United States Patent Application Publication US 2005/0255487 A1 - sequence listing, part 33

SEQ ID NO: 896239 - RNA, 19 nt, Homo sapiens
  misc_RNA (1)...(19): siRNA sense strand
gacaggagaugaggcaguu

SEQ ID NO: 896240 - RNA, 19 nt, Homo sapiens
  misc_RNA (1)...(19): siRNA sense strand
cugaacagcugcaggaaug

SEQ ID NO: 896241 - RNA, 19 nt, Homo sapiens
  misc_RNA (1)...(19): siRNA sense strand
gagaaacaacggcagcaaa

SEQ ID NO: 896242 - RNA, 19 nt, Homo sapiens
  misc_RNA (1)...(19): siRNA sense strand
ggagaagcaaccuuauuau

SEQ ID NO: 896243 - RNA, 19 nt, Homo sapiens
  misc_RNA (1)...(19): siRNA sense strand
caacgucucccacccagaa

SEQ ID NO: 896244 - RNA, 19 nt, Homo sapiens
  misc_RNA (1)...(19): siRNA sense strand
cgucacaaauugagaaaca

SEQ ID NO: 896245 - RNA, 19 nt, Homo sapiens
  misc_RNA (1)...(19): siRNA sense strand
ggaauuuggacaccuuuga

SEQ ID NO: 896246 - RNA, 19 nt, Homo sapiens
  misc_RNA (1)...(19): siRNA sense strand
caacagcagcacaaaauua

SEQ ID NO: 896247 - RNA, 19 nt, Homo sapiens
  misc_RNA (1)...(19): siRNA sense strand
gcggaagccuagcuggaaa

SEQ ID NO: 896248 - RNA, 19 nt, Homo sapiens
  misc_RNA (1)...(19): siRNA sense strand
cuuaggaucucgcuggaaa

SEQ ID NO: 896249 - RNA, 19 nt, Homo sapiens
  misc_RNA (1)...(19): siRNA sense strand
uaacgggaaagucaaauga

SEQ ID NO: 896250 - RNA, 19 nt, Homo sapiens
  misc_RNA (1)...(19): siRNA sense strand
ucaguaccauucaacaaga

SEQ ID NO: 896251 - RNA, 19 nt, Homo sapiens
  misc_RNA (1)...(19): siRNA sense strand
gggcagugaucaacaugug

SEQ ID NO: 896252 - RNA, 19 nt, Homo sapiens
  misc_RNA (1)...(19): siRNA sense strand
agaacgcgcuuugagaauu

SEQ ID NO: 896253 - RNA, 19 nt, Homo sapiens
  misc_RNA (1)...(19): siRNA sense strand
gaauuuggacaccuuugaa

SEQ ID NO: 896254 - RNA, 19 nt, Homo sapiens
  misc_RNA (1)...(19): siRNA sense strand
caauggagaggaugaaaug

SEQ ID NO: 896255 - RNA, 19 nt, Homo sapiens
  misc_RNA (1)...(19): siRNA sense strand
ggaaacuguccuccauaaa

SEQ ID NO: 896256 - RNA, 19 nt, Homo sapiens
  misc_RNA (1)...(19): siRNA sense strand
gaggagcuaccaacacuug

SEQ ID NO: 896257 - RNA, 19 nt, Homo sapiens
  misc_RNA (1)...(19): siRNA sense strand
gaguauaagcaacugauga

SEQ ID NO: 896258 - RNA, 19 nt, Homo sapiens
  misc_RNA (1)...(19): siRNA sense strand
gcaagauccacuuagagaa

SEQ ID NO: 896259 - RNA, 19 nt, Homo sapiens
  misc_RNA (1)...(19): siRNA sense strand
aaagucaaaugaagaugga

SEQ ID NO: 896260 - RNA, 19 nt, Homo sapiens
  misc_RNA (1)...(19): siRNA sense strand
cagcacagccucugaaucu

SEQ ID NO: 896261 - RNA, 19 nt, Homo sapiens
  misc_RNA (1)...(19): siRNA sense strand
ggaccagcccuguaacuca

SEQ ID NO: 896262 - RNA, 19 nt, Homo sapiens
  misc_RNA (1)...(19): siRNA sense strand
acaacaaaccucacucuga

SEQ ID NO: 896263 - RNA, 19 nt, Homo sapiens
  misc_RNA (1)...(19): siRNA sense strand
ugaaacagaagaagcuuga

SEQ ID NO: 896264 - RNA, 19 nt, Homo sapiens
  misc_RNA (1)...(19): siRNA sense strand
aagaacagauugcgagaca

SEQ ID NO: 896265 - RNA, 19 nt, Homo sapiens
  misc_RNA (1)...(19): siRNA sense strand
caacagcaagaacagauug

SEQ ID NO: 896266 - RNA, 19 nt, Homo sapiens
  misc_RNA (1)...(19): siRNA sense strand
caaagaauggaaucagaga

SEQ ID NO: 896267 - RNA, 19 nt, Homo sapiens
  misc_RNA (1)...(19): siRNA sense strand
uggagaggaugaaauggaa

SEQ ID NO: 896268 - RNA, 19 nt, Homo sapiens
  misc_RNA (1)...(19): siRNA sense strand
gaacagcugcaggaaugaa

SEQ ID NO: 896269 - RNA, 19 nt, Homo sapiens
  misc_RNA (1)...(19): siRNA sense strand
gaacagauugcgagacaac

SEQ ID NO: 896270 - RNA, 19 nt, Homo sapiens
  misc_RNA (1)...(19): siRNA sense strand
gaaacaacggcagcaaaug

SEQ ID NO: 896271 - RNA, 19 nt, Homo sapiens
  misc_RNA (1)...(19): siRNA sense strand
gaaaugacucggacugaac

SEQ ID NO: 896272 - RNA, 19 nt, Homo sapiens
  misc_RNA (1)...(19): siRNA sense strand
ggaccuugcucgccaacag

SEQ ID NO: 896273 - RNA, 19 nt, Homo sapiens
  misc_RNA (1)...(19): siRNA sense strand
ggagaugaggcaguucuuu

SEQ ID NO: 896274 - RNA, 19 nt, Homo sapiens
  misc_RNA (1)...(19): siRNA sense strand
ggacaccuuugaacauggu

SEQ ID NO: 896275 - RNA, 19 nt, Homo sapiens
  misc_RNA (1)...(19): siRNA sense strand
caaaggaugagaggagaaa

SEQ ID NO: 896276 - RNA, 19 nt, Homo sapiens
  misc_RNA (1)...(19): siRNA sense strand
ggaaucagagaauaauaag

SEQ ID NO: 896277 - RNA, 19 nt, Homo sapiens
  misc_RNA (1)...(19): siRNA sense strand
ggaagagggcagugaucaa

SEQ ID NO: 896278 - RNA, 19 nt, Homo sapiens
  misc_RNA (1)...(19): siRNA sense strand
ccaguuaacgggaaaguca

SEQ ID NO: 896279 - RNA, 19 nt, Homo sapiens
  misc_RNA (1)...(19): siRNA sense strand
ggaggaagccugggaagag

SEQ ID NO: 896280 - RNA, 19 nt, Homo sapiens
  misc_RNA (1)...(19): siRNA sense strand
gcagggacggucucaccua

SEQ ID NO: 896281 - RNA, 19 nt, Homo sapiens
  misc_RNA (1)...(19): siRNA sense strand
uaccaacacuugucaguac

SEQ ID NO: 896282 - RNA, 19 nt, Homo sapiens
  misc_RNA (1)...(19): siRNA sense strand
gagcacuuaugguaugaag

SEQ ID NO: 896283 - RNA, 19 nt, Homo sapiens
  misc_RNA (1)...(19): siRNA sense strand
gcacuuaugguaugaagac

SEQ ID NO: 896284 - RNA, 19 nt, Homo sapiens
  misc_RNA (1)...(19): siRNA sense strand
gcacaacaaaccucacucu

SEQ ID NO: 896285 - RNA, 19 nt, Homo sapiens
  misc_RNA (1)...(19): siRNA sense strand
ggaugaaauggaaauguau

SEQ ID NO: 896286 - RNA, 19 nt, Homo sapiens
  misc_RNA (1)...(19): siRNA sense strand
ccgaaacgcaccugcauug

SEQ ID NO: 896287 - RNA, 19 nt, Homo sapiens
  misc_RNA (1)...(19): siRNA sense strand
cuaaauaccagugaacuuc

SEQ ID NO: 896288 - RNA, 19 nt, Homo sapiens
  misc_RNA (1)...(19): siRNA sense strand
caagauccacuuagagaag

SEQ ID NO: 896289 - RNA, 19 nt, Homo sapiens
  misc_RNA (1)...(19): siRNA sense strand
gggacggucucaccuacug

SEQ ID NO: 896290 - RNA, 19 nt, Homo sapiens
  misc_RNA (1)...(19): siRNA sense strand
guacaguucauuccaucaa

SEQ ID NO: 896291 - RNA, 19 nt, Homo sapiens
  misc_RNA (1)...(19): siRNA sense strand
gcagcucuccaccaugauu

SEQ ID NO: 896292 - RNA, 19 nt, Homo sapiens
  misc_RNA (1)...(19): siRNA sense strand
gauaaugaccaguguuacu

SEQ ID NO: 896293 - RNA, 19 nt, Homo sapiens
  misc_RNA (1)...(19): siRNA sense strand
uagagaaguacccaaacua

SEQ ID NO: 896294 - RNA, 19 nt, Homo sapiens
  misc_RNA (1)...(19): siRNA sense strand
gaagagggcagugaucaac

SEQ ID NO: 896295 - RNA, 19 nt, Homo sapiens
  misc_RNA (1)...(19): siRNA sense strand
ggacacggcuuuccacuca

SEQ ID NO: 896296 - RNA, 19 nt, Homo sapiens
  misc_RNA (1)...(19): siRNA sense strand
gaauaaccguuuggccuuu

SEQ ID NO: 896297 - RNA, 19 nt, Homo sapiens
  misc_RNA (1)...(19): siRNA sense strand
ggcccgaccugcuagauuu

SEQ ID NO: 896298 - RNA, 19 nt, Homo sapiens
  misc_RNA (1)...(19): siRNA sense strand
ugaccuaugugucccagua

SEQ ID NO: 896299 - RNA, 19 nt, Homo sapiens
  misc_RNA (1)...(19): siRNA sense strand
gcaggcagguggagaaugg

SEQ ID NO: 896300 - RNA, 19 nt, Homo sapiens
  misc_RNA (1)...(19): siRNA sense strand
gcucaucuaugucuucaag

SEQ ID NO: 896301 - RNA, 19 nt, Homo sapiens
  misc_RNA (1)...(19): siRNA sense strand
ucaagaccaugaagauguu

SEQ ID NO: 896302 - RNA, 19 nt, Homo sapiens
  misc_RNA (1)...(19): siRNA sense strand
gcaacgcuaucaucaacug

SEQ ID NO: 896303 - RNA, 19 nt, Homo sapiens
  misc_RNA (1)...(19): siRNA sense strand
ggaagaggaagacaagaug

SEQ ID NO: 896304 - RNA, 19 nt, Homo sapiens
  misc_RNA (1)...(19): siRNA sense strand
acaaugucuucgagaauaa

SEQ ID NO: 896305 - RNA, 19 nt, Homo sapiens
  misc_RNA (1)...(19): siRNA sense strand
gcgcaacgcuaucaucaac

SEQ ID NO: 896306 - RNA, 19 nt, Homo sapiens
  misc_RNA (1)...(19): siRNA sense strand
gggagaaggugcugaugca

SEQ ID NO: 896307 - RNA, 19 nt, Homo sapiens
  misc_RNA (1)...(19): siRNA sense strand
ccaugaagauguugaaacu

SEQ ID NO: 896308 - RNA, 19 nt, Homo sapiens
  misc_RNA (1)...(19): siRNA sense strand
aggcugaugucgaguauga

SEQ ID NO: 896309 - RNA, 19 nt, Homo sapiens
  misc_RNA (1)...(19): siRNA sense strand
uggaagccaugaucaagaa

SEQ ID NO: 896310 - RNA, 19 nt, Homo sapiens
  misc_RNA (1)...(19): siRNA sense strand
aguccgagcucaucuaugu

SEQ ID NO: 896311 - RNA, 19 nt, Homo sapiens
  misc_RNA (1)...(19): siRNA sense strand
gcagagggaggaagaggaa

SEQ ID NO: 896312 - RNA, 19 nt, Homo sapiens
  misc_RNA (1)...(19): siRNA sense strand
ggagggcaccuuugugugu

SEQ ID NO: 896313 - RNA, 19 nt, Homo sapiens
  misc_RNA (1)...(19): siRNA sense strand
ccacaaagaaggccaccaa

SEQ ID NO: 896314 - RNA, 19 nt, Homo sapiens
  misc_RNA (1)...(19): siRNA sense strand
gagagccugucgucugaga

SEQ ID NO: 896315 - RNA, 19 nt, Homo sapiens
  misc_RNA (1)...(19): siRNA sense strand
gaaacugcuaggaaacaaa

SEQ ID NO: 896316 - RNA, 19 nt, Homo sapiens
  misc_RNA (1)...(19): siRNA sense strand
gaggagggcaccuuugugu

SEQ ID NO: 896317 - RNA, 19 nt, Homo sapiens
  misc_RNA (1)...(19): siRNA sense strand
uugauucgcuuuccaagga

SEQ ID NO: 896318 - RNA, 19 nt, Homo sapiens
  misc_RNA (1)...(19): siRNA sense strand
uggagagccugucgucuga

SEQ ID NO: 896319 - RNA, 19 nt, Homo sapiens
  misc_RNA (1)...(19): siRNA sense strand
gagcucaucuaugucuuca

SEQ ID NO: 896320 - RNA, 19 nt, Homo sapiens
  misc_RNA (1)...(19): siRNA sense strand
gaagauguugaaacugcua

SEQ ID NO: 896321 - RNA, 19 nt, Homo sapiens
  misc_RNA (1)...(19): siRNA sense strand
cagaagaugccaaggaugu

SEQ ID NO: 896322 - RNA, 19 nt, Homo sapiens
  misc_RNA (1)...(19): siRNA sense strand
gaagaggaagacaagaugu

SEQ ID NO: 896323 - RNA, 19 nt, Homo sapiens
  misc_RNA (1)...(19): siRNA sense strand
ggaggaagaggaagacaag

SEQ ID NO: 896324 - RNA, 19 nt, Homo sapiens
  misc_RNA (1)...(19): siRNA sense strand
uccggugccuccucaauaa

SEQ ID NO: 896325 - RNA, 19 nt, Homo sapiens
  misc_RNA (1)...(19): siRNA sense strand
uguugaaacugcuaggaaa

SEQ ID NO: 896326 - RNA, 19 nt, Homo sapiens
  misc_RNA (1)...(19): siRNA sense strand
ccuaugugucccaguauua

SEQ ID NO: 896327 - RNA, 19 nt, Homo sapiens
  misc_RNA (1)...(19): siRNA sense strand
gaaccugagggcaagaaga

SEQ ID NO: 896328 - RNA, 19 nt, Homo sapiens
  misc_RNA (1)...(19): siRNA sense strand
gaagaugccaaggauguuc

SEQ ID NO: 896329 - RNA, 19 nt, Homo sapiens
  misc_RNA (1)...(19): siRNA sense strand
gaucaagaagaaagaguuc

SEQ ID NO: 896330 - RNA, 19 nt, Homo sapiens
  misc_RNA (1)...(19): siRNA sense strand
ggccgcagaucccuaccaa

SEQ ID NO: 896331 - RNA, 19 nt, Homo sapiens
  misc_RNA (1)...(19): siRNA sense strand
ugaaacugcuaggaaacaa

SEQ ID NO: 896332 - RNA, 19 nt, Homo sapiens
  misc_RNA (1)...(19): siRNA sense strand
gaagccaugaucaagaaga

SEQ ID NO: 896333 - RNA, 19 nt, Homo sapiens
  misc_RNA (1)...(19): siRNA sense strand
gagcuugugacccucauug

SEQ ID NO: 896334 - RNA, 19 nt, Homo sapiens
  misc_RNA (1)...(19): siRNA sense strand
gagccuagaguggaacaaa

SEQ ID NO: 896335 - RNA, 19 nt, Homo sapiens
  misc_RNA (1)...(19): siRNA sense strand
aggcagaaccaaagaagaa

SEQ ID NO: 896336 - RNA, 19 nt, Homo sapiens
  misc_RNA (1)...(19): siRNA sense strand
ccaggcugaugucgaguau

SEQ ID NO: 896337 - RNA, 19 nt, Homo sapiens
  misc_RNA (1)...(19): siRNA sense strand
gaaugagggccgugaggau

SEQ ID NO: 896338 - RNA, 19 nt, Homo sapiens
  misc_RNA (1)...(19): siRNA sense strand
cgcagaagaugccaaggau

SEQ ID NO: 896339 - RNA, 19 nt, Homo sapiens
  misc_RNA (1)...(19): siRNA sense strand
ccggguuccuggcaaacua

SEQ ID NO: 896340 - RNA, 19 nt, Homo sapiens
  misc_RNA (1)...(19): siRNA sense strand
aagccaugaucaagaagaa

SEQ ID NO: 896341 - RNA, 19 nt, Homo sapiens
  misc_RNA (1)...(19): siRNA sense strand
gagaguccgagcucaucua

SEQ ID NO: 896342 - RNA, 19 nt, Homo sapiens
  misc_RNA (1)...(19): siRNA sense strand
gaacgggagacugcacgaa

SEQ ID NO: 896343 - RNA, 19 nt, Homo sapiens
  misc_RNA (1)...(19): siRNA sense strand
ccuuugaaguggcugagaa

SEQ ID NO: 896344 - RNA, 19 nt, Homo sapiens
  misc_RNA (1)...(19): siRNA sense strand
gcaggcagaaccaaagaag

SEQ ID NO: 896345 - RNA, 19 nt, Homo sapiens
  misc_RNA (1)...(19): siRNA sense strand
gggaaguucaagaccauga

SEQ ID NO: 896346 - RNA, 19 nt, Homo sapiens
  misc_RNA (1)...(19): siRNA sense strand
ucaucuaugucuucaagca

SEQ ID NO: 896347 - RNA, 19 nt, Homo sapiens
  misc_RNA (1)...(19): siRNA sense strand
gcagcaacucgcagaagau

SEQ ID NO: 896348 - RNA, 19 nt, Homo sapiens
  misc_RNA (1)...(19): siRNA sense strand
ucaagcucauccacgagaa

SEQ ID NO: 896349 - RNA, 19 nt, Homo sapiens
  misc_RNA (1)...(19): siRNA sense strand
gaggacauccauggagaga

SEQ ID NO: 896350 - RNA, 19 nt, Homo sapiens
  misc_RNA (1)...(19): siRNA sense strand
gauguuggaagccaugauc

SEQ ID NO: 896351 - RNA, 19 nt, Homo sapiens
  misc_RNA (1)...(19): siRNA sense strand
ucaauaagccagaaaagga

SEQ ID NO: 896352 - RNA, 19 nt, Homo sapiens
  misc_RNA (1)...(19): siRNA sense strand
gggaggaagaggaagacaa

SEQ ID NO: 896353 - RNA, 19 nt, Homo sapiens
  misc_RNA (1)...(19): siRNA sense strand
ccagcagcaugugcacuug

SEQ ID NO: 896354 - RNA, 19 nt, Homo sapiens
  misc_RNA (1)...(19): siRNA sense strand
ucagcaucaugaccuaugu

SEQ ID NO: 896355 - RNA, 19 nt, Homo sapiens
  misc_RNA (1)...(19): siRNA sense strand
gggugcugcuggaggagaa

SEQ ID NO: 896356 - RNA, 19 nt, Homo sapiens
  misc_RNA (1)...(19): siRNA sense strand
agcagcaacucgcagaaga

SEQ ID NO: 896357 - RNA, 19 nt, Homo sapiens
  misc_RNA (1)...(19): siRNA sense strand
gcaagaagaaggggaaguu

SEQ ID NO: 896358 - RNA, 19 nt, Homo sapiens
  misc_RNA (1)...(19): siRNA sense strand
ggaagacaagauguuggaa

SEQ ID NO: 896359 - RNA, 19 nt, Homo sapiens
  misc_RNA (1)...(19): siRNA sense strand
acacggcuuuccacucauc

SEQ ID NO: 896360 - RNA, 19 nt, Homo sapiens
  misc_RNA (1)...(19): siRNA sense strand
ggaggaggacaaggaggaa

SEQ ID NO: 896361 - RNA, 19 nt, Homo sapiens
  misc_RNA (1)...(19): siRNA sense strand
cuaggaaacaaacgugaug

SEQ ID NO: 896362 - RNA, 19 nt, Homo sapiens
  misc_RNA (1)...(19): siRNA sense strand
gccagcagcaugugcacuu

SEQ ID NO: 896363 - RNA, 19 nt, Homo sapiens
  misc_RNA (1)...(19): siRNA sense strand
aaccugagggcaagaagaa

SEQ ID NO: 896364 - RNA, 19 nt, Homo sapiens
  misc_RNA (1)...(19): siRNA sense strand
gccuagaguggaacaaaug

SEQ ID NO: 896365 - RNA, 19 nt, Homo sapiens
  misc_RNA (1)...(19): siRNA sense strand
cagcaacucgcagaagaug

SEQ ID NO: 896366 - RNA, 19 nt, Homo sapiens
  misc_RNA (1)...(19): siRNA sense strand
gaccaugaagauguugaaa

SEQ ID NO: 896367 - RNA, 19 nt, Homo sapiens
  misc_RNA (1)...(19): siRNA sense strand
ugaucaagaagaaagaguu

SEQ ID NO: 896368 - RNA, 19 nt, Homo sapiens
  misc_RNA (1)...(19): siRNA sense strand
agaggaagacaagauguug

SEQ ID NO: 896369 - RNA, 19 nt, Homo sapiens
  misc_RNA (1)...(19): siRNA sense strand
uaucaucaacugccuggau

SEQ ID NO: 896370 - RNA, 19 nt, Homo sapiens
  misc_RNA (1)...(19): siRNA sense strand
cuucgagaauaaccguuug

SEQ ID NO: 896371 - RNA, 19 nt, Homo sapiens
  misc_RNA (1)...(19): siRNA sense strand
gcuaggaaacaaacgugau

SEQ ID NO: 896372 - RNA, 19 nt, Homo sapiens
  misc_RNA (1)...(19): siRNA sense strand
aagaggaagacaagauguu

SEQ ID NO: 896373 - RNA, 19 nt, Homo sapiens
  misc_RNA (1)...(19): siRNA sense strand
gccaggcugaugucgagua

SEQ ID NO: 896374 - RNA, 19 nt, Homo sapiens
  misc_RNA (1)...(19): siRNA sense strand
aauaaccguuuggccuuug

SEQ ID NO: 896375 - RNA, 19 nt, Homo sapiens
  misc_RNA (1)...(19): siRNA sense strand
ccccacagcugcagguaaa

SEQ ID NO: 896376 - RNA, 19 nt, Homo sapiens
  misc_RNA (1)...(19): siRNA sense strand
caugaggacuggccaaaga

SEQ ID NO: 896377 - RNA, 19 nt, Homo sapiens
  misc_RNA (1)...(19): siRNA sense strand
gagauuaucgacagaagaa

SEQ ID NO: 896378 - RNA, 19 nt, Homo sapiens
  misc_RNA (1)...(19): siRNA sense strand
gugcuucucucucauaagu

SEQ ID NO: 896379 - RNA, 19 nt, Homo sapiens
  misc_RNA (1)...(19): siRNA sense strand
gaggugggcagauuccuuu

SEQ ID NO: 896380 - RNA, 19 nt, Homo sapiens
  misc_RNA (1)...(19): siRNA sense strand
gcuacgaggugggcagauu

SEQ ID NO: 896381 - RNA, 19 nt, Homo sapiens
  misc_RNA (1)...(19): siRNA sense strand
ggagguaaacauugacuuc

SEQ ID NO: 896382 - RNA, 19 nt, Homo sapiens
  misc_RNA (1)...(19): siRNA sense strand
gaugugcuucucucucaua

SEQ ID NO: 896383 - RNA, 19 nt, Homo sapiens
  misc_RNA (1)...(19): siRNA sense strand
gcuucucucucauaaguau

SEQ ID NO: 896384 - RNA, 19 nt, Homo sapiens
  misc_RNA (1)...(19): siRNA sense strand
cacgggagguaaacauuga

SEQ ID NO: 896385 - RNA, 19 nt, Homo sapiens
  misc_RNA (1)...(19): siRNA sense strand
cugcaaaacuggucucuaa

SEQ ID NO: 896386 - RNA, 19 nt, Homo sapiens
  misc_RNA (1)...(19): siRNA sense strand
gccagaggaggcucaguua

SEQ ID NO: 896387 - RNA, 19 nt, Homo sapiens
  misc_RNA (1)...(19): siRNA sense strand
cagcuauucuuccagacaa

SEQ ID NO: 896388 - RNA, 19 nt, Homo sapiens
  misc_RNA (1)...(19): siRNA sense strand
gggcagauuccuuugaugu

SEQ ID NO: 896389 - RNA, 19 nt, Homo sapiens
  misc_RNA (1)...(19): siRNA sense strand
gagaagccacgaggaagaa

SEQ ID NO: 896390 - RNA, 19 nt, Homo sapiens
  misc_RNA (1)...(19): siRNA sense strand
gugaggagaaccuggaauu

SEQ ID NO: 896391 - RNA, 19 nt, Homo sapiens
  misc_RNA (1)...(19): siRNA sense strand
ucaagagauuaucgacaga

SEQ ID NO: 896392 - RNA, 19 nt, Homo sapiens
  misc_RNA (1)...(19): siRNA sense strand
ucagacucguguagugauu

SEQ ID NO: 896393 - RNA, 19 nt, Homo sapiens
  misc_RNA (1)...(19): siRNA sense strand
ugugaggaguucaagaaga

SEQ ID NO: 896394 - RNA, 19 nt, Homo sapiens
  misc_RNA (1)...(19): siRNA sense strand
uaggaucuuugaggaguuu

SEQ ID NO: 896395 - RNA, 19 nt, Homo sapiens
  misc_RNA (1)...(19): siRNA sense strand
gugaggaguucaagaagac

SEQ ID NO: 896396 - RNA, 19 nt, Homo sapiens
  misc_RNA (1)...(19): siRNA sense strand
cgagaagccacgaggaaga

SEQ ID NO: 896397 - RNA, 19 nt, Homo sapiens
  misc_RNA (1)...(19): siRNA sense strand
ugggaugccugucucacaa

SEQ ID NO: 896398 - RNA, 19 nt, Homo sapiens
  misc_RNA (1)...(19): siRNA sense strand
ccacgggagguaaacauug

SEQ ID NO: 896399 - RNA, 19 nt, Homo sapiens
  misc_RNA (1)...(19): siRNA sense strand
gugggcagauuccuuugau

SEQ ID NO: 896400 - RNA, 19 nt, Homo sapiens
  misc_RNA (1)...(19): siRNA sense strand
agacagaacaaagggauga

SEQ ID NO: 896401 - RNA, 19 nt, Homo sapiens
  misc_RNA (1)...(19): siRNA sense strand
uacacagccucauggagaa

SEQ ID NO: 896402 - RNA, 19 nt, Homo sapiens
  misc_RNA (1)...(19): siRNA sense strand
ggccaaagacagaacaaag

SEQ ID NO: 896403 - RNA, 19 nt, Homo sapiens
  misc_RNA (1)...(19): siRNA sense strand
uaaggcccauaggaucuuu

SEQ ID NO: 896404 - RNA, 19 nt, Homo sapiens
  misc_RNA (1)...(19): siRNA sense strand
ggaugccugucucacaagu

SEQ ID NO: 896405 - RNA, 19 nt, Homo sapiens
  misc_RNA (1)...(19): siRNA sense strand
uugaggaguuuguggaugu

SEQ ID NO: 896406 - RNA, 19 nt, Homo sapiens
  misc_RNA (1)...(19): siRNA sense strand
uugaugugcuucucucuca

SEQ ID NO: 896407 - RNA, 19 nt, Homo sapiens
  misc_RNA (1)...(19): siRNA sense strand
caagagauuaucgacagaa

SEQ ID NO: 896408 - RNA, 19 nt, Homo sapiens
  misc_RNA (1)...(19): siRNA sense strand
gguccaaaauguacuuaga

SEQ ID NO: 896409 - RNA, 19 nt, Homo sapiens
  misc_RNA (1)...(19): siRNA sense strand
ggacuggccaaagacagaa

SEQ ID NO: 896410 - RNA, 19 nt, Homo sapiens
  misc_RNA (1)...(19): siRNA sense strand
ccugugaggaguucaagaa

SEQ ID NO: 896411 - RNA, 19 nt, Homo sapiens
  misc_RNA (1)...(19): siRNA sense strand
ugaccaagcccaaggaaaa

SEQ ID NO: 896412 - RNA, 19 nt, Homo sapiens
  misc_RNA (1)...(19): siRNA sense strand
uagaucugcugucccaaag

SEQ ID NO: 896413 - RNA, 19 nt, Homo sapiens
  misc_RNA (1)...(19): siRNA sense strand
agacucguguagugauuuc

SEQ ID NO: 896414 - RNA, 19 nt, Homo sapiens
  misc_RNA (1)...(19): siRNA sense strand
ugcauuccgugccuucuug

SEQ ID NO: 896415 - RNA, 19 nt, Homo sapiens
  misc_RNA (1)...(19): siRNA sense strand
gccaaagacagaacaaagg

SEQ ID NO: 896416 - RNA, 19 nt, Homo sapiens
  misc_RNA (1)...(19): siRNA sense strand
agccaucccugacuugcuu

SEQ ID NO: 896417 - RNA, 19 nt, Homo sapiens
  misc_RNA (1)...(19): siRNA sense strand
uuagaucugcugucccaaa

SEQ ID NO: 896418 - RNA, 19 nt, Homo sapiens
  misc_RNA (1)...(19): siRNA sense strand
gauuucacagcuauucuuc

SEQ ID NO: 896419 - RNA, 19 nt, Homo sapiens
  misc_RNA (1)...(19): siRNA sense strand
uuucacagcuauucuucca

SEQ ID NO: 896420 - RNA, 19 nt, Homo sapiens
  misc_RNA (1)...(19): siRNA sense strand
ggugggcagauuccuuuga

SEQ ID NO: 896421 - RNA, 19 nt, Homo sapiens
  misc_RNA (1)...(19): siRNA sense strand
ucucuaaggcccauaggau

SEQ ID NO: 896422 - RNA, 19 nt, Homo sapiens
  misc_RNA (1)...(19): siRNA sense strand
gaaggaaaguugugaauaa

SEQ ID NO: 896423 - RNA, 19 nt, Homo sapiens
  misc_RNA (1)...(19): siRNA sense strand
caagaaggcugucucagua

SEQ ID NO: 896424 - RNA, 19 nt, Homo sapiens
  misc_RNA (1)...(19): siRNA sense strand
gcauacagcugauuucaaa

SEQ ID NO: 896425 - RNA, 19 nt, Homo sapiens
  misc_RNA (1)...(19): siRNA sense strand
uaucacagcugaauuguaa

SEQ ID NO: 896426 - RNA, 19 nt, Homo sapiens
  misc_RNA (1)...(19): siRNA sense strand
ggaacagggugaucaauga

SEQ ID NO: 896427 - RNA, 19 nt, Homo sapiens
  misc_RNA (1)...(19): siRNA sense strand
gaagaaggacuggacauua

SEQ ID NO: 896428 - RNA, 19 nt, Homo sapiens
  misc_RNA (1)...(19): siRNA sense strand
ggaaaguugugaauaaguu

SEQ ID NO: 896429 - RNA, 19 nt, Homo sapiens
  misc_RNA (1)...(19): siRNA sense strand
gaaggaagcuugcaagacu

SEQ ID NO: 896430 - RNA, 19 nt, Homo sapiens
  misc_RNA (1)...(19): siRNA sense strand
ccagggaaaugucacuuua

SEQ ID NO: 896431 - RNA, 19 nt, Homo sapiens
  misc_RNA (1)...(19): siRNA sense strand
uaucaaugcugcuuaauga

SEQ ID NO: 896432 - RNA, 19 nt, Homo sapiens
  misc_RNA (1)...(19): siRNA sense strand
gcagcuagauuuagauuuc

SEQ ID NO: 896433 - RNA, 19 nt, Homo sapiens
  misc_RNA (1)...(19): siRNA sense strand
gaaacaaucucccaguaag

SEQ ID NO: 896434 - RNA, 19 nt, Homo sapiens
  misc_RNA (1)...(19): siRNA sense strand
caagcacugucaagauuua

SEQ ID NO: 896435 - RNA, 19 nt, Homo sapiens
  misc_RNA (1)...(19): siRNA sense strand
ggccaaaguugauaacaaa

SEQ ID NO: 896436 - RNA, 19 nt, Homo sapiens
  misc_RNA (1)...(19): siRNA sense strand
aaacaacccuguacuuuca

SEQ ID NO: 896437 - RNA, 19 nt, Homo sapiens
  misc_RNA (1)...(19): siRNA sense strand
ccacauugcugcuuccaaa

SEQ ID NO: 896438 - RNA, 19 nt, Homo sapiens
  misc_RNA (1)...(19): siRNA sense strand
ggaaacaacccuguacuuu

SEQ ID NO: 896439 - RNA, 19 nt, Homo sapiens
  misc_RNA (1)...(19): siRNA sense strand
aagaaggacuggacauuaa

SEQ ID NO: 896440 - RNA, 19 nt, Homo sapiens
  misc_RNA (1)...(19): siRNA sense strand
acaaauggcugcaggauuc

SEQ ID NO: 896441 - RNA, 19 nt, Homo sapiens
  misc_RNA (1)...(19): siRNA sense strand
ccaagcagcuagauuuaga

SEQ ID NO: 896442 - RNA, 19 nt, Homo sapiens
  misc_RNA (1)...(19): siRNA sense strand
cuacuagaccuguucauua

SEQ ID NO: 896443 - RNA, 19 nt, Homo sapiens
  misc_RNA (1)...(19): siRNA sense strand
gaagcaauauugucaagag

SEQ ID NO: 896444 - RNA, 19 nt, Homo sapiens
  misc_RNA (1)...(19): siRNA sense strand
guauuaaacucuuguugga

SEQ ID NO: 896445 - RNA, 19 nt, Homo sapiens
  misc_RNA (1)...(19): siRNA sense strand
gaaucugaaugcucuuaaa

SEQ ID NO: 896446 - RNA, 19 nt, Homo sapiens
  misc_RNA (1)...(19): siRNA sense strand
uuuaagaacugccuagaaa

SEQ ID NO: 896447 - RNA, 19 nt, Homo sapiens
  misc_RNA (1)...(19): siRNA sense strand
gcaauaacaccacugauuc

SEQ ID NO: 896448 - RNA, 19 nt, Homo sapiens
  misc_RNA (1)...(19): siRNA sense strand
aaagauaggcguuugguuu

SEQ ID NO: 896449 - RNA, 19 nt, Homo sapiens
  misc_RNA (1)...(19): siRNA sense strand
guccgaauguuauuacuuu

SEQ ID NO: 896450 - RNA, 19 nt, Homo sapiens
  misc_RNA (1)...(19): siRNA sense strand
gugaaacaaucucccagua

SEQ ID NO: 896451 - RNA, 19 nt, Homo sapiens
  misc_RNA (1)...(19): siRNA sense strand
agacagaccuagugacaga

SEQ ID NO: 896452 - RNA, 19 nt, Homo sapiens
  misc_RNA (1)...(19): siRNA sense strand
aaauaaagcuguacugcau

SEQ ID NO: 896453 - RNA, 19 nt, Homo sapiens
  misc_RNA (1)...(19): siRNA sense strand
caaaagaagugaauuggaa

SEQ ID NO: 896454 - RNA, 19 nt, Homo sapiens
  misc_RNA (1)...(19): siRNA sense strand
ggagaaccuuccuaaguca

SEQ ID NO: 896455 - RNA, 19 nt, Homo sapiens
  misc_RNA (1)...(19): siRNA sense strand
ggaaggagguauuuaucca

SEQ ID NO: 896456 - RNA, 19 nt, Homo sapiens
  misc_RNA (1)...(19): siRNA sense strand
ccagagaccuugucaucga

SEQ ID NO: 896457 - RNA, 19 nt, Homo sapiens
  misc_RNA (1)...(19): siRNA sense strand
gaagacgugacuugcaaua

SEQ ID NO: 896458 - RNA, 19 nt, Homo sapiens
  misc_RNA (1)...(19): siRNA sense strand
ggaacgguaugggagauuu

SEQ ID NO: 896459 - RNA, 19 nt, Homo sapiens
  misc_RNA (1)...(19): siRNA sense strand
guacuuucagcaacuauua

SEQ ID NO: 896460 - RNA, 19 nt, Homo sapiens
  misc_RNA (1)...(19): siRNA sense strand
gagaagaagccaguuugua

SEQ ID NO: 896461 - RNA, 19 nt, Homo sapiens
  misc_RNA (1)...(19): siRNA sense strand
caaaauauuuccugucuug

SEQ ID NO: 896462 - RNA, 19 nt, Homo sapiens
  misc_RNA (1)...(19): siRNA sense strand
gggcacaccugaagcacuu

SEQ ID NO: 896463 - RNA, 19 nt, Homo sapiens
  misc_RNA (1)...(19): siRNA sense strand
gaaaaucgcagcacugaaa

SEQ ID NO: 896464 - RNA, 19 nt, Homo sapiens
  misc_RNA (1)...(19): siRNA sense strand
ugacuuggauggaggagaa

SEQ ID NO: 896465 - RNA, 19 nt, Homo sapiens
  misc_RNA (1)...(19): siRNA sense strand
gcaggaaggagguauuuau

SEQ ID NO: 896466 - RNA, 19 nt, Homo sapiens
  misc_RNA (1)...(19): siRNA sense strand
uuucgaguguguagaauua

SEQ ID NO: 896467 - RNA, 19 nt, Homo sapiens
  misc_RNA (1)...(19): siRNA sense strand
gggaaaugucacuuuauua

SEQ ID NO: 896468 - RNA, 19 nt, Homo sapiens
  misc_RNA (1)...(19): siRNA sense strand
acacaccacugaccucaaa

SEQ ID NO: 896469 - RNA, 19 nt, Homo sapiens
  misc_RNA (1)...(19): siRNA sense strand
gccucaagcuucuuaugua

SEQ ID NO: 896470 - RNA, 19 nt, Homo sapiens
  misc_RNA (1)...(19): siRNA sense strand
gaauuggaacuuacacaaa

SEQ ID NO: 896471 - RNA, 19 nt, Homo sapiens
  misc_RNA (1)...(19): siRNA sense strand
gauccugugugcaagauug

SEQ ID NO: 896472 - RNA, 19 nt, Homo sapiens
  misc_RNA (1)...(19): siRNA sense strand
ggagguauuuauccaggaa

SEQ ID NO: 896473 - RNA, 19 nt, Homo sapiens
  misc_RNA (1)...(19): siRNA sense strand
cuagaccuguucauuagua

SEQ ID NO: 896474 - RNA, 19 nt, Homo sapiens
  misc_RNA (1)...(19): siRNA sense strand
uuaaauauccgcaaacaga

SEQ ID NO: 896475 - RNA, 19 nt, Homo sapiens
  misc_RNA (1)...(19): siRNA sense strand
guuagugccucauccugua

SEQ ID NO: 896476 - RNA, 19 nt, Homo sapiens
  misc_RNA (1)...(19): siRNA sense strand
gaacgguaugggagauuua

SEQ ID NO: 896477 - RNA, 19 nt, Homo sapiens
  misc_RNA (1)...(19): siRNA sense strand
gggccaaaguugauaacaa

SEQ ID NO: 896478 - RNA, 19 nt, Homo sapiens
  misc_RNA (1)...(19): siRNA sense strand
ucaaggaacuucagagcau

SEQ ID NO: 896479 - RNA, 19 nt, Homo sapiens
  misc_RNA (1)...(19): siRNA sense strand
ggcaaucucuucugaugga

SEQ ID NO: 896480 - RNA, 19 nt, Homo sapiens
  misc_RNA (1)...(19): siRNA sense strand
gcaaucggacugugcauga

SEQ ID NO: 896481 - RNA, 19 nt, Homo sapiens
  misc_RNA (1)...(19): siRNA sense strand
aaacgaagaagcacagaaa

SEQ ID NO: 896482 - RNA, 19 nt, Homo sapiens
  misc_RNA (1)...(19): siRNA sense strand
ggaauaagccagaccuaag

SEQ ID NO: 896483 - RNA, 19 nt, Homo sapiens
  misc_RNA (1)...(19): siRNA sense strand
cugcagagguucuuacgaa

SEQ ID NO: 896484 - RNA, 19 nt, Homo sapiens
  misc_RNA (1)...(19): siRNA sense strand
gcaacuaugguucugauga

SEQ ID NO: 896485 - RNA, 19 nt, Homo sapiens
  misc_RNA (1)...(19): siRNA sense strand
ucagacagccuccugguaa

SEQ ID NO: 896486 - RNA, 19 nt, Homo sapiens
  misc_RNA (1)...(19): siRNA sense strand
aaacaacuagcucggaaua

SEQ ID NO: 896487 - RNA, 19 nt, Homo sapiens
  misc_RNA (1)...(19): siRNA sense strand
caugaucccucuccagaug

SEQ ID NO: 896488 - RNA, 19 nt, Homo sapiens
  misc_RNA (1)...(19): siRNA sense strand
ugaguuggguguuucaaga

SEQ ID NO: 896489 - RNA, 19 nt, Homo sapiens
  misc_RNA (1)...(19): siRNA sense strand
agugagagcugaaguagau

SEQ ID NO: 896490 - RNA, 19 nt, Homo sapiens
  misc_RNA (1)...(19): siRNA sense strand
cccaagcacugucaagauu

SEQ ID NO: 896491 - RNA, 19 nt, Homo sapiens
  misc_RNA (1)...(19): siRNA sense strand
ggaaugcuucucugucaaa

SEQ ID NO: 896492 - RNA, 19 nt, Homo sapiens
  misc_RNA (1)...(19): siRNA sense strand
caggaaugcuucucuguca

SEQ ID NO: 896493 - RNA, 19 nt, Homo sapiens
  misc_RNA (1)...(19): siRNA sense strand
ccaguuauaacacuuguaa

SEQ ID NO: 896494 - RNA, 19 nt, Homo sapiens
  misc_RNA (1)...(19): siRNA sense strand
agagaguccugaaggcaua

SEQ ID NO: 896495 - RNA, 19 nt, Homo sapiens
  misc_RNA (1)...(19): siRNA sense strand
agucaaugcugcugauaaa

SEQ ID NO: 896496 - RNA, 19 nt, Homo sapiens
  misc_RNA (1)...(19): siRNA sense strand
ucucugaguuugacacuga

SEQ ID NO: 896497 - RNA, 19 nt, Homo sapiens
  misc_RNA (1)...(19): siRNA sense strand
gcaaauagaaaucaacaac

SEQ ID NO: 896498 - RNA, 19 nt, Homo sapiens
  misc_RNA (1)...(19): siRNA sense strand
ucacugacguugaauuugg

SEQ ID NO: 896499 - RNA, 19 nt, Homo sapiens
  misc_RNA (1)...(19): siRNA sense strand
gaacugccuagaaaucuug

SEQ ID NO: 896500 - RNA, 19 nt, Homo sapiens
  misc_RNA (1)...(19): siRNA sense strand
gaaggacuggacauuaauu

SEQ ID NO: 896501 - RNA, 19 nt, Homo sapiens
  misc_RNA (1)...(19): siRNA sense strand
uuuaaagacucauggugua

SEQ ID NO: 896502 - RNA, 19 nt, Homo sapiens
  misc_RNA (1)...(19): siRNA sense strand
aaaccaagccucucucuuc

SEQ ID NO: 896503 - RNA, 19 nt, Homo sapiens
  misc_RNA (1)...(19): siRNA sense strand
aaaagaagcuggaaaugga

SEQ ID NO: 896504 - RNA, 19 nt, Homo sapiens
  misc_RNA (1)...(19): siRNA sense strand
gaaugcagcaacaguaaau

SEQ ID NO: 896505 - RNA, 19 nt, Homo sapiens
  misc_RNA (1)...(19): siRNA sense strand
gcaagaagcauacgaucca

SEQ ID NO: 896506 - RNA, 19 nt, Homo sapiens
  misc_RNA (1)...(19): siRNA sense strand
caaugcugcuuaaugaaga

SEQ ID NO: 896507 - RNA, 19 nt, Homo sapiens
  misc_RNA (1)...(19): siRNA sense strand
gcucucaggcaaagucaua

SEQ ID NO: 896508 - RNA, 19 nt, Homo sapiens
  misc_RNA (1)...(19): siRNA sense strand
ccuaagcacugaagguaug

SEQ ID NO: 896509 - RNA, 19 nt, Homo sapiens
  misc_RNA (1)...(19): siRNA sense strand
uauccauaguuuccaguua

SEQ ID NO: 896510 - RNA, 19 nt, Homo sapiens
  misc_RNA (1)...(19): siRNA sense strand
ugaaguagaugcugguuuu

SEQ ID NO: 896511 - RNA, 19 nt, Homo sapiens
  misc_RNA (1)...(19): siRNA sense strand
ggaaccaaucgaaguguaa

SEQ ID NO: 896512 - RNA, 19 nt, Homo sapiens
  misc_RNA (1)...(19): siRNA sense strand
caacucaagguuauuauag

SEQ ID NO: 896513 - RNA, 19 nt, Homo sapiens
  misc_RNA (1)...(19): siRNA sense strand
guaaaucaaagacugaguu

SEQ ID NO: 896514 - RNA, 19 nt, Homo sapiens
  misc_RNA (1)...(19): siRNA sense strand
gcagcaacaguaaaucaaa

SEQ ID NO: 896515 - RNA, 19 nt, Homo sapiens
  misc_RNA (1)...(19): siRNA sense strand
gcaagucugagucugauau

SEQ ID NO: 896516 - RNA, 19 nt, Homo sapiens
  misc_RNA (1)...(19): siRNA sense strand
ucaagaagcaauauuguca

SEQ ID NO: 896517 - RNA, 19 nt, Homo sapiens
  misc_RNA (1)...(19): siRNA sense strand
ugaaacaaucucccaguaa

SEQ ID NO: 896518 - RNA, 19 nt, Homo sapiens
  misc_RNA (1)...(19): siRNA sense strand
caggcaaucucuucugaug

SEQ ID NO: 896519 - RNA, 19 nt, Homo sapiens
  misc_RNA (1)...(19): siRNA sense strand
agggaaaugucacuuuauu

SEQ ID NO: 896520 - RNA, 19 nt, Homo sapiens
  misc_RNA (1)...(19): siRNA sense strand
caaggcaaauagaaaucaa

SEQ ID NO: 896521 - RNA, 19 nt, Homo sapiens
  misc_RNA (1)...(19): siRNA sense strand
gaaaucaacaacaacucaa

SEQ ID NO: 896522 - RNA, 19 nt, Homo sapiens
  misc_RNA (1)...(19): siRNA sense strand
agaagaagcuccaccacuu

SEQ ID NO: 896523 - RNA, 19 nt, Homo sapiens
  misc_RNA (1)...(19): siRNA sense strand
guaagacacuggacuccuu

SEQ ID NO: 896524 - RNA, 19 nt, Homo sapiens
  misc_RNA (1)...(19): siRNA sense strand
ccacugcugugccaccuuu

SEQ ID NO: 896525 - RNA, 19 nt, Homo sapiens
  misc_RNA (1)...(19): siRNA sense strand
gaggagaucauccgcaaga

SEQ ID NO: 896526 - RNA, 19 nt, Homo sapiens
  misc_RNA (1)...(19): siRNA sense strand
ggagguggaggacuucauu

SEQ ID NO: 896527 - RNA, 19 nt, Homo sapiens
  misc_RNA (1)...(19): siRNA sense strand
gaagaucaaguuccguuca

SEQ ID NO: 896528 - RNA, 19 nt, Homo sapiens
  misc_RNA (1)...(19): siRNA sense strand
acacuggacuccuucuaug

SEQ ID NO: 896529 - RNA, 19 nt, Homo sapiens
  misc_RNA (1)...(19): siRNA sense strand
cgaugcaggucaugaagug

SEQ ID NO: 896530 - RNA, 19 nt, Homo sapiens
  misc_RNA (1)...(19): siRNA sense strand
cagacuggcuccuguccuu

SEQ ID NO: 896531 - RNA, 19 nt, Homo sapiens
  misc_RNA (1)...(19): siRNA sense strand
acucggaccuguacuuugu

SEQ ID NO: 896532 - RNA, 19 nt, Homo sapiens
  misc_RNA (1)...(19): siRNA sense strand
caaccugauuccugugauc

SEQ ID NO: 896533 - RNA, 19 nt, Homo sapiens
  misc_RNA (1)...(19): siRNA sense strand
gaacgaggaggagaucauc

SEQ ID NO: 896534 - RNA, 19 nt, Homo sapiens
  misc_RNA (1)...(19): siRNA sense strand
gcaugauccucuuccugau

SEQ ID NO: 896535 - RNA, 19 nt, Homo sapiens
  misc_RNA (1)...(19): siRNA sense strand
acauggagguggaggacuu

SEQ ID NO: 896536 - RNA, 19 nt, Homo sapiens
  misc_RNA (1)...(19): siRNA sense strand
gacacuggacuccuucuau

SEQ ID NO: 896537 - RNA, 19 nt, Homo sapiens
  misc_RNA (1)...(19): siRNA sense strand
ggagcacccucugcaugau

SEQ ID NO: 896538 - RNA, 19 nt, Homo sapiens
  misc_RNA (1)...(19): siRNA sense strand
ggacuccuucuaugagaug

SEQ ID NO: 896539 - RNA, 19 nt, Homo sapiens
  misc_RNA (1)...(19): siRNA sense strand
gcgaguauucccuacaugu

SEQ ID NO: 896540 - RNA, 19 nt, Homo sapiens
  misc_RNA (1)...(19): siRNA sense strand
ugacggccaucaucaacca

SEQ ID NO: 896541 - RNA, 19 nt, Homo sapiens
  misc_RNA (1)...(19): siRNA sense strand
uagcgaguauucccuacau

SEQ ID NO: 896542 - RNA, 19 nt, Homo sapiens
  misc_RNA (1)...(19): siRNA sense strand
ugacucggaccuguacuuu

SEQ ID NO: 896543 - RNA, 19 nt, Homo sapiens
  misc_RNA (1)...(19): siRNA sense strand
augauccucuuccugauga

SEQ ID NO: 896544 - RNA, 19 nt, Homo sapiens
  misc_RNA (1)...(19): siRNA sense strand
cauccuuccugcucuccaa

SEQ ID NO: 896545 - RNA, 19 nt, Homo sapiens
  misc_RNA (1)...(19): siRNA sense strand
uggagcacccucugcauga

SEQ ID NO: 896546 - RNA, 19 nt, Homo sapiens
  misc_RNA (1)...(19): siRNA sense strand
gugaugacucggaccugua

SEQ ID NO: 896547 - RNA, 19 nt, Homo sapiens
  misc_RNA (1)...(19): siRNA sense strand
cgaguucgaccuggccuuu

SEQ ID NO: 896548 - RNA, 19 nt, Homo sapiens
  misc_RNA (1)...(19): siRNA sense strand
caaccgggacaccgacaug

SEQ ID NO: 896549 - RNA, 19 nt, Homo sapiens
  misc_RNA (1)...(19): siRNA sense strand
ggacagcauguacgagaac

SEQ ID NO: 896550 - RNA, 19 nt, Homo sapiens
  misc_RNA (1)...(19): siRNA sense strand
gcagcuaccaccugaagac

SEQ ID NO: 896551 - RNA, 19 nt, Homo sapiens
  misc_RNA (1)...(19): siRNA sense strand
guccuuugcugucuaugag

SEQ ID NO: 896552 - RNA, 19 nt, Homo sapiens
  misc_RNA (1)...(19): siRNA sense strand
acacgaugcaggucaugaa

SEQ ID NO: 896553 - RNA, 19 nt, Homo sapiens
  misc_RNA (1)...(19): siRNA sense strand
uggacagcauguacgagaa

SEQ ID NO: 896554 - RNA, 19 nt, Homo sapiens
  misc_RNA (1)...(19): siRNA sense strand
guacuuugucucccaccuu

SEQ ID NO: 896555 - RNA, 19 nt, Homo sapiens
  misc_RNA (1)...(19): siRNA sense strand
gagguggaggacuucauug

SEQ ID NO: 896556 - RNA, 19 nt, Homo sapiens
  misc_RNA (1)...(19): siRNA sense strand
guacugagcuacuuaaaca

SEQ ID NO: 896557 - RNA, 19 nt, Homo sapiens
  misc_RNA (1)...(19): siRNA sense strand
gauaaucaacgaagaauug

SEQ ID NO: 896558 - RNA, 19 nt, Homo sapiens
  misc_RNA (1)...(19): siRNA sense strand
agaaagagguacugagcua

SEQ ID NO: 896559 - RNA, 19 nt, Homo sapiens
  misc_RNA (1)...(19): siRNA sense strand
gaauaugggugugguccuu

SEQ ID NO: 896560 - RNA, 19 nt, Homo sapiens
  misc_RNA (1)...(19): siRNA sense strand
ggagauaaucaacgaagaa

SEQ ID NO: 896561 - RNA, 19 nt, Homo sapiens
  misc_RNA (1)...(19): siRNA sense strand
cagcuagcauccuuucuga

SEQ ID NO: 896562 - RNA, 19 nt, Homo sapiens
  misc_RNA (1)...(19): siRNA sense strand
guagagaaaggaaaggaaa

SEQ ID NO: 896563 - RNA, 19 nt, Homo sapiens
  misc_RNA (1)...(19): siRNA sense strand
ggaaccaccucauccaaaa

SEQ ID NO: 896564 - RNA, 19 nt, Homo sapiens
  misc_RNA (1)...(19): siRNA sense strand
cuagcauccuuucugaaua

SEQ ID NO: 896565 - RNA, 19 nt, Homo sapiens
  misc_RNA (1)...(19): siRNA sense strand
uagcauccuuucugaauag

SEQ ID NO: 896566 - RNA, 19 nt, Homo sapiens
  misc_RNA (1)...(19): siRNA sense strand
gcuagcauccuuucugaau

SEQ ID NO: 896567 - RNA, 19 nt, Homo sapiens
  misc_RNA (1)...(19): siRNA sense strand
auaaggugcucaucaagga

SEQ ID NO: 896568 - RNA, 19 nt, Homo sapiens
  misc_RNA (1)...(19): siRNA sense strand
gcauggauacgcuggagaa

SEQ ID NO: 896569 - RNA, 19 nt, Homo sapiens
  misc_RNA (1)...(19): siRNA sense strand
cauugagucugacaagguu

SEQ ID NO: 896570 - RNA, 19 nt, Homo sapiens
  misc_RNA (1)...(19): siRNA sense strand
aaaauaaggugcucaucaa

SEQ ID NO: 896571 - RNA, 19 nt, Homo sapiens
  misc_RNA (1)...(19): siRNA sense strand
gcucggccuugccagauug

SEQ ID NO: 896572 - RNA, 19 nt, Homo sapiens
  misc_RNA (1)...(19): siRNA sense strand
ccaggaaguuugggcaguu

SEQ ID NO: 896573 - RNA, 19 nt, Homo sapiens
  misc_RNA (1)...(19): siRNA sense strand
aaccacagcuccauugagu

SEQ ID NO: 896574 - RNA, 19 nt, Homo sapiens
  misc_RNA (1)...(19): siRNA sense strand
ccaaucccuugcaguucua

SEQ ID NO: 896575 - RNA, 19 nt, Homo sapiens
  misc_RNA (1)...(19): siRNA sense strand
caggaaagcagccaaugga

SEQ ID NO: 896576 - RNA, 19 nt, Homo sapiens
  misc_RNA (1)...(19): siRNA sense strand
cagguggugucucguucua

SEQ ID NO: 896577 - RNA, 19 nt, Homo sapiens
  misc_RNA (1)...(19): siRNA sense strand
ucaaaccacagcuccauug

SEQ ID NO: 896578 - RNA, 19 nt, Homo sapiens
  misc_RNA (1)...(19): siRNA sense strand
caugaucuccagucccuaa

SEQ ID NO: 896579 - RNA, 19 nt, Homo sapiens
  misc_RNA (1)...(19): siRNA sense strand
ugaauagccaagagaaaga

SEQ ID NO: 896580 - RNA, 19 nt, Homo sapiens
  misc_RNA (1)...(19): siRNA sense strand
gagauaaucaacgaagaau

SEQ ID NO: 896581 - RNA, 19 nt, Homo sapiens
  misc_RNA (1)...(19): siRNA sense strand
gcuacaaaaucaaguucua

SEQ ID NO: 896582 - RNA, 19 nt, Homo sapiens
  misc_RNA (1)...(19): siRNA sense strand
gagguacugagcuacuuaa

SEQ ID NO: 896583 - RNA, 19 nt, Homo sapiens
  misc_RNA (1)...(19): siRNA sense strand
gcaagcauuucagaaccau

SEQ ID NO: 896584 - RNA, 19 nt, Homo sapiens
  misc_RNA (1)...(19): siRNA sense strand
caaaccacagcuccauuga

SEQ ID NO: 896585 - RNA, 19 nt, Homo sapiens
  misc_RNA (1)...(19): siRNA sense strand
caagagaaagagguacuga

SEQ ID NO: 896586 - RNA, 19 nt, Homo sapiens
  misc_RNA (1)...(19): siRNA sense strand
cuacuuaaacagcuuggaa

SEQ ID NO: 896587 - RNA, 19 nt, Homo sapiens
  misc_RNA (1)...(19): siRNA sense strand
acagcuccauugagucuga

SEQ ID NO: 896588 - RNA, 19 nt, Homo sapiens
  misc_RNA (1)...(19): siRNA sense strand
ggagaauaccucgguguca

SEQ ID NO: 896589 - RNA, 19 nt, Homo sapiens
  misc_RNA (1)...(19): siRNA sense strand
uggagaacgugcagcugaa

SEQ ID NO: 896590 - RNA, 19 nt, Homo sapiens
  misc_RNA (1)...(19): siRNA sense strand
uggauacgcuggagaacgu

SEQ ID NO: 896591 - RNA, 19 nt, Homo sapiens
  misc_RNA (1)...(19): siRNA sense strand
caggcaagguccaggaaag

SEQ ID NO: 896592 - RNA, 19 nt, Homo sapiens
  misc_RNA (1)...(19): siRNA sense strand
gcaggcaagguccaggaaa

SEQ ID NO: 896593 - RNA, 19 nt, Homo sapiens
  misc_RNA (1)...(19): siRNA sense strand
ccacagcuccauugagucu

SEQ ID NO: 896594 - RNA, 19 nt, Homo sapiens
  misc_RNA (1)...(19): siRNA sense strand
caaaauaaggugcucauca

SEQ ID NO: 896595 - RNA, 19 nt, Homo sapiens
  misc_RNA (1)...(19): siRNA sense strand
ggugagccaauccaacuga

SEQ ID NO: 896596 - RNA, 19 nt, Homo sapiens
  misc_RNA (1)...(19): siRNA sense strand
ggcccaaucccuugcaguu

SEQ ID NO: 896597 - RNA, 19 nt, Homo sapiens
  misc_RNA (1)...(19): siRNA sense strand
gcaggaaccaccucaucca

SEQ ID NO: 896598 - RNA, 19 nt, Homo sapiens
  misc_RNA (1)...(19): siRNA sense strand
caggaaguuugggcaguug

SEQ ID NO: 896599 - RNA, 19 nt, Homo sapiens
  misc_RNA (1)...(19): siRNA sense strand
gguggugucucguucuacu

SEQ ID NO: 896600 - RNA, 19 nt, Homo sapiens
  misc_RNA (1)...(19): siRNA sense strand
aaacagcuuggaaguggaa

SEQ ID NO: 896601 - RNA, 19 nt, Homo sapiens
  misc_RNA (1)...(19): siRNA sense strand
ggcaagcauuucagaacca

SEQ ID NO: 896602 - RNA, 19 nt, Homo sapiens
  misc_RNA (1)...(19): siRNA sense strand
gcgcaggaaccaccucauc

SEQ ID NO: 896603 - RNA, 19 nt, Homo sapiens
  misc_RNA (1)...(19): siRNA sense strand
uggagauaaucaacgaaga

SEQ ID NO: 896604 - RNA, 19 nt, Homo sapiens
  misc_RNA (1)...(19): siRNA sense strand
agagguacugagcuacuua

SEQ ID NO: 896605 - RNA, 19 nt, Homo sapiens
  misc_RNA (1)...(19): siRNA sense strand
uagccaagagaaagaggua

SEQ ID NO: 896606 - RNA, 19 nt, Homo sapiens
  misc_RNA (1)...(19): siRNA sense strand
cccaaucccuugcaguucu

SEQ ID NO: 896607 - RNA, 19 nt, Homo sapiens
  misc_RNA (1)...(19): siRNA sense strand
acggaaggcagcauggaua

SEQ ID NO: 896608 - RNA, 19 nt, Homo sapiens
  misc_RNA (1)...(19): siRNA sense strand
gggaaggccgcaucucucu

SEQ ID NO: 896609 - RNA, 19 nt, Homo sapiens
  misc_RNA (1)...(19): siRNA sense strand
gaucgcaacccguauuucc

SEQ ID NO: 896610 - RNA, 19 nt, Homo sapiens
  misc_RNA (1)...(19): siRNA sense strand
ccagcuagcauccuuucug

SEQ ID NO: 896611 - RNA, 19 nt, Homo sapiens
  misc_RNA (1)...(19): siRNA sense strand
ugaaggggcucguguagag

SEQ ID NO: 896612 - RNA, 19 nt, Homo sapiens
  misc_RNA (1)...(19): siRNA sense strand
acccggacccuucacagua

SEQ ID NO: 896613 - RNA, 19 nt, Homo sapiens
  misc_RNA (1)...(19): siRNA sense strand
gaaggaagagagggaugca

SEQ ID NO: 896614 - RNA, 19 nt, Homo sapiens
  misc_RNA (1)...(19): siRNA sense strand
ucagaaccauccccagcua

SEQ ID NO: 896615 - RNA, 19 nt, Homo sapiens
  misc_RNA (1)...(19): siRNA sense strand
ccaggaaagcagccaaugg

SEQ ID NO: 896616 - RNA, 19 nt, Homo sapiens
  misc_RNA (1)...(19): siRNA sense strand
guaguuucuuugggugguu

SEQ ID NO: 896617 - RNA, 19 nt, Homo sapiens
  misc_RNA (1)...(19): siRNA sense strand
aagagguacugagcuacuu

SEQ ID NO: 896618 - RNA, 19 nt, Homo sapiens
  misc_RNA (1)...(19): siRNA sense strand
gaauagccaagagaaagag

SEQ ID NO: 896619 - RNA, 19 nt, Homo sapiens
  misc_RNA (1)...(19): siRNA sense strand
gauggaagguggucacuuu

SEQ ID NO: 896620 - RNA, 19 nt, Homo sapiens
  misc_RNA (1)...(19): siRNA sense strand
agaaagaucugcagaguga

SEQ ID NO: 896621 - RNA, 19 nt, Homo sapiens
  misc_RNA (1)...(19): siRNA sense strand
gagaggagcuaucaguuug

SEQ ID NO: 896622 - RNA, 19 nt, Homo sapiens
  misc_RNA (1)...(19): siRNA sense strand
ggacuggacuucugauguu

SEQ ID NO: 896623 - RNA, 19 nt, Homo sapiens
  misc_RNA (1)...(19): siRNA sense strand
ggagcuaccugcugauauu

SEQ ID NO: 896624 - RNA, 19 nt, Homo sapiens
  misc_RNA (1)...(19): siRNA sense strand
gcaacaggaugaggaauuu

SEQ ID NO: 896625 - RNA, 19 nt, Homo sapiens
  misc_RNA (1)...(19): siRNA sense strand
gggaagagcgcuuggauaa

SEQ ID NO: 896626 - RNA, 19 nt, Homo sapiens
  misc_RNA (1)...(19): siRNA sense strand
gaacaggaguuugggaaga

SEQ ID NO: 896627 - RNA, 19 nt, Homo sapiens
  misc_RNA (1)...(19): siRNA sense strand
gaagagcgcuuggauaagg

SEQ ID NO: 896628 - RNA, 19 nt, Homo sapiens
  misc_RNA (1)...(19): siRNA sense strand
ggacagaggcucaagacuu

SEQ ID NO: 896629 - RNA, 19 nt, Homo sapiens
  misc_RNA (1)...(19): siRNA sense strand
gauggcagcucgcgauaug

SEQ ID NO: 896630 - RNA, 19 nt, Homo sapiens
  misc_RNA (1)...(19): siRNA sense strand
gaagagauccuggccaaga

SEQ ID NO: 896631 - RNA, 19 nt, Homo sapiens
  misc_RNA (1)...(19): siRNA sense strand
agaagaagauuccaagugu

SEQ ID NO: 896632 - RNA, 19 nt, Homo sapiens
  misc_RNA (1)...(19): siRNA sense strand
gagauucacuggguaccua

SEQ ID NO: 896633 - RNA, 19 nt, Homo sapiens
  misc_RNA (1)...(19): siRNA sense strand
gacagaagcuuuggaacga

SEQ ID NO: 896634 - RNA, 19 nt, Homo sapiens
  misc_RNA (1)...(19): siRNA sense strand
gaguuuagccucaguguug

SEQ ID NO: 896635 - RNA, 19 nt, Homo sapiens
  misc_RNA (1)...(19): siRNA sense strand
gaaagaggaggcugggaaa

SEQ ID NO: 896636 - RNA, 19 nt, Homo sapiens
  misc_RNA (1)...(19): siRNA sense strand
ggccugagcuugagagaca

SEQ ID NO: 896637 - RNA, 19 nt, Homo sapiens
  misc_RNA (1)...(19): siRNA sense strand
gcaugucccucacccagaa

SEQ ID NO: 896638 - RNA, 19 nt, Homo sapiens
  misc_RNA (1)...(19): siRNA sense strand
ggaagguggucacuuugug

SEQ ID NO: 896639 - RNA, 19 nt, Homo sapiens
  misc_RNA (1)...(19): siRNA sense strand
gagaguuccuuaaaucaag

SEQ ID NO: 896640 - RNA, 19 nt, Homo sapiens
  misc_RNA (1)...(19): siRNA sense strand
gaaccugaccggcuguuug

SEQ ID NO: 896641 - RNA, 19 nt, Homo sapiens
  misc_RNA (1)...(19): siRNA sense strand
ccaagugggucaggaaguu

SEQ ID NO: 896642 - RNA, 19 nt, Homo sapiens
  misc_RNA (1)...(19): siRNA sense strand
gagaagaagauuccaagug

SEQ ID NO: 896643 - RNA, 19 nt, Homo sapiens
  misc_RNA (1)...(19): siRNA sense strand
gaugaggaauuugagaaga

SEQ ID NO: 896644 - RNA, 19 nt, Homo sapiens
  misc_RNA (1)...(19): siRNA sense strand
gagcaggacugggaguuuc

SEQ ID NO: 896645 - RNA, 19 nt, Homo sapiens
  misc_RNA (1)...(19): siRNA sense strand
caucuucacccgccugaua

SEQ ID NO: 896646 - RNA, 19 nt, Homo sapiens
  misc_RNA (1)...(19): siRNA sense strand
ggacuucugauguuaaugu

SEQ ID NO: 896647 - RNA, 19 nt, Homo sapiens
  misc_RNA (1)...(19): siRNA sense strand
gaccaggaauucggaaaga

SEQ ID NO: 896648 - RNA, 19 nt, Homo sapiens
  misc_RNA (1)...(19): siRNA sense strand
ggagaguuccuuaaaucaa

SEQ ID NO: 896649 - RNA, 19 nt, Homo sapiens
  misc_RNA (1)...(19): siRNA sense strand
gaaaguggagggucugaag

SEQ ID NO: 896650 - RNA, 19 nt, Homo sapiens
  misc_RNA (1)...(19): siRNA sense strand
gcaagucgagccagaagga

SEQ ID NO: 896651 - RNA, 19 nt, Homo sapiens
  misc_RNA (1)...(19): siRNA sense strand
gacuggacuucugauguua

SEQ ID NO: 896652 - RNA, 19 nt, Homo sapiens
  misc_RNA (1)...(19): siRNA sense strand
ccggagaguuccuuaaauc

SEQ ID NO: 896653 - RNA, 19 nt, Homo sapiens
  misc_RNA (1)...(19): siRNA sense strand
ugagaggagcuaucaguuu

SEQ ID NO: 896654 - RNA, 19 nt, Homo sapiens
  misc_RNA (1)...(19): siRNA sense strand
ggacuucuccuucauugag

SEQ ID NO: 896655 - RNA, 19 nt, Homo sapiens
  misc_RNA (1)...(19): siRNA sense strand
ugagggcacaccuggauua

SEQ ID NO: 896656 - RNA, 19 nt, Homo sapiens
  misc_RNA (1)...(19): siRNA sense strand
ggaucucacucggacguuu

SEQ ID NO: 896657 - RNA, 19 nt, Homo sapiens
  misc_RNA (1)...(19): siRNA sense strand
gaauuugggaagagagauu

SEQ ID NO: 896658 - RNA, 19 nt, Homo sapiens
  misc_RNA (1)...(19): siRNA sense strand
guucccgccucaccuuuaa

SEQ ID NO: 896659 - RNA, 19 nt, Homo sapiens
  misc_RNA (1)...(19): siRNA sense strand
gcuggcaacuuggccguuu

SEQ ID NO: 896660 - RNA, 19 nt, Homo sapiens
  misc_RNA (1)...(19): siRNA sense strand
uggcagugcugaccuggaa

SEQ ID NO: 896661 - RNA, 19 nt, Homo sapiens
  misc_RNA (1)...(19): siRNA sense strand
cccugaaacugaagaagaa

SEQ ID NO: 896662 - RNA, 19 nt, Homo sapiens
  misc_RNA (1)...(19): siRNA sense strand
ggcccuggaucgucccuuu

SEQ ID NO: 896663 - RNA, 19 nt, Homo sapiens
  misc_RNA (1)...(19): siRNA sense strand
ccaagagacugggaaagag

SEQ ID NO: 896664 - RNA, 19 nt, Homo sapiens
  misc_RNA (1)...(19): siRNA sense strand
cuucugauguuaaugugaa

SEQ ID NO: 896665 - RNA, 19 nt, Homo sapiens
  misc_RNA (1)...(19): siRNA sense strand
ggacugggaguuucagaag

SEQ ID NO: 896666 - RNA, 19 nt, Homo sapiens
  misc_RNA (1)...(19): siRNA sense strand
gacugggaguucagaaaga

SEQ ID NO: 896667 - RNA, 19 nt, Homo sapiens
  misc_RNA (1)...(19): siRNA sense strand
ggacugggaguucagaaag

SEQ ID NO: 896668 - RNA, 19 nt, Homo sapiens
  misc_RNA (1)...(19): siRNA sense strand
gggcacaccuggauuaccu

SEQ ID NO: 896669 - RNA, 19 nt, Homo sapiens
  misc_RNA (1)...(19): siRNA sense strand
gcacaccuggauuaccuuu

SEQ ID NO: 896670 - RNA, 19 nt, Homo sapiens
  misc_RNA (1)...(19): siRNA sense strand
gaagaagaagaaggucuga

SEQ ID NO: 896671 - RNA, 19 nt, Homo sapiens
  misc_RNA (1)...(19): siRNA sense strand
gaaauccucagggucagaa

SEQ ID NO: 896672 - RNA, 19 nt, Homo sapiens
  misc_RNA (1)...(19): siRNA sense strand
caucucgggugccaucuuc

SEQ ID NO: 896673 - RNA, 19 nt, Homo sapiens
  misc_RNA (1)...(19): siRNA sense strand
gcgcuuggauaagggacua

SEQ ID NO: 896674 - RNA, 19 nt, Homo sapiens
  misc_RNA (1)...(19): siRNA sense strand
ccacagcccagcaguuuca

SEQ ID NO: 896675 - RNA, 19 nt, Homo sapiens
  misc_RNA (1)...(19): siRNA sense strand
gaccagcccuguguucucu

SEQ ID NO: 896676 - RNA, 19 nt, Homo sapiens
  misc_RNA (1)...(19): siRNA sense strand
ccucgacagugccauguau

SEQ ID NO: 896677 - RNA, 19 nt, Homo sapiens
  misc_RNA (1)...(19): siRNA sense strand
ggccggagaguuccuuaaa

SEQ ID NO: 896678 - RNA, 19 nt, Homo sapiens
  misc_RNA (1)...(19): siRNA sense strand
cagcaaguaugggcaagga

SEQ ID NO: 896679 - RNA, 19 nt, Homo sapiens
  misc_RNA (1)...(19): siRNA sense strand
ccagcccuguguucucuuu

SEQ ID NO: 896680 - RNA, 19 nt, Homo sapiens
  misc_RNA (1)...(19): siRNA sense strand
ggagagucaaccucaauuc

SEQ ID NO: 896681 - RNA, 19 nt, Homo sapiens
  misc_RNA (1)...(19): siRNA sense strand
gccggagaguuccuuaaau

SEQ ID NO: 896682 - RNA, 19 nt, Homo sapiens
  misc_RNA (1)...(19): siRNA sense strand
ccagcgagaggcagcauuu

SEQ ID NO: 896683 - RNA, 19 nt, Homo sapiens
  misc_RNA (1)...(19): siRNA sense strand
caccaaggccugcgguuga

SEQ ID NO: 896684 - RNA, 19 nt, Homo sapiens
  misc_RNA (1)...(19): siRNA sense strand
ucacaguccuucgaaugga

SEQ ID NO: 896685 - RNA, 19 nt, Homo sapiens
  misc_RNA (1)...(19): siRNA sense strand
gaccuugggcugagaaaca

SEQ ID NO: 896686 - RNA, 19 nt, Homo sapiens
  misc_RNA (1)...(19): siRNA sense strand
guucaggacugggaguuca

SEQ ID NO: 896687 - RNA, 19 nt, Homo sapiens
  misc_RNA (1)...(19): siRNA sense strand
gcagccaagaccagaguaa

SEQ ID NO: 896688 - RNA, 19 nt, Homo sapiens
  misc_RNA (1)...(19): siRNA sense strand
gaucgaggugggugaguug

SEQ ID NO: 896689 - RNA, 19 nt, Homo sapiens
  misc_RNA (1)...(19): siRNA sense strand
gcccugaaacugaagaaga

SEQ ID NO: 896690 - RNA, 19 nt, Homo sapiens
  misc_RNA (1)...(19): siRNA sense strand
gggaaagccccucacguua

SEQ ID NO: 896691 - RNA, 19 nt, Homo sapiens
  misc_RNA (1)...(19): siRNA sense strand
cagagugaauuugggauca

SEQ ID NO: 896692 - RNA, 19 nt, Homo sapiens
  misc_RNA (1)...(19): siRNA sense strand
gaaggaucgucgcccaacu

SEQ ID NO: 896693 - RNA, 19 nt, Homo sapiens
  misc_RNA (1)...(19): siRNA sense strand
gcccucagcuucggagcaa

SEQ ID NO: 896694 - RNA, 19 nt, Homo sapiens
  misc_RNA (1)...(19): siRNA sense strand
gacugggaguuucagaaga

SEQ ID NO: 896695 - RNA, 19 nt, Homo sapiens
  misc_RNA (1)...(19): siRNA sense strand
gaauucggaaagagagauu

SEQ ID NO: 896696 - RNA, 19 nt, Homo sapiens
  misc_RNA (1)...(19): siRNA sense strand
gagcuaccugcugauauuu

SEQ ID NO: 896697 - RNA, 19 nt, Homo sapiens
  misc_RNA (1)...(19): siRNA sense strand
gcagccaggaugccgauga

SEQ ID NO: 896698 - RNA, 19 nt, Homo sapiens
  misc_RNA (1)...(19): siRNA sense strand
gggagagucaaccucaauu

SEQ ID NO: 896699 - RNA, 19 nt, Homo sapiens
  misc_RNA (1)...(19): siRNA sense strand
ugaaacugaagaagaagaa

SEQ ID NO: 896700 - RNA, 19 nt, Homo sapiens
  misc_RNA (1)...(19): siRNA sense strand
ggaauuugagaagaagauu

SEQ ID NO: 896701 - RNA, 19 nt, Homo sapiens
  misc_RNA (1)...(19): siRNA sense strand
cagcccagcuuggcacuca

SEQ ID NO: 896702 - RNA, 19 nt, Homo sapiens
  misc_RNA (1)...(19): siRNA sense strand
uaucacaguccuucgaaug

SEQ ID NO: 896703 - RNA, 19 nt, Homo sapiens
  misc_RNA (1)...(19): siRNA sense strand
gauggcagcacccucuuca

SEQ ID NO: 896704 - RNA, 19 nt, Homo sapiens
  misc_RNA (1)...(19): siRNA sense strand
gggagggcaucaggagaga

SEQ ID NO: 896705 - RNA, 19 nt, Homo sapiens
  misc_RNA (1)...(19): siRNA sense strand
cagagcagcuggcaaaaca

SEQ ID NO: 896706 - RNA, 19 nt, Homo sapiens
  misc_RNA (1)...(19): siRNA sense strand
augaggaauuugagaagaa

SEQ ID NO: 896707 - RNA, 19 nt, Homo sapiens
  misc_RNA (1)...(19): siRNA sense strand
ccaggaauucggaaagaga

SEQ ID NO: 896708 - RNA, 19 nt, Homo sapiens
  misc_RNA (1)...(19): siRNA sense strand
gggaagaaggagugucuca

SEQ ID NO: 896709 - RNA, 19 nt, Homo sapiens
  misc_RNA (1)...(19): siRNA sense strand
ccaaggggcugaaagucaa

SEQ ID NO: 896710 - RNA, 19 nt, Homo sapiens
  misc_RNA (1)...(19): siRNA sense strand
gaccggcuguuuggaaagu

SEQ ID NO: 896711 - RNA, 19 nt, Homo sapiens
  misc_RNA (1)...(19): siRNA sense strand
gcagugcugaccuggaaga

SEQ ID NO: 896712 - RNA, 19 nt, Homo sapiens
  misc_RNA (1)...(19): siRNA sense strand
cagcgccgauucucugaag

SEQ ID NO: 896713 - RNA, 19 nt, Homo sapiens
  misc_RNA (1)...(19): siRNA sense strand
ucggagccgugccaacuug

SEQ ID NO: 896714 - RNA, 19 nt, Homo sapiens
  misc_RNA (1)...(19): siRNA sense strand
gagacaagugggccagaga

SEQ ID NO: 896715 - RNA, 19 nt, Homo sapiens
  misc_RNA (1)...(19): siRNA sense strand
gaggcugggucggugaguu

SEQ ID NO: 896716 - RNA, 19 nt, Homo sapiens
  misc_RNA (1)...(19): siRNA sense strand
ggaccaggaauucggaaag

SEQ ID NO: 896717 - RNA, 19 nt, Homo sapiens
  misc_RNA (1)...(19): siRNA sense strand
caggacagaagcuuuggaa

SEQ ID NO: 896718 - RNA, 19 nt, Homo sapiens
  misc_RNA (1)...(19): siRNA sense strand
ccagugagaggagcuauca

SEQ ID NO: 896719 - RNA, 19 nt, Homo sapiens
  misc_RNA (1)...(19): siRNA sense strand
gaaacuggcuggcccauuc

SEQ ID NO: 896720 - RNA, 19 nt, Homo sapiens
  misc_RNA (1)...(19): siRNA sense strand
ggagggagaugcugacgaa

SEQ ID NO: 896721 - RNA, 19 nt, Homo sapiens
  misc_RNA (1)...(19): siRNA sense strand
ggacaaagcccuggacuuc

SEQ ID NO: 896722 - RNA, 19 nt, Homo sapiens
  misc_RNA (1)...(19): siRNA sense strand
gcaaugaguaccugcuuaa

SEQ ID NO: 896723 - RNA, 19 nt, Homo sapiens
  misc_RNA (1)...(19): siRNA sense strand
ucaaggcccuggucaguga

SEQ ID NO: 896724 - RNA, 19 nt, Homo sapiens
  misc_RNA (1)...(19): siRNA sense strand
ggacugaucaggugugugu

SEQ ID NO: 896725 - RNA, 19 nt, Homo sapiens
  misc_RNA (1)...(19): siRNA sense strand
gcagagggcagccauugaa

SEQ ID NO: 896726 - RNA, 19 nt, Homo sapiens
  misc_RNA (1)...(19): siRNA sense strand
ggaccagucuccagaaacu

SEQ ID NO: 896727 - RNA, 19 nt, Homo sapiens
  misc_RNA (1)...(19): siRNA sense strand
gggagaugcugacgaaugg

SEQ ID NO: 896728 - RNA, 19 nt, Homo sapiens
  misc_RNA (1)...(19): siRNA sense strand
gaaccagcacggcgaggua

SEQ ID NO: 896729 - RNA, 19 nt, Homo sapiens
  misc_RNA (1)...(19): siRNA sense strand
gcacggcgagguaggcuuu

SEQ ID NO: 896730 - RNA, 19 nt, Homo sapiens
  misc_RNA (1)...(19): siRNA sense strand
agaguggccuggagaaaga

SEQ ID NO: 896731 - RNA, 19 nt, Homo sapiens
  misc_RNA (1)...(19): siRNA sense strand
gaggaugagcugacaauca

SEQ ID NO: 896732 - RNA, 19 nt, Homo sapiens
  misc_RNA (1)...(19): siRNA sense strand
gcaagcagcccgcaaugag

SEQ ID NO: 896733 - RNA, 19 nt, Homo sapiens
  misc_RNA (1)...(19): siRNA sense strand
ggcccaagauggaguagau

SEQ ID NO: 896734 - RNA, 19 nt, Homo sapiens
  misc_RNA (1)...(19): siRNA sense strand
cgcaaugaguaccugcuua

SEQ ID NO: 896735 - RNA, 19 nt, Homo sapiens
  misc_RNA (1)...(19): siRNA sense strand
ugaacucucugacccugaa

SEQ ID NO: 896736 - RNA, 19 nt, Homo sapiens
  misc_RNA (1)...(19): siRNA sense strand
ccagagagcagccaagaca

SEQ ID NO: 896737 - RNA, 19 nt, Homo sapiens
  misc_RNA (1)...(19): siRNA sense strand
gagccacacugagcuggaa

SEQ ID NO: 896738 - RNA, 19 nt, Homo sapiens
  misc_RNA (1)...(19): siRNA sense strand
gaagugaccaugggaucuu

SEQ ID NO: 896739 - RNA, 19 nt, Homo sapiens
  misc_RNA (1)...(19): siRNA sense strand
aagcauagaacagagguua

SEQ ID NO: 896740 - RNA, 19 nt, Homo sapiens
  misc_RNA (1)...(19): siRNA sense strand
ggagaaggcggcugauguc

SEQ ID NO: 896741 - RNA, 19 nt, Homo sapiens
  misc_RNA (1)...(19): siRNA sense strand
augaguaccugcuuaacuu

SEQ ID NO: 896742 - RNA, 19 nt, Homo sapiens
  misc_RNA (1)...(19): siRNA sense strand
augcugagcuuucugacuu

SEQ ID NO: 896743 - RNA, 19 nt, Homo sapiens
  misc_RNA (1)...(19): siRNA sense strand
gcaagaguggccuggagaa

SEQ ID NO: 896744 - RNA, 19 nt, Homo sapiens
  misc_RNA (1)...(19): siRNA sense strand
gagcugcccgugacuacaa

SEQ ID NO: 896745 - RNA, 19 nt, Homo sapiens
  misc_RNA (1)...(19): siRNA sense strand
agcaagaccugaagcuguu

SEQ ID NO: 896746 - RNA, 19 nt, Homo sapiens
  misc_RNA (1)...(19): siRNA sense strand
gaagucggaagcuguaugg

SEQ ID NO: 896747 - RNA, 19 nt, Homo sapiens
  misc_RNA (1)...(19): siRNA sense strand
augcccaccucgaccauua

SEQ ID NO: 896748 - RNA, 19 nt, Homo sapiens
  misc_RNA (1)...(19): siRNA sense strand
ggcaggcacuccagaaacu

SEQ ID NO: 896749 - RNA, 19 nt, Homo sapiens
  misc_RNA (1)...(19): siRNA sense strand
ggagacgggagagcucuuu

SEQ ID NO: 896750 - RNA, 19 nt, Homo sapiens
  misc_RNA (1)...(19): siRNA sense strand
gcauagaacagagguuaca

SEQ ID NO: 896751 - RNA, 19 nt, Homo sapiens
  misc_RNA (1)...(19): siRNA sense strand
aagcagcccgcaaugagua

SEQ ID NO: 896752 - RNA, 19 nt, Homo sapiens
  misc_RNA (1)...(19): siRNA sense strand
caagaguggccuggagaaa

SEQ ID NO: 896753 - RNA, 19 nt, Homo sapiens
  misc_RNA (1)...(19): siRNA sense strand
gugaguggcuggaggucau

SEQ ID NO: 896754 - RNA, 19 nt, Homo sapiens
  misc_RNA (1)...(19): siRNA sense strand
gcuccaagcauagaacaga

SEQ ID NO: 896755 - RNA, 19 nt, Homo sapiens
  misc_RNA (1)...(19): siRNA sense strand
ugaccgauaccgugaccua

SEQ ID NO: 896756 - RNA, 19 nt, Homo sapiens
  misc_RNA (1)...(19): siRNA sense strand
ccaggcgucugaccgauac

SEQ ID NO: 896757 - RNA, 19 nt, Homo sapiens
  misc_RNA (1)...(19): siRNA sense strand
gcuggcccauuccugaaga

SEQ ID NO: 896758 - RNA, 19 nt, Homo sapiens
  misc_RNA (1)...(19): siRNA sense strand
gcugagcuuucugacuuug

SEQ ID NO: 896759 - RNA, 19 nt, Homo sapiens
  misc_RNA (1)...(19): siRNA sense strand
gcucaaggcccuggucagu

SEQ ID NO: 896760 - RNA, 19 nt, Homo sapiens
  misc_RNA (1)...(19): siRNA sense strand
caagcuguccgcccaguca

SEQ ID NO: 896761 - RNA, 19 nt, Homo sapiens
  misc_RNA (1)...(19): siRNA sense strand
ugacccaggcccaggauga

SEQ ID NO: 896762 - RNA, 19 nt, Homo sapiens
  misc_RNA (1)...(19): siRNA sense strand
uuucugacuuugaggaaug

SEQ ID NO: 896763 - RNA, 19 nt, Homo sapiens
  misc_RNA (1)...(19): siRNA sense strand
cugaggugcugcagucugu

SEQ ID NO: 896764 - RNA, 19 nt, Homo sapiens
  misc_RNA (1)...(19): siRNA sense strand
ggucauagaggagggagau

SEQ ID NO: 896765 - RNA, 19 nt, Homo sapiens
  misc_RNA (1)...(19): siRNA sense strand
aggcguggcuggcaagagu

SEQ ID NO: 896766 - RNA, 19 nt, Homo sapiens
  misc_RNA (1)...(19): siRNA sense strand
ucggaccagucuccagaaa

SEQ ID NO: 896767 - RNA, 19 nt, Homo sapiens
  misc_RNA (1)...(19): siRNA sense strand
aggcagggcgugaggauga

SEQ ID NO: 896768 - RNA, 19 nt, Homo sapiens
  misc_RNA (1)...(19): siRNA sense strand
gcugggagcaagaccugaa

SEQ ID NO: 896769 - RNA, 19 nt, Homo sapiens
  misc_RNA (1)...(19): siRNA sense strand
gcaagaccugaagcuguuu

SEQ ID NO: 896770 - RNA, 19 nt, Homo sapiens
  misc_RNA (1)...(19): siRNA sense strand
aggaugagcugacaaucac

SEQ ID NO: 896771 - RNA, 19 nt, Homo sapiens
  misc_RNA (1)...(19): siRNA sense strand
ccgauaccgugaccuagca

SEQ ID NO: 896772 - RNA, 19 nt, Homo sapiens
  misc_RNA (1)...(19): siRNA sense strand
ccaccucgaccauuacuac

SEQ ID NO: 896773 - RNA, 19 nt, Homo sapiens
  misc_RNA (1)...(19): siRNA sense strand
gcuuugucccugagcgaua

SEQ ID NO: 896774 - RNA, 19 nt, Homo sapiens
  misc_RNA (1)...(19): siRNA sense strand
ggaagccgcagaggucauc

SEQ ID NO: 896775 - RNA, 19 nt, Homo sapiens
  misc_RNA (1)...(19): siRNA sense strand
uccagaaacugagcaccaa

SEQ ID NO: 896776 - RNA, 19 nt, Homo sapiens
  misc_RNA (1)...(19): siRNA sense strand
cagcuacaccggacagagu

SEQ ID NO: 896777 - RNA, 19 nt, Homo sapiens
  misc_RNA (1)...(19): siRNA sense strand
cagccaagacagugacaau

SEQ ID NO: 896778 - RNA, 19 nt, Homo sapiens
  misc_RNA (1)...(19): siRNA sense strand
ugaggaugcugagcuuucu

SEQ ID NO: 896779 - RNA, 19 nt, Homo sapiens
  misc_RNA (1)...(19): siRNA sense strand
acuacaagauccagaacca

SEQ ID NO: 896780 - RNA, 19 nt, Homo sapiens
  misc_RNA (1)...(19): siRNA sense strand
caagcagcccgcaaugagu

SEQ ID NO: 896781 - RNA, 19 nt, Homo sapiens
  misc_RNA (1)...(19): siRNA sense strand
gggacaaagcccuggacuu

SEQ ID NO: 896782 - RNA, 19 nt, Homo sapiens
  misc_RNA (1)...(19): siRNA sense strand
uuacaggaagugcgagaga

SEQ ID NO: 896783 - RNA, 19 nt, Homo sapiens
  misc_RNA (1)...(19): siRNA sense strand
aagcagagggcagccauug

SEQ ID NO: 896784 - RNA, 19 nt, Homo sapiens
  misc_RNA (1)...(19): siRNA sense strand
gugaggaugagcugacaau

SEQ ID NO: 896785 - RNA, 19 nt, Homo sapiens
  misc_RNA (1)...(19): siRNA sense strand
gaaggagacuuggguaguu

SEQ ID NO: 896786 - RNA, 19 nt, Homo sapiens
  misc_RNA (1)...(19): siRNA sense strand
cagcaugaaugacaacuuc

SEQ ID NO: 896787 - RNA, 19 nt, Homo sapiens
  misc_RNA (1)...(19): siRNA sense strand
gcagccacauggaguucua

SEQ ID NO: 896788 - RNA, 19 nt, Homo sapiens
  misc_RNA (1)...(19): siRNA sense strand
caagagggacuccaaguuc

SEQ ID NO: 896789 - RNA, 19 nt, Homo sapiens
  misc_RNA (1)...(19): siRNA sense strand
gcaugaaugacaacuucua

SEQ ID NO: 896790 - RNA, 19 nt, Homo sapiens
  misc_RNA (1)...(19): siRNA sense strand
ccaagagggacuccaaguu

SEQ ID NO: 896791 - RNA, 19 nt, Homo sapiens
  misc_RNA (1)...(19): siRNA sense strand
aagagggacuccaaguuca

SEQ ID NO: 896792 - RNA, 19 nt, Homo sapiens
  misc_RNA (1)...(19): siRNA sense strand
aggcaaagccagagucuuc

SEQ ID NO: 896793 - RNA, 19 nt, Homo sapiens
  misc_RNA (1)...(19): siRNA sense strand
ccaaguucaucaucagcau

SEQ ID NO: 896794 - RNA, 19 nt, Homo sapiens
  misc_RNA (1)...(19): siRNA sense strand
ccacauggaguucuacaac

SEQ ID NO: 896795 - RNA, 19 nt, Homo sapiens
  misc_RNA (1)...(19): siRNA sense strand
ccaaaauccugagcaagaa

SEQ ID NO: 896796 - RNA, 19 nt, Homo sapiens
  misc_RNA (1)...(19): siRNA sense strand
cacggugauugaugugaaa

SEQ ID NO: 896797 - RNA, 19 nt, Homo sapiens
  misc_RNA (1)...(19): siRNA sense strand
aaggagacuuggguaguug

SEQ ID NO: 896798 - RNA, 19 nt, Homo sapiens
  misc_RNA (1)...(19): siRNA sense strand
ggacuccaaguucaucauc

SEQ ID NO: 896799 - RNA, 19 nt, Homo sapiens
  misc_RNA (1)...(19): siRNA sense strand
ccacagagaccugcaccau

SEQ ID NO: 896800 - RNA, 19 nt, Homo sapiens
  misc_RNA (1)...(19): siRNA sense strand
ccaccaagagggacuccaa

SEQ ID NO: 896801 - RNA, 19 nt, Homo sapiens
  misc_RNA (1)...(19): siRNA sense strand
ggcaagauccaagccauca

SEQ ID NO: 896802 - RNA, 19 nt, Homo sapiens
  misc_RNA (1)...(19): siRNA sense strand
ccaccaacaccuccaccaa

SEQ ID NO: 896803 - RNA, 19 nt, Homo sapiens
  misc_RNA (1)...(19): siRNA sense strand
gacuccaaguucaucauca

SEQ ID NO: 896804 - RNA, 19 nt, Homo sapiens
  misc_RNA (1)...(19): siRNA sense strand
ggaguucuacaaccaguac

SEQ ID NO: 896805 - RNA, 19 nt, Homo sapiens
  misc_RNA (1)...(19): siRNA sense strand
acauggaguucuacaacca

SEQ ID NO: 896806 - RNA, 19 nt, Homo sapiens
  misc_RNA (1)...(19): siRNA sense strand
caagcccaaugccaacgau

SEQ ID NO: 896807 - RNA, 19 nt, Homo sapiens
  misc_RNA (1)...(19): siRNA sense strand
ccaacgacaugaucauccu

SEQ ID NO: 896808 - RNA, 19 nt, Homo sapiens
  misc_RNA (1)...(19): siRNA sense strand
gcagugccaucuucaucua

SEQ ID NO: 896809 - RNA, 19 nt, Homo sapiens
  misc_RNA (1)...(19): siRNA sense strand
gcaagggccacuccacaua

SEQ ID NO: 896810 - RNA, 19 nt, Homo sapiens
  misc_RNA (1)...(19): siRNA sense strand
ggaaugagaaggucaagga

SEQ ID NO: 896811 - RNA, 19 nt, Homo sapiens
  misc_RNA (1)...(19): siRNA sense strand
cauggugacugcaauggua

SEQ ID NO: 896812 - RNA, 19 nt, Homo sapiens
  misc_RNA (1)...(19): siRNA sense strand
ccaugucccuggccaaaug

SEQ ID NO: 896813 - RNA, 19 nt, Homo sapiens
  misc_RNA (1)...(19): siRNA sense strand
ccuguugggugguugguuu

SEQ ID NO: 896814 - RNA, 19 nt, Homo sapiens
  misc_RNA (1)...(19): siRNA sense strand
gccaucaucagcuucauuu

SEQ ID NO: 896815 - RNA, 19 nt, Homo sapiens
  misc_RNA (1)...(19): siRNA sense strand
ucauugaggaugugacuaa

SEQ ID NO: 896816 - RNA, 19 nt, Homo sapiens
  misc_RNA (1)...(19): siRNA sense strand
caucaucggccacuacuuc

SEQ ID NO: 896817 - RNA, 19 nt, Homo sapiens
  misc_RNA (1)...(19): siRNA sense strand
gaccugcuauccacucaca

SEQ ID NO: 896818 - RNA, 19 nt, Homo sapiens
  misc_RNA (1)...(19): siRNA sense strand
ccaccaugcugcuuaucau

SEQ ID NO: 896819 - RNA, 19 nt, Homo sapiens
  misc_RNA (1)...(19): siRNA sense strand
gaaggucaaggaggucauu

SEQ ID NO: 896820 - RNA, 19 nt, Homo sapiens
  misc_RNA (1)...(19): siRNA sense strand
ugaccaccaugcugcuuau

SEQ ID NO: 896821 - RNA, 19 nt, Homo sapiens
  misc_RNA (1)...(19): siRNA sense strand
aagcuugccugcucugaca

SEQ ID NO: 896822 - RNA, 19 nt, Homo sapiens
  misc_RNA (1)...(19): siRNA sense strand
gaccaugucccuggccaaa

SEQ ID NO: 896823 - RNA, 19 nt, Homo sapiens
  misc_RNA (1)...(19): siRNA sense strand
aaacacgacucugguucug

SEQ ID NO: 896824 - RNA, 19 nt, Homo sapiens
  misc_RNA (1)...(19): siRNA sense strand
cgaaugguccagugugugu

SEQ ID NO: 896825 - RNA, 19 nt, Homo sapiens
  misc_RNA (1)...(19): siRNA sense strand
ccugggcucugccaacuuc

SEQ ID NO: 896826 - RNA, 19 nt, Homo sapiens
  misc_RNA (1)...(19): siRNA sense strand
cgccuucacucacccaugu

SEQ ID NO: 896827 - RNA, 19 nt, Homo sapiens
  misc_RNA (1)...(19): siRNA sense strand
ggaggucauugaggaugug

SEQ ID NO: 896828 - RNA, 19 nt, Homo sapiens
  misc_RNA (1)...(19): siRNA sense strand
ucuccuacauccucauugu

SEQ ID NO: 896829 - RNA, 19 nt, Homo sapiens
  misc_RNA (1)...(19): siRNA sense strand
uaacccagucuuucuuuua

SEQ ID NO: 896830 - RNA, 19 nt, Homo sapiens
  misc_RNA (1)...(19): siRNA sense strand
cagcuucauuugccuugau

SEQ ID NO: 896831 - RNA, 19 nt, Homo sapiens
  misc_RNA (1)...(19): siRNA sense strand
cauugaggaugugacuaaa

SEQ ID NO: 896832 - RNA, 19 nt, Homo sapiens
  misc_RNA (1)...(19): siRNA sense strand
caucuucaccuuccggaau

SEQ ID NO: 896833 - RNA, 19 nt, Homo sapiens
  misc_RNA (1)...(19): siRNA sense strand
cacgaaugguccagugugu

SEQ ID NO: 896834 - RNA, 19 nt, Homo sapiens
  misc_RNA (1)...(19): siRNA sense strand
uaacaucaucggccacuac

SEQ ID NO: 896835 - RNA, 19 nt, Homo sapiens
  misc_RNA (1)...(19): siRNA sense strand
acaaggcgguggccauggu

SEQ ID NO: 896836 - RNA, 19 nt, Homo sapiens
  misc_RNA (1)...(19): siRNA sense strand
ccuaacccagucuuucuuu

SEQ ID NO: 896837 - RNA, 19 nt, Homo sapiens
  misc_RNA (1)...(19): siRNA sense strand
ccaacuuccugauacucau

SEQ ID NO: 896838 - RNA, 19 nt, Homo sapiens
  misc_RNA (1)...(19): siRNA sense strand
ucugacacccgccacauug

SEQ ID NO: 896839 - RNA, 19 nt, Homo sapiens
  misc_RNA (1)...(19): siRNA sense strand
gguuuccucuccauugucu

SEQ ID NO: 896840 - RNA, 19 nt, Homo sapiens
  misc_RNA (1)...(19): siRNA sense strand
caacuuccugauacucaug

SEQ ID NO: 896841 - RNA, 19 nt, Homo sapiens
  misc_RNA (1)...(19): siRNA sense strand
caagggccacuccacauac

SEQ ID NO: 896842 - RNA, 19 nt, Homo sapiens
  misc_RNA (1)...(19): siRNA sense strand
caucaucagcuucauuugc

SEQ ID NO: 896843 - RNA, 19 nt, Homo sapiens
  misc_RNA (1)...(19): siRNA sense strand
caucggccacuacuucugu

SEQ ID NO: 896844 - RNA, 19 nt, Homo sapiens
  misc_RNA (1)...(19): siRNA sense strand
guugguuuccucuccauug

SEQ ID NO: 896845 - RNA, 19 nt, Homo sapiens
  misc_RNA (1)...(19): siRNA sense strand
cagaccugcuauccacuca

SEQ ID NO: 896846 - RNA, 19 nt, Homo sapiens
  misc_RNA (1)...(19): siRNA sense strand
gccaacuuccugauacuca

SEQ ID NO: 896847 - RNA, 19 nt, Homo sapiens
  misc_RNA (1)...(19): siRNA sense strand
ugaagaaacucaugagaaa

SEQ ID NO: 896848 - RNA, 19 nt, Homo sapiens
  misc_RNA (1)...(19): siRNA sense strand
gaaggugccugcaguaugu

SEQ ID NO: 896849 - RNA, 19 nt, Homo sapiens
  misc_RNA (1)...(19): siRNA sense strand
ggauagcacuuauacauuc

SEQ ID NO: 896850 - RNA, 19 nt, Homo sapiens
  misc_RNA (1)...(19): siRNA sense strand
ggaaauaccaccagaugaa

SEQ ID NO: 896851 - RNA, 19 nt, Homo sapiens
  misc_RNA (1)...(19): siRNA sense strand
gcacuuauacauuccauga

SEQ ID NO: 896852 - RNA, 19 nt, Homo sapiens
  misc_RNA (1)...(19): siRNA sense strand
gaaacagaaugaaauugag

SEQ ID NO: 896853 - RNA, 19 nt, Homo sapiens
  misc_RNA (1)...(19): siRNA sense strand
gaacaucccagaucucuac

SEQ ID NO: 896854 - RNA, 19 nt, Homo sapiens
  misc_RNA (1)...(19): siRNA sense strand
gaaugaaauugaggaagga

SEQ ID NO: 896855 - RNA, 19 nt, Homo sapiens
  misc_RNA (1)...(19): siRNA sense strand
caaaggagacucuggagau

SEQ ID NO: 896856 - RNA, 19 nt, Homo sapiens
  misc_RNA (1)...(19): siRNA sense strand
gagaaggcaggcauggaua

SEQ ID NO: 896857 - RNA, 19 nt, Homo sapiens
  misc_RNA (1)...(19): siRNA sense strand
ggacauccagcuaccauca

SEQ ID NO: 896858 - RNA, 19 nt, Homo sapiens
  misc_RNA (1)...(19): siRNA sense strand
ggaaggugccugcaguaug

SEQ ID NO: 896859 - RNA, 19 nt, Homo sapiens
  misc_RNA (1)...(19): siRNA sense strand
ggagaaggcaggcauggau

SEQ ID NO: 896860 - RNA, 19 nt, Homo sapiens
  misc_RNA (1)...(19): siRNA sense strand
gcauggauaugaccuacag

SEQ ID NO: 896861 - RNA, 19 nt, Homo sapiens
  misc_RNA (1)...(19): siRNA sense strand
gggauagcacuuauacauu

SEQ ID NO: 896862 - RNA, 19 nt, Homo sapiens
  misc_RNA (1)...(19): siRNA sense strand
caucugguccucucacaaa

SEQ ID NO: 896863 - RNA, 19 nt, Homo sapiens
  misc_RNA (1)...(19): siRNA sense strand
gccaagggauugcucaucu

SEQ ID NO: 896864 - RNA, 19 nt, Homo sapiens
  misc_RNA (1)...(19): siRNA sense strand
cuaugcagauccuaacuau

SEQ ID NO: 896865 - RNA, 19 nt, Homo sapiens
  misc_RNA (1)...(19): siRNA sense strand
ggaagugguugcgguccuu

SEQ ID NO: 896866 - RNA, 19 nt, Homo sapiens
  misc_RNA (1)...(19): siRNA sense strand
uuaccaagcucaagucaac

SEQ ID NO: 896867 - RNA, 19 nt, Homo sapiens
  misc_RNA (1)...(19): siRNA sense strand
caugagaaacagaaugaaa

SEQ ID NO: 896868 - RNA, 19 nt, Homo sapiens
  misc_RNA (1)...(19): siRNA sense strand
ucucuaccaugcagcagua

SEQ ID NO: 896869 - RNA, 19 nt, Homo sapiens
  misc_RNA (1)...(19): siRNA sense strand
gcuauucccugcauaucag

SEQ ID NO: 896870 - RNA, 19 nt, Homo sapiens
  misc_RNA (1)...(19): siRNA sense strand
aaaggagacucuggagaug

SEQ ID NO: 896871 - RNA, 19 nt, Homo sapiens
  misc_RNA (1)...(19): siRNA sense strand
caagucaaccugagaacau

SEQ ID NO: 896872 - RNA, 19 nt, Homo sapiens
  misc_RNA (1)...(19): siRNA sense strand
gaaauaccaccagaugaag

SEQ ID NO: 896873 - RNA, 19 nt, Homo sapiens
  misc_RNA (1)...(19): siRNA sense strand
gagaaacagaaugaaauug

SEQ ID NO: 896874 - RNA, 19 nt, Homo sapiens
  misc_RNA (1)...(19): siRNA sense strand
ccaagggauugcucaucuu

SEQ ID NO: 896875 - RNA, 19 nt, Homo sapiens
  misc_RNA (1)...(19): siRNA sense strand
gauccuaacuaugcuucug

SEQ ID NO: 896876 - RNA, 19 nt, Homo sapiens
  misc_RNA (1)...(19): siRNA sense strand
ggucauccgaguccagaaa

SEQ ID NO: 896877 - RNA, 19 nt, Homo sapiens
  misc_RNA (1)...(19): siRNA sense strand
augaagagguugagaacau

SEQ ID NO: 896878 - RNA, 19 nt, Homo sapiens
  misc_RNA (1)...(19): siRNA sense strand
gaagagguugagaacauca

SEQ ID NO: 896879 - RNA, 19 nt, Homo sapiens
  misc_RNA (1)...(19): siRNA sense strand
aaagagggacauccagcua

SEQ ID NO: 896880 - RNA, 19 nt, Homo sapiens
  misc_RNA (1)...(19): siRNA sense strand
ucagcaacgucaguucuug

SEQ ID NO: 896881 - RNA, 19 nt, Homo sapiens
  misc_RNA (1)...(19): siRNA sense strand
gaaggcaggcauggauaug

SEQ ID NO: 896882 - RNA, 19 nt, Homo sapiens
  misc_RNA (1)...(19): siRNA sense strand
aaacucaugagaaacagaa

SEQ ID NO: 896883 - RNA, 19 nt, Homo sapiens
  misc_RNA (1)...(19): siRNA sense strand
acaaaagucuugccacugu

SEQ ID NO: 896884 - RNA, 19 nt, Homo sapiens
  misc_RNA (1)...(19): siRNA sense strand
cagaugaagagguugagaa

SEQ ID NO: 896885 - RNA, 19 nt, Homo sapiens
  misc_RNA (1)...(19): siRNA sense strand
aagaaacucaugagaaaca

SEQ ID NO: 896886 - RNA, 19 nt, Homo sapiens
  misc_RNA (1)...(19): siRNA sense strand
ugaagagguugagaacauc

SEQ ID NO: 896887 - RNA, 19 nt, Homo sapiens
  misc_RNA (1)...(19): siRNA sense strand
ggugaccaauccacacuac

SEQ ID NO: 896888 - RNA, 19 nt, Homo sapiens
  misc_RNA (1)...(19): siRNA sense strand
caggagggcagccaaagga

SEQ ID NO: 896889 - RNA, 19 nt, Homo sapiens
  misc_RNA (1)...(19): siRNA sense strand
gaaacucaugagaaacaga

SEQ ID NO: 896890 - RNA, 19 nt, Homo sapiens
  misc_RNA (1)...(19): siRNA sense strand
ccaaggaugaagaaacuca

SEQ ID NO: 896891 - RNA, 19 nt, Homo sapiens
  misc_RNA (1)...(19): siRNA sense strand
caagggauugcucaucuuc

SEQ ID NO: 896892 - RNA, 19 nt, Homo sapiens
  misc_RNA (1)...(19): siRNA sense strand
gcagcaguacaaucuaugu

SEQ ID NO: 896893 - RNA, 19 nt, Homo sapiens
  misc_RNA (1)...(19): siRNA sense strand
ggauucagggcuuuaccaa

SEQ ID NO: 896894 - RNA, 19 nt, Homo sapiens
  misc_RNA (1)...(19): siRNA sense strand
caucccagaucucuaccau

SEQ ID NO: 896895 - RNA, 19 nt, Homo sapiens
  misc_RNA (1)...(19): siRNA sense strand
ugccaaggaugaagaaacu

SEQ ID NO: 896896 - RNA, 19 nt, Homo sapiens
  misc_RNA (1)...(19): siRNA sense strand
agggauugcucaucuucuu

SEQ ID NO: 896897 - RNA, 19 nt, Homo sapiens
  misc_RNA (1)...(19): siRNA sense strand
ggugugcucuguggagaag

SEQ ID NO: 896898 - RNA, 19 nt, Homo sapiens
  misc_RNA (1)...(19): siRNA sense strand
gaagaaacucaugagaaac

SEQ ID NO: 896899 - RNA, 19 nt, Homo sapiens
  misc_RNA (1)...(19): siRNA sense strand
gcucaucuucuugcucuug

SEQ ID NO: 896900 - RNA, 19 nt, Homo sapiens
  misc_RNA (1)...(19): siRNA sense strand
acauccagcuaccaucaug

SEQ ID NO: 896901 - RNA, 19 nt, Homo sapiens
  misc_RNA (1)...(19): siRNA sense strand
gggaaggugccugcaguau

SEQ ID NO: 896902 - RNA, 19 nt, Homo sapiens
  misc_RNA (1)...(19): siRNA sense strand
cugagaacaucccagaucu

SEQ ID NO: 896903 - RNA, 19 nt, Homo sapiens
  misc_RNA (1)...(19): siRNA sense strand
gggaggauucagggcuuua

SEQ ID NO: 896904 - RNA, 19 nt, Homo sapiens
  misc_RNA (1)...(19): siRNA sense strand
ccaugcagcaguacaaucu

SEQ ID NO: 896905 - RNA, 19 nt, Homo sapiens
  misc_RNA (1)...(19): siRNA sense strand
caucuucuugcucuuggua

SEQ ID NO: 896906 - RNA, 19 nt, Homo sapiens
  misc_RNA (1)...(19): siRNA sense strand
acuuauacauuccaugaag

SEQ ID NO: 896907 - RNA, 19 nt, Homo sapiens
  misc_RNA (1)...(19): siRNA sense strand
ccagcuauucccugcauau

SEQ ID NO: 896908 - RNA, 19 nt, Homo sapiens
  misc_RNA (1)...(19): siRNA sense strand
gauagcacuuauacauucc

SEQ ID NO: 896909 - RNA, 19 nt, Homo sapiens
  misc_RNA (1)...(19): siRNA sense strand
gggauugcucaucuucuug

SEQ ID NO: 896910 - RNA, 19 nt, Homo sapiens
  misc_RNA (1)...(19): siRNA sense strand
gacagugcccucuccuaca

SEQ ID NO: 896911 - RNA, 19 nt, Homo sapiens
  misc_RNA (1)...(19): siRNA sense strand
ccugagaacaucccagauc

SEQ ID NO: 896912 - RNA, 19 nt, Homo sapiens
  misc_RNA (1)...(19): siRNA sense strand
augcagcaguacaaucuau

SEQ ID NO: 896913 - RNA, 19 nt, Homo sapiens
  misc_RNA (1)...(19): siRNA sense strand
aaauaccaccagaugaaga

SEQ ID NO: 896914 - RNA, 19 nt, Homo sapiens
  misc_RNA (1)...(19): siRNA sense strand
ccagaaaagacacaaaaug

SEQ ID NO: 896915 - RNA, 19 nt, Homo sapiens
  misc_RNA (1)...(19): siRNA sense strand
gcagauccuaacuaugcuu

SEQ ID NO: 896916 - RNA, 19 nt, Homo sapiens
  misc_RNA (1)...(19): siRNA sense strand
uggaaauaccaccagauga

SEQ ID NO: 896917 - RNA, 19 nt, Homo sapiens
  misc_RNA (1)...(19): siRNA sense strand
gaagaaaguuugccauuua

SEQ ID NO: 896918 - RNA, 19 nt, Homo sapiens
  misc_RNA (1)...(19): siRNA sense strand
ggaaacagaaggccucuua

SEQ ID NO: 896919 - RNA, 19 nt, Homo sapiens
  misc_RNA (1)...(19): siRNA sense strand
gaaauuggaggaaauauug

SEQ ID NO: 896920 - RNA, 19 nt, Homo sapiens
  misc_RNA (1)...(19): siRNA sense strand
gaacagcgagaauuuguaa

SEQ ID NO: 896921 - RNA, 19 nt, Homo sapiens
  misc_RNA (1)...(19): siRNA sense strand
gaagaagaguggcuuaaag

SEQ ID NO: 896922 - RNA, 19 nt, Homo sapiens
  misc_RNA (1)...(19): siRNA sense strand
gaagagagagguuuggaaa

SEQ ID NO: 896923 - RNA, 19 nt, Homo sapiens
  misc_RNA (1)...(19): siRNA sense strand
acacuuacaugaaggauuu

SEQ ID NO: 896924 - RNA, 19 nt, Homo sapiens
  misc_RNA (1)...(19): siRNA sense strand
aaacugauuucucgaauug

SEQ ID NO: 896925 - RNA, 19 nt, Homo sapiens
  misc_RNA (1)...(19): siRNA sense strand
gcaaauaccaugcacuuau

SEQ ID NO: 896926 - RNA, 19 nt, Homo sapiens
  misc_RNA (1)...(19): siRNA sense strand
aaagagccaugaagaaauu

SEQ ID NO: 896927 - RNA, 19 nt, Homo sapiens
  misc_RNA (1)...(19): siRNA sense strand
caauacagcuaacugaaga

SEQ ID NO: 896928 - RNA, 19 nt, Homo sapiens
  misc_RNA (1)...(19): siRNA sense strand
guauugagcugaaacaaca

SEQ ID NO: 896929 - RNA, 19 nt, Homo sapiens
  misc_RNA (1)...(19): siRNA sense strand
uauaucagcuuaacccaaa

SEQ ID NO: 896930 - RNA, 19 nt, Homo sapiens
  misc_RNA (1)...(19): siRNA sense strand
ggaaagcaccaccaucaaa

SEQ ID NO: 896931 - RNA, 19 nt, Homo sapiens
  misc_RNA (1)...(19): siRNA sense strand
ugaagaaaguuugccauuu

SEQ ID NO: 896932 - RNA, 19 nt, Homo sapiens
  misc_RNA (1)...(19): siRNA sense strand
ggacaauucccaaguuuau

SEQ ID NO: 896933 - RNA, 19 nt, Homo sapiens
  misc_RNA (1)...(19): siRNA sense strand
gccaagaacuagaagcaaa

SEQ ID NO: 896934 - RNA, 19 nt, Homo sapiens
  misc_RNA (1)...(19): siRNA sense strand
ugaagaaauugcugaagaa

SEQ ID NO: 896935 - RNA, 19 nt, Homo sapiens
  misc_RNA (1)...(19): siRNA sense strand
gaauuucuccaaagaguaa

SEQ ID NO: 896936 - RNA, 19 nt, Homo sapiens
  misc_RNA (1)...(19): siRNA sense strand
gcgaauacccuugaucuuu

SEQ ID NO: 896937 - RNA, 19 nt, Homo sapiens
  misc_RNA (1)...(19): siRNA sense strand
cgaauacccuugaucuuuc

SEQ ID NO: 896938 - RNA, 19 nt, Homo sapiens
  misc_RNA (1)...(19): siRNA sense strand
aaacuucuguggacaauuc

SEQ ID NO: 896939 - RNA, 19 nt, Homo sapiens
  misc_RNA (1)...(19): siRNA sense strand
ugacagcgcuauuagaaca

SEQ ID NO: 896940 - RNA, 19 nt, Homo sapiens
  misc_RNA (1)...(19): siRNA sense strand
acagcuaacugaagaacua

SEQ ID NO: 896941 - RNA, 19 nt, Homo sapiens
  misc_RNA (1)...(19): siRNA sense strand
cauauuugcucaacagaga

SEQ ID NO: 896942 - RNA, 19 nt, Homo sapiens
  misc_RNA (1)...(19): siRNA sense strand
caagauaagaguacaaaug

SEQ ID NO: 896943 - RNA, 19 nt, Homo sapiens
  misc_RNA (1)...(19): siRNA sense strand
gaaucgcagucacuuagaa

SEQ ID NO: 896944 - RNA, 19 nt, Homo sapiens
  misc_RNA (1)...(19): siRNA sense strand
gcaccaccaucaaaguuau

SEQ ID NO: 896945 - RNA, 19 nt, Homo sapiens
  misc_RNA (1)...(19): siRNA sense strand
gauaagaguacaaaugaug

SEQ ID NO: 896946 - RNA, 19 nt, Homo sapiens
  misc_RNA (1)...(19): siRNA sense strand
aaacaaauaccaaggaaga

SEQ ID NO: 896947 - RNA, 19 nt, Homo sapiens
  misc_RNA (1)...(19): siRNA sense strand
accaugcacuuauugauua

SEQ ID NO: 896948 - RNA, 19 nt, Homo sapiens
  misc_RNA (1)...(19): siRNA sense strand
ggaagaagaguggcuuaaa

SEQ ID NO: 896949 - RNA, 19 nt, Homo sapiens
  misc_RNA (1)...(19): siRNA sense strand
gaugaugacacuuacauga

SEQ ID NO: 896950 - RNA, 19 nt, Homo sapiens
  misc_RNA (1)...(19): siRNA sense strand
aaacaaacaguaccagauu

SEQ ID NO: 896951 - RNA, 19 nt, Homo sapiens
  misc_RNA (1)...(19): siRNA sense strand
ugacugcccucuaugaugu

SEQ ID NO: 896952 - RNA, 19 nt, Homo sapiens
  misc_RNA (1)...(19): siRNA sense strand
gaaaacaaauaccaaggaa

SEQ ID NO: 896953 - RNA, 19 nt, Homo sapiens
  misc_RNA (1)...(19): siRNA sense strand
gcaaacagggacacacuga

SEQ ID NO: 896954 - RNA, 19 nt, Homo sapiens
  misc_RNA (1)...(19): siRNA sense strand
gaagaaauugcugaagaaa

SEQ ID NO: 896955 - RNA, 19 nt, Homo sapiens
  misc_RNA (1)...(19): siRNA sense strand
cacauuaccuaguuucaga

SEQ ID NO: 896956 - RNA, 19 nt, Homo sapiens
  misc_RNA (1)...(19): siRNA sense strand
gaauacccuugaucuuuca

SEQ ID NO: 896957 - RNA, 19 nt, Homo sapiens
  misc_RNA (1)...(19): siRNA sense strand
ggaaugcgaauacccuuga

SEQ ID NO: 896958 - RNA, 19 nt, Homo sapiens
  misc_RNA (1)...(19): siRNA sense strand
gaugccacauuaccuaguu

SEQ ID NO: 896959 - RNA, 19 nt, Homo sapiens
  misc_RNA (1)...(19): siRNA sense strand
ugaagaaaauggcuuauga

SEQ ID NO: 896960 - RNA, 19 nt, Homo sapiens
  misc_RNA (1)...(19): siRNA sense strand
gaaagcaccaccaucaaag

SEQ ID NO: 896961 - RNA, 19 nt, Homo sapiens
  misc_RNA (1)...(19): siRNA sense strand
uauggaagacuauuggaua

SEQ ID NO: 896962 - RNA, 19 nt, Homo sapiens
  misc_RNA (1)...(19): siRNA sense strand
gaugaugccacauuaccua

SEQ ID NO: 896963 - RNA, 19 nt, Homo sapiens
  misc_RNA (1)...(19): siRNA sense strand
gagcaagcacucaaucaga

SEQ ID NO: 896964 - RNA, 19 nt, Homo sapiens
  misc_RNA (1)...(19): siRNA sense strand
gauauggccaguacacuau

SEQ ID NO: 896965 - RNA, 19 nt, Homo sapiens
  misc_RNA (1)...(19): siRNA sense strand
guggacaauucccaaguuu

SEQ ID NO: 896966 - RNA, 19 nt, Homo sapiens
  misc_RNA (1)...(19): siRNA sense strand
caauuucccaggauucuuu

SEQ ID NO: 896967 - RNA, 19 nt, Homo sapiens
  misc_RNA (1)...(19): siRNA sense strand
uaaagucaaagccauugua

SEQ ID NO: 896968 - RNA, 19 nt, Homo sapiens
  misc_RNA (1)...(19): siRNA sense strand
guaugaaauuggaggaaau

SEQ ID NO: 896969 - RNA, 19 nt, Homo sapiens
  misc_RNA (1)...(19): siRNA sense strand
cgaggcaucuaaccuuguu

SEQ ID NO: 896970 - RNA, 19 nt, Homo sapiens
  misc_RNA (1)...(19): siRNA sense strand
uaugauguauuggguauug

SEQ ID NO: 896971 - RNA, 19 nt, Homo sapiens
  misc_RNA (1)...(19): siRNA sense strand
ugacgucagagacauauuu

SEQ ID NO: 896972 - RNA, 19 nt, Homo sapiens
  misc_RNA (1)...(19): siRNA sense strand
ggauugaaguccagugaac

SEQ ID NO: 896973 - RNA, 19 nt, Homo sapiens
  misc_RNA (1)...(19): siRNA sense strand
aggcgaugaugccacauua

SEQ ID NO: 896974 - RNA, 19 nt, Homo sapiens
  misc_RNA (1)...(19): siRNA sense strand
gcagucacuuagaacaaau

SEQ ID NO: 896975 - RNA, 19 nt, Homo sapiens
  misc_RNA (1)...(19): siRNA sense strand
agaggugguuguugucaaa

SEQ ID NO: 896976 - RNA, 19 nt, Homo sapiens
  misc_RNA (1)...(19): siRNA sense strand
gcaauacagcuaacugaag

SEQ ID NO: 896977 - RNA, 19 nt, Homo sapiens
  misc_RNA (1)...(19): siRNA sense strand
agaacaagaucagaggaaa

SEQ ID NO: 896978 - RNA, 19 nt, Homo sapiens
  misc_RNA (1)...(19): siRNA sense strand
caggaaagcaccaccauca

SEQ ID NO: 896979 - RNA, 19 nt, Homo sapiens
  misc_RNA (1)...(19): siRNA sense strand
agaaagagagcuccaagga

SEQ ID NO: 896980 - RNA, 19 nt, Homo sapiens
  misc_RNA (1)...(19): siRNA sense strand
caagaaaucuagugaaaac

SEQ ID NO: 896981 - RNA, 19 nt, Homo sapiens
  misc_RNA (1)...(19): siRNA sense strand
cuccaaagaguaauagaua

SEQ ID NO: 896982 - RNA, 19 nt, Homo sapiens
  misc_RNA (1)...(19): siRNA sense strand
ccaagaagcagcaacuaca

SEQ ID NO: 896983 - RNA, 19 nt, Homo sapiens
  misc_RNA (1)...(19): siRNA sense strand
gagcugccauuagaaucaa

SEQ ID NO: 896984 - RNA, 19 nt, Homo sapiens
  misc_RNA (1)...(19): siRNA sense strand
gaggaaaguaccaggaaug

SEQ ID NO: 896985 - RNA, 19 nt, Homo sapiens
  misc_RNA (1)...(19): siRNA sense strand
gcaagcacucaaucagaaa

SEQ ID NO: 896986 - RNA, 19 nt, Homo sapiens
  misc_RNA (1)...(19): siRNA sense strand
ugagcugacugcccucuau

SEQ ID NO: 896987 - RNA, 19 nt, Homo sapiens
  misc_RNA (1)...(19): siRNA sense strand
guacuugccagguuucuca

SEQ ID NO: 896988 - RNA, 19 nt, Homo sapiens
  misc_RNA (1)...(19): siRNA sense strand
uggaugaacuaucuaugga

SEQ ID NO: 896989 - RNA, 19 nt, Homo sapiens
  misc_RNA (1)...(19): siRNA sense strand
ugauguacuugccagguuu

SEQ ID NO: 896990 - RNA, 19 nt, Homo sapiens
  misc_RNA (1)...(19): siRNA sense strand
augaagaaauugcugaaga

SEQ ID NO: 896991 - RNA, 19 nt, Homo sapiens
  misc_RNA (1)...(19): siRNA sense strand
gaauguagcaauggucaug

SEQ ID NO: 896992 - RNA, 19 nt, Homo sapiens
  misc_RNA (1)...(19): siRNA sense strand
gaauugaagagagagguuu

SEQ ID NO: 896993 - RNA, 19 nt, Homo sapiens
  misc_RNA (1)...(19): siRNA sense strand
gaacaagaucagaggaaag

SEQ ID NO: 896994 - RNA, 19 nt, Homo sapiens
  misc_RNA (1)...(19): siRNA sense strand
agacauauuugcucaacag

SEQ ID NO: 896995 - RNA, 19 nt, Homo sapiens
  misc_RNA (1)...(19): siRNA sense strand
gaacgcugccuugaugaug

SEQ ID NO: 896996 - RNA, 19 nt, Homo sapiens
  misc_RNA (1)...(19): siRNA sense strand
gugauguacuugccagguu

SEQ ID NO: 896997 - RNA, 19 nt, Homo sapiens
  misc_RNA (1)...(19): siRNA sense strand
ccaugcacuuauugauuaa

SEQ ID NO: 896998 - RNA, 19 nt, Homo sapiens
  misc_RNA (1)...(19): siRNA sense strand
cagcaaauaccaugcacuu

SEQ ID NO: 896999 - RNA, 19 nt, Homo sapiens
  misc_RNA (1)...(19): siRNA sense strand
ccauuagaaucaagaaucu

SEQ ID NO: 897000 - RNA, 19 nt, Homo sapiens
  misc_RNA (1)...(19): siRNA sense strand
ggagcugccauuagaauca

SEQ ID NO: 897001 - RNA, 19 nt, Homo sapiens
  misc_RNA (1)...(19): siRNA sense strand
gaagagcaaaggcgaugau

SEQ ID NO: 897002 - RNA, 19 nt, Homo sapiens
  misc_RNA (1)...(19): siRNA sense strand
ggauuuauaucagcuuaac

SEQ ID NO: 897003 - RNA, 19 nt, Homo sapiens
  misc_RNA (1)...(19): siRNA sense strand
ggauagaacuagaaaacau

SEQ ID NO: 897004 - RNA, 19 nt, Homo sapiens
  misc_RNA (1)...(19): siRNA sense strand
caugaaggauuuauaucag

SEQ ID NO: 897005 - RNA, 19 nt, Homo sapiens
  misc_RNA (1)...(19): siRNA sense strand
uacaaaugaugcugacguu

SEQ ID NO: 897006 - RNA, 19 nt, Homo sapiens
  misc_RNA (1)...(19): siRNA sense strand
gaaaagcaagauaagagua

SEQ ID NO: 897007 - RNA, 19 nt, Homo sapiens
  misc_RNA (1)...(19): siRNA sense strand
gaagcaaaguuuuaugaag

SEQ ID NO: 897008 - RNA, 19 nt, Homo sapiens
  misc_RNA (1)...(19): siRNA sense strand
uccagaaucuuccaaccaa

SEQ ID NO: 897009 - RNA, 19 nt, Homo sapiens
  misc_RNA (1)...(19): siRNA sense strand
agucaugaauguagcaaug

SEQ ID NO: 897010 - RNA, 19 nt, Homo sapiens
  misc_RNA (1)...(19): siRNA sense strand
gcuuugaaccuucuuguca

SEQ ID NO: 897011 - RNA, 19 nt, Homo sapiens
  misc_RNA (1)...(19): siRNA sense strand
agcaagcacucaaucagaa

SEQ ID NO: 897012 - RNA, 19 nt, Homo sapiens
  misc_RNA (1)...(19): siRNA sense strand
ugaugacacuuacaugaag

SEQ ID NO: 897013 - RNA, 19 nt, Homo sapiens
  misc_RNA (1)...(19): siRNA sense strand
uaaaagagccaugaagaaa

SEQ ID NO: 897014 - RNA, 19 nt, Homo sapiens
  misc_RNA (1)...(19): siRNA sense strand
gauaaaagagccaugaaga

SEQ ID NO: 897015 - RNA, 19 nt, Homo sapiens
  misc_RNA (1)...(19): siRNA sense strand
cuucuugaauuucuccaaa

SEQ ID NO: 897016 - RNA, 19 nt, Homo sapiens
  misc_RNA (1)...(19): siRNA sense strand
uguaugaaauuggaggaaa

SEQ ID NO: 897017 - RNA, 19 nt, Homo sapiens
  misc_RNA (1)...(19): siRNA sense strand
gaagagacaugagauggua

SEQ ID NO: 897018 - RNA, 19 nt, Homo sapiens
  misc_RNA (1)...(19): siRNA sense strand
gaggagauaugauaaaugu

SEQ ID NO: 897019 - RNA, 19 nt, Homo sapiens
  misc_RNA (1)...(19): siRNA sense strand
caaaggagguuauaaugga

SEQ ID NO: 897020 - RNA, 19 nt, Homo sapiens
  misc_RNA (1)...(19): siRNA sense strand
aaagagcccuguaauauga

SEQ ID NO: 897021 - RNA, 19 nt, Homo sapiens
  misc_RNA (1)...(19): siRNA sense strand
cuacaaaugugaagaaugu

SEQ ID NO: 897022 - RNA, 19 nt, Homo sapiens
  misc_RNA (1)...(19): siRNA sense strand
cuacaaaugugaagaaugu

SEQ ID NO: 897023 - RNA, 19 nt, Homo sapiens
  misc_RNA (1)...(19): siRNA sense strand
ggacuuaaccaaugucuga

SEQ ID NO: 897024 - RNA, 19 nt, Homo sapiens
  misc_RNA (1)...(19): siRNA sense strand
ggaugugacuguagaauuc

SEQ ID NO: 897025 - RNA, 19 nt, Homo sapiens
  misc_RNA (1)...(19): siRNA sense strand
gagaaacccuuccaaugug

SEQ ID NO: 897026 - RNA, 19 nt, Homo sapiens
  misc_RNA (1)...(19): siRNA sense strand
gagagaaacccuacaaaug

SEQ ID NO: 897027 - RNA, 19 nt, Homo sapiens
  misc_RNA (1)...(19): siRNA sense strand
gagagaaacccuacaaaug

SEQ ID NO: 897028 - RNA, 19 nt, Homo sapiens
  misc_RNA (1)...(19): siRNA sense strand
gagagaaacccuacaaaug

SEQ ID NO: 897029 - RNA, 19 nt, Homo sapiens
  misc_RNA (1)...(19): siRNA sense strand
gagagaaacccuacaaaug

SEQ ID NO: 897030 - RNA, 19 nt, Homo sapiens
  misc_RNA (1)...(19): siRNA sense strand
gagagaaacccuacaaaug

SEQ ID NO: 897031 - RNA, 19 nt, Homo sapiens
  misc_RNA (1)...(19): siRNA sense strand
gagagaaacccuacaaaug

SEQ ID NO: 897032 - RNA, 19 nt, Homo sapiens
  misc_RNA (1)...(19): siRNA sense strand
ucacaaccuucucaacaua

SEQ ID NO: 897033 - RNA, 19 nt, Homo sapiens
  misc_RNA (1)...(19): siRNA sense strand
ccucaaaccuuacuaaaca

SEQ ID NO: 897034 - RNA, 19 nt, Homo sapiens
  misc_RNA (1)...(19): siRNA sense strand
ggagauaugauaaauguga

SEQ ID NO: 897035 - RNA, 19 nt, Homo sapiens
  misc_RNA (1)...(19): siRNA sense strand
gaaaagagcccuguaauau

SEQ ID NO: 897036 - RNA, 19 nt, Homo sapiens
  misc_RNA (1)...(19): siRNA sense strand
uaaccggucuucacacauu

SEQ ID NO: 897037 - RNA, 19 nt, Homo sapiens
  misc_RNA (1)...(19): siRNA sense strand
gggagaagcccuacaaaug

SEQ ID NO: 897038 - RNA, 19 nt, Homo sapiens
  misc_RNA (1)...(19): siRNA sense strand
gagagaaggccuacaaaug

SEQ ID NO: 897039 - RNA, 19 nt, Homo sapiens
  misc_RNA (1)...(19): siRNA sense strand
gagaaacccuacaaaugug

SEQ ID NO: 897040 - RNA, 19 nt, Homo sapiens
  misc_RNA (1)...(19): siRNA sense strand
gagaaacccuacaaaugug

SEQ ID NO: 897041 - RNA, 19 nt, Homo sapiens
  misc_RNA (1)...(19): siRNA sense strand
ggagaagcccuacaaaugu

SEQ ID NO: 897042 - RNA, 19 nt, Homo sapiens
  misc_RNA (1)...(19): siRNA sense strand
cuacaaaugugaagagugu

SEQ ID NO: 897043 - RNA, 19 nt, Homo sapiens
  misc_RNA (1)...(19): siRNA sense strand
gagaaacccuacaaaugug

SEQ ID NO: 897044 - RNA, 19 nt, Homo sapiens
  misc_RNA (1)...(19): siRNA sense strand
cuacaaaugugaagagugu

SEQ ID NO: 897045 - RNA, 19 nt, Homo sapiens
  misc_RNA (1)...(19): siRNA sense strand
gagaaacccuacaaaugug

SEQ ID NO: 897046 - RNA, 19 nt, Homo sapiens
  misc_RNA (1)...(19): siRNA sense strand
cuacaaaugugaagagugu

SEQ ID NO: 897047 - RNA, 19 nt, Homo sapiens
  misc_RNA (1)...(19): siRNA sense strand
gagaaacccuacaaaugug

SEQ ID NO: 897048 - RNA, 19 nt, Homo sapiens
  misc_RNA (1)...(19): siRNA sense strand
cuacaaaugugaagagugu

SEQ ID NO: 897049 - RNA, 19 nt, Homo sapiens
  misc_RNA (1)...(19): siRNA sense strand
gagaaacccuacaaaugug

SEQ ID NO: 897050 - RNA, 19 nt, Homo sapiens
  misc_RNA (1)...(19): siRNA sense strand
gcacagcagaauuuauaua

SEQ ID NO: 897051 - RNA, 19 nt, Homo sapiens
  misc_RNA (1)...(19): siRNA sense strand
cuacaaaugugaagagugu

SEQ ID NO: 897052 - RNA, 19 nt, Homo sapiens
  misc_RNA (1)...(19): siRNA sense strand
gagaaacccuacaaaugug

SEQ ID NO: 897053 - RNA, 19 nt, Homo sapiens
  misc_RNA (1)...(19): siRNA sense strand
cuacaaaugugaagagugu

SEQ ID NO: 897054 - RNA, 19 nt, Homo sapiens
  misc_RNA (1)...(19): siRNA sense strand
gagagaaacccuuccaaug

SEQ ID NO: 897055 - RNA, 19 nt, Homo sapiens
  misc_RNA (1)...(19): siRNA sense strand
gagaagcccuacaaaugug

SEQ ID NO: 897056 - RNA, 19 nt, Homo sapiens
  misc_RNA (1)...(19): siRNA sense strand
gagaaggccuacaaaugug

SEQ ID NO: 897057 - RNA, 19 nt, Homo sapiens
  misc_RNA (1)...(19): siRNA sense strand
ggagagaaacccuacaaau

SEQ ID NO: 897058 - RNA, 19 nt, Homo sapiens
  misc_RNA (1)...(19): siRNA sense strand
ggagagaaacccuacaaau

SEQ ID NO: 897059 - RNA, 19 nt, Homo sapiens
  misc_RNA (1)...(19): siRNA sense strand
ggagagaaacccuacaaau

SEQ ID NO: 897060 - RNA, 19 nt, Homo sapiens
  misc_RNA (1)...(19): siRNA sense strand
ggagagaaacccuacaaau

SEQ ID NO: 897061 - RNA, 19 nt, Homo sapiens
  misc_RNA (1)...(19): siRNA sense strand
ggagagaaacccuacaaau

SEQ ID NO: 897062 - RNA, 19 nt, Homo sapiens
  misc_RNA (1)...(19): siRNA sense strand
guacauaagagaauucaug

SEQ ID NO: 897063 - RNA, 19 nt, Homo sapiens
  misc_RNA (1)...(19): siRNA sense strand
gagagaaccccaacaaaua

SEQ ID NO: 897064 - RNA, 19 nt, Homo sapiens
  misc_RNA (1)...(19): siRNA sense strand
ggaaaagagcccuguaaua

SEQ ID NO: 897065 - RNA, 19 nt, Homo sapiens
  misc_RNA (1)...(19): siRNA sense strand
uggcaaagcuuguaaccau

SEQ ID NO: 897066 - RNA, 19 nt, Homo sapiens
  misc_RNA (1)...(19): siRNA sense strand
agagaaacccuacaaaugu

SEQ ID NO: 897067 - RNA, 19 nt, Homo sapiens
  misc_RNA (1)...(19): siRNA sense strand
aaccauuccucaaaccuua

SEQ ID NO: 897068 - RNA, 19 nt, Homo sapiens
  misc_RNA (1)...(19): siRNA sense strand
agagaaacccuacaaaugu

SEQ ID NO: 897069 - RNA, 19 nt, Homo sapiens
  misc_RNA (1)...(19): siRNA sense strand
uaaccagucuucacaccuu

SEQ ID NO: 897070 - RNA, 19 nt, Homo sapiens
  misc_RNA (1)...(19): siRNA sense strand
agagaaacccuacaaaugu

SEQ ID NO: 897071 - RNA, 19 nt, Homo sapiens
  misc_RNA (1)...(19): siRNA sense strand
uaaccggucuucauaccuu

SEQ ID NO: 897072 - RNA, 19 nt, Homo sapiens
  misc_RNA (1)...(19): siRNA sense strand
agagaaacccuacaaaugu

SEQ ID NO: 897073 - RNA, 19 nt, Homo sapiens
  misc_RNA (1)...(19): siRNA sense strand
agagaaacccuacaaaugu

SEQ ID NO: 897074 - RNA, 19 nt, Homo sapiens
  misc_RNA (1)...(19): siRNA sense strand
agagaaacccuacaaaugu

SEQ ID NO: 897075 - RNA, 19 nt, Homo sapiens
  misc_RNA (1)...(19): siRNA sense strand
agagaaacccuacaaaugu

SEQ ID NO: 897076 - RNA, 19 nt, Homo sapiens
  misc_RNA (1)...(19): siRNA sense strand
ggucuucacaccuuacuaa

SEQ ID NO: 897077 - RNA, 19 nt, Homo sapiens
  misc_RNA (1)...(19): siRNA sense strand
caaaugugaugaauauugc

SEQ ID NO: 897078 - RNA, 19 nt, Homo sapiens
  misc_RNA (1)...(19): siRNA sense strand
gcaaaggagguuauaaugg

SEQ ID NO: 897079 - RNA, 19 nt, Homo sapiens
  misc_RNA (1)...(19): siRNA sense strand
ggagagaaacccuuccaau

SEQ ID NO: 897080 - RNA, 19 nt, Homo sapiens
  misc_RNA (1)...(19): siRNA sense strand
auaauggacuuaaccaaug

SEQ ID NO: 897081 - RNA, 19 nt, Homo sapiens
  misc_RNA (1)...(19): siRNA sense strand
uaaccggucuucacaccuu

SEQ ID NO: 897082 - RNA, 19 nt, Homo sapiens
  misc_RNA (1)...(19): siRNA sense strand
uaaccggucuucacaccuu

SEQ ID NO: 897083 - RNA, 19 nt, Homo sapiens
  misc_RNA (1)...(19): siRNA sense strand
uaaccggucuucacaccuu

SEQ ID NO: 897084 - RNA, 19 nt, Homo sapiens
  misc_RNA (1)...(19): siRNA sense strand
agagaaacccuuccaaugu

SEQ ID NO: 897085 - RNA, 19 nt, Homo sapiens
  misc_RNA (1)...(19): siRNA sense strand
cuucacaccuuacuaaaca

SEQ ID NO: 897086 - RNA, 19 nt, Homo sapiens
  misc_RNA (1)...(19): siRNA sense strand
agagaaggccuacaaaugu

SEQ ID NO: 897087 - RNA, 19 nt, Homo sapiens
  misc_RNA (1)...(19): siRNA sense strand
guucucauauugcugaaga

SEQ ID NO: 897088 - RNA, 19 nt, Homo sapiens
  misc_RNA (1)...(19): siRNA sense strand
aauacguucucauaccuua

SEQ ID NO: 897089 - RNA, 19 nt, Homo sapiens
  misc_RNA (1)...(19): siRNA sense strand
auacugaggagauaugaua

SEQ ID NO: 897090 - RNA, 19 nt, Homo sapiens
  misc_RNA (1)...(19): siRNA sense strand
cuuaaccaaugucugauaa

SEQ ID NO: 897091 - RNA, 19 nt, Homo sapiens
  misc_RNA (1)...(19): siRNA sense strand
ucucauaccuuaccguaca

SEQ ID NO: 897092 - RNA, 19 nt, Homo sapiens
  misc_RNA (1)...(19): siRNA sense strand
acacauuacucaacauaag

SEQ ID NO: 897093 - RNA, 19 nt, Homo sapiens
  misc_RNA (1)...(19): siRNA sense strand
gcccagagcgagacauaaa

SEQ ID NO: 897094 - RNA, 19 nt, Homo sapiens
  misc_RNA (1)...(19): siRNA sense strand
acaccuuacucaacauaaa

SEQ ID NO: 897095 - RNA, 19 nt, Homo sapiens
  misc_RNA (1)...(19): siRNA sense strand
aagagaaacccuacaaaug

SEQ ID NO: 897096 - RNA, 19 nt, Homo sapiens
  misc_RNA (1)...(19): siRNA sense strand
aaagagaaacccuacaaau

SEQ ID NO: 897097 - RNA, 19 nt, Homo sapiens
  misc_RNA (1)...(19): siRNA sense strand
cauaagagaauucauacug

SEQ ID NO: 897098 - RNA, 19 nt, Homo sapiens
  misc_RNA (1)...(19): siRNA sense strand
uuacuacccuuacucaaca

SEQ ID NO: 897099 - RNA, 19 nt, Homo sapiens
  misc_RNA (1)...(19): siRNA sense strand
ucauauugcugaagaccuu

SEQ ID NO: 897100 - RNA, 19 nt, Homo sapiens
  misc_RNA (1)...(19): siRNA sense strand
gcaaagcuuguaaccauuc

SEQ ID NO: 897101 - RNA, 19 nt, Homo sapiens
  misc_RNA (1)...(19): siRNA sense strand
ucacacauuacucaacaua

SEQ ID NO: 897102 - RNA, 19 nt, Homo sapiens
  misc_RNA (1)...(19): siRNA sense strand
gacauaagauaagacauac

SEQ ID NO: 897103 - RNA, 19 nt, Homo sapiens
  misc_RNA (1)...(19): siRNA sense strand
ggcaaagcuuguaaccauu

SEQ ID NO: 897104 - RNA, 19 nt, Homo sapiens
  misc_RNA (1)...(19): siRNA sense strand
uaaagagaaacccuacaaa

SEQ ID NO: 897105 - RNA, 19 nt, Homo sapiens
  misc_RNA (1)...(19): siRNA sense strand
gauucauacuggagagaaa

SEQ ID NO: 897106 - RNA, 19 nt, Homo sapiens
  misc_RNA (1)...(19): siRNA sense strand
agaaagggcuguaaaagug

SEQ ID NO: 897107 - RNA, 19 nt, Homo sapiens
  misc_RNA (1)...(19): siRNA sense strand
gauaagacauacugaaaag

SEQ ID NO: 897108 - RNA, 19 nt, Homo sapiens
  misc_RNA (1)...(19): siRNA sense strand
agaaacccuuccaauguga

SEQ ID NO: 897109 - RNA, 19 nt, Homo sapiens
  misc_RNA (1)...(19): siRNA sense strand
ugaagaauguggcaaagcu

SEQ ID NO: 897110 - RNA, 19 nt, Homo sapiens
  misc_RNA (1)...(19): siRNA sense strand
gugcaaaggagguuauaau

SEQ ID NO: 897111 - RNA, 19 nt, Homo sapiens
  misc_RNA (1)...(19): siRNA sense strand
gaauguggcaaagcuugua

SEQ ID NO: 897112 - RNA, 19 nt, Homo sapiens
  misc_RNA (1)...(19): siRNA sense strand
gaugaauauugcaaagcuu

SEQ ID NO: 897113 - RNA, 19 nt, Homo sapiens
  misc_RNA (1)...(19): siRNA sense strand
gauguuagagaacuacaga

SEQ ID NO: 897114 - RNA, 19 nt, Homo sapiens
  misc_RNA (1)...(19): siRNA sense strand
uaauggacuuaaccaaugu

SEQ ID NO: 897115 - RNA, 19 nt, Homo sapiens
  misc_RNA (1)...(19): siRNA sense strand
cuucacaccuuacucaaca

SEQ ID NO: 897116 - RNA, 19 nt, Homo sapiens
  misc_RNA (1)...(19): siRNA sense strand
cuucacaccuuacucaaca

SEQ ID NO: 897117 - RNA, 19 nt, Homo sapiens
  misc_RNA (1)...(19): siRNA sense strand
gaaauacgcuuaguugaug

SEQ ID NO: 897118 - RNA, 19 nt, Homo sapiens
  misc_RNA (1)...(19): siRNA sense strand
ggacugaaauuacaccaaa

SEQ ID NO: 897119 - RNA, 19 nt, Homo sapiens
  misc_RNA (1)...(19): siRNA sense strand
gaagaaauacgcuuaguug

SEQ ID NO: 897120 - RNA, 19 nt, Homo sapiens
  misc_RNA (1)...(19): siRNA sense strand
ugaaagaggacugaaauua

SEQ ID NO: 897121 - RNA, 19 nt, Homo sapiens
  misc_RNA (1)...(19): siRNA sense strand
guacuaauguuucaaccaa

SEQ ID NO: 897122 - RNA, 19 nt, Homo sapiens
  misc_RNA (1)...(19): siRNA sense strand
gaacucuuaugcuguacua

SEQ ID NO: 897123 - RNA, 19 nt, Homo sapiens
  misc_RNA (1)...(19): siRNA sense strand
gcaagucaguucucauuuc

SEQ ID NO: 897124 - RNA, 19 nt, Homo sapiens
  misc_RNA (1)...(19): siRNA sense strand
gcugagaagugccuugauu

SEQ ID NO: 897125 - RNA, 19 nt, Homo sapiens
  misc_RNA (1)...(19): siRNA sense strand
gaagugccuugauuuccua

SEQ ID NO: 897126 - RNA, 19 nt, Homo sapiens
  misc_RNA (1)...(19): siRNA sense strand
caugaacucuuaugcugua

SEQ ID NO: 897127 - RNA, 19 nt, Homo sapiens
  misc_RNA (1)...(19): siRNA sense strand
gaaauaagugccugcaguu

SEQ ID NO: 897128 - RNA, 19 nt, Homo sapiens
  misc_RNA (1)...(19): siRNA sense strand
ggagaaaagugucacaaaa

SEQ ID NO: 897129 - RNA, 19 nt, Homo sapiens
  misc_RNA (1)...(19): siRNA sense strand
gaaagaggacugaaauuac

SEQ ID NO: 897130 - RNA, 19 nt, Homo sapiens
  misc_RNA (1)...(19): siRNA sense strand
gaucugaggaggaaacgua

SEQ ID NO: 897131 - RNA, 19 nt, Homo sapiens
  misc_RNA (1)...(19): siRNA sense strand
ccagagauguccagaagau

SEQ ID NO: 897132 - RNA, 19 nt, Homo sapiens
  misc_RNA (1)...(19): siRNA sense strand
caacaucacccuccgagaa

SEQ ID NO: 897133 - RNA, 19 nt, Homo sapiens
  misc_RNA (1)...(19): siRNA sense strand
aaagaggacugaaauuaca

SEQ ID NO: 897134 - RNA, 19 nt, Homo sapiens
  misc_RNA (1)...(19): siRNA sense strand
gagcaagucaguucucauu

SEQ ID NO: 897135 - RNA, 19 nt, Homo sapiens
  misc_RNA (1)...(19): siRNA sense strand
gcaguuacuuggcaaucuu

SEQ ID NO: 897136 - RNA, 19 nt, Homo sapiens
  misc_RNA (1)...(19): siRNA sense strand
gcugugaacuugauugagu

SEQ ID NO: 897137 - RNA, 19 nt, Homo sapiens
  misc_RNA (1)...(19): siRNA sense strand
ccaauuccuucuucuaaug

SEQ ID NO: 897138 - RNA, 19 nt, Homo sapiens
  misc_RNA (1)...(19): siRNA sense strand
ggaaacguacugcacauga

SEQ ID NO: 897139 - RNA, 19 nt, Homo sapiens
  misc_RNA (1)...(19): siRNA sense strand
cgucugcagucuauacaua

SEQ ID NO: 897140 - RNA, 19 nt, Homo sapiens
  misc_RNA (1)...(19): siRNA sense strand
agagauguccagaagauua

SEQ ID NO: 897141 - RNA, 19 nt, Homo sapiens
  misc_RNA (1)...(19): siRNA sense strand
gcuaaaaccuguccaacaa

SEQ ID NO: 897142 - RNA, 19 nt, Homo sapiens
  misc_RNA (1)...(19): siRNA sense strand
ucaacauccugcagaauga

SEQ ID NO: 897143 - RNA, 19 nt, Homo sapiens
  misc_RNA (1)...(19): siRNA sense strand
gcucuauccugaaagcauu

SEQ ID NO: 897144 - RNA, 19 nt, Homo sapiens
  misc_RNA (1)...(19): siRNA sense strand
aagaucagcuugacacugu

SEQ ID NO: 897145 - RNA, 19 nt, Homo sapiens
  misc_RNA (1)...(19): siRNA sense strand
gaugauccagcuuauauug

SEQ ID NO: 897146 - RNA, 19 nt, Homo sapiens
  misc_RNA (1)...(19): siRNA sense strand
ggaaguacgucugcagucu

SEQ ID NO: 897147 - RNA, 19 nt, Homo sapiens
  misc_RNA (1)...(19): siRNA sense strand
gacagucuuucucaucuug

SEQ ID NO: 897148 - RNA, 19 nt, Homo sapiens
  misc_RNA (1)...(19): siRNA sense strand
ggaagugcuugaaguuucu

SEQ ID NO: 897149 - RNA, 19 nt, Homo sapiens
  misc_RNA (1)...(19): siRNA sense strand
gaaacguacugcacaugag

SEQ ID NO: 897150 - RNA, 19 nt, Homo sapiens
  misc_RNA (1)...(19): siRNA sense strand
gagaugaugcucccaagga

SEQ ID NO: 897151 - RNA, 19 nt, Homo sapiens
  misc_RNA (1)...(19): siRNA sense strand
ggauucaucuugcauuggu

SEQ ID NO: 897152 - RNA, 19 nt, Homo sapiens
  misc_RNA (1)...(19): siRNA sense strand
caagucaguucucauuucu

SEQ ID NO: 897153 - RNA, 19 nt, Homo sapiens
  misc_RNA (1)...(19): siRNA sense strand
gaaguacgucugcagucua

SEQ ID NO: 897154 - RNA, 19 nt, Homo sapiens
  misc_RNA (1)...(19): siRNA sense strand
guuggaagaugagauguau

SEQ ID NO: 897155 - RNA, 19 nt, Homo sapiens
  misc_RNA (1)...(19): siRNA sense strand
cgaugaaauugaggaagua

SEQ ID NO: 897156 - RNA, 19 nt, Homo sapiens
  misc_RNA (1)...(19): siRNA sense strand
guagaaaacuggugucauc

SEQ ID NO: 897157 - RNA, 19 nt, Homo sapiens
  misc_RNA (1)...(19): siRNA sense strand
ugucagaacagcagcuaua

SEQ ID NO: 897158 - RNA, 19 nt, Homo sapiens
  misc_RNA (1)...(19): siRNA sense strand
guucauggguuggaagaug

SEQ ID NO: 897159 - RNA, 19 nt, Homo sapiens
  misc_RNA (1)...(19): siRNA sense strand
agucaguucucauuucuug

SEQ ID NO: 897160 - RNA, 19 nt, Homo sapiens
  misc_RNA (1)...(19): siRNA sense strand
gaccaagacccacguguca

SEQ ID NO: 897161 - RNA, 19 nt, Homo sapiens
  misc_RNA (1)...(19): siRNA sense strand
cagcauuguucucagauca

SEQ ID NO: 897162 - RNA, 19 nt, Homo sapiens
  misc_RNA (1)...(19): siRNA sense strand
ucucaugguguaagaaaua

SEQ ID NO: 897163 - RNA, 19 nt, Homo sapiens
  misc_RNA (1)...(19): siRNA sense strand
gaggaaacguacugcacau

SEQ ID NO: 897164 - RNA, 19 nt, Homo sapiens
  misc_RNA (1)...(19): siRNA sense strand
uggaagugcuugaaguuuc

SEQ ID NO: 897165 - RNA, 19 nt, Homo sapiens
  misc_RNA (1)...(19): siRNA sense strand
agauacgucucauggugua

SEQ ID NO: 897166 - RNA, 19 nt, Homo sapiens
  misc_RNA (1)...(19): siRNA sense strand
uguauagucuucagcacuu

SEQ ID NO: 897167 - RNA, 19 nt, Homo sapiens
  misc_RNA (1)...(19): siRNA sense strand
cagcuuauauugcaguuuu

SEQ ID NO: 897168 - RNA, 19 nt, Homo sapiens
  misc_RNA (1)...(19): siRNA sense strand
uggaagaugagauguauga

SEQ ID NO: 897169 - RNA, 19 nt, Homo sapiens
  misc_RNA (1)...(19): siRNA sense strand
gagauguccagaagauuau

SEQ ID NO: 897170 - RNA, 19 nt, Homo sapiens
  misc_RNA (1)...(19): siRNA sense strand
agaaauacgcuuaguugau

SEQ ID NO: 897171 - RNA, 19 nt, Homo sapiens
  misc_RNA (1)...(19): siRNA sense strand
caugaaagaggacugaaau

SEQ ID NO: 897172 - RNA, 19 nt, Homo sapiens
  misc_RNA (1)...(19): siRNA sense strand
ggucgucagucagcucuau

SEQ ID NO: 897173 - RNA, 19 nt, Homo sapiens
  misc_RNA (1)...(19): siRNA sense strand
ccaucaacauccugcagaa

SEQ ID NO: 897174 - RNA, 19 nt, Homo sapiens
  misc_RNA (1)...(19): siRNA sense strand
aaauaagugccugcaguua

SEQ ID NO: 897175 - RNA, 19 nt, Homo sapiens
  misc_RNA (1)...(19): siRNA sense strand
cagcagagccuugaaagag

SEQ ID NO: 897176 - RNA, 19 nt, Homo sapiens
  misc_RNA (1)...(19): siRNA sense strand
gcagcagagccuugaaaga

SEQ ID NO: 897177 - RNA, 19 nt, Homo sapiens
  misc_RNA (1)...(19): siRNA sense strand
ccaaagaagggauucaucu

SEQ ID NO: 897178 - RNA, 19 nt, Homo sapiens
  misc_RNA (1)...(19): siRNA sense strand
gugccuugauuuccuaguu

SEQ ID NO: 897179 - RNA, 19 nt, Homo sapiens
  misc_RNA (1)...(19): siRNA sense strand
ugaugacuaugaacaagug

SEQ ID NO: 897180 - RNA, 19 nt, Homo sapiens
  misc_RNA (1)...(19): siRNA sense strand
agaaaagugucacaaaaga

SEQ ID NO: 897181 - RNA, 19 nt, Homo sapiens
  misc_RNA (1)...(19): siRNA sense strand
cuuaguugaugaugcguuu

SEQ ID NO: 897182 - RNA, 19 nt, Homo sapiens
  misc_RNA (1)...(19): siRNA sense strand
ugaagaaauacgcuuaguu

SEQ ID NO: 897183 - RNA, 19 nt, Homo sapiens
  misc_RNA (1)...(19): siRNA sense strand
uuuauaaucaggccuguaa

SEQ ID NO: 897184 - RNA, 19 nt, Homo sapiens
  misc_RNA (1)...(19): siRNA sense strand
cagaacagcagcuauaaaa

SEQ ID NO: 897185 - RNA, 19 nt, Homo sapiens
  misc_RNA (1)...(19): siRNA sense strand
ugccagagauguccagaag

SEQ ID NO: 897186 - RNA, 19 nt, Homo sapiens
  misc_RNA (1)...(19): siRNA sense strand
ccaagacccacgugucaga

SEQ ID NO: 897187 - RNA, 19 nt, Homo sapiens
  misc_RNA (1)...(19): siRNA sense strand
agaugaugcucccaaggaa

SEQ ID NO: 897188 - RNA, 19 nt, Homo sapiens
  misc_RNA (1)...(19): siRNA sense strand
cacaugagcgugccaagga

SEQ ID NO: 897189 - RNA, 19 nt, Homo sapiens
  misc_RNA (1)...(19): siRNA sense strand
ucugagcacccacccauuu

SEQ ID NO: 897190 - RNA, 19 nt, Homo sapiens
  misc_RNA (1)...(19): siRNA sense strand
gcauuguucucagaucaca

SEQ ID NO: 897191 - RNA, 19 nt, Homo sapiens
  misc_RNA (1)...(19): siRNA sense strand
ucagaacagcagcuauaaa

SEQ ID NO: 897192 - RNA, 19 nt, Homo sapiens
  misc_RNA (1)...(19): siRNA sense strand
ugauccagcuuauauugca

SEQ ID NO: 897193 - RNA, 19 nt, Homo sapiens
  misc_RNA (1)...(19): siRNA sense strand
cuauacauaccaugagaaa

SEQ ID NO: 897194 - RNA, 19 nt, Homo sapiens
  misc_RNA (1)...(19): siRNA sense strand
ugagaagugccuugauuuc

SEQ ID NO: 897195 - RNA, 19 nt, Homo sapiens
  misc_RNA (1)...(19): siRNA sense strand
gcaaaacuguugggcucua

SEQ ID NO: 897196 - RNA, 19 nt, Homo sapiens
  misc_RNA (1)...(19): siRNA sense strand
uauaaucaggccuguaaau

SEQ ID NO: 897197 - RNA, 19 nt, Homo sapiens
  misc_RNA (1)...(19): siRNA sense strand
uaaaaccuguccaacaaug

SEQ ID NO: 897198 - RNA, 19 nt, Homo sapiens
  misc_RNA (1)...(19): siRNA sense strand
gaaccagacauggaugauc

SEQ ID NO: 897199 - RNA, 19 nt, Homo sapiens
  misc_RNA (1)...(19): siRNA sense strand
acgaugaaauugaggaagu

SEQ ID NO: 897200 - RNA, 19 nt, Homo sapiens
  misc_RNA (1)...(19): siRNA sense strand
caauuccuucuucuaauga

SEQ ID NO: 897201 - RNA, 19 nt, Homo sapiens
  misc_RNA (1)...(19): siRNA sense strand
ccaugaaagaggacugaaa

SEQ ID NO: 897202 - RNA, 19 nt, Homo sapiens
  misc_RNA (1)...(19): siRNA sense strand
ggcucuucaugaacucuua

SEQ ID NO: 897203 - RNA, 19 nt, Homo sapiens
  misc_RNA (1)...(19): siRNA sense strand
aaguacgucugcagucuau

SEQ ID NO: 897204 - RNA, 19 nt, Homo sapiens
  misc_RNA (1)...(19): siRNA sense strand
caacgaugaaauugaggaa

SEQ ID NO: 897205 - RNA, 19 nt, Homo sapiens
  misc_RNA (1)...(19): siRNA sense strand
gccuugauuuccuaguuga

SEQ ID NO: 897206 - RNA, 19 nt, Homo sapiens
  misc_RNA (1)...(19): siRNA sense strand
gguuggaagaugagaugua

SEQ ID NO: 897207 - RNA, 19 nt, Homo sapiens
  misc_RNA (1)...(19): siRNA sense strand
gagcgugccaaggaacuuu

SEQ ID NO: 897208 - RNA, 19 nt, Homo sapiens
  misc_RNA (1)...(19): siRNA sense strand
cccaauuccuucuucuaau

SEQ ID NO: 897209 - RNA, 19 nt, Homo sapiens
  misc_RNA (1)...(19): siRNA sense strand
ucccaauuccuucuucuaa

SEQ ID NO: 897210 - RNA, 19 nt, Homo sapiens
  misc_RNA (1)...(19): siRNA sense strand
caucagagucgagguuuca

SEQ ID NO: 897211 - RNA, 19 nt, Homo sapiens
  misc_RNA (1)...(19): siRNA sense strand
cagcugaaccagacaugga

SEQ ID NO: 897212 - RNA, 19 nt, Homo sapiens
  misc_RNA (1)...(19): siRNA sense strand
gaagggauucaucuugcau

SEQ ID NO: 897213 - RNA, 19 nt, Homo sapiens
  misc_RNA (1)...(19): siRNA sense strand
gucuauacauaccaugaga

SEQ ID NO: 897214 - RNA, 19 nt, Homo sapiens
  misc_RNA (1)...(19): siRNA sense strand
gggcugugaacuugauuga

SEQ ID NO: 897215 - RNA, 19 nt, Homo sapiens
  misc_RNA (1)...(19): siRNA sense strand
aaauacgcuuaguugauga

SEQ ID NO: 897216 - RNA, 19 nt, Homo sapiens
  misc_RNA (1)...(19): siRNA sense strand
aggccuagcugccagagau

SEQ ID NO: 897217 - RNA, 19 nt, Homo sapiens
  misc_RNA (1)...(19): siRNA sense strand
gggaagauauugauucuga

SEQ ID NO: 897218 - RNA, 19 nt, Homo sapiens
  misc_RNA (1)...(19): siRNA sense strand
gauauuaagggacugauua

SEQ ID NO: 897219 - RNA, 19 nt, Homo sapiens
  misc_RNA (1)...(19): siRNA sense strand
gaaaagaacuuggaauaug

SEQ ID NO: 897220 - RNA, 19 nt, Homo sapiens
  misc_RNA (1)...(19): siRNA sense strand
gaccacaguuucuuuauuc

SEQ ID NO: 897221 - RNA, 19 nt, Homo sapiens
  misc_RNA (1)...(19): siRNA sense strand
ggacaaggaugccaugaac

SEQ ID NO: 897222 - RNA, 19 nt, Homo sapiens
  misc_RNA (1)...(19): siRNA sense strand
caauaaggcugaggaguug

SEQ ID NO: 897223 - RNA, 19 nt, Homo sapiens
  misc_RNA (1)...(19): siRNA sense strand
gaauuggaaugugaggaua

SEQ ID NO: 897224 - RNA, 19 nt, Homo sapiens
  misc_RNA (1)...(19): siRNA sense strand
gaaaagaacuuggagaaag

SEQ ID NO: 897225 - RNA, 19 nt, Homo sapiens
  misc_RNA (1)...(19): siRNA sense strand
ggaauuugcagacuucuau

SEQ ID NO: 897226 - RNA, 19 nt, Homo sapiens
  misc_RNA (1)...(19): siRNA sense strand
cgaagaaguuggcaaagca

SEQ ID NO: 897227 - RNA, 19 nt, Homo sapiens
  misc_RNA (1)...(19): siRNA sense strand
gaacuuggaauaugaugau

SEQ ID NO: 897228 - RNA, 19 nt, Homo sapiens
  misc_RNA (1)...(19): siRNA sense strand
agacaggaaugaagaacaa

SEQ ID NO: 897229 - RNA, 19 nt, Homo sapiens
  misc_RNA (1)...(19): siRNA sense strand
ccaauaaggcugaggaguu

SEQ ID NO: 897230 - RNA, 19 nt, Homo sapiens
  misc_RNA (1)...(19): siRNA sense strand
ggagacgauugggaagaua

SEQ ID NO: 897231 - RNA, 19 nt, Homo sapiens
  misc_RNA (1)...(19): siRNA sense strand
aaguggagaugaugaauga

SEQ ID NO: 897232 - RNA, 19 nt, Homo sapiens
  misc_RNA (1)...(19): siRNA sense strand
uccaaaggaugaaaucaaa

SEQ ID NO: 897233 - RNA, 19 nt, Homo sapiens
  misc_RNA (1)...(19): siRNA sense strand
ggaccuggauggagacgau

SEQ ID NO: 897234 - RNA, 19 nt, Homo sapiens
  misc_RNA (1)...(19): siRNA sense strand
uguaagcucuucacagaug

SEQ ID NO: 897235 - RNA, 19 nt, Homo sapiens
  misc_RNA (1)...(19): siRNA sense strand
gucaagagcuguggcaguu

SEQ ID NO: 897236 - RNA, 19 nt, Homo sapiens
  misc_RNA (1)...(19): siRNA sense strand
gaugaaaccauggaauuga

SEQ ID NO: 897237 - RNA, 19 nt, Homo sapiens
  misc_RNA (1)...(19): siRNA sense strand
gaagauauugauucugaug

SEQ ID NO: 897238 - RNA, 19 nt, Homo sapiens
  misc_RNA (1)...(19): siRNA sense strand
gaccaaagaccacaguuuc

SEQ ID NO: 897239 - RNA, 19 nt, Homo sapiens
  misc_RNA (1)...(19): siRNA sense strand
uaucacggacugcuuauuu

SEQ ID NO: 897240 - RNA, 19 nt, Homo sapiens
  misc_RNA (1)...(19): siRNA sense strand
ggaaaguggagaugaugaa

SEQ ID NO: 897241 - RNA, 19 nt, Homo sapiens
  misc_RNA (1)...(19): siRNA sense strand
uugcagacuucuaugauuu

SEQ ID NO: 897242 - RNA, 19 nt, Homo sapiens
  misc_RNA (1)...(19): siRNA sense strand
caaaggaggccaggaaugu

SEQ ID NO: 897243 - RNA, 19 nt, Homo sapiens
  misc_RNA (1)...(19): siRNA sense strand
ggaggaagaggcugaggaa

SEQ ID NO: 897244 - RNA, 19 nt, Homo sapiens
  misc_RNA (1)...(19): siRNA sense strand
ggaauaugaugaugaaacc

SEQ ID NO: 897245 - RNA, 19 nt, Homo sapiens
  misc_RNA (1)...(19): siRNA sense strand
gaacagcaggcgaagaagu

SEQ ID NO: 897246 - RNA, 19 nt, Homo sapiens
  misc_RNA (1)...(19): siRNA sense strand
aaacagcgauuuggcuugu

SEQ ID NO: 897247 - RNA, 19 nt, Homo sapiens
  misc_RNA (1)...(19): siRNA sense strand
ggagagaaaguugguguug

SEQ ID NO: 897248 - RNA, 19 nt, Homo sapiens
  misc_RNA (1)...(19): siRNA sense strand
agaccacaguuucuuuauu

SEQ ID NO: 897249 - RNA, 19 nt, Homo sapiens
  misc_RNA (1)...(19): siRNA sense strand
gcaaaggaggccaggaaug

SEQ ID NO: 897250 - RNA, 19 nt, Homo sapiens
  misc_RNA (1)...(19): siRNA sense strand
gaaguuugccucuuucaac

SEQ ID NO: 897251 - RNA, 19 nt, Homo sapiens
  misc_RNA (1)...(19): siRNA sense strand
gaugaagaauuggaaugug

SEQ ID NO: 897252 - RNA, 19 nt, Homo sapiens
  misc_RNA (1)...(19): siRNA sense strand
acguugagcuggagaagaa

SEQ ID NO: 897253 - RNA, 19 nt, Homo sapiens
  misc_RNA (1)...(19): siRNA sense strand
cgaugcugcuuuggaauuu

SEQ ID NO: 897254 - RNA, 19 nt, Homo sapiens
  misc_RNA (1)...(19): siRNA sense strand
ugaggauacugaagcaaug

SEQ ID NO: 897255 - RNA, 19 nt, Homo sapiens
  misc_RNA (1)...(19): siRNA sense strand
ccaagcagaugcacuuucg

SEQ ID NO: 897256 - RNA, 19 nt, Homo sapiens
  misc_RNA (1)...(19): siRNA sense strand
uuaaauacuugggagagaa

SEQ ID NO: 897257 - RNA, 19 nt, Homo sapiens
  misc_RNA (1)...(19): siRNA sense strand
gcucgcugaugaagaaugu

SEQ ID NO: 897258 - RNA, 19 nt, Homo sapiens
  misc_RNA (1)...(19): siRNA sense strand
ggaagauauugauucugau

SEQ ID NO: 897259 - RNA, 19 nt, Homo sapiens
  misc_RNA (1)...(19): siRNA sense strand
guacaggcacauaugaaug

SEQ ID NO: 897260 - RNA, 19 nt, Homo sapiens
  misc_RNA (1)...(19): siRNA sense strand
cagaaaagaacuuggaaua

SEQ ID NO: 897261 - RNA, 19 nt, Homo sapiens
  misc_RNA (1)...(19): siRNA sense strand
gaugagauacuacaaacag

SEQ ID NO: 897262 - RNA, 19 nt, Homo sapiens
  misc_RNA (1)...(19): siRNA sense strand
augaagaauuggaauguga

SEQ ID NO: 897263 - RNA, 19 nt, Homo sapiens
  misc_RNA (1)...(19): siRNA sense strand
gcgaugcugcuuuggaauu

SEQ ID NO: 897264 - RNA, 19 nt, Homo sapiens
  misc_RNA (1)...(19): siRNA sense strand
gaaaguggagaugaugaau

SEQ ID NO: 897265 - RNA, 19 nt, Homo sapiens
  misc_RNA (1)...(19): siRNA sense strand
gcuccuugaugagauacua

SEQ ID NO: 897266 - RNA, 19 nt, Homo sapiens
  misc_RNA (1)...(19): siRNA sense strand
ggaggaagaggaccuggau

SEQ ID NO: 897267 - RNA, 19 nt, Homo sapiens
  misc_RNA (1)...(19): siRNA sense strand
ggacagcgaggaggaggaa

SEQ ID NO: 897268 - RNA, 19 nt, Homo sapiens
  misc_RNA (1)...(19): siRNA sense strand
guccaugucucccaagaag

SEQ ID NO: 897269 - RNA, 19 nt, Homo sapiens
  misc_RNA (1)...(19): siRNA sense strand
ccaccaagcagaugcacuu

SEQ ID NO: 897270 - RNA, 19 nt, Homo sapiens
  misc_RNA (1)...(19): siRNA sense strand
cuuggaauaugaugaugaa

SEQ ID NO: 897271 - RNA, 19 nt, Homo sapiens
  misc_RNA (1)...(19): siRNA sense strand
aggaguagcuauccagauc

SEQ ID NO: 897272 - RNA, 19 nt, Homo sapiens
  misc_RNA (1)...(19): siRNA sense strand
gcagacuucuaugauuuua

SEQ ID NO: 897273 - RNA, 19 nt, Homo sapiens
  misc_RNA (1)...(19): siRNA sense strand
uggcucacaugaccaaaga

SEQ ID NO: 897274 - RNA, 19 nt, Homo sapiens
  misc_RNA (1)...(19): siRNA sense strand
ggaaugugaggauacugaa

SEQ ID NO: 897275 - RNA, 19 nt, Homo sapiens
  misc_RNA (1)...(19): siRNA sense strand
guggagaugaugaaugaaa

SEQ ID NO: 897276 - RNA, 19 nt, Homo sapiens
  misc_RNA (1)...(19): siRNA sense strand
caaaauggaugcugaagac

SEQ ID NO: 897277 - RNA, 19 nt, Homo sapiens
  misc_RNA (1)...(19): siRNA sense strand
uggcgaugcugcuuuggaa

SEQ ID NO: 897278 - RNA, 19 nt, Homo sapiens
  misc_RNA (1)...(19): siRNA sense strand
uaaauacuugggagagaaa

SEQ ID NO: 897279 - RNA, 19 nt, Homo sapiens
  misc_RNA (1)...(19): siRNA sense strand
gggacugauuaaauacuug

SEQ ID NO: 897280 - RNA, 19 nt, Homo sapiens
  misc_RNA (1)...(19): siRNA sense strand
ugaccaaagaccacaguuu

SEQ ID NO: 897281 - RNA, 19 nt, Homo sapiens
  misc_RNA (1)...(19): siRNA sense strand
gauauugauucugaugaag

SEQ ID NO: 897282 - RNA, 19 nt, Homo sapiens
  misc_RNA (1)...(19): siRNA sense strand
gcgaagaaguuggcaaagc

SEQ ID NO: 897283 - RNA, 19 nt, Homo sapiens
  misc_RNA (1)...(19): siRNA sense strand
gaccgagacccgagugaga

SEQ ID NO: 897284 - RNA, 19 nt, Homo sapiens
  misc_RNA (1)...(19): siRNA sense strand
gaagcuguacaggcacaua

SEQ ID NO: 897285 - RNA, 19 nt, Homo sapiens
  misc_RNA (1)...(19): siRNA sense strand
ggaagaggaccuggaugga

SEQ ID NO: 897286 - RNA, 19 nt, Homo sapiens
  misc_RNA (1)...(19): siRNA sense strand
gagcgagacaugcaguaug

SEQ ID NO: 897287 - RNA, 19 nt, Homo sapiens
  misc_RNA (1)...(19): siRNA sense strand
aggcacauaugaaugacaa

SEQ ID NO: 897288 - RNA, 19 nt, Homo sapiens
  misc_RNA (1)...(19): siRNA sense strand
cugaagcaauggacgaugu

SEQ ID NO: 897289 - RNA, 19 nt, Homo sapiens
  misc_RNA (1)...(19): siRNA sense strand
uacaggcacauaugaauga

SEQ ID NO: 897290 - RNA, 19 nt, Homo sapiens
  misc_RNA (1)...(19): siRNA sense strand
gcuguacaggcacauauga

SEQ ID NO: 897291 - RNA, 19 nt, Homo sapiens
  misc_RNA (1)...(19): siRNA sense strand
gagacgauugggaagauau

SEQ ID NO: 897292 - RNA, 19 nt, Homo sapiens
  misc_RNA (1)...(19): siRNA sense strand
gagagcgagacaugcagua

SEQ ID NO: 897293 - RNA, 19 nt, Homo sapiens
  misc_RNA (1)...(19): siRNA sense strand
guagcuauccagaucacaa

SEQ ID NO: 897294 - RNA, 19 nt, Homo sapiens
  misc_RNA (1)...(19): siRNA sense strand
agauggcgaugcugcuuug

SEQ ID NO: 897295 - RNA, 19 nt, Homo sapiens
  misc_RNA (1)...(19): siRNA sense strand
cuauccagaucacaaggaa

SEQ ID NO: 897296 - RNA, 19 nt, Homo sapiens
  misc_RNA (1)...(19): siRNA sense strand
guccaaaggaugaaaucaa

SEQ ID NO: 897297 - RNA, 19 nt, Homo sapiens
  misc_RNA (1)...(19): siRNA sense strand
gaugcugcuuuggaauuug

SEQ ID NO: 897298 - RNA, 19 nt, Homo sapiens
  misc_RNA (1)...(19): siRNA sense strand
caguauguccaaaggauga

SEQ ID NO: 897299 - RNA, 19 nt, Homo sapiens
  misc_RNA (1)...(19): siRNA sense strand
gauacuacaaacagcgauu

SEQ ID NO: 897300 - RNA, 19 nt, Homo sapiens
  misc_RNA (1)...(19): siRNA sense strand
gaugaugaaaccauggaau

SEQ ID NO: 897301 - RNA, 19 nt, Homo sapiens
  misc_RNA (1)...(19): siRNA sense strand
uuugcagacuucuaugauu

SEQ ID NO: 897302 - RNA, 19 nt, Homo sapiens
  misc_RNA (1)...(19): siRNA sense strand
ugaagaacaaugccaccaa

SEQ ID NO: 897303 - RNA, 19 nt, Homo sapiens
  misc_RNA (1)...(19): siRNA sense strand
ugaugaaaccauggaauug

SEQ ID NO: 897304 - RNA, 19 nt, Homo sapiens
  misc_RNA (1)...(19): siRNA sense strand
acguacaccugcauaacuu

SEQ ID NO: 897305 - RNA, 19 nt, Homo sapiens
  misc_RNA (1)...(19): siRNA sense strand
uugaacagcaggcgaagaa

SEQ ID NO: 897306 - RNA, 19 nt, Homo sapiens
  misc_RNA (1)...(19): siRNA sense strand
ggacaguguggacaaggau

SEQ ID NO: 897307 - RNA, 19 nt, Homo sapiens
  misc_RNA (1)...(19): siRNA sense strand
gugaggauacugaagcaau

SEQ ID NO: 897308 - RNA, 19 nt, Homo sapiens
  misc_RNA (1)...(19): siRNA sense strand
gcugaagacaggaaugaag

SEQ ID NO: 897309 - RNA, 19 nt, Homo sapiens
  misc_RNA (1)...(19): siRNA sense strand
ugaaaccauggaauugauu

SEQ ID NO: 897310 - RNA, 19 nt, Homo sapiens
  misc_RNA (1)...(19): siRNA sense strand
ggcagugaaucggaaagug

SEQ ID NO: 897311 - RNA, 19 nt, Homo sapiens
  misc_RNA (1)...(19): siRNA sense strand
ggacuggcaccgcuacaac

SEQ ID NO: 897312 - RNA, 19 nt, Homo sapiens
  misc_RNA (1)...(19): siRNA sense strand
gcgacguacaccugcauaa

SEQ ID NO: 897313 - RNA, 19 nt, Homo sapiens
  misc_RNA (1)...(19): siRNA sense strand
ugaagacaggaaugaagaa

SEQ ID NO: 897314 - RNA, 19 nt, Homo sapiens
  misc_RNA (1)...(19): siRNA sense strand
acagcgauuuggcuuguca

SEQ ID NO: 897315 - RNA, 19 nt, Homo sapiens
  misc_RNA (1)...(19): siRNA sense strand
ggaguagcuauccagauca

SEQ ID NO: 897316 - RNA, 19 nt, Homo sapiens
  misc_RNA (1)...(19): siRNA sense strand
gguccaagugagauucuga

SEQ ID NO: 897317 - RNA, 19 nt, Homo sapiens
  misc_RNA (1)...(19): siRNA sense strand
ggaauaagauccagcaaau

SEQ ID NO: 897318 - RNA, 19 nt, Homo sapiens
  misc_RNA (1)...(19): siRNA sense strand
gaacuugacuuucccugaa

SEQ ID NO: 897319 - RNA, 19 nt, Homo sapiens
  misc_RNA (1)...(19): siRNA sense strand
cugaagcccuuaucacuaa

SEQ ID NO: 897320 - RNA, 19 nt, Homo sapiens
  misc_RNA (1)...(19): siRNA sense strand
cauugaagcuggaugaguu

SEQ ID NO: 897321 - RNA, 19 nt, Homo sapiens
  misc_RNA (1)...(19): siRNA sense strand
aauaagauccagcaaauug

SEQ ID NO: 897322 - RNA, 19 nt, Homo sapiens
  misc_RNA (1)...(19): siRNA sense strand
uagaaggccuccagaaucu

SEQ ID NO: 897323 - RNA, 19 nt, Homo sapiens
  misc_RNA (1)...(19): siRNA sense strand
aagaaaccaugcagucuga

SEQ ID NO: 897324 - RNA, 19 nt, Homo sapiens
  misc_RNA (1)...(19): siRNA sense strand
caagagaagcaagaaauga

SEQ ID NO: 897325 - RNA, 19 nt, Homo sapiens
  misc_RNA (1)...(19): siRNA sense strand
gaaaccaugcagucugauu

SEQ ID NO: 897326 - RNA, 19 nt, Homo sapiens
  misc_RNA (1)...(19): siRNA sense strand
gaauaagauccagcaaauu

SEQ ID NO: 897327 - RNA, 19 nt, Homo sapiens
  misc_RNA (1)...(19): siRNA sense strand
gggaauaagauccagcaaa

SEQ ID NO: 897328 - RNA, 19 nt, Homo sapiens
  misc_RNA (1)...(19): siRNA sense strand
ucugagaaccugauagaaa

SEQ ID NO: 897329 - RNA, 19 nt, Homo sapiens
  misc_RNA (1)...(19): siRNA sense strand
gaaccugauagaaacauug

SEQ ID NO: 897330 - RNA, 19 nt, Homo sapiens
  misc_RNA (1)...(19): siRNA sense strand
aaacauugaagcuggauga

SEQ ID NO: 897331 - RNA, 19 nt, Homo sapiens
  misc_RNA (1)...(19): siRNA sense strand
uugaugaacugcagacugu

SEQ ID NO: 897332 - RNA, 19 nt, Homo sapiens
  misc_RNA (1)...(19): siRNA sense strand
gccaagagaagcaagaaau

SEQ ID NO: 897333 - RNA, 19 nt, Homo sapiens
  misc_RNA (1)...(19): siRNA sense strand
ggauuacuacuaucaggaa

SEQ ID NO: 897334 - RNA, 19 nt, Homo sapiens
  misc_RNA (1)...(19): siRNA sense strand
ccaagagaagcaagaaaug

SEQ ID NO: 897335 - RNA, 19 nt, Homo sapiens
  misc_RNA (1)...(19): siRNA sense strand
gggaggggauuacuacuau

SEQ ID NO: 897336 - RNA, 19 nt, Homo sapiens
  misc_RNA (1)...(19): siRNA sense strand
gacagaagcccugccacuu

SEQ ID NO: 897337 - RNA, 19 nt, Homo sapiens
  misc_RNA (1)...(19): siRNA sense strand
ugucagagaagauguuuca

SEQ ID NO: 897338 - RNA, 19 nt, Homo sapiens
  misc_RNA (1)...(19): siRNA sense strand
cugagaaccugauagaaac

SEQ ID NO: 897339 - RNA, 19 nt, Homo sapiens
  misc_RNA (1)...(19): siRNA sense strand
uccagaaucuucacagucu

SEQ ID NO: 897340 - RNA, 19 nt, Homo sapiens
  misc_RNA (1)...(19): siRNA sense strand
uuacuacuaucaggaacuu

SEQ ID NO: 897341 - RNA, 19 nt, Homo sapiens
  misc_RNA (1)...(19): siRNA sense strand
cuaagcggaacuugacuuu

SEQ ID NO: 897342 - RNA, 19 nt, Homo sapiens
  misc_RNA (1)...(19): siRNA sense strand
uuagaaggccuccagaauc

SEQ ID NO: 897343 - RNA, 19 nt, Homo sapiens
  misc_RNA (1)...(19): siRNA sense strand
caaaucaggcagguggaaa

SEQ ID NO: 897344 - RNA, 19 nt, Homo sapiens
  misc_RNA (1)...(19): siRNA sense strand
aaacuacggccaagagaag

SEQ ID NO: 897345 - RNA, 19 nt, Homo sapiens
  misc_RNA (1)...(19): siRNA sense strand
ggaacugucagagaagaug

SEQ ID NO: 897346 - RNA, 19 nt, Homo sapiens
  misc_RNA (1)...(19): siRNA sense strand
gaacugucagagaagaugu

SEQ ID NO: 897347 - RNA, 19 nt, Homo sapiens
  misc_RNA (1)...(19): siRNA sense strand
ucagagaagauguuucaca

SEQ ID NO: 897348 - RNA, 19 nt, Homo sapiens
  misc_RNA (1)...(19): siRNA sense strand
ucacuaagcggaacuugac

SEQ ID NO: 897349 - RNA, 19 nt, Homo sapiens
  misc_RNA (1)...(19): siRNA sense strand
gcaacagacggcccugaca

SEQ ID NO: 897350 - RNA, 19 nt, Homo sapiens
  misc_RNA (1)...(19): siRNA sense strand
agaagauguuucacacucu

SEQ ID NO: 897351 - RNA, 19 nt, Homo sapiens
  misc_RNA (1)...(19): siRNA sense strand
gagcugaguggcccauucu

SEQ ID NO: 897352 - RNA, 19 nt, Homo sapiens
  misc_RNA (1)...(19): siRNA sense strand
agaaccugauagaaacauu

SEQ ID NO: 897353 - RNA, 19 nt, Homo sapiens
  misc_RNA (1)...(19): siRNA sense strand
uaucugcaagggaauaaga

SEQ ID NO: 897354 - RNA, 19 nt, Homo sapiens
  misc_RNA (1)...(19): siRNA sense strand
acugaagcccuuaucacua

SEQ ID NO: 897355 - RNA, 19 nt, Homo sapiens
  misc_RNA (1)...(19): siRNA sense strand
aaaccaugcagucugauuc

SEQ ID NO: 897356 - RNA, 19 nt, Homo sapiens
  misc_RNA (1)...(19): siRNA sense strand
ucccaugccuccaguuucu

SEQ ID NO: 897357 - RNA, 19 nt, Homo sapiens
  misc_RNA (1)...(19): siRNA sense strand
uugagaaccuggcuugcau

SEQ ID NO: 897358 - RNA, 19 nt, Homo sapiens
  misc_RNA (1)...(19): siRNA sense strand
cuuagaaggccuccagaau

SEQ ID NO: 897359 - RNA, 19 nt, Homo sapiens
  misc_RNA (1)...(19): siRNA sense strand
ucacacucuugaugaacug

SEQ ID NO: 897360 - RNA, 19 nt, Homo sapiens
  misc_RNA (1)...(19): siRNA sense strand
ccaagaaaccaugcagucu

SEQ ID NO: 897361 - RNA, 19 nt, Homo sapiens
  misc_RNA (1)...(19): siRNA sense strand
gugguggagcgcuggauuu

SEQ ID NO: 897362 - RNA, 19 nt, Homo sapiens
  misc_RNA (1)...(19): siRNA sense strand
ccaaaucaggcagguggaa

SEQ ID NO: 897363 - RNA, 19 nt, Homo sapiens
  misc_RNA (1)...(19): siRNA sense strand
ccuccucucccaccaagaa

SEQ ID NO: 897364 - RNA, 19 nt, Homo sapiens
  misc_RNA (1)...(19): siRNA sense strand
ggccaagagaagcaagaaa

SEQ ID NO: 897365 - RNA, 19 nt, Homo sapiens
  misc_RNA (1)...(19): siRNA sense strand
gaagagacaugcgauggua

SEQ ID NO: 897366 - RNA, 19 nt, Homo sapiens
  misc_RNA (1)...(19): siRNA sense strand
aaagagcccugcaauauga

SEQ ID NO: 897367 - RNA, 19 nt, Homo sapiens
  misc_RNA (1)...(19): siRNA sense strand
gaaaagagcccugcaauau

SEQ ID NO: 897368 - RNA, 19 nt, Homo sapiens
  misc_RNA (1)...(19): siRNA sense strand
agccagaccugaucacuug

SEQ ID NO: 897369 - RNA, 19 nt, Homo sapiens
  misc_RNA (1)...(19): siRNA sense strand
ggaaaagagcccugcaaua

SEQ ID NO: 897370 - RNA, 19 nt, Homo sapiens
  misc_RNA (1)...(19): siRNA sense strand
ggguauugcugucucuaag

SEQ ID NO: 897371 - RNA, 19 nt, Homo sapiens
  misc_RNA (1)...(19): siRNA sense strand
uuagauaacuacagaaacc

SEQ ID NO: 897372 - RNA, 19 nt, Homo sapiens
  misc_RNA (1)...(19): siRNA sense strand
acagaaaccuggucuuccu

SEQ ID NO: 897373 - RNA, 19 nt, Homo sapiens
  misc_RNA (1)...(19): siRNA sense strand
cuacagaaaccuggucuuc

SEQ ID NO: 897374 - RNA, 19 nt, Homo sapiens
  misc_RNA (1)...(19): siRNA sense strand
gaucacuugucuggagcaa

SEQ ID NO: 897375 - RNA, 19 nt, Homo sapiens
  misc_RNA (1)...(19): siRNA sense strand
ccugcaauaugaagagaca

SEQ ID NO: 897376 - RNA, 19 nt, Homo sapiens
  misc_RNA (1)...(19): siRNA sense strand
gcccugcaauaugaagaga

SEQ ID NO: 897377 - RNA, 19 nt, Homo sapiens
  misc_RNA (1)...(19): siRNA sense strand
gaaccgaggucgacaugaa

SEQ ID NO: 897378 - RNA, 19 nt, Homo sapiens
  misc_RNA (1)...(19): siRNA sense strand
ccacguggaugaugaauac

SEQ ID NO: 897379 - RNA, 19 nt, Homo sapiens
  misc_RNA (1)...(19): siRNA sense strand
ucucugacauccuccgaua

SEQ ID NO: 897380 - RNA, 19 nt, Homo sapiens
  misc_RNA (1)...(19): siRNA sense strand
gaagaaaaccgccugauuc

SEQ ID NO: 897381 - RNA, 19 nt, Homo sapiens
  misc_RNA (1)...(19): siRNA sense strand
aaaccaggacgacuacaua

SEQ ID NO: 897382 - RNA, 19 nt, Homo sapiens
  misc_RNA (1)...(19): siRNA sense strand
gcaagcgggucucugacau

SEQ ID NO: 897383 - RNA, 19 nt, Homo sapiens
  misc_RNA (1)...(19): siRNA sense strand
ggacgacuacauaucauuc

SEQ ID NO: 897384 - RNA, 19 nt, Homo sapiens
  misc_RNA (1)...(19): siRNA sense strand
ucaagauguuugcaaagga

SEQ ID NO: 897385 - RNA, 19 nt, Homo sapiens
  misc_RNA (1)...(19): siRNA sense strand
ccaggacgacuacauauca

SEQ ID NO: 897386 - RNA, 19 nt, Homo sapiens
  misc_RNA (1)...(19): siRNA sense strand
ggcaccauguguauaagaa

SEQ ID NO: 897387 - RNA, 19 nt, Homo sapiens
  misc_RNA (1)...(19): siRNA sense strand
caccauguguauaagaaga

SEQ ID NO: 897388 - RNA, 19 nt, Homo sapiens
  misc_RNA (1)...(19): siRNA sense strand
ccagccacguggaugauga

SEQ ID NO: 897389 - RNA, 19 nt, Homo sapiens
  misc_RNA (1)...(19): siRNA sense strand
gccucaagauguuugcaaa

SEQ ID NO: 897390 - RNA, 19 nt, Homo sapiens
  misc_RNA (1)...(19): siRNA sense strand
ggaagaaaaccgccugauu

SEQ ID NO: 897391 - RNA, 19 nt, Homo sapiens
  misc_RNA (1)...(19): siRNA sense strand
ccaagguuaugaucacuac

SEQ ID NO: 897392 - RNA, 19 nt, Homo sapiens
  misc_RNA (1)...(19): siRNA sense strand
gcucagcccaggagaggaa

SEQ ID NO: 897393 - RNA, 19 nt, Homo sapiens
  misc_RNA (1)...(19): siRNA sense strand
gaggaucccaagguuauga

SEQ ID NO: 897394 - RNA, 19 nt, Homo sapiens
  misc_RNA (1)...(19): siRNA sense strand
caauaccgcacgcaagaga

SEQ ID NO: 897395 - RNA, 19 nt, Homo sapiens
  misc_RNA (1)...(19): siRNA sense strand
ugacauccuccgauaccua

SEQ ID NO: 897396 - RNA, 19 nt, Homo sapiens
  misc_RNA (1)...(19): siRNA sense strand
ucgcaaaccaggacgacua

SEQ ID NO: 897397 - RNA, 19 nt, Homo sapiens
  misc_RNA (1)...(19): siRNA sense strand
ugaugaugcuggaggugaa

SEQ ID NO: 897398 - RNA, 19 nt, Homo sapiens
  misc_RNA (1)...(19): siRNA sense strand
ggucaucaccuucgcaaac

SEQ ID NO: 897399 - RNA, 19 nt, Homo sapiens
  misc_RNA (1)...(19): siRNA sense strand
ccugauucccacugaguua

SEQ ID NO: 897400 - RNA, 19 nt, Homo sapiens
  misc_RNA (1)...(19): siRNA sense strand
gcaacguggagcucacuga

SEQ ID NO: 897401 - RNA, 19 nt, Homo sapiens
  misc_RNA (1)...(19): siRNA sense strand
agucgaggaucccaagguu

SEQ ID NO: 897402 - RNA, 19 nt, Homo sapiens
  misc_RNA (1)...(19): siRNA sense strand
caccugcccuuugguccua

SEQ ID NO: 897403 - RNA, 19 nt, Homo sapiens
  misc_RNA (1)...(19): siRNA sense strand
gacauccuccgauaccuau

SEQ ID NO: 897404 - RNA, 19 nt, Homo sapiens
  misc_RNA (1)...(19): siRNA sense strand
cauccuccgauaccuauuu

SEQ ID NO: 897405 - RNA, 19 nt, Homo sapiens
  misc_RNA (1)...(19): siRNA sense strand
ucgaggaucccaagguuau

SEQ ID NO: 897406 - RNA, 19 nt, Homo sapiens
  misc_RNA (1)...(19): siRNA sense strand
guucccgccucaagauguu

SEQ ID NO: 897407 - RNA, 19 nt, Homo sapiens
  misc_RNA (1)...(19): siRNA sense strand
gcugugcaauguggucaug

SEQ ID NO: 897408 - RNA, 19 nt, Homo sapiens
  misc_RNA (1)...(19): siRNA sense strand
uggcacccuuacaccaaua

SEQ ID NO: 897409 - RNA, 19 nt, Homo sapiens
  misc_RNA (1)...(19): siRNA sense strand
ccaacggcgucaccgaucu

SEQ ID NO: 897410 - RNA, 19 nt, Homo sapiens
  misc_RNA (1)...(19): siRNA sense strand
gcuggcacccuuacaccaa

SEQ ID NO: 897411 - RNA, 19 nt, Homo sapiens
  misc_RNA (1)...(19): siRNA sense strand
caaaccaggacgacuacau

SEQ ID NO: 897412 - RNA, 19 nt, Homo sapiens
  misc_RNA (1)...(19): siRNA sense strand
ugaccagccacguggauga

SEQ ID NO: 897413 - RNA, 19 nt, Homo sapiens
  misc_RNA (1)...(19): siRNA sense strand
ucagccaccugcccuuugg

SEQ ID NO: 897414 - RNA, 19 nt, Homo sapiens
  misc_RNA (1)...(19): siRNA sense strand
ccaguucccgccucaagau

SEQ ID NO: 897415 - RNA, 19 nt, Homo sapiens
  misc_RNA (1)...(19): siRNA sense strand
caggacgacuacauaucau

SEQ ID NO: 897416 - RNA, 19 nt, Homo sapiens
  misc_RNA (1)...(19): siRNA sense strand
ccgaucugcuggucguuca

SEQ ID NO: 897417 - RNA, 19 nt, Homo sapiens
  misc_RNA (1)...(19): siRNA sense strand
acagaaagcuuguauauga

SEQ ID NO: 897418 - RNA, 19 nt, Homo sapiens
  misc_RNA (1)...(19): siRNA sense strand
acaaaggucucacuucuua

SEQ ID NO: 897419 - RNA, 19 nt, Homo sapiens
  misc_RNA (1)...(19): siRNA sense strand
gaacagaaagcuuguauau

SEQ ID NO: 897420 - RNA, 19 nt, Homo sapiens
  misc_RNA (1)...(19): siRNA sense strand
uaaaugcccugacgaauau

SEQ ID NO: 897421 - RNA, 19 nt, Homo sapiens
  misc_RNA (1)...(19): siRNA sense strand
gaucuacagucaccauaua

SEQ ID NO: 897422 - RNA, 19 nt, Homo sapiens
  misc_RNA (1)...(19): siRNA sense strand
guaaaugcccugacgaaua

SEQ ID NO: 897423 - RNA, 19 nt, Homo sapiens
  misc_RNA (1)...(19): siRNA sense strand
ggacaacagugcaucuuau

SEQ ID NO: 897424 - RNA, 19 nt, Homo sapiens
  misc_RNA (1)...(19): siRNA sense strand
caacaaaggucucacuucu

SEQ ID NO: 897425 - RNA, 19 nt, Homo sapiens
  misc_RNA (1)...(19): siRNA sense strand
gaauguggaucuacaguca

SEQ ID NO: 897426 - RNA, 19 nt, Homo sapiens
  misc_RNA (1)...(19): siRNA sense strand
ugacgaauauaaagaggua

SEQ ID NO: 897427 - RNA, 19 nt, Homo sapiens
  misc_RNA (1)...(19): siRNA sense strand
uaauuacacuccagauuga

SEQ ID NO: 897428 - RNA, 19 nt, Homo sapiens
  misc_RNA (1)...(19): siRNA sense strand
gaaugacuaucacaugaau

SEQ ID NO: 897429 - RNA, 19 nt, Homo sapiens
  misc_RNA (1)...(19): siRNA sense strand
guaauuacacuccagauug

SEQ ID NO: 897430 - RNA, 19 nt, Homo sapiens
  misc_RNA (1)...(19): siRNA sense strand
gcagcuacuucucaacaaa

SEQ ID NO: 897431 - RNA, 19 nt, Homo sapiens
  misc_RNA (1)...(19): siRNA sense strand
ugacagacaucagcagcua

SEQ ID NO: 897432 - RNA, 19 nt, Homo sapiens
  misc_RNA (1)...(19): siRNA sense strand
caacagugcaucuuauuuc

SEQ ID NO: 897433 - RNA, 19 nt, Homo sapiens
  misc_RNA (1)...(19): siRNA sense strand
gguuagaugugacuggauu

SEQ ID NO: 897434 - RNA, 19 nt, Homo sapiens
  misc_RNA (1)...(19): siRNA sense strand
gacuauggauuaaggaaug

SEQ ID NO: 897435 - RNA, 19 nt, Homo sapiens
  misc_RNA (1)...(19): siRNA sense strand
cagaaagcuuguauaugaa

SEQ ID NO: 897436 - RNA, 19 nt, Homo sapiens
  misc_RNA (1)...(19): siRNA sense strand
aagcaaagccagucaagaa

SEQ ID NO: 897437 - RNA, 19 nt, Homo sapiens
  misc_RNA (1)...(19): siRNA sense strand
gaggaguucuggcacacaa

SEQ ID NO: 897438 - RNA, 19 nt, Homo sapiens
  misc_RNA (1)...(19): siRNA sense strand
ggaaugacuaucacaugaa

SEQ ID NO: 897439 - RNA, 19 nt, Homo sapiens
  misc_RNA (1)...(19): siRNA sense strand
ggacggucaucugaacuug

SEQ ID NO: 897440 - RNA, 19 nt, Homo sapiens
  misc_RNA (1)...(19): siRNA sense strand
aggaaugacuaucacauga

SEQ ID NO: 897441 - RNA, 19 nt, Homo sapiens
  misc_RNA (1)...(19): siRNA sense strand
gggaaaagguuagauguga

SEQ ID NO: 897442 - RNA, 19 nt, Homo sapiens
  misc_RNA (1)...(19): siRNA sense strand
gcacaaaagugagcauguu

SEQ ID NO: 897443 - RNA, 19 nt, Homo sapiens
  misc_RNA (1)...(19): siRNA sense strand
aggaaagccugguauaauc

SEQ ID NO: 897444 - RNA, 19 nt, Homo sapiens
  misc_RNA (1)...(19): siRNA sense strand
gauuaaggaaugacuauca

SEQ ID NO: 897445 - RNA, 19 nt, Homo sapiens
  misc_RNA (1)...(19): siRNA sense strand
gcacauuuccuguaagcau

SEQ ID NO: 897446 - RNA, 19 nt, Homo sapiens
  misc_RNA (1)...(19): siRNA sense strand
ggagauggaaaugcuguuu

SEQ ID NO: 897447 - RNA, 19 nt, Homo sapiens
  misc_RNA (1)...(19): siRNA sense strand
cauggugacuauggauuaa

SEQ ID NO: 897448 - RNA, 19 nt, Homo sapiens
  misc_RNA (1)...(19): siRNA sense strand
gcaaagccagucaagaaca

SEQ ID NO: 897449 - RNA, 19 nt, Homo sapiens
  misc_RNA (1)...(19): siRNA sense strand
caggugagcucuguguaug

SEQ ID NO: 897450 - RNA, 19 nt, Homo sapiens
  misc_RNA (1)...(19): siRNA sense strand
ggucucacuucuuacauag

SEQ ID NO: 897451 - RNA, 19 nt, Homo sapiens
  misc_RNA (1)...(19): siRNA sense strand
gacaacagugcaucuuauu

SEQ ID NO: 897452 - RNA, 19 nt, Homo sapiens
  misc_RNA (1)...(19): siRNA sense strand
ggugaggaccugcgccuuu

SEQ ID NO: 897453 - RNA, 19 nt, Homo sapiens
  misc_RNA (1)...(19): siRNA sense strand
ggaguucuggcacacaauu

SEQ ID NO: 897454 - RNA, 19 nt, Homo sapiens
  misc_RNA (1)...(19): siRNA sense strand
acaugaaucugggccaauu

SEQ ID NO: 897455 - RNA, 19 nt, Homo sapiens
  misc_RNA (1)...(19): siRNA sense strand
ggugagcucuguguaugug

SEQ ID NO: 897456 - RNA, 19 nt, Homo sapiens
  misc_RNA (1)...(19): siRNA sense strand
ggaaagccugguauaaucu

SEQ ID NO: 897457 - RNA, 19 nt, Homo sapiens
  misc_RNA (1)...(19): siRNA sense strand
cuacagucaccauauauau

SEQ ID NO: 897458 - RNA, 19 nt, Homo sapiens
  misc_RNA (1)...(19): siRNA sense strand
gcuuguauaugaaccaucu

SEQ ID NO: 897459 - RNA, 19 nt, Homo sapiens
  misc_RNA (1)...(19): siRNA sense strand
ucauggugacuauggauua

SEQ ID NO: 897460 - RNA, 19 nt, Homo sapiens
  misc_RNA (1)...(19): siRNA sense strand
ccaauuggaagcacauuuc

SEQ ID NO: 897461 - RNA, 19 nt, Homo sapiens
  misc_RNA (1)...(19): siRNA sense strand
uaaucuguguggaggguuu

SEQ ID NO: 897462 - RNA, 19 nt, Homo sapiens
  misc_RNA (1)...(19): siRNA sense strand
gaagcacauuuccuguaag

SEQ ID NO: 897463 - RNA, 19 nt, Homo sapiens
  misc_RNA (1)...(19): siRNA sense strand
caucuuauuuccugaacag

SEQ ID NO: 897464 - RNA, 19 nt, Homo sapiens
  misc_RNA (1)...(19): siRNA sense strand
caaaaguucagacucauaa

SEQ ID NO: 897465 - RNA, 19 nt, Homo sapiens
  misc_RNA (1)...(19): siRNA sense strand
uaugaaccaucuacacaag

SEQ ID NO: 897466 - RNA, 19 nt, Homo sapiens
  misc_RNA (1)...(19): siRNA sense strand
ucaagaagcacaaaaguga

SEQ ID NO: 897467 - RNA, 19 nt, Homo sapiens
  misc_RNA (1)...(19): siRNA sense strand
ggagacagaaggaaauggu

SEQ ID NO: 897468 - RNA, 19 nt, Homo sapiens
  misc_RNA (1)...(19): siRNA sense strand
ugaaccaucuacacaagca

SEQ ID NO: 897469 - RNA, 19 nt, Homo sapiens
  misc_RNA (1)...(19): siRNA sense strand
ucacagcuaccccuauuua

SEQ ID NO: 897470 - RNA, 19 nt, Homo sapiens
  misc_RNA (1)...(19): siRNA sense strand
gcaaaaguucagacucaua

SEQ ID NO: 897471 - RNA, 19 nt, Homo sapiens
  misc_RNA (1)...(19): siRNA sense strand
gaguucuggcacacaauua

SEQ ID NO: 897472 - RNA, 19 nt, Homo sapiens
  misc_RNA (1)...(19): siRNA sense strand
caucagcagcuacuucuca

SEQ ID NO: 897473 - RNA, 19 nt, Homo sapiens
  misc_RNA (1)...(19): siRNA sense strand
uugaagagcccaaggugaa

SEQ ID NO: 897474 - RNA, 19 nt, Homo sapiens
  misc_RNA (1)...(19): siRNA sense strand
cugaaagcguggagacaga

SEQ ID NO: 897475 - RNA, 19 nt, Homo sapiens
  misc_RNA (1)...(19): siRNA sense strand
cuucuuacauagggacuuu

SEQ ID NO: 897476 - RNA, 19 nt, Homo sapiens
  misc_RNA (1)...(19): siRNA sense strand
acagucaccauauauauca

SEQ ID NO: 897477 - RNA, 19 nt, Homo sapiens
  misc_RNA (1)...(19): siRNA sense strand
ggaucuacagucaccauau

SEQ ID NO: 897478 - RNA, 19 nt, Homo sapiens
  misc_RNA (1)...(19): siRNA sense strand
uauaugaaccaucuacaca

SEQ ID NO: 897479 - RNA, 19 nt, Homo sapiens
  misc_RNA (1)...(19): siRNA sense strand
acaacagugcaucuuauuu

SEQ ID NO: 897480 - RNA, 19 nt, Homo sapiens
  misc_RNA (1)...(19): siRNA sense strand
aggucucacuucuuacaua

SEQ ID NO: 897481 - RNA, 19 nt, Homo sapiens
  misc_RNA (1)...(19): siRNA sense strand
gaaagccugguauaaucug

SEQ ID NO: 897482 - RNA, 19 nt, Homo sapiens
  misc_RNA (1)...(19): siRNA sense strand
ugaacagaaagcuuguaua

SEQ ID NO: 897483 - RNA, 19 nt, Homo sapiens
  misc_RNA (1)...(19): siRNA sense strand
uaaccaaggagaaguaaaa

SEQ ID NO: 897484 - RNA, 19 nt, Homo sapiens
  misc_RNA (1)...(19): siRNA sense strand
caaagccagucaagaacac

SEQ ID NO: 897485 - RNA, 19 nt, Homo sapiens
  misc_RNA (1)...(19): siRNA sense strand
ccaggugagcucuguguau

SEQ ID NO: 897486 - RNA, 19 nt, Homo sapiens
  misc_RNA (1)...(19): siRNA sense strand
gauuuuggauguugggaaa

SEQ ID NO: 897487 - RNA, 19 nt, Homo sapiens
  misc_RNA (1)...(19): siRNA sense strand
ucuacagucaccauauaua

SEQ ID NO: 897488 - RNA, 19 nt, Homo sapiens
  misc_RNA (1)...(19): siRNA sense strand
ugaccaugccucacagcua

SEQ ID NO: 897489 - RNA, 19 nt, Homo sapiens
  misc_RNA (1)...(19): siRNA sense strand
cagcagcuacuucucaaca

SEQ ID NO: 897490 - RNA, 19 nt, Homo sapiens
  misc_RNA (1)...(19): siRNA sense strand
cugcuucggugaaagaaag

SEQ ID NO: 897491 - RNA, 19 nt, Homo sapiens
  misc_RNA (1)...(19): siRNA sense strand
aagcaaaaguucagacuca

SEQ ID NO: 897492 - RNA, 19 nt, Homo sapiens
  misc_RNA (1)...(19): siRNA sense strand
ucaacaaaggucucacuuc

SEQ ID NO: 897493 - RNA, 19 nt, Homo sapiens
  misc_RNA (1)...(19): siRNA sense strand
gcccugacgaauauaaaga

SEQ ID NO: 897494 - RNA, 19 nt, Homo sapiens
  misc_RNA (1)...(19): siRNA sense strand
aggacaacagugcaucuua

SEQ ID NO: 897495 - RNA, 19 nt, Homo sapiens
  misc_RNA (1)...(19): siRNA sense strand
gacaucagcagcuacuucu

SEQ ID NO: 897496 - RNA, 19 nt, Homo sapiens
  misc_RNA (1)...(19): siRNA sense strand
caagcaaagccagucaaga

SEQ ID NO: 897497 - RNA, 19 nt, Homo sapiens
  misc_RNA (1)...(19): siRNA sense strand
ugaagagcccaaggugaaa

SEQ ID NO: 897498 - RNA, 19 nt, Homo sapiens
  misc_RNA (1)...(19): siRNA sense strand
aaaggucucacuucuuaca

SEQ ID NO: 897499 - RNA, 19 nt, Homo sapiens
  misc_RNA (1)...(19): siRNA sense strand
uaaggaaugacuaucacau

SEQ ID NO: 897500 - RNA, 19 nt, Homo sapiens
  misc_RNA (1)...(19): siRNA sense strand
gcguggagacagaaggaaa

SEQ ID NO: 897501 - RNA, 19 nt, Homo sapiens
  misc_RNA (1)...(19): siRNA sense strand
guguggaggguuucaaaga

SEQ ID NO: 897502 - RNA, 19 nt, Homo sapiens
  misc_RNA (1)...(19): siRNA sense strand
cagcaggaccuaaggaaaa

SEQ ID NO: 897503 - RNA, 19 nt, Homo sapiens
  misc_RNA (1)...(19): siRNA sense strand
ccucacagcuaccccuauu

SEQ ID NO: 897504 - RNA, 19 nt, Homo sapiens
  misc_RNA (1)...(19): siRNA sense strand
ccuguaagcaugcugaaag

SEQ ID NO: 897505 - RNA, 19 nt, Homo sapiens
  misc_RNA (1)...(19): siRNA sense strand
uguggaggguuucaaagag

SEQ ID NO: 897506 - RNA, 19 nt, Homo sapiens
  misc_RNA (1)...(19): siRNA sense strand
gugacuggauuuugcauga

SEQ ID NO: 897507 - RNA, 19 nt, Homo sapiens
  misc_RNA (1)...(19): siRNA sense strand
ucagcaggaccuaaggaaa

SEQ ID NO: 897508 - RNA, 19 nt, Homo sapiens
  misc_RNA (1)...(19): siRNA sense strand
uccaguggcuacaggacaa

SEQ ID NO: 897509 - RNA, 19 nt, Homo sapiens
  misc_RNA (1)...(19): siRNA sense strand
agacaucagcagcuacuuc

SEQ ID NO: 897510 - RNA, 19 nt, Homo sapiens
  misc_RNA (1)...(19): siRNA sense strand
gcaucuuauuuccugaaca

SEQ ID NO: 897511 - RNA, 19 nt, Homo sapiens
  misc_RNA (1)...(19): siRNA sense strand
gauuuugcaugacaggaaa

SEQ ID NO: 897512 - RNA, 19 nt, Homo sapiens
  misc_RNA (1)...(19): siRNA sense strand
gagauugccuugaagagua

SEQ ID NO: 897513 - RNA, 19 nt, Homo sapiens
  misc_RNA (1)...(19): siRNA sense strand
gaagagguaugaggaggaa

SEQ ID NO: 897514 - RNA, 19 nt, Homo sapiens
  misc_RNA (1)...(19): siRNA sense strand
ucaaggcucugaacaacaa

SEQ ID NO: 897515 - RNA, 19 nt, Homo sapiens
  misc_RNA (1)...(19): siRNA sense strand
gcucagagaucgagaacgu

SEQ ID NO: 897516 - RNA, 19 nt, Homo sapiens
  misc_RNA (1)...(19): siRNA sense strand
gaucaaggcucugaacaac

SEQ ID NO: 897517 - RNA, 19 nt, Homo sapiens
  misc_RNA (1)...(19): siRNA sense strand
ggaggcauccaccagguua

SEQ ID NO: 897518 - RNA, 19 nt, Homo sapiens
  misc_RNA (1)...(19): siRNA sense strand
gaguggaggcuauggauuu

SEQ ID NO: 897519 - RNA, 19 nt, Homo sapiens
  misc_RNA (1)...(19): siRNA sense strand
ggucagcgguggcuaugug

SEQ ID NO: 897520 - RNA, 19 nt, Homo sapiens
  misc_RNA (1)...(19): siRNA sense strand
caggaugucaggagaauuu

SEQ ID NO: 897521 - RNA, 19 nt, Homo sapiens
  misc_RNA (1)...(19): siRNA sense strand
caaguucgccuccuucauc

SEQ ID NO: 897522 - RNA, 19 nt, Homo sapiens
  misc_RNA (1)...(19): siRNA sense strand
ggacaacaaccggaaccua

SEQ ID NO: 897523 - RNA, 19 nt, Homo sapiens
  misc_RNA (1)...(19): siRNA sense strand
cagagaauccgcucagaga

SEQ ID NO: 897524 - RNA, 19 nt, Homo sapiens
  misc_RNA (1)...(19): siRNA sense strand
acauggagaucgccaccua

SEQ ID NO: 897525 - RNA, 19 nt, Homo sapiens
  misc_RNA (1)...(19): siRNA sense strand
guggaggacuacaagaaga

SEQ ID NO: 897526 - RNA, 19 nt, Homo sapiens
  misc_RNA (1)...(19): siRNA sense strand
ggauguggaugcugcuuac

SEQ ID NO: 897527 - RNA, 19 nt, Homo sapiens
  misc_RNA (1)...(19): siRNA sense strand
gucagcaucuccaucauca

SEQ ID NO: 897528 - RNA, 19 nt, Homo sapiens
  misc_RNA (1)...(19): siRNA sense strand
ggacagcaucauugacgaa

SEQ ID NO: 897529 - RNA, 19 nt, Homo sapiens
  misc_RNA (1)...(19): siRNA sense strand
cugaacaacugcaagaaca

SEQ ID NO: 897530 - RNA, 19 nt, Homo sapiens
  misc_RNA (1)...(19): siRNA sense strand
cagcagagaacgaguuugu

SEQ ID NO: 897531 - RNA, 19 nt, Homo sapiens
  misc_RNA (1)...(19): siRNA sense strand
acucggagcugaggaaugu

SEQ ID NO: 897532 - RNA, 19 nt, Homo sapiens
  misc_RNA (1)...(19): siRNA sense strand
gguaugaggaggaaaucaa

SEQ ID NO: 897533 - RNA, 19 nt, Homo sapiens
  misc_RNA (1)...(19): siRNA sense strand
gagaauccgcucagagauc

SEQ ID NO: 897534 - RNA, 19 nt, Homo sapiens
  misc_RNA (1)...(19): siRNA sense strand
gaaguccgcacccaguaug

SEQ ID NO: 897535 - RNA, 19 nt, Homo sapiens
  misc_RNA (1)...(19): siRNA sense strand
gaagaguggaggcuaugga

SEQ ID NO: 897536 - RNA, 19 nt, Homo sapiens
  misc_RNA (1)...(19): siRNA sense strand
gagugcacccuccaagaaa

SEQ ID NO: 897537 - RNA, 19 nt, Homo sapiens
  misc_RNA (1)...(19): siRNA sense strand
gaagcuggcccuggacaug

SEQ ID NO: 897538 - RNA, 19 nt, Homo sapiens
  misc_RNA (1)...(19): siRNA sense strand
ggacagcagcagagaacga

SEQ ID NO: 897539 - RNA, 19 nt, Homo sapiens
  misc_RNA (1)...(19): siRNA sense strand
gaauuucccuccccuguca

SEQ ID NO: 897540 - RNA, 19 nt, Homo sapiens
  misc_RNA (1)...(19): siRNA sense strand
cagcaucauugacgaaguc

SEQ ID NO: 897541 - RNA, 19 nt, Homo sapiens
  misc_RNA (1)...(19): siRNA sense strand
gaccuggacagcaucauug

SEQ ID NO: 897542 - RNA, 19 nt, Homo sapiens
  misc_RNA (1)...(19): siRNA sense strand
ggaugcugcuuacgccaau

SEQ ID NO: 897543 - RNA, 19 nt, Homo sapiens
  misc_RNA (1)...(19): siRNA sense strand
gagacaacgcccugaagga

SEQ ID NO: 897544 - RNA, 19 nt, Homo sapiens
  misc_RNA (1)...(19): siRNA sense strand
ugagugcacccuccaagaa

SEQ ID NO: 897545 - RNA, 19 nt, Homo sapiens
  misc_RNA (1)...(19): siRNA sense strand
acaacaaguucgccuccuu

SEQ ID NO: 897546 - RNA, 19 nt, Homo sapiens
  misc_RNA (1)...(19): siRNA sense strand
agauugccuugaagaguaa

SEQ ID NO: 897547 - RNA, 19 nt, Homo sapiens
  misc_RNA (1)...(19): siRNA sense strand
ggagauugccuugaagagu

SEQ ID NO: 897548 - RNA, 19 nt, Homo sapiens
  misc_RNA (1)...(19): siRNA sense strand
gaggagauugccuugaaga

SEQ ID NO: 897549 - RNA, 19 nt, Homo sapiens
  misc_RNA (1)...(19): siRNA sense strand
augaggagauugccuugaa

SEQ ID NO: 897550 - RNA, 19 nt, Homo sapiens
  misc_RNA (1)...(19): siRNA sense strand
gaccugaacaacugcaaga

SEQ ID NO: 897551 - RNA, 19 nt, Homo sapiens
  misc_RNA (1)...(19): siRNA sense strand
gcagugccaacgauuacaa

SEQ ID NO: 897552 - RNA, 19 nt, Homo sapiens
  misc_RNA (1)...(19): siRNA sense strand
caagaaggauguggaugcu

SEQ ID NO: 897553 - RNA, 19 nt, Homo sapiens
  misc_RNA (1)...(19): siRNA sense strand
ucgagaacgugaagaagca

SEQ ID NO: 897554 - RNA, 19 nt, Homo sapiens
  misc_RNA (1)...(19): siRNA sense strand
cagguuaccgucaaugaga

SEQ ID NO: 897555 - RNA, 19 nt, Homo sapiens
  misc_RNA (1)...(19): siRNA sense strand
gaagcauguuuggcagugu

SEQ ID NO: 897556 - RNA, 19 nt, Homo sapiens
  misc_RNA (1)...(19): siRNA sense strand
cagauccagucccacauca

SEQ ID NO: 897557 - RNA, 19 nt, Homo sapiens
  misc_RNA (1)...(19): siRNA sense strand
aagccgagaucacucagau

SEQ ID NO: 897558 - RNA, 19 nt, Homo sapiens
  misc_RNA (1)...(19): siRNA sense strand
guucuucaggugucucuuu

SEQ ID NO: 897559 - RNA, 19 nt, Homo sapiens
  misc_RNA (1)...(19): siRNA sense strand
gaacaacugcaagaacaac

SEQ ID NO: 897560 - RNA, 19 nt, Homo sapiens
  misc_RNA (1)...(19): siRNA sense strand
gauccagucccacaucagu

SEQ ID NO: 897561 - RNA, 19 nt, Homo sapiens
  misc_RNA (1)...(19): siRNA sense strand
ggaccaggagaucaaguuc

SEQ ID NO: 897562 - RNA, 19 nt, Homo sapiens
  misc_RNA (1)...(19): siRNA sense strand
ggaaugugcgggacguagu

SEQ ID NO: 897563 - RNA, 19 nt, Homo sapiens
  misc_RNA (1)...(19): siRNA sense strand
ccaccagguuaccgucaau

SEQ ID NO: 897564 - RNA, 19 nt, Homo sapiens
  misc_RNA (1)...(19): siRNA sense strand
accaggagaucaaguucuu

SEQ ID NO: 897565 - RNA, 19 nt, Homo sapiens
  misc_RNA (1)...(19): siRNA sense strand
cgggaagaguggaggcuau

SEQ ID NO: 897566 - RNA, 19 nt, Homo sapiens
  misc_RNA (1)...(19): siRNA sense strand
gaaugugcgggacguagug

SEQ ID NO: 897567 - RNA, 19 nt, Homo sapiens
  misc_RNA (1)...(19): siRNA sense strand
gaugcugcuuacgccaaua

SEQ ID NO: 897568 - RNA, 19 nt, Homo sapiens
  misc_RNA (1)...(19): siRNA sense strand
cugcucagcugugcucuca

SEQ ID NO: 897569 - RNA, 19 nt, Homo sapiens
  misc_RNA (1)...(19): siRNA sense strand
gaguuugugcugcucaaga

SEQ ID NO: 897570 - RNA, 19 nt, Homo sapiens
  misc_RNA (1)...(19): siRNA sense strand
gaaggguuccagccugagu

SEQ ID NO: 897571 - RNA, 19 nt, Homo sapiens
  misc_RNA (1)...(19): siRNA sense strand
agacaacgcccugaaggau

SEQ ID NO: 897572 - RNA, 19 nt, Homo sapiens
  misc_RNA (1)...(19): siRNA sense strand
aguuugugcugcucaagaa

SEQ ID NO: 897573 - RNA, 19 nt, Homo sapiens
  misc_RNA (1)...(19): siRNA sense strand
ucagcaaccugcggaagca

SEQ ID NO: 897574 - RNA, 19 nt, Homo sapiens
  misc_RNA (1)...(19): siRNA sense strand
ugccaacgauuacaaagac

SEQ ID NO: 897575 - RNA, 19 nt, Homo sapiens
  misc_RNA (1)...(19): siRNA sense strand
gugccaacgauuacaaaga

SEQ ID NO: 897576 - RNA, 19 nt, Homo sapiens
  misc_RNA (1)...(19): siRNA sense strand
cgccaccuaucgcaagcua

SEQ ID NO: 897577 - RNA, 19 nt, Homo sapiens
  misc_RNA (1)...(19): siRNA sense strand
gaccaaguuccaagagcuu

SEQ ID NO: 897578 - RNA, 19 nt, Homo sapiens
  misc_RNA (1)...(19): siRNA sense strand
cgaaguccgcacccaguau

SEQ ID NO: 897579 - RNA, 19 nt, Homo sapiens
  misc_RNA (1)...(19): siRNA sense strand
caggagaucaaguucuuca

SEQ ID NO: 897580 - RNA, 19 nt, Homo sapiens
  misc_RNA (1)...(19): siRNA sense strand
gcucaagaaggauguggau

SEQ ID NO: 897581 - RNA, 19 nt, Homo sapiens
  misc_RNA (1)...(19): siRNA sense strand
cagcagcagagaacgaguu

SEQ ID NO: 897582 - RNA, 19 nt, Homo sapiens
  misc_RNA (1)...(19): siRNA sense strand
ugaggagauugccuugaag

SEQ ID NO: 897583 - RNA, 19 nt, Homo sapiens
  misc_RNA (1)...(19): siRNA sense strand
ccauggaccaggagaucaa

SEQ ID NO: 897584 - RNA, 19 nt, Homo sapiens
  misc_RNA (1)...(19): siRNA sense strand
ggagcagcagaaccaggua

SEQ ID NO: 897585 - RNA, 19 nt, Homo sapiens
  misc_RNA (1)...(19): siRNA sense strand
acaacaaccggaaccuaga

SEQ ID NO: 897586 - RNA, 19 nt, Homo sapiens
  misc_RNA (1)...(19): siRNA sense strand
gaagccgagaucacucaga

SEQ ID NO: 897587 - RNA, 19 nt, Homo sapiens
  misc_RNA (1)...(19): siRNA sense strand
ggacuacaagaagagguau

SEQ ID NO: 897588 - RNA, 19 nt, Homo sapiens
  misc_RNA (1)...(19): siRNA sense strand
aaacaccaagaaugaaauc

SEQ ID NO: 897589 - RNA, 19 nt, Homo sapiens
  misc_RNA (1)...(19): siRNA sense strand
gcacccaguaugaggagau

SEQ ID NO: 897590 - RNA, 19 nt, Homo sapiens
  misc_RNA (1)...(19): siRNA sense strand
uggaagaccuccucaauga

SEQ ID NO: 897591 - RNA, 19 nt, Homo sapiens
  misc_RNA (1)...(19): siRNA sense strand
gcugguaccugcccuccua

SEQ ID NO: 897592 - RNA, 19 nt, Homo sapiens
  misc_RNA (1)...(19): siRNA sense strand
gcaccuggccuucgucuau

SEQ ID NO: 897593 - RNA, 19 nt, Homo sapiens
  misc_RNA (1)...(19): siRNA sense strand
caaugucacugagauauca

SEQ ID NO: 897594 - RNA, 19 nt, Homo sapiens
  misc_RNA (1)...(19): siRNA sense strand
ucaaugggcucuggguaga

SEQ ID NO: 897595 - RNA, 19 nt, Homo sapiens
  misc_RNA (1)...(19): siRNA sense strand
ccaacccucuugccucguu

SEQ ID NO: 897596 - RNA, 19 nt, Homo sapiens
  misc_RNA (1)...(19): siRNA sense strand
ccacagcaucgcuuucuug

SEQ ID NO: 897597 - RNA, 19 nt, Homo sapiens
  misc_RNA (1)...(19): siRNA sense strand
caccuggccuucgucuaua

SEQ ID NO: 897598 - RNA, 19 nt, Homo sapiens
  misc_RNA (1)...(19): siRNA sense strand
gcuccugggugaccaucaa

SEQ ID NO: 897599 - RNA, 19 nt, Homo sapiens
  misc_RNA (1)...(19): siRNA sense strand
ccuacuaccucaccaccuu

SEQ ID NO: 897600 - RNA, 19 nt, Homo sapiens
  misc_RNA (1)...(19): siRNA sense strand
ccagcugccuuuccgaagu

SEQ ID NO: 897601 - RNA, 19 nt, Homo sapiens
  misc_RNA (1)...(19): siRNA sense strand
ugacaucgcacagggaguu

SEQ ID NO: 897602 - RNA, 19 nt, Homo sapiens
  misc_RNA (1)...(19): siRNA sense strand
cagcugccuuuccgaagug

SEQ ID NO: 897603 - RNA, 19 nt, Homo sapiens
  misc_RNA (1)...(19): siRNA sense strand
ccucguuggucuccauguu

SEQ ID NO: 897604 - RNA, 19 nt, Homo sapiens
  misc_RNA (1)...(19): siRNA sense strand
gcgggaagagaaugacuug

SEQ ID NO: 897605 - RNA, 19 nt, Homo sapiens
  misc_RNA (1)...(19): siRNA sense strand
guggaagaccuccucaaug

SEQ ID NO: 897606 - RNA, 19 nt, Homo sapiens
  misc_RNA (1)...(19): siRNA sense strand
ggaauggaagcacccuugu

SEQ ID NO: 897607 - RNA, 19 nt, Homo sapiens
  misc_RNA (1)...(19): siRNA sense strand
cuaccucaccaccuucuuu

SEQ ID NO: 897608 - RNA, 19 nt, Homo sapiens
  misc_RNA (1)...(19): siRNA sense strand
ggucugcgucuucggaaug

SEQ ID NO: 897609 - RNA, 19 nt, Homo sapiens
  misc_RNA (1)...(19): siRNA sense strand
ucacccugcuccaucacuu

SEQ ID NO: 897610 - RNA, 19 nt, Homo sapiens
  misc_RNA (1)...(19): siRNA sense strand
cagcguaccaagcccugua

SEQ ID NO: 897611 - RNA, 19 nt, Homo sapiens
  misc_RNA (1)...(19): siRNA sense strand
ucauccagcuggccaacau

SEQ ID NO: 897612 - RNA, 19 nt, Homo sapiens
  misc_RNA (1)...(19): siRNA sense strand
ggaaccgucaccugcauca

SEQ ID NO: 897613 - RNA, 19 nt, Homo sapiens
  misc_RNA (1)...(19): siRNA sense strand
gauaucagacagcguacca

SEQ ID NO: 897614 - RNA, 19 nt, Homo sapiens
  misc_RNA (1)...(19): siRNA sense strand
ggucuucuuccuccuccua

SEQ ID NO: 897615 - RNA, 19 nt, Homo sapiens
  misc_RNA (1)...(19): siRNA sense strand
gcgucaaugucacugagau

SEQ ID NO: 897616 - RNA, 19 nt, Homo sapiens
  misc_RNA (1)...(19): siRNA sense strand
gaauggaagcacccuuguc

SEQ ID NO: 897617 - RNA, 19 nt, Homo sapiens
  misc_RNA (1)...(19): siRNA sense strand
cgucaaugucacugagaua

SEQ ID NO: 897618 - RNA, 19 nt, Homo sapiens
  misc_RNA (1)...(19): siRNA sense strand
ccgaagugcccaucaucuu

SEQ ID NO: 897619 - RNA, 19 nt, Homo sapiens
  misc_RNA (1)...(19): siRNA sense strand
ucagcuacgucaaggugau

SEQ ID NO: 897620 - RNA, 19 nt, Homo sapiens
  misc_RNA (1)...(19): siRNA sense strand
cguggaagaccuccucaau

SEQ ID NO: 897621 - RNA, 19 nt, Homo sapiens
  misc_RNA (1)...(19): siRNA sense strand
ucaccugcaucaucuuugc

SEQ ID NO: 897622 - RNA, 19 nt, Homo sapiens
  misc_RNA (1)...(19): siRNA sense strand
cgucaccugcaucaucuuu

SEQ ID NO: 897623 - RNA, 19 nt, Homo sapiens
  misc_RNA (1)...(19): siRNA sense strand
caacaugucaacagaauua

SEQ ID NO: 897624 - RNA, 19 nt, Homo sapiens
  misc_RNA (1)...(19): siRNA sense strand
gaaaggagaagaaagcaaa

SEQ ID NO: 897625 - RNA, 19 nt, Homo sapiens
  misc_RNA (1)...(19): siRNA sense strand
gaauucugcugcuguuauu

SEQ ID NO: 897626 - RNA, 19 nt, Homo sapiens
  misc_RNA (1)...(19): siRNA sense strand
gagcauaagcguucacuga

SEQ ID NO: 897627 - RNA, 19 nt, Homo sapiens
  misc_RNA (1)...(19): siRNA sense strand
gagaagaaagcaaagguuu

SEQ ID NO: 897628 - RNA, 19 nt, Homo sapiens
  misc_RNA (1)...(19): siRNA sense strand
ggaagaaacgcgagcaaga

SEQ ID NO: 897629 - RNA, 19 nt, Homo sapiens
  misc_RNA (1)...(19): siRNA sense strand
gaagaaacgcgagcaagaa

SEQ ID NO: 897630 - RNA, 19 nt, Homo sapiens
  misc_RNA (1)...(19): siRNA sense strand
gcuugggacacacaaauua

SEQ ID NO: 897631 - RNA, 19 nt, Homo sapiens
  misc_RNA (1)...(19): siRNA sense strand
ggaauucugcugcuguuau

SEQ ID NO: 897632 - RNA, 19 nt, Homo sapiens
  misc_RNA (1)...(19): siRNA sense strand
gaucuuaaagcaaguuugu

SEQ ID NO: 897633 - RNA, 19 nt, Homo sapiens
  misc_RNA (1)...(19): siRNA sense strand
ccacacaaaggaaagcuaa

SEQ ID NO: 897634 - RNA, 19 nt, Homo sapiens
  misc_RNA (1)...(19): siRNA sense strand
cagcugcuacuaaagauaa

SEQ ID NO: 897635 - RNA, 19 nt, Homo sapiens
  misc_RNA (1)...(19): siRNA sense strand
caacuaugaaccacacaaa

SEQ ID NO: 897636 - RNA, 19 nt, Homo sapiens
  misc_RNA (1)...(19): siRNA sense strand
ggagaagaaagcaaagguu

SEQ ID NO: 897637 - RNA, 19 nt, Homo sapiens
  misc_RNA (1)...(19): siRNA sense strand
gaacgaaaggagaagaaag

SEQ ID NO: 897638 - RNA, 19 nt, Homo sapiens
  misc_RNA (1)...(19): siRNA sense strand
aaaucaacaugucaacaga

SEQ ID NO: 897639 - RNA, 19 nt, Homo sapiens
  misc_RNA (1)...(19): siRNA sense strand
gaagagcaacggaagaaac

SEQ ID NO: 897640 - RNA, 19 nt, Homo sapiens
  misc_RNA (1)...(19): siRNA sense strand
caagcgcucugcuaucucu

SEQ ID NO: 897641 - RNA, 19 nt, Homo sapiens
  misc_RNA (1)...(19): siRNA sense strand
gaaacgcgagcaagaacga

SEQ ID NO: 897642 - RNA, 19 nt, Homo sapiens
  misc_RNA (1)...(19): siRNA sense strand
ccaagacuccagccagaaa

SEQ ID NO: 897643 - RNA, 19 nt, Homo sapiens
  misc_RNA (1)...(19): siRNA sense strand
ggucaggacuccaguaccu

SEQ ID NO: 897644 - RNA, 19 nt, Homo sapiens
  misc_RNA (1)...(19): siRNA sense strand
cauuuuggcugaagauuaa

SEQ ID NO: 897645 - RNA, 19 nt, Homo sapiens
  misc_RNA (1)...(19): siRNA sense strand
acuccagucuccaauaaga

SEQ ID NO: 897646 - RNA, 19 nt, Homo sapiens
  misc_RNA (1)...(19): siRNA sense strand
ggaagagcaacggaagaaa

SEQ ID NO: 897647 - RNA, 19 nt, Homo sapiens
  misc_RNA (1)...(19): siRNA sense strand
ccaauaagaaaccaguguu

SEQ ID NO: 897648 - RNA, 19 nt, Homo sapiens
  misc_RNA (1)...(19): siRNA sense strand
aaccaguguuugaucuuaa

SEQ ID NO: 897649 - RNA, 19 nt, Homo sapiens
  misc_RNA (1)...(19): siRNA sense strand
uaaaucaacaugucaacag

SEQ ID NO: 897650 - RNA, 19 nt, Homo sapiens
  misc_RNA (1)...(19): siRNA sense strand
ucacucaagcgcucugcua

SEQ ID NO: 897651 - RNA, 19 nt, Homo sapiens
  misc_RNA (1)...(19): siRNA sense strand
ggacacacaaauuaaagac

SEQ ID NO: 897652 - RNA, 19 nt, Homo sapiens
  misc_RNA (1)...(19): siRNA sense strand
gggacacacaaauuaaaga

SEQ ID NO: 897653 - RNA, 19 nt, Homo sapiens
  misc_RNA (1)...(19): siRNA sense strand
ugcuaucucugcagcuaaa

SEQ ID NO: 897654 - RNA, 19 nt, Homo sapiens
  misc_RNA (1)...(19): siRNA sense strand
caagaacgaaaggagaaga

SEQ ID NO: 897655 - RNA, 19 nt, Homo sapiens
  misc_RNA (1)...(19): siRNA sense strand
cuaugaaccacacaaagga

SEQ ID NO: 897656 - RNA, 19 nt, Homo sapiens
  misc_RNA (1)...(19): siRNA sense strand
ggggcaaucuaaagaaaau

SEQ ID NO: 897657 - RNA, 19 nt, Homo sapiens
  misc_RNA (1)...(19): siRNA sense strand
gggaauucugcugcuguua

SEQ ID NO: 897658 - RNA, 19 nt, Homo sapiens
  misc_RNA (1)...(19): siRNA sense strand
cgaaaggagaagaaagcaa

SEQ ID NO: 897659 - RNA, 19 nt, Homo sapiens
  misc_RNA (1)...(19): siRNA sense strand
ccagacaaaggaagagcaa

SEQ ID NO: 897660 - RNA, 19 nt, Homo sapiens
  misc_RNA (1)...(19): siRNA sense strand
uuucagcugcuacuaaaga

SEQ ID NO: 897661 - RNA, 19 nt, Homo sapiens
  misc_RNA (1)...(19): siRNA sense strand
cucaagcgcucugcuaucu

SEQ ID NO: 897662 - RNA, 19 nt, Homo sapiens
  misc_RNA (1)...(19): siRNA sense strand
accaguguuugaucuuaaa

SEQ ID NO: 897663 - RNA, 19 nt, Homo sapiens
  misc_RNA (1)...(19): siRNA sense strand
gcgaaggggccucauuuug

SEQ ID NO: 897664 - RNA, 19 nt, Homo sapiens
  misc_RNA (1)...(19): siRNA sense strand
guuuucagcugcuacuaaa

SEQ ID NO: 897665 - RNA, 19 nt, Homo sapiens
  misc_RNA (1)...(19): siRNA sense strand
uaacagagauucaaaggua

SEQ ID NO: 897666 - RNA, 19 nt, Homo sapiens
  misc_RNA (1)...(19): siRNA sense strand
gaaaugagaaucaggauga

SEQ ID NO: 897667 - RNA, 19 nt, Homo sapiens
  misc_RNA (1)...(19): siRNA sense strand
caacaugucaacagaauua

SEQ ID NO: 897668 - RNA, 19 nt, Homo sapiens
  misc_RNA (1)...(19): siRNA sense strand
ggaaagaaaucucucuaca

SEQ ID NO: 897669 - RNA, 19 nt, Homo sapiens
  misc_RNA (1)...(19): siRNA sense strand
gaaaggagaagaaagcaaa

SEQ ID NO: 897670 - RNA, 19 nt, Homo sapiens
  misc_RNA (1)...(19): siRNA sense strand
aaagaaaucucucuacaca

SEQ ID NO: 897671 - RNA, 19 nt, Homo sapiens
  misc_RNA (1)...(19): siRNA sense strand
gaauucugcugcuguuauu

SEQ ID NO: 897672 - RNA, 19 nt, Homo sapiens
  misc_RNA (1)...(19): siRNA sense strand
agaaaucucucuacacaga

SEQ ID NO: 897673 - RNA, 19 nt, Homo sapiens
  misc_RNA (1)...(19): siRNA sense strand
gagcauaagcguucacuga

SEQ ID NO: 897674 - RNA, 19 nt, Homo sapiens
  misc_RNA (1)...(19): siRNA sense strand
uaaguaaucccacugaauu

SEQ ID NO: 897675 - RNA, 19 nt, Homo sapiens
  misc_RNA (1)...(19): siRNA sense strand
gaagaacacaauuccauga

SEQ ID NO: 897676 - RNA, 19 nt, Homo sapiens
  misc_RNA (1)...(19): siRNA sense strand
gagaagaaagcaaagguuu

SEQ ID NO: 897677 - RNA, 19 nt, Homo sapiens
  misc_RNA (1)...(19): siRNA sense strand
ggaagaaacgcgagcaaga

SEQ ID NO: 897678 - RNA, 19 nt, Homo sapiens
  misc_RNA (1)...(19): siRNA sense strand
gaagaaacgcgagcaagaa

SEQ ID NO: 897679 - RNA, 19 nt, Homo sapiens
  misc_RNA (1)...(19): siRNA sense strand
gagcuggacucccucaagu

SEQ ID NO: 897680 - RNA, 19 nt, Homo sapiens
  misc_RNA (1)...(19): siRNA sense strand
acagugaccugcagaacuu

SEQ ID NO: 897681 - RNA, 19 nt, Homo sapiens
  misc_RNA (1)...(19): siRNA sense strand
gaaucaggaugaaagucaa

SEQ ID NO: 897682 - RNA, 19 nt, Homo sapiens
  misc_RNA (1)...(19): siRNA sense strand
ucacuacuccaaacuuuaa

SEQ ID NO: 897683 - RNA, 19 nt, Homo sapiens
  misc_RNA (1)...(19): siRNA sense strand
aaucacuacuccaaacuuu

SEQ ID NO: 897684 - RNA, 19 nt, Homo sapiens
  misc_RNA (1)...(19): siRNA sense strand
gcuugggacacacaaauua

SEQ ID NO: 897685 - RNA, 19 nt, Homo sapiens
  misc_RNA (1)...(19): siRNA sense strand
ggaauucugcugcuguuau

SEQ ID NO: 897686 - RNA, 19 nt, Homo sapiens
  misc_RNA (1)...(19): siRNA sense strand
ggaaagccaggaucucaga

SEQ ID NO: 897687 - RNA, 19 nt, Homo sapiens
  misc_RNA (1)...(19): siRNA sense strand
gaucuuaaagcaaguuugu

SEQ ID NO: 897688 - RNA, 19 nt, Homo sapiens
  misc_RNA (1)...(19): siRNA sense strand
gaaaggcuacauuaaacau

SEQ ID NO: 897689 - RNA, 19 nt, Homo sapiens
  misc_RNA (1)...(19): siRNA sense strand
ccacacaaaggaaagcuaa

SEQ ID NO: 897690 - RNA, 19 nt, Homo sapiens
  misc_RNA (1)...(19): siRNA sense strand
gcaccaagaagcugagaau

SEQ ID NO: 897691 - RNA, 19 nt, Homo sapiens
  misc_RNA (1)...(19): siRNA sense strand
cagcugcuacuaaagauaa

SEQ ID NO: 897692 - RNA, 19 nt, Homo sapiens
  misc_RNA (1)...(19): siRNA sense strand
ccaagaagcugagaaugcu

SEQ ID NO: 897693 - RNA, 19 nt, Homo sapiens
  misc_RNA (1)...(19): siRNA sense strand
ggagaagaaagcaaagguu

SEQ ID NO: 897694 - RNA, 19 nt, Homo sapiens
  misc_RNA (1)...(19): siRNA sense strand
caacuaugaaccacacaaa

SEQ ID NO: 897695 - RNA, 19 nt, Homo sapiens
  misc_RNA (1)...(19): siRNA sense strand
uaaaagaacugcaaucacu

SEQ ID NO: 897696 - RNA, 19 nt, Homo sapiens
  misc_RNA (1)...(19): siRNA sense strand
gaacgaaaggagaagaaag

SEQ ID NO: 897697 - RNA, 19 nt, Homo sapiens
  misc_RNA (1)...(19): siRNA sense strand
gaaaaggaaaugagaauca

SEQ ID NO: 897698 - RNA, 19 nt, Homo sapiens
  misc_RNA (1)...(19): siRNA sense strand
gaagagcaacggaagaaac

SEQ ID NO: 897699 - RNA, 19 nt, Homo sapiens
  misc_RNA (1)...(19): siRNA sense strand
aaaucaacaugucaacaga

SEQ ID NO: 897700 - RNA, 19 nt, Homo sapiens
  misc_RNA (1)...(19): siRNA sense strand
gaaagaaaucucucuacac

SEQ ID NO: 897701 - RNA, 19 nt, Homo sapiens
  misc_RNA (1)...(19): siRNA sense strand
cugcagaacuuagccaaga

SEQ ID NO: 897702 - RNA, 19 nt, Homo sapiens
  misc_RNA (1)...(19): siRNA sense strand
gaucagcaaccaggaagaa

SEQ ID NO: 897703 - RNA, 19 nt, Homo sapiens
  misc_RNA (1)...(19): siRNA sense strand
caagcgcucugcuaucucu

SEQ ID NO: 897704 - RNA, 19 nt, Homo sapiens
  misc_RNA (1)...(19): siRNA sense strand
aaggcuacauuaaacauga

SEQ ID NO: 897705 - RNA, 19 nt, Homo sapiens
  misc_RNA (1)...(19): siRNA sense strand
gaaacgcgagcaagaacga

SEQ ID NO: 897706 - RNA, 19 nt, Homo sapiens
  misc_RNA (1)...(19): siRNA sense strand
ccaagacuccagccagaaa

SEQ ID NO: 897707 - RNA, 19 nt, Homo sapiens
  misc_RNA (1)...(19): siRNA sense strand
cuugaaaggcuacauuaaa

SEQ ID NO: 897708 - RNA, 19 nt, Homo sapiens
  misc_RNA (1)...(19): siRNA sense strand
ggucaggacuccaguaccu

SEQ ID NO: 897709 - RNA, 19 nt, Homo sapiens
  misc_RNA (1)...(19): siRNA sense strand
cauuuuggcugaagauuaa

SEQ ID NO: 897710 - RNA, 19 nt, Homo sapiens
  misc_RNA (1)...(19): siRNA sense strand
ucucagagcuacugcaaaa

SEQ ID NO: 897711 - RNA, 19 nt, Homo sapiens
  misc_RNA (1)...(19): siRNA sense strand
cauuaaacaugaggcaaga

SEQ ID NO: 897712 - RNA, 19 nt, Homo sapiens
  misc_RNA (1)...(19): siRNA sense strand
ggagaaggugcaagacugu

SEQ ID NO: 897713 - RNA, 19 nt, Homo sapiens
  misc_RNA (1)...(19): siRNA sense strand
ccaggaagaagcugagaga

SEQ ID NO: 897714 - RNA, 19 nt, Homo sapiens
  misc_RNA (1)...(19): siRNA sense strand
gaaggaaagaaaucucucu

SEQ ID NO: 897715 - RNA, 19 nt, Homo sapiens
  misc_RNA (1)...(19): siRNA sense strand
gaucucagagcuacugcaa

SEQ ID NO: 897716 - RNA, 19 nt, Homo sapiens
  misc_RNA (1)...(19): siRNA sense strand
gugaugagacugagauaca

SEQ ID NO: 897717 - RNA, 19 nt, Homo sapiens
  misc_RNA (1)...(19): siRNA sense strand
uugaaaggcuacauuaaac

SEQ ID NO: 897718 - RNA, 19 nt, Homo sapiens
  misc_RNA (1)...(19): siRNA sense strand
ggaagagcaacggaagaaa

SEQ ID NO: 897719 - RNA, 19 nt, Homo sapiens
  misc_RNA (1)...(19): siRNA sense strand
ccaauaagaaaccaguguu

SEQ ID NO: 897720 - RNA, 19 nt, Homo sapiens
  misc_RNA (1)...(19): siRNA sense strand
acuccagucuccaauaaga

SEQ ID NO: 897721 - RNA, 19 nt, Homo sapiens
  misc_RNA (1)...(19): siRNA sense strand
acaaggagaaggugcaaga

SEQ ID NO: 897722 - RNA, 19 nt, Homo sapiens
  misc_RNA (1)...(19): siRNA sense strand
aaccaguguuugaucuuaa

SEQ ID NO: 897723 - RNA, 19 nt, Homo sapiens
  misc_RNA (1)...(19): siRNA sense strand
uuaaacaugaggcaagaaa

SEQ ID NO: 897724 - RNA, 19 nt, Homo sapiens
  misc_RNA (1)...(19): siRNA sense strand
aaacuucugcauccucuug

SEQ ID NO: 897725 - RNA, 19 nt, Homo sapiens
  misc_RNA (1)...(19): siRNA sense strand
uaaaucaacaugucaacag

SEQ ID NO: 897726 - RNA, 19 nt, Homo sapiens
  misc_RNA (1)...(19): siRNA sense strand
gaagcucauuuuaaggaaa

SEQ ID NO: 897727 - RNA, 19 nt, Homo sapiens
  misc_RNA (1)...(19): siRNA sense strand
aauaaguaaucccacugaa

SEQ ID NO: 897728 - RNA, 19 nt, Homo sapiens
  misc_RNA (1)...(19): siRNA sense strand
gcaagaaaaggaaaugaga

SEQ ID NO: 897729 - RNA, 19 nt, Homo sapiens
  misc_RNA (1)...(19): siRNA sense strand
ucacucaagcgcucugcua

SEQ ID NO: 897730 - RNA, 19 nt, Homo sapiens
  misc_RNA (1)...(19): siRNA sense strand
aaauaaguaaucccacuga

SEQ ID NO: 897731 - RNA, 19 nt, Homo sapiens
  misc_RNA (1)...(19): siRNA sense strand
ggacacacaaauuaaagac

SEQ ID NO: 897732 - RNA, 19 nt, Homo sapiens
  misc_RNA (1)...(19): siRNA sense strand
gaugagacugagauacaga

SEQ ID NO: 897733 - RNA, 19 nt, Homo sapiens
  misc_RNA (1)...(19): siRNA sense strand
gggacacacaaauuaaaga

SEQ ID NO: 897734 - RNA, 19 nt, Homo sapiens
  misc_RNA (1)...(19): siRNA sense strand
agaaucaggaugaaaguca

SEQ ID NO: 897735 - RNA, 19 nt, Homo sapiens
  misc_RNA (1)...(19): siRNA sense strand
caggaaagccaggaucuca

SEQ ID NO: 897736 - RNA, 19 nt, Homo sapiens
  misc_RNA (1)...(19): siRNA sense strand
aaaugagaaucaggaugaa

SEQ ID NO: 897737 - RNA, 19 nt, Homo sapiens
  misc_RNA (1)...(19): siRNA sense strand
ugaaaggcuacauuaaaca

SEQ ID NO: 897738 - RNA, 19 nt, Homo sapiens
  misc_RNA (1)...(19): siRNA sense strand
gguaacagagauucaaagg

SEQ ID NO: 897739 - RNA, 19 nt, Homo sapiens
  misc_RNA (1)...(19): siRNA sense strand
gagacugagauacagauca

SEQ ID NO: 897740 - RNA, 19 nt, Homo sapiens
  misc_RNA (1)...(19): siRNA sense strand
caagaacgaaaggagaaga

SEQ ID NO: 897741 - RNA, 19 nt, Homo sapiens
  misc_RNA (1)...(19): siRNA sense strand
ugcuaucucugcagcuaaa

SEQ ID NO: 897742 - RNA, 19 nt, Homo sapiens
  misc_RNA (1)...(19): siRNA sense strand
gaagcugagaaugcuguuu

SEQ ID NO: 897743 - RNA, 19 nt, Homo sapiens
  misc_RNA (1)...(19): siRNA sense strand
cagguaacagagauucaaa

SEQ ID NO: 897744 - RNA, 19 nt, Homo sapiens
  misc_RNA (1)...(19): siRNA sense strand
ggggcaaucuaaagaaaau

SEQ ID NO: 897745 - RNA, 19 nt, Homo sapiens
  misc_RNA (1)...(19): siRNA sense strand
cuaugaaccacacaaagga

SEQ ID NO: 897746 - RNA, 19 nt, Homo sapiens
  misc_RNA (1)...(19): siRNA sense strand
gcagaacuuagccaagagu

SEQ ID NO: 897747 - RNA, 19 nt, Homo sapiens
  misc_RNA (1)...(19): siRNA sense strand
gcaaucacuacuccaaacu

SEQ ID NO: 897748 - RNA, 19 nt, Homo sapiens
  misc_RNA (1)...(19): siRNA sense strand
cuacuccaaacuuuaagaa

SEQ ID NO: 897749 - RNA, 19 nt, Homo sapiens
  misc_RNA (1)...(19): siRNA sense strand
cgaaaggagaagaaagcaa

SEQ ID NO: 897750 - RNA, 19 nt, Homo sapiens
  misc_RNA (1)...(19): siRNA sense strand
ccagacaaaggaagagcaa

SEQ ID NO: 897751 - RNA, 19 nt, Homo sapiens
  misc_RNA (1)...(19): siRNA sense strand
gggaauucugcugcuguua

SEQ ID NO: 897752 - RNA, 19 nt, Homo sapiens
  misc_RNA (1)...(19): siRNA sense strand
caaucacuacuccaaacuu

SEQ ID NO: 897753 - RNA, 19 nt, Homo sapiens
  misc_RNA (1)...(19): siRNA sense strand
uuucagcugcuacuaaaga

SEQ ID NO: 897754 - RNA, 19 nt, Homo sapiens
  misc_RNA (1)...(19): siRNA sense strand
cucaagcgcucugcuaucu

SEQ ID NO: 897755 - RNA, 19 nt, Homo sapiens
  misc_RNA (1)...(19): siRNA sense strand
aagaacacaauuccaugaa

SEQ ID NO: 897756 - RNA, 19 nt, Homo sapiens
  misc_RNA (1)...(19): siRNA sense strand
caccagacgagcaccaaga

SEQ ID NO: 897757 - RNA, 19 nt, Homo sapiens
  misc_RNA (1)...(19): siRNA sense strand
gcgaaggggccucauuuug

SEQ ID NO: 897758 - RNA, 19 nt, Homo sapiens
  misc_RNA (1)...(19): siRNA sense strand
gcuggacucccucaaguac

SEQ ID NO: 897759 - RNA, 19 nt, Homo sapiens
  misc_RNA (1)...(19): siRNA sense strand
accaguguuugaucuuaaa

SEQ ID NO: 897760 - RNA, 19 nt, Homo sapiens
  misc_RNA (1)...(19): siRNA sense strand
aagcugagaaugcuguuuc

SEQ ID NO: 897761 - RNA, 19 nt, Homo sapiens
  misc_RNA (1)...(19): siRNA sense strand
guuuucagcugcuacuaaa

SEQ ID NO: 897762 - RNA, 19 nt, Homo sapiens
  misc_RNA (1)...(19): siRNA sense strand
aaggaaagaaaucucucua

SEQ ID NO: 897763 - RNA, 19 nt, Homo sapiens
  misc_RNA (1)...(19): siRNA sense strand
cagaaggaaagaaaucucu

SEQ ID NO: 897764 - RNA, 19 nt, Homo sapiens
  misc_RNA (1)...(19): siRNA sense strand
aaugcuguuuccucaggua

SEQ ID NO: 897765 - RNA, 19 nt, Homo sapiens
  misc_RNA (1)...(19): siRNA sense strand
uaaagaacaugguguggaa

SEQ ID NO: 897766 - RNA, 19 nt, Homo sapiens
  misc_RNA (1)...(19): siRNA sense strand
ggcaacauauggagcguua

SEQ ID NO: 897767 - RNA, 19 nt, Homo sapiens
  misc_RNA (1)...(19): siRNA sense strand
gggaacccguccaguauuu

SEQ ID NO: 897768 - RNA, 19 nt, Homo sapiens
  misc_RNA (1)...(19): siRNA sense strand
ucaaagaaucccauuauga

SEQ ID NO: 897769 - RNA, 19 nt, Homo sapiens
  misc_RNA (1)...(19): siRNA sense strand
gcacucggcuugguacaga

SEQ ID NO: 897770 - RNA, 19 nt, Homo sapiens
  misc_RNA (1)...(19): siRNA sense strand
gcucaaagaaucccauuau

SEQ ID NO: 897771 - RNA, 19 nt, Homo sapiens
  misc_RNA (1)...(19): siRNA sense strand
auacgaagcuuuccugcaa

SEQ ID NO: 897772 - RNA, 19 nt, Homo sapiens
  misc_RNA (1)...(19): siRNA sense strand
gccaaagucuccuccauca

SEQ ID NO: 897773 - RNA, 19 nt, Homo sapiens
  misc_RNA (1)...(19): siRNA sense strand
ggauauuuauggcuucgaa

SEQ ID NO: 897774 - RNA, 19 nt, Homo sapiens
  misc_RNA (1)...(19): siRNA sense strand
caaagaaucccauuaugag

SEQ ID NO: 897775 - RNA, 19 nt, Homo sapiens
  misc_RNA (1)...(19): siRNA sense strand
gcuacaagccagaagagua

SEQ ID NO: 897776 - RNA, 19 nt, Homo sapiens
  misc_RNA (1)...(19): siRNA sense strand
ggaccaggcugugaugauc

SEQ ID NO: 897777 - RNA, 19 nt, Homo sapiens
  misc_RNA (1)...(19): siRNA sense strand
ggcagagccuggccacaaa

SEQ ID NO: 897778 - RNA, 19 nt, Homo sapiens
  misc_RNA (1)...(19): siRNA sense strand
gcagagugaccacgugauu

SEQ ID NO: 897779 - RNA, 19 nt, Homo sapiens
  misc_RNA (1)...(19): siRNA sense strand
agaaccagcucaaguaucu

SEQ ID NO: 897780 - RNA, 19 nt, Homo sapiens
  misc_RNA (1)...(19): siRNA sense strand
uggagaagcuggaggauac

SEQ ID NO: 897781 - RNA, 19 nt, Homo sapiens
  misc_RNA (1)...(19): siRNA sense strand
caaacccaaugaugccaaa

SEQ ID NO: 897782 - RNA, 19 nt, Homo sapiens
  misc_RNA (1)...(19): siRNA sense strand
ucgaaguguuucagcauaa

SEQ ID NO: 897783 - RNA, 19 nt, Homo sapiens
  misc_RNA (1)...(19): siRNA sense strand
ggaaggcagccaagaggaa

SEQ ID NO: 897784 - RNA, 19 nt, Homo sapiens
  misc_RNA (1)...(19): siRNA sense strand
ccacagaccugaccuuccu

SEQ ID NO: 897785 - RNA, 19 nt, Homo sapiens
  misc_RNA (1)...(19): siRNA sense strand
uaauuacccucagagugua

SEQ ID NO: 897786 - RNA, 19 nt, Homo sapiens
  misc_RNA (1)...(19): siRNA sense strand
guggccacauccucaguua

SEQ ID NO: 897787 - RNA, 19 nt, Homo sapiens
  misc_RNA (1)...(19): siRNA sense strand
agaaggccguggcuaguga

SEQ ID NO: 897788 - RNA, 19 nt, Homo sapiens
  misc_RNA (1)...(19): siRNA sense strand
gaacaugguguggaaauac

SEQ ID NO: 897789 - RNA, 19 nt, Homo sapiens
  misc_RNA (1)...(19): siRNA sense strand
agaacaugguguggaaaua

SEQ ID NO: 897790 - RNA, 19 nt, Homo sapiens
  misc_RNA (1)...(19): siRNA sense strand
gacaagaagcggccagaga

SEQ ID NO: 897791 - RNA, 19 nt, Homo sapiens
  misc_RNA (1)...(19): siRNA sense strand
uaacagcuuugagcaguuc

SEQ ID NO: 897792 - RNA, 19 nt, Homo sapiens
  misc_RNA (1)...(19): siRNA sense strand
ccgagaaccagcucaagua

SEQ ID NO: 897793 - RNA, 19 nt, Homo sapiens
  misc_RNA (1)...(19): siRNA sense strand
uggagauccugcagucuaa

SEQ ID NO: 897794 - RNA, 19 nt, Homo sapiens
  misc_RNA (1)...(19): siRNA sense strand
gugaacagcaucaacauca

SEQ ID NO: 897795 - RNA, 19 nt, Homo sapiens
  misc_RNA (1)...(19): siRNA sense strand
gaacuuccacaucuucuac

SEQ ID NO: 897796 - RNA, 19 nt, Homo sapiens
  misc_RNA (1)...(19): siRNA sense strand
aaacaaugaccuucucuuc

SEQ ID NO: 897797 - RNA, 19 nt, Homo sapiens
  misc_RNA (1)...(19): siRNA sense strand
gaccagaggaccaggaaau

SEQ ID NO: 897798 - RNA, 19 nt, Homo sapiens
  misc_RNA (1)...(19): siRNA sense strand
caagcaccauccacacuuc

SEQ ID NO: 897799 - RNA, 19 nt, Homo sapiens
  misc_RNA (1)...(19): siRNA sense strand
ucaguuaccuccuggaaaa

SEQ ID NO: 897800 - RNA, 19 nt, Homo sapiens
  misc_RNA (1)...(19): siRNA sense strand
agucggagcaggaggaaua

SEQ ID NO: 897801 - RNA, 19 nt, Homo sapiens
  misc_RNA (1)...(19): siRNA sense strand
acaggucgcuggccuccaa

SEQ ID NO: 897802 - RNA, 19 nt, Homo sapiens
  misc_RNA (1)...(19): siRNA sense strand
gcuggaggccuuuggaaau

SEQ ID NO: 897803 - RNA, 19 nt, Homo sapiens
  misc_RNA (1)...(19): siRNA sense strand
gaccauguguagcucaaag

SEQ ID NO: 897804 - RNA, 19 nt, Homo sapiens
  misc_RNA (1)...(19): siRNA sense strand
gaacccguccaguauuuca

SEQ ID NO: 897805 - RNA, 19 nt, Homo sapiens
  misc_RNA (1)...(19): siRNA sense strand
gaaguggaggaccugcuaa

SEQ ID NO: 897806 - RNA, 19 nt, Homo sapiens
  misc_RNA (1)...(19): siRNA sense strand
caaagucuccuccaucaac

SEQ ID NO: 897807 - RNA, 19 nt, Homo sapiens
  misc_RNA (1)...(19): siRNA sense strand
gaagggccagugugccaaa

SEQ ID NO: 897808 - RNA, 19 nt, Homo sapiens
  misc_RNA (1)...(19): siRNA sense strand
ccaagacccuccggaacga

SEQ ID NO: 897809 - RNA, 19 nt, Homo sapiens
  misc_RNA (1)...(19): siRNA sense strand
ugaacagcaucaacaucaa

SEQ ID NO: 897810 - RNA, 19 nt, Homo sapiens
  misc_RNA (1)...(19): siRNA sense strand
guacagcgugcggacauaa

SEQ ID NO: 897811 - RNA, 19 nt, Homo sapiens
  misc_RNA (1)...(19): siRNA sense strand
ggaggacgccaaagucaag

SEQ ID NO: 897812 - RNA, 19 nt, Homo sapiens
  misc_RNA (1)...(19): siRNA sense strand
ucaagggcaagaaggauaa

SEQ ID NO: 897813 - RNA, 19 nt, Homo sapiens
  misc_RNA (1)...(19): siRNA sense strand
cugcgggaguugugcauaa

SEQ ID NO: 897814 - RNA, 19 nt, Homo sapiens
  misc_RNA (1)...(19): siRNA sense strand
gcgagaggccucagagcuu

SEQ ID NO: 897815 - RNA, 19 nt, Homo sapiens
  misc_RNA (1)...(19): siRNA sense strand
guggagauccugcagucua

SEQ ID NO: 897816 - RNA, 19 nt, Homo sapiens
  misc_RNA (1)...(19): siRNA sense strand
gagaccauguguagcucaa

SEQ ID NO: 897817 - RNA, 19 nt, Homo sapiens
  misc_RNA (1)...(19): siRNA sense strand
uuaaggagaccauguguag

SEQ ID NO: 897818 - RNA, 19 nt, Homo sapiens
  misc_RNA (1)...(19): siRNA sense strand
ggccguggcuagugagauc

SEQ ID NO: 897819 - RNA, 19 nt, Homo sapiens
  misc_RNA (1)...(19): siRNA sense strand
auaauuacccucagagugu

SEQ ID NO: 897820 - RNA, 19 nt, Homo sapiens
  misc_RNA (1)...(19): siRNA sense strand
gaccgaagccaccaagaag

SEQ ID NO: 897821 - RNA, 19 nt, Homo sapiens
  misc_RNA (1)...(19): siRNA sense strand
guacccaggcucuucauca

SEQ ID NO: 897822 - RNA, 19 nt, Homo sapiens
  misc_RNA (1)...(19): siRNA sense strand
ccagcagguucgggaagua

SEQ ID NO: 897823 - RNA, 19 nt, Homo sapiens
  misc_RNA (1)...(19): siRNA sense strand
caucaaccagggcagcaua

SEQ ID NO: 897824 - RNA, 19 nt, Homo sapiens
  misc_RNA (1)...(19): siRNA sense strand
gaacagcaucaacaucaac

SEQ ID NO: 897825 - RNA, 19 nt, Homo sapiens
  misc_RNA (1)...(19): siRNA sense strand
agagugaccacgugauuga

SEQ ID NO: 897826 - RNA, 19 nt, Homo sapiens
  misc_RNA (1)...(19): siRNA sense strand
gccagaagaguacaagaug

SEQ ID NO: 897827 - RNA, 19 nt, Homo sapiens
  misc_RNA (1)...(19): siRNA sense strand
ucgggcuccuggauauuua

SEQ ID NO: 897828 - RNA, 19 nt, Homo sapiens
  misc_RNA (1)...(19): siRNA sense strand
gaugugcaguuugacuuca

SEQ ID NO: 897829 - RNA, 19 nt, Homo sapiens
  misc_RNA (1)...(19): siRNA sense strand
agggcaagaaggauaauua

SEQ ID NO: 897830 - RNA, 19 nt, Homo sapiens
  misc_RNA (1)...(19): siRNA sense strand
ggaggaaggcagccaagag

SEQ ID NO: 897831 - RNA, 19 nt, Homo sapiens
  misc_RNA (1)...(19): siRNA sense strand
gagcuggcuuugccuaucg

SEQ ID NO: 897832 - RNA, 19 nt, Homo sapiens
  misc_RNA (1)...(19): siRNA sense strand
cgugggaacccguccagua

SEQ ID NO: 897833 - RNA, 19 nt, Homo sapiens
  misc_RNA (1)...(19): siRNA sense strand
cgagaagcccugacacaca

SEQ ID NO: 897834 - RNA, 19 nt, Homo sapiens
  misc_RNA (1)...(19): siRNA sense strand
acuggaaggucgucaggaa

SEQ ID NO: 897835 - RNA, 19 nt, Homo sapiens
  misc_RNA (1)...(19): siRNA sense strand
gugggaacccguccaguau

SEQ ID NO: 897836 - RNA, 19 nt, Homo sapiens
  misc_RNA (1)...(19): siRNA sense strand
cggugccuguugugaaaua

SEQ ID NO: 897837 - RNA, 19 nt, Homo sapiens
  misc_RNA (1)...(19): siRNA sense strand
cgggaguugugcauaaaga

SEQ ID NO: 897838 - RNA, 19 nt, Homo sapiens
  misc_RNA (1)...(19): siRNA sense strand
ugaaguggaggaccugcua

SEQ ID NO: 897839 - RNA, 19 nt, Homo sapiens
  misc_RNA (1)...(19): siRNA sense strand
gcagaaggccguggcuagu

SEQ ID NO: 897840 - RNA, 19 nt, Homo sapiens
  misc_RNA (1)...(19): siRNA sense strand
gaccggguuucuggacaaa

SEQ ID NO: 897841 - RNA, 19 nt, Homo sapiens
  misc_RNA (1)...(19): siRNA sense strand
cgagaaccagcucaaguau

SEQ ID NO: 897842 - RNA, 19 nt, Homo sapiens
  misc_RNA (1)...(19): siRNA sense strand
ggccagcguccuucauuug

SEQ ID NO: 897843 - RNA, 19 nt, Homo sapiens
  misc_RNA (1)...(19): siRNA sense strand
uggccagcguccuucauuu

SEQ ID NO: 897844 - RNA, 19 nt, Homo sapiens
  misc_RNA (1)...(19): siRNA sense strand
caaccugaccggaaucucu

SEQ ID NO: 897845 - RNA, 19 nt, Homo sapiens
  misc_RNA (1)...(19): siRNA sense strand
aaggauaauuacccucaga

SEQ ID NO: 897846 - RNA, 19 nt, Homo sapiens
  misc_RNA (1)...(19): siRNA sense strand
agaaucucaucuacaccua

SEQ ID NO: 897847 - RNA, 19 nt, Homo sapiens
  misc_RNA (1)...(19): siRNA sense strand
gcuggaggauacugucaag

SEQ ID NO: 897848 - RNA, 19 nt, Homo sapiens
  misc_RNA (1)...(19): siRNA sense strand
uuaagggcaucaucucgau

SEQ ID NO: 897849 - RNA, 19 nt, Homo sapiens
  misc_RNA (1)...(19): siRNA sense strand
uccaguauuucaacaacaa

SEQ ID NO: 897850 - RNA, 19 nt, Homo sapiens
  misc_RNA (1)...(19): siRNA sense strand
caucaauuacugcaacgaa

SEQ ID NO: 897851 - RNA, 19 nt, Homo sapiens
  misc_RNA (1)...(19): siRNA sense strand
gaucagccaucugcaucca

SEQ ID NO: 897852 - RNA, 19 nt, Homo sapiens
  misc_RNA (1)...(19): siRNA sense strand
agaaauuccuccgggugaa

SEQ ID NO: 897853 - RNA, 19 nt, Homo sapiens
  misc_RNA (1)...(19): siRNA sense strand
ccgcaaauacgaagcuuuc

SEQ ID NO: 897854 - RNA, 19 nt, Homo sapiens
  misc_RNA (1)...(19): siRNA sense strand
cuacguccgcugcaucaaa

SEQ ID NO: 897855 - RNA, 19 nt, Homo sapiens
  misc_RNA (1)...(19): siRNA sense strand
cucaaagaaucccauuaug

SEQ ID NO: 897856 - RNA, 19 nt, Homo sapiens
  misc_RNA (1)...(19): siRNA sense strand
ugaccggguuucuggacaa

SEQ ID NO: 897857 - RNA, 19 nt, Homo sapiens
  misc_RNA (1)...(19): siRNA sense strand
acaacaaaaucaucuguga

SEQ ID NO: 897858 - RNA, 19 nt, Homo sapiens
  misc_RNA (1)...(19): siRNA sense strand
gagccuggccacaaagauc

SEQ ID NO: 897859 - RNA, 19 nt, Homo sapiens
  misc_RNA (1)...(19): siRNA sense strand
gaaguuuaagggcaucauc

SEQ ID NO: 897860 - RNA, 19 nt, Homo sapiens
  misc_RNA (1)...(19): siRNA sense strand
agaccgaagccaccaagaa

SEQ ID NO: 897861 - RNA, 19 nt, Homo sapiens
  misc_RNA (1)...(19): siRNA sense strand
ugcggugccuguugugaaa

SEQ ID NO: 897862 - RNA, 19 nt, Homo sapiens
  misc_RNA (1)...(19): siRNA sense strand
caucagcacucggcuuggu

SEQ ID NO: 897863 - RNA, 19 nt, Homo sapiens
  misc_RNA (1)...(19): siRNA sense strand
gccacccaguucaagauga

SEQ ID NO: 897864 - RNA, 19 nt, Homo sapiens
  misc_RNA (1)...(19): siRNA sense strand
cagggcagcauaacguuug

SEQ ID NO: 897865 - RNA, 19 nt, Homo sapiens
  misc_RNA (1)...(19): siRNA sense strand
gaacagagaaagaaaggua

SEQ ID NO: 897866 - RNA, 19 nt, Homo sapiens
  misc_RNA (1)...(19): siRNA sense strand
aaacaauacuacccacuua

SEQ ID NO: 897867 - RNA, 19 nt, Homo sapiens
  misc_RNA (1)...(19): siRNA sense strand
ggauggaucuccugaaaug

SEQ ID NO: 897868 - RNA, 19 nt, Homo sapiens
  misc_RNA (1)...(19): siRNA sense strand
gcaggcagccguuucuuua

SEQ ID NO: 897869 - RNA, 19 nt, Homo sapiens
  misc_RNA (1)...(19): siRNA sense strand
caaaugagaacucuuauug

SEQ ID NO: 897870 - RNA, 19 nt, Homo sapiens
  misc_RNA (1)...(19): siRNA sense strand
caaggaagaaccagauuua

SEQ ID NO: 897871 - RNA, 19 nt, Homo sapiens
  misc_RNA (1)...(19): siRNA sense strand
guaugucucuagaugauua

SEQ ID NO: 897872 - RNA, 19 nt, Homo sapiens
  misc_RNA (1)...(19): siRNA sense strand
gacauucccuggugcauaa

SEQ ID NO: 897873 - RNA, 19 nt, Homo sapiens
  misc_RNA (1)...(19): siRNA sense strand
cacggaaucuuaccaauuu

SEQ ID NO: 897874 - RNA, 19 nt, Homo sapiens
  misc_RNA (1)...(19): siRNA sense strand
acaaauguaugguguguaa

SEQ ID NO: 897875 - RNA, 19 nt, Homo sapiens
  misc_RNA (1)...(19): siRNA sense strand
aaagaaagcccuaaccaaa

SEQ ID NO: 897876 - RNA, 19 nt, Homo sapiens
  misc_RNA (1)...(19): siRNA sense strand
ugaaucaucucuaaucaug

SEQ ID NO: 897877 - RNA, 19 nt, Homo sapiens
  misc_RNA (1)...(19): siRNA sense strand
guucaaacuugccgaaauu

SEQ ID NO: 897878 - RNA, 19 nt, Homo sapiens
  misc_RNA (1)...(19): siRNA sense strand
ggaaugugaaugcaaauuu

SEQ ID NO: 897879 - RNA, 19 nt, Homo sapiens
  misc_RNA (1)...(19): siRNA sense strand
ugagaacucuuauugcuau

SEQ ID NO: 897880 - RNA, 19 nt, Homo sapiens
  misc_RNA (1)...(19): siRNA sense strand
gcaagaagguguagaucag

SEQ ID NO: 897881 - RNA, 19 nt, Homo sapiens
  misc_RNA (1)...(19): siRNA sense strand
ggagugagaucauuuagcu

SEQ ID NO: 897882 - RNA, 19 nt, Homo sapiens
  misc_RNA (1)...(19): siRNA sense strand
ggaagaaccagauuuagau

SEQ ID NO: 897883 - RNA, 19 nt, Homo sapiens
  misc_RNA (1)...(19): siRNA sense strand
gaagauugcucaguaaugc

SEQ ID NO: 897884 - RNA, 19 nt, Homo sapiens
  misc_RNA (1)...(19): siRNA sense strand
ucaaaugagugaaguuguu

SEQ ID NO: 897885 - RNA, 19 nt, Homo sapiens
  misc_RNA (1)...(19): siRNA sense strand
caacuucugcgacaacuaa

SEQ ID NO: 897886 - RNA, 19 nt, Homo sapiens
  misc_RNA (1)...(19): siRNA sense strand
ccaagucucuaaugcagaa

SEQ ID NO: 897887 - RNA, 19 nt, Homo sapiens
  misc_RNA (1)...(19): siRNA sense strand
gcaaguaauguaaagauug

SEQ ID NO: 897888 - RNA, 19 nt, Homo sapiens
  misc_RNA (1)...(19): siRNA sense strand
ggccaaaugagaacucuua

SEQ ID NO: 897889 - RNA, 19 nt, Homo sapiens
  misc_RNA (1)...(19): siRNA sense strand
agacauggaucucgacguu

SEQ ID NO: 897890 - RNA, 19 nt, Homo sapiens
  misc_RNA (1)...(19): siRNA sense strand
uaauagagauggucugucu

SEQ ID NO: 897891 - RNA, 19 nt, Homo sapiens
  misc_RNA (1)...(19): siRNA sense strand
gccgaaauuucauuaaaga

SEQ ID NO: 897892 - RNA, 19 nt, Homo sapiens
  misc_RNA (1)...(19): siRNA sense strand
gaacucuuauugcuaucaa

SEQ ID NO: 897893 - RNA, 19 nt, Homo sapiens
  misc_RNA (1)...(19): siRNA sense strand
uuuagaagauugcucagua

SEQ ID NO: 897894 - RNA, 19 nt, Homo sapiens
  misc_RNA (1)...(19): siRNA sense strand
caaggauacuggucuuaug

SEQ ID NO: 897895 - RNA, 19 nt, Homo sapiens
  misc_RNA (1)...(19): siRNA sense strand
gaaaaccaguuaauagaga

SEQ ID NO: 897896 - RNA, 19 nt, Homo sapiens
  misc_RNA (1)...(19): siRNA sense strand
ggccagcuaucuucaaaug

SEQ ID NO: 897897 - RNA, 19 nt, Homo sapiens
  misc_RNA (1)...(19): siRNA sense strand
auacuggucuuaugucuug

SEQ ID NO: 897898 - RNA, 19 nt, Homo sapiens
  misc_RNA (1)...(19): siRNA sense strand
augaagagcuaguugauga

SEQ ID NO: 897899 - RNA, 19 nt, Homo sapiens
  misc_RNA (1)...(19): siRNA sense strand
gaaaauacacuacucauca

SEQ ID NO: 897900 - RNA, 19 nt, Homo sapiens
  misc_RNA (1)...(19): siRNA sense strand
ugaaauggcugaaaaugaa

SEQ ID NO: 897901 - RNA, 19 nt, Homo sapiens
  misc_RNA (1)...(19): siRNA sense strand
gcagccaccuguugccuau

SEQ ID NO: 897902 - RNA, 19 nt, Homo sapiens
  misc_RNA (1)...(19): siRNA sense strand
ggaugaaucaggagaaguu

SEQ ID NO: 897903 - RNA, 19 nt, Homo sapiens
  misc_RNA (1)...(19): siRNA sense strand
gcugguacuucacaugauu

SEQ ID NO: 897904 - RNA, 19 nt, Homo sapiens
  misc_RNA (1)...(19): siRNA sense strand
cuucaaagcucauaagaac

SEQ ID NO: 897905 - RNA, 19 nt, Homo sapiens
  misc_RNA (1)...(19): siRNA sense strand
gcuaguugaugauggagaa

SEQ ID NO: 897906 - RNA, 19 nt, Homo sapiens
  misc_RNA (1)...(19): siRNA sense strand
aaauacagacgaacacuaa

SEQ ID NO: 897907 - RNA, 19 nt, Homo sapiens
  misc_RNA (1)...(19): siRNA sense strand
ggcaaguaauguaaagauu

SEQ ID NO: 897908 - RNA, 19 nt, Homo sapiens
  misc_RNA (1)...(19): siRNA sense strand
acaacuaaaugaacagaga

SEQ ID NO: 897909 - RNA, 19 nt, Homo sapiens
  misc_RNA (1)...(19): siRNA sense strand
ccaaaugaaugacaguagu

SEQ ID NO: 897910 - RNA, 19 nt, Homo sapiens
  misc_RNA (1)...(19): siRNA sense strand
caaagaaagcccuaaccaa

SEQ ID NO: 897911 - RNA, 19 nt, Homo sapiens
  misc_RNA (1)...(19): siRNA sense strand
ggugaaucaucucuaauca

SEQ ID NO: 897912 - RNA, 19 nt, Homo sapiens
  misc_RNA (1)...(19): siRNA sense strand
uuagaagauugcucaguaa

SEQ ID NO: 897913 - RNA, 19 nt, Homo sapiens
  misc_RNA (1)...(19): siRNA sense strand
gagagacuguccagcacuu

SEQ ID NO: 897914 - RNA, 19 nt, Homo sapiens
  misc_RNA (1)...(19): siRNA sense strand
cgacgagggccaaauagaa

SEQ ID NO: 897915 - RNA, 19 nt, Homo sapiens
  misc_RNA (1)...(19): siRNA sense strand
caagaaaccugggaaaaug

SEQ ID NO: 897916 - RNA, 19 nt, Homo sapiens
  misc_RNA (1)...(19): siRNA sense strand
ucacaugauuucaaguaug

SEQ ID NO: 897917 - RNA, 19 nt, Homo sapiens
  misc_RNA (1)...(19): siRNA sense strand
aaaugaaucugaaggucaa

SEQ ID NO: 897918 - RNA, 19 nt, Homo sapiens
  misc_RNA (1)...(19): siRNA sense strand
gacgagggccaaauagaaa

SEQ ID NO: 897919 - RNA, 19 nt, Homo sapiens
  misc_RNA (1)...(19): siRNA sense strand
cgaggagaaugaaguagga

SEQ ID NO: 897920 - RNA, 19 nt, Homo sapiens
  misc_RNA (1)...(19): siRNA sense strand
gcaaauuuauuggcugaag

SEQ ID NO: 897921 - RNA, 19 nt, Homo sapiens
  misc_RNA (1)...(19): siRNA sense strand
gaagaaccagauuuagaug

SEQ ID NO: 897922 - RNA, 19 nt, Homo sapiens
  misc_RNA (1)...(19): siRNA sense strand
gggacaggauacagaauuc

SEQ ID NO: 897923 - RNA, 19 nt, Homo sapiens
  misc_RNA (1)...(19): siRNA sense strand
gcugugauauuuguggaaa

SEQ ID NO: 897924 - RNA, 19 nt, Homo sapiens
  misc_RNA (1)...(19): siRNA sense strand
aauggugaaucaucucuaa

SEQ ID NO: 897925 - RNA, 19 nt, Homo sapiens
  misc_RNA (1)...(19): siRNA sense strand
caaacuugccgaaauuuca

SEQ ID NO: 897926 - RNA, 19 nt, Homo sapiens
  misc_RNA (1)...(19): siRNA sense strand
caauuuggcaaguaaugua

SEQ ID NO: 897927 - RNA, 19 nt, Homo sapiens
  misc_RNA (1)...(19): siRNA sense strand
caaauacagacgaacacua

SEQ ID NO: 897928 - RNA, 19 nt, Homo sapiens
  misc_RNA (1)...(19): siRNA sense strand
acacaggagugagaucauu

SEQ ID NO: 897929 - RNA, 19 nt, Homo sapiens
  misc_RNA (1)...(19): siRNA sense strand
caucuuggacuucuuguau

SEQ ID NO: 897930 - RNA, 19 nt, Homo sapiens
  misc_RNA (1)...(19): siRNA sense strand
aggagaagcugaugaagag

SEQ ID NO: 897931 - RNA, 19 nt, Homo sapiens
  misc_RNA (1)...(19): siRNA sense strand
acauggaucucgacguuau

SEQ ID NO: 897932 - RNA, 19 nt, Homo sapiens
  misc_RNA (1)...(19): siRNA sense strand
ugugggagcuggcgaagga

SEQ ID NO: 897933 - RNA, 19 nt, Homo sapiens
  misc_RNA (1)...(19): siRNA sense strand
guacuucacaugauuucaa

SEQ ID NO: 897934 - RNA, 19 nt, Homo sapiens
  misc_RNA (1)...(19): siRNA sense strand
guaaugcagccaccuguug

SEQ ID NO: 897935 - RNA, 19 nt, Homo sapiens
  misc_RNA (1)...(19): siRNA sense strand
ccagcuaucuucaaaugag

SEQ ID NO: 897936 - RNA, 19 nt, Homo sapiens
  misc_RNA (1)...(19): siRNA sense strand
auaggaaugugaaugcaaa

SEQ ID NO: 897937 - RNA, 19 nt, Homo sapiens
  misc_RNA (1)...(19): siRNA sense strand
ggagaaugaaguaggagaa

SEQ ID NO: 897938 - RNA, 19 nt, Homo sapiens
  misc_RNA (1)...(19): siRNA sense strand
guagaucagggacaggaua

SEQ ID NO: 897939 - RNA, 19 nt, Homo sapiens
  misc_RNA (1)...(19): siRNA sense strand
caaaugaaugacaguaguu

SEQ ID NO: 897940 - RNA, 19 nt, Homo sapiens
  misc_RNA (1)...(19): siRNA sense strand
aagaauacgaggagaauga

SEQ ID NO: 897941 - RNA, 19 nt, Homo sapiens
  misc_RNA (1)...(19): siRNA sense strand
uguagacugugcagauaaa

SEQ ID NO: 897942 - RNA, 19 nt, Homo sapiens
  misc_RNA (1)...(19): siRNA sense strand
gaugucagcauugugguaa

SEQ ID NO: 897943 - RNA, 19 nt, Homo sapiens
  misc_RNA (1)...(19): siRNA sense strand
aauacuacccacuuagaua

SEQ ID NO: 897944 - RNA, 19 nt, Homo sapiens
  misc_RNA (1)...(19): siRNA sense strand
gaagagcuaguugaugaug

SEQ ID NO: 897945 - RNA, 19 nt, Homo sapiens
  misc_RNA (1)...(19): siRNA sense strand
guggccagcuaucuucaaa

SEQ ID NO: 897946 - RNA, 19 nt, Homo sapiens
  misc_RNA (1)...(19): siRNA sense strand
agucagaaauaccaucaga

SEQ ID NO: 897947 - RNA, 19 nt, Homo sapiens
  misc_RNA (1)...(19): siRNA sense strand
guuuguaugucucuagaug

SEQ ID NO: 897948 - RNA, 19 nt, Homo sapiens
  misc_RNA (1)...(19): siRNA sense strand
uguguagacugugcagaua

SEQ ID NO: 897949 - RNA, 19 nt, Homo sapiens
  misc_RNA (1)...(19): siRNA sense strand
ugagaucauuuagcuguga

SEQ ID NO: 897950 - RNA, 19 nt, Homo sapiens
  misc_RNA (1)...(19): siRNA sense strand
ggaaaauggugaaucaucu

SEQ ID NO: 897951 - RNA, 19 nt, Homo sapiens
  misc_RNA (1)...(19): siRNA sense strand
cacaugauuucaaguaugg

SEQ ID NO: 897952 - RNA, 19 nt, Homo sapiens
  misc_RNA (1)...(19): siRNA sense strand
gaagcuggcacuagucaag

SEQ ID NO: 897953 - RNA, 19 nt, Homo sapiens
  misc_RNA (1)...(19): siRNA sense strand
ucaaggaagaaccagauuu

SEQ ID NO: 897954 - RNA, 19 nt, Homo sapiens
  misc_RNA (1)...(19): siRNA sense strand
caacacggaaucuuaccaa

SEQ ID NO: 897955 - RNA, 19 nt, Homo sapiens
  misc_RNA (1)...(19): siRNA sense strand
agauauugcugcaguucaa

SEQ ID NO: 897956 - RNA, 19 nt, Homo sapiens
  misc_RNA (1)...(19): siRNA sense strand
cuaaaugaacagagaaaga

SEQ ID NO: 897957 - RNA, 19 nt, Homo sapiens
  misc_RNA (1)...(19): siRNA sense strand
ccaaaugagaacucuuauu

SEQ ID NO: 897958 - RNA, 19 nt, Homo sapiens
  misc_RNA (1)...(19): siRNA sense strand
uuaauaggaggccaaauga

SEQ ID NO: 897959 - RNA, 19 nt, Homo sapiens
  misc_RNA (1)...(19): siRNA sense strand
ggauacuggucuuaugucu

SEQ ID NO: 897960 - RNA, 19 nt, Homo sapiens
  misc_RNA (1)...(19): siRNA sense strand
caacuaaaugaacagagaa

SEQ ID NO: 897961 - RNA, 19 nt, Homo sapiens
  misc_RNA (1)...(19): siRNA sense strand
uguaugguguguaagaaga

SEQ ID NO: 897962 - RNA, 19 nt, Homo sapiens
  misc_RNA (1)...(19): siRNA sense strand
aaacaagaaaccugggaaa

SEQ ID NO: 897963 - RNA, 19 nt, Homo sapiens
  misc_RNA (1)...(19): siRNA sense strand
ucaaagcucauaagaacau

SEQ ID NO: 897964 - RNA, 19 nt, Homo sapiens
  misc_RNA (1)...(19): siRNA sense strand
acacggaaucuuaccaauu

SEQ ID NO: 897965 - RNA, 19 nt, Homo sapiens
  misc_RNA (1)...(19): siRNA sense strand
gcuuacaucuccuggauaa

SEQ ID NO: 897966 - RNA, 19 nt, Homo sapiens
  misc_RNA (1)...(19): siRNA sense strand
uaacguggcugccggcuau

SEQ ID NO: 897967 - RNA, 19 nt, Homo sapiens
  misc_RNA (1)...(19): siRNA sense strand
agacagaacugggugauga

SEQ ID NO: 897968 - RNA, 19 nt, Homo sapiens
  misc_RNA (1)...(19): siRNA sense strand
ucacccaggucucugcuua

SEQ ID NO: 897969 - RNA, 19 nt, Homo sapiens
  misc_RNA (1)...(19): siRNA sense strand
gcuguaaugucuccaggaa

SEQ ID NO: 897970 - RNA, 19 nt, Homo sapiens
  misc_RNA (1)...(19): siRNA sense strand
caaguauucucuccaugga

SEQ ID NO: 897971 - RNA, 19 nt, Homo sapiens
  misc_RNA (1)...(19): siRNA sense strand
gcguuacccucaauagcua

SEQ ID NO: 897972 - RNA, 19 nt, Homo sapiens
  misc_RNA (1)...(19): siRNA sense strand
uacaucuccuggauaaaua

SEQ ID NO: 897973 - RNA, 19 nt, Homo sapiens
  misc_RNA (1)...(19): siRNA sense strand
ggagugaccagcuuugugu

SEQ ID NO: 897974 - RNA, 19 nt, Homo sapiens
  misc_RNA (1)...(19): siRNA sense strand
ccaggucucugcuuacauc

SEQ ID NO: 897975 - RNA, 19 nt, Homo sapiens
  misc_RNA (1)...(19): siRNA sense strand
ugucaucgccuccaacuga

SEQ ID NO: 897976 - RNA, 19 nt, Homo sapiens
  misc_RNA (1)...(19): siRNA sense strand
uggauuaccagaagacuuu

SEQ ID NO: 897977 - RNA, 19 nt, Homo sapiens
  misc_RNA (1)...(19): siRNA sense strand
caacagucccugcuacauc

SEQ ID NO: 897978 - RNA, 19 nt, Homo sapiens
  misc_RNA (1)...(19): siRNA sense strand
ccaggaagccuacagucuu

SEQ ID NO: 897979 - RNA, 19 nt, Homo sapiens
  misc_RNA (1)...(19): siRNA sense strand
ccagagcguuacccucaau

SEQ ID NO: 897980 - RNA, 19 nt, Homo sapiens
  misc_RNA (1)...(19): siRNA sense strand
gcaagaccaagaccaaugg

SEQ ID NO: 897981 - RNA, 19 nt, Homo sapiens
  misc_RNA (1)...(19): siRNA sense strand
ggugugugcugguggagau

SEQ ID NO: 897982 - RNA, 19 nt, Homo sapiens
  misc_RNA (1)...(19): siRNA sense strand
aggcuuaccugcccucugu

SEQ ID NO: 897983 - RNA, 19 nt, Homo sapiens
  misc_RNA (1)...(19): siRNA sense strand
cauccuggcuaacaacagu

SEQ ID NO: 897984 - RNA, 19 nt, Homo sapiens
  misc_RNA (1)...(19): siRNA sense strand
uuacaucuccuggauaaau

SEQ ID NO: 897985 - RNA, 19 nt, Homo sapiens
  misc_RNA (1)...(19): siRNA sense strand
guacgugagugugcagaag

SEQ ID NO: 897986 - RNA, 19 nt, Homo sapiens
  misc_RNA (1)...(19): siRNA sense strand
aacagucccugcuacauca

SEQ ID NO: 897987 - RNA, 19 nt, Homo sapiens
  misc_RNA (1)...(19): siRNA sense strand
ucuccuggauaaauaaugu

SEQ ID NO: 897988 - RNA, 19 nt, Homo sapiens
  misc_RNA (1)...(19): siRNA sense strand
ggcaagaccaagaccaaug

SEQ ID NO: 897989 - RNA, 19 nt, Homo sapiens
  misc_RNA (1)...(19): siRNA sense strand
ggagguucccgguaucaca

SEQ ID NO: 897990 - RNA, 19 nt, Homo sapiens
  misc_RNA (1)...(19): siRNA sense strand
cuggauaaauaaugucauc

SEQ ID NO: 897991 - RNA, 19 nt, Homo sapiens
  misc_RNA (1)...(19): siRNA sense strand
ggaauuccuggcccucuca

SEQ ID NO: 897992 - RNA, 19 nt, Homo sapiens
  misc_RNA (1)...(19): siRNA sense strand
cugcuuacaucuccuggau

SEQ ID NO: 897993 - RNA, 19 nt, Homo sapiens
  misc_RNA (1)...(19): siRNA sense strand
gcugcucacugcguggauu

SEQ ID NO: 897994 - RNA, 19 nt, Homo sapiens
  misc_RNA (1)...(19): siRNA sense strand
ggacccuuaucagacagaa

SEQ ID NO: 897995 - RNA, 19 nt, Homo sapiens
  misc_RNA (1)...(19): siRNA sense strand
uggcaaguauucucuccau

SEQ ID NO: 897996 - RNA, 19 nt, Homo sapiens
  misc_RNA (1)...(19): siRNA sense strand
aaccugagccagaaugaug

SEQ ID NO: 897997 - RNA, 19 nt, Homo sapiens
  misc_RNA (1)...(19): siRNA sense strand
gucuggagguucccgguau

SEQ ID NO: 897998 - RNA, 19 nt, Homo sapiens
  misc_RNA (1)...(19): siRNA sense strand
uccuggcccucucagauuu

SEQ ID NO: 897999 - RNA, 19 nt, Homo sapiens
  misc_RNA (1)...(19): siRNA sense strand
cugcguggauuaccagaag

SEQ ID NO: 898000 - RNA, 19 nt, Homo sapiens
  misc_RNA (1)...(19): siRNA sense strand
cccaggaccuuccggaaac

SEQ ID NO: 898001 - RNA, 19 nt, Homo sapiens
  misc_RNA (1)...(19): siRNA sense strand
agaucguggugcauccaua

SEQ ID NO: 898002 - RNA, 19 nt, Homo sapiens
  misc_RNA (1)...(19): siRNA sense strand
accauaaccugagccagaa

SEQ ID NO: 898003 - RNA, 19 nt, Homo sapiens
  misc_RNA (1)...(19): siRNA sense strand
cuaacaacagucccugcua

SEQ ID NO: 898004 - RNA, 19 nt, Homo sapiens
  misc_RNA (1)...(19): siRNA sense strand
gaucguggugcauccauac

SEQ ID NO: 898005 - RNA, 19 nt, Homo sapiens
  misc_RNA (1)...(19): siRNA sense strand
cauacuggaacagcgauaa

SEQ ID NO: 898006 - RNA, 19 nt, Homo sapiens
  misc_RNA (1)...(19): siRNA sense strand
ggaccuuccggaaaccaau

SEQ ID NO: 898007 - RNA, 19 nt, Homo sapiens
  misc_RNA (1)...(19): siRNA sense strand
caaagaagcuguucaauau

SEQ ID NO: 898008 - RNA, 19 nt, Homo sapiens
  misc_RNA (1)...(19): siRNA sense strand
caacaaaucccuagaaaua

SEQ ID NO: 898009 - RNA, 19 nt, Homo sapiens
  misc_RNA (1)...(19): siRNA sense strand
ggacauuucuuacaacaua

SEQ ID NO: 898010 - RNA, 19 nt, Homo sapiens
  misc_RNA (1)...(19): siRNA sense strand
ugaaagcccucccuuauua

SEQ ID NO: 898011 - RNA, 19 nt, Homo sapiens
  misc_RNA (1)...(19): siRNA sense strand
agaagaagcucaugaauug

SEQ ID NO: 898012 - RNA, 19 nt, Homo sapiens
  misc_RNA (1)...(19): siRNA sense strand
gaaaguagcagaaauaaca

SEQ ID NO: 898013 - RNA, 19 nt, Homo sapiens
  misc_RNA (1)...(19): siRNA sense strand
caagucagcugaagagaaa

SEQ ID NO: 898014 - RNA, 19 nt, Homo sapiens
  misc_RNA (1)...(19): siRNA sense strand
gagaaggaauuuacagauu

SEQ ID NO: 898015 - RNA, 19 nt, Homo sapiens
  misc_RNA (1)...(19): siRNA sense strand
gaaauagcauggagaagga

SEQ ID NO: 898016 - RNA, 19 nt, Homo sapiens
  misc_RNA (1)...(19): siRNA sense strand
gaacuacugagucuuauaa

SEQ ID NO: 898017 - RNA, 19 nt, Homo sapiens
  misc_RNA (1)...(19): siRNA sense strand
ggaaacaacuagcaaucaa

SEQ ID NO: 898018 - RNA, 19 nt, Homo sapiens
  misc_RNA (1)...(19): siRNA sense strand
gagcaccacuucuaugauu

SEQ ID NO: 898019 - RNA, 19 nt, Homo sapiens
  misc_RNA (1)...(19): siRNA sense strand
gcagaaauucgacaauaua

SEQ ID NO: 898020 - RNA, 19 nt, Homo sapiens
  misc_RNA (1)...(19): siRNA sense strand
caaagcacuucucaacaua

SEQ ID NO: 898021 - RNA, 19 nt, Homo sapiens
  misc_RNA (1)...(19): siRNA sense strand
gacaagguauugauggaua

SEQ ID NO: 898022 - RNA, 19 nt, Homo sapiens
  misc_RNA (1)...(19): siRNA sense strand
gaaaggaugcuugauguaa

SEQ ID NO: 898023 - RNA, 19 nt, Homo sapiens
  misc_RNA (1)...(19): siRNA sense strand
gaagaaacccuuuaucucu

SEQ ID NO: 898024 - RNA, 19 nt, Homo sapiens
  misc_RNA (1)...(19): siRNA sense strand
gaaauauacggcauuauga

SEQ ID NO: 898025 - RNA, 19 nt, Homo sapiens
  misc_RNA (1)...(19): siRNA sense strand
ucaaagaagcuguucaaua

SEQ ID NO: 898026 - RNA, 19 nt, Homo sapiens
  misc_RNA (1)...(19): siRNA sense strand
cagaggaacuggcauuuga

SEQ ID NO: 898027 - RNA, 19 nt, Homo sapiens
  misc_RNA (1)...(19): siRNA sense strand
gagaacaaacuuacuauga

SEQ ID NO: 898028 - RNA, 19 nt, Homo sapiens
  misc_RNA (1)...(19): siRNA sense strand
caggagagauccagcagua

SEQ ID NO: 898029 - RNA, 19 nt, Homo sapiens
  misc_RNA (1)...(19): siRNA sense strand
gaggaaaguagcagaaaua

SEQ ID NO: 898030 - RNA, 19 nt, Homo sapiens
  misc_RNA (1)...(19): siRNA sense strand
gaagauacaguagaaauga

SEQ ID NO: 898031 - RNA, 19 nt, Homo sapiens
  misc_RNA (1)...(19): siRNA sense strand
ccagguuucuguuuacaua

SEQ ID NO: 898032 - RNA, 19 nt, Homo sapiens
  misc_RNA (1)...(19): siRNA sense strand
gcaaugauaccgucuuuau

SEQ ID NO: 898033 - RNA, 19 nt, Homo sapiens
  misc_RNA (1)...(19): siRNA sense strand
uaacaaugcuacaggaaga

SEQ ID NO: 898034 - RNA, 19 nt, Homo sapiens
  misc_RNA (1)...(19): siRNA sense strand
ggacaguguuguaaugaau

SEQ ID NO: 898035 - RNA, 19 nt, Homo sapiens
  misc_RNA (1)...(19): siRNA sense strand
uaacagcuuugcuuaaugu

SEQ ID NO: 898036 - RNA, 19 nt, Homo sapiens
  misc_RNA (1)...(19): siRNA sense strand
aaacucaggucuauuaauc

SEQ ID NO: 898037 - RNA, 19 nt, Homo sapiens
  misc_RNA (1)...(19): siRNA sense strand
gcaaaacucaggucuauua

SEQ ID NO: 898038 - RNA, 19 nt, Homo sapiens
  misc_RNA (1)...(19): siRNA sense strand
gugcugauguuuauagauu

SEQ ID NO: 898039 - RNA, 19 nt, Homo sapiens
  misc_RNA (1)...(19): siRNA sense strand
aacagaagcugaucgcaua

SEQ ID NO: 898040 - RNA, 19 nt, Homo sapiens
  misc_RNA (1)...(19): siRNA sense strand
uaaagcugguugggaauua

SEQ ID NO: 898041 - RNA, 19 nt, Homo sapiens
  misc_RNA (1)...(19): siRNA sense strand
uugcaaaccucaagaacua

SEQ ID NO: 898042 - RNA, 19 nt, Homo sapiens
  misc_RNA (1)...(19): siRNA sense strand
gaagacaaggaauguuuaa

SEQ ID NO: 898043 - RNA, 19 nt, Homo sapiens
  misc_RNA (1)...(19): siRNA sense strand
ggaguacacuggaaaggau

SEQ ID NO: 898044 - RNA, 19 nt, Homo sapiens
  misc_RNA (1)...(19): siRNA sense strand
ucaagaagaugaacgagau

SEQ ID NO: 898045 - RNA, 19 nt, Homo sapiens
  misc_RNA (1)...(19): siRNA sense strand
ggaagaauuuauuggaaca

SEQ ID NO: 898046 - RNA, 19 nt, Homo sapiens
  misc_RNA (1)...(19): siRNA sense strand
gcaaugccuucuucccaaa

SEQ ID NO: 898047 - RNA, 19 nt, Homo sapiens
  misc_RNA (1)...(19): siRNA sense strand
gaaagugaaacagaaagua

SEQ ID NO: 898048 - RNA, 19 nt, Homo sapiens
  misc_RNA (1)...(19): siRNA sense strand
gcauugauaucuuuacagu

SEQ ID NO: 898049 - RNA, 19 nt, Homo sapiens
  misc_RNA (1)...(19): siRNA sense strand
ggaggaaaguagcagaaau

SEQ ID NO: 898050 - RNA, 19 nt, Homo sapiens
  misc_RNA (1)...(19): siRNA sense strand
aagcagaccugggcacaua

SEQ ID NO: 898051 - RNA, 19 nt, Homo sapiens
  misc_RNA (1)...(19): siRNA sense strand
uuacauaguagcagucuua

SEQ ID NO: 898052 - RNA, 19 nt, Homo sapiens
  misc_RNA (1)...(19): siRNA sense strand
cccaagaucugcuucugua

SEQ ID NO: 898053 - RNA, 19 nt, Homo sapiens
  misc_RNA (1)...(19): siRNA sense strand
acaaaucccuagaaauaga

SEQ ID NO: 898054 - RNA, 19 nt, Homo sapiens
  misc_RNA (1)...(19): siRNA sense strand
acaguugaguggcauauaa

SEQ ID NO: 898055 - RNA, 19 nt, Homo sapiens
  misc_RNA (1)...(19): siRNA sense strand
ucgcauagcuauagagaau

SEQ ID NO: 898056 - RNA, 19 nt, Homo sapiens
  misc_RNA (1)...(19): siRNA sense strand
cauaguagcagucuuagaa

SEQ ID NO: 898057 - RNA, 19 nt, Homo sapiens
  misc_RNA (1)...(19): siRNA sense strand
caguagaaaugacagauga

SEQ ID NO: 898058 - RNA, 19 nt, Homo sapiens
  misc_RNA (1)...(19): siRNA sense strand
aaaucagccuuacuguuua

SEQ ID NO: 898059 - RNA, 19 nt, Homo sapiens
  misc_RNA (1)...(19): siRNA sense strand
caacucacuuuacuugaau

SEQ ID NO: 898060 - RNA, 19 nt, Homo sapiens
  misc_RNA (1)...(19): siRNA sense strand
gcaacgaauggaagaauuu

SEQ ID NO: 898061 - RNA, 19 nt, Homo sapiens
  misc_RNA (1)...(19): siRNA sense strand
agacacauauuucucuuug

SEQ ID NO: 898062 - RNA, 19 nt, Homo sapiens
  misc_RNA (1)...(19): siRNA sense strand
ggcagaaauucgacaauau

SEQ ID NO: 898063 - RNA, 19 nt, Homo sapiens
  misc_RNA (1)...(19): siRNA sense strand
uggcagaaauucgacaaua

SEQ ID NO: 898064 - RNA, 19 nt, Homo sapiens
  misc_RNA (1)...(19): siRNA sense strand
gaccaccacuguuggagaa

SEQ ID NO: 898065 - RNA, 19 nt, Homo sapiens
  misc_RNA (1)...(19): siRNA sense strand
ucacuuuacuugaaucaga

SEQ ID NO: 898066 - RNA, 19 nt, Homo sapiens
  misc_RNA (1)...(19): siRNA sense strand
caacugcgaguauuaaaug

SEQ ID NO: 898067 - RNA, 19 nt, Homo sapiens
  misc_RNA (1)...(19): siRNA sense strand
guucggacauuucuuacaa

SEQ ID NO: 898068 - RNA, 19 nt, Homo sapiens
  misc_RNA (1)...(19): siRNA sense strand
ggauauguuucaucaagau

SEQ ID NO: 898069 - RNA, 19 nt, Homo sapiens
  misc_RNA (1)...(19): siRNA sense strand
acaaagcacuucucaacau

SEQ ID NO: 898070 - RNA, 19 nt, Homo sapiens
  misc_RNA (1)...(19): siRNA sense strand
ccacagauguuugcagugu

SEQ ID NO: 898071 - RNA, 19 nt, Homo sapiens
  misc_RNA (1)...(19): siRNA sense strand
cgacaacucacuuuacuug

SEQ ID NO: 898072 - RNA, 19 nt, Homo sapiens
  misc_RNA (1)...(19): siRNA sense strand
ugauaaagaugacaccaau

SEQ ID NO: 898073 - RNA, 19 nt, Homo sapiens
  misc_RNA (1)...(19): siRNA sense strand
gggcagcacuuuauuugca

SEQ ID NO: 898074 - RNA, 19 nt, Homo sapiens
  misc_RNA (1)...(19): siRNA sense strand
ccauauagaagauacagua

SEQ ID NO: 898075 - RNA, 19 nt, Homo sapiens
  misc_RNA (1)...(19): siRNA sense strand
ggaaaggaugcuugaugua

SEQ ID NO: 898076 - RNA, 19 nt, Homo sapiens
  misc_RNA (1)...(19): siRNA sense strand
gcagaaucuucaccaucua

SEQ ID NO: 898077 - RNA, 19 nt, Homo sapiens
  misc_RNA (1)...(19): siRNA sense strand
uaguagcagucuuagaaua

SEQ ID NO: 898078 - RNA, 19 nt, Homo sapiens
  misc_RNA (1)...(19): siRNA sense strand
caacgaauggaagaauuua

SEQ ID NO: 898079 - RNA, 19 nt, Homo sapiens
  misc_RNA (1)...(19): siRNA sense strand
acaauuggauggcagcauu

SEQ ID NO: 898080 - RNA, 19 nt, Homo sapiens
  misc_RNA (1)...(19): siRNA sense strand
auacauuucugcagacauu

SEQ ID NO: 898081 - RNA, 19 nt, Homo sapiens
  misc_RNA (1)...(19): siRNA sense strand
gcuucuguaucaucuauaa

SEQ ID NO: 898082 - RNA, 19 nt, Homo sapiens
  misc_RNA (1)...(19): siRNA sense strand
guacgcagaucccaauuuu

SEQ ID NO: 898083 - RNA, 19 nt, Homo sapiens
  misc_RNA (1)...(19): siRNA sense strand
aggcgaagguuucaaagaa

SEQ ID NO: 898084 - RNA, 19 nt, Homo sapiens
  misc_RNA (1)...(19): siRNA sense strand
gaagcgaagaaacccuuua

SEQ ID NO: 898085 - RNA, 19 nt, Homo sapiens
  misc_RNA (1)...(19): siRNA sense strand
gauuaugucuaagcauuug

SEQ ID NO: 898086 - RNA, 19 nt, Homo sapiens
  misc_RNA (1)...(19): siRNA sense strand
uagaagaagcucaugaauu

SEQ ID NO: 898087 - RNA, 19 nt, Homo sapiens
  misc_RNA (1)...(19): siRNA sense strand
guacagccaucagaauuag

SEQ ID NO: 898088 - RNA, 19 nt, Homo sapiens
  misc_RNA (1)...(19): siRNA sense strand
acaacucacuuuacuugaa

SEQ ID NO: 898089 - RNA, 19 nt, Homo sapiens
  misc_RNA (1)...(19): siRNA sense strand
gaaauugcucgacaacuca

SEQ ID NO: 898090 - RNA, 19 nt, Homo sapiens
  misc_RNA (1)...(19): siRNA sense strand
gugcagaacugaaaagauu

SEQ ID NO: 898091 - RNA, 19 nt, Homo sapiens
  misc_RNA (1)...(19): siRNA sense strand
gguccuagguuauaaaauu

SEQ ID NO: 898092 - RNA, 19 nt, Homo sapiens
  misc_RNA (1)...(19): siRNA sense strand
aaacgaagacugagugaau

SEQ ID NO: 898093 - RNA, 19 nt, Homo sapiens
  misc_RNA (1)...(19): siRNA sense strand
aagaagcuguucaauaugu

SEQ ID NO: 898094 - RNA, 19 nt, Homo sapiens
  misc_RNA (1)...(19): siRNA sense strand
cagcuuugcuuaauguuca

SEQ ID NO: 898095 - RNA, 19 nt, Homo sapiens
  misc_RNA (1)...(19): siRNA sense strand
cuaagccucucccaagauu

SEQ ID NO: 898096 - RNA, 19 nt, Homo sapiens
  misc_RNA (1)...(19): siRNA sense strand
gcagcugcccuacgaguuu

SEQ ID NO: 898097 - RNA, 19 nt, Homo sapiens
  misc_RNA (1)...(19): siRNA sense strand
cagacuagaccacacauuu

SEQ ID NO: 898098 - RNA, 19 nt, Homo sapiens
  misc_RNA (1)...(19): siRNA sense strand
ugcgaaagguacaaauuaa

SEQ ID NO: 898099 - RNA, 19 nt, Homo sapiens
  misc_RNA (1)...(19): siRNA sense strand
uaaaguuacugggccauau

SEQ ID NO: 898100 - RNA, 19 nt, Homo sapiens
  misc_RNA (1)...(19): siRNA sense strand
caacuuuaaugguguccuu

SEQ ID NO: 898101 - RNA, 19 nt, Homo sapiens
  misc_RNA (1)...(19): siRNA sense strand
gaguucaccucccacaguu

SEQ ID NO: 898102 - RNA, 19 nt, Homo sapiens
  misc_RNA (1)...(19): siRNA sense strand
gcauagcuauagagaaugg

SEQ ID NO: 898103 - RNA, 19 nt, Homo sapiens
  misc_RNA (1)...(19): siRNA sense strand
aaacuuauagagaggcuua

SEQ ID NO: 898104 - RNA, 19 nt, Homo sapiens
  misc_RNA (1)...(19): siRNA sense strand
agcaggaacuguuauuaaa

SEQ ID NO: 898105 - RNA, 19 nt, Homo sapiens
  misc_RNA (1)...(19): siRNA sense strand
caauaacagcuuugcuuaa

SEQ ID NO: 898106 - RNA, 19 nt, Homo sapiens
  misc_RNA (1)...(19): siRNA sense strand
gaacuggcauuugauccau

SEQ ID NO: 898107 - RNA, 19 nt, Homo sapiens
  misc_RNA (1)...(19): siRNA sense strand
caucacagcugaaauguuu

SEQ ID NO: 898108 - RNA, 19 nt, Homo sapiens
  misc_RNA (1)...(19): siRNA sense strand
ccugagagcugccuucuua

SEQ ID NO: 898109 - RNA, 19 nt, Homo sapiens
  misc_RNA (1)...(19): siRNA sense strand
gagagucccugcugaauga

SEQ ID NO: 898110 - RNA, 19 nt, Homo sapiens
  misc_RNA (1)...(19): siRNA sense strand
caaccaaagucaaguauug

SEQ ID NO: 898111 - RNA, 19 nt, Homo sapiens
  misc_RNA (1)...(19): siRNA sense strand
ggaccaccgugcucaauuu

SEQ ID NO: 898112 - RNA, 19 nt, Homo sapiens
  misc_RNA (1)...(19): siRNA sense strand
gagacaaguuuaagaaguu

SEQ ID NO: 898113 - RNA, 19 nt, Homo sapiens
  misc_RNA (1)...(19): siRNA sense strand
cgacacaguuugcgagaaa

SEQ ID NO: 898114 - RNA, 19 nt, Homo sapiens
  misc_RNA (1)...(19): siRNA sense strand
gucaagagguccaauaaga

SEQ ID NO: 898115 - RNA, 19 nt, Homo sapiens
  misc_RNA (1)...(19): siRNA sense strand
gaggaggacuauuucuauu

SEQ ID NO: 898116 - RNA, 19 nt, Homo sapiens
  misc_RNA (1)...(19): siRNA sense strand
gaauaaguacguagaagaa

SEQ ID NO: 898117 - RNA, 19 nt, Homo sapiens
  misc_RNA (1)...(19): siRNA sense strand
ggagagacaaguuuaagaa

SEQ ID NO: 898118 - RNA, 19 nt, Homo sapiens
  misc_RNA (1)...(19): siRNA sense strand
gagagcugccuucuuauaa

SEQ ID NO: 898119 - RNA, 19 nt, Homo sapiens
  misc_RNA (1)...(19): siRNA sense strand
gagcugccuucuuauaaug

SEQ ID NO: 898120 - RNA, 19 nt, Homo sapiens
  misc_RNA (1)...(19): siRNA sense strand
uaaguacugucccuacauu

SEQ ID NO: 898121 - RNA, 19 nt, Homo sapiens
  misc_RNA (1)...(19): siRNA sense strand
acaacaagcugucagugaa

SEQ ID NO: 898122 - RNA, 19 nt, Homo sapiens
  misc_RNA (1)...(19): siRNA sense strand
acacagggcuuccacuuca

SEQ ID NO: 898123 - RNA, 19 nt, Homo sapiens
  misc_RNA (1)...(19): siRNA sense strand
uauaaugguuggacuucua

SEQ ID NO: 898124 - RNA, 19 nt, Homo sapiens
  misc_RNA (1)...(19): siRNA sense strand
agaaugagguagauguuga

SEQ ID NO: 898125 - RNA, 19 nt, Homo sapiens
  misc_RNA (1)...(19): siRNA sense strand
gaacacagggcuuccacuu

SEQ ID NO: 898126 - RNA, 19 nt, Homo sapiens
  misc_RNA (1)...(19): siRNA sense strand
gagaaagcauuaggaagga

SEQ ID NO: 898127 - RNA, 19 nt, Homo sapiens
  misc_RNA (1)...(19): siRNA sense strand
gcagagacugggaugauaa

SEQ ID NO: 898128 - RNA, 19 nt, Homo sapiens
  misc_RNA (1)...(19): siRNA sense strand
caagagguccaauaagaaa

SEQ ID NO: 898129 - RNA, 19 nt, Homo sapiens
  misc_RNA (1)...(19): siRNA sense strand
caaaagaggaggacuauuu

SEQ ID NO: 898130 - RNA, 19 nt, Homo sapiens
  misc_RNA (1)...(19): siRNA sense strand
gugcaaugacuaugaauaa

SEQ ID NO: 898131 - RNA, 19 nt, Homo sapiens
  misc_RNA (1)...(19): siRNA sense strand
gauaaguacugucccuaca

SEQ ID NO: 898132 - RNA, 19 nt, Homo sapiens
  misc_RNA (1)...(19): siRNA sense strand
ccaaggagauucugauucg

SEQ ID NO: 898133 - RNA, 19 nt, Homo sapiens
  misc_RNA (1)...(19): siRNA sense strand
gaaauucgagaacucuuau

SEQ ID NO: 898134 - RNA, 19 nt, Homo sapiens
  misc_RNA (1)...(19): siRNA sense strand
caaugaagacugauguauu

SEQ ID NO: 898135 - RNA, 19 nt, Homo sapiens
  misc_RNA (1)...(19): siRNA sense strand
gaagaaugagguagauguu

SEQ ID NO: 898136 - RNA, 19 nt, Homo sapiens
  misc_RNA (1)...(19): siRNA sense strand
ggcagagacugggaugaua

SEQ ID NO: 898137 - RNA, 19 nt, Homo sapiens
  misc_RNA (1)...(19): siRNA sense strand
ggaagaaugagguagaugu

SEQ ID NO: 898138 - RNA, 19 nt, Homo sapiens
  misc_RNA (1)...(19): siRNA sense strand
ugagguagauguugauucu

SEQ ID NO: 898139 - RNA, 19 nt, Homo sapiens
  misc_RNA (1)...(19): siRNA sense strand
guagggacacuuuggaauu

SEQ ID NO: 898140 - RNA, 19 nt, Homo sapiens
  misc_RNA (1)...(19): siRNA sense strand
gagacugggaugauaagua

SEQ ID NO: 898141 - RNA, 19 nt, Homo sapiens
  misc_RNA (1)...(19): siRNA sense strand
gcugaaugaugcaguaaca

SEQ ID NO: 898142 - RNA, 19 nt, Homo sapiens
  misc_RNA (1)...(19): siRNA sense strand
ugaaauucgagaacucuua

SEQ ID NO: 898143 - RNA, 19 nt, Homo sapiens
  misc_RNA (1)...(19): siRNA sense strand
ugagagcugccuucuuaua

SEQ ID NO: 898144 - RNA, 19 nt, Homo sapiens
  misc_RNA (1)...(19): siRNA sense strand
ggaggacuauuucuauugc

SEQ ID NO: 898145 - RNA, 19 nt, Homo sapiens
  misc_RNA (1)...(19): siRNA sense strand
gcaaugacuaugaauaagu

SEQ ID NO: 898146 - RNA, 19 nt, Homo sapiens
  misc_RNA (1)...(19): siRNA sense strand
ugagaccauugauguguuu

SEQ ID NO: 898147 - RNA, 19 nt, Homo sapiens
  misc_RNA (1)...(19): siRNA sense strand
gagaacauuggcacgauuu

SEQ ID NO: 898148 - RNA, 19 nt, Homo sapiens
  misc_RNA (1)...(19): siRNA sense strand
gcaaugaagacugauguau

SEQ ID NO: 898149 - RNA, 19 nt, Homo sapiens
  misc_RNA (1)...(19): siRNA sense strand
ggaauggaagaaugaggua

SEQ ID NO: 898150 - RNA, 19 nt, Homo sapiens
  misc_RNA (1)...(19): siRNA sense strand
ugugaagacuggaauugaa

SEQ ID NO: 898151 - RNA, 19 nt, Homo sapiens
  misc_RNA (1)...(19): siRNA sense strand
ggaauuccauuggcauugg

SEQ ID NO: 898152 - RNA, 19 nt, Homo sapiens
  misc_RNA (1)...(19): siRNA sense strand
agacuggaauugaagaugu

SEQ ID NO: 898153 - RNA, 19 nt, Homo sapiens
  misc_RNA (1)...(19): siRNA sense strand
ggagagucccugcugaaug

SEQ ID NO: 898154 - RNA, 19 nt, Homo sapiens
  misc_RNA (1)...(19): siRNA sense strand
auacgaagcuuccagaaaa

SEQ ID NO: 898155 - RNA, 19 nt, Homo sapiens
  misc_RNA (1)...(19): siRNA sense strand
ccacuucaaccucccgaua

SEQ ID NO: 898156 - RNA, 19 nt, Homo sapiens
  misc_RNA (1)...(19): siRNA sense strand
uugcaucucuaaaugauug

SEQ ID NO: 898157 - RNA, 19 nt, Homo sapiens
  misc_RNA (1)...(19): siRNA sense strand
agacugggaugauaaguac

SEQ ID NO: 898158 - RNA, 19 nt, Homo sapiens
  misc_RNA (1)...(19): siRNA sense strand
gaugucaagagguccaaua

SEQ ID NO: 898159 - RNA, 19 nt, Homo sapiens
  misc_RNA (1)...(19): siRNA sense strand
acacgaccaucaaguacuu

SEQ ID NO: 898160 - RNA, 19 nt, Homo sapiens
  misc_RNA (1)...(19): siRNA sense strand
cuacaucacagcugaaaug

SEQ ID NO: 898161 - RNA, 19 nt, Homo sapiens
  misc_RNA (1)...(19): siRNA sense strand
gaaacaacaagcugucagu

SEQ ID NO: 898162 - RNA, 19 nt, Homo sapiens
  misc_RNA (1)...(19): siRNA sense strand
uaucacaaguugcccacaa

SEQ ID NO: 898163 - RNA, 19 nt, Homo sapiens
  misc_RNA (1)...(19): siRNA sense strand
gagacaagccaaggagauu

SEQ ID NO: 898164 - RNA, 19 nt, Homo sapiens
  misc_RNA (1)...(19): siRNA sense strand
cgacacaagugagagacaa

SEQ ID NO: 898165 - RNA, 19 nt, Homo sapiens
  misc_RNA (1)...(19): siRNA sense strand
gaaaucuauugucgguugu

SEQ ID NO: 898166 - RNA, 19 nt, Homo sapiens
  misc_RNA (1)...(19): siRNA sense strand
cuacuaggugggauuauuu

SEQ ID NO: 898167 - RNA, 19 nt, Homo sapiens
  misc_RNA (1)...(19): siRNA sense strand
ucaagagguccaauaagaa

SEQ ID NO: 898168 - RNA, 19 nt, Homo sapiens
  misc_RNA (1)...(19): siRNA sense strand
cuacucgauucacccauaa

SEQ ID NO: 898169 - RNA, 19 nt, Homo sapiens
  misc_RNA (1)...(19): siRNA sense strand
ugagaacauuggcacgauu

SEQ ID NO: 898170 - RNA, 19 nt, Homo sapiens
  misc_RNA (1)...(19): siRNA sense strand
ugagaacauucacgucaau

SEQ ID NO: 898171 - RNA, 19 nt, Homo sapiens
  misc_RNA (1)...(19): siRNA sense strand
gcaauagcagcgacucaga

SEQ ID NO: 898172 - RNA, 19 nt, Homo sapiens
  misc_RNA (1)...(19): siRNA sense strand
agaaaucucuaucaaaucc

SEQ ID NO: 898173 - RNA, 19 nt, Homo sapiens
  misc_RNA (1)...(19): siRNA sense strand
agagacaaguuuaagaagu

SEQ ID NO: 898174 - RNA, 19 nt, Homo sapiens
  misc_RNA (1)...(19): siRNA sense strand
aaucacugcuugugcaaug

SEQ ID NO: 898175 - RNA, 19 nt, Homo sapiens
  misc_RNA (1)...(19): siRNA sense strand
ucacaaguugcccacaaua

SEQ ID NO: 898176 - RNA, 19 nt, Homo sapiens
  misc_RNA (1)...(19): siRNA sense strand
uauuacggcugccauuguu

SEQ ID NO: 898177 - RNA, 19 nt, Homo sapiens
  misc_RNA (1)...(19): siRNA sense strand
ugaauaaguacguagaaga

SEQ ID NO: 898178 - RNA, 19 nt, Homo sapiens
  misc_RNA (1)...(19): siRNA sense strand
aggaaucgccaacuucuuu

SEQ ID NO: 898179 - RNA, 19 nt, Homo sapiens
  misc_RNA (1)...(19): siRNA sense strand
cagaaaagcuacaaaagag

SEQ ID NO: 898180 - RNA, 19 nt, Homo sapiens
  misc_RNA (1)...(19): siRNA sense strand
ugaaacugaugaaauucga

SEQ ID NO: 898181 - RNA, 19 nt, Homo sapiens
  misc_RNA (1)...(19): siRNA sense strand
cuaaaugauugucgugaag

SEQ ID NO: 898182 - RNA, 19 nt, Homo sapiens
  misc_RNA (1)...(19): siRNA sense strand
guacguagaagaaaaugua

SEQ ID NO: 898183 - RNA, 19 nt, Homo sapiens
  misc_RNA (1)...(19): siRNA sense strand
aaaccuugaucuucaucuu

SEQ ID NO: 898184 - RNA, 19 nt, Homo sapiens
  misc_RNA (1)...(19): siRNA sense strand
ucuaaaugauugucgugaa

SEQ ID NO: 898185 - RNA, 19 nt, Homo sapiens
  misc_RNA (1)...(19): siRNA sense strand
gacuggaauugaagauguu

SEQ ID NO: 898186 - RNA, 19 nt, Homo sapiens
  misc_RNA (1)...(19): siRNA sense strand
ccauugagaccauugaugu

SEQ ID NO: 898187 - RNA, 19 nt, Homo sapiens
  misc_RNA (1)...(19): siRNA sense strand
caaguugcccacaauagug

SEQ ID NO: 898188 - RNA, 19 nt, Homo sapiens
  misc_RNA (1)...(19): siRNA sense strand
gaaggacagcagcuugaau

SEQ ID NO: 898189 - RNA, 19 nt, Homo sapiens
  misc_RNA (1)...(19): siRNA sense strand
ccaucuguaucacaaguug

SEQ ID NO: 898190 - RNA, 19 nt, Homo sapiens
  misc_RNA (1)...(19): siRNA sense strand
guucaucauugccuaugga

SEQ ID NO: 898191 - RNA, 19 nt, Homo sapiens
  misc_RNA (1)...(19): siRNA sense strand
acuacucgauucacccaua

SEQ ID NO: 898192 - RNA, 19 nt, Homo sapiens
  misc_RNA (1)...(19): siRNA sense strand
uagggacacuuuggaauuc

SEQ ID NO: 898193 - RNA, 19 nt, Homo sapiens
  misc_RNA (1)...(19): siRNA sense strand
ggaaggacagcagcuugaa

SEQ ID NO: 898194 - RNA, 19 nt, Homo sapiens
  misc_RNA (1)...(19): siRNA sense strand
aaaugauugucgugaagaa

SEQ ID NO: 898195 - RNA, 19 nt, Homo sapiens
  misc_RNA (1)...(19): siRNA sense strand
agagcugccuucuuauaau

SEQ ID NO: 898196 - RNA, 19 nt, Homo sapiens
  misc_RNA (1)...(19): siRNA sense strand
gcgaaaccuugaucuucau

SEQ ID NO: 898197 - RNA, 19 nt, Homo sapiens
  misc_RNA (1)...(19): siRNA sense strand
gacuaugaauaaguacgua

SEQ ID NO: 898198 - RNA, 19 nt, Homo sapiens
  misc_RNA (1)...(19): siRNA sense strand
ucuacuaggugggauuauu

SEQ ID NO: 898199 - RNA, 19 nt, Homo sapiens
  misc_RNA (1)...(19): siRNA sense strand
guugucauauucuuuacug

SEQ ID NO: 898200 - RNA, 19 nt, Homo sapiens
  misc_RNA (1)...(19): siRNA sense strand
ccagacgucaggcuuacua

SEQ ID NO: 898201 - RNA, 19 nt, Homo sapiens
  misc_RNA (1)...(19): siRNA sense strand
ccaccgugcucaauuugca

SEQ ID NO: 898202 - RNA, 19 nt, Homo sapiens
  misc_RNA (1)...(19): siRNA sense strand
ccaaagucaaguauuguau

SEQ ID NO: 898203 - RNA, 19 nt, Homo sapiens
  misc_RNA (1)...(19): siRNA sense strand
cauauucuuuacugucuuc

SEQ ID NO: 898204 - RNA, 19 nt, Homo sapiens
  misc_RNA (1)...(19): siRNA sense strand
gaucaugugaagacuggaa

SEQ ID NO: 898205 - RNA, 19 nt, Homo sapiens
  misc_RNA (1)...(19): siRNA sense strand
cagcgaacuuuauccuaca

SEQ ID NO: 898206 - RNA, 19 nt, Homo sapiens
  misc_RNA (1)...(19): siRNA sense strand
aaauaucugcggaagcuuu

SEQ ID NO: 898207 - RNA, 19 nt, Homo sapiens
  misc_RNA (1)...(19): siRNA sense strand
ucacgcgggucuccaauua

SEQ ID NO: 898208 - RNA, 19 nt, Homo sapiens
  misc_RNA (1)...(19): siRNA sense strand
ccaauuacaucgacuggau

SEQ ID NO: 898209 - RNA, 19 nt, Homo sapiens
  misc_RNA (1)...(19): siRNA sense strand
gucagugucucuaagauug

SEQ ID NO: 898210 - RNA, 19 nt, Homo sapiens
  misc_RNA (1)...(19): siRNA sense strand
ccacuuacccaccuuaugu

SEQ ID NO: 898211 - RNA, 19 nt, Homo sapiens
  misc_RNA (1)...(19): siRNA sense strand
gcaccauucuacccaacaa

SEQ ID NO: 898212 - RNA, 19 nt, Homo sapiens
  misc_RNA (1)...(19): siRNA sense strand
ccacaagcccuccgucuuc

SEQ ID NO: 898213 - RNA, 19 nt, Homo sapiens
  misc_RNA (1)...(19): siRNA sense strand
ggugauugcaaauaacuaa

SEQ ID NO: 898214 - RNA, 19 nt, Homo sapiens
  misc_RNA (1)...(19): siRNA sense strand
cgacauugcccugcucaaa

SEQ ID NO: 898215 - RNA, 19 nt, Homo sapiens
  misc_RNA (1)...(19): siRNA sense strand
uacaucgacuggaucaauu

SEQ ID NO: 898216 - RNA, 19 nt, Homo sapiens
  misc_RNA (1)...(19): siRNA sense strand
auucggugauugcaaauaa

SEQ ID NO: 898217 - RNA, 19 nt, Homo sapiens
  misc_RNA (1)...(19): siRNA sense strand
gaagaagcgaggcccaaca

SEQ ID NO: 898218 - RNA, 19 nt, Homo sapiens
  misc_RNA (1)...(19): siRNA sense strand
ccaaccaaaucuccaaagg

SEQ ID NO: 898219 - RNA, 19 nt, Homo sapiens
  misc_RNA (1)...(19): siRNA sense strand
gcuccaauggcaaguggua

SEQ ID NO: 898220 - RNA, 19 nt, Homo sapiens
  misc_RNA (1)...(19): siRNA sense strand
caacggggcuguuccugau

SEQ ID NO: 898221 - RNA, 19 nt, Homo sapiens
  misc_RNA (1)...(19): siRNA sense strand
cacaagcccuccgucuuca

SEQ ID NO: 898222 - RNA, 19 nt, Homo sapiens
  misc_RNA (1)...(19): siRNA sense strand
gaaaaccaguaugaucugu

SEQ ID NO: 898223 - RNA, 19 nt, Homo sapiens
  misc_RNA (1)...(19): siRNA sense strand
ccaaagggaacgacauugc

SEQ ID NO: 898224 - RNA, 19 nt, Homo sapiens
  misc_RNA (1)...(19): siRNA sense strand
ggugguuggcggugaagaa

SEQ ID NO: 898225 - RNA, 19 nt, Homo sapiens
  misc_RNA (1)...(19): siRNA sense strand
uuacaucgacuggaucaau

SEQ ID NO: 898226 - RNA, 19 nt, Homo sapiens
  misc_RNA (1)...(19): siRNA sense strand
acgcgggucuccaauuaca

SEQ ID NO: 898227 - RNA, 19 nt, Homo sapiens
  misc_RNA (1)...(19): siRNA sense strand
gacauugcccugcucaaac

SEQ ID NO: 898228 - RNA, 19 nt, Homo sapiens
  misc_RNA (1)...(19): siRNA sense strand
gguugcugguuguggacua

SEQ ID NO: 898229 - RNA, 19 nt, Homo sapiens
  misc_RNA (1)...(19): siRNA sense strand
uuacccaccuuaugugacu

SEQ ID NO: 898230 - RNA, 19 nt, Homo sapiens
  misc_RNA (1)...(19): siRNA sense strand
acauugcccugcucaaacu

SEQ ID NO: 898231 - RNA, 19 nt, Homo sapiens
  misc_RNA (1)...(19): siRNA sense strand
ccauucuacccaacaacua

SEQ ID NO: 898232 - RNA, 19 nt, Homo sapiens
  misc_RNA (1)...(19): siRNA sense strand
gcuggagcccucaguugug

SEQ ID NO: 898233 - RNA, 19 nt, Homo sapiens
  misc_RNA (1)...(19): siRNA sense strand
ggaugaaaguuaugagaua

SEQ ID NO: 898234 - RNA, 19 nt, Homo sapiens
  misc_RNA (1)...(19): siRNA sense strand
gguaagauguuaaugguaa

SEQ ID NO: 898235 - RNA, 19 nt, Homo sapiens
  misc_RNA (1)...(19): siRNA sense strand
acaggaauuucaccuauua

SEQ ID NO: 898236 - RNA, 19 nt, Homo sapiens
  misc_RNA (1)...(19): siRNA sense strand
gauaagguguuacugaguu

SEQ ID NO: 898237 - RNA, 19 nt, Homo sapiens
  misc_RNA (1)...(19): siRNA sense strand
gagaauuuguguacugaaa

SEQ ID NO: 898238 - RNA, 19 nt, Homo sapiens
  misc_RNA (1)...(19): siRNA sense strand
gaaauauacuagagcacuu

SEQ ID NO: 898239 - RNA, 19 nt, Homo sapiens
  misc_RNA (1)...(19): siRNA sense strand
gaagaacacagcaagcaaa

SEQ ID NO: 898240 - RNA, 19 nt, Homo sapiens
  misc_RNA (1)...(19): siRNA sense strand
gauauauguugaagacuug

SEQ ID NO: 898241 - RNA, 19 nt, Homo sapiens
  misc_RNA (1)...(19): siRNA sense strand
aaggaggccuguuacuuua

SEQ ID NO: 898242 - RNA, 19 nt, Homo sapiens
  misc_RNA (1)...(19): siRNA sense strand
gaauuucaccuauuacaga

SEQ ID NO: 898243 - RNA, 19 nt, Homo sapiens
  misc_RNA (1)...(19): siRNA sense strand
aaaguagacucuucugaga

SEQ ID NO: 898244 - RNA, 19 nt, Homo sapiens
  misc_RNA (1)...(19): siRNA sense strand
ucacaggaauuucaccuau

SEQ ID NO: 898245 - RNA, 19 nt, Homo sapiens
  misc_RNA (1)...(19): siRNA sense strand
gcacauacaaugaucaauc

SEQ ID NO: 898246 - RNA, 19 nt, Homo sapiens
  misc_RNA (1)...(19): siRNA sense strand
cuagagcacuucaugauuc

SEQ ID NO: 898247 - RNA, 19 nt, Homo sapiens
  misc_RNA (1)...(19): siRNA sense strand
ccaacuguguuucauuuga

SEQ ID NO: 898248 - RNA, 19 nt, Homo sapiens
  misc_RNA (1)...(19): siRNA sense strand
ucaaguaucacaggaauuu

SEQ ID NO: 898249 - RNA, 19 nt, Homo sapiens
  misc_RNA (1)...(19): siRNA sense strand
gcaaagccuuguguuucaa

SEQ ID NO: 898250 - RNA, 19 nt, Homo sapiens
  misc_RNA (1)...(19): siRNA sense strand
uaucagggguccagaaaua

SEQ ID NO: 898251 - RNA, 19 nt, Homo sapiens
  misc_RNA (1)...(19): siRNA sense strand
ugagauauauguugaagac

SEQ ID NO: 898252 - RNA, 19 nt, Homo sapiens
  misc_RNA (1)...(19): siRNA sense strand
ugaaucaggugacgguguu

SEQ ID NO: 898253 - RNA, 19 nt, Homo sapiens
  misc_RNA (1)...(19): siRNA sense strand
aaagauaagguguuacuga

SEQ ID NO: 898254 - RNA, 19 nt, Homo sapiens
  misc_RNA (1)...(19): siRNA sense strand
gaaguauucaaccaacaaa

SEQ ID NO: 898255 - RNA, 19 nt, Homo sapiens
  misc_RNA (1)...(19): siRNA sense strand
ggaagaacacagcaagcaa

SEQ ID NO: 898256 - RNA, 19 nt, Homo sapiens
  misc_RNA (1)...(19): siRNA sense strand
caacagaaggccaaagaag

SEQ ID NO: 898257 - RNA, 19 nt, Homo sapiens
  misc_RNA (1)...(19): siRNA sense strand
gacugauccuggaguguuu

SEQ ID NO: 898258 - RNA, 19 nt, Homo sapiens
  misc_RNA (1)...(19): siRNA sense strand
gcacaaaagacaucuggua

SEQ ID NO: 898259 - RNA, 19 nt, Homo sapiens
  misc_RNA (1)...(19): siRNA sense strand
gcuccgcucuggccuuaug

SEQ ID NO: 898260 - RNA, 19 nt, Homo sapiens
  misc_RNA (1)...(19): siRNA sense strand
cuccaacuguguuucauuu

SEQ ID NO: 898261 - RNA, 19 nt, Homo sapiens
  misc_RNA (1)...(19): siRNA sense strand
gugcuuugccuuugguaua

SEQ ID NO: 898262 - RNA, 19 nt, Homo sapiens
  misc_RNA (1)...(19): siRNA sense strand
gguacucgcugccugucaa

SEQ ID NO: 898263 - RNA, 19 nt, Homo sapiens
  misc_RNA (1)...(19): siRNA sense strand
acagaaggccaaagaaguu

SEQ ID NO: 898264 - RNA, 19 nt, Homo sapiens
  misc_RNA (1)...(19): siRNA sense strand
auaagguguuacugaguua

SEQ ID NO: 898265 - RNA, 19 nt, Homo sapiens
  misc_RNA (1)...(19): siRNA sense strand
cacaggaauuucaccuauu

SEQ ID NO: 898266 - RNA, 19 nt, Homo sapiens
  misc_RNA (1)...(19): siRNA sense strand
caacaccccucaaaugaau

SEQ ID NO: 898267 - RNA, 19 nt, Homo sapiens
  misc_RNA (1)...(19): siRNA sense strand
aagcuccgcucuggccuua

SEQ ID NO: 898268 - RNA, 19 nt, Homo sapiens
  misc_RNA (1)...(19): siRNA sense strand
gauaaucaucuugcucuga

SEQ ID NO: 898269 - RNA, 19 nt, Homo sapiens
  misc_RNA (1)...(19): siRNA sense strand
gaggaugaaaguuaugaga

SEQ ID NO: 898270 - RNA, 19 nt, Homo sapiens
  misc_RNA (1)...(19): siRNA sense strand
ugauuaaaguagacucuuc

SEQ ID NO: 898271 - RNA, 19 nt, Homo sapiens
  misc_RNA (1)...(19): siRNA sense strand
gcacuccaacuguguuuca

SEQ ID NO: 898272 - RNA, 19 nt, Homo sapiens
  misc_RNA (1)...(19): siRNA sense strand
gugacgguguugaugguaa

SEQ ID NO: 898273 - RNA, 19 nt, Homo sapiens
  misc_RNA (1)...(19): siRNA sense strand
ucucuaagcacauacaaug

SEQ ID NO: 898274 - RNA, 19 nt, Homo sapiens
  misc_RNA (1)...(19): siRNA sense strand
gauccuggaguguuuauag

SEQ ID NO: 898275 - RNA, 19 nt, Homo sapiens
  misc_RNA (1)...(19): siRNA sense strand
uuucaccuauuacagagua

SEQ ID NO: 898276 - RNA, 19 nt, Homo sapiens
  misc_RNA (1)...(19): siRNA sense strand
gaugguaagauguuaaugg

SEQ ID NO: 898277 - RNA, 19 nt, Homo sapiens
  misc_RNA (1)...(19): siRNA sense strand
uuacugaguuacuaugagu

SEQ ID NO: 898278 - RNA, 19 nt, Homo sapiens
  misc_RNA (1)...(19): siRNA sense strand
guaaaggauaaucaucuug

SEQ ID NO: 898279 - RNA, 19 nt, Homo sapiens
  misc_RNA (1)...(19): siRNA sense strand
guccagaaauauacuagag

SEQ ID NO: 898280 - RNA, 19 nt, Homo sapiens
  misc_RNA (1)...(19): siRNA sense strand
caacaacaaggaacacucu

SEQ ID NO: 898281 - RNA, 19 nt, Homo sapiens
  misc_RNA (1)...(19): siRNA sense strand
gaguaucuugcuucucuaa

SEQ ID NO: 898282 - RNA, 19 nt, Homo sapiens
  misc_RNA (1)...(19): siRNA sense strand
agcaaagccuuguguuuca

SEQ ID NO: 898283 - RNA, 19 nt, Homo sapiens
  misc_RNA (1)...(19): siRNA sense strand
ggagugcuuugccuuuggu

SEQ ID NO: 898284 - RNA, 19 nt, Homo sapiens
  misc_RNA (1)...(19): siRNA sense strand
aagcaaagccuuguguuuc

SEQ ID NO: 898285 - RNA, 19 nt, Homo sapiens
  misc_RNA (1)...(19): siRNA sense strand
cuaagcacauacaaugauc

SEQ ID NO: 898286 - RNA, 19 nt, Homo sapiens
  misc_RNA (1)...(19): siRNA sense strand
uagagcacuucaugauuca

SEQ ID NO: 898287 - RNA, 19 nt, Homo sapiens
  misc_RNA (1)...(19): siRNA sense strand
guggagugcuuugccuuug

SEQ ID NO: 898288 - RNA, 19 nt, Homo sapiens
  misc_RNA (1)...(19): siRNA sense strand
uuuaagcucucugaaacuu

SEQ ID NO: 898289 - RNA, 19 nt, Homo sapiens
  misc_RNA (1)...(19): siRNA sense strand
ggaggccuguuacuuuagg

SEQ ID NO: 898290 - RNA, 19 nt, Homo sapiens
  misc_RNA (1)...(19): siRNA sense strand
uaauaugcacuccaacugu

SEQ ID NO: 898291 - RNA, 19 nt, Homo sapiens
  misc_RNA (1)...(19): siRNA sense strand
ucugagaauuuguguacug

SEQ ID NO: 898292 - RNA, 19 nt, Homo sapiens
  misc_RNA (1)...(19): siRNA sense strand
guagaaagcacaaaagaca

SEQ ID NO: 898293 - RNA, 19 nt, Homo sapiens
  misc_RNA (1)...(19): siRNA sense strand
ucaucuugcucugauuaaa

SEQ ID NO: 898294 - RNA, 19 nt, Homo sapiens
  misc_RNA (1)...(19): siRNA sense strand
acagcaaaguggaagaaca

SEQ ID NO: 898295 - RNA, 19 nt, Homo sapiens
  misc_RNA (1)...(19): siRNA sense strand
ggaauuucaccuauuacag

SEQ ID NO: 898296 - RNA, 19 nt, Homo sapiens
  misc_RNA (1)...(19): siRNA sense strand
cagaaggccaaagaaguuu

SEQ ID NO: 898297 - RNA, 19 nt, Homo sapiens
  misc_RNA (1)...(19): siRNA sense strand
ggagagaaaccaccaaaag

SEQ ID NO: 898298 - RNA, 19 nt, Homo sapiens
  misc_RNA (1)...(19): siRNA sense strand
cugagaauuuguguacuga

SEQ ID NO: 898299 - RNA, 19 nt, Homo sapiens
  misc_RNA (1)...(19): siRNA sense strand
caaaagacaucugguacuc

SEQ ID NO: 898300 - RNA, 19 nt, Homo sapiens
  misc_RNA (1)...(19): siRNA sense strand
uauacuagagcacuucaug

SEQ ID NO: 898301 - RNA, 19 nt, Homo sapiens
  misc_RNA (1)...(19): siRNA sense strand
uuuggaggaugaaaguuau

SEQ ID NO: 898302 - RNA, 19 nt, Homo sapiens
  misc_RNA (1)...(19): siRNA sense strand
ccaacagaaggccaaagaa

SEQ ID NO: 898303 - RNA, 19 nt, Homo sapiens
  misc_RNA (1)...(19): siRNA sense strand
ccauguacuuuaugaagcu

SEQ ID NO: 898304 - RNA, 19 nt, Homo sapiens
  misc_RNA (1)...(19): siRNA sense strand
gaucaauccauuacuuuug

SEQ ID NO: 898305 - RNA, 19 nt, Homo sapiens
  misc_RNA (1)...(19): siRNA sense strand
gaaagauaagguguuacug

SEQ ID NO: 898306 - RNA, 19 nt, Homo sapiens
  misc_RNA (1)...(19): siRNA sense strand
uaggagagaaaccaccaaa

SEQ ID NO: 898307 - RNA, 19 nt, Homo sapiens
  misc_RNA (1)...(19): siRNA sense strand
agacugauccuggaguguu

SEQ ID NO: 898308 - RNA, 19 nt, Homo sapiens
  misc_RNA (1)...(19): siRNA sense strand
ccuauuacagaguaucuug

SEQ ID NO: 898309 - RNA, 19 nt, Homo sapiens
  misc_RNA (1)...(19): siRNA sense strand
gagcacuucaugauucaag

SEQ ID NO: 898310 - RNA, 19 nt, Homo sapiens
  misc_RNA (1)...(19): siRNA sense strand
uuaaaguagacucuucuga

SEQ ID NO: 898311 - RNA, 19 nt, Homo sapiens
  misc_RNA (1)...(19): siRNA sense strand
gauuaaaguagacucuucu

SEQ ID NO: 898312 - RNA, 19 nt, Homo sapiens
  misc_RNA (1)...(19): siRNA sense strand
gccagaccaggccuucuuu

SEQ ID NO: 898313 - RNA, 19 nt, Homo sapiens
  misc_RNA (1)...(19): siRNA sense strand
ggagcuccauaagugugaa

SEQ ID NO: 898314 - RNA, 19 nt, Homo sapiens
  misc_RNA (1)...(19): siRNA sense strand
cacauacaaugaucaaucc

SEQ ID NO: 898315 - RNA, 19 nt, Homo sapiens
  misc_RNA (1)...(19): siRNA sense strand
gauucaaguaucacaggaa

SEQ ID NO: 898316 - RNA, 19 nt, Homo sapiens
  misc_RNA (1)...(19): siRNA sense strand
uggaguguuuauaggugua

SEQ ID NO: 898317 - RNA, 19 nt, Homo sapiens
  misc_RNA (1)...(19): siRNA sense strand
agaaagauaagguguuacu

SEQ ID NO: 898318 - RNA, 19 nt, Homo sapiens
  misc_RNA (1)...(19): siRNA sense strand
aaacagguagaaagcacaa

SEQ ID NO: 898319 - RNA, 19 nt, Homo sapiens
  misc_RNA (1)...(19): siRNA sense strand
cccaacagaaggccaaaga

SEQ ID NO: 898320 - RNA, 19 nt, Homo sapiens
  misc_RNA (1)...(19): siRNA sense strand
ccuguuacuuuaggagaga

SEQ ID NO: 898321 - RNA, 19 nt, Homo sapiens
  misc_RNA (1)...(19): siRNA sense strand
guuacugaguuacuaugag

SEQ ID NO: 898322 - RNA, 19 nt, Homo sapiens
  misc_RNA (1)...(19): siRNA sense strand
ucuaagcacauacaaugau

SEQ ID NO: 898323 - RNA, 19 nt, Homo sapiens
  misc_RNA (1)...(19): siRNA sense strand
caucuugcucugauuaaag

SEQ ID NO: 898324 - RNA, 19 nt, Homo sapiens
  misc_RNA (1)...(19): siRNA sense strand
guguaaaggauaaucaucu

SEQ ID NO: 898325 - RNA, 19 nt, Homo sapiens
  misc_RNA (1)...(19): siRNA sense strand
ggaguguuuauagguguaa

SEQ ID NO: 898326 - RNA, 19 nt, Homo sapiens
  misc_RNA (1)...(19): siRNA sense strand
guugaugguaagauguuaa

SEQ ID NO: 898327 - RNA, 19 nt, Homo sapiens
  misc_RNA (1)...(19): siRNA sense strand
ugacgguguugaugguaag

SEQ ID NO: 898328 - RNA, 19 nt, Homo sapiens
  misc_RNA (1)...(19): siRNA sense strand
ccgcucuggccuuaugaua

SEQ ID NO: 898329 - RNA, 19 nt, Homo sapiens
  misc_RNA (1)...(19): siRNA sense strand
acauugaccuucaguuuaa

SEQ ID NO: 898330 - RNA, 19 nt, Homo sapiens
  misc_RNA (1)...(19): siRNA sense strand
caaccuggcuacuggaauc

SEQ ID NO: 898331 - RNA, 19 nt, Homo sapiens
  misc_RNA (1)...(19): siRNA sense strand
cacagacgauggcuacauu

SEQ ID NO: 898332 - RNA, 19 nt, Homo sapiens
  misc_RNA (1)...(19): siRNA sense strand
gaaaaccccuccuaagauc

SEQ ID NO: 898333 - RNA, 19 nt, Homo sapiens
  misc_RNA (1)...(19): siRNA sense strand
cuacauugaccuucaguuu

SEQ ID NO: 898334 - RNA, 19 nt, Homo sapiens
  misc_RNA (1)...(19): siRNA sense strand
gcgccuuucucauuauuau

SEQ ID NO: 898335 - RNA, 19 nt, Homo sapiens
  misc_RNA (1)...(19): siRNA sense strand
gauuggcgccuuucucauu

SEQ ID NO: 898336 - RNA, 19 nt, Homo sapiens
  misc_RNA (1)...(19): siRNA sense strand
uacauugaccuucaguuua

SEQ ID NO: 898337 - RNA, 19 nt, Homo sapiens
  misc_RNA (1)...(19): siRNA sense strand
uuacuccuaugaugacauu

SEQ ID NO: 898338 - RNA, 19 nt, Homo sapiens
  misc_RNA (1)...(19): siRNA sense strand
ccaguaguaaagugaaaua

SEQ ID NO: 898339 - RNA, 19 nt, Homo sapiens
  misc_RNA (1)...(19): siRNA sense strand
ugaugacauuccagacuuu

SEQ ID NO: 898340 - RNA, 19 nt, Homo sapiens
  misc_RNA (1)...(19): siRNA sense strand
cuaccgugcuuacuccuau

SEQ ID NO: 898341 - RNA, 19 nt, Homo sapiens
  misc_RNA (1)...(19): siRNA sense strand
gaccuucaguuuaagaaaa

SEQ ID NO: 898342 - RNA, 19 nt, Homo sapiens
  misc_RNA (1)...(19): siRNA sense strand
gugcuuacuccuaugauga

SEQ ID NO: 898343 - RNA, 19 nt, Homo sapiens
  misc_RNA (1)...(19): siRNA sense strand
auuggcgccuuucucauua

SEQ ID NO: 898344 - RNA, 19 nt, Homo sapiens
  misc_RNA (1)...(19): siRNA sense strand
gcacagacgauggcuacau

SEQ ID NO: 898345 - RNA, 19 nt, Homo sapiens
  misc_RNA (1)...(19): siRNA sense strand
ccaucgcacuugccacugu

SEQ ID NO: 898346 - RNA, 19 nt, Homo sapiens
  misc_RNA (1)...(19): siRNA sense strand
gcugaucauuggcauucug

SEQ ID NO: 898347 - RNA, 19 nt, Homo sapiens
  misc_RNA (1)...(19): siRNA sense strand
uccaaaggcuaccgugcuu

SEQ ID NO: 898348 - RNA, 19 nt, Homo sapiens
  misc_RNA (1)...(19): siRNA sense strand
uuccagacuuugaugacua

SEQ ID NO: 898349 - RNA, 19 nt, Homo sapiens
  misc_RNA (1)...(19): siRNA sense strand
ccaaaggcuaccgugcuua

SEQ ID NO: 898350 - RNA, 19 nt, Homo sapiens
  misc_RNA (1)...(19): siRNA sense strand
ucauuggcauucugguguu

SEQ ID NO: 898351 - RNA, 19 nt, Homo sapiens
  misc_RNA (1)...(19): siRNA sense strand
cagacgauggcuacauuga

SEQ ID NO: 898352 - RNA, 19 nt, Homo sapiens
  misc_RNA (1)...(19): siRNA sense strand
caaaggcuaccgugcuuac

SEQ ID NO: 898353 - RNA, 19 nt, Homo sapiens
  misc_RNA (1)...(19): siRNA sense strand
aagaaaaccccuccuaaga

SEQ ID NO: 898354 - RNA, 19 nt, Homo sapiens
  misc_RNA (1)...(19): siRNA sense strand
ugacauuccagacuuugau

SEQ ID NO: 898355 - RNA, 19 nt, Homo sapiens
  misc_RNA (1)...(19): siRNA sense strand
augaugacauuccagacuu

SEQ ID NO: 898356 - RNA, 19 nt, Homo sapiens
  misc_RNA (1)...(19): siRNA sense strand
uauaaggccaucgcacuug

SEQ ID NO: 898357 - RNA, 19 nt, Homo sapiens
  misc_RNA (1)...(19): siRNA sense strand
gaugacauuccagacuuug

SEQ ID NO: 898358 - RNA, 19 nt, Homo sapiens
  misc_RNA (1)...(19): siRNA sense strand
gugcugaucauuggcauuc

SEQ ID NO: 898359 - RNA, 19 nt, Homo sapiens
  misc_RNA (1)...(19): siRNA sense strand
uggcgccuuucucauuauu

SEQ ID NO: 898360 - RNA, 19 nt, Homo sapiens
  misc_RNA (1)...(19): siRNA sense strand
guuccagugcugaucauug

SEQ ID NO: 898361 - RNA, 19 nt, Homo sapiens
  misc_RNA (1)...(19): siRNA sense strand
gccuuucucauuauuauag

SEQ ID NO: 898362 - RNA, 19 nt, Homo sapiens
  misc_RNA (1)...(19): siRNA sense strand
gaagcgagaagacuuauaa

SEQ ID NO: 898363 - RNA, 19 nt, Homo sapiens
  misc_RNA (1)...(19): siRNA sense strand
ggaaggagcccaccuggaa

SEQ ID NO: 898364 - RNA, 19 nt, Homo sapiens
  misc_RNA (1)...(19): siRNA sense strand
acaaggagauugagagcuu

SEQ ID NO: 898365 - RNA, 19 nt, Homo sapiens
  misc_RNA (1)...(19): siRNA sense strand
gcaccuacagugucucauu

SEQ ID NO: 898366 - RNA, 19 nt, Homo sapiens
  misc_RNA (1)...(19): siRNA sense strand
uggugucgcuggagaagua

SEQ ID NO: 898367 - RNA, 19 nt, Homo sapiens
  misc_RNA (1)...(19): siRNA sense strand
caaggagauugagagcuuu

SEQ ID NO: 898368 - RNA, 19 nt, Homo sapiens
  misc_RNA (1)...(19): siRNA sense strand
ggaagcucauccuacugaa

SEQ ID NO: 898369 - RNA, 19 nt, Homo sapiens
  misc_RNA (1)...(19): siRNA sense strand
ggacuucuacgacuucaag

SEQ ID NO: 898370 - RNA, 19 nt, Homo sapiens
  misc_RNA (1)...(19): siRNA sense strand
gagcccaccuggaacuucu

SEQ ID NO: 898371 - RNA, 19 nt, Homo sapiens
  misc_RNA (1)...(19): siRNA sense strand
gcaaccaguuuggccaaca

SEQ ID NO: 898372 - RNA, 19 nt, Homo sapiens
  misc_RNA (1)...(19): siRNA sense strand
caccuacagugucucauuc

SEQ ID NO: 898373 - RNA, 19 nt, Homo sapiens
  misc_RNA (1)...(19): siRNA sense strand
gcaggacuucuacgacuuc

SEQ ID NO: 898374 - RNA, 19 nt, Homo sapiens
  misc_RNA (1)...(19): siRNA sense strand
caaccaguuuggccaacag

SEQ ID NO: 898375 - RNA, 19 nt, Homo sapiens
  misc_RNA (1)...(19): siRNA sense strand
ccaccuggaacuucuggaa

SEQ ID NO: 898376 - RNA, 19 nt, Homo sapiens
  misc_RNA (1)...(19): siRNA sense strand
acugaagcgagaagacuua

SEQ ID NO: 898377 - RNA, 19 nt, Homo sapiens
  misc_RNA (1)...(19): siRNA sense strand
ugacagcaacaaggagauu

SEQ ID NO: 898378 - RNA, 19 nt, Homo sapiens
  misc_RNA (1)...(19): siRNA sense strand
ugaagcgagaagacuuaua

SEQ ID NO: 898379 - RNA, 19 nt, Homo sapiens
  misc_RNA (1)...(19): siRNA sense strand
gaagcucauccuacugaag

SEQ ID NO: 898380 - RNA, 19 nt, Homo sapiens
  misc_RNA (1)...(19): siRNA sense strand
gcaggagcaggacuucuac

SEQ ID NO: 898381 - RNA, 19 nt, Homo sapiens
  misc_RNA (1)...(19): siRNA sense strand
gggacuauuuccucaaguu

SEQ ID NO: 898382 - RNA, 19 nt, Homo sapiens
  misc_RNA (1)...(19): siRNA sense strand
cgacacagcagacaaguuc

SEQ ID NO: 898383 - RNA, 19 nt, Homo sapiens
  misc_RNA (1)...(19): siRNA sense strand
ggacuauuuccucaaguuu

SEQ ID NO: 898384 - RNA, 19 nt, Homo sapiens
  misc_RNA (1)...(19): siRNA sense strand
ccucaaguuugccuauauu

SEQ ID NO: 898385 - RNA, 19 nt, Homo sapiens
  misc_RNA (1)...(19): siRNA sense strand
gcauauccgugcugaagag

SEQ ID NO: 898386 - RNA, 19 nt, Homo sapiens
  misc_RNA (1)...(19): siRNA sense strand
guacgggacggcaagauga

SEQ ID NO: 898387 - RNA, 19 nt, Homo sapiens
  misc_RNA (1)...(19): siRNA sense strand
gcacaguggcccucaucaa

SEQ ID NO: 898388 - RNA, 19 nt, Homo sapiens
  misc_RNA (1)...(19): siRNA sense strand
caaguuugccuauauugug

SEQ ID NO: 898389 - RNA, 19 nt, Homo sapiens
  misc_RNA (1)...(19): siRNA sense strand
uugccuauauuguggauuu

SEQ ID NO: 898390 - RNA, 19 nt, Homo sapiens
  misc_RNA (1)...(19): siRNA sense strand
cagcuucuccgucugguuu

SEQ ID NO: 898391 - RNA, 19 nt, Homo sapiens
  misc_RNA (1)...(19): siRNA sense strand
gaaccaaaggugucaagag

SEQ ID NO: 898392 - RNA, 19 nt, Homo sapiens
  misc_RNA (1)...(19): siRNA sense strand
cccaagaccucgagaguac

SEQ ID NO: 898393 - RNA, 19 nt, Homo sapiens
  misc_RNA (1)...(19): siRNA sense strand
cucaagaaguccugcauau

SEQ ID NO: 898394 - RNA, 19 nt, Homo sapiens
  misc_RNA (1)...(19): siRNA sense strand
acucaagccugccuucuuc

SEQ ID NO: 898395 - RNA, 19 nt, Homo sapiens
  misc_RNA (1)...(19): siRNA sense strand
cgagcugggugcuggcauu

SEQ ID NO: 898396 - RNA, 19 nt, Homo sapiens
  misc_RNA (1)...(19): siRNA sense strand
acugggagguggagauuau

SEQ ID NO: 898397 - RNA, 19 nt, Homo sapiens
  misc_RNA (1)...(19): siRNA sense strand
caagaaguccugcauaucc

SEQ ID NO: 898398 - RNA, 19 nt, Homo sapiens
  misc_RNA (1)...(19): siRNA sense strand
acaaguuccugcagcuguu

SEQ ID NO: 898399 - RNA, 19 nt, Homo sapiens
  misc_RNA (1)...(19): siRNA sense strand
ggaccgaggcaccuacuac

SEQ ID NO: 898400 - RNA, 19 nt, Homo sapiens
  misc_RNA (1)...(19): siRNA sense strand
gccuucagcuccgcaagaa

SEQ ID NO: 898401 - RNA, 19 nt, Homo sapiens
  misc_RNA (1)...(19): siRNA sense strand
caagagugcagccguagca

SEQ ID NO: 898402 - RNA, 19 nt, Homo sapiens
  misc_RNA (1)...(19): siRNA sense strand
ccucaagaaguccugcaua

SEQ ID NO: 898403 - RNA, 19 nt, Homo sapiens
  misc_RNA (1)...(19): siRNA sense strand
gcugggugcuggcauugca

SEQ ID NO: 898404 - RNA, 19 nt, Homo sapiens
  misc_RNA (1)...(19): siRNA sense strand
gcucagcuucaccaaauca

SEQ ID NO: 898405 - RNA, 19 nt, Homo sapiens
  misc_RNA (1)...(19): siRNA sense strand
cagggacuauuuccucaag

SEQ ID NO: 898406 - RNA, 19 nt, Homo sapiens
  misc_RNA (1)...(19): siRNA sense strand
gacuauuuccucaaguuug

SEQ ID NO: 898407 - RNA, 19 nt, Homo sapiens
  misc_RNA (1)...(19): siRNA sense strand
caagcuguccgugcaguga

SEQ ID NO: 898408 - RNA, 19 nt, Homo sapiens
  misc_RNA (1)...(19): siRNA sense strand
ccuauauuguggauuugga

SEQ ID NO: 898409 - RNA, 19 nt, Homo sapiens
  misc_RNA (1)...(19): siRNA sense strand
acaguggcccucaucaaga

SEQ ID NO: 898410 - RNA, 19 nt, Homo sapiens
  misc_RNA (1)...(19): siRNA sense strand
ccacccgcuucacccauug

SEQ ID NO: 898411 - RNA, 19 nt, Homo sapiens
  misc_RNA (1)...(19): siRNA sense strand
gagggugagccggcuguuu

SEQ ID NO: 898412 - RNA, 19 nt, Homo sapiens
  misc_RNA (1)...(19): siRNA sense strand
gcuguguccuaucaacuac

SEQ ID NO: 898413 - RNA, 19 nt, Homo sapiens
  misc_RNA (1)...(19): siRNA sense strand
caguggcccucaucaagag

SEQ ID NO: 898414 - RNA, 19 nt, Homo sapiens
  misc_RNA (1)...(19): siRNA sense strand
gacucaagccugccuucuu

SEQ ID NO: 898415 - RNA, 19 nt, Homo sapiens
  misc_RNA (1)...(19): siRNA sense strand
agagggugcuguguccuau

SEQ ID NO: 898416 - RNA, 19 nt, Homo sapiens
  misc_RNA (1)...(19): siRNA sense strand
ucaaguuugccuauauugu

SEQ ID NO: 898417 - RNA, 19 nt, Homo sapiens
  misc_RNA (1)...(19): siRNA sense strand
ggauuuggacagcgacaca

SEQ ID NO: 898418 - RNA, 19 nt, Homo sapiens
  misc_RNA (1)...(19): siRNA sense strand
caggagcugcuggcacuaa

SEQ ID NO: 898419 - RNA, 19 nt, Homo sapiens
  misc_RNA (1)...(19): siRNA sense strand
ucaagaaguccugcauauc

SEQ ID NO: 898420 - RNA, 19 nt, Homo sapiens
  misc_RNA (1)...(19): siRNA sense strand
cacaguggcccucaucaag

SEQ ID NO: 898421 - RNA, 19 nt, Homo sapiens
  misc_RNA (1)...(19): siRNA sense strand
ggaaccaaaggugucaaga

SEQ ID NO: 898422 - RNA, 19 nt, Homo sapiens
  misc_RNA (1)...(19): siRNA sense strand
aggcugagcaguccaaagu

SEQ ID NO: 898423 - RNA, 19 nt, Homo sapiens
  misc_RNA (1)...(19): siRNA sense strand
gaccgugccuuggccuucu

SEQ ID NO: 898424 - RNA, 19 nt, Homo sapiens
  misc_RNA (1)...(19): siRNA sense strand
caacuuggcugugcuauag

SEQ ID NO: 898425 - RNA, 19 nt, Homo sapiens
  misc_RNA (1)...(19): siRNA sense strand
gggaagacaucguuuggaa

SEQ ID NO: 898426 - RNA, 19 nt, Homo sapiens
  misc_RNA (1)...(19): siRNA sense strand
cgggauaucuuuggaguua

SEQ ID NO: 898427 - RNA, 19 nt, Homo sapiens
  misc_RNA (1)...(19): siRNA sense strand
aaacagcaauggagaguga

SEQ ID NO: 898428 - RNA, 19 nt, Homo sapiens
  misc_RNA (1)...(19): siRNA sense strand
gcucugauccugcuuguuu

SEQ ID NO: 898429 - RNA, 19 nt, Homo sapiens
  misc_RNA (1)...(19): siRNA sense strand
gaagacaucguuuggaaug

SEQ ID NO: 898430 - RNA, 19 nt, Homo sapiens
  misc_RNA (1)...(19): siRNA sense strand
gcccagauguucacaguug

SEQ ID NO: 898431 - RNA, 19 nt, Homo sapiens
  misc_RNA (1)...(19): siRNA sense strand
agucuaagcuuuauguuug

SEQ ID NO: 898432 - RNA, 19 nt, Homo sapiens
  misc_RNA (1)...(19): siRNA sense strand
ggaaaccuccucaucauca

SEQ ID NO: 898433 - RNA, 19 nt, Homo sapiens
  misc_RNA (1)...(19): siRNA sense strand
ggagcaagccgguccaguu

SEQ ID NO: 898434 - RNA, 19 nt, Homo sapiens
  misc_RNA (1)...(19): siRNA sense strand
ccaguuaccuguucaucau

SEQ ID NO: 898435 - RNA, 19 nt, Homo sapiens
  misc_RNA (1)...(19): siRNA sense strand
gcuauaggccacaaugaaa

SEQ ID NO: 898436 - RNA, 19 nt, Homo sapiens
  misc_RNA (1)...(19): siRNA sense strand
cggagaugcugcacaugua

SEQ ID NO: 898437 - RNA, 19 nt, Homo sapiens
  misc_RNA (1)...(19): siRNA sense strand
gaagggaaaccuccucauc

SEQ ID NO: 898438 - RNA, 19 nt, Homo sapiens
  misc_RNA (1)...(19): siRNA sense strand
ucacagcaaccuuuggaua

SEQ ID NO: 898439 - RNA, 19 nt, Homo sapiens
  misc_RNA (1)...(19): siRNA sense strand
caucaucgucaguguguua

SEQ ID NO: 898440 - RNA, 19 nt, Homo sapiens
  misc_RNA (1)...(19): siRNA sense strand
gcaccuuccuguacaugga

SEQ ID NO: 898441 - RNA, 19 nt, Homo sapiens
  misc_RNA (1)...(19): siRNA sense strand
gaacugcaggauccaaaga

SEQ ID NO: 898442 - RNA, 19 nt, Homo sapiens
  misc_RNA (1)...(19): siRNA sense strand
uuggauaccucaccuucua

SEQ ID NO: 898443 - RNA, 19 nt, Homo sapiens
  misc_RNA (1)...(19): siRNA sense strand
ggccgucagucuaagcuuu

SEQ ID NO: 898444 - RNA, 19 nt, Homo sapiens
  misc_RNA (1)...(19): siRNA sense strand
ugagguggagccuuucuua

SEQ ID NO: 898445 - RNA, 19 nt, Homo sapiens
  misc_RNA (1)...(19): siRNA sense strand
acaguugacucacagaugu

SEQ ID NO: 898446 - RNA, 19 nt, Homo sapiens
  misc_RNA (1)...(19): siRNA sense strand
gcaagccgguccaguucau

SEQ ID NO: 898447 - RNA, 19 nt, Homo sapiens
  misc_RNA (1)...(19): siRNA sense strand
gagcaagccgguccaguuc

SEQ ID NO: 898448 - RNA, 19 nt, Homo sapiens
  misc_RNA (1)...(19): siRNA sense strand
gaaaccuccucaucaucau

SEQ ID NO: 898449 - RNA, 19 nt, Homo sapiens
  misc_RNA (1)...(19): siRNA sense strand
gaccugugcugguauugca

SEQ ID NO: 898450 - RNA, 19 nt, Homo sapiens
  misc_RNA (1)...(19): siRNA sense strand
gaggugcugcccaucuaua

SEQ ID NO: 898451 - RNA, 19 nt, Homo sapiens
  misc_RNA (1)...(19): siRNA sense strand
cauuauggcuuuugcuuuu

SEQ ID NO: 898452 - RNA, 19 nt, Homo sapiens
  misc_RNA (1)...(19): siRNA sense strand
cugcugaccugugcuggua

SEQ ID NO: 898453 - RNA, 19 nt, Homo sapiens
  misc_RNA (1)...(19): siRNA sense strand
gcugaccugugcugguauu

SEQ ID NO: 898454 - RNA, 19 nt, Homo sapiens
  misc_RNA (1)...(19): siRNA sense strand
gaaugucaguguucaaccu

SEQ ID NO: 898455 - RNA, 19 nt, Homo sapiens
  misc_RNA (1)...(19): siRNA sense strand
gauguucacaguugacuca

SEQ ID NO: 898456 - RNA, 19 nt, Homo sapiens
  misc_RNA (1)...(19): siRNA sense strand
gcugugaggcccagauguu

SEQ ID NO: 898457 - RNA, 19 nt, Homo sapiens
  misc_RNA (1)...(19): siRNA sense strand
ucaucugucugcacaaugu

SEQ ID NO: 898458 - RNA, 19 nt, Homo sapiens
  misc_RNA (1)...(19): siRNA sense strand
gcacauguacagccagaag

SEQ ID NO: 898459 - RNA, 19 nt, Homo sapiens
  misc_RNA (1)...(19): siRNA sense strand
caauguccuugucaucugu

SEQ ID NO: 898460 - RNA, 19 nt, Homo sapiens
  misc_RNA (1)...(19): siRNA sense strand
ucaauguccuugucaucug

SEQ ID NO: 898461 - RNA, 19 nt, Homo sapiens
  misc_RNA (1)...(19): siRNA sense strand
ggaagacaucguuuggaau

SEQ ID NO: 898462 - RNA, 19 nt, Homo sapiens
  misc_RNA (1)...(19): siRNA sense strand
gcggagaugcugcacaugu

SEQ ID NO: 898463 - RNA, 19 nt, Homo sapiens
  misc_RNA (1)...(19): siRNA sense strand
caucgucaguguguuaauc

SEQ ID NO: 898464 - RNA, 19 nt, Homo sapiens
  misc_RNA (1)...(19): siRNA sense strand
gguggagccuuucuuaucc

SEQ ID NO: 898465 - RNA, 19 nt, Homo sapiens
  misc_RNA (1)...(19): siRNA sense strand
gcucacagcaaccuuugga

SEQ ID NO: 898466 - RNA, 19 nt, Homo sapiens
  misc_RNA (1)...(19): siRNA sense strand
gccgucagucuaagcuuua

SEQ ID NO: 898467 - RNA, 19 nt, Homo sapiens
  misc_RNA (1)...(19): siRNA sense strand
cugaggugcugcccaucua

SEQ ID NO: 898468 - RNA, 19 nt, Homo sapiens
  misc_RNA (1)...(19): siRNA sense strand
cagucuaagcuuuauguuu

SEQ ID NO: 898469 - RNA, 19 nt, Homo sapiens
  misc_RNA (1)...(19): siRNA sense strand
ccuacacagugcccauuau

SEQ ID NO: 898470 - RNA, 19 nt, Homo sapiens
  misc_RNA (1)...(19): siRNA sense strand
gagguggagccuuucuuau

SEQ ID NO: 898471 - RNA, 19 nt, Homo sapiens
  misc_RNA (1)...(19): siRNA sense strand
cauguccaguuaccuguuc

SEQ ID NO: 898472 - RNA, 19 nt, Homo sapiens
  misc_RNA (1)...(19): siRNA sense strand
agggaaaccuccucaucau

SEQ ID NO: 898473 - RNA, 19 nt, Homo sapiens
  misc_RNA (1)...(19): siRNA sense strand
caucuucuaccuccgcauu

SEQ ID NO: 898474 - RNA, 19 nt, Homo sapiens
  misc_RNA (1)...(19): siRNA sense strand
aagggaaaccuccucauca

SEQ ID NO: 898475 - RNA, 19 nt, Homo sapiens
  misc_RNA (1)...(19): siRNA sense strand
ccacaaugaaacagcaaug

SEQ ID NO: 898476 - RNA, 19 nt, Homo sapiens
  misc_RNA (1)...(19): siRNA sense strand
cuacacagugcccauuaug

SEQ ID NO: 898477 - RNA, 19 nt, Homo sapiens
  misc_RNA (1)...(19): siRNA sense strand
acaaugaaacagcaaugga

SEQ ID NO: 898478 - RNA, 19 nt, Homo sapiens
  misc_RNA (1)...(19): siRNA sense strand
gggaaaccuccucaucauc

SEQ ID NO: 898479 - RNA, 19 nt, Homo sapiens
  misc_RNA (1)...(19): siRNA sense strand
ggucaauguccuugucauc

SEQ ID NO: 898480 - RNA, 19 nt, Homo sapiens
  misc_RNA (1)...(19): siRNA sense strand
gcccugcugcugugcauug

SEQ ID NO: 898481 - RNA, 19 nt, Homo sapiens
  misc_RNA (1)...(19): siRNA sense strand
ggagaugcugcacauguac

SEQ ID NO: 898482 - RNA, 19 nt, Homo sapiens
  misc_RNA (1)...(19): siRNA sense strand
gcgcuucugucguccuacu

SEQ ID NO: 898483 - RNA, 19 nt, Homo sapiens
  misc_RNA (1)...(19): siRNA sense strand
ccucagcaacgccaucaug

SEQ ID NO: 898484 - RNA, 19 nt, Homo sapiens
  misc_RNA (1)...(19): siRNA sense strand
aggcggagaugcugcacau

SEQ ID NO: 898485 - RNA, 19 nt, Homo sapiens
  misc_RNA (1)...(19): siRNA sense strand
ggaacugcaggauccaaag

SEQ ID NO: 898486 - RNA, 19 nt, Homo sapiens
  misc_RNA (1)...(19): siRNA sense strand
ggucaucuacaagaaguuc

SEQ ID NO: 898487 - RNA, 19 nt, Homo sapiens
  misc_RNA (1)...(19): siRNA sense strand
uuucggucaucuacaagaa

SEQ ID NO: 898488 - RNA, 19 nt, Homo sapiens
  misc_RNA (1)...(19): siRNA sense strand
gggcucacagcaaccuuug

SEQ ID NO: 898489 - RNA, 19 nt, Homo sapiens
  misc_RNA (1)...(19): siRNA sense strand
gggauaucuuuggaguuau

SEQ ID NO: 898490 - RNA, 19 nt, Homo sapiens
  misc_RNA (1)...(19): siRNA sense strand
cagucgugcuguucccuau

SEQ ID NO: 898491 - RNA, 19 nt, Homo sapiens
  misc_RNA (1)...(19): siRNA sense strand
ggagauaaaugaagaagaa

SEQ ID NO: 898492 - RNA, 19 nt, Homo sapiens
  misc_RNA (1)...(19): siRNA sense strand
gaagaagaauaucugguua

SEQ ID NO: 898493 - RNA, 19 nt, Homo sapiens
  misc_RNA (1)...(19): siRNA sense strand
agaaagcgcuagagguuua

SEQ ID NO: 898494 - RNA, 19 nt, Homo sapiens
  misc_RNA (1)...(19): siRNA sense strand
gcagauaaaugacaaagag

SEQ ID NO: 898495 - RNA, 19 nt, Homo sapiens
  misc_RNA (1)...(19): siRNA sense strand
gggcugugcuuaagaguaa

SEQ ID NO: 898496 - RNA, 19 nt, Homo sapiens
  misc_RNA (1)...(19): siRNA sense strand
gaaguggucucggaaaguu

SEQ ID NO: 898497 - RNA, 19 nt, Homo sapiens
  misc_RNA (1)...(19): siRNA sense strand
gcuagagguuuaugauuug

SEQ ID NO: 898498 - RNA, 19 nt, Homo sapiens
  misc_RNA (1)...(19): siRNA sense strand
cagaagaagacaucaauaa

SEQ ID NO: 898499 - RNA, 19 nt, Homo sapiens
  misc_RNA (1)...(19): siRNA sense strand
gcccaauacuuuagaagaa

SEQ ID NO: 898500 - RNA, 19 nt, Homo sapiens
  misc_RNA (1)...(19): siRNA sense strand
cagcgauguuuaccauuua

SEQ ID NO: 898501 - RNA, 19 nt, Homo sapiens
  misc_RNA (1)...(19): siRNA sense strand
ggaaaguuguguggaaguu

SEQ ID NO: 898502 - RNA, 19 nt, Homo sapiens
  misc_RNA (1)...(19): siRNA sense strand
ggaacaguguguccuugaa

SEQ ID NO: 898503 - RNA, 19 nt, Homo sapiens
  misc_RNA (1)...(19): siRNA sense strand
ucagcgauguuuaccauuu

SEQ ID NO: 898504 - RNA, 19 nt, Homo sapiens
  misc_RNA (1)...(19): siRNA sense strand
cgcuagagguuuaugauuu

SEQ ID NO: 898505 - RNA, 19 nt, Homo sapiens
  misc_RNA (1)...(19): siRNA sense strand
agacaucaauaagcagaua

SEQ ID NO: 898506 - RNA, 19 nt, Homo sapiens
  misc_RNA (1)...(19): siRNA sense strand
aagaagacaucaauaagca

SEQ ID NO: 898507 - RNA, 19 nt, Homo sapiens
  misc_RNA (1)...(19): siRNA sense strand
gaagaagacaucaauaagc

SEQ ID NO: 898508 - RNA, 19 nt, Homo sapiens
  misc_RNA (1)...(19): siRNA sense strand
ugaagaagaauaucugguu

SEQ ID NO: 898509 - RNA, 19 nt, Homo sapiens
  misc_RNA (1)...(19): siRNA sense strand
ggaacccacucaacagaag

SEQ ID NO: 898510 - RNA, 19 nt, Homo sapiens
  misc_RNA (1)...(19): siRNA sense strand
gaaguucaggagauaaaug

SEQ ID NO: 898511 - RNA, 19 nt, Homo sapiens
  misc_RNA (1)...(19): siRNA sense strand
agagaaagcgcuagagguu

SEQ ID NO: 898512 - RNA, 19 nt, Homo sapiens
  misc_RNA (1)...(19): siRNA sense strand
gagaaagcgcuagagguuu

SEQ ID NO: 898513 - RNA, 19 nt, Homo sapiens
  misc_RNA (1)...(19): siRNA sense strand
caacuuacgggaaauugug

SEQ ID NO: 898514 - RNA, 19 nt, Homo sapiens
  misc_RNA (1)...(19): siRNA sense strand
caacagaagaagacaucaa

SEQ ID NO: 898515 - RNA, 19 nt, Homo sapiens
  misc_RNA (1)...(19): siRNA sense strand
gaaggaacccacucaacag

SEQ ID NO: 898516 - RNA, 19 nt, Homo sapiens
  misc_RNA (1)...(19): siRNA sense strand
ugaaggaacccacucaaca

SEQ ID NO: 898517 - RNA, 19 nt, Homo sapiens
  misc_RNA (1)...(19): siRNA sense strand
aaaguuguguggaaguuca

SEQ ID NO: 898518 - RNA, 19 nt, Homo sapiens
  misc_RNA (1)...(19): siRNA sense strand
ggaaauuguggaacagugu

SEQ ID NO: 898519 - RNA, 19 nt, Homo sapiens
  misc_RNA (1)...(19): siRNA sense strand
uguggaaguucaggagaua

SEQ ID NO: 898520 - RNA, 19 nt, Homo sapiens
  misc_RNA (1)...(19): siRNA sense strand
gcgaguggcagcugcaaug

SEQ ID NO: 898521 - RNA, 19 nt, Homo sapiens
  misc_RNA (1)...(19): siRNA sense strand
gcgcuagagguuuaugauu

SEQ ID NO: 898522 - RNA, 19 nt, Homo sapiens
  misc_RNA (1)...(19): siRNA sense strand
aguggcagcugcaauggaa

SEQ ID NO: 898523 - RNA, 19 nt, Homo sapiens
  misc_RNA (1)...(19): siRNA sense strand
aaucuacauuucugaagga

SEQ ID NO: 898524 - RNA, 19 nt, Homo sapiens
  misc_RNA (1)...(19): siRNA sense strand
gaacccacucaacagaaga

SEQ ID NO: 898525 - RNA, 19 nt, Homo sapiens
  misc_RNA (1)...(19): siRNA sense strand
acagaagaagacaucaaua

SEQ ID NO: 898526 - RNA, 19 nt, Homo sapiens
  misc_RNA (1)...(19): siRNA sense strand
ggaaguggucucggaaagu

SEQ ID NO: 898527 - RNA, 19 nt, Homo sapiens
  misc_RNA (1)...(19): siRNA sense strand
gaacaguguguccuugaac

SEQ ID NO: 898528 - RNA, 19 nt, Homo sapiens
  misc_RNA (1)...(19): siRNA sense strand
agaagaagacaucaauaag

SEQ ID NO: 898529 - RNA, 19 nt, Homo sapiens
  misc_RNA (1)...(19): siRNA sense strand
guaccucauugcucuuugg

SEQ ID NO: 898530 - RNA, 19 nt, Homo sapiens
  misc_RNA (1)...(19): siRNA sense strand
cagguucacgccaacagua

SEQ ID NO: 898531 - RNA, 19 nt, Homo sapiens
  misc_RNA (1)...(19): siRNA sense strand
cuucagcgauguuuaccau

SEQ ID NO: 898532 - RNA, 19 nt, Homo sapiens
  misc_RNA (1)...(19): siRNA sense strand
cgccaacaguaccucauug

SEQ ID NO: 898533 - RNA, 19 nt, Homo sapiens
  misc_RNA (1)...(19): siRNA sense strand
gaaaguuguguggaaguuc

SEQ ID NO: 898534 - RNA, 19 nt, Homo sapiens
  misc_RNA (1)...(19): siRNA sense strand
cuagagguuuaugauuuga

SEQ ID NO: 898535 - RNA, 19 nt, Homo sapiens
  misc_RNA (1)...(19): siRNA sense strand
gcucuuuggcgacucuuau

SEQ ID NO: 898536 - RNA, 19 nt, Homo sapiens
  misc_RNA (1)...(19): siRNA sense strand
gacaucaauaagcagauaa

SEQ ID NO: 898537 - RNA, 19 nt, Homo sapiens
  misc_RNA (1)...(19): siRNA sense strand
ccaauacuuuagaagaacu

SEQ ID NO: 898538 - RNA, 19 nt, Homo sapiens
  misc_RNA (1)...(19): siRNA sense strand
cuuauugggcugugcuuaa

SEQ ID NO: 898539 - RNA, 19 nt, Homo sapiens
  misc_RNA (1)...(19): siRNA sense strand
ggaaguucaggagauaaau

SEQ ID NO: 898540 - RNA, 19 nt, Homo sapiens
  misc_RNA (1)...(19): siRNA sense strand
uacgggaaauuguggaaca

SEQ ID NO: 898541 - RNA, 19 nt, Homo sapiens
  misc_RNA (1)...(19): siRNA sense strand
guguggaaguucaggagau

SEQ ID NO: 898542 - RNA, 19 nt, Homo sapiens
  misc_RNA (1)...(19): siRNA sense strand
uggaaguggucucggaaag

SEQ ID NO: 898543 - RNA, 19 nt, Homo sapiens
  misc_RNA (1)...(19): siRNA sense strand
gaaagcgcuagagguuuau

SEQ ID NO: 898544 - RNA, 19 nt, Homo sapiens
  misc_RNA (1)...(19): siRNA sense strand
uggaaguucaggagauaaa

SEQ ID NO: 898545 - RNA, 19 nt, Homo sapiens
  misc_RNA (1)...(19): siRNA sense strand
ccacucaacagaagaagac

SEQ ID NO: 898546 - RNA, 19 nt, Homo sapiens
  misc_RNA (1)...(19): siRNA sense strand
cucggaaaguuguguggaa

SEQ ID NO: 898547 - RNA, 19 nt, Homo sapiens
  misc_RNA (1)...(19): siRNA sense strand
gcaaagcuuucucuuaaua

SEQ ID NO: 898548 - RNA, 19 nt, Homo sapiens
  misc_RNA (1)...(19): siRNA sense strand
cacaggagcucauuaauua

SEQ ID NO: 898549 - RNA, 19 nt, Homo sapiens
  misc_RNA (1)...(19): siRNA sense strand
uaaccgaaguggauaaaua

SEQ ID NO: 898550 - RNA, 19 nt, Homo sapiens
  misc_RNA (1)...(19): siRNA sense strand
cugcaaagcuuucucuuaa

SEQ ID NO: 898551 - RNA, 19 nt, Homo sapiens
  misc_RNA (1)...(19): siRNA sense strand
caaagucggucuaaggaaa

SEQ ID NO: 898552 - RNA, 19 nt, Homo sapiens
  misc_RNA (1)...(19): siRNA sense strand
gcagaaauaugauccagau

SEQ ID NO: 898553 - RNA, 19 nt, Homo sapiens
  misc_RNA (1)...(19): siRNA sense strand
gaauaaucguuguauggua

SEQ ID NO: 898554 - RNA, 19 nt, Homo sapiens
  misc_RNA (1)...(19): siRNA sense strand
ggacagaguaauuaugaua

SEQ ID NO: 898555 - RNA, 19 nt, Homo sapiens
  misc_RNA (1)...(19): siRNA sense strand
gaaaggcucuaugucauug

SEQ ID NO: 898556 - RNA, 19 nt, Homo sapiens
  misc_RNA (1)...(19): siRNA sense strand
gaacaagugauuaugauga

SEQ ID NO: 898557 - RNA, 19 nt, Homo sapiens
  misc_RNA (1)...(19): siRNA sense strand
gauacagucuucagauuug

SEQ ID NO: 898558 - RNA, 19 nt, Homo sapiens
  misc_RNA (1)...(19): siRNA sense strand
uaagugcccucaaaggaua

SEQ ID NO: 898559 - RNA, 19 nt, Homo sapiens
  misc_RNA (1)...(19): siRNA sense strand
caaguugcaucuuuaaaug

SEQ ID NO: 898560 - RNA, 19 nt, Homo sapiens
  misc_RNA (1)...(19): siRNA sense strand
guacugaacuugagcucuu

SEQ ID NO: 898561 - RNA, 19 nt, Homo sapiens
  misc_RNA (1)...(19): siRNA sense strand
ggagaaaggcucuauguca

SEQ ID NO: 898562 - RNA, 19 nt, Homo sapiens
  misc_RNA (1)...(19): siRNA sense strand
gccaacaccuacaaucuaa

SEQ ID NO: 898563 - RNA, 19 nt, Homo sapiens
  misc_RNA (1)...(19): siRNA sense strand
ggaccuacacgcaucuuua

SEQ ID NO: 898564 - RNA, 19 nt, Homo sapiens
  misc_RNA (1)...(19): siRNA sense strand
gagaaaggcucuaugucau

SEQ ID NO: 898565 - RNA, 19 nt, Homo sapiens
  misc_RNA (1)...(19): siRNA sense strand
cccaauugcugccauguua

SEQ ID NO: 898566 - RNA, 19 nt, Homo sapiens
  misc_RNA (1)...(19): siRNA sense strand
gaggagugauguauauuuc

SEQ ID NO: 898567 - RNA, 19 nt, Homo sapiens
  misc_RNA (1)...(19): siRNA sense strand
ggcaaucacuucagaggaa

SEQ ID NO: 898568 - RNA, 19 nt, Homo sapiens
  misc_RNA (1)...(19): siRNA sense strand
ugacacagaugaugcuuuc

SEQ ID NO: 898569 - RNA, 19 nt, Homo sapiens
  misc_RNA (1)...(19): siRNA sense strand
ggacugccauuaggucuga

SEQ ID NO: 898570 - RNA, 19 nt, Homo sapiens
  misc_RNA (1)...(19): siRNA sense strand
cgaaguggauaaauacguu

SEQ ID NO: 898571 - RNA, 19 nt, Homo sapiens
  misc_RNA (1)...(19): siRNA sense strand
gauccucgauacaauaaau

SEQ ID NO: 898572 - RNA, 19 nt, Homo sapiens
  misc_RNA (1)...(19): siRNA sense strand
ccacaggagcucauuaauu

SEQ ID NO: 898573 - RNA, 19 nt, Homo sapiens
  misc_RNA (1)...(19): siRNA sense strand
ggaggagugauguauauuu

SEQ ID NO: 898574 - RNA, 19 nt, Homo sapiens
  misc_RNA (1)...(19): siRNA sense strand
ccaccuaagugcccucaaa

SEQ ID NO: 898575 - RNA, 19 nt, Homo sapiens
  misc_RNA (1)...(19): siRNA sense strand
guaaggaauugcgcaugua

SEQ ID NO: 898576 - RNA, 19 nt, Homo sapiens
  misc_RNA (1)...(19): siRNA sense strand
ggaaugaaagaacaagauu

SEQ ID NO: 898577 - RNA, 19 nt, Homo sapiens
  misc_RNA (1)...(19): siRNA sense strand
uagagauagugcagaaaua

SEQ ID NO: 898578 - RNA, 19 nt, Homo sapiens
  misc_RNA (1)...(19): siRNA sense strand
ggaggaauuacucaugaua

SEQ ID NO: 898579 - RNA, 19 nt, Homo sapiens
  misc_RNA (1)...(19): siRNA sense strand
guaaaguguuucucauauc

SEQ ID NO: 898580 - RNA, 19 nt, Homo sapiens
  misc_RNA (1)...(19): siRNA sense strand
caggaggaauuacucauga

SEQ ID NO: 898581 - RNA, 19 nt, Homo sapiens
  misc_RNA (1)...(19): siRNA sense strand
gaauugcgcauguaugaug

SEQ ID NO: 898582 - RNA, 19 nt, Homo sapiens
  misc_RNA (1)...(19): siRNA sense strand
gaacaaaugaauggaccua

SEQ ID NO: 898583 - RNA, 19 nt, Homo sapiens
  misc_RNA (1)...(19): siRNA sense strand
ccuaagcugugaauacuau

SEQ ID NO: 898584 - RNA, 19 nt, Homo sapiens
  misc_RNA (1)...(19): siRNA sense strand
ccauauaugcagccaguua

SEQ ID NO: 898585 - RNA, 19 nt, Homo sapiens
  misc_RNA (1)...(19): siRNA sense strand
gaggaacaagugauuauga

SEQ ID NO: 898586 - RNA, 19 nt, Homo sapiens
  misc_RNA (1)...(19): siRNA sense strand
gcacuguacugaacuugag

SEQ ID NO: 898587 - RNA, 19 nt, Homo sapiens
  misc_RNA (1)...(19): siRNA sense strand
caugagaacugacaauacu

SEQ ID NO: 898588 - RNA, 19 nt, Homo sapiens
  misc_RNA (1)...(19): siRNA sense strand
gaacuugagcucuuuaagg

SEQ ID NO: 898589 - RNA, 19 nt, Homo sapiens
  misc_RNA (1)...(19): siRNA sense strand
gcggacagaguaauuauga

SEQ ID NO: 898590 - RNA, 19 nt, Homo sapiens
  misc_RNA (1)...(19): siRNA sense strand
gaaguggauaaauacguua

SEQ ID NO: 898591 - RNA, 19 nt, Homo sapiens
  misc_RNA (1)...(19): siRNA sense strand
caaaggauaucuguaugca

SEQ ID NO: 898592 - RNA, 19 nt, Homo sapiens
  misc_RNA (1)...(19): siRNA sense strand
caaaugaugccauauaugc

SEQ ID NO: 898593 - RNA, 19 nt, Homo sapiens
  misc_RNA (1)...(19): siRNA sense strand
ggauaaauacguuaacagu

SEQ ID NO: 898594 - RNA, 19 nt, Homo sapiens
  misc_RNA (1)...(19): siRNA sense strand
acaaaugaauggaccuaug

SEQ ID NO: 898595 - RNA, 19 nt, Homo sapiens
  misc_RNA (1)...(19): siRNA sense strand
gcucauuaauuacgugcaa

SEQ ID NO: 898596 - RNA, 19 nt, Homo sapiens
  misc_RNA (1)...(19): siRNA sense strand
gagcaaagucggucuaagg

SEQ ID NO: 898597 - RNA, 19 nt, Homo sapiens
  misc_RNA (1)...(19): siRNA sense strand
aaagaugaauggcauaagg

SEQ ID NO: 898598 - RNA, 19 nt, Homo sapiens
  misc_RNA (1)...(19): siRNA sense strand
aaaaggagcucaugugcuu

SEQ ID NO: 898599 - RNA, 19 nt, Homo sapiens
  misc_RNA (1)...(19): siRNA sense strand
caaaugaauggaccuaugu

SEQ ID NO: 898600 - RNA, 19 nt, Homo sapiens
  misc_RNA (1)...(19): siRNA sense strand
ggauaucuguaugcaguug

SEQ ID NO: 898601 - RNA, 19 nt, Homo sapiens
  misc_RNA (1)...(19): siRNA sense strand
gaagccagcaauuaccaaa

SEQ ID NO: 898602 - RNA, 19 nt, Homo sapiens
  misc_RNA (1)...(19): siRNA sense strand
gugauuacuucaaggcuau

SEQ ID NO: 898603 - RNA, 19 nt, Homo sapiens
  misc_RNA (1)...(19): siRNA sense strand
ggaccuauguugccaaaau

SEQ ID NO: 898604 - RNA, 19 nt, Homo sapiens
  misc_RNA (1)...(19): siRNA sense strand
ccucaaaggauaucuguau

SEQ ID NO: 898605 - RNA, 19 nt, Homo sapiens
  misc_RNA (1)...(19): siRNA sense strand
aacauacgauuuccacuga

SEQ ID NO: 898606 - RNA, 19 nt, Homo sapiens
  misc_RNA (1)...(19): siRNA sense strand
ggagugauguauauuucag

SEQ ID NO: 898607 - RNA, 19 nt, Homo sapiens
  misc_RNA (1)...(19): siRNA sense strand
guagagauagugcagaaau

SEQ ID NO: 898608 - RNA, 19 nt, Homo sapiens
  misc_RNA (1)...(19): siRNA sense strand
gcuuugacccugauacuga

SEQ ID NO: 898609 - RNA, 19 nt, Homo sapiens
  misc_RNA (1)...(19): siRNA sense strand
uaccaaaugaugccauaua

SEQ ID NO: 898610 - RNA, 19 nt, Homo sapiens
  misc_RNA (1)...(19): siRNA sense strand
aaacggcaguugauacagu

SEQ ID NO: 898611 - RNA, 19 nt, Homo sapiens
  misc_RNA (1)...(19): siRNA sense strand
gaaggauugcuuugugaug

SEQ ID NO: 898612 - RNA, 19 nt, Homo sapiens
  misc_RNA (1)...(19): siRNA sense strand
gaaaccacaccaucaccuu

SEQ ID NO: 898613 - RNA, 19 nt, Homo sapiens
  misc_RNA (1)...(19): siRNA sense strand
gauaaagaugaauggcaua

SEQ ID NO: 898614 - RNA, 19 nt, Homo sapiens
  misc_RNA (1)...(19): siRNA sense strand
ucacuugguuacacuagga

SEQ ID NO: 898615 - RNA, 19 nt, Homo sapiens
  misc_RNA (1)...(19): siRNA sense strand
guuaacaguuucgucuuga

SEQ ID NO: 898616 - RNA, 19 nt, Homo sapiens
  misc_RNA (1)...(19): siRNA sense strand
gcaaacgguggauuucaug

SEQ ID NO: 898617 - RNA, 19 nt, Homo sapiens
  misc_RNA (1)...(19): siRNA sense strand
gaugaauggcauaagguuu

SEQ ID NO: 898618 - RNA, 19 nt, Homo sapiens
  misc_RNA (1)...(19): siRNA sense strand
ugauacagucuucagauuu

SEQ ID NO: 898619 - RNA, 19 nt, Homo sapiens
  misc_RNA (1)...(19): siRNA sense strand
agacaggacugccauuagg

SEQ ID NO: 898620 - RNA, 19 nt, Homo sapiens
  misc_RNA (1)...(19): siRNA sense strand
gcaaagucggucuaaggaa

SEQ ID NO: 898621 - RNA, 19 nt, Homo sapiens
  misc_RNA (1)...(19): siRNA sense strand
gaagaaaccacaccaucac

SEQ ID NO: 898622 - RNA, 19 nt, Homo sapiens
  misc_RNA (1)...(19): siRNA sense strand
ggauugcuuugugauguga

SEQ ID NO: 898623 - RNA, 19 nt, Homo sapiens
  misc_RNA (1)...(19): siRNA sense strand
ugauuaugaugauguccua

SEQ ID NO: 898624 - RNA, 19 nt, Homo sapiens
  misc_RNA (1)...(19): siRNA sense strand
guagaauguuacaauccaa

SEQ ID NO: 898625 - RNA, 19 nt, Homo sapiens
  misc_RNA (1)...(19): siRNA sense strand
gcaucgccgucauuggaaa

SEQ ID NO: 898626 - RNA, 19 nt, Homo sapiens
  misc_RNA (1)...(19): siRNA sense strand
gccagcaauuaccaaauga

SEQ ID NO: 898627 - RNA, 19 nt, Homo sapiens
  misc_RNA (1)...(19): siRNA sense strand
gaagaauuuuccugcauug

SEQ ID NO: 898628 - RNA, 19 nt, Homo sapiens
  misc_RNA (1)...(19): siRNA sense strand
cauacgauuuccacugaug

SEQ ID NO: 898629 - RNA, 19 nt, Homo sapiens
  misc_RNA (1)...(19): siRNA sense strand
ggaauaaucguuguauggu

SEQ ID NO: 898630 - RNA, 19 nt, Homo sapiens
  misc_RNA (1)...(19): siRNA sense strand
ggaacaagugauuaugaug

SEQ ID NO: 898631 - RNA, 19 nt, Homo sapiens
  misc_RNA (1)...(19): siRNA sense strand
ucagacaggacugccauua

SEQ ID NO: 898632 - RNA, 19 nt, Homo sapiens
  misc_RNA (1)...(19): siRNA sense strand
cgucuugccuucgugcuuu

SEQ ID NO: 898633 - RNA, 19 nt, Homo sapiens
  misc_RNA (1)...(19): siRNA sense strand
gaugccaggugacacagau

SEQ ID NO: 898634 - RNA, 19 nt, Homo sapiens
  misc_RNA (1)...(19): siRNA sense strand
cgacuugaaggauugcuuu

SEQ ID NO: 898635 - RNA, 19 nt, Homo sapiens
  misc_RNA (1)...(19): siRNA sense strand
cguuaacaguuucgucuug

SEQ ID NO: 898636 - RNA, 19 nt, Homo sapiens
  misc_RNA (1)...(19): siRNA sense strand
gaauguuacaauccaagaa

SEQ ID NO: 898637 - RNA, 19 nt, Homo sapiens
  misc_RNA (1)...(19): siRNA sense strand
accaaaugaugccauauau

SEQ ID NO: 898638 - RNA, 19 nt, Homo sapiens
  misc_RNA (1)...(19): siRNA sense strand
caccacaggagcucauuaa

SEQ ID NO: 898639 - RNA, 19 nt, Homo sapiens
  misc_RNA (1)...(19): siRNA sense strand
gauuugauccucgauacaa

SEQ ID NO: 898640 - RNA, 19 nt, Homo sapiens
  misc_RNA (1)...(19): siRNA sense strand
caccaucaccuucuagaga

SEQ ID NO: 898641 - RNA, 19 nt, Homo sapiens
  misc_RNA (1)...(19): siRNA sense strand
agaagaaaccacaccauca

SEQ ID NO: 898642 - RNA, 19 nt, Homo sapiens
  misc_RNA (1)...(19): siRNA sense strand
gagauagugcagaaauaug

SEQ ID NO: 898643 - RNA, 19 nt, Homo sapiens
  misc_RNA (1)...(19): siRNA sense strand
cagaggaacaagugauuau

SEQ ID NO: 898644 - RNA, 19 nt, Homo sapiens
  misc_RNA (1)...(19): siRNA sense strand
ggaauuacucaugauacuu

SEQ ID NO: 898645 - RNA, 19 nt, Homo sapiens
  misc_RNA (1)...(19): siRNA sense strand
acaguagaauguuacaauc

SEQ ID NO: 898646 - RNA, 19 nt, Homo sapiens
  misc_RNA (1)...(19): siRNA sense strand
agauagugcagaaauauga

SEQ ID NO: 898647 - RNA, 19 nt, Homo sapiens
  misc_RNA (1)...(19): siRNA sense strand
gagcagcccuuaacacugu

SEQ ID NO: 898648 - RNA, 19 nt, Homo sapiens
  misc_RNA (1)...(19): siRNA sense strand
cgagagggcuguuuccaaa

SEQ ID NO: 898649 - RNA, 19 nt, Homo sapiens
  misc_RNA (1)...(19): siRNA sense strand
gagacgaucgugaacagua

SEQ ID NO: 898650 - RNA, 19 nt, Homo sapiens
  misc_RNA (1)...(19): siRNA sense strand
agacgaucgugaacaguaa

SEQ ID NO: 898651 - RNA, 19 nt, Homo sapiens
  misc_RNA (1)...(19): siRNA sense strand
acagugacgugaaagucua

SEQ ID NO: 898652 - RNA, 19 nt, Homo sapiens
  misc_RNA (1)...(19): siRNA sense strand
caaggaguucugugacuuu

SEQ ID NO: 898653 - RNA, 19 nt, Homo sapiens
  misc_RNA (1)...(19): siRNA sense strand
ggaguucugugacuuuuau

SEQ ID NO: 898654 - RNA, 19 nt, Homo sapiens
  misc_RNA (1)...(19): siRNA sense strand
gaaagucuacaaggaguuc

SEQ ID NO: 898655 - RNA, 19 nt, Homo sapiens
  misc_RNA (1)...(19): siRNA sense strand
acaaggaguucugugacuu

SEQ ID NO: 898656 - RNA, 19 nt, Homo sapiens
  misc_RNA (1)...(19): siRNA sense strand
gcacagugacgugaaaguc

SEQ ID NO: 898657 - RNA, 19 nt, Homo sapiens
  misc_RNA (1)...(19): siRNA sense strand
caggcacagugacgugaaa

SEQ ID NO: 898658 - RNA, 19 nt, Homo sapiens
  misc_RNA (1)...(19): siRNA sense strand
ccgcugagacgaucgugaa

SEQ ID NO: 898659 - RNA, 19 nt, Homo sapiens
  misc_RNA (1)...(19): siRNA sense strand
gcuguaccaugagcagugu

SEQ ID NO: 898660 - RNA, 19 nt, Homo sapiens
  misc_RNA (1)...(19): siRNA sense strand
gcaggcacagugacgugaa

SEQ ID NO: 898661 - RNA, 19 nt, Homo sapiens
  misc_RNA (1)...(19): siRNA sense strand
ucuacaaggaguucuguga

SEQ ID NO: 898662 - RNA, 19 nt, Homo sapiens
  misc_RNA (1)...(19): siRNA sense strand
acgugaaagucuacaagga

SEQ ID NO: 898663 - RNA, 19 nt, Homo sapiens
  misc_RNA (1)...(19): siRNA sense strand
uacaaggaguucugugacu

SEQ ID NO: 898664 - RNA, 19 nt, Homo sapiens
  misc_RNA (1)...(19): siRNA sense strand
ggaaggugcugaugaagac

SEQ ID NO: 898665 - RNA, 19 nt, Homo sapiens
  misc_RNA (1)...(19): siRNA sense strand
ggagaacguguuugcugua

SEQ ID NO: 898666 - RNA, 19 nt, Homo sapiens
  misc_RNA (1)...(19): siRNA sense strand
caucgcagccaucguguug

SEQ ID NO: 898667 - RNA, 19 nt, Homo sapiens
  misc_RNA (1)...(19): siRNA sense strand
gagaacguguuugcuguac

SEQ ID NO: 898668 - RNA, 19 nt, Homo sapiens
  misc_RNA (1)...(19): siRNA sense strand
gaaaagcagccaccacaug

SEQ ID NO: 898669 - RNA, 19 nt, Homo sapiens
  misc_RNA (1)...(19): siRNA sense strand
ggccugugcucuccuuucu

SEQ ID NO: 898670 - RNA, 19 nt, Homo sapiens
  misc_RNA (1)...(19): siRNA sense strand
ugggagcucugaacuacug

SEQ ID NO: 898671 - RNA, 19 nt, Homo sapiens
  misc_RNA (1)...(19): siRNA sense strand
gucaacauccucucuguca

SEQ ID NO: 898672 - RNA, 19 nt, Homo sapiens
  misc_RNA (1)...(19): siRNA sense strand
uccggaaggugcugaugaa

SEQ ID NO: 898673 - RNA, 19 nt, Homo sapiens
  misc_RNA (1)...(19): siRNA sense strand
ccugugcucuccuuucucu

SEQ ID NO: 898674 - RNA, 19 nt, Homo sapiens
  misc_RNA (1)...(19): siRNA sense strand
caacauccucucugucacu

SEQ ID NO: 898675 - RNA, 19 nt, Homo sapiens
  misc_RNA (1)...(19): siRNA sense strand
cggaaggugcugaugaaga

SEQ ID NO: 898676 - RNA, 19 nt, Homo sapiens
  misc_RNA (1)...(19): siRNA sense strand
guacugcguggucaacauc

SEQ ID NO: 898677 - RNA, 19 nt, Homo sapiens
  misc_RNA (1)...(19): siRNA sense strand
ccaucguggucaucacuuc

SEQ ID NO: 898678 - RNA, 19 nt, Homo sapiens
  misc_RNA (1)...(19): siRNA sense strand
aaaagcagccaccacauga

SEQ ID NO: 898679 - RNA, 19 nt, Homo sapiens
  misc_RNA (1)...(19): siRNA sense strand
gcaaggagcugguggauaa

SEQ ID NO: 898680 - RNA, 19 nt, Homo sapiens
  misc_RNA (1)...(19): siRNA sense strand
ucaccaagcucaaguauua

SEQ ID NO: 898681 - RNA, 19 nt, Homo sapiens
  misc_RNA (1)...(19): siRNA sense strand
ggaaccagcugcgcaugua

SEQ ID NO: 898682 - RNA, 19 nt, Homo sapiens
  misc_RNA (1)...(19): siRNA sense strand
gaacaucgaccgcuucauc

SEQ ID NO: 898683 - RNA, 19 nt, Homo sapiens
  misc_RNA (1)...(19): siRNA sense strand
caauggcuuucaucaccua

SEQ ID NO: 898684 - RNA, 19 nt, Homo sapiens
  misc_RNA (1)...(19): siRNA sense strand
acaaauaugucgggaugau

SEQ ID NO: 898685 - RNA, 19 nt, Homo sapiens
  misc_RNA (1)...(19): siRNA sense strand
ccauguaugugggcagaaa

SEQ ID NO: 898686 - RNA, 19 nt, Homo sapiens
  misc_RNA (1)...(19): siRNA sense strand
aaauaugucgggaugauug

SEQ ID NO: 898687 - RNA, 19 nt, Homo sapiens
  misc_RNA (1)...(19): siRNA sense strand
ucgggaagauuggcuacua

SEQ ID NO: 898688 - RNA, 19 nt, Homo sapiens
  misc_RNA (1)...(19): siRNA sense strand
gcguagccaucuuuguguu

SEQ ID NO: 898689 - RNA, 19 nt, Homo sapiens
  misc_RNA (1)...(19): siRNA sense strand
guagccaucuuuguguuca

SEQ ID NO: 898690 - RNA, 19 nt, Homo sapiens
  misc_RNA (1)...(19): siRNA sense strand
cuucuugggcuacaaauau

SEQ ID NO: 898691 - RNA, 19 nt, Homo sapiens
  misc_RNA (1)...(19): siRNA sense strand
acaccgaccucaccaccau

SEQ ID NO: 898692 - RNA, 19 nt, Homo sapiens
  misc_RNA (1)...(19): siRNA sense strand
caaauaugucgggaugauu

SEQ ID NO: 898693 - RNA, 19 nt, Homo sapiens
  misc_RNA (1)...(19): siRNA sense strand
gggaagugcaguaccaaca

SEQ ID NO: 898694 - RNA, 19 nt, Homo sapiens
  misc_RNA (1)...(19): siRNA sense strand
gccucuaucuggucacugu

SEQ ID NO: 898695 - RNA, 19 nt, Homo sapiens
  misc_RNA (1)...(19): siRNA sense strand
ggacgcugcggcugaagau

SEQ ID NO: 898696 - RNA, 19 nt, Homo sapiens
  misc_RNA (1)...(19): siRNA sense strand
gcuuucaucaccuacguuu

SEQ ID NO: 898697 - RNA, 19 nt, Homo sapiens
  misc_RNA (1)...(19): siRNA sense strand
gaaagcugggccugcuguu

SEQ ID NO: 898698 - RNA, 19 nt, Homo sapiens
  misc_RNA (1)...(19): siRNA sense strand
cgcagccuaugcucaugua

SEQ ID NO: 898699 - RNA, 19 nt, Homo sapiens
  misc_RNA (1)...(19): siRNA sense strand
ggaagugcaguaccaacag

SEQ ID NO: 898700 - RNA, 19 nt, Homo sapiens
  misc_RNA (1)...(19): siRNA sense strand
gugcugcguagccaucuuu

SEQ ID NO: 898701 - RNA, 19 nt, Homo sapiens
  misc_RNA (1)...(19): siRNA sense strand
gcugguggauaagaacauc

SEQ ID NO: 898702 - RNA, 19 nt, Homo sapiens
  misc_RNA (1)...(19): siRNA sense strand
ggcaaggagcugguggaua

SEQ ID NO: 898703 - RNA, 19 nt, Homo sapiens
  misc_RNA (1)...(19): siRNA sense strand
caucaccaagcucaaguau

SEQ ID NO: 898704 - RNA, 19 nt, Homo sapiens
  misc_RNA (1)...(19): siRNA sense strand
ccagcaauggcuuucauca

SEQ ID NO: 898705 - RNA, 19 nt, Homo sapiens
  misc_RNA (1)...(19): siRNA sense strand
gaacggaacugccucauca

SEQ ID NO: 898706 - RNA, 19 nt, Homo sapiens
  misc_RNA (1)...(19): siRNA sense strand
ggagggagcugcagagugu

SEQ ID NO: 898707 - RNA, 19 nt, Homo sapiens
  misc_RNA (1)...(19): siRNA sense strand
ugacacagaugaugacuga

SEQ ID NO: 898708 - RNA, 19 nt, Homo sapiens
  misc_RNA (1)...(19): siRNA sense strand
guacaaaggaggccaauau

SEQ ID NO: 898709 - RNA, 19 nt, Homo sapiens
  misc_RNA (1)...(19): siRNA sense strand
ggaagacccucuggaauca

SEQ ID NO: 898710 - RNA, 19 nt, Homo sapiens
  misc_RNA (1)...(19): siRNA sense strand
acaccaagaugauaauuga

SEQ ID NO: 898711 - RNA, 19 nt, Homo sapiens
  misc_RNA (1)...(19): siRNA sense strand
cagaggaggcuaauuauga

SEQ ID NO: 898712 - RNA, 19 nt, Homo sapiens
  misc_RNA (1)...(19): siRNA sense strand
acaaaggaggccaauauua

SEQ ID NO: 898713 - RNA, 19 nt, Homo sapiens
  misc_RNA (1)...(19): siRNA sense strand
gaacucgucaucccuuuga

SEQ ID NO: 898714 - RNA, 19 nt, Homo sapiens
  misc_RNA (1)...(19): siRNA sense strand
gaugauaauugaagauguc

SEQ ID NO: 898715 - RNA, 19 nt, Homo sapiens
  misc_RNA (1)...(19): siRNA sense strand
caaaggaggccaauauuac

SEQ ID NO: 898716 - RNA, 19 nt, Homo sapiens
  misc_RNA (1)...(19): siRNA sense strand
ccaagaugauaauugaaga

SEQ ID NO: 898717 - RNA, 19 nt, Homo sapiens
  misc_RNA (1)...(19): siRNA sense strand
gauaauugaagauguccua

SEQ ID NO: 898718 - RNA, 19 nt, Homo sapiens
  misc_RNA (1)...(19): siRNA sense strand
ugccagaggaggcuaauua

SEQ ID NO: 898719 - RNA, 19 nt, Homo sapiens
  misc_RNA (1)...(19): siRNA sense strand
gcaagagaaagauaaggaa

SEQ ID NO: 898720 - RNA, 19 nt, Homo sapiens
  misc_RNA (1)...(19): siRNA sense strand
ccaagaagucucuggaaga

SEQ ID NO: 898721 - RNA, 19 nt, Homo sapiens
  misc_RNA (1)...(19): siRNA sense strand
gagcuguggugguucuuuc

SEQ ID NO: 898722 - RNA, 19 nt, Homo sapiens
  misc_RNA (1)...(19): siRNA sense strand
ggacaacauguacaaagga

SEQ ID NO: 898723 - RNA, 19 nt, Homo sapiens
  misc_RNA (1)...(19): siRNA sense strand
ggaccugcgugugcgguuu

SEQ ID NO: 898724 - RNA, 19 nt, Homo sapiens
  misc_RNA (1)...(19): siRNA sense strand
gaggagcaagagaaagaua

SEQ ID NO: 898725 - RNA, 19 nt, Homo sapiens
  misc_RNA (1)...(19): siRNA sense strand
uaaggaagaucagccucaa

SEQ ID NO: 898726 - RNA, 19 nt, Homo sapiens
  misc_RNA (1)...(19): siRNA sense strand
agagaaagauaaggaagau

SEQ ID NO: 898727 - RNA, 19 nt, Homo sapiens
  misc_RNA (1)...(19): siRNA sense strand
ccugggccauccacagaua

SEQ ID NO: 898728 - RNA, 19 nt, Homo sapiens
  misc_RNA (1)...(19): siRNA sense strand
gaaucaagaacucuacauc

SEQ ID NO: 898729 - RNA, 19 nt, Homo sapiens
  misc_RNA (1)...(19): siRNA sense strand
cagcaggaguuugacaaga

SEQ ID NO: 898730 - RNA, 19 nt, Homo sapiens
  misc_RNA (1)...(19): siRNA sense strand
uggaggagcuguggugguu

SEQ ID NO: 898731 - RNA, 19 nt, Homo sapiens
  misc_RNA (1)...(19): siRNA sense strand
agaaagauaaggaagauca

SEQ ID NO: 898732 - RNA, 19 nt, Homo sapiens
  misc_RNA (1)...(19): siRNA sense strand
aagaacaccuuggaucuca

SEQ ID NO: 898733 - RNA, 19 nt, Homo sapiens
  misc_RNA (1)...(19): siRNA sense strand
uuacaacaccaagaugaua

SEQ ID NO: 898734 - RNA, 19 nt, Homo sapiens
  misc_RNA (1)...(19): siRNA sense strand
caccuucaaucaaguagug

SEQ ID NO: 898735 - RNA, 19 nt, Homo sapiens
  misc_RNA (1)...(19): siRNA sense strand
gaccagaugaggagcaaga

SEQ ID NO: 898736 - RNA, 19 nt, Homo sapiens
  misc_RNA (1)...(19): siRNA sense strand
ggccgcaccuucaaucaag

SEQ ID NO: 898737 - RNA, 19 nt, Homo sapiens
  misc_RNA (1)...(19): siRNA sense strand
gugcaacugccaagagaaa

SEQ ID NO: 898738 - RNA, 19 nt, Homo sapiens
  misc_RNA (1)...(19): siRNA sense strand
ggaggccaauauuacaaca

SEQ ID NO: 898739 - RNA, 19 nt, Homo sapiens
  misc_RNA (1)...(19): siRNA sense strand
cagaugaggagcaagagaa

SEQ ID NO: 898740 - RNA, 19 nt, Homo sapiens
  misc_RNA (1)...(19): siRNA sense strand
gcaggaguuugacaagaac

SEQ ID NO: 898741 - RNA, 19 nt, Homo sapiens
  misc_RNA (1)...(19): siRNA sense strand
gaggagcuguggugguucu

SEQ ID NO: 898742 - RNA, 19 nt, Homo sapiens
  misc_RNA (1)...(19): siRNA sense strand
agcaggaguuugacaagaa

SEQ ID NO: 898743 - RNA, 19 nt, Homo sapiens
  misc_RNA (1)...(19): siRNA sense strand
cggaagacccucuggaauc

SEQ ID NO: 898744 - RNA, 19 nt, Homo sapiens
  misc_RNA (1)...(19): siRNA sense strand
ugguggagcuucacuacga

SEQ ID NO: 898745 - RNA, 19 nt, Homo sapiens
  misc_RNA (1)...(19): siRNA sense strand
uacaacaccaagaugauaa

SEQ ID NO: 898746 - RNA, 19 nt, Homo sapiens
  misc_RNA (1)...(19): siRNA sense strand
gcagagggugaccguguga

SEQ ID NO: 898747 - RNA, 19 nt, Homo sapiens
  misc_RNA (1)...(19): siRNA sense strand
caacaccaagaugauaauu

SEQ ID NO: 898748 - RNA, 19 nt, Homo sapiens
  misc_RNA (1)...(19): siRNA sense strand
cuggaagggugggacauuu

SEQ ID NO: 898749 - RNA, 19 nt, Homo sapiens
  misc_RNA (1)...(19): siRNA sense strand
gauguccuaagcccagaua

SEQ ID NO: 898750 - RNA, 19 nt, Homo sapiens
  misc_RNA (1)...(19): siRNA sense strand
agaggaggcuaauuaugag

SEQ ID NO: 898751 - RNA, 19 nt, Homo sapiens
  misc_RNA (1)...(19): siRNA sense strand
uggaaggccugagggaaga

SEQ ID NO: 898752 - RNA, 19 nt, Homo sapiens
  misc_RNA (1)...(19): siRNA sense strand
aaaggaggccaauauuaca

SEQ ID NO: 898753 - RNA, 19 nt, Homo sapiens
  misc_RNA (1)...(19): siRNA sense strand
gaagucagcacugguugca

SEQ ID NO: 898754 - RNA, 19 nt, Homo sapiens
  misc_RNA (1)...(19): siRNA sense strand
gccuugauccugacaaugu

SEQ ID NO: 898755 - RNA, 19 nt, Homo sapiens
  misc_RNA (1)...(19): siRNA sense strand
uacaaaggaggccaauauu

SEQ ID NO: 898756 - RNA, 19 nt, Homo sapiens
  misc_RNA (1)...(19): siRNA sense strand
ggaacucgucaucccuuug

SEQ ID NO: 898757 - RNA, 19 nt, Homo sapiens
  misc_RNA (1)...(19): siRNA sense strand
cuagugacacagaugauga

SEQ ID NO: 898758 - RNA, 19 nt, Homo sapiens
  misc_RNA (1)...(19): siRNA sense strand
uauuacaacaccaagauga

SEQ ID NO: 898759 - RNA, 19 nt, Homo sapiens
  misc_RNA (1)...(19): siRNA sense strand
ccagaggaggcuaauuaug

SEQ ID NO: 898760 - RNA, 19 nt, Homo sapiens
  misc_RNA (1)...(19): siRNA sense strand
ggaaucaagaacucuacau

SEQ ID NO: 898761 - RNA, 19 nt, Homo sapiens
  misc_RNA (1)...(19): siRNA sense strand
gccagaggaggcuaauuau

SEQ ID NO: 898762 - RNA, 19 nt, Homo sapiens
  misc_RNA (1)...(19): siRNA sense strand
ggagcaagagaaagauaag

SEQ ID NO: 898763 - RNA, 19 nt, Homo sapiens
  misc_RNA (1)...(19): siRNA sense strand
aagcccagauaccugugua

SEQ ID NO: 898764 - RNA, 19 nt, Homo sapiens
  misc_RNA (1)...(19): siRNA sense strand
aagagaaagauaaggaaga

SEQ ID NO: 898765 - RNA, 19 nt, Homo sapiens
  misc_RNA (1)...(19): siRNA sense strand
caugggcccuagugacaca

SEQ ID NO: 898766 - RNA, 19 nt, Homo sapiens
  misc_RNA (1)...(19): siRNA sense strand
ccaauuucauucggcuuca

SEQ ID NO: 898767 - RNA, 19 nt, Homo sapiens
  misc_RNA (1)...(19): siRNA sense strand
caauauuacaacaccaaga

SEQ ID NO: 898768 - RNA, 19 nt, Homo sapiens
  misc_RNA (1)...(19): siRNA sense strand
cagcaggacaacucagaga

SEQ ID NO: 898769 - RNA, 19 nt, Homo sapiens
  misc_RNA (1)...(19): siRNA sense strand
ccucuggaaucaagaacuc

SEQ ID NO: 898770 - RNA, 19 nt, Homo sapiens
  misc_RNA (1)...(19): siRNA sense strand
gccaauauuacaacaccaa

SEQ ID NO: 898771 - RNA, 19 nt, Homo sapiens
  misc_RNA (1)...(19): siRNA sense strand
uggacaacauguacaaagg

SEQ ID NO: 898772 - RNA, 19 nt, Homo sapiens
  misc_RNA (1)...(19): siRNA sense strand
cacggaagacccucuggaa

SEQ ID NO: 898773 - RNA, 19 nt, Homo sapiens
  misc_RNA (1)...(19): siRNA sense strand
gguggagcuucacuacgau

SEQ ID NO: 898774 - RNA, 19 nt, Homo sapiens
  misc_RNA (1)...(19): siRNA sense strand
aauugaagauguccuaagc

SEQ ID NO: 898775 - RNA, 19 nt, Homo sapiens
  misc_RNA (1)...(19): siRNA sense strand
ggccugcagccaagaguga

SEQ ID NO: 898776 - RNA, 19 nt, Homo sapiens
  misc_RNA (1)...(19): siRNA sense strand
gaaagauaaggaagaucag

SEQ ID NO: 898777 - RNA, 19 nt, Homo sapiens
  misc_RNA (1)...(19): siRNA sense strand
uggugcaacugccaagaga

SEQ ID NO: 898778 - RNA, 19 nt, Homo sapiens
  misc_RNA (1)...(19): siRNA sense strand
gcugugaaggagcucauug

SEQ ID NO: 898779 - RNA, 19 nt, Homo sapiens
  misc_RNA (1)...(19): siRNA sense strand
ggagcuguggugguucuuu

SEQ ID NO: 898780 - RNA, 19 nt, Homo sapiens
  misc_RNA (1)...(19): siRNA sense strand
ccuugauccugacaauguu

SEQ ID NO: 898781 - RNA, 19 nt, Homo sapiens
  misc_RNA (1)...(19): siRNA sense strand
ggaagggugggacauuugc

SEQ ID NO: 898782 - RNA, 19 nt, Homo sapiens
  misc_RNA (1)...(19): siRNA sense strand
gaagacccucuggaaucaa

SEQ ID NO: 898783 - RNA, 19 nt, Homo sapiens
  misc_RNA (1)...(19): siRNA sense strand
gcccuagugacacagauga

SEQ ID NO: 898784 - RNA, 19 nt, Homo sapiens
  misc_RNA (1)...(19): siRNA sense strand
gcagugaggugcuguauga

SEQ ID NO: 898785 - RNA, 19 nt, Homo sapiens
  misc_RNA (1)...(19): siRNA sense strand
gaaaccaccuccaucagau

SEQ ID NO: 898786 - RNA, 19 nt, Homo sapiens
  misc_RNA (1)...(19): siRNA sense strand
ggacguaguucugcacuca

SEQ ID NO: 898787 - RNA, 19 nt, Homo sapiens
  misc_RNA (1)...(19): siRNA sense strand
ggaaaccaccuccaucaga

SEQ ID NO: 898788 - RNA, 19 nt, Homo sapiens
  misc_RNA (1)...(19): siRNA sense strand
gcccugaggugcauccaaa

SEQ ID NO: 898789 - RNA, 19 nt, Homo sapiens
  misc_RNA (1)...(19): siRNA sense strand
gagacuuccucuuggacua

SEQ ID NO: 898790 - RNA, 19 nt, Homo sapiens
  misc_RNA (1)...(19): siRNA sense strand
gcccugagccugaaacuuc

SEQ ID NO: 898791 - RNA, 19 nt, Homo sapiens
  misc_RNA (1)...(19): siRNA sense strand
gaacgcaguggccacaaga

SEQ ID NO: 898792 - RNA, 19 nt, Homo sapiens
  misc_RNA (1)...(19): siRNA sense strand
ccaccuccaucagaucuuu

SEQ ID NO: 898793 - RNA, 19 nt, Homo sapiens
  misc_RNA (1)...(19): siRNA sense strand
caaacccucugcuguggau

SEQ ID NO: 898794 - RNA, 19 nt, Homo sapiens
  misc_RNA (1)...(19): siRNA sense strand
guggagacuuccucuugga

SEQ ID NO: 898795 - RNA, 19 nt, Homo sapiens
  misc_RNA (1)...(19): siRNA sense strand
cagccaagaggacguaguu

SEQ ID NO: 898796 - RNA, 19 nt, Homo sapiens
  misc_RNA (1)...(19): siRNA sense strand
agucaaaggucagcugauc

SEQ ID NO: 898797 - RNA, 19 nt, Homo sapiens
  misc_RNA (1)...(19): siRNA sense strand
caggagcuccgcaaagugu

SEQ ID NO: 898798 - RNA, 19 nt, Homo sapiens
  misc_RNA (1)...(19): siRNA sense strand
ccaagaggacguaguucug

SEQ ID NO: 898799 - RNA, 19 nt, Homo sapiens
  misc_RNA (1)...(19): siRNA sense strand
guguggagacuuccucuug

SEQ ID NO: 898800 - RNA, 19 nt, Homo sapiens
  misc_RNA (1)...(19): siRNA sense strand
cgaaggcccugaggugcau

SEQ ID NO: 898801 - RNA, 19 nt, Homo sapiens
  misc_RNA (1)...(19): siRNA sense strand
uugcucagcucagccaaga

SEQ ID NO: 898802 - RNA, 19 nt, Homo sapiens
  misc_RNA (1)...(19): siRNA sense strand
gcucagccaagaggacgua

SEQ ID NO: 898803 - RNA, 19 nt, Homo sapiens
  misc_RNA (1)...(19): siRNA sense strand
gaggaggcugcaugagcua

SEQ ID NO: 898804 - RNA, 19 nt, Homo sapiens
  misc_RNA (1)...(19): siRNA sense strand
ugaacgcaguggccacaag

SEQ ID NO: 898805 - RNA, 19 nt, Homo sapiens
  misc_RNA (1)...(19): siRNA sense strand
gacuuccucuuggacuauu

SEQ ID NO: 898806 - RNA, 19 nt, Homo sapiens
  misc_RNA (1)...(19): siRNA sense strand
ggaggcugcaugagcuaga

SEQ ID NO: 898807 - RNA, 19 nt, Homo sapiens
  misc_RNA (1)...(19): siRNA sense strand
ggccuucauucucgucagu

SEQ ID NO: 898808 - RNA, 19 nt, Homo sapiens
  misc_RNA (1)...(19): siRNA sense strand
cagcucuccuaccuucaau

SEQ ID NO: 898809 - RNA, 19 nt, Homo sapiens
  misc_RNA (1)...(19): siRNA sense strand
gccaagaggacguaguucu

SEQ ID NO: 898810 - RNA, 19 nt, Homo sapiens
  misc_RNA (1)...(19): siRNA sense strand
ggaggcagcuggcgagaua

SEQ ID NO: 898811 - RNA, 19 nt, Homo sapiens
  misc_RNA (1)...(19): siRNA sense strand
gaauuuaccagcugaagaa

SEQ ID NO: 898812 - RNA, 19 nt, Homo sapiens
  misc_RNA (1)...(19): siRNA sense strand
ggcgagagcuacagacuga

SEQ ID NO: 898813 - RNA, 19 nt, Homo sapiens
  misc_RNA (1)...(19): siRNA sense strand
caagaucuaugauaaggau

SEQ ID NO: 898814 - RNA, 19 nt, Homo sapiens
  misc_RNA (1)...(19): siRNA sense strand
gaacgaguuuguugaaggu

SEQ ID NO: 898815 - RNA, 19 nt, Homo sapiens
  misc_RNA (1)...(19): siRNA sense strand
gcacacucuuuaugcauga

SEQ ID NO: 898816 - RNA, 19 nt, Homo sapiens
  misc_RNA (1)...(19): siRNA sense strand
ggacauucaagaucuauga

SEQ ID NO: 898817 - RNA, 19 nt, Homo sapiens
  misc_RNA (1)...(19): siRNA sense strand
ggacaacaccaucgacuuc

SEQ ID NO: 898818 - RNA, 19 nt, Homo sapiens
  misc_RNA (1)...(19): siRNA sense strand
acaagugggugaugaagau

SEQ ID NO: 898819 - RNA, 19 nt, Homo sapiens
  misc_RNA (1)...(19): siRNA sense strand
ugaagaugcugcagaugga

SEQ ID NO: 898820 - RNA, 19 nt, Homo sapiens
  misc_RNA (1)...(19): siRNA sense strand
gaaguggacauucaagauc

SEQ ID NO: 898821 - RNA, 19 nt, Homo sapiens
  misc_RNA (1)...(19): siRNA sense strand
guacguggcagcucugaau

SEQ ID NO: 898822 - RNA, 19 nt, Homo sapiens
  misc_RNA (1)...(19): siRNA sense strand
ggaauuuaccagcugaaga

SEQ ID NO: 898823 - RNA, 19 nt, Homo sapiens
  misc_RNA (1)...(19): siRNA sense strand
ugaugaagaugcugcagau

SEQ ID NO: 898824 - RNA, 19 nt, Homo sapiens
  misc_RNA (1)...(19): siRNA sense strand
ccaucgacuuccuggagua

SEQ ID NO: 898825 - RNA, 19 nt, Homo sapiens
  misc_RNA (1)...(19): siRNA sense strand
ggagugguacaagaaguuu

SEQ ID NO: 898826 - RNA, 19 nt, Homo sapiens
  misc_RNA (1)...(19): siRNA sense strand
guauguagagggcauguuc

SEQ ID NO: 898827 - RNA, 19 nt, Homo sapiens
  misc_RNA (1)...(19): siRNA sense strand
gaaaagugccauguucuga

SEQ ID NO: 898828 - RNA, 19 nt, Homo sapiens
  misc_RNA (1)...(19): siRNA sense strand
gccuggagcuacucaacau

SEQ ID NO: 898829 - RNA, 19 nt, Homo sapiens
  misc_RNA (1)...(19): siRNA sense strand
gcagcuggcgagauagaug

SEQ ID NO: 898830 - RNA, 19 nt, Homo sapiens
  misc_RNA (1)...(19): siRNA sense strand
gacaagugggugaugaaga

SEQ ID NO: 898831 - RNA, 19 nt, Homo sapiens
  misc_RNA (1)...(19): siRNA sense strand
gaguuuaagcgcuucuuca

SEQ ID NO: 898832 - RNA, 19 nt, Homo sapiens
  misc_RNA (1)...(19): siRNA sense strand
gcggcacacucuuuaugca

SEQ ID NO: 898833 - RNA, 19 nt, Homo sapiens
  misc_RNA (1)...(19): siRNA sense strand
caacauuguggagggaauu

SEQ ID NO: 898834 - RNA, 19 nt, Homo sapiens
  misc_RNA (1)...(19): siRNA sense strand
guuccgagccuucgacaag

SEQ ID NO: 898835 - RNA, 19 nt, Homo sapiens
  misc_RNA (1)...(19): siRNA sense strand
gauggccagcugucucuga

SEQ ID NO: 898836 - RNA, 19 nt, Homo sapiens
  misc_RNA (1)...(19): siRNA sense strand
cgggacaagugggugauga

SEQ ID NO: 898837 - RNA, 19 nt, Homo sapiens
  misc_RNA (1)...(19): siRNA sense strand
cagcggcacacucuuuaug

SEQ ID NO: 898838 - RNA, 19 nt, Homo sapiens
  misc_RNA (1)...(19): siRNA sense strand
ggacaagugggugaugaag

SEQ ID NO: 898839 - RNA, 19 nt, Homo sapiens
  misc_RNA (1)...(19): siRNA sense strand
ucucugaacgaguuuguug

SEQ ID NO: 898840 - RNA, 19 nt, Homo sapiens
  misc_RNA (1)...(19): siRNA sense strand
gggacaacaccaucgacuu

SEQ ID NO: 898841 - RNA, 19 nt, Homo sapiens
  misc_RNA (1)...(19): siRNA sense strand
gggacaagugggugaugaa

SEQ ID NO: 898842 - RNA, 19 nt, Homo sapiens
  misc_RNA (1)...(19): siRNA sense strand
caggagugguacaagaagu

SEQ ID NO: 898843 - RNA, 19 nt, Homo sapiens
  misc_RNA (1)...(19): siRNA sense strand
cccagcggcacacucuuua

SEQ ID NO: 898844 - RNA, 19 nt, Homo sapiens
  misc_RNA (1)...(19): siRNA sense strand
cagcagagacggaaaagug

SEQ ID NO: 898845 - RNA, 19 nt, Homo sapiens
  misc_RNA (1)...(19): siRNA sense strand
ucaacauuguggagggaau

SEQ ID NO: 898846 - RNA, 19 nt, Homo sapiens
  misc_RNA (1)...(19): siRNA sense strand
gcuacagacugagcaagac

SEQ ID NO: 898847 - RNA, 19 nt, Homo sapiens
  misc_RNA (1)...(19): siRNA sense strand
gauaagaguuaccuguguu

SEQ ID NO: 898848 - RNA, 19 nt, Homo sapiens
  misc_RNA (1)...(19): siRNA sense strand
cagauggccuggacuauau

SEQ ID NO: 898849 - RNA, 19 nt, Homo sapiens
  misc_RNA (1)...(19): siRNA sense strand
gcagauggccuggacuaua

SEQ ID NO: 898850 - RNA, 19 nt, Homo sapiens
  misc_RNA (1)...(19): siRNA sense strand
ccaaaguccugcauugaug

SEQ ID NO: 898851 - RNA, 19 nt, Homo sapiens
  misc_RNA (1)...(19): siRNA sense strand
ugaaugagauccuguucug

SEQ ID NO: 898852 - RNA, 19 nt, Homo sapiens
  misc_RNA (1)...(19): siRNA sense strand
acacguaugucuugucaga

SEQ ID NO: 898853 - RNA, 19 nt, Homo sapiens
  misc_RNA (1)...(19): siRNA sense strand
ucagugagguugucaucaa

SEQ ID NO: 898854 - RNA, 19 nt, Homo sapiens
  misc_RNA (1)...(19): siRNA sense strand
ucaagcaaaugaaggaaug

SEQ ID NO: 898855 - RNA, 19 nt, Homo sapiens
  misc_RNA (1)...(19): siRNA sense strand
caccagagcuccuagaaac

SEQ ID NO: 898856 - RNA, 19 nt, Homo sapiens
  misc_RNA (1)...(19): siRNA sense strand
gugagcaacuguaugaugu

SEQ ID NO: 898857 - RNA, 19 nt, Homo sapiens
  misc_RNA (1)...(19): siRNA sense strand
agaguuaccuguguuguga

SEQ ID NO: 898858 - RNA, 19 nt, Homo sapiens
  misc_RNA (1)...(19): siRNA sense strand
caaaugaaggaauguaaug

SEQ ID NO: 898859 - RNA, 19 nt, Homo sapiens
  misc_RNA (1)...(19): siRNA sense strand
ugagugagcaacuguauga

SEQ ID NO: 898860 - RNA, 19 nt, Homo sapiens
  misc_RNA (1)...(19): siRNA sense strand
gaauugagggugaagugaa

SEQ ID NO: 898861 - RNA, 19 nt, Homo sapiens
  misc_RNA (1)...(19): siRNA sense strand
ccagguugcugaaggaugu

SEQ ID NO: 898862 - RNA, 19 nt, Homo sapiens
  misc_RNA (1)...(19): siRNA sense strand
gcaaaugaaggaauguaau

SEQ ID NO: 898863 - RNA, 19 nt, Homo sapiens
  misc_RNA (1)...(19): siRNA sense strand
gaacugagugagcaacugu

SEQ ID NO: 898864 - RNA, 19 nt, Homo sapiens
  misc_RNA (1)...(19): siRNA sense strand
acguaugucuugucagaua

SEQ ID NO: 898865 - RNA, 19 nt, Homo sapiens
  misc_RNA (1)...(19): siRNA sense strand
gaagagaagaccuuacaac

SEQ ID NO: 898866 - RNA, 19 nt, Homo sapiens
  misc_RNA (1)...(19): siRNA sense strand
caucuugacuccugaaggu

SEQ ID NO: 898867 - RNA, 19 nt, Homo sapiens
  misc_RNA (1)...(19): siRNA sense strand
cagauggaguuuccugaug

SEQ ID NO: 898868 - RNA, 19 nt, Homo sapiens
  misc_RNA (1)...(19): siRNA sense strand
uguuugauguugacaguaa

SEQ ID NO: 898869 - RNA, 19 nt, Homo sapiens
  misc_RNA (1)...(19): siRNA sense strand
guauggaaccuaccuggaa

SEQ ID NO: 898870 - RNA, 19 nt, Homo sapiens
  misc_RNA (1)...(19): siRNA sense strand
gaucgaucccuccauguug

SEQ ID NO: 898871 - RNA, 19 nt, Homo sapiens
  misc_RNA (1)...(19): siRNA sense strand
gcugagaaacccagagcua

SEQ ID NO: 898872 - RNA, 19 nt, Homo sapiens
  misc_RNA (1)...(19): siRNA sense strand
ucaccgaggucagcaguau

SEQ ID NO: 898873 - RNA, 19 nt, Homo sapiens
  misc_RNA (1)...(19): siRNA sense strand
gucauaauguuugauguug

SEQ ID NO: 898874 - RNA, 19 nt, Homo sapiens
  misc_RNA (1)...(19): siRNA sense strand
gaacaccacaaagccauga

SEQ ID NO: 898875 - RNA, 19 nt, Homo sapiens
  misc_RNA (1)...(19): siRNA sense strand
ucacaaagcccagaagaag

SEQ ID NO: 898876 - RNA, 19 nt, Homo sapiens
  misc_RNA (1)...(19): siRNA sense strand
ugacagaugaggaagagaa

SEQ ID NO: 898877 - RNA, 19 nt, Homo sapiens
  misc_RNA (1)...(19): siRNA sense strand
ugauaagaguuaccugugu

SEQ ID NO: 898878 - RNA, 19 nt, Homo sapiens
  misc_RNA (1)...(19): siRNA sense strand
gagguugucaucaagcaaa

SEQ ID NO: 898879 - RNA, 19 nt, Homo sapiens
  misc_RNA (1)...(19): siRNA sense strand
cuauauguccggcgaauug

SEQ ID NO: 898880 - RNA, 19 nt, Homo sapiens
  misc_RNA (1)...(19): siRNA sense strand
gauuggguguggcaacuca

SEQ ID NO: 898881 - RNA, 19 nt, Homo sapiens
  misc_RNA (1)...(19): siRNA sense strand
ggguugggaugacacguau

SEQ ID NO: 898882 - RNA, 19 nt, Homo sapiens
  misc_RNA (1)...(19): siRNA sense strand
ggaagagaagaccuuacaa

SEQ ID NO: 898883 - RNA, 19 nt, Homo sapiens
  misc_RNA (1)...(19): siRNA sense strand
gccuugcccugcugagaaa

SEQ ID NO: 898884 - RNA, 19 nt, Homo sapiens
  misc_RNA (1)...(19): siRNA sense strand
gcaguccauugauaagagu

SEQ ID NO: 898885 - RNA, 19 nt, Homo sapiens
  misc_RNA (1)...(19): siRNA sense strand
gcggggugcuacauaaaua

SEQ ID NO: 898886 - RNA, 19 nt, Homo sapiens
  misc_RNA (1)...(19): siRNA sense strand
ggagaccgaguggcucuuu

SEQ ID NO: 898887 - RNA, 19 nt, Homo sapiens
  misc_RNA (1)...(19): siRNA sense strand
uacaacagguggacaggau

SEQ ID NO: 898888 - RNA, 19 nt, Homo sapiens
  misc_RNA (1)...(19): siRNA sense strand
gcagauggaguuuccugau

SEQ ID NO: 898889 - RNA, 19 nt, Homo sapiens
  misc_RNA (1)...(19): siRNA sense strand
ggugcuacauaaauauauc

SEQ ID NO: 898890 - RNA, 19 nt, Homo sapiens
  misc_RNA (1)...(19): siRNA sense strand
gagaccgaguggcucuuug

SEQ ID NO: 898891 - RNA, 19 nt, Homo sapiens
  misc_RNA (1)...(19): siRNA sense strand
ugucagauaugcucaagac

SEQ ID NO: 898892 - RNA, 19 nt, Homo sapiens
  misc_RNA (1)...(19): siRNA sense strand
cagcauuuguggagcaauc

SEQ ID NO: 898893 - RNA, 19 nt, Homo sapiens
  misc_RNA (1)...(19): siRNA sense strand
ccagagcuacuccuagaga

SEQ ID NO: 898894 - RNA, 19 nt, Homo sapiens
  misc_RNA (1)...(19): siRNA sense strand
gaggucagcaguaugaaag

SEQ ID NO: 898895 - RNA, 19 nt, Homo sapiens
  misc_RNA (1)...(19): siRNA sense strand
ucaggagguugauuacagu

SEQ ID NO: 898896 - RNA, 19 nt, Homo sapiens
  misc_RNA (1)...(19): siRNA sense strand
gaugucauaauguuugaug

SEQ ID NO: 898897 - RNA, 19 nt, Homo sapiens
  misc_RNA (1)...(19): siRNA sense strand
acccagagcuacuccuaga

SEQ ID NO: 898898 - RNA, 19 nt, Homo sapiens
  misc_RNA (1)...(19): siRNA sense strand
ggcaguccauugauaagag

SEQ ID NO: 898899 - RNA, 19 nt, Homo sapiens
  misc_RNA (1)...(19): siRNA sense strand
gaagguccacauugcagau

SEQ ID NO: 898900 - RNA, 19 nt, Homo sapiens
  misc_RNA (1)...(19): siRNA sense strand
gaaaaggugcuggugauug

SEQ ID NO: 898901 - RNA, 19 nt, Homo sapiens
  misc_RNA (1)...(19): siRNA sense strand
aagagaagaccuuacaaca

SEQ ID NO: 898902 - RNA, 19 nt, Homo sapiens
  misc_RNA (1)...(19): siRNA sense strand
gggauauagugaacaucga

SEQ ID NO: 898903 - RNA, 19 nt, Homo sapiens
  misc_RNA (1)...(19): siRNA sense strand
ugaggaagagaagaccuua

SEQ ID NO: 898904 - RNA, 19 nt, Homo sapiens
  misc_RNA (1)...(19): siRNA sense strand
ucaagacggugaaaauugu

SEQ ID NO: 898905 - RNA, 19 nt, Homo sapiens
  misc_RNA (1)...(19): siRNA sense strand
ggagcaaucuuuucuacag

SEQ ID NO: 898906 - RNA, 19 nt, Homo sapiens
  misc_RNA (1)...(19): siRNA sense strand
cauaauguuugauguugac

SEQ ID NO: 898907 - RNA, 19 nt, Homo sapiens
  misc_RNA (1)...(19): siRNA sense strand
gggaaaaggugcuggugau

SEQ ID NO: 898908 - RNA, 19 nt, Homo sapiens
  misc_RNA (1)...(19): siRNA sense strand
uuuccaaaguccugcauug

SEQ ID NO: 898909 - RNA, 19 nt, Homo sapiens
  misc_RNA (1)...(19): siRNA sense strand
ggcuucaggagguugauua

SEQ ID NO: 898910 - RNA, 19 nt, Homo sapiens
  misc_RNA (1)...(19): siRNA sense strand
ugacgcagauggaguuucc

SEQ ID NO: 898911 - RNA, 19 nt, Homo sapiens
  misc_RNA (1)...(19): siRNA sense strand
ggucagcaguaugaaagca

SEQ ID NO: 898912 - RNA, 19 nt, Homo sapiens
  misc_RNA (1)...(19): siRNA sense strand
gcgaauugagggugaagug

SEQ ID NO: 898913 - RNA, 19 nt, Homo sapiens
  misc_RNA (1)...(19): siRNA sense strand
ggaccguucagcaccaaga

SEQ ID NO: 898914 - RNA, 19 nt, Homo sapiens
  misc_RNA (1)...(19): siRNA sense strand
gaguuuggcuccguugacu

SEQ ID NO: 898915 - RNA, 19 nt, Homo sapiens
  misc_RNA (1)...(19): siRNA sense strand
gagggugaagugaaugaga

SEQ ID NO: 898916 - RNA, 19 nt, Homo sapiens
  misc_RNA (1)...(19): siRNA sense strand
aaacccagagcuacuccua

SEQ ID NO: 898917 - RNA, 19 nt, Homo sapiens
  misc_RNA (1)...(19): siRNA sense strand
ggccuugcccugcugagaa

SEQ ID NO: 898918 - RNA, 19 nt, Homo sapiens
  misc_RNA (1)...(19): siRNA sense strand
gcuuucgagugguauggaa

SEQ ID NO: 898919 - RNA, 19 nt, Homo sapiens
  misc_RNA (1)...(19): siRNA sense strand
cguaugucuugucagauau

SEQ ID NO: 898920 - RNA, 19 nt, Homo sapiens
  misc_RNA (1)...(19): siRNA sense strand
aauugagggugaagugaau

SEQ ID NO: 898921 - RNA, 19 nt, Homo sapiens
  misc_RNA (1)...(19): siRNA sense strand
cuacgaugucauaauguuu

SEQ ID NO: 898922 - RNA, 19 nt, Homo sapiens
  misc_RNA (1)...(19): siRNA sense strand
ggaugacaagcgauacuuc

SEQ ID NO: 898923 - RNA, 19 nt, Homo sapiens
  misc_RNA (1)...(19): siRNA sense strand
cgaggucagcaguaugaaa

SEQ ID NO: 898924 - RNA, 19 nt, Homo sapiens
  misc_RNA (1)...(19): siRNA sense strand
auacuuccgucgacugauc

SEQ ID NO: 898925 - RNA, 19 nt, Homo sapiens
  misc_RNA (1)...(19): siRNA sense strand
gagcaaucuuuucuacaga

SEQ ID NO: 898926 - RNA, 19 nt, Homo sapiens
  misc_RNA (1)...(19): siRNA sense strand
cagagcuacuccuagagau

SEQ ID NO: 898927 - RNA, 19 nt, Homo sapiens
  misc_RNA (1)...(19): siRNA sense strand
gggcaguccauugauaaga

SEQ ID NO: 898928 - RNA, 19 nt, Homo sapiens
  misc_RNA (1)...(19): siRNA sense strand
uauaucaagcccagggaaa

SEQ ID NO: 898929 - RNA, 19 nt, Homo sapiens
  misc_RNA (1)...(19): siRNA sense strand
uggacuauaucgccagcuu

SEQ ID NO: 898930 - RNA, 19 nt, Homo sapiens
  misc_RNA (1)...(19): siRNA sense strand
cagcagcgaggaaagaaag

SEQ ID NO: 898931 - RNA, 19 nt, Homo sapiens
  misc_RNA (1)...(19): siRNA sense strand
cgaauugagggugaaguga

SEQ ID NO: 898932 - RNA, 19 nt, Homo sapiens
  misc_RNA (1)...(19): siRNA sense strand
ugauuacaguggcccuuca

SEQ ID NO: 898933 - RNA, 19 nt, Homo sapiens
  misc_RNA (1)...(19): siRNA sense strand
gugagguugucaucaagca

SEQ ID NO: 898934 - RNA, 19 nt, Homo sapiens
  misc_RNA (1)...(19): siRNA sense strand
agagaagaccuuacaacag

SEQ ID NO: 898935 - RNA, 19 nt, Homo sapiens
  misc_RNA (1)...(19): siRNA sense strand
acaccagagcuccuagaaa

SEQ ID NO: 898936 - RNA, 19 nt, Homo sapiens
  misc_RNA (1)...(19): siRNA sense strand
aauguuugauguugacagu

SEQ ID NO: 898937 - RNA, 19 nt, Homo sapiens
  misc_RNA (1)...(19): siRNA sense strand
uacgaugucauaauguuug

SEQ ID NO: 898938 - RNA, 19 nt, Homo sapiens
  misc_RNA (1)...(19): siRNA sense strand
ccagagugaccgaaugaag

SEQ ID NO: 898939 - RNA, 19 nt, Homo sapiens
  misc_RNA (1)...(19): siRNA sense strand
gagaaacccagagcuacuc

SEQ ID NO: 898940 - RNA, 19 nt, Homo sapiens
  misc_RNA (1)...(19): siRNA sense strand
aagccagguugcugaagga

SEQ ID NO: 898941 - RNA, 19 nt, Homo sapiens
  misc_RNA (1)...(19): siRNA sense strand
cgauacuuccgucgacuga

SEQ ID NO: 898942 - RNA, 19 nt, Homo sapiens
  misc_RNA (1)...(19): siRNA sense strand
ccugacagaugaggaagag

SEQ ID NO: 898943 - RNA, 19 nt, Homo sapiens
  misc_RNA (1)...(19): siRNA sense strand
agggugaagugaaugagau

SEQ ID NO: 898944 - RNA, 19 nt, Homo sapiens
  misc_RNA (1)...(19): siRNA sense strand
gggaugacaagcgauacuu

SEQ ID NO: 898945 - RNA, 19 nt, Homo sapiens
  misc_RNA (1)...(19): siRNA sense strand
ggacaggaauaaugcauug

SEQ ID NO: 898946 - RNA, 19 nt, Homo sapiens
  misc_RNA (1)...(19): siRNA sense strand
caaaugagagcuccuauca

SEQ ID NO: 898947 - RNA, 19 nt, Homo sapiens
  misc_RNA (1)...(19): siRNA sense strand
caagcagaaugaacagaaa

SEQ ID NO: 898948 - RNA, 19 nt, Homo sapiens
  misc_RNA (1)...(19): siRNA sense strand
gaaaccaggacaggaauaa

SEQ ID NO: 898949 - RNA, 19 nt, Homo sapiens
  misc_RNA (1)...(19): siRNA sense strand
aaugagagcuccuaucaca

SEQ ID NO: 898950 - RNA, 19 nt, Homo sapiens
  misc_RNA (1)...(19): siRNA sense strand
aaacauucauggugucuca

SEQ ID NO: 898951 - RNA, 19 nt, Homo sapiens
  misc_RNA (1)...(19): siRNA sense strand
ugaaagaacgguaugaaca

SEQ ID NO: 898952 - RNA, 19 nt, Homo sapiens
  misc_RNA (1)...(19): siRNA sense strand
gaagcccuaugcagucaug

SEQ ID NO: 898953 - RNA, 19 nt, Homo sapiens
  misc_RNA (1)...(19): siRNA sense strand
gaaaagccaagcagaauga

SEQ ID NO: 898954 - RNA, 19 nt, Homo sapiens
  misc_RNA (1)...(19): siRNA sense strand
ugagagcuccuaucacaga

SEQ ID NO: 898955 - RNA, 19 nt, Homo sapiens
  misc_RNA (1)...(19): siRNA sense strand
gaaagaacgguaugaacac

SEQ ID NO: 898956 - RNA, 19 nt, Homo sapiens
  misc_RNA (1)...(19): siRNA sense strand
gagagcuccuaucacagaa

SEQ ID NO: 898957 - RNA, 19 nt, Homo sapiens
  misc_RNA (1)...(19): siRNA sense strand
gaauuccuacacagaguuu

SEQ ID NO: 898958 - RNA, 19 nt, Homo sapiens
  misc_RNA (1)...(19): siRNA sense strand
ccaagcagaaugaacagaa

SEQ ID NO: 898959 - RNA, 19 nt, Homo sapiens
  misc_RNA (1)...(19): siRNA sense strand
gaaugaaagaacgguauga

SEQ ID NO: 898960 - RNA, 19 nt, Homo sapiens
  misc_RNA (1)...(19): siRNA sense strand
guugucaccauggauauua

SEQ ID NO: 898961 - RNA, 19 nt, Homo sapiens
  misc_RNA (1)...(19): siRNA sense strand
acagaaaccaggacaggaa

SEQ ID NO: 898962 - RNA, 19 nt, Homo sapiens
  misc_RNA (1)...(19): siRNA sense strand
ggaaaugaagcccuaugca

SEQ ID NO: 898963 - RNA, 19 nt, Homo sapiens
  misc_RNA (1)...(19): siRNA sense strand
ggaauuccuacacagaguu

SEQ ID NO: 898964 - RNA, 19 nt, Homo sapiens
  misc_RNA (1)...(19): siRNA sense strand
gcgguugucaccauggaua

SEQ ID NO: 898965 - RNA, 19 nt, Homo sapiens
  misc_RNA (1)...(19): siRNA sense strand
gcagaaaagccaagcagaa

SEQ ID NO: 898966 - RNA, 19 nt, Homo sapiens
  misc_RNA (1)...(19): siRNA sense strand
auacuggaauuccuacaca

SEQ ID NO: 898967 - RNA, 19 nt, Homo sapiens
  misc_RNA (1)...(19): siRNA sense strand
agaacgguaugaacacgau

SEQ ID NO: 898968 - RNA, 19 nt, Homo sapiens
  misc_RNA (1)...(19): siRNA sense strand
gggcgguugucaccaugga

SEQ ID NO: 898969 - RNA, 19 nt, Homo sapiens
  misc_RNA (1)...(19): siRNA sense strand
cgaaugaaagaacgguaug

SEQ ID NO: 898970 - RNA, 19 nt, Homo sapiens
  misc_RNA (1)...(19): siRNA sense strand
aauaaugcauugccuucca

SEQ ID NO: 898971 - RNA, 19 nt, Homo sapiens
  misc_RNA (1)...(19): siRNA sense strand
agaaaccaggacaggaaua

SEQ ID NO: 898972 - RNA, 19 nt, Homo sapiens
  misc_RNA (1)...(19): siRNA sense strand
uuacaaaugagagcuccua

SEQ ID NO: 898973 - RNA, 19 nt, Homo sapiens
  misc_RNA (1)...(19): siRNA sense strand
aaccaggacaggaauaaug

SEQ ID NO: 898974 - RNA, 19 nt, Homo sapiens
  misc_RNA (1)...(19): siRNA sense strand
auaaugcauugccuuccaa

SEQ ID NO: 898975 - RNA, 19 nt, Homo sapiens
  misc_RNA (1)...(19): siRNA sense strand
uggaauuccuacacagagu

SEQ ID NO: 898976 - RNA, 19 nt, Homo sapiens
  misc_RNA (1)...(19): siRNA sense strand
cagugugcuucaugcagaa

SEQ ID NO: 898977 - RNA, 19 nt, Homo sapiens
  misc_RNA (1)...(19): siRNA sense strand
cuccacgccugggaaauga

SEQ ID NO: 898978 - RNA, 19 nt, Homo sapiens
  misc_RNA (1)...(19): siRNA sense strand
aagccaagcagaaugaaca

SEQ ID NO: 898979 - RNA, 19 nt, Homo sapiens
  misc_RNA (1)...(19): siRNA sense strand
ggaaacaacuucaaucaca

SEQ ID NO: 898980 - RNA, 19 nt, Homo sapiens
  misc_RNA (1)...(19): siRNA sense strand
ggaaggagauaaaugaaga

SEQ ID NO: 898981 - RNA, 19 nt, Homo sapiens
  misc_RNA (1)...(19): siRNA sense strand
caacaccacuuccuagaaa

SEQ ID NO: 898982 - RNA, 19 nt, Homo sapiens
  misc_RNA (1)...(19): siRNA sense strand
ucagaugacuuuaaaggua

SEQ ID NO: 898983 - RNA, 19 nt, Homo sapiens
  misc_RNA (1)...(19): siRNA sense strand
gaggacaucuaugcuaaua

SEQ ID NO: 898984 - RNA, 19 nt, Homo sapiens
  misc_RNA (1)...(19): siRNA sense strand
ggacaucuaugcuaauauc

SEQ ID NO: 898985 - RNA, 19 nt, Homo sapiens
  misc_RNA (1)...(19): siRNA sense strand
cgaggaagaugucagauau

SEQ ID NO: 898986 - RNA, 19 nt, Homo sapiens
  misc_RNA (1)...(19): siRNA sense strand
gcaguaaguucuaaucaca

SEQ ID NO: 898987 - RNA, 19 nt, Homo sapiens
  misc_RNA (1)...(19): siRNA sense strand
ggaggaggaugaaggagaa

SEQ ID NO: 898988 - RNA, 19 nt, Homo sapiens
  misc_RNA (1)...(19): siRNA sense strand
guaaaugaauccauacaca

SEQ ID NO: 898989 - RNA, 19 nt, Homo sapiens
  misc_RNA (1)...(19): siRNA sense strand
gaaauggcuucuagaugga

SEQ ID NO: 898990 - RNA, 19 nt, Homo sapiens
  misc_RNA (1)...(19): siRNA sense strand
cagaagacauuauaagauc

SEQ ID NO: 898991 - RNA, 19 nt, Homo sapiens
  misc_RNA (1)...(19): siRNA sense strand
gaaaauagaggaagacaaa

SEQ ID NO: 898992 - RNA, 19 nt, Homo sapiens
  misc_RNA (1)...(19): siRNA sense strand
gacaacagaagacauuaua

SEQ ID NO: 898993 - RNA, 19 nt, Homo sapiens
  misc_RNA (1)...(19): siRNA sense strand
uauaagaucugugaaagug

SEQ ID NO: 898994 - RNA, 19 nt, Homo sapiens
  misc_RNA (1)...(19): siRNA sense strand
uaaggaaggagauaaauga

SEQ ID NO: 898995 - RNA, 19 nt, Homo sapiens
  misc_RNA (1)...(19): siRNA sense strand
gaaaguggaaagagaagaa

SEQ ID NO: 898996 - RNA, 19 nt, Homo sapiens
  misc_RNA (1)...(19): siRNA sense strand
gaaacaacuucaaucacau

SEQ ID NO: 898997 - RNA, 19 nt, Homo sapiens
  misc_RNA (1)...(19): siRNA sense strand
gaagcuaguccucaugaaa

SEQ ID NO: 898998 - RNA, 19 nt, Homo sapiens
  misc_RNA (1)...(19): siRNA sense strand
gagcagaagagucaauuga

SEQ ID NO: 898999 - RNA, 19 nt, Homo sapiens
  misc_RNA (1)...(19): siRNA sense strand
caacuucaaucacaucagu

SEQ ID NO: 899000 - RNA, 19 nt, Homo sapiens
  misc_RNA (1)...(19): siRNA sense strand
gaaggaagaggccauuuua

SEQ ID NO: 899001 - RNA, 19 nt, Homo sapiens
  misc_RNA (1)...(19): siRNA sense strand
gaagagaugaagaagcaaa

SEQ ID NO: 899002 - RNA, 19 nt, Homo sapiens
  misc_RNA (1)...(19): siRNA sense strand
aggaagaugucagauauaa

SEQ ID NO: 899003 - RNA, 19 nt, Homo sapiens
  misc_RNA (1)...(19): siRNA sense strand
ggaagaaucgaaugucaug

SEQ ID NO: 899004 - RNA, 19 nt, Homo sapiens
  misc_RNA (1)...(19): siRNA sense strand
ccauggaaauuaaaguuga

SEQ ID NO: 899005 - RNA, 19 nt, Homo sapiens
  misc_RNA (1)...(19): siRNA sense strand
gcaccagcauuugaagaaa

SEQ ID NO: 899006 - RNA, 19 nt, Homo sapiens
  misc_RNA (1)...(19): siRNA sense strand
gaaccggugacaaugauuu

SEQ ID NO: 899007 - RNA, 19 nt, Homo sapiens
  misc_RNA (1)...(19): siRNA sense strand
agaaagagcagaagaguca

SEQ ID NO: 899008 - RNA, 19 nt, Homo sapiens
  misc_RNA (1)...(19): siRNA sense strand
gaacaggaagagaugaaga

SEQ ID NO: 899009 - RNA, 19 nt, Homo sapiens
  misc_RNA (1)...(19): siRNA sense strand
caacagaagacauuauaag

SEQ ID NO: 899010 - RNA, 19 nt, Homo sapiens
  misc_RNA (1)...(19): siRNA sense strand
cuuuaaagguacaggaaua

SEQ ID NO: 899011 - RNA, 19 nt, Homo sapiens
  misc_RNA (1)...(19): siRNA sense strand
gaagacagugaagaagaua

SEQ ID NO: 899012 - RNA, 19 nt, Homo sapiens
  misc_RNA (1)...(19): siRNA sense strand
caauugagcggacaacaga

SEQ ID NO: 899013 - RNA, 19 nt, Homo sapiens
  misc_RNA (1)...(19): siRNA sense strand
ugaaggagaagcagagaaa

SEQ ID NO: 899014 - RNA, 19 nt, Homo sapiens
  misc_RNA (1)...(19): siRNA sense strand
ggacgaggaagaugucaga

SEQ ID NO: 899015 - RNA, 19 nt, Homo sapiens
  misc_RNA (1)...(19): siRNA sense strand
aggaagaaaucucacagaa

SEQ ID NO: 899016 - RNA, 19 nt, Homo sapiens
  misc_RNA (1)...(19): siRNA sense strand
gaagaaagagcagaagagu

SEQ ID NO: 899017 - RNA, 19 nt, Homo sapiens
  misc_RNA (1)...(19): siRNA sense strand
gacauuauaagaucuguga

SEQ ID NO: 899018 - RNA, 19 nt, Homo sapiens
  misc_RNA (1)...(19): siRNA sense strand
ggacaacagaagacauuau

SEQ ID NO: 899019 - RNA, 19 nt, Homo sapiens
  misc_RNA (1)...(19): siRNA sense strand
agacaagccucagagagaa

SEQ ID NO: 899020 - RNA, 19 nt, Homo sapiens
  misc_RNA (1)...(19): siRNA sense strand
ccaaaguccuacauaccuu

SEQ ID NO: 899021 - RNA, 19 nt, Homo sapiens
  misc_RNA (1)...(19): siRNA sense strand
gaacugcaaaucucaacga

SEQ ID NO: 899022 - RNA, 19 nt, Homo sapiens
  misc_RNA (1)...(19): siRNA sense strand
aggaagagaugaagaagca

SEQ ID NO: 899023 - RNA, 19 nt, Homo sapiens
  misc_RNA (1)...(19): siRNA sense strand
gugaagaagauaagaaguu

SEQ ID NO: 899024 - RNA, 19 nt, Homo sapiens
  misc_RNA (1)...(19): siRNA sense strand
gaggaagaugucagauaua

SEQ ID NO: 899025 - RNA, 19 nt, Homo sapiens
  misc_RNA (1)...(19): siRNA sense strand
gaaaagaacaggaagagau

SEQ ID NO: 899026 - RNA, 19 nt, Homo sapiens
  misc_RNA (1)...(19): siRNA sense strand
gauccauccuuaacagcuu

SEQ ID NO: 899027 - RNA, 19 nt, Homo sapiens
  misc_RNA (1)...(19): siRNA sense strand
uaaagcaccagcauuugaa

SEQ ID NO: 899028 - RNA, 19 nt, Homo sapiens
  misc_RNA (1)...(19): siRNA sense strand
ggguauugguguaaaugaa

SEQ ID NO: 899029 - RNA, 19 nt, Homo sapiens
  misc_RNA (1)...(19): siRNA sense strand
gagaagaaagagcagaaga

SEQ ID NO: 899030 - RNA, 19 nt, Homo sapiens
  misc_RNA (1)...(19): siRNA sense strand
ggaagaaaucucacagaag

SEQ ID NO: 899031 - RNA, 19 nt, Homo sapiens
  misc_RNA (1)...(19): siRNA sense strand
cuaaagcaccagcauuuga

SEQ ID NO: 899032 - RNA, 19 nt, Homo sapiens
  misc_RNA (1)...(19): siRNA sense strand
ugaaagagcaagaagaaag

SEQ ID NO: 899033 - RNA, 19 nt, Homo sapiens
  misc_RNA (1)...(19): siRNA sense strand
agaagacagugaagaagau

SEQ ID NO: 899034 - RNA, 19 nt, Homo sapiens
  misc_RNA (1)...(19): siRNA sense strand
gaagaggccauuuuaaaga

SEQ ID NO: 899035 - RNA, 19 nt, Homo sapiens
  misc_RNA (1)...(19): siRNA sense strand
gaaacuaaagucaauugag

SEQ ID NO: 899036 - RNA, 19 nt, Homo sapiens
  misc_RNA (1)...(19): siRNA sense strand
uugaggacaucuaugcuaa

SEQ ID NO: 899037 - RNA, 19 nt, Homo sapiens
  misc_RNA (1)...(19): siRNA sense strand
ggacuggguauugguguaa

SEQ ID NO: 899038 - RNA, 19 nt, Homo sapiens
  misc_RNA (1)...(19): siRNA sense strand
gguaucagcaggcagaaga

SEQ ID NO: 899039 - RNA, 19 nt, Homo sapiens
  misc_RNA (1)...(19): siRNA sense strand
ugguguaaaugaauccaua

SEQ ID NO: 899040 - RNA, 19 nt, Homo sapiens
  misc_RNA (1)...(19): siRNA sense strand
gcaaaucucaacgaaggaa

SEQ ID NO: 899041 - RNA, 19 nt, Homo sapiens
  misc_RNA (1)...(19): siRNA sense strand
cagaaccggugacaaugau

SEQ ID NO: 899042 - RNA, 19 nt, Homo sapiens
  misc_RNA (1)...(19): siRNA sense strand
gcggacaacagaagacauu

SEQ ID NO: 899043 - RNA, 19 nt, Homo sapiens
  misc_RNA (1)...(19): siRNA sense strand
auacagaaccggugacaau

SEQ ID NO: 899044 - RNA, 19 nt, Homo sapiens
  misc_RNA (1)...(19): siRNA sense strand
cagaagacagugaagaaga

SEQ ID NO: 899045 - RNA, 19 nt, Homo sapiens
  misc_RNA (1)...(19): siRNA sense strand
gaaggagauaaaugaagaa

SEQ ID NO: 899046 - RNA, 19 nt, Homo sapiens
  misc_RNA (1)...(19): siRNA sense strand
agagcaagaagaaagcuua

SEQ ID NO: 899047 - RNA, 19 nt, Homo sapiens
  misc_RNA (1)...(19): siRNA sense strand
ggaggaggaggaugaagga

SEQ ID NO: 899048 - RNA, 19 nt, Homo sapiens
  misc_RNA (1)...(19): siRNA sense strand
ggcagaagacagugaagaa

SEQ ID NO: 899049 - RNA, 19 nt, Homo sapiens
  misc_RNA (1)...(19): siRNA sense strand
uaauaucccugaccuucca

SEQ ID NO: 899050 - RNA, 19 nt, Homo sapiens
  misc_RNA (1)...(19): siRNA sense strand
aaaccaacaccacuuccua

SEQ ID NO: 899051 - RNA, 19 nt, Homo sapiens
  misc_RNA (1)...(19): siRNA sense strand
ccagagagacaauauuugg

SEQ ID NO: 899052 - RNA, 19 nt, Homo sapiens
  misc_RNA (1)...(19): siRNA sense strand
aaacuaaagcaccagcauu

SEQ ID NO: 899053 - RNA, 19 nt, Homo sapiens
  misc_RNA (1)...(19): siRNA sense strand
gaagacauuauaagaucug

SEQ ID NO: 899054 - RNA, 19 nt, Homo sapiens
  misc_RNA (1)...(19): siRNA sense strand
gaaagagcaagaagaaagc

SEQ ID NO: 899055 - RNA, 19 nt, Homo sapiens
  misc_RNA (1)...(19): siRNA sense strand
cuugaagacuggagaaagu

SEQ ID NO: 899056 - RNA, 19 nt, Homo sapiens
  misc_RNA (1)...(19): siRNA sense strand
ccagauccagguucuagaa

SEQ ID NO: 899057 - RNA, 19 nt, Homo sapiens
  misc_RNA (1)...(19): siRNA sense strand
ucugaaagagcaagaagaa

SEQ ID NO: 899058 - RNA, 19 nt, Homo sapiens
  misc_RNA (1)...(19): siRNA sense strand
agaggaacuucuaagacaa

SEQ ID NO: 899059 - RNA, 19 nt, Homo sapiens
  misc_RNA (1)...(19): siRNA sense strand
ucacagugcagcauacaau

SEQ ID NO: 899060 - RNA, 19 nt, Homo sapiens
  misc_RNA (1)...(19): siRNA sense strand
gguuaaggaaggagauaaa

SEQ ID NO: 899061 - RNA, 19 nt, Homo sapiens
  misc_RNA (1)...(19): siRNA sense strand
aagcugaacugcaaaucuc

SEQ ID NO: 899062 - RNA, 19 nt, Homo sapiens
  misc_RNA (1)...(19): siRNA sense strand
aagacaagccucagagaga

SEQ ID NO: 899063 - RNA, 19 nt, Homo sapiens
  misc_RNA (1)...(19): siRNA sense strand
cagaagcuaguccucauga

SEQ ID NO: 899064 - RNA, 19 nt, Homo sapiens
  misc_RNA (1)...(19): siRNA sense strand
gcaggcagaagacagugaa

SEQ ID NO: 899065 - RNA, 19 nt, Homo sapiens
  misc_RNA (1)...(19): siRNA sense strand
uccaggccaucacagauaa

SEQ ID NO: 899066 - RNA, 19 nt, Homo sapiens
  misc_RNA (1)...(19): siRNA sense strand
aacuaaagcaccagcauuu

SEQ ID NO: 899067 - RNA, 19 nt, Homo sapiens
  misc_RNA (1)...(19): siRNA sense strand
gaauggcaaagcugggaaa

SEQ ID NO: 899068 - RNA, 19 nt, Homo sapiens
  misc_RNA (1)...(19): siRNA sense strand
ggaugagaauggcaaagcu

SEQ ID NO: 899069 - RNA, 19 nt, Homo sapiens
  misc_RNA (1)...(19): siRNA sense strand
gcagcccuguccaccauuc

SEQ ID NO: 899070 - RNA, 19 nt, Homo sapiens
  misc_RNA (1)...(19): siRNA sense strand
ccaacaccacuuccuagaa

SEQ ID NO: 899071 - RNA, 19 nt, Homo sapiens
  misc_RNA (1)...(19): siRNA sense strand
gaagaagauaagaaguuuc

SEQ ID NO: 899072 - RNA, 19 nt, Homo sapiens
  misc_RNA (1)...(19): siRNA sense strand
ccuccagacauaaaugaua

SEQ ID NO: 899073 - RNA, 19 nt, Homo sapiens
  misc_RNA (1)...(19): siRNA sense strand
ggaagaugucagauauaau

SEQ ID NO: 899074 - RNA, 19 nt, Homo sapiens
  misc_RNA (1)...(19): siRNA sense strand
ucaacaagcagaagagaag

SEQ ID NO: 899075 - RNA, 19 nt, Homo sapiens
  misc_RNA (1)...(19): siRNA sense strand
guauugguguaaaugaauc

SEQ ID NO: 899076 - RNA, 19 nt, Homo sapiens
  misc_RNA (1)...(19): siRNA sense strand
ugagaaagagauccaagau

SEQ ID NO: 899077 - RNA, 19 nt, Homo sapiens
  misc_RNA (1)...(19): siRNA sense strand
aauagaggaagacaaacua

SEQ ID NO: 899078 - RNA, 19 nt, Homo sapiens
  misc_RNA (1)...(19): siRNA sense strand
ugggaagaaucgaauguca

SEQ ID NO: 899079 - RNA, 19 nt, Homo sapiens
  misc_RNA (1)...(19): siRNA sense strand
gcaagaagaugaaguggau

SEQ ID NO: 899080 - RNA, 19 nt, Homo sapiens
  misc_RNA (1)...(19): siRNA sense strand
aggaacccauuuacuguua

SEQ ID NO: 899081 - RNA, 19 nt, Homo sapiens
  misc_RNA (1)...(19): siRNA sense strand
gaacccauuuacuguuaca

SEQ ID NO: 899082 - RNA, 19 nt, Homo sapiens
  misc_RNA (1)...(19): siRNA sense strand
agaagcagauccaguccaa

SEQ ID NO: 899083 - RNA, 19 nt, Homo sapiens
  misc_RNA (1)...(19): siRNA sense strand
gcaacuucaucuucgacaa

SEQ ID NO: 899084 - RNA, 19 nt, Homo sapiens
  misc_RNA (1)...(19): siRNA sense strand
ucgcagaggaacccauuua

SEQ ID NO: 899085 - RNA, 19 nt, Homo sapiens
  misc_RNA (1)...(19): siRNA sense strand
gaaccgcgaccacaucaag

SEQ ID NO: 899086 - RNA, 19 nt, Homo sapiens
  misc_RNA (1)...(19): siRNA sense strand
ucaacacgcuauccucauc

SEQ ID NO: 899087 - RNA, 19 nt, Homo sapiens
  misc_RNA (1)...(19): siRNA sense strand
cagaggaacccauuuacug

SEQ ID NO: 899088 - RNA, 19 nt, Homo sapiens
  misc_RNA (1)...(19): siRNA sense strand
gaggaacccauuuacuguu

SEQ ID NO: 899089 - RNA, 19 nt, Homo sapiens
  misc_RNA (1)...(19): siRNA sense strand
caacgagagcgaccucaug

SEQ ID NO: 899090 - RNA, 19 nt, Homo sapiens
  misc_RNA (1)...(19): siRNA sense strand
ucgacaagcugcacaaggu

SEQ ID NO: 899091 - RNA, 19 nt, Homo sapiens
  misc_RNA (1)...(19): siRNA sense strand
caagaacuucgcagaggaa

SEQ ID NO: 899092 - RNA, 19 nt, Homo sapiens
  misc_RNA (1)...(19): siRNA sense strand
agagcgaccucauguacga

SEQ ID NO: 899093 - RNA, 19 nt, Homo sapiens
  misc_RNA (1)...(19): siRNA sense strand
gcacaaggugggcaucaag

SEQ ID NO: 899094 - RNA, 19 nt, Homo sapiens
  misc_RNA (1)...(19): siRNA sense strand
gcaacuuccuggccaagcu

SEQ ID NO: 899095 - RNA, 19 nt, Homo sapiens
  misc_RNA (1)...(19): siRNA sense strand
gagaaccgcgaccacauca

SEQ ID NO: 899096 - RNA, 19 nt, Homo sapiens
  misc_RNA (1)...(19): siRNA sense strand
ggagaucgacaacuguuac

SEQ ID NO: 899097 - RNA, 19 nt, Homo sapiens
  misc_RNA (1)...(19): siRNA sense strand
gcgagaagcgcgagaucau

SEQ ID NO: 899098 - RNA, 19 nt, Homo sapiens
  misc_RNA (1)...(19): siRNA sense strand
gcagaggaacccauuuacu

SEQ ID NO: 899099 - RNA, 19 nt, Homo sapiens
  misc_RNA (1)...(19): siRNA sense strand
ugcaggagaucgacaacug

SEQ ID NO: 899100 - RNA, 19 nt, Homo sapiens
  misc_RNA (1)...(19): siRNA sense strand
gaacagcaaggcggagaag

SEQ ID NO: 899101 - RNA, 19 nt, Homo sapiens
  misc_RNA (1)...(19): siRNA sense strand
cgagagcgaccucauguac

SEQ ID NO: 899102 - RNA, 19 nt, Homo sapiens
  misc_RNA (1)...(19): siRNA sense strand
gugcugcugugcgucauga

SEQ ID NO: 899103 - RNA, 19 nt, Homo sapiens
  misc_RNA (1)...(19): siRNA sense strand
agaagagcccggagcagaa

SEQ ID NO: 899104 - RNA, 19 nt, Homo sapiens
  misc_RNA (1)...(19): siRNA sense strand
gcaggagaucgacaacugu

SEQ ID NO: 899105 - RNA, 19 nt, Homo sapiens
  misc_RNA (1)...(19): siRNA sense strand
caacuucaucuucgacaag

SEQ ID NO: 899106 - RNA, 19 nt, Homo sapiens
  misc_RNA (1)...(19): siRNA sense strand
ucuccuaccugugcaccua

SEQ ID NO: 899107 - RNA, 19 nt, Homo sapiens
  misc_RNA (1)...(19): siRNA sense strand
gcccggagcagaaccuguu

SEQ ID NO: 899108 - RNA, 19 nt, Homo sapiens
  misc_RNA (1)...(19): siRNA sense strand
ggaacccauuuacuguuac

SEQ ID NO: 899109 - RNA, 19 nt, Homo sapiens
  misc_RNA (1)...(19): siRNA sense strand
ucaaccggcuggacuucau

SEQ ID NO: 899110 - RNA, 19 nt, Homo sapiens
  misc_RNA (1)...(19): siRNA sense strand
cgcagaagcagaacgaguu

SEQ ID NO: 899111 - RNA, 19 nt, Homo sapiens
  misc_RNA (1)...(19): siRNA sense strand
agaggaacccauuuacugu

SEQ ID NO: 899112 - RNA, 19 nt, Homo sapiens
  misc_RNA (1)...(19): siRNA sense strand
ucauccaccucuucaucuu

SEQ ID NO: 899113 - RNA, 19 nt, Homo sapiens
  misc_RNA (1)...(19): siRNA sense strand
ccacgcagaagcagaacga

SEQ ID NO: 899114 - RNA, 19 nt, Homo sapiens
  misc_RNA (1)...(19): siRNA sense strand
caggagaucgacaacuguu

SEQ ID NO: 899115 - RNA, 19 nt, Homo sapiens
  misc_RNA (1)...(19): siRNA sense strand
caaccucauccaccucuuc

SEQ ID NO: 899116 - RNA, 19 nt, Homo sapiens
  misc_RNA (1)...(19): siRNA sense strand
gaagagcccggagcagaac

SEQ ID NO: 899117 - RNA, 19 nt, Homo sapiens
  misc_RNA (1)...(19): siRNA sense strand
cgcccaagaucgagaagca

SEQ ID NO: 899118 - RNA, 19 nt, Homo sapiens
  misc_RNA (1)...(19): siRNA sense strand
ucaccauccugagccgaaa

SEQ ID NO: 899119 - RNA, 19 nt, Homo sapiens
  misc_RNA (1)...(19): siRNA sense strand
gcaacugcagcgcaucauc

SEQ ID NO: 899120 - RNA, 19 nt, Homo sapiens
  misc_RNA (1)...(19): siRNA sense strand
cgagaaccgcgaccacauc

SEQ ID NO: 899121 - RNA, 19 nt, Homo sapiens
  misc_RNA (1)...(19): siRNA sense strand
gcacaggccugacggauga

SEQ ID NO: 899122 - RNA, 19 nt, Homo sapiens
  misc_RNA (1)...(19): siRNA sense strand
gcaccaagcucaagaagca

SEQ ID NO: 899123 - RNA, 19 nt, Homo sapiens
  misc_RNA (1)...(19): siRNA sense strand
gauggugucuugucuguau

SEQ ID NO: 899124 - RNA, 19 nt, Homo sapiens
  misc_RNA (1)...(19): siRNA sense strand
ugaaagcccugucuacugu

SEQ ID NO: 899125 - RNA, 19 nt, Homo sapiens
  misc_RNA (1)...(19): siRNA sense strand
ggagcacgcuuaaguccuu

SEQ ID NO: 899126 - RNA, 19 nt, Homo sapiens
  misc_RNA (1)...(19): siRNA sense strand
uccgagagcugaacaagaa

SEQ ID NO: 899127 - RNA, 19 nt, Homo sapiens
  misc_RNA (1)...(19): siRNA sense strand
guacaguggugagguguug

SEQ ID NO: 899128 - RNA, 19 nt, Homo sapiens
  misc_RNA (1)...(19): siRNA sense strand
gcuguuugaucuccagaaa

SEQ ID NO: 899129 - RNA, 19 nt, Homo sapiens
  misc_RNA (1)...(19): siRNA sense strand
ggucccaucuacucuguga

SEQ ID NO: 899130 - RNA, 19 nt, Homo sapiens
  misc_RNA (1)...(19): siRNA sense strand
gcagcucucccucaaguau

SEQ ID NO: 899131 - RNA, 19 nt, Homo sapiens
  misc_RNA (1)...(19): siRNA sense strand
ggaccgagcagcagcagau

SEQ ID NO: 899132 - RNA, 19 nt, Homo sapiens
  misc_RNA (1)...(19): siRNA sense strand
gacccuaggcuguucauuc

SEQ ID NO: 899133 - RNA, 19 nt, Homo sapiens
  misc_RNA (1)...(19): siRNA sense strand
ucaagcaaacccaggauga

SEQ ID NO: 899134 - RNA, 19 nt, Homo sapiens
  misc_RNA (1)...(19): siRNA sense strand
cagaaaagcucccagaaac

SEQ ID NO: 899135 - RNA, 19 nt, Homo sapiens
  misc_RNA (1)...(19): siRNA sense strand
gagagcugaacaagaauug

SEQ ID NO: 899136 - RNA, 19 nt, Homo sapiens
  misc_RNA (1)...(19): siRNA sense strand
ccagcagacucagcucuug

SEQ ID NO: 899137 - RNA, 19 nt, Homo sapiens
  misc_RNA (1)...(19): siRNA sense strand
caagcaaacccaggaugaa

SEQ ID NO: 899138 - RNA, 19 nt, Homo sapiens
  misc_RNA (1)...(19): siRNA sense strand
cagcacaguuuaccuucuc

SEQ ID NO: 899139 - RNA, 19 nt, Homo sapiens
  misc_RNA (1)...(19): siRNA sense strand
gcuuaaguccuucgugugu

SEQ ID NO: 899140 - RNA, 19 nt, Homo sapiens
  misc_RNA (1)...(19): siRNA sense strand
gaugaaagcccugucuacu

SEQ ID NO: 899141 - RNA, 19 nt, Homo sapiens
  misc_RNA (1)...(19): siRNA sense strand
gcagcugccucugggaaag

SEQ ID NO: 899142 - RNA, 19 nt, Homo sapiens
  misc_RNA (1)...(19): siRNA sense strand
ggaugaaagcccugucuac

SEQ ID NO: 899143 - RNA, 19 nt, Homo sapiens
  misc_RNA (1)...(19): siRNA sense strand
cugcagcucucccucaagu

SEQ ID NO: 899144 - RNA, 19 nt, Homo sapiens
  misc_RNA (1)...(19): siRNA sense strand
gcuucccgcucaaguguuc

SEQ ID NO: 899145 - RNA, 19 nt, Homo sapiens
  misc_RNA (1)...(19): siRNA sense strand
aagcaaacccaggaugaaa

SEQ ID NO: 899146 - RNA, 19 nt, Homo sapiens
  misc_RNA (1)...(19): siRNA sense strand
gacuggagcacgcuuaagu

SEQ ID NO: 899147 - RNA, 19 nt, Homo sapiens
  misc_RNA (1)...(19): siRNA sense strand
ucuacugucuggaguucaa

SEQ ID NO: 899148 - RNA, 19 nt, Homo sapiens
  misc_RNA (1)...(19): siRNA sense strand
agcagcagauggugucuug

SEQ ID NO: 899149 - RNA, 19 nt, Homo sapiens
  misc_RNA (1)...(19): siRNA sense strand
cgagagcugaacaagaauu

SEQ ID NO: 899150 - RNA, 19 nt, Homo sapiens
  misc_RNA (1)...(19): siRNA sense strand
gggacuggagcacgcuuaa

SEQ ID NO: 899151 - RNA, 19 nt, Homo sapiens
  misc_RNA (1)...(19): siRNA sense strand
gcggucccaucuacucugu

SEQ ID NO: 899152 - RNA, 19 nt, Homo sapiens
  misc_RNA (1)...(19): siRNA sense strand
gcuuccaggugcugagugu

SEQ ID NO: 899153 - RNA, 19 nt, Homo sapiens
  misc_RNA (1)...(19): siRNA sense strand
aaggugacgugcagcuguu

SEQ ID NO: 899154 - RNA, 19 nt, Homo sapiens
  misc_RNA (1)...(19): siRNA sense strand
cggaugacacccacacaga

SEQ ID NO: 899155 - RNA, 19 nt, Homo sapiens
  misc_RNA (1)...(19): siRNA sense strand
ggcagagccacgcguuuga

SEQ ID NO: 899156 - RNA, 19 nt, Homo sapiens
  misc_RNA (1)...(19): siRNA sense strand
ccagaaaagcucccagaaa

SEQ ID NO: 899157 - RNA, 19 nt, Homo sapiens
  misc_RNA (1)...(19): siRNA sense strand
cagcugagcacagaguuca

SEQ ID NO: 899158 - RNA, 19 nt, Homo sapiens
  misc_RNA (1)...(19): siRNA sense strand
acccuaggcuguucauucu

SEQ ID NO: 899159 - RNA, 19 nt, Homo sapiens
  misc_RNA (1)...(19): siRNA sense strand
gcaaacccaggaugaaagc

SEQ ID NO: 899160 - RNA, 19 nt, Homo sapiens
  misc_RNA (1)...(19): siRNA sense strand
gaucaagcaaacccaggau

SEQ ID NO: 899161 - RNA, 19 nt, Homo sapiens
  misc_RNA (1)...(19): siRNA sense strand
gcagagccacgcguuugau

SEQ ID NO: 899162 - RNA, 19 nt, Homo sapiens
  misc_RNA (1)...(19): siRNA sense strand
cagcagauggugucuuguc

SEQ ID NO: 899163 - RNA, 19 nt, Homo sapiens
  misc_RNA (1)...(19): siRNA sense strand
gaaaggagacccaaagaug

SEQ ID NO: 899164 - RNA, 19 nt, Homo sapiens
  misc_RNA (1)...(19): siRNA sense strand
gaauuaaguucagcuauug

SEQ ID NO: 899165 - RNA, 19 nt, Homo sapiens
  misc_RNA (1)...(19): siRNA sense strand
gacaaaggguuuucuagua

SEQ ID NO: 899166 - RNA, 19 nt, Homo sapiens
  misc_RNA (1)...(19): siRNA sense strand
caaagaugaccaaguguuu

SEQ ID NO: 899167 - RNA, 19 nt, Homo sapiens
  misc_RNA (1)...(19): siRNA sense strand
gggaacuacagaugaauua

SEQ ID NO: 899168 - RNA, 19 nt, Homo sapiens
  misc_RNA (1)...(19): siRNA sense strand
gaaaagggccauacauuug

SEQ ID NO: 899169 - RNA, 19 nt, Homo sapiens
  misc_RNA (1)...(19): siRNA sense strand
uaaacagacucagugacua

SEQ ID NO: 899170 - RNA, 19 nt, Homo sapiens
  misc_RNA (1)...(19): siRNA sense strand
uggguuugcucuggaauua

SEQ ID NO: 899171 - RNA, 19 nt, Homo sapiens
  misc_RNA (1)...(19): siRNA sense strand
gcucggcgcugcauuucug

SEQ ID NO: 899172 - RNA, 19 nt, Homo sapiens
  misc_RNA (1)...(19): siRNA sense strand
uaaaguauaccacguucaa

SEQ ID NO: 899173 - RNA, 19 nt, Homo sapiens
  misc_RNA (1)...(19): siRNA sense strand
ggagaaaggagacccaaag

SEQ ID NO: 899174 - RNA, 19 nt, Homo sapiens
  misc_RNA (1)...(19): siRNA sense strand
gaacuacagaugaauuaag

SEQ ID NO: 899175 - RNA, 19 nt, Homo sapiens
  misc_RNA (1)...(19): siRNA sense strand
gagaaaggagacccaaaga

SEQ ID NO: 899176 - RNA, 19 nt, Homo sapiens
  misc_RNA (1)...(19): siRNA sense strand
aaaggagacccaaagauga

SEQ ID NO: 899177 - RNA, 19 nt, Homo sapiens
  misc_RNA (1)...(19): siRNA sense strand
ggccacagccuuccucgaa

SEQ ID NO: 899178 - RNA, 19 nt, Homo sapiens
  misc_RNA (1)...(19): siRNA sense strand
gauaugcagccaugaagga

SEQ ID NO: 899179 - RNA, 19 nt, Homo sapiens
  misc_RNA (1)...(19): siRNA sense strand
acccaaagaugaccaagug

SEQ ID NO: 899180 - RNA, 19 nt, Homo sapiens
  misc_RNA (1)...(19): siRNA sense strand
ggaacuacagaugaauuaa

SEQ ID NO: 899181 - RNA, 19 nt, Homo sapiens
  misc_RNA (1)...(19): siRNA sense strand
ccaaagaugaccaaguguu

SEQ ID NO: 899182 - RNA, 19 nt, Homo sapiens
  misc_RNA (1)...(19): siRNA sense strand
cgugggaacuacagaugaa

SEQ ID NO: 899183 - RNA, 19 nt, Homo sapiens
  misc_RNA (1)...(19): siRNA sense strand
agcaguggaucgacaagua

SEQ ID NO: 899184 - RNA, 19 nt, Homo sapiens
  misc_RNA (1)...(19): siRNA sense strand
gaaaauccagugcacauug

SEQ ID NO: 899185 - RNA, 19 nt, Homo sapiens
  misc_RNA (1)...(19): siRNA sense strand
ggaggggaaucaagagaaa

SEQ ID NO: 899186 - RNA, 19 nt, Homo sapiens
  misc_RNA (1)...(19): siRNA sense strand
aaacagacucagugacuau

SEQ ID NO: 899187 - RNA, 19 nt, Homo sapiens
  misc_RNA (1)...(19): siRNA sense strand
ccgggaggcucacuuaaag

SEQ ID NO: 899188 - RNA, 19 nt, Homo sapiens
  misc_RNA (1)...(19): siRNA sense strand
aaguucagcuauuggguuu

SEQ ID NO: 899189 - RNA, 19 nt, Homo sapiens
  misc_RNA (1)...(19): siRNA sense strand
gguuugcucuggaauuagu

SEQ ID NO: 899190 - RNA, 19 nt, Homo sapiens
  misc_RNA (1)...(19): siRNA sense strand
ccagauaugcagccaugaa

SEQ ID NO: 899191 - RNA, 19 nt, Homo sapiens
  misc_RNA (1)...(19): siRNA sense strand
gccauacauuugccgaaga

SEQ ID NO: 899192 - RNA, 19 nt, Homo sapiens
  misc_RNA (1)...(19): siRNA sense strand
cuacagaugaauuaaguuc

SEQ ID NO: 899193 - RNA, 19 nt, Homo sapiens
  misc_RNA (1)...(19): siRNA sense strand
agaaaagggccauacauuu

SEQ ID NO: 899194 - RNA, 19 nt, Homo sapiens
  misc_RNA (1)...(19): siRNA sense strand
ucuucacgcuagccagaua

SEQ ID NO: 899195 - RNA, 19 nt, Homo sapiens
  misc_RNA (1)...(19): siRNA sense strand
aagaugaccaaguguuuga

SEQ ID NO: 899196 - RNA, 19 nt, Homo sapiens
  misc_RNA (1)...(19): siRNA sense strand
ccauacauuugccgaagag

SEQ ID NO: 899197 - RNA, 19 nt, Homo sapiens
  misc_RNA (1)...(19): siRNA sense strand
ggccaaguucuuaaacaga

SEQ ID NO: 899198 - RNA, 19 nt, Homo sapiens
  misc_RNA (1)...(19): siRNA sense strand
augcgaacguggccaaguu

SEQ ID NO: 899199 - RNA, 19 nt, Homo sapiens
  misc_RNA (1)...(19): siRNA sense strand
aaagaugaccaaguguuug

SEQ ID NO: 899200 - RNA, 19 nt, Homo sapiens
  misc_RNA (1)...(19): siRNA sense strand
guggccaaguucuuaaaca

SEQ ID NO: 899201 - RNA, 19 nt, Homo sapiens
  misc_RNA (1)...(19): siRNA sense strand
cagaaaagggccauacauu

SEQ ID NO: 899202 - RNA, 19 nt, Homo sapiens
  misc_RNA (1)...(19): siRNA sense strand
ggaauuagucacagaaaag

SEQ ID NO: 899203 - RNA, 19 nt, Homo sapiens
  misc_RNA (1)...(19): siRNA sense strand
gacguguggugccucuugu

SEQ ID NO: 899204 - RNA, 19 nt, Homo sapiens
  misc_RNA (1)...(19): siRNA sense strand
uuaaacagacucagugacu

SEQ ID NO: 899205 - RNA, 19 nt, Homo sapiens
  misc_RNA (1)...(19): siRNA sense strand
agaaaggagacccaaagau

SEQ ID NO: 899206 - RNA, 19 nt, Homo sapiens
  misc_RNA (1)...(19): siRNA sense strand
gcaguggaucgacaaguac

SEQ ID NO: 899207 - RNA, 19 nt, Homo sapiens
  misc_RNA (1)...(19): siRNA sense strand
ccaggauccccaagauuua

SEQ ID NO: 899208 - RNA, 19 nt, Homo sapiens
  misc_RNA (1)...(19): siRNA sense strand
ggagacaaaggguuuucua

SEQ ID NO: 899209 - RNA, 19 nt, Homo sapiens
  misc_RNA (1)...(19): siRNA sense strand
cccgggaggcucacuuaaa

SEQ ID NO: 899210 - RNA, 19 nt, Homo sapiens
  misc_RNA (1)...(19): siRNA sense strand
cgucugaccucaugagcua

SEQ ID NO: 899211 - RNA, 19 nt, Homo sapiens
  misc_RNA (1)...(19): siRNA sense strand
gaacagcuacgcauagaag

SEQ ID NO: 899212 - RNA, 19 nt, Homo sapiens
  misc_RNA (1)...(19): siRNA sense strand
gucagccacuaacaacaua

SEQ ID NO: 899213 - RNA, 19 nt, Homo sapiens
  misc_RNA (1)...(19): siRNA sense strand
gcauagaagccgggauuga

SEQ ID NO: 899214 - RNA, 19 nt, Homo sapiens
  misc_RNA (1)...(19): siRNA sense strand
gcaucaaggucuccaaagc

SEQ ID NO: 899215 - RNA, 19 nt, Homo sapiens
  misc_RNA (1)...(19): siRNA sense strand
gguggaacagcuacgcaua

SEQ ID NO: 899216 - RNA, 19 nt, Homo sapiens
  misc_RNA (1)...(19): siRNA sense strand
gagcuacugugagcaacau

SEQ ID NO: 899217 - RNA, 19 nt, Homo sapiens
  misc_RNA (1)...(19): siRNA sense strand
uggaacagcuacgcauaga

SEQ ID NO: 899218 - RNA, 19 nt, Homo sapiens
  misc_RNA (1)...(19): siRNA sense strand
cccggaagcugguggaaca

SEQ ID NO: 899219 - RNA, 19 nt, Homo sapiens
  misc_RNA (1)...(19): siRNA sense strand
gcgcaucaaggucuccaaa

SEQ ID NO: 899220 - RNA, 19 nt, Homo sapiens
  misc_RNA (1)...(19): siRNA sense strand
ggaacagcuacgcauagaa

SEQ ID NO: 899221 - RNA, 19 nt, Homo sapiens
  misc_RNA (1)...(19): siRNA sense strand
cauagaagccgggauugag

SEQ ID NO: 899222 - RNA, 19 nt, Homo sapiens
  misc_RNA (1)...(19): siRNA sense strand
acgcauagaagccgggauu

SEQ ID NO: 899223 - RNA, 19 nt, Homo sapiens
  misc_RNA (1)...(19): siRNA sense strand
caugagcuacugugagcaa

SEQ ID NO: 899224 - RNA, 19 nt, Homo sapiens
  misc_RNA (1)...(19): siRNA sense strand
gaggagagguacuuugaug

SEQ ID NO: 899225 - RNA, 19 nt, Homo sapiens
  misc_RNA (1)...(19): siRNA sense strand
ggaagcagcugaggcaaca

SEQ ID NO: 899226 - RNA, 19 nt, Homo sapiens
  misc_RNA (1)...(19): siRNA sense strand
ugacagagcaugagaaagu

SEQ ID NO: 899227 - RNA, 19 nt, Homo sapiens
  misc_RNA (1)...(19): siRNA sense strand
caccagcgcuuccuagaug

SEQ ID NO: 899228 - RNA, 19 nt, Homo sapiens
  misc_RNA (1)...(19): siRNA sense strand
ggaggacagugacgaggaa

SEQ ID NO: 899229 - RNA, 19 nt, Homo sapiens
  misc_RNA (1)...(19): siRNA sense strand
guacuuugaugaggaagaa

SEQ ID NO: 899230 - RNA, 19 nt, Homo sapiens
  misc_RNA (1)...(19): siRNA sense strand
gggaugaggaggagaggua

SEQ ID NO: 899231 - RNA, 19 nt, Homo sapiens
  misc_RNA (1)...(19): siRNA sense strand
gcgaguacuucagugauga

SEQ ID NO: 899232 - RNA, 19 nt, Homo sapiens
  misc_RNA (1)...(19): siRNA sense strand
gagguacuuugaugaggaa

SEQ ID NO: 899233 - RNA, 19 nt, Homo sapiens
  misc_RNA (1)...(19): siRNA sense strand
ggcgaguacuucagugaug

SEQ ID NO: 899234 - RNA, 19 nt, Homo sapiens
  misc_RNA (1)...(19): siRNA sense strand
caguggcccuggacaguga

SEQ ID NO: 899235 - RNA, 19 nt, Homo sapiens
  misc_RNA (1)...(19): siRNA sense strand
gacagagcaugagaaagug

SEQ ID NO: 899236 - RNA, 19 nt, Homo sapiens
  misc_RNA (1)...(19): siRNA sense strand
cgaccaccgugcagacuuc

SEQ ID NO: 899237 - RNA, 19 nt, Homo sapiens
  misc_RNA (1)...(19): siRNA sense strand
ggagagguacuuugaugag

SEQ ID NO: 899238 - RNA, 19 nt, Homo sapiens
  misc_RNA (1)...(19): siRNA sense strand
gcaccagcgcuuccuagau

SEQ ID NO: 899239 - RNA, 19 nt, Homo sapiens
  misc_RNA (1)...(19): siRNA sense strand
gaggaggagagguacuuug

SEQ ID NO: 899240 - RNA, 19 nt, Homo sapiens
  misc_RNA (1)...(19): siRNA sense strand
aagaggaggaggacaguga

SEQ ID NO: 899241 - RNA, 19 nt, Homo sapiens
  misc_RNA (1)...(19): siRNA sense strand
cggcgaaggaacccgauaa

SEQ ID NO: 899242 - RNA, 19 nt, Homo sapiens
  misc_RNA (1)...(19): siRNA sense strand
gcaaggacggggacuuuga

SEQ ID NO: 899243 - RNA, 19 nt, Homo sapiens
  misc_RNA (1)...(19): siRNA sense strand
ggaggagagguacuuugau

SEQ ID NO: 899244 - RNA, 19 nt, Homo sapiens
  misc_RNA (1)...(19): siRNA sense strand
aggaggagagguacuuuga

SEQ ID NO: 899245 - RNA, 19 nt, Homo sapiens
  misc_RNA (1)...(19): siRNA sense strand
cgauaagggcugcauagag

SEQ ID NO: 899246 - RNA, 19 nt, Homo sapiens
  misc_RNA (1)...(19): siRNA sense strand
ggaagaggaggaggacagu

SEQ ID NO: 899247 - RNA, 19 nt, Homo sapiens
  misc_RNA (1)...(19): siRNA sense strand
gacaccagucccaucuaaa

SEQ ID NO: 899248 - RNA, 19 nt, Homo sapiens
  misc_RNA (1)...(19): siRNA sense strand
ugaggaagaaccugaggau

SEQ ID NO: 899249 - RNA, 19 nt, Homo sapiens
  misc_RNA (1)...(19): siRNA sense strand
gcaguacaucgggcaguau

SEQ ID NO: 899250 - RNA, 19 nt, Homo sapiens
  misc_RNA (1)...(19): siRNA sense strand
ggacagugacgaggaagac

SEQ ID NO: 899251 - RNA, 19 nt, Homo sapiens
  misc_RNA (1)...(19): siRNA sense strand
aaacagagaucuaccagua

SEQ ID NO: 899252 - RNA, 19 nt, Homo sapiens
  misc_RNA (1)...(19): siRNA sense strand
gaugugaacuuccaaagga

SEQ ID NO: 899253 - RNA, 19 nt, Homo sapiens
  misc_RNA (1)...(19): siRNA sense strand
ccaaggcacuuucuauuga

SEQ ID NO: 899254 - RNA, 19 nt, Homo sapiens
  misc_RNA (1)...(19): siRNA sense strand
gggcaacuuuccacacuua

SEQ ID NO: 899255 - RNA, 19 nt, Homo sapiens
  misc_RNA (1)...(19): siRNA sense strand
gaacugcaaacucaugaua

SEQ ID NO: 899256 - RNA, 19 nt, Homo sapiens
  misc_RNA (1)...(19): siRNA sense strand
gcaaacucaugauacauug

SEQ ID NO: 899257 - RNA, 19 nt, Homo sapiens
  misc_RNA (1)...(19): siRNA sense strand
gaaaguucccgacuacaaa

SEQ ID NO: 899258 - RNA, 19 nt, Homo sapiens
  misc_RNA (1)...(19): siRNA sense strand
ggaugaaaguucccgacua

SEQ ID NO: 899259 - RNA, 19 nt, Homo sapiens
  misc_RNA (1)...(19): siRNA sense strand
gaaguugccaggauuagaa

SEQ ID NO: 899260 - RNA, 19 nt, Homo sapiens
  misc_RNA (1)...(19): siRNA sense strand
auacagaucuugcuuucaa

SEQ ID NO: 899261 - RNA, 19 nt, Homo sapiens
  misc_RNA (1)...(19): siRNA sense strand
caauacagaucuugcuuuc

SEQ ID NO: 899262 - RNA, 19 nt, Homo sapiens
  misc_RNA (1)...(19): siRNA sense strand
gaugaaaguucccgacuac

SEQ ID NO: 899263 - RNA, 19 nt, Homo sapiens
  misc_RNA (1)...(19): siRNA sense strand
ccagugauguggaaagaga

SEQ ID NO: 899264 - RNA, 19 nt, Homo sapiens
  misc_RNA (1)...(19): siRNA sense strand
gcagaaguugccaggauua

SEQ ID NO: 899265 - RNA, 19 nt, Homo sapiens
  misc_RNA (1)...(19): siRNA sense strand
gaaacuugaugugaacuuc

SEQ ID NO: 899266 - RNA, 19 nt, Homo sapiens
  misc_RNA (1)...(19): siRNA sense strand
caggagggauucuggugua

SEQ ID NO: 899267 - RNA, 19 nt, Homo sapiens
  misc_RNA (1)...(19): siRNA sense strand
gaaagaagccaaggagaag

SEQ ID NO: 899268 - RNA, 19 nt, Homo sapiens
  misc_RNA (1)...(19): siRNA sense strand
acacuuaccugaaccaucu

SEQ ID NO: 899269 - RNA, 19 nt, Homo sapiens
  misc_RNA (1)...(19): siRNA sense strand
cugagaacgucaacuauga

SEQ ID NO: 899270 - RNA, 19 nt, Homo sapiens
  misc_RNA (1)...(19): siRNA sense strand
ugcagacgcucuuguguuu

SEQ ID NO: 899271 - RNA, 19 nt, Homo sapiens
  misc_RNA (1)...(19): siRNA sense strand
ucacaaaccaggaacauuc

SEQ ID NO: 899272 - RNA, 19 nt, Homo sapiens
  misc_RNA (1)...(19): siRNA sense strand
caaggcacuuucuauugaa

SEQ ID NO: 899273 - RNA, 19 nt, Homo sapiens
  misc_RNA (1)...(19): siRNA sense strand
ugaggaagaucuuuguauc

SEQ ID NO: 899274 - RNA, 19 nt, Homo sapiens
  misc_RNA (1)...(19): siRNA sense strand
cgacuccgauggaacaguu

SEQ ID NO: 899275 - RNA, 19 nt, Homo sapiens
  misc_RNA (1)...(19): siRNA sense strand
ggacauggucaguuccaaa

SEQ ID NO: 899276 - RNA, 19 nt, Homo sapiens
  misc_RNA (1)...(19): siRNA sense strand
cagcagaaguugccaggau

SEQ ID NO: 899277 - RNA, 19 nt, Homo sapiens
  misc_RNA (1)...(19): siRNA sense strand
ggacucgcaguacuugaua

SEQ ID NO: 899278 - RNA, 19 nt, Homo sapiens
  misc_RNA (1)...(19): siRNA sense strand
gaucauggaaugcgacaga

SEQ ID NO: 899279 - RNA, 19 nt, Homo sapiens
  misc_RNA (1)...(19): siRNA sense strand
ggagugaagucucgaaucc

SEQ ID NO: 899280 - RNA, 19 nt, Homo sapiens
  misc_RNA (1)...(19): siRNA sense strand
acagagaucuaccaguaug

SEQ ID NO: 899281 - RNA, 19 nt, Homo sapiens
  misc_RNA (1)...(19): siRNA sense strand
agaauuugguggugcauau

SEQ ID NO: 899282 - RNA, 19 nt, Homo sapiens
  misc_RNA (1)...(19): siRNA sense strand
guuccaaaguucaugaaga

SEQ ID NO: 899283 - RNA, 19 nt, Homo sapiens
  misc_RNA (1)...(19): siRNA sense strand
ccagagauguccucaacca

SEQ ID NO: 899284 - RNA, 19 nt, Homo sapiens
  misc_RNA (1)...(19): siRNA sense strand
caaaguucaugaagaggau

SEQ ID NO: 899285 - RNA, 19 nt, Homo sapiens
  misc_RNA (1)...(19): siRNA sense strand
gaugacugguccaaagaug

SEQ ID NO: 899286 - RNA, 19 nt, Homo sapiens
  misc_RNA (1)...(19): siRNA sense strand
ucacuuggaugacauucug

SEQ ID NO: 899287 - RNA, 19 nt, Homo sapiens
  misc_RNA (1)...(19): siRNA sense strand
ggaagguuguggaaacucu

SEQ ID NO: 899288 - RNA, 19 nt, Homo sapiens
  misc_RNA (1)...(19): siRNA sense strand
cauggucaguuccaaaguu

SEQ ID NO: 899289 - RNA, 19 nt, Homo sapiens
  misc_RNA (1)...(19): siRNA sense strand
gggcuagggccaaaucauu

SEQ ID NO: 899290 - RNA, 19 nt, Homo sapiens
  misc_RNA (1)...(19): siRNA sense strand
agaaagaagccaaggagaa

SEQ ID NO: 899291 - RNA, 19 nt, Homo sapiens
  misc_RNA (1)...(19): siRNA sense strand
ugccaacccuggaagaauu

SEQ ID NO: 899292 - RNA, 19 nt, Homo sapiens
  misc_RNA (1)...(19): siRNA sense strand
aaaaggaccucaacgagaa

SEQ ID NO: 899293 - RNA, 19 nt, Homo sapiens
  misc_RNA (1)...(19): siRNA sense strand
gaacgucaacuaugaagac

SEQ ID NO: 899294 - RNA, 19 nt, Homo sapiens
  misc_RNA (1)...(19): siRNA sense strand
uccaagagguagucgauga

SEQ ID NO: 899295 - RNA, 19 nt, Homo sapiens
  misc_RNA (1)...(19): siRNA sense strand
ggccagugcuguacagaca

SEQ ID NO: 899296 - RNA, 19 nt, Homo sapiens
  misc_RNA (1)...(19): siRNA sense strand
gaggaagaucuuuguauca

SEQ ID NO: 899297 - RNA, 19 nt, Homo sapiens
  misc_RNA (1)...(19): siRNA sense strand
gcugagggcccagaaacua

SEQ ID NO: 899298 - RNA, 19 nt, Homo sapiens
  misc_RNA (1)...(19): siRNA sense strand
ccaaauaccaaauggagau

SEQ ID NO: 899299 - RNA, 19 nt, Homo sapiens
  misc_RNA (1)...(19): siRNA sense strand
cuuaugauguggcggauau

SEQ ID NO: 899300 - RNA, 19 nt, Homo sapiens
  misc_RNA (1)...(19): siRNA sense strand
ccaaaugaaugaaaacuuc

SEQ ID NO: 899301 - RNA, 19 nt, Homo sapiens
  misc_RNA (1)...(19): siRNA sense strand
ugagauaucuacgcagcaa

SEQ ID NO: 899302 - RNA, 19 nt, Homo sapiens
  misc_RNA (1)...(19): siRNA sense strand
ccugaggucugcuccauuc

SEQ ID NO: 899303 - RNA, 19 nt, Homo sapiens
  misc_RNA (1)...(19): siRNA sense strand
ugccugaacugcaaacuca

SEQ ID NO: 899304 - RNA, 19 nt, Homo sapiens
  misc_RNA (1)...(19): siRNA sense strand
acucacaucugcaggauag

SEQ ID NO: 899305 - RNA, 19 nt, Homo sapiens
  misc_RNA (1)...(19): siRNA sense strand
gcacggacaauacagaucu

SEQ ID NO: 899306 - RNA, 19 nt, Homo sapiens
  misc_RNA (1)...(19): siRNA sense strand
agaccuuucuccauaucua

SEQ ID NO: 899307 - RNA, 19 nt, Homo sapiens
  misc_RNA (1)...(19): siRNA sense strand
gaucagugggcccauguug

SEQ ID NO: 899308 - RNA, 19 nt, Homo sapiens
  misc_RNA (1)...(19): siRNA sense strand
gaggucugcuccauucaca

SEQ ID NO: 899309 - RNA, 19 nt, Homo sapiens
  misc_RNA (1)...(19): siRNA sense strand
ccacgagucauacagaaga

SEQ ID NO: 899310 - RNA, 19 nt, Homo sapiens
  misc_RNA (1)...(19): siRNA sense strand
ucaacuugguggaagagaa

SEQ ID NO: 899311 - RNA, 19 nt, Homo sapiens
  misc_RNA (1)...(19): siRNA sense strand
gaugaggaagaucuuugua

SEQ ID NO: 899312 - RNA, 19 nt, Homo sapiens
  misc_RNA (1)...(19): siRNA sense strand
ugaaaguucccgacuacaa

SEQ ID NO: 899313 - RNA, 19 nt, Homo sapiens
  misc_RNA (1)...(19): siRNA sense strand
ggacgacacccagugaugu

SEQ ID NO: 899314 - RNA, 19 nt, Homo sapiens
  misc_RNA (1)...(19): siRNA sense strand
ggacagccccugccucaaa

SEQ ID NO: 899315 - RNA, 19 nt, Homo sapiens
  misc_RNA (1)...(19): siRNA sense strand
ugacgacuccgaugaggaa

SEQ ID NO: 899316 - RNA, 19 nt, Homo sapiens
  misc_RNA (1)...(19): siRNA sense strand
aaggagaaguucaaaggau

SEQ ID NO: 899317 - RNA, 19 nt, Homo sapiens
  misc_RNA (1)...(19): siRNA sense strand
ggaacacgaccagcaguga

SEQ ID NO: 899318 - RNA, 19 nt, Homo sapiens
  misc_RNA (1)...(19): siRNA sense strand
uggcggauauggugaaaca

SEQ ID NO: 899319 - RNA, 19 nt, Homo sapiens
  misc_RNA (1)...(19): siRNA sense strand
ccagucugcuuaugaugug

SEQ ID NO: 899320 - RNA, 19 nt, Homo sapiens
  misc_RNA (1)...(19): siRNA sense strand
guacuuggaggaccuagau

SEQ ID NO: 899321 - RNA, 19 nt, Homo sapiens
  misc_RNA (1)...(19): siRNA sense strand
ccagagacuuugugguucu

SEQ ID NO: 899322 - RNA, 19 nt, Homo sapiens
  misc_RNA (1)...(19): siRNA sense strand
cggauauggugaaacaguu

SEQ ID NO: 899323 - RNA, 19 nt, Homo sapiens
  misc_RNA (1)...(19): siRNA sense strand
ccaaggagaaguucaaagg

SEQ ID NO: 899324 - RNA, 19 nt, Homo sapiens
  misc_RNA (1)...(19): siRNA sense strand
gcucuuguguuuccugaac

SEQ ID NO: 899325 - RNA, 19 nt, Homo sapiens
  misc_RNA (1)...(19): siRNA sense strand
gaaacucuagacaggcaaa

SEQ ID NO: 899326 - RNA, 19 nt, Homo sapiens
  misc_RNA (1)...(19): siRNA sense strand
gagucauacagaagaaaua

SEQ ID NO: 899327 - RNA, 19 nt, Homo sapiens
  misc_RNA (1)...(19): siRNA sense strand
caacuugguggaagagaau

SEQ ID NO: 899328 - RNA, 19 nt, Homo sapiens
  misc_RNA (1)...(19): siRNA sense strand
gcaaaucaggagugaaguc

SEQ ID NO: 899329 - RNA, 19 nt, Homo sapiens
  misc_RNA (1)...(19): siRNA sense strand
ggaccucccugagccucuu

SEQ ID NO: 899330 - RNA, 19 nt, Homo sapiens
  misc_RNA (1)...(19): siRNA sense strand
cgacuccgaugaggaagau

SEQ ID NO: 899331 - RNA, 19 nt, Homo sapiens
  misc_RNA (1)...(19): siRNA sense strand
gcaguggaagguuguggaa

SEQ ID NO: 899332 - RNA, 19 nt, Homo sapiens
  misc_RNA (1)...(19): siRNA sense strand
cauaguccacguccaaaga

SEQ ID NO: 899333 - RNA, 19 nt, Homo sapiens
  misc_RNA (1)...(19): siRNA sense strand
gcauccaaauaccaaaugg

SEQ ID NO: 899334 - RNA, 19 nt, Homo sapiens
  misc_RNA (1)...(19): siRNA sense strand
ccagaaugguacagcaaag

SEQ ID NO: 899335 - RNA, 19 nt, Homo sapiens
  misc_RNA (1)...(19): siRNA sense strand
caaggagaaguucaaagga

SEQ ID NO: 899336 - RNA, 19 nt, Homo sapiens
  misc_RNA (1)...(19): siRNA sense strand
uccagggccuccagaaaga

SEQ ID NO: 899337 - RNA, 19 nt, Homo sapiens
  misc_RNA (1)...(19): siRNA sense strand
caggagaucuuuuggacuu

SEQ ID NO: 899338 - RNA, 19 nt, Homo sapiens
  misc_RNA (1)...(19): siRNA sense strand
ggaccaaagccguaugcau

SEQ ID NO: 899339 - RNA, 19 nt, Homo sapiens
  misc_RNA (1)...(19): siRNA sense strand
gaagguuguggaaacucua

SEQ ID NO: 899340 - RNA, 19 nt, Homo sapiens
  misc_RNA (1)...(19): siRNA sense strand
ucagaucaccuuagauuuu

SEQ ID NO: 899341 - RNA, 19 nt, Homo sapiens
  misc_RNA (1)...(19): siRNA sense strand
gaauuugguggugcauauu

SEQ ID NO: 899342 - RNA, 19 nt, Homo sapiens
  misc_RNA (1)...(19): siRNA sense strand
acaauacagaucuugcuuu

SEQ ID NO: 899343 - RNA, 19 nt, Homo sapiens
  misc_RNA (1)...(19): siRNA sense strand
gacaauacagaucuugcuu

SEQ ID NO: 899344 - RNA, 19 nt, Homo sapiens
  misc_RNA (1)...(19): siRNA sense strand
aaucagaugacgcccauga

SEQ ID NO: 899345 - RNA, 19 nt, Homo sapiens
  misc_RNA (1)...(19): siRNA sense strand
aaugaaaacuucccugaga

SEQ ID NO: 899346 - RNA, 19 nt, Homo sapiens
  misc_RNA (1)...(19): siRNA sense strand
gcccuucgccaaaugaaug

SEQ ID NO: 899347 - RNA, 19 nt, Homo sapiens
  misc_RNA (1)...(19): siRNA sense strand
gcaagcacugagauaucua

SEQ ID NO: 899348 - RNA, 19 nt, Homo sapiens
  misc_RNA (1)...(19): siRNA sense strand
ugaaacgcauggaaacacu

SEQ ID NO: 899349 - RNA, 19 nt, Homo sapiens
  misc_RNA (1)...(19): siRNA sense strand
gauguggaaagagauguaa

SEQ ID NO: 899350 - RNA, 19 nt, Homo sapiens
  misc_RNA (1)...(19): siRNA sense strand
gucgaugacugguccaaag

SEQ ID NO: 899351 - RNA, 19 nt, Homo sapiens
  misc_RNA (1)...(19): siRNA sense strand
acaaugaacuguggaagaa

SEQ ID NO: 899352 - RNA, 19 nt, Homo sapiens
  misc_RNA (1)...(19): siRNA sense strand
guaagaagaaggaguaugu

SEQ ID NO: 899353 - RNA, 19 nt, Homo sapiens
  misc_RNA (1)...(19): siRNA sense strand
caggagagccgucguaaga

SEQ ID NO: 899354 - RNA, 19 nt, Homo sapiens
  misc_RNA (1)...(19): siRNA sense strand
ggagaaggccuugaagaga

SEQ ID NO: 899355 - RNA, 19 nt, Homo sapiens
  misc_RNA (1)...(19): siRNA sense strand
ggagagccgucguaagaag

SEQ ID NO: 899356 - RNA, 19 nt, Homo sapiens
  misc_RNA (1)...(19): siRNA sense strand
gaagagaguccggaggaaa

SEQ ID NO: 899357 - RNA, 19 nt, Homo sapiens
  misc_RNA (1)...(19): siRNA sense strand
gaaggaguauguggagugu

SEQ ID NO: 899358 - RNA, 19 nt, Homo sapiens
  misc_RNA (1)...(19): siRNA sense strand
gggaccaccugcagcauga

SEQ ID NO: 899359 - RNA, 19 nt, Homo sapiens
  misc_RNA (1)...(19): siRNA sense strand
aaaagaagguggagacauu

SEQ ID NO: 899360 - RNA, 19 nt, Homo sapiens
  misc_RNA (1)...(19): siRNA sense strand
gagaagcggacccugauug

SEQ ID NO: 899361 - RNA, 19 nt, Homo sapiens
  misc_RNA (1)...(19): siRNA sense strand
ugacucagcugccagugau

SEQ ID NO: 899362 - RNA, 19 nt, Homo sapiens
  misc_RNA (1)...(19): siRNA sense strand
ggaggaaaaucaagaacaa

SEQ ID NO: 899363 - RNA, 19 nt, Homo sapiens
  misc_RNA (1)...(19): siRNA sense strand
aacaagaucuccagaccuu

SEQ ID NO: 899364 - RNA, 19 nt, Homo sapiens
  misc_RNA (1)...(19): siRNA sense strand
cuccagaccuuacaagaug

SEQ ID NO: 899365 - RNA, 19 nt, Homo sapiens
  misc_RNA (1)...(19): siRNA sense strand
ccucaacaaugcgcacuuu

SEQ ID NO: 899366 - RNA, 19 nt, Homo sapiens
  misc_RNA (1)...(19): siRNA sense strand
uauguggagugucuagaaa

SEQ ID NO: 899367 - RNA, 19 nt, Homo sapiens
  misc_RNA (1)...(19): siRNA sense strand
gaggagaaggccuugaaga

SEQ ID NO: 899368 - RNA, 19 nt, Homo sapiens
  misc_RNA (1)...(19): siRNA sense strand
ggccacugcuccugacaga

SEQ ID NO: 899369 - RNA, 19 nt, Homo sapiens
  misc_RNA (1)...(19): siRNA sense strand
uuacaucugagaacaauga

SEQ ID NO: 899370 - RNA, 19 nt, Homo sapiens
  misc_RNA (1)...(19): siRNA sense strand
guggagacauuuacaucug

SEQ ID NO: 899371 - RNA, 19 nt, Homo sapiens
  misc_RNA (1)...(19): siRNA sense strand
ggacaccacccaagaugca

SEQ ID NO: 899372 - RNA, 19 nt, Homo sapiens
  misc_RNA (1)...(19): siRNA sense strand
cggaggaccuggugcagau

SEQ ID NO: 899373 - RNA, 19 nt, Homo sapiens
  misc_RNA (1)...(19): siRNA sense strand
cccgaagccuccuauucua

SEQ ID NO: 899374 - RNA, 19 nt, Homo sapiens
  misc_RNA (1)...(19): siRNA sense strand
gaggacaccacccaagaug

SEQ ID NO: 899375 - RNA, 19 nt, Homo sapiens
  misc_RNA (1)...(19): siRNA sense strand
cggagaacauggaggacuu

SEQ ID NO: 899376 - RNA, 19 nt, Homo sapiens
  misc_RNA (1)...(19): siRNA sense strand
gaagguggagacauuuaca

SEQ ID NO: 899377 - RNA, 19 nt, Homo sapiens
  misc_RNA (1)...(19): siRNA sense strand
uggagacauuuacaucuga

SEQ ID NO: 899378 - RNA, 19 nt, Homo sapiens
  misc_RNA (1)...(19): siRNA sense strand
gagcaccuggaccacuuua

SEQ ID NO: 899379 - RNA, 19 nt, Homo sapiens
  misc_RNA (1)...(19): siRNA sense strand
ggaggacaccacccaagau

SEQ ID NO: 899380 - RNA, 19 nt, Homo sapiens
  misc_RNA (1)...(19): siRNA sense strand
caaacugugcuccaucaug

SEQ ID NO: 899381 - RNA, 19 nt, Homo sapiens
  misc_RNA (1)...(19): siRNA sense strand
ggagaagcggacccugauu

SEQ ID NO: 899382 - RNA, 19 nt, Homo sapiens
  misc_RNA (1)...(19): siRNA sense strand
gaagccuccuauucuacga

SEQ ID NO: 899383 - RNA, 19 nt, Homo sapiens
  misc_RNA (1)...(19): siRNA sense strand
guauguggagugucuagaa

SEQ ID NO: 899384 - RNA, 19 nt, Homo sapiens
  misc_RNA (1)...(19): siRNA sense strand
ugaagagaguccggaggaa

SEQ ID NO: 899385 - RNA, 19 nt, Homo sapiens
  misc_RNA (1)...(19): siRNA sense strand
ccaccaaguaccugaguga

SEQ ID NO: 899386 - RNA, 19 nt, Homo sapiens
  misc_RNA (1)...(19): siRNA sense strand
gguggcagccuugugcuuu

SEQ ID NO: 899387 - RNA, 19 nt, Homo sapiens
  misc_RNA (1)...(19): siRNA sense strand
aagaagguggagacauuua

SEQ ID NO: 899388 - RNA, 19 nt, Homo sapiens
  misc_RNA (1)...(19): siRNA sense strand
uucagcagcuucuuugaug

SEQ ID NO: 899389 - RNA, 19 nt, Homo sapiens
  misc_RNA (1)...(19): siRNA sense strand
ucagcagcuucuuugauga

SEQ ID NO: 899390 - RNA, 19 nt, Homo sapiens
  misc_RNA (1)...(19): siRNA sense strand
gagagccgucguaagaaga

SEQ ID NO: 899391 - RNA, 19 nt, Homo sapiens
  misc_RNA (1)...(19): siRNA sense strand
caacaccaccaucaaacuc

SEQ ID NO: 899392 - RNA, 19 nt, Homo sapiens
  misc_RNA (1)...(19): siRNA sense strand
ugcagaaacuccagacucu

SEQ ID NO: 899393 - RNA, 19 nt, Homo sapiens
  misc_RNA (1)...(19): siRNA sense strand
caugggcgcugggacacaa

SEQ ID NO: 899394 - RNA, 19 nt, Homo sapiens
  misc_RNA (1)...(19): siRNA sense strand
cccacgagaccaccaagua

SEQ ID NO: 899395 - RNA, 19 nt, Homo sapiens
  misc_RNA (1)...(19): siRNA sense strand
guggcagccuugugcuuug

SEQ ID NO: 899396 - RNA, 19 nt, Homo sapiens
  misc_RNA (1)...(19): siRNA sense strand
caagaucuccagaccuuac

SEQ ID NO: 899397 - RNA, 19 nt, Homo sapiens
  misc_RNA (1)...(19): siRNA sense strand
aaagaagguggagacauuu

SEQ ID NO: 899398 - RNA, 19 nt, Homo sapiens
  misc_RNA (1)...(19): siRNA sense strand
gucguaagaagaaggagua

SEQ ID NO: 899399 - RNA, 19 nt, Homo sapiens
  misc_RNA (1)...(19): siRNA sense strand
ucaccaaagccgaggagaa

SEQ ID NO: 899400 - RNA, 19 nt, Homo sapiens
  misc_RNA (1)...(19): siRNA sense strand
gcucccagacugugaagga

SEQ ID NO: 899401 - RNA, 19 nt, Homo sapiens
  misc_RNA (1)...(19): siRNA sense strand
gcagccuugugcuuuguuc

SEQ ID NO: 899402 - RNA, 19 nt, Homo sapiens
  misc_RNA (1)...(19): siRNA sense strand
uggagacccuggagaaugc

SEQ ID NO: 899403 - RNA, 19 nt, Homo sapiens
  misc_RNA (1)...(19): siRNA sense strand
cccagacugugaaggaaga

SEQ ID NO: 899404 - RNA, 19 nt, Homo sapiens
  misc_RNA (1)...(19): siRNA sense strand
cugagcaccuggaccacuu

SEQ ID NO: 899405 - RNA, 19 nt, Homo sapiens
  misc_RNA (1)...(19): siRNA sense strand
cuacacggccagccagaug

SEQ ID NO: 899406 - RNA, 19 nt, Homo sapiens
  misc_RNA (1)...(19): siRNA sense strand
caccaaagccgaggagaag

SEQ ID NO: 899407 - RNA, 19 nt, Homo sapiens
  misc_RNA (1)...(19): siRNA sense strand
gcgcugggacacaaacugu

SEQ ID NO: 899408 - RNA, 19 nt, Homo sapiens
  misc_RNA (1)...(19): siRNA sense strand
gcaggcuuaugggaagaug

SEQ ID NO: 899409 - RNA, 19 nt, Homo sapiens
  misc_RNA (1)...(19): siRNA sense strand
guggagacccuggagaaug

SEQ ID NO: 899410 - RNA, 19 nt, Homo sapiens
  misc_RNA (1)...(19): siRNA sense strand
caucugagaacaaugaacu

SEQ ID NO: 899411 - RNA, 19 nt, Homo sapiens
  misc_RNA (1)...(19): siRNA sense strand
agaaggccuugaagagagu

SEQ ID NO: 899412 - RNA, 19 nt, Homo sapiens
  misc_RNA (1)...(19): siRNA sense strand
ucacugccccucacaaauu

SEQ ID NO: 899413 - RNA, 19 nt, Homo sapiens
  misc_RNA (1)...(19): siRNA sense strand
gggcaggcuuaugggaaga

SEQ ID NO: 899414 - RNA, 19 nt, Homo sapiens
  misc_RNA (1)...(19): siRNA sense strand
guucagcagcuucuuugau

SEQ ID NO: 899415 - RNA, 19 nt, Homo sapiens
  misc_RNA (1)...(19): siRNA sense strand
aggaguauguggagugucu

SEQ ID NO: 899416 - RNA, 19 nt, Homo sapiens
  misc_RNA (1)...(19): siRNA sense strand
ccgaggagaaggccuugaa

SEQ ID NO: 899417 - RNA, 19 nt, Homo sapiens
  misc_RNA (1)...(19): siRNA sense strand
aaccaguuccucaaaguga

SEQ ID NO: 899418 - RNA, 19 nt, Homo sapiens
  misc_RNA (1)...(19): siRNA sense strand
ccacgagaccaccaaguac

SEQ ID NO: 899419 - RNA, 19 nt, Homo sapiens
  misc_RNA (1)...(19): siRNA sense strand
acauuuacaucugagaaca

SEQ ID NO: 899420 - RNA, 19 nt, Homo sapiens
  misc_RNA (1)...(19): siRNA sense strand
gaaaaucaagaacaagauc

SEQ ID NO: 899421 - RNA, 19 nt, Homo sapiens
  misc_RNA (1)...(19): siRNA sense strand
acccugugcuggaugagaa

SEQ ID NO: 899422 - RNA, 19 nt, Homo sapiens
  misc_RNA (1)...(19): siRNA sense strand
caacaaugcgcacuuuccu

SEQ ID NO: 899423 - RNA, 19 nt, Homo sapiens
  misc_RNA (1)...(19): siRNA sense strand
agacauuuacaucugagaa

SEQ ID NO: 899424 - RNA, 19 nt, Homo sapiens
  misc_RNA (1)...(19): siRNA sense strand
gguggucucuuaccuguua

SEQ ID NO: 899425 - RNA, 19 nt, Homo sapiens
  misc_RNA (1)...(19): siRNA sense strand
ccaauacucuguuaaggaa

SEQ ID NO: 899426 - RNA, 19 nt, Homo sapiens
  misc_RNA (1)...(19): siRNA sense strand
gaaaggccuugcuauaaca

SEQ ID NO: 899427 - RNA, 19 nt, Homo sapiens
  misc_RNA (1)...(19): siRNA sense strand
ggagagaaaucaggaagau

SEQ ID NO: 899428 - RNA, 19 nt, Homo sapiens
  misc_RNA (1)...(19): siRNA sense strand
gcugugagcuggguguuaa

SEQ ID NO: 899429 - RNA, 19 nt, Homo sapiens
  misc_RNA (1)...(19): siRNA sense strand
ggagaagaucagaaaguua

SEQ ID NO: 899430 - RNA, 19 nt, Homo sapiens
  misc_RNA (1)...(19): siRNA sense strand
gaaaugccaguccaguuaa

SEQ ID NO: 899431 - RNA, 19 nt, Homo sapiens
  misc_RNA (1)...(19): siRNA sense strand
agaaaugccaguccaguua

SEQ ID NO: 899432 - RNA, 19 nt, Homo sapiens
  misc_RNA (1)...(19): siRNA sense strand
agaagaagaugaugaugau

SEQ ID NO: 899433 - RNA, 19 nt, Homo sapiens
  misc_RNA (1)...(19): siRNA sense strand
gacaggagcucaccuacca

SEQ ID NO: 899434 - RNA, 19 nt, Homo sapiens
  misc_RNA (1)...(19): siRNA sense strand
ggaagaagaagaugaugau

SEQ ID NO: 899435 - RNA, 19 nt, Homo sapiens
  misc_RNA (1)...(19): siRNA sense strand
gaagaaggagucagaacug

SEQ ID NO: 899436 - RNA, 19 nt, Homo sapiens
  misc_RNA (1)...(19): siRNA sense strand
gaugugaacucccaaaaug

SEQ ID NO: 899437 - RNA, 19 nt, Homo sapiens
  misc_RNA (1)...(19): siRNA sense strand
ugaaaggccuugcuauaac

SEQ ID NO: 899438 - RNA, 19 nt, Homo sapiens
  misc_RNA (1)...(19): siRNA sense strand
gaaaguuacccaauacucu

SEQ ID NO: 899439 - RNA, 19 nt, Homo sapiens
  misc_RNA (1)...(19): siRNA sense strand
ccacaccucuuuggcacua

SEQ ID NO: 899440 - RNA, 19 nt, Homo sapiens
  misc_RNA (1)...(19): siRNA sense strand
ggauguugcucgacuccaa

SEQ ID NO: 899441 - RNA, 19 nt, Homo sapiens
  misc_RNA (1)...(19): siRNA sense strand
gagaagaucagaaaguuac

SEQ ID NO: 899442 - RNA, 19 nt, Homo sapiens
  misc_RNA (1)...(19): siRNA sense strand
ucagaaaguuacccaauac

SEQ ID NO: 899443 - RNA, 19 nt, Homo sapiens
  misc_RNA (1)...(19): siRNA sense strand
agucagaacugcccuuugu

SEQ ID NO: 899444 - RNA, 19 nt, Homo sapiens
  misc_RNA (1)...(19): siRNA sense strand
uuucuucacuggagcauuu

SEQ ID NO: 899445 - RNA, 19 nt, Homo sapiens
  misc_RNA (1)...(19): siRNA sense strand
gagcucaccuaccaagagu

SEQ ID NO: 899446 - RNA, 19 nt, Homo sapiens
  misc_RNA (1)...(19): siRNA sense strand
gagaaaugccaguccaguu

SEQ ID NO: 899447 - RNA, 19 nt, Homo sapiens
  misc_RNA (1)...(19): siRNA sense strand
gaucagaaaguuacccaau

SEQ ID NO: 899448 - RNA, 19 nt, Homo sapiens
  misc_RNA (1)...(19): siRNA sense strand
uggagaagaucagaaaguu

SEQ ID NO: 899449 - RNA, 19 nt, Homo sapiens
  misc_RNA (1)...(19): siRNA sense strand
gucaacggcuggacuuguu

SEQ ID NO: 899450 - RNA, 19 nt, Homo sapiens
  misc_RNA (1)...(19): siRNA sense strand
ugcaagagcugguacucaa

SEQ ID NO: 899451 - RNA, 19 nt, Homo sapiens
  misc_RNA (1)...(19): siRNA sense strand
ggagcauuuccauuuaaua

SEQ ID NO: 899452 - RNA, 19 nt, Homo sapiens
  misc_RNA (1)...(19): siRNA sense strand
cuucaaaacugacuuacua

SEQ ID NO: 899453 - RNA, 19 nt, Homo sapiens
  misc_RNA (1)...(19): siRNA sense strand
cugaaaggccuugcuauaa

SEQ ID NO: 899454 - RNA, 19 nt, Homo sapiens
  misc_RNA (1)...(19): siRNA sense strand
cagaucaaguggagaagau

SEQ ID NO: 899455 - RNA, 19 nt, Homo sapiens
  misc_RNA (1)...(19): siRNA sense strand
caacggcuggacuuguuua

SEQ ID NO: 899456 - RNA, 19 nt, Homo sapiens
  misc_RNA (1)...(19): siRNA sense strand
guuacccaauacucuguua

SEQ ID NO: 899457 - RNA, 19 nt, Homo sapiens
  misc_RNA (1)...(19): siRNA sense strand
aagaagaagaugaugauga

SEQ ID NO: 899458 - RNA, 19 nt, Homo sapiens
  misc_RNA (1)...(19): siRNA sense strand
guucugaugauaagugaaa

SEQ ID NO: 899459 - RNA, 19 nt, Homo sapiens
  misc_RNA (1)...(19): siRNA sense strand
uaaggaaggacaaggaugu

SEQ ID NO: 899460 - RNA, 19 nt, Homo sapiens
  misc_RNA (1)...(19): siRNA sense strand
aucagaaaguuacccaaua

SEQ ID NO: 899461 - RNA, 19 nt, Homo sapiens
  misc_RNA (1)...(19): siRNA sense strand
aagaagaugaugaugauga

SEQ ID NO: 899462 - RNA, 19 nt, Homo sapiens
  misc_RNA (1)...(19): siRNA sense strand
auggucagguggucucuua

SEQ ID NO: 899463 - RNA, 19 nt, Homo sapiens
  misc_RNA (1)...(19): siRNA sense strand
caggagagcuucaaaacug

SEQ ID NO: 899464 - RNA, 19 nt, Homo sapiens
  misc_RNA (1)...(19): siRNA sense strand
agaagaugaugaugaugau

SEQ ID NO: 899465 - RNA, 19 nt, Homo sapiens
  misc_RNA (1)...(19): siRNA sense strand
acugaaaggccuugcuaua

SEQ ID NO: 899466 - RNA, 19 nt, Homo sapiens
  misc_RNA (1)...(19): siRNA sense strand
uugcucgacuccaagauuu

SEQ ID NO: 899467 - RNA, 19 nt, Homo sapiens
  misc_RNA (1)...(19): siRNA sense strand
cauccacacugacugaaag

SEQ ID NO: 899468 - RNA, 19 nt, Homo sapiens
  misc_RNA (1)...(19): siRNA sense strand
cagcccagaugcagaaugg

SEQ ID NO: 899469 - RNA, 19 nt, Homo sapiens
  misc_RNA (1)...(19): siRNA sense strand
ugacugaaaggccuugcua

SEQ ID NO: 899470 - RNA, 19 nt, Homo sapiens
  misc_RNA (1)...(19): siRNA sense strand
gcucaccuaccaagaguug

SEQ ID NO: 899471 - RNA, 19 nt, Homo sapiens
  misc_RNA (1)...(19): siRNA sense strand
gaagauuaugggaguggaa

SEQ ID NO: 899472 - RNA, 19 nt, Homo sapiens
  misc_RNA (1)...(19): siRNA sense strand
gaacaccagaaagcacaaa

SEQ ID NO: 899473 - RNA, 19 nt, Homo sapiens
  misc_RNA (1)...(19): siRNA sense strand
ccaguccaguuaacaucaa

SEQ ID NO: 899474 - RNA, 19 nt, Homo sapiens
  misc_RNA (1)...(19): siRNA sense strand
gcccuuuguucccaacuau

SEQ ID NO: 899475 - RNA, 19 nt, Homo sapiens
  misc_RNA (1)...(19): siRNA sense strand
ggagucagaacugcccuuu

SEQ ID NO: 899476 - RNA, 19 nt, Homo sapiens
  misc_RNA (1)...(19): siRNA sense strand
gaagaagaagaugaugaug

SEQ ID NO: 899477 - RNA, 19 nt, Homo sapiens
  misc_RNA (1)...(19): siRNA sense strand
gaauucagaacccaucucu

SEQ ID NO: 899478 - RNA, 19 nt, Homo sapiens
  misc_RNA (1)...(19): siRNA sense strand
aagaugaugaugaugauga

SEQ ID NO: 899479 - RNA, 19 nt, Homo sapiens
  misc_RNA (1)...(19): siRNA sense strand
uggcucaccuccauugcuu

SEQ ID NO: 899480 - RNA, 19 nt, Homo sapiens
  misc_RNA (1)...(19): siRNA sense strand
gcauccacacugacugaaa

SEQ ID NO: 899481 - RNA, 19 nt, Homo sapiens
  misc_RNA (1)...(19): siRNA sense strand
ucucuuaccuguuaaaauc

SEQ ID NO: 899482 - RNA, 19 nt, Homo sapiens
  misc_RNA (1)...(19): siRNA sense strand
caagaguugcucagagugu

SEQ ID NO: 899483 - RNA, 19 nt, Homo sapiens
  misc_RNA (1)...(19): siRNA sense strand
gggaguggaagaagaagau

SEQ ID NO: 899484 - RNA, 19 nt, Homo sapiens
  misc_RNA (1)...(19): siRNA sense strand
uaacaucaaggagagaaau

SEQ ID NO: 899485 - RNA, 19 nt, Homo sapiens
  misc_RNA (1)...(19): siRNA sense strand
acacugggcauguaaacga

SEQ ID NO: 899486 - RNA, 19 nt, Homo sapiens
  misc_RNA (1)...(19): siRNA sense strand
ggagcucaccuaccaagag

SEQ ID NO: 899487 - RNA, 19 nt, Homo sapiens
  misc_RNA (1)...(19): siRNA sense strand
gauuaugggaguggaagaa

SEQ ID NO: 899488 - RNA, 19 nt, Homo sapiens
  misc_RNA (1)...(19): siRNA sense strand
caacccagccuucccuuuu

SEQ ID NO: 899489 - RNA, 19 nt, Homo sapiens
  misc_RNA (1)...(19): siRNA sense strand
auucagaacccaucucuuc

SEQ ID NO: 899490 - RNA, 19 nt, Homo sapiens
  misc_RNA (1)...(19): siRNA sense strand
gaguggaagaagaagauga

SEQ ID NO: 899491 - RNA, 19 nt, Homo sapiens
  misc_RNA (1)...(19): siRNA sense strand
auacucagaacaccagaaa

SEQ ID NO: 899492 - RNA, 19 nt, Homo sapiens
  misc_RNA (1)...(19): siRNA sense strand
ugaugaugaugaugaugau

SEQ ID NO: 899493 - RNA, 19 nt, Homo sapiens
  misc_RNA (1)...(19): siRNA sense strand
uggaagaagaagaugauga

SEQ ID NO: 899494 - RNA, 19 nt, Homo sapiens
  misc_RNA (1)...(19): siRNA sense strand
ccuuuguucccaacuauuu

SEQ ID NO: 899495 - RNA, 19 nt, Homo sapiens
  misc_RNA (1)...(19): siRNA sense strand
gaagaugaugaugaugaug

SEQ ID NO: 899496 - RNA, 19 nt, Homo sapiens
  misc_RNA (1)...(19): siRNA sense strand
gaagaagaugaugaugaug

SEQ ID NO: 899497 - RNA, 19 nt, Homo sapiens
  misc_RNA (1)...(19): siRNA sense strand
uuaugggaguggaagaaga

SEQ ID NO: 899498 - RNA, 19 nt, Homo sapiens
  misc_RNA (1)...(19): siRNA sense strand
gaggucaacggcuggacuu

SEQ ID NO: 899499 - RNA, 19 nt, Homo sapiens
  misc_RNA (1)...(19): siRNA sense strand
ugaagaaggagucagaacu

SEQ ID NO: 899500 - RNA, 19 nt, Homo sapiens
  misc_RNA (1)...(19): siRNA sense strand
uaugggaguggaagaagaa

SEQ ID NO: 899501 - RNA, 19 nt, Homo sapiens
  misc_RNA (1)...(19): siRNA sense strand
accaagaguugcucagagu

SEQ ID NO: 899502 - RNA, 19 nt, Homo sapiens
  misc_RNA (1)...(19): siRNA sense strand
gagcuucaaaacugacuua

SEQ ID NO: 899503 - RNA, 19 nt, Homo sapiens
  misc_RNA (1)...(19): siRNA sense strand
guggagaagaucagaaagu

SEQ ID NO: 899504 - RNA, 19 nt, Homo sapiens
  misc_RNA (1)...(19): siRNA sense strand
caaggagagaaaucaggaa

SEQ ID NO: 899505 - RNA, 19 nt, Homo sapiens
  misc_RNA (1)...(19): siRNA sense strand
cggcuggacuuguuuacac

SEQ ID NO: 899506 - RNA, 19 nt, Homo sapiens
  misc_RNA (1)...(19): siRNA sense strand
cccaauacucuguuaagga

SEQ ID NO: 899507 - RNA, 19 nt, Homo sapiens
  misc_RNA (1)...(19): siRNA sense strand
caaguggagaagaucagaa

SEQ ID NO: 899508 - RNA, 19 nt, Homo sapiens
  misc_RNA (1)...(19): siRNA sense strand
gcaagagcugguacucaag

SEQ ID NO: 899509 - RNA, 19 nt, Homo sapiens
  misc_RNA (1)...(19): siRNA sense strand
uaauaugcaagagcuggua

SEQ ID NO: 899510 - RNA, 19 nt, Homo sapiens
  misc_RNA (1)...(19): siRNA sense strand
cgccagcauuccagccauu

SEQ ID NO: 899511 - RNA, 19 nt, Homo sapiens
  misc_RNA (1)...(19): siRNA sense strand
ggagcugacaaagaaauuc

SEQ ID NO: 899512 - RNA, 19 nt, Homo sapiens
  misc_RNA (1)...(19): siRNA sense strand
ggucaacggcuggacuugu

SEQ ID NO: 899513 - RNA, 19 nt, Homo sapiens
  misc_RNA (1)...(19): siRNA sense strand
agaugaugaugaugaugau

SEQ ID NO: 899514 - RNA, 19 nt, Homo sapiens
  misc_RNA (1)...(19): siRNA sense strand
uaacaggagagcuucaaaa

SEQ ID NO: 899515 - RNA, 19 nt, Homo sapiens
  misc_RNA (1)...(19): siRNA sense strand
guugcucgacuccaagauu

SEQ ID NO: 899516 - RNA, 19 nt, Homo sapiens
  misc_RNA (1)...(19): siRNA sense strand
ggaaggagauggagaaaga

SEQ ID NO: 899517 - RNA, 19 nt, Homo sapiens
  misc_RNA (1)...(19): siRNA sense strand
ggagaucgaugagcagaua

SEQ ID NO: 899518 - RNA, 19 nt, Homo sapiens
  misc_RNA (1)...(19): siRNA sense strand
aaagaaauccugaccauaa

SEQ ID NO: 899519 - RNA, 19 nt, Homo sapiens
  misc_RNA (1)...(19): siRNA sense strand
ugagguagaugcaagagua

SEQ ID NO: 899520 - RNA, 19 nt, Homo sapiens
  misc_RNA (1)...(19): siRNA sense strand
ggaaaggaguucauuagag

SEQ ID NO: 899521 - RNA, 19 nt, Homo sapiens
  misc_RNA (1)...(19): siRNA sense strand
ccaaacgauuucuuuagua

SEQ ID NO: 899522 - RNA, 19 nt, Homo sapiens
  misc_RNA (1)...(19): siRNA sense strand
gaaaguggccgagcugaaa

SEQ ID NO: 899523 - RNA, 19 nt, Homo sapiens
  misc_RNA (1)...(19): siRNA sense strand
cgaccaagaugucaagaga

SEQ ID NO: 899524 - RNA, 19 nt, Homo sapiens
  misc_RNA (1)...(19): siRNA sense strand
gcaaggagcacucaguuuc

SEQ ID NO: 899525 - RNA, 19 nt, Homo sapiens
  misc_RNA (1)...(19): siRNA sense strand
gcacucaguuuccucuuca

SEQ ID NO: 899526 - RNA, 19 nt, Homo sapiens
  misc_RNA (1)...(19): siRNA sense strand
guacagcccuccacaucug

SEQ ID NO: 899527 - RNA, 19 nt, Homo sapiens
  misc_RNA (1)...(19): siRNA sense strand
gaaagcagaaauacaugaa

SEQ ID NO: 899528 - RNA, 19 nt, Homo sapiens
  misc_RNA (1)...(19): siRNA sense strand
caaguagugugcugccaaa

SEQ ID NO: 899529 - RNA, 19 nt, Homo sapiens
  misc_RNA (1)...(19): siRNA sense strand
aaacaccgcggaagcguua

SEQ ID NO: 899530 - RNA, 19 nt, Homo sapiens
  misc_RNA (1)...(19): siRNA sense strand
gaaagcagcaccgagagaa

SEQ ID NO: 899531 - RNA, 19 nt, Homo sapiens
  misc_RNA (1)...(19): siRNA sense strand
aagaaauccugaccauaaa

SEQ ID NO: 899532 - RNA, 19 nt, Homo sapiens
  misc_RNA (1)...(19): siRNA sense strand
ggacaaagagugggacgaa

SEQ ID NO: 899533 - RNA, 19 nt, Homo sapiens
  misc_RNA (1)...(19): siRNA sense strand
aagaucagauggacaaaga

SEQ ID NO: 899534 - RNA, 19 nt, Homo sapiens
  misc_RNA (1)...(19): siRNA sense strand
gccaaacgauuucuuuagu

SEQ ID NO: 899535 - RNA, 19 nt, Homo sapiens
  misc_RNA (1)...(19): siRNA sense strand
caaacgauuucuuuaguac

SEQ ID NO: 899536 - RNA, 19 nt, Homo sapiens
  misc_RNA (1)...(19): siRNA sense strand
ggaacuacaggauuuguug

SEQ ID NO: 899537 - RNA, 19 nt, Homo sapiens
  misc_RNA (1)...(19): siRNA sense strand
ugaggcaggucaacacuau

SEQ ID NO: 899538 - RNA, 19 nt, Homo sapiens
  misc_RNA (1)...(19): siRNA sense strand
ggaggaaggagauggagaa

SEQ ID NO: 899539 - RNA, 19 nt, Homo sapiens
  misc_RNA (1)...(19): siRNA sense strand
ggacgcagacgaccaagau

SEQ ID NO: 899540 - RNA, 19 nt, Homo sapiens
  misc_RNA (1)...(19): siRNA sense strand
guagugugcugccaaacga

SEQ ID NO: 899541 - RNA, 19 nt, Homo sapiens
  misc_RNA (1)...(19): siRNA sense strand
gaaucgccaggaugaaaua

SEQ ID NO: 899542 - RNA, 19 nt, Homo sapiens
  misc_RNA (1)...(19): siRNA sense strand
ugagaaagcagaaauacau

SEQ ID NO: 899543 - RNA, 19 nt, Homo sapiens
  misc_RNA (1)...(19): siRNA sense strand
uuaaagaaauccugaccau

SEQ ID NO: 899544 - RNA, 19 nt, Homo sapiens
  misc_RNA (1)...(19): siRNA sense strand
ggaaagcagcaccgagaga

SEQ ID NO: 899545 - RNA, 19 nt, Homo sapiens
  misc_RNA (1)...(19): siRNA sense strand
uaaagaaauccugaccaua

SEQ ID NO: 899546 - RNA, 19 nt, Homo sapiens
  misc_RNA (1)...(19): siRNA sense strand
gaaagguugaugcuccaaa

SEQ ID NO: 899547 - RNA, 19 nt, Homo sapiens
  misc_RNA (1)...(19): siRNA sense strand
augagcagauagaguguua

SEQ ID NO: 899548 - RNA, 19 nt, Homo sapiens
  misc_RNA (1)...(19): siRNA sense strand
caaagagugggacgaauuc

SEQ ID NO: 899549 - RNA, 19 nt, Homo sapiens
  misc_RNA (1)...(19): siRNA sense strand
acaaagagugggacgaauu

SEQ ID NO: 899550 - RNA, 19 nt, Homo sapiens
  misc_RNA (1)...(19): siRNA sense strand
uuagagcgacucccaguaa

SEQ ID NO: 899551 - RNA, 19 nt, Homo sapiens
  misc_RNA (1)...(19): siRNA sense strand
agacucacguccugggaaa

SEQ ID NO: 899552 - RNA, 19 nt, Homo sapiens
  misc_RNA (1)...(19): siRNA sense strand
ggaaucgccaggaugaaau

SEQ ID NO: 899553 - RNA, 19 nt, Homo sapiens
  misc_RNA (1)...(19): siRNA sense strand
ucacgggagguaacaagua

SEQ ID NO: 899554 - RNA, 19 nt, Homo sapiens
  misc_RNA (1)...(19): siRNA sense strand
ggugaaaggggcauuguua

SEQ ID NO: 899555 - RNA, 19 nt, Homo sapiens
  misc_RNA (1)...(19): siRNA sense strand
ugacgacccugagguagau

SEQ ID NO: 899556 - RNA, 19 nt, Homo sapiens
  misc_RNA (1)...(19): siRNA sense strand
gagaaagcagaaauacaug

SEQ ID NO: 899557 - RNA, 19 nt, Homo sapiens
  misc_RNA (1)...(19): siRNA sense strand
gaacuacaggauuuguugu

SEQ ID NO: 899558 - RNA, 19 nt, Homo sapiens
  misc_RNA (1)...(19): siRNA sense strand
gggcaaggagcacucaguu

SEQ ID NO: 899559 - RNA, 19 nt, Homo sapiens
  misc_RNA (1)...(19): siRNA sense strand
gauuuguugucucaggauu

SEQ ID NO: 899560 - RNA, 19 nt, Homo sapiens
  misc_RNA (1)...(19): siRNA sense strand
ggaggaagaggaggaggaa

SEQ ID NO: 899561 - RNA, 19 nt, Homo sapiens
  misc_RNA (1)...(19): siRNA sense strand
ugaguugugcccuguguaa

SEQ ID NO: 899562 - RNA, 19 nt, Homo sapiens
  misc_RNA (1)...(19): siRNA sense strand
caaaagaucagauggacaa

SEQ ID NO: 899563 - RNA, 19 nt, Homo sapiens
  misc_RNA (1)...(19): siRNA sense strand
uacaggauuuguugucuca

SEQ ID NO: 899564 - RNA, 19 nt, Homo sapiens
  misc_RNA (1)...(19): siRNA sense strand
gacaaagagugggacgaau

SEQ ID NO: 899565 - RNA, 19 nt, Homo sapiens
  misc_RNA (1)...(19): siRNA sense strand
gaucagauggacaaagagu

SEQ ID NO: 899566 - RNA, 19 nt, Homo sapiens
  misc_RNA (1)...(19): siRNA sense strand
ggaagaggaggaggaagga

SEQ ID NO: 899567 - RNA, 19 nt, Homo sapiens
  misc_RNA (1)...(19): siRNA sense strand
aaucuccauucgcgaagua

SEQ ID NO: 899568 - RNA, 19 nt, Homo sapiens
  misc_RNA (1)...(19): siRNA sense strand
gcugaaaggcgcgaaggaa

SEQ ID NO: 899569 - RNA, 19 nt, Homo sapiens
  misc_RNA (1)...(19): siRNA sense strand
gaaaggggcauuguuauag

SEQ ID NO: 899570 - RNA, 19 nt, Homo sapiens
  misc_RNA (1)...(19): siRNA sense strand
uaggaaaggaguucauuag

SEQ ID NO: 899571 - RNA, 19 nt, Homo sapiens
  misc_RNA (1)...(19): siRNA sense strand
gcugaguugugcccugugu

SEQ ID NO: 899572 - RNA, 19 nt, Homo sapiens
  misc_RNA (1)...(19): siRNA sense strand
caauugagaaagcagaaau

SEQ ID NO: 899573 - RNA, 19 nt, Homo sapiens
  misc_RNA (1)...(19): siRNA sense strand
gcugccaaacgauuucuuu

SEQ ID NO: 899574 - RNA, 19 nt, Homo sapiens
  misc_RNA (1)...(19): siRNA sense strand
ggcaaggagcacucaguuu

SEQ ID NO: 899575 - RNA, 19 nt, Homo sapiens
  misc_RNA (1)...(19): siRNA sense strand
ggaggaggaaggagaugga

SEQ ID NO: 899576 - RNA, 19 nt, Homo sapiens
  misc_RNA (1)...(19): siRNA sense strand
gaaggagauggagaaagaa

SEQ ID NO: 899577 - RNA, 19 nt, Homo sapiens
  misc_RNA (1)...(19): siRNA sense strand
cauucagggucaauugaga

SEQ ID NO: 899578 - RNA, 19 nt, Homo sapiens
  misc_RNA (1)...(19): siRNA sense strand
cacgggagguaacaaguag

SEQ ID NO: 899579 - RNA, 19 nt, Homo sapiens
  misc_RNA (1)...(19): siRNA sense strand
auaggaaaggaguucauua

SEQ ID NO: 899580 - RNA, 19 nt, Homo sapiens
  misc_RNA (1)...(19): siRNA sense strand
caagaguacgaaagguuga

SEQ ID NO: 899581 - RNA, 19 nt, Homo sapiens
  misc_RNA (1)...(19): siRNA sense strand
agaaagcagaaauacauga

SEQ ID NO: 899582 - RNA, 19 nt, Homo sapiens
  misc_RNA (1)...(19): siRNA sense strand
ugaaaggggcauuguuaua

SEQ ID NO: 899583 - RNA, 19 nt, Homo sapiens
  misc_RNA (1)...(19): siRNA sense strand
aggcaggucaacacuauuu

SEQ ID NO: 899584 - RNA, 19 nt, Homo sapiens
  misc_RNA (1)...(19): siRNA sense strand
gcuacggaaucgccaggau

SEQ ID NO: 899585 - RNA, 19 nt, Homo sapiens
  misc_RNA (1)...(19): siRNA sense strand
cggaaucgccaggaugaaa

SEQ ID NO: 899586 - RNA, 19 nt, Homo sapiens
  misc_RNA (1)...(19): siRNA sense strand
gaggaaggagauggagaaa

SEQ ID NO: 899587 - RNA, 19 nt, Homo sapiens
  misc_RNA (1)...(19): siRNA sense strand
gcagacgaccaagauguca

SEQ ID NO: 899588 - RNA, 19 nt, Homo sapiens
  misc_RNA (1)...(19): siRNA sense strand
cauaguugccgaagaggau

SEQ ID NO: 899589 - RNA, 19 nt, Homo sapiens
  misc_RNA (1)...(19): siRNA sense strand
gaugcaagaguacgaaagg

SEQ ID NO: 899590 - RNA, 19 nt, Homo sapiens
  misc_RNA (1)...(19): siRNA sense strand
cugccaaacgauuucuuua

SEQ ID NO: 899591 - RNA, 19 nt, Homo sapiens
  misc_RNA (1)...(19): siRNA sense strand
gggaacuacaggauuuguu

SEQ ID NO: 899592 - RNA, 19 nt, Homo sapiens
  misc_RNA (1)...(19): siRNA sense strand
aaagguugaugcuccaaaa

SEQ ID NO: 899593 - RNA, 19 nt, Homo sapiens
  misc_RNA (1)...(19): siRNA sense strand
guagaugcaagaguacgaa

SEQ ID NO: 899594 - RNA, 19 nt, Homo sapiens
  misc_RNA (1)...(19): siRNA sense strand
gaagaagagaaugcugaca

SEQ ID NO: 899595 - RNA, 19 nt, Homo sapiens
  misc_RNA (1)...(19): siRNA sense strand
cagggucaauugagaaagc

SEQ ID NO: 899596 - RNA, 19 nt, Homo sapiens
  misc_RNA (1)...(19): siRNA sense strand
aaagcagcaccgagagaaa

SEQ ID NO: 899597 - RNA, 19 nt, Homo sapiens
  misc_RNA (1)...(19): siRNA sense strand
aggaaaggaguucauuaga

SEQ ID NO: 899598 - RNA, 19 nt, Homo sapiens
  misc_RNA (1)...(19): siRNA sense strand
ccucauucagggucaauug

SEQ ID NO: 899599 - RNA, 19 nt, Homo sapiens
  misc_RNA (1)...(19): siRNA sense strand
ucgcgaaguacaaccguuu

SEQ ID NO: 899600 - RNA, 19 nt, Homo sapiens
  misc_RNA (1)...(19): siRNA sense strand
uacggaaucgccaggauga

SEQ ID NO: 899601 - RNA, 19 nt, Homo sapiens
  misc_RNA (1)...(19): siRNA sense strand
agccauaguugccgaagag

SEQ ID NO: 899602 - RNA, 19 nt, Homo sapiens
  misc_RNA (1)...(19): siRNA sense strand
cacuauuuccgaagccaua

SEQ ID NO: 899603 - RNA, 19 nt, Homo sapiens
  misc_RNA (1)...(19): siRNA sense strand
uagagcgacucccaguaag

SEQ ID NO: 899604 - RNA, 19 nt, Homo sapiens
  misc_RNA (1)...(19): siRNA sense strand
agaaaguggccgagcugaa

SEQ ID NO: 899605 - RNA, 19 nt, Homo sapiens
  misc_RNA (1)...(19): siRNA sense strand
aagcguuaccggaagguuu

SEQ ID NO: 899606 - RNA, 19 nt, Homo sapiens
  misc_RNA (1)...(19): siRNA sense strand
gagaggagguggaauauua

SEQ ID NO: 899607 - RNA, 19 nt, Homo sapiens
  misc_RNA (1)...(19): siRNA sense strand
uauaggagcuggaaucuuu

SEQ ID NO: 899608 - RNA, 19 nt, Homo sapiens
  misc_RNA (1)...(19): siRNA sense strand
cagcagaaauguuugaauu

SEQ ID NO: 899609 - RNA, 19 nt, Homo sapiens
  misc_RNA (1)...(19): siRNA sense strand
gaagccagcagaaauguuu

SEQ ID NO: 899610 - RNA, 19 nt, Homo sapiens
  misc_RNA (1)...(19): siRNA sense strand
gaacacggaguuugggaaa

SEQ ID NO: 899611 - RNA, 19 nt, Homo sapiens
  misc_RNA (1)...(19): siRNA sense strand
ccacaaaugcaaauacuug

SEQ ID NO: 899612 - RNA, 19 nt, Homo sapiens
  misc_RNA (1)...(19): siRNA sense strand
gguggaauauuaccaguca

SEQ ID NO: 899613 - RNA, 19 nt, Homo sapiens
  misc_RNA (1)...(19): siRNA sense strand
gacgagaggagguggaaua

SEQ ID NO: 899614 - RNA, 19 nt, Homo sapiens
  misc_RNA (1)...(19): siRNA sense strand
ccacggagcagauauagga

SEQ ID NO: 899615 - RNA, 19 nt, Homo sapiens
  misc_RNA (1)...(19): siRNA sense strand
gggagagccugcugccaaa

SEQ ID NO: 899616 - RNA, 19 nt, Homo sapiens
  misc_RNA (1)...(19): siRNA sense strand
gggcgguccuggccauaaa

SEQ ID NO: 899617 - RNA, 19 nt, Homo sapiens
  misc_RNA (1)...(19): siRNA sense strand
ggaaugccacaaaugcaaa

SEQ ID NO: 899618 - RNA, 19 nt, Homo sapiens
  misc_RNA (1)...(19): siRNA sense strand
gccuauggcucuccugugu

SEQ ID NO: 899619 - RNA, 19 nt, Homo sapiens
  misc_RNA (1)...(19): siRNA sense strand
ggcaggcgcuguaccaaag

SEQ ID NO: 899620 - RNA, 19 nt, Homo sapiens
  misc_RNA (1)...(19): siRNA sense strand
ggagagagagagggaaaga

SEQ ID NO: 899621 - RNA, 19 nt, Homo sapiens
  misc_RNA (1)...(19): siRNA sense strand
ggagaaggcccagcaacug

SEQ ID NO: 899622 - RNA, 19 nt, Homo sapiens
  misc_RNA (1)...(19): siRNA sense strand
gcagauauaggagcuggaa

SEQ ID NO: 899623 - RNA, 19 nt, Homo sapiens
  misc_RNA (1)...(19): siRNA sense strand
cuaccucucugcugccuau

SEQ ID NO: 899624 - RNA, 19 nt, Homo sapiens
  misc_RNA (1)...(19): siRNA sense strand
ccauaaagggcuaccgaaa

SEQ ID NO: 899625 - RNA, 19 nt, Homo sapiens
  misc_RNA (1)...(19): siRNA sense strand
aaagagaagccagcagaaa

SEQ ID NO: 899626 - RNA, 19 nt, Homo sapiens
  misc_RNA (1)...(19): siRNA sense strand
gccaaaugcuggagguucu

SEQ ID NO: 899627 - RNA, 19 nt, Homo sapiens
  misc_RNA (1)...(19): siRNA sense strand
guccaguucuaccagcuaa

SEQ ID NO: 899628 - RNA, 19 nt, Homo sapiens
  misc_RNA (1)...(19): siRNA sense strand
agagagagagggaaagaga

SEQ ID NO: 899629 - RNA, 19 nt, Homo sapiens
  misc_RNA (1)...(19): siRNA sense strand
gcucuccuguguguaaaga

SEQ ID NO: 899630 - RNA, 19 nt, Homo sapiens
  misc_RNA (1)...(19): siRNA sense strand
ccgcagacccgaaagugaa

SEQ ID NO: 899631 - RNA, 19 nt, Homo sapiens
  misc_RNA (1)...(19): siRNA sense strand
gcauuuacuacuaucaguu

SEQ ID NO: 899632 - RNA, 19 nt, Homo sapiens
  misc_RNA (1)...(19): siRNA sense strand
guacuucuacuuccacuac

SEQ ID NO: 899633 - RNA, 19 nt, Homo sapiens
  misc_RNA (1)...(19): siRNA sense strand
aagagaagccagcagaaau

SEQ ID NO: 899634 - RNA, 19 nt, Homo sapiens
  misc_RNA (1)...(19): siRNA sense strand
gagagccugcugccaaaug

SEQ ID NO: 899635 - RNA, 19 nt, Homo sapiens
  misc_RNA (1)...(19): siRNA sense strand
agagaagccagcagaaaug

SEQ ID NO: 899636 - RNA, 19 nt, Homo sapiens
  misc_RNA (1)...(19): siRNA sense strand
gcaaaggcuacagcgguuu

SEQ ID NO: 899637 - RNA, 19 nt, Homo sapiens
  misc_RNA (1)...(19): siRNA sense strand
cuauggcucuccugugugu

SEQ ID NO: 899638 - RNA, 19 nt, Homo sapiens
  misc_RNA (1)...(19): siRNA sense strand
cauggucacuguggcaaug

SEQ ID NO: 899639 - RNA, 19 nt, Homo sapiens
  misc_RNA (1)...(19): siRNA sense strand
gagaagccagcagaaaugu

SEQ ID NO: 899640 - RNA, 19 nt, Homo sapiens
  misc_RNA (1)...(19): siRNA sense strand
gcaggugaacacggaguuu

SEQ ID NO: 899641 - RNA, 19 nt, Homo sapiens
  misc_RNA (1)...(19): siRNA sense strand
acacgggcaucaccagcuu

SEQ ID NO: 899642 - RNA, 19 nt, Homo sapiens
  misc_RNA (1)...(19): siRNA sense strand
ggcauuuacuacuaucagu

SEQ ID NO: 899643 - RNA, 19 nt, Homo sapiens
  misc_RNA (1)...(19): siRNA sense strand
gaaugccacaaaugcaaau

SEQ ID NO: 899644 - RNA, 19 nt, Homo sapiens
  misc_RNA (1)...(19): siRNA sense strand
gauauaggagcuggaaucu

SEQ ID NO: 899645 - RNA, 19 nt, Homo sapiens
  misc_RNA (1)...(19): siRNA sense strand
gggcuuacaguggcuuuga

SEQ ID NO: 899646 - RNA, 19 nt, Homo sapiens
  misc_RNA (1)...(19): siRNA sense strand
gggagaaggcccagcaacu

SEQ ID NO: 899647 - RNA, 19 nt, Homo sapiens
  misc_RNA (1)...(19): siRNA sense strand
caaaggcuacagcgguuuc

SEQ ID NO: 899648 - RNA, 19 nt, Homo sapiens
  misc_RNA (1)...(19): siRNA sense strand
ggugaccgaaggcuuguug

SEQ ID NO: 899649 - RNA, 19 nt, Homo sapiens
  misc_RNA (1)...(19): siRNA sense strand
ggccuuguacuucuacuuc

SEQ ID NO: 899650 - RNA, 19 nt, Homo sapiens
  misc_RNA (1)...(19): siRNA sense strand
cauaaagggcuaccgaaaa

SEQ ID NO: 899651 - RNA, 19 nt, Homo sapiens
  misc_RNA (1)...(19): siRNA sense strand
aagagaggcaggcgcugua

SEQ ID NO: 899652 - RNA, 19 nt, Homo sapiens
  misc_RNA (1)...(19): siRNA sense strand
cgagaggagguggaauauu

SEQ ID NO: 899653 - RNA, 19 nt, Homo sapiens
  misc_RNA (1)...(19): siRNA sense strand
agauauaggagcuggaauc

SEQ ID NO: 899654 - RNA, 19 nt, Homo sapiens
  misc_RNA (1)...(19): siRNA sense strand
gaagagccauggaucauaa

SEQ ID NO: 899655 - RNA, 19 nt, Homo sapiens
  misc_RNA (1)...(19): siRNA sense strand
ggagaaaccuuaugauugu

SEQ ID NO: 899656 - RNA, 19 nt, Homo sapiens
  misc_RNA (1)...(19): siRNA sense strand
gaaagaaaccauaugauug

SEQ ID NO: 899657 - RNA, 19 nt, Homo sapiens
  misc_RNA (1)...(19): siRNA sense strand
ggaaagacccuaucaaugu

SEQ ID NO: 899658 - RNA, 19 nt, Homo sapiens
  misc_RNA (1)...(19): siRNA sense strand
ggaaagaaaccauaugauu

SEQ ID NO: 899659 - RNA, 19 nt, Homo sapiens
  misc_RNA (1)...(19): siRNA sense strand
gaaguuucaucuuguugua

SEQ ID NO: 899660 - RNA, 19 nt, Homo sapiens
  misc_RNA (1)...(19): siRNA sense strand
agagaaaccuuacauaugu

SEQ ID NO: 899661 - RNA, 19 nt, Homo sapiens
  misc_RNA (1)...(19): siRNA sense strand
gaaagacccuaucaaugug

SEQ ID NO: 899662 - RNA, 19 nt, Homo sapiens
  misc_RNA (1)...(19): siRNA sense strand
gaucauaaagggagacaua

SEQ ID NO: 899663 - RNA, 19 nt, Homo sapiens
  misc_RNA (1)...(19): siRNA sense strand
caucagggcauaaauauaa

SEQ ID NO: 899664 - RNA, 19 nt, Homo sapiens
  misc_RNA (1)...(19): siRNA sense strand
gcuaagaagucacaacuca

SEQ ID NO: 899665 - RNA, 19 nt, Homo sapiens
  misc_RNA (1)...(19): siRNA sense strand
cuacaaaugugcucaaugu

SEQ ID NO: 899666 - RNA, 19 nt, Homo sapiens
  misc_RNA (1)...(19): siRNA sense strand
ggagacauaucaaauugga

SEQ ID NO: 899667 - RNA, 19 nt, Homo sapiens
  misc_RNA (1)...(19): siRNA sense strand
ggagagaaaccuuacauau

SEQ ID NO: 899668 - RNA, 19 nt, Homo sapiens
  misc_RNA (1)...(19): siRNA sense strand
gggaaagccuucugugaga

SEQ ID NO: 899669 - RNA, 19 nt, Homo sapiens
  misc_RNA (1)...(19): siRNA sense strand
gggaaagccuucucucaga

SEQ ID NO: 899670 - RNA, 19 nt, Homo sapiens
  misc_RNA (1)...(19): siRNA sense strand
agacagaacucauuacaca

SEQ ID NO: 899671 - RNA, 19 nt, Homo sapiens
  misc_RNA (1)...(19): siRNA sense strand
gaagucacaucucauugga

SEQ ID NO: 899672 - RNA, 19 nt, Homo sapiens
  misc_RNA (1)...(19): siRNA sense strand
gagagaaaccuuacauaug

SEQ ID NO: 899673 - RNA, 19 nt, Homo sapiens
  misc_RNA (1)...(19): siRNA sense strand
ggacaccagcgaauucaua

SEQ ID NO: 899674 - RNA, 19 nt, Homo sapiens
  misc_RNA (1)...(19): siRNA sense strand
gagaaacccuacaaaugug

SEQ ID NO: 899675 - RNA, 19 nt, Homo sapiens
  misc_RNA (1)...(19): siRNA sense strand
gauucacaauggaguaaua

SEQ ID NO: 899676 - RNA, 19 nt, Homo sapiens
  misc_RNA (1)...(19): siRNA sense strand
gggagaaaccuuaugauug

SEQ ID NO: 899677 - RNA, 19 nt, Homo sapiens
  misc_RNA (1)...(19): siRNA sense strand
agagugagcccaauucuaa

SEQ ID NO: 899678 - RNA, 19 nt, Homo sapiens
  misc_RNA (1)...(19): siRNA sense strand
gagaacacauacuggagaa

SEQ ID NO: 899679 - RNA, 19 nt, Homo sapiens
  misc_RNA (1)...(19): siRNA sense strand
acacaucaguuaguucaua

SEQ ID NO: 899680 - RNA, 19 nt, Homo sapiens
  misc_RNA (1)...(19): siRNA sense strand
gagaagucccaccucauua

SEQ ID NO: 899681 - RNA, 19 nt, Homo sapiens
  misc_RNA (1)...(19): siRNA sense strand
gaaaucaccccucauuaua

SEQ ID NO: 899682 - RNA, 19 nt, Homo sapiens
  misc_RNA (1)...(19): siRNA sense strand
guacaucagagaacucaua

SEQ ID NO: 899683 - RNA, 19 nt, Homo sapiens
  misc_RNA (1)...(19): siRNA sense strand
ggaaaagccuucagugaga

SEQ ID NO: 899684 - RNA, 19 nt, Homo sapiens
  misc_RNA (1)...(19): siRNA sense strand
gaagucccaccucauuaua

SEQ ID NO: 899685 - RNA, 19 nt, Homo sapiens
  misc_RNA (1)...(19): siRNA sense strand
cacaagggaugguucauug

SEQ ID NO: 899686 - RNA, 19 nt, Homo sapiens
  misc_RNA (1)...(19): siRNA sense strand
gaagucagaccuuguuuua

SEQ ID NO: 899687 - RNA, 19 nt, Homo sapiens
  misc_RNA (1)...(19): siRNA sense strand
ugagaaacccuacaaaugu

SEQ ID NO: 899688 - RNA, 19 nt, Homo sapiens
  misc_RNA (1)...(19): siRNA sense strand
gacaagacaggaagaguaa

SEQ ID NO: 899689 - RNA, 19 nt, Homo sapiens
  misc_RNA (1)...(19): siRNA sense strand
agaaauacacaaucccuua

SEQ ID NO: 899690 - RNA, 19 nt, Homo sapiens
  misc_RNA (1)...(19): siRNA sense strand
cugcagagauuucuagaga

SEQ ID NO: 899691 - RNA, 19 nt, Homo sapiens
  misc_RNA (1)...(19): siRNA sense strand
cuaccgaguuguuauaaga

SEQ ID NO: 899692 - RNA, 19 nt, Homo sapiens
  misc_RNA (1)...(19): siRNA sense strand
acaguuuccuuccaucaua

SEQ ID NO: 899693 - RNA, 19 nt, Homo sapiens
  misc_RNA (1)...(19): siRNA sense strand
gaagacagaacucauuaca

SEQ ID NO: 899694 - RNA, 19 nt, Homo sapiens
  misc_RNA (1)...(19): siRNA sense strand
caacuugacccuucucaga

SEQ ID NO: 899695 - RNA, 19 nt, Homo sapiens
  misc_RNA (1)...(19): siRNA sense strand
gaaauacacaaucccuuau

SEQ ID NO: 899696 - RNA, 19 nt, Homo sapiens
  misc_RNA (1)...(19): siRNA sense strand
gugcauagaaacagauaua

SEQ ID NO: 899697 - RNA, 19 nt, Homo sapiens
  misc_RNA (1)...(19): siRNA sense strand
gaaaagcuguguauguguu

SEQ ID NO: 899698 - RNA, 19 nt, Homo sapiens
  misc_RNA (1)...(19): siRNA sense strand
gaagauucacaauggagua

SEQ ID NO: 899699 - RNA, 19 nt, Homo sapiens
  misc_RNA (1)...(19): siRNA sense strand
ggauguggcuguggauuuc

SEQ ID NO: 899700 - RNA, 19 nt, Homo sapiens
  misc_RNA (1)...(19): siRNA sense strand
uaagaagucacaacucauu

SEQ ID NO: 899701 - RNA, 19 nt, Homo sapiens
  misc_RNA (1)...(19): siRNA sense strand
gugagaaacccuacaaaug

SEQ ID NO: 899702 - RNA, 19 nt, Homo sapiens
  misc_RNA (1)...(19): siRNA sense strand
gaagucacaacuaacugua

SEQ ID NO: 899703 - RNA, 19 nt, Homo sapiens
  misc_RNA (1)...(19): siRNA sense strand
gggaaagacccuaucaaug

SEQ ID NO: 899704 - RNA, 19 nt, Homo sapiens
  misc_RNA (1)...(19): siRNA sense strand
gagcccaauucuaaucuug

SEQ ID NO: 899705 - RNA, 19 nt, Homo sapiens
  misc_RNA (1)...(19): siRNA sense strand
gaagucacagcugauuaua

SEQ ID NO: 899706 - RNA, 19 nt, Homo sapiens
  misc_RNA (1)...(19): siRNA sense strand
gagaaaagcuguguaugug

SEQ ID NO: 899707 - RNA, 19 nt, Homo sapiens
  misc_RNA (1)...(19): siRNA sense strand
uguggaaacuaaagagaaa

SEQ ID NO: 899708 - RNA, 19 nt, Homo sapiens
  misc_RNA (1)...(19): siRNA sense strand
agucacagcugauuauaca

SEQ ID NO: 899709 - RNA, 19 nt, Homo sapiens
  misc_RNA (1)...(19): siRNA sense strand
caauacagagauuccauaa

SEQ ID NO: 899710 - RNA, 19 nt, Homo sapiens
  misc_RNA (1)...(19): siRNA sense strand
gagaaaccuuacauaugug

SEQ ID NO: 899711 - RNA, 19 nt, Homo sapiens
  misc_RNA (1)...(19): siRNA sense strand
caagucacagcucaucaua

SEQ ID NO: 899712 - RNA, 19 nt, Homo sapiens
  misc_RNA (1)...(19): siRNA sense strand
gagaagccguaugagugua

SEQ ID NO: 899713 - RNA, 19 nt, Homo sapiens
  misc_RNA (1)...(19): siRNA sense strand
ggagagaagccguaugagu

SEQ ID NO: 899714 - RNA, 19 nt, Homo sapiens
  misc_RNA (1)...(19): siRNA sense strand
acaauggaguaauaccuuu

SEQ ID NO: 899715 - RNA, 19 nt, Homo sapiens
  misc_RNA (1)...(19): siRNA sense strand
ggagaagagccauggauca

SEQ ID NO: 899716 - RNA, 19 nt, Homo sapiens
  misc_RNA (1)...(19): siRNA sense strand
ccagaagucacaucucauu

SEQ ID NO: 899717 - RNA, 19 nt, Homo sapiens
  misc_RNA (1)...(19): siRNA sense strand
caucauacaucagagaaca

SEQ ID NO: 899718 - RNA, 19 nt, Homo sapiens
  misc_RNA (1)...(19): siRNA sense strand
gggaugugaugcuggagaa

SEQ ID NO: 899719 - RNA, 19 nt, Homo sapiens
  misc_RNA (1)...(19): siRNA sense strand
ugagaaguuucaucuuguu

SEQ ID NO: 899720 - RNA, 19 nt, Homo sapiens
  misc_RNA (1)...(19): siRNA sense strand
gugagaaguuucaucuugu

SEQ ID NO: 899721 - RNA, 19 nt, Homo sapiens
  misc_RNA (1)...(19): siRNA sense strand
agugagaaguuucaucuug

SEQ ID NO: 899722 - RNA, 19 nt, Homo sapiens
  misc_RNA (1)...(19): siRNA sense strand
ucacauuuguuaacagcaa

SEQ ID NO: 899723 - RNA, 19 nt, Homo sapiens
  misc_RNA (1)...(19): siRNA sense strand
agacaagacaggaagagua

SEQ ID NO: 899724 - RNA, 19 nt, Homo sapiens
  misc_RNA (1)...(19): siRNA sense strand
ucuagagaaucaagacaaa

SEQ ID NO: 899725 - RNA, 19 nt, Homo sapiens
  misc_RNA (1)...(19): siRNA sense strand
agucacagcucaucauaca

SEQ ID NO: 899726 - RNA, 19 nt, Homo sapiens
  misc_RNA (1)...(19): siRNA sense strand
caucaaagaauucauacug

SEQ ID NO: 899727 - RNA, 19 nt, Homo sapiens
  misc_RNA (1)...(19): siRNA sense strand
cauaaagggagacauauca

SEQ ID NO: 899728 - RNA, 19 nt, Homo sapiens
  misc_RNA (1)...(19): siRNA sense strand
ggacaucagagaauucaca

SEQ ID NO: 899729 - RNA, 19 nt, Homo sapiens
  misc_RNA (1)...(19): siRNA sense strand
acaaaugugcucaauguga

SEQ ID NO: 899730 - RNA, 19 nt, Homo sapiens
  misc_RNA (1)...(19): siRNA sense strand
caaagaauucauacuggaa

SEQ ID NO: 899731 - RNA, 19 nt, Homo sapiens
  misc_RNA (1)...(19): siRNA sense strand
ucaggcaggucacauuugu

SEQ ID NO: 899732 - RNA, 19 nt, Homo sapiens
  misc_RNA (1)...(19): siRNA sense strand
uaaagggagacauaucaaa

SEQ ID NO: 899733 - RNA, 19 nt, Homo sapiens
  misc_RNA (1)...(19): siRNA sense strand
gcaucagggcauaaauaua

SEQ ID NO: 899734 - RNA, 19 nt, Homo sapiens
  misc_RNA (1)...(19): siRNA sense strand
agggagacauaucaaauug

SEQ ID NO: 899735 - RNA, 19 nt, Homo sapiens
  misc_RNA (1)...(19): siRNA sense strand
uuacaucagaggauucaua

SEQ ID NO: 899736 - RNA, 19 nt, Homo sapiens
  misc_RNA (1)...(19): siRNA sense strand
caucagagaauacauacug

SEQ ID NO: 899737 - RNA, 19 nt, Homo sapiens
  misc_RNA (1)...(19): siRNA sense strand
aaucgucccuuauuauaca

SEQ ID NO: 899738 - RNA, 19 nt, Homo sapiens
  misc_RNA (1)...(19): siRNA sense strand
gagaaaccuuaugauuguu

SEQ ID NO: 899739 - RNA, 19 nt, Homo sapiens
  misc_RNA (1)...(19): siRNA sense strand
gaauucauacuggaaagaa

SEQ ID NO: 899740 - RNA, 19 nt, Homo sapiens
  misc_RNA (1)...(19): siRNA sense strand
caacucauuguacaucaaa

SEQ ID NO: 899741 - RNA, 19 nt, Homo sapiens
  misc_RNA (1)...(19): siRNA sense strand
aggcaggucacauuuguua

SEQ ID NO: 899742 - RNA, 19 nt, Homo sapiens
  misc_RNA (1)...(19): siRNA sense strand
ggugagaaacccuacaaau

SEQ ID NO: 899743 - RNA, 19 nt, Homo sapiens
  misc_RNA (1)...(19): siRNA sense strand
gcauagaaacagauauauc

SEQ ID NO: 899744 - RNA, 19 nt, Homo sapiens
  misc_RNA (1)...(19): siRNA sense strand
gaccuaccgaguuguuaua

SEQ ID NO: 899745 - RNA, 19 nt, Homo sapiens
  misc_RNA (1)...(19): siRNA sense strand
gagaauucacacaguggua

SEQ ID NO: 899746 - RNA, 19 nt, Homo sapiens
  misc_RNA (1)...(19): siRNA sense strand
auccagaagucacaacuaa

SEQ ID NO: 899747 - RNA, 19 nt, Homo sapiens
  misc_RNA (1)...(19): siRNA sense strand
uugagaagauucacaaugg

SEQ ID NO: 899748 - RNA, 19 nt, Homo sapiens
  misc_RNA (1)...(19): siRNA sense strand
gcagaugggagacaagaca

SEQ ID NO: 899749 - RNA, 19 nt, Homo sapiens
  misc_RNA (1)...(19): siRNA sense strand
caucagaggauucauacug

SEQ ID NO: 899750 - RNA, 19 nt, Homo sapiens
  misc_RNA (1)...(19): siRNA sense strand
caucagagaacacauacug

SEQ ID NO: 899751 - RNA, 19 nt, Homo sapiens
  misc_RNA (1)...(19): siRNA sense strand
caaguuggaacaaggagaa

SEQ ID NO: 899752 - RNA, 19 nt, Homo sapiens
  misc_RNA (1)...(19): siRNA sense strand
caucagagaacucauacug

SEQ ID NO: 899753 - RNA, 19 nt, Homo sapiens
  misc_RNA (1)...(19): siRNA sense strand
ucaauacagagauuccaua

SEQ ID NO: 899754 - RNA, 19 nt, Homo sapiens
  misc_RNA (1)...(19): siRNA sense strand
gccagaggcaugggcauua

SEQ ID NO: 899755 - RNA, 19 nt, Homo sapiens
  misc_RNA (1)...(19): siRNA sense strand
ccagaggcaugggcauuag

SEQ ID NO: 899756 - RNA, 19 nt, Homo sapiens
  misc_RNA (1)...(19): siRNA sense strand
aaaacucaguccacucuaa

SEQ ID NO: 899757 - RNA, 19 nt, Homo sapiens
  misc_RNA (1)...(19): siRNA sense strand
guugccacaugggcuauuu

SEQ ID NO: 899758 - RNA, 19 nt, Homo sapiens
  misc_RNA (1)...(19): siRNA sense strand
gugggacaaccuaguauug

SEQ ID NO: 899759 - RNA, 19 nt, Homo sapiens
  misc_RNA (1)...(19): siRNA sense strand
cagccuccguugccacaug

SEQ ID NO: 899760 - RNA, 19 nt, Homo sapiens
  misc_RNA (1)...(19): siRNA sense strand
ggaaaacucaguccacucu

SEQ ID NO: 899761 - RNA, 19 nt, Homo sapiens
  misc_RNA (1)...(19): siRNA sense strand
cagcuccgcucgugcuuuc

SEQ ID NO: 899762 - RNA, 19 nt, Homo sapiens
  misc_RNA (1)...(19): siRNA sense strand
auagagggcucccagaagu

SEQ ID NO: 899763 - RNA, 19 nt, Homo sapiens
  misc_RNA (1)...(19): siRNA sense strand
ucauagagggcucccagaa

SEQ ID NO: 899764 - RNA, 19 nt, Homo sapiens
  misc_RNA (1)...(19): siRNA sense strand
cauagagggcucccagaag

SEQ ID NO: 899765 - RNA, 19 nt, Homo sapiens
  misc_RNA (1)...(19): siRNA sense strand
gagcugggcuaccuaaaua

SEQ ID NO: 899766 - RNA, 19 nt, Homo sapiens
  misc_RNA (1)...(19): siRNA sense strand
gaaggaagauggcgaguca

SEQ ID NO: 899767 - RNA, 19 nt, Homo sapiens
  misc_RNA (1)...(19): siRNA sense strand
gcucaguucucuccuuuga

SEQ ID NO: 899768 - RNA, 19 nt, Homo sapiens
  misc_RNA (1)...(19): siRNA sense strand
uccaacaucugucauuaua

SEQ ID NO: 899769 - RNA, 19 nt, Homo sapiens
  misc_RNA (1)...(19): siRNA sense strand
ucaguucucuccuuugaaa

SEQ ID NO: 899770 - RNA, 19 nt, Homo sapiens
  misc_RNA (1)...(19): siRNA sense strand
ugaagaugcugacacagaa

SEQ ID NO: 899771 - RNA, 19 nt, Homo sapiens
  misc_RNA (1)...(19): siRNA sense strand
caacaucugucauuauacu

SEQ ID NO: 899772 - RNA, 19 nt, Homo sapiens
  misc_RNA (1)...(19): siRNA sense strand
ccagcgaaguggugaaauu

SEQ ID NO: 899773 - RNA, 19 nt, Homo sapiens
  misc_RNA (1)...(19): siRNA sense strand
cgacagaaauggaugaaaa

SEQ ID NO: 899774 - RNA, 19 nt, Homo sapiens
  misc_RNA (1)...(19): siRNA sense strand
gaaauuccaacaucuguca

SEQ ID NO: 899775 - RNA, 19 nt, Homo sapiens
  misc_RNA (1)...(19): siRNA sense strand
cagaagagacaguaacuug

SEQ ID NO: 899776 - RNA, 19 nt, Homo sapiens
  misc_RNA (1)...(19): siRNA sense strand
cagcucaguucucuccuuu

SEQ ID NO: 899777 - RNA, 19 nt, Homo sapiens
  misc_RNA (1)...(19): siRNA sense strand
gcagagagcugggcuaccu

SEQ ID NO: 899778 - RNA, 19 nt, Homo sapiens
  misc_RNA (1)...(19): siRNA sense strand
guugcaguguggaauauuu

SEQ ID NO: 899779 - RNA, 19 nt, Homo sapiens
  misc_RNA (1)...(19): siRNA sense strand
gaagauggcgagucauugg

SEQ ID NO: 899780 - RNA, 19 nt, Homo sapiens
  misc_RNA (1)...(19): siRNA sense strand
gcgaaguggugaaauuugg

SEQ ID NO: 899781 - RNA, 19 nt, Homo sapiens
  misc_RNA (1)...(19): siRNA sense strand
uaacuugucuccagaugac

SEQ ID NO: 899782 - RNA, 19 nt, Homo sapiens
  misc_RNA (1)...(19): siRNA sense strand
guucucuccuuugaaauaa

SEQ ID NO: 899783 - RNA, 19 nt, Homo sapiens
  misc_RNA (1)...(19): siRNA sense strand
ggucagauucggagaguau

SEQ ID NO: 899784 - RNA, 19 nt, Homo sapiens
  misc_RNA (1)...(19): siRNA sense strand
acaggugcauggucagauu

SEQ ID NO: 899785 - RNA, 19 nt, Homo sapiens
  misc_RNA (1)...(19): siRNA sense strand
ggaagauggcgagucauug

SEQ ID NO: 899786 - RNA, 19 nt, Homo sapiens
  misc_RNA (1)...(19): siRNA sense strand
ccaguugcaguguggaaua

SEQ ID NO: 899787 - RNA, 19 nt, Homo sapiens
  misc_RNA (1)...(19): siRNA sense strand
ugacacagaagagacagua

SEQ ID NO: 899788 - RNA, 19 nt, Homo sapiens
  misc_RNA (1)...(19): siRNA sense strand
cagcgaaguggugaaauuu

SEQ ID NO: 899789 - RNA, 19 nt, Homo sapiens
  misc_RNA (1)...(19): siRNA sense strand
gcugggcuaccuaaauaaa

SEQ ID NO: 899790 - RNA, 19 nt, Homo sapiens
  misc_RNA (1)...(19): siRNA sense strand
auuccaacaucugucauua

SEQ ID NO: 899791 - RNA, 19 nt, Homo sapiens
  misc_RNA (1)...(19): siRNA sense strand
gauggcgagucauuggaau

SEQ ID NO: 899792 - RNA, 19 nt, Homo sapiens
  misc_RNA (1)...(19): siRNA sense strand
ggccgaaauuccaacaucu

SEQ ID NO: 899793 - RNA, 19 nt, Homo sapiens
  misc_RNA (1)...(19): siRNA sense strand
uuaccauccuggccaguug

SEQ ID NO: 899794 - RNA, 19 nt, Homo sapiens
  misc_RNA (1)...(19): siRNA sense strand
gucuccagaugacgguuua

SEQ ID NO: 899795 - RNA, 19 nt, Homo sapiens
  misc_RNA (1)...(19): siRNA sense strand
guaacuugucuccagauga

SEQ ID NO: 899796 - RNA, 19 nt, Homo sapiens
  misc_RNA (1)...(19): siRNA sense strand
uguggaauauuucagucaa

SEQ ID NO: 899797 - RNA, 19 nt, Homo sapiens
  misc_RNA (1)...(19): siRNA sense strand
cggaguauggcacuuauuc

SEQ ID NO: 899798 - RNA, 19 nt, Homo sapiens
  misc_RNA (1)...(19): siRNA sense strand
caguugcaguguggaauau

SEQ ID NO: 899799 - RNA, 19 nt, Homo sapiens
  misc_RNA (1)...(19): siRNA sense strand
guggaauauuucagucaau

SEQ ID NO: 899800 - RNA, 19 nt, Homo sapiens
  misc_RNA (1)...(19): siRNA sense strand
auucggagaguaucaguuu

SEQ ID NO: 899801 - RNA, 19 nt, Homo sapiens
  misc_RNA (1)...(19): siRNA sense strand
uggccgaaauuccaacauc

SEQ ID NO: 899802 - RNA, 19 nt, Homo sapiens
  misc_RNA (1)...(19): siRNA sense strand
ucgcucugcuccucccaaa

SEQ ID NO: 899803 - RNA, 19 nt, Homo sapiens
  misc_RNA (1)...(19): siRNA sense strand
ccagaugacgguuuaccau

SEQ ID NO: 899804 - RNA, 19 nt, Homo sapiens
  misc_RNA (1)...(19): siRNA sense strand
uugaagaugcugacacaga

SEQ ID NO: 899805 - RNA, 19 nt, Homo sapiens
  misc_RNA (1)...(19): siRNA sense strand
gaagaugcugacacagaag

SEQ ID NO: 899806 - RNA, 19 nt, Homo sapiens
  misc_RNA (1)...(19): siRNA sense strand
aaauucaacagcucaguuc

SEQ ID NO: 899807 - RNA, 19 nt, Homo sapiens
  misc_RNA (1)...(19): siRNA sense strand
agaaauggaugaaaaugag

SEQ ID NO: 899808 - RNA, 19 nt, Homo sapiens
  misc_RNA (1)...(19): siRNA sense strand
uggcgagucauuggaauuu

SEQ ID NO: 899809 - RNA, 19 nt, Homo sapiens
  misc_RNA (1)...(19): siRNA sense strand
aggaagauggcgagucauu

SEQ ID NO: 899810 - RNA, 19 nt, Homo sapiens
  misc_RNA (1)...(19): siRNA sense strand
agaagagacaguaacuugu

SEQ ID NO: 899811 - RNA, 19 nt, Homo sapiens
  misc_RNA (1)...(19): siRNA sense strand
aguucucuccuuugaaaua

SEQ ID NO: 899812 - RNA, 19 nt, Homo sapiens
  misc_RNA (1)...(19): siRNA sense strand
uaccggaguauggcacuua

SEQ ID NO: 899813 - RNA, 19 nt, Homo sapiens
  misc_RNA (1)...(19): siRNA sense strand
agagagcugggcuaccuaa

SEQ ID NO: 899814 - RNA, 19 nt, Homo sapiens
  misc_RNA (1)...(19): siRNA sense strand
gacacagaagagacaguaa

SEQ ID NO: 899815 - RNA, 19 nt, Homo sapiens
  misc_RNA (1)...(19): siRNA sense strand
acaggcccauaccggagua

SEQ ID NO: 899816 - RNA, 19 nt, Homo sapiens
  misc_RNA (1)...(19): siRNA sense strand
gaacuacucuucauguaua

SEQ ID NO: 899817 - RNA, 19 nt, Homo sapiens
  misc_RNA (1)...(19): siRNA sense strand
ggaacaagauuaugcauga

SEQ ID NO: 899818 - RNA, 19 nt, Homo sapiens
  misc_RNA (1)...(19): siRNA sense strand
aaagaucgcugguguguuu

SEQ ID NO: 899819 - RNA, 19 nt, Homo sapiens
  misc_RNA (1)...(19): siRNA sense strand
gcucaucucuccacaaauu

SEQ ID NO: 899820 - RNA, 19 nt, Homo sapiens
  misc_RNA (1)...(19): siRNA sense strand
gauaggaacuaguauauuc

SEQ ID NO: 899821 - RNA, 19 nt, Homo sapiens
  misc_RNA (1)...(19): siRNA sense strand
ggacagauuuacuacguuu

SEQ ID NO: 899822 - RNA, 19 nt, Homo sapiens
  misc_RNA (1)...(19): siRNA sense strand
ggacuucgguggaguaaug

SEQ ID NO: 899823 - RNA, 19 nt, Homo sapiens
  misc_RNA (1)...(19): siRNA sense strand
gcauugagcuuaaucugaa

SEQ ID NO: 899824 - RNA, 19 nt, Homo sapiens
  misc_RNA (1)...(19): siRNA sense strand
ggaccagaauuacaaauau

SEQ ID NO: 899825 - RNA, 19 nt, Homo sapiens
  misc_RNA (1)...(19): siRNA sense strand
ggacaaccaugaaaucugu

SEQ ID NO: 899826 - RNA, 19 nt, Homo sapiens
  misc_RNA (1)...(19): siRNA sense strand
gaacuggacagauuuacua

SEQ ID NO: 899827 - RNA, 19 nt, Homo sapiens
  misc_RNA (1)...(19): siRNA sense strand
gaagugagagauguuauua

SEQ ID NO: 899828 - RNA, 19 nt, Homo sapiens
  misc_RNA (1)...(19): siRNA sense strand
gggaugaccuucuggauau

SEQ ID NO: 899829 - RNA, 19 nt, Homo sapiens
  misc_RNA (1)...(19): siRNA sense strand
gaugggcgcuugugugauu

SEQ ID NO: 899830 - RNA, 19 nt, Homo sapiens
  misc_RNA (1)...(19): siRNA sense strand
gaggaaaguuguucgagaa

SEQ ID NO: 899831 - RNA, 19 nt, Homo sapiens
  misc_RNA (1)...(19): siRNA sense strand
ggaacaugguggaugauaa

SEQ ID NO: 899832 - RNA, 19 nt, Homo sapiens
  misc_RNA (1)...(19): siRNA sense strand
gaaguucucuccuugaaag

SEQ ID NO: 899833 - RNA, 19 nt, Homo sapiens
  misc_RNA (1)...(19): siRNA sense strand
gagcugagccgguuucuga

SEQ ID NO: 899834 - RNA, 19 nt, Homo sapiens
  misc_RNA (1)...(19): siRNA sense strand
ucucaaagcuuccuucaga

SEQ ID NO: 899835 - RNA, 19 nt, Homo sapiens
  misc_RNA (1)...(19): siRNA sense strand
gcacuuauguauuucuguu

SEQ ID NO: 899836 - RNA, 19 nt, Homo sapiens
  misc_RNA (1)...(19): siRNA sense strand
gaacaugguggaugauaaa

SEQ ID NO: 899837 - RNA, 19 nt, Homo sapiens
  misc_RNA (1)...(19): siRNA sense strand
gaagaacuggacagauuua

SEQ ID NO: 899838 - RNA, 19 nt, Homo sapiens
  misc_RNA (1)...(19): siRNA sense strand
gcauguggcucaagaagug

SEQ ID NO: 899839 - RNA, 19 nt, Homo sapiens
  misc_RNA (1)...(19): siRNA sense strand
caauugaggacaacaaaua

SEQ ID NO: 899840 - RNA, 19 nt, Homo sapiens
  misc_RNA (1)...(19): siRNA sense strand
gcaccuacuuugcagauug

SEQ ID NO: 899841 - RNA, 19 nt, Homo sapiens
  misc_RNA (1)...(19): siRNA sense strand
gccagccucuugauuguua

SEQ ID NO: 899842 - RNA, 19 nt, Homo sapiens
  misc_RNA (1)...(19): siRNA sense strand
gagcuucuuuaucauagua

SEQ ID NO: 899843 - RNA, 19 nt, Homo sapiens
  misc_RNA (1)...(19): siRNA sense strand
ggaguaauggacauauuua

SEQ ID NO: 899844 - RNA, 19 nt, Homo sapiens
  misc_RNA (1)...(19): siRNA sense strand
gauuucaccugcauuagaa

SEQ ID NO: 899845 - RNA, 19 nt, Homo sapiens
  misc_RNA (1)...(19): siRNA sense strand
gagaagacagugaaauaaa

SEQ ID NO: 899846 - RNA, 19 nt, Homo sapiens
  misc_RNA (1)...(19): siRNA sense strand
caagagcgcaggucacuaa

SEQ ID NO: 899847 - RNA, 19 nt, Homo sapiens
  misc_RNA (1)...(19): siRNA sense strand
cggcagagaugauagcaaa

SEQ ID NO: 899848 - RNA, 19 nt, Homo sapiens
  misc_RNA (1)...(19): siRNA sense strand
gcauuuccaugauguuuga

SEQ ID NO: 899849 - RNA, 19 nt, Homo sapiens
  misc_RNA (1)...(19): siRNA sense strand
gggauuuacuggauauauu

SEQ ID NO: 899850 - RNA, 19 nt, Homo sapiens
  misc_RNA (1)...(19): siRNA sense strand
gauaugguguuugggauuu

SEQ ID NO: 899851 - RNA, 19 nt, Homo sapiens
  misc_RNA (1)...(19): siRNA sense strand
gagcauuccggauuuauuu

SEQ ID NO: 899852 - RNA, 19 nt, Homo sapiens
  misc_RNA (1)...(19): siRNA sense strand
gaacuacuacucguaauug

SEQ ID NO: 899853 - RNA, 19 nt, Homo sapiens
  misc_RNA (1)...(19): siRNA sense strand
ggugaagacuggaacaaga

SEQ ID NO: 899854 - RNA, 19 nt, Homo sapiens
  misc_RNA (1)...(19): siRNA sense strand
uauggcagauggcuuauuu

SEQ ID NO: 899855 - RNA, 19 nt, Homo sapiens
  misc_RNA (1)...(19): siRNA sense strand
ggagguggcuuuuacagua

SEQ ID NO: 899856 - RNA, 19 nt, Homo sapiens
  misc_RNA (1)...(19): siRNA sense strand
gauuauggcagauggcuua

SEQ ID NO: 899857 - RNA, 19 nt, Homo sapiens
  misc_RNA (1)...(19): siRNA sense strand
gcaagaagaggaacucaga

SEQ ID NO: 899858 - RNA, 19 nt, Homo sapiens
  misc_RNA (1)...(19): siRNA sense strand
caacuuagaacuugaugaa

SEQ ID NO: 899859 - RNA, 19 nt, Homo sapiens
  misc_RNA (1)...(19): siRNA sense strand
gugaagaacguguuuauug

SEQ ID NO: 899860 - RNA, 19 nt, Homo sapiens
  misc_RNA (1)...(19): siRNA sense strand
ccacccagauguuucauga

SEQ ID NO: 899861 - RNA, 19 nt, Homo sapiens
  misc_RNA (1)...(19): siRNA sense strand
gcauggaccuugaagaucu

SEQ ID NO: 899862 - RNA, 19 nt, Homo sapiens
  misc_RNA (1)...(19): siRNA sense strand
gaucuucgccacuuucaaa

SEQ ID NO: 899863 - RNA, 19 nt, Homo sapiens
  misc_RNA (1)...(19): siRNA sense strand
guaauggaccaaacucuaa

SEQ ID NO: 899864 - RNA, 19 nt, Homo sapiens
  misc_RNA (1)...(19): siRNA sense strand
ccacaaauucgaacuacua

SEQ ID NO: 899865 - RNA, 19 nt, Homo sapiens
  misc_RNA (1)...(19): siRNA sense strand
aauguaaccuggaauaguu

SEQ ID NO: 899866 - RNA, 19 nt, Homo sapiens
  misc_RNA (1)...(19): siRNA sense strand
gaagaggaacucagagaga

SEQ ID NO: 899867 - RNA, 19 nt, Homo sapiens
  misc_RNA (1)...(19): siRNA sense strand
uugaagaacuggacagauu

SEQ ID NO: 899868 - RNA, 19 nt, Homo sapiens
  misc_RNA (1)...(19): siRNA sense strand
uaagauuucaccugcauua

SEQ ID NO: 899869 - RNA, 19 nt, Homo sapiens
  misc_RNA (1)...(19): siRNA sense strand
gagauaggaacuaguauau

SEQ ID NO: 899870 - RNA, 19 nt, Homo sapiens
  misc_RNA (1)...(19): siRNA sense strand
gaaugcauauacuuacaug

SEQ ID NO: 899871 - RNA, 19 nt, Homo sapiens
  misc_RNA (1)...(19): siRNA sense strand
uaagaggacaaucgcauua

SEQ ID NO: 899872 - RNA, 19 nt, Homo sapiens
  misc_RNA (1)...(19): siRNA sense strand
gauaagccacuguucauug

SEQ ID NO: 899873 - RNA, 19 nt, Homo sapiens
  misc_RNA (1)...(19): siRNA sense strand
aaaggaaagugcaagaaga

SEQ ID NO: 899874 - RNA, 19 nt, Homo sapiens
  misc_RNA (1)...(19): siRNA sense strand
uagcucaucucuccacaaa

SEQ ID NO: 899875 - RNA, 19 nt, Homo sapiens
  misc_RNA (1)...(19): siRNA sense strand
gaacguguuuauugcuguu

SEQ ID NO: 899876 - RNA, 19 nt, Homo sapiens
  misc_RNA (1)...(19): siRNA sense strand
ggaggaaggacaaccauga

SEQ ID NO: 899877 - RNA, 19 nt, Homo sapiens
  misc_RNA (1)...(19): siRNA sense strand
cagcagcagucgugcagua

SEQ ID NO: 899878 - RNA, 19 nt, Homo sapiens
  misc_RNA (1)...(19): siRNA sense strand
acagugagauauagaaaug

SEQ ID NO: 899879 - RNA, 19 nt, Homo sapiens
  misc_RNA (1)...(19): siRNA sense strand
ggaccaaacucuaaaugcu

SEQ ID NO: 899880 - RNA, 19 nt, Homo sapiens
  misc_RNA (1)...(19): siRNA sense strand
cuacagguguuugaaauug

SEQ ID NO: 899881 - RNA, 19 nt, Homo sapiens
  misc_RNA (1)...(19): siRNA sense strand
gaagacuggaacaagauua

SEQ ID NO: 899882 - RNA, 19 nt, Homo sapiens
  misc_RNA (1)...(19): siRNA sense strand
gcagauugcugaguaugug

SEQ ID NO: 899883 - RNA, 19 nt, Homo sapiens
  misc_RNA (1)...(19): siRNA sense strand
gaagacagugaaauaaaga

SEQ ID NO: 899884 - RNA, 19 nt, Homo sapiens
  misc_RNA (1)...(19): siRNA sense strand
ccaauaagccauucagugu

SEQ ID NO: 899885 - RNA, 19 nt, Homo sapiens
  misc_RNA (1)...(19): siRNA sense strand
ggauuuauuuccgauuuga

SEQ ID NO: 899886 - RNA, 19 nt, Homo sapiens
  misc_RNA (1)...(19): siRNA sense strand
ggacacgaaugccaacagu

SEQ ID NO: 899887 - RNA, 19 nt, Homo sapiens
  misc_RNA (1)...(19): siRNA sense strand
uaacaggcaugcaaauuuu

SEQ ID NO: 899888 - RNA, 19 nt, Homo sapiens
  misc_RNA (1)...(19): siRNA sense strand
gaaaacauguaacgcuaaa

SEQ ID NO: 899889 - RNA, 19 nt, Homo sapiens
  misc_RNA (1)...(19): siRNA sense strand
gaguacaguuucaacaaau

SEQ ID NO: 899890 - RNA, 19 nt, Homo sapiens
  misc_RNA (1)...(19): siRNA sense strand
uacaguggcuuuaaugaga

SEQ ID NO: 899891 - RNA, 19 nt, Homo sapiens
  misc_RNA (1)...(19): siRNA sense strand
ggaguuugguuguauuuac

SEQ ID NO: 899892 - RNA, 19 nt, Homo sapiens
  misc_RNA (1)...(19): siRNA sense strand
ucagucaacuuacgguuug

SEQ ID NO: 899893 - RNA, 19 nt, Homo sapiens
  misc_RNA (1)...(19): siRNA sense strand
gcgcuugugugauuguauu

SEQ ID NO: 899894 - RNA, 19 nt, Homo sapiens
  misc_RNA (1)...(19): siRNA sense strand
gaaagugcaagaagaggaa

SEQ ID NO: 899895 - RNA, 19 nt, Homo sapiens
  misc_RNA (1)...(19): siRNA sense strand
aagagaagacagugaaaua

SEQ ID NO: 899896 - RNA, 19 nt, Homo sapiens
  misc_RNA (1)...(19): siRNA sense strand
gaagaccuaaagaagcuua

SEQ ID NO: 899897 - RNA, 19 nt, Homo sapiens
  misc_RNA (1)...(19): siRNA sense strand
cuugugagcuugauauuuc

SEQ ID NO: 899898 - RNA, 19 nt, Homo sapiens
  misc_RNA (1)...(19): siRNA sense strand
ugaaaucugucgugugcaa

SEQ ID NO: 899899 - RNA, 19 nt, Homo sapiens
  misc_RNA (1)...(19): siRNA sense strand
gaaggacaaccaugaaauc

SEQ ID NO: 899900 - RNA, 19 nt, Homo sapiens
  misc_RNA (1)...(19): siRNA sense strand
cuucgccacuuucaaauaa

SEQ ID NO: 899901 - RNA, 19 nt, Homo sapiens
  misc_RNA (1)...(19): siRNA sense strand
gaagaaaccgauacgaucu

SEQ ID NO: 899902 - RNA, 19 nt, Homo sapiens
  misc_RNA (1)...(19): siRNA sense strand
ggaagugagagauguuauu

SEQ ID NO: 899903 - RNA, 19 nt, Homo sapiens
  misc_RNA (1)...(19): siRNA sense strand
gggaauguaaccuggaaua

SEQ ID NO: 899904 - RNA, 19 nt, Homo sapiens
  misc_RNA (1)...(19): siRNA sense strand
gagagaaccacccauacuu

SEQ ID NO: 899905 - RNA, 19 nt, Homo sapiens
  misc_RNA (1)...(19): siRNA sense strand
caacaaauacaucgaccaa

SEQ ID NO: 899906 - RNA, 19 nt, Homo sapiens
  misc_RNA (1)...(19): siRNA sense strand
caaagcuuccuucagauuu

SEQ ID NO: 899907 - RNA, 19 nt, Homo sapiens
  misc_RNA (1)...(19): siRNA sense strand
uuaaaugcauggaccuuga

SEQ ID NO: 899908 - RNA, 19 nt, Homo sapiens
  misc_RNA (1)...(19): siRNA sense strand
ccaaggaccagaauuacaa

SEQ ID NO: 899909 - RNA, 19 nt, Homo sapiens
  misc_RNA (1)...(19): siRNA sense strand
ggaaggacaaccaugaaau

SEQ ID NO: 899910 - RNA, 19 nt, Homo sapiens
  misc_RNA (1)...(19): siRNA sense strand
cgagggagcagcuggagua

SEQ ID NO: 899911 - RNA, 19 nt, Homo sapiens
  misc_RNA (1)...(19): siRNA sense strand
uauggaacaugguggauga

SEQ ID NO: 899912 - RNA, 19 nt, Homo sapiens
  misc_RNA (1)...(19): siRNA sense strand
caaaugcggacaccaaaga

SEQ ID NO: 899913 - RNA, 19 nt, Homo sapiens
  misc_RNA (1)...(19): siRNA sense strand
uaaaugcugugggacauau

SEQ ID NO: 899914 - RNA, 19 nt, Homo sapiens
  misc_RNA (1)...(19): siRNA sense strand
guaguucggcugauuaaga

SEQ ID NO: 899915 - RNA, 19 nt, Homo sapiens
  misc_RNA (1)...(19): siRNA sense strand
ggaacuacucuucauguau

SEQ ID NO: 899916 - RNA, 19 nt, Homo sapiens
  misc_RNA (1)...(19): siRNA sense strand
gaacugcugugcaaugugu

SEQ ID NO: 899917 - RNA, 19 nt, Homo sapiens
  misc_RNA (1)...(19): siRNA sense strand
ggucaacucugcaggaagu

SEQ ID NO: 899918 - RNA, 19 nt, Homo sapiens
  misc_RNA (1)...(19): siRNA sense strand
gcugagaguucuuccagau

SEQ ID NO: 899919 - RNA, 19 nt, Homo sapiens
  misc_RNA (1)...(19): siRNA sense strand
gcacagcugucuccaucuc

SEQ ID NO: 899920 - RNA, 19 nt, Homo sapiens
  misc_RNA (1)...(19): siRNA sense strand
gaagguggcauccagaaca

SEQ ID NO: 899921 - RNA, 19 nt, Homo sapiens
  misc_RNA (1)...(19): siRNA sense strand
gcacacagaagcacacaca

SEQ ID NO: 899922 - RNA, 19 nt, Homo sapiens
  misc_RNA (1)...(19): siRNA sense strand
ugagaguucuuccagaugu

SEQ ID NO: 899923 - RNA, 19 nt, Homo sapiens
  misc_RNA (1)...(19): siRNA sense strand
gggcccagauugcagagaa

SEQ ID NO: 899924 - RNA, 19 nt, Homo sapiens
  misc_RNA (1)...(19): siRNA sense strand
gcaaugugaccggcuauga

SEQ ID NO: 899925 - RNA, 19 nt, Homo sapiens
  misc_RNA (1)...(19): siRNA sense strand
uagcccagcuggacacaga

SEQ ID NO: 899926 - RNA, 19 nt, Homo sapiens
  misc_RNA (1)...(19): siRNA sense strand
uaugagggccgacacauug

SEQ ID NO: 899927 - RNA, 19 nt, Homo sapiens
  misc_RNA (1)...(19): siRNA sense strand
guaccaaggauacccaguu

SEQ ID NO: 899928 - RNA, 19 nt, Homo sapiens
  misc_RNA (1)...(19): siRNA sense strand
gagaagguggcauccagaa

SEQ ID NO: 899929 - RNA, 19 nt, Homo sapiens
  misc_RNA (1)...(19): siRNA sense strand
ggacaagcacacagaagca

SEQ ID NO: 899930 - RNA, 19 nt, Homo sapiens
  misc_RNA (1)...(19): siRNA sense strand
gcggucaacucugcaggaa

SEQ ID NO: 899931 - RNA, 19 nt, Homo sapiens
  misc_RNA (1)...(19): siRNA sense strand
uaccaaggauacccaguuc

SEQ ID NO: 899932 - RNA, 19 nt, Homo sapiens
  misc_RNA (1)...(19): siRNA sense strand
gggaauccggucagacuug

SEQ ID NO: 899933 - RNA, 19 nt, Homo sapiens
  misc_RNA (1)...(19): siRNA sense strand
ucgagugguuccuguauag

SEQ ID NO: 899934 - RNA, 19 nt, Homo sapiens
  misc_RNA (1)...(19): siRNA sense strand
gauacccaguucuccuaug

SEQ ID NO: 899935 - RNA, 19 nt, Homo sapiens
  misc_RNA (1)...(19): siRNA sense strand
guucuccuaugcugucuuc

SEQ ID NO: 899936 - RNA, 19 nt, Homo sapiens
  misc_RNA (1)...(19): siRNA sense strand
ccuuggaacugcugugcaa

SEQ ID NO: 899937 - RNA, 19 nt, Homo sapiens
  misc_RNA (1)...(19): siRNA sense strand
ccuaugcugucuucaaguc

SEQ ID NO: 899938 - RNA, 19 nt, Homo sapiens
  misc_RNA (1)...(19): siRNA sense strand
cgccaaagccuauguucga

SEQ ID NO: 899939 - RNA, 19 nt, Homo sapiens
  misc_RNA (1)...(19): siRNA sense strand
gccgacacauugccaugga

SEQ ID NO: 899940 - RNA, 19 nt, Homo sapiens
  misc_RNA (1)...(19): siRNA sense strand
gcgaggacaagcacacaga

SEQ ID NO: 899941 - RNA, 19 nt, Homo sapiens
  misc_RNA (1)...(19): siRNA sense strand
ggcccagauugcagagaaa

SEQ ID NO: 899942 - RNA, 19 nt, Homo sapiens
  misc_RNA (1)...(19): siRNA sense strand
gcaggugcagcgccuacaa

SEQ ID NO: 899943 - RNA, 19 nt, Homo sapiens
  misc_RNA (1)...(19): siRNA sense strand
gagaguucuuccagauguc

SEQ ID NO: 899944 - RNA, 19 nt, Homo sapiens
  misc_RNA (1)...(19): siRNA sense strand
gcccuggacacccuauuug

SEQ ID NO: 899945 - RNA, 19 nt, Homo sapiens
  misc_RNA (1)...(19): siRNA sense strand
uggaacugcugugcaaugu

SEQ ID NO: 899946 - RNA, 19 nt, Homo sapiens
  misc_RNA (1)...(19): siRNA sense strand
auacugcacugggcauugu

SEQ ID NO: 899947 - RNA, 19 nt, Homo sapiens
  misc_RNA (1)...(19): siRNA sense strand
gcaagguggagcugagagu

SEQ ID NO: 899948 - RNA, 19 nt, Homo sapiens
  misc_RNA (1)...(19): siRNA sense strand
ccaaggauacccaguucuc

SEQ ID NO: 899949 - RNA, 19 nt, Homo sapiens
  misc_RNA (1)...(19): siRNA sense strand
gugaugccguggugcucaa

SEQ ID NO: 899950 - RNA, 19 nt, Homo sapiens
  misc_RNA (1)...(19): siRNA sense strand
gauacugcacugggcauug

SEQ ID NO: 899951 - RNA, 19 nt, Homo sapiens
  misc_RNA (1)...(19): siRNA sense strand
gggugcagcaugccgacua

SEQ ID NO: 899952 - RNA, 19 nt, Homo sapiens
  misc_RNA (1)...(19): siRNA sense strand
ggauacccaguucuccuau

SEQ ID NO: 899953 - RNA, 19 nt, Homo sapiens
  misc_RNA (1)...(19): siRNA sense strand
ccacuguccuugguaccau

SEQ ID NO: 899954 - RNA, 19 nt, Homo sapiens
  misc_RNA (1)...(19): siRNA sense strand
uagcaggaggcacagugua

SEQ ID NO: 899955 - RNA, 19 nt, Homo sapiens
  misc_RNA (1)...(19): siRNA sense strand
caagguggagcugagaguu

SEQ ID NO: 899956 - RNA, 19 nt, Homo sapiens
  misc_RNA (1)...(19): siRNA sense strand
ggcuggagcucccuaugcu

SEQ ID NO: 899957 - RNA, 19 nt, Homo sapiens
  misc_RNA (1)...(19): siRNA sense strand
cuaugagggccgacacauu

SEQ ID NO: 899958 - RNA, 19 nt, Homo sapiens
  misc_RNA (1)...(19): siRNA sense strand
gcugcauacucuguagguu

SEQ ID NO: 899959 - RNA, 19 nt, Homo sapiens
  misc_RNA (1)...(19): siRNA sense strand
uucgagugguuccuguaua

SEQ ID NO: 899960 - RNA, 19 nt, Homo sapiens
  misc_RNA (1)...(19): siRNA sense strand
ggaaugcagcugaaagauu

SEQ ID NO: 899961 - RNA, 19 nt, Homo sapiens
  misc_RNA (1)...(19): siRNA sense strand
ucugaggccucugcauuug

SEQ ID NO: 899962 - RNA, 19 nt, Homo sapiens
  misc_RNA (1)...(19): siRNA sense strand
uccagcaccucuaccuguu

SEQ ID NO: 899963 - RNA, 19 nt, Homo sapiens
  misc_RNA (1)...(19): siRNA sense strand
acucugaggccucugcauu

SEQ ID NO: 899964 - RNA, 19 nt, Homo sapiens
  misc_RNA (1)...(19): siRNA sense strand
ccggaaugcagcugaaaga

SEQ ID NO: 899965 - RNA, 19 nt, Homo sapiens
  misc_RNA (1)...(19): siRNA sense strand
gacuuccucugcuaaauua

SEQ ID NO: 899966 - RNA, 19 nt, Homo sapiens
  misc_RNA (1)...(19): siRNA sense strand
gaacgcaugcuaucacaaa

SEQ ID NO: 899967 - RNA, 19 nt, Homo sapiens
  misc_RNA (1)...(19): siRNA sense strand
uaaagcgggugaugaccua

SEQ ID NO: 899968 - RNA, 19 nt, Homo sapiens
  misc_RNA (1)...(19): siRNA sense strand
gggaccaucuguucacuga

SEQ ID NO: 899969 - RNA, 19 nt, Homo sapiens
  misc_RNA (1)...(19): siRNA sense strand
ggacugggaccaucuguuc

SEQ ID NO: 899970 - RNA, 19 nt, Homo sapiens
  misc_RNA (1)...(19): siRNA sense strand
ggaagaagacuuuguuuug

SEQ ID NO: 899971 - RNA, 19 nt, Homo sapiens
  misc_RNA (1)...(19): siRNA sense strand
gcaaacaacagcuggaucu

SEQ ID NO: 899972 - RNA, 19 nt, Homo sapiens
  misc_RNA (1)...(19): siRNA sense strand
gaagaggcagauauuccua

SEQ ID NO: 899973 - RNA, 19 nt, Homo sapiens
  misc_RNA (1)...(19): siRNA sense strand
aacaacagcuggaucugaa

SEQ ID NO: 899974 - RNA, 19 nt, Homo sapiens
  misc_RNA (1)...(19): siRNA sense strand
aaacgcaucacagaaauuu

SEQ ID NO: 899975 - RNA, 19 nt, Homo sapiens
  misc_RNA (1)...(19): siRNA sense strand
ugaaacuccucaccaaagu

SEQ ID NO: 899976 - RNA, 19 nt, Homo sapiens
  misc_RNA (1)...(19): siRNA sense strand
guacucagccauucagaca

SEQ ID NO: 899977 - RNA, 19 nt, Homo sapiens
  misc_RNA (1)...(19): siRNA sense strand
gagacuuccucugcuaaau

SEQ ID NO: 899978 - RNA, 19 nt, Homo sapiens
  misc_RNA (1)...(19): siRNA sense strand
gaucugaacgcaugcuauc

SEQ ID NO: 899979 - RNA, 19 nt, Homo sapiens
  misc_RNA (1)...(19): siRNA sense strand
accgugaccuggacaauga

SEQ ID NO: 899980 - RNA, 19 nt, Homo sapiens
  misc_RNA (1)...(19): siRNA sense strand
ucaccucaauggcaagaau

SEQ ID NO: 899981 - RNA, 19 nt, Homo sapiens
  misc_RNA (1)...(19): siRNA sense strand
ggaggaaguacaggaagaa

SEQ ID NO: 899982 - RNA, 19 nt, Homo sapiens
  misc_RNA (1)...(19): siRNA sense strand
aaacaacagcuggaucuga

SEQ ID NO: 899983 - RNA, 19 nt, Homo sapiens
  misc_RNA (1)...(19): siRNA sense strand
ggaaguacaggaagaagac

SEQ ID NO: 899984 - RNA, 19 nt, Homo sapiens
  misc_RNA (1)...(19): siRNA sense strand
ggccgagaaucaccucaau

SEQ ID NO: 899985 - RNA, 19 nt, Homo sapiens
  misc_RNA (1)...(19): siRNA sense strand
gaagaagacuuuguuuugc

SEQ ID NO: 899986 - RNA, 19 nt, Homo sapiens
  misc_RNA (1)...(19): siRNA sense strand
caaaacgcaucacagaaau

SEQ ID NO: 899987 - RNA, 19 nt, Homo sapiens
  misc_RNA (1)...(19): siRNA sense strand
agacuuccucugcuaaauu

SEQ ID NO: 899988 - RNA, 19 nt, Homo sapiens
  misc_RNA (1)...(19): siRNA sense strand
cagcgcaggccgagaauca

SEQ ID NO: 899989 - RNA, 19 nt, Homo sapiens
  misc_RNA (1)...(19): siRNA sense strand
uggaggaaguacaggaaga

SEQ ID NO: 899990 - RNA, 19 nt, Homo sapiens
  misc_RNA (1)...(19): siRNA sense strand
acaggaagaagacuuuguu

SEQ ID NO: 899991 - RNA, 19 nt, Homo sapiens
  misc_RNA (1)...(19): siRNA sense strand
gaaacuccucaccaaagug

SEQ ID NO: 899992 - RNA, 19 nt, Homo sapiens
  misc_RNA (1)...(19): siRNA sense strand
cagauaaagcgggugauga

SEQ ID NO: 899993 - RNA, 19 nt, Homo sapiens
  misc_RNA (1)...(19): siRNA sense strand
ccucccagcauccagauaa

SEQ ID NO: 899994 - RNA, 19 nt, Homo sapiens
  misc_RNA (1)...(19): siRNA sense strand
caugaaguacucagccauu

SEQ ID NO: 899995 - RNA, 19 nt, Homo sapiens
  misc_RNA (1)...(19): siRNA sense strand
ggagaucgaccugaaacuc

SEQ ID NO: 899996 - RNA, 19 nt, Homo sapiens
  misc_RNA (1)...(19): siRNA sense strand
gaaguacucagccauucag

SEQ ID NO: 899997 - RNA, 19 nt, Homo sapiens
  misc_RNA (1)...(19): siRNA sense strand
gcacgaaguccgggaggau

SEQ ID NO: 899998 - RNA, 19 nt, Homo sapiens
  misc_RNA (1)...(19): siRNA sense strand
caggaagaagacuuuguuu

SEQ ID NO: 899999 - RNA, 19 nt, Homo sapiens
  misc_RNA (1)...(19): siRNA sense strand
aggauuugcucgacuugga

SEQ ID NO: 900000 - RNA, 19 nt, Homo sapiens
  misc_RNA (1)...(19): siRNA sense strand
ccaaacaggcaaacaacag

SEQ ID NO: 900001 - RNA, 19 nt, Homo sapiens
  misc_RNA (1)...(19): siRNA sense strand
acaaaacgcaucacagaaa

SEQ ID NO: 900002 - RNA, 19 nt, Homo sapiens
  misc_RNA (1)...(19): siRNA sense strand
ucacaaaacgcaucacaga

SEQ ID NO: 900003 - RNA, 19 nt, Homo sapiens
  misc_RNA (1)...(19): siRNA sense strand
ccgagaaucaccucaaugg

SEQ ID NO: 900004 - RNA, 19 nt, Homo sapiens
  misc_RNA (1)...(19): siRNA sense strand
ggcaggugauuccgugaag

SEQ ID NO: 900005 - RNA, 19 nt, Homo sapiens
  misc_RNA (1)...(19): siRNA sense strand
ccagauaaagcgggugaug

SEQ ID NO: 900006 - RNA, 19 nt, Homo sapiens
  misc_RNA (1)...(19): siRNA sense strand
gggcaggugauuccgugaa

SEQ ID NO: 900007 - RNA, 19 nt, Homo sapiens
  misc_RNA (1)...(19): siRNA sense strand
ccugaaacuccucaccaaa

SEQ ID NO: 900008 - RNA, 19 nt, Homo sapiens
  misc_RNA (1)...(19): siRNA sense strand
ggaucugaacgcaugcuau

SEQ ID NO: 900009 - RNA, 19 nt, Homo sapiens
  misc_RNA (1)...(19): siRNA sense strand
ggggcuggcuucauuggaa

SEQ ID NO: 900010 - RNA, 19 nt, Homo sapiens
  misc_RNA (1)...(19): siRNA sense strand
guacaggaagaagacuuug

SEQ ID NO: 900011 - RNA, 19 nt, Homo sapiens
  misc_RNA (1)...(19): siRNA sense strand
gaaagacagugaugaugaa

SEQ ID NO: 900012 - RNA, 19 nt, Homo sapiens
  misc_RNA (1)...(19): siRNA sense strand
caagaaagcagugaaauau

SEQ ID NO: 900013 - RNA, 19 nt, Homo sapiens
  misc_RNA (1)...(19): siRNA sense strand
ccaagaaagcagugaaaua

SEQ ID NO: 900014 - RNA, 19 nt, Homo sapiens
  misc_RNA (1)...(19): siRNA sense strand
agaaagcagugaaauauca

SEQ ID NO: 900015 - RNA, 19 nt, Homo sapiens
  misc_RNA (1)...(19): siRNA sense strand
caacaagguucgguccaaa

SEQ ID NO: 900016 - RNA, 19 nt, Homo sapiens
  misc_RNA (1)...(19): siRNA sense strand
cgaaagacagugaugauga

SEQ ID NO: 900017 - RNA, 19 nt, Homo sapiens
  misc_RNA (1)...(19): siRNA sense strand
gcgggaagcuggccaucuu

SEQ ID NO: 900018 - RNA, 19 nt, Homo sapiens
  misc_RNA (1)...(19): siRNA sense strand
gaagacggccaacaagguu

SEQ ID NO: 900019 - RNA, 19 nt, Homo sapiens
  misc_RNA (1)...(19): siRNA sense strand
ugaaagcgaucgagcaaag

SEQ ID NO: 900020 - RNA, 19 nt, Homo sapiens
  misc_RNA (1)...(19): siRNA sense strand
cgaagcaggcgcugaauga

SEQ ID NO: 900021 - RNA, 19 nt, Homo sapiens
  misc_RNA (1)...(19): siRNA sense strand
ucaagaagacggccaacaa

SEQ ID NO: 900022 - RNA, 19 nt, Homo sapiens
  misc_RNA (1)...(19): siRNA sense strand
ggaaguucguggagguaau

SEQ ID NO: 900023 - RNA, 19 nt, Homo sapiens
  misc_RNA (1)...(19): siRNA sense strand
aaaauggacucacagauga

SEQ ID NO: 900024 - RNA, 19 nt, Homo sapiens
  misc_RNA (1)...(19): siRNA sense strand
ggaucucacugcagacauc

SEQ ID NO: 900025 - RNA, 19 nt, Homo sapiens
  misc_RNA (1)...(19): siRNA sense strand
aagguucgguccaaauuga

SEQ ID NO: 900026 - RNA, 19 nt, Homo sapiens
  misc_RNA (1)...(19): siRNA sense strand
gagguaaugaccgaauaua

SEQ ID NO: 900027 - RNA, 19 nt, Homo sapiens
  misc_RNA (1)...(19): siRNA sense strand
ggucuuggcgucauccauu

SEQ ID NO: 900028 - RNA, 19 nt, Homo sapiens
  misc_RNA (1)...(19): siRNA sense strand
ccaacaagguucgguccaa

SEQ ID NO: 900029 - RNA, 19 nt, Homo sapiens
  misc_RNA (1)...(19): siRNA sense strand
ggaagaaaaucaugaucau

SEQ ID NO: 900030 - RNA, 19 nt, Homo sapiens
  misc_RNA (1)...(19): siRNA sense strand
guagagagccagggagaga

SEQ ID NO: 900031 - RNA, 19 nt, Homo sapiens
  misc_RNA (1)...(19): siRNA sense strand
gguaaugaccgaauauaac

SEQ ID NO: 900032 - RNA, 19 nt, Homo sapiens
  misc_RNA (1)...(19): siRNA sense strand
agacagugaugaugaagag

SEQ ID NO: 900033 - RNA, 19 nt, Homo sapiens
  misc_RNA (1)...(19): siRNA sense strand
gaaggaccaccaccaacga

SEQ ID NO: 900034 - RNA, 19 nt, Homo sapiens
  misc_RNA (1)...(19): siRNA sense strand
acgaagaacuggaagacau

SEQ ID NO: 900035 - RNA, 19 nt, Homo sapiens
  misc_RNA (1)...(19): siRNA sense strand
ggagugcgaaagacaguga

SEQ ID NO: 900036 - RNA, 19 nt, Homo sapiens
  misc_RNA (1)...(19): siRNA sense strand
gagacgaggcacaaugaga

SEQ ID NO: 900037 - RNA, 19 nt, Homo sapiens
  misc_RNA (1)...(19): siRNA sense strand
ugacgaagcaggcgcugaa

SEQ ID NO: 900038 - RNA, 19 nt, Homo sapiens
  misc_RNA (1)...(19): siRNA sense strand
ggagguaaugaccgaauau

SEQ ID NO: 900039 - RNA, 19 nt, Homo sapiens
  misc_RNA (1)...(19): siRNA sense strand
uggagguaaugaccgaaua

SEQ ID NO: 900040 - RNA, 19 nt, Homo sapiens
  misc_RNA (1)...(19): siRNA sense strand
cagaugagaagaccaaaca

SEQ ID NO: 900041 - RNA, 19 nt, Homo sapiens
  misc_RNA (1)...(19): siRNA sense strand
aacaggagcuggaggaucu

SEQ ID NO: 900042 - RNA, 19 nt, Homo sapiens
  misc_RNA (1)...(19): siRNA sense strand
caacuggagaucacuggaa

SEQ ID NO: 900043 - RNA, 19 nt, Homo sapiens
  misc_RNA (1)...(19): siRNA sense strand
ggaccaccaccaacgaaga

SEQ ID NO: 900044 - RNA, 19 nt, Homo sapiens
  misc_RNA (1)...(19): siRNA sense strand
gaaguucguggagguaaug

SEQ ID NO: 900045 - RNA, 19 nt, Homo sapiens
  misc_RNA (1)...(19): siRNA sense strand
ggaacauucuguggacuac

SEQ ID NO: 900046 - RNA, 19 nt, Homo sapiens
  misc_RNA (1)...(19): siRNA sense strand
ugauugaccgcaucgagua

SEQ ID NO: 900047 - RNA, 19 nt, Homo sapiens
  misc_RNA (1)...(19): siRNA sense strand
caagaagacggccaacaag

SEQ ID NO: 900048 - RNA, 19 nt, Homo sapiens
  misc_RNA (1)...(19): siRNA sense strand
gagcugcacgauauguuug

SEQ ID NO: 900049 - RNA, 19 nt, Homo sapiens
  misc_RNA (1)...(19): siRNA sense strand
caaaauggacucacagaug

SEQ ID NO: 900050 - RNA, 19 nt, Homo sapiens
  misc_RNA (1)...(19): siRNA sense strand
gaccaccaccaacgaagaa

SEQ ID NO: 900051 - RNA, 19 nt, Homo sapiens
  misc_RNA (1)...(19): siRNA sense strand
gcacccaacccagaugaga

SEQ ID NO: 900052 - RNA, 19 nt, Homo sapiens
  misc_RNA (1)...(19): siRNA sense strand
acucacagaugacgaagca

SEQ ID NO: 900053 - RNA, 19 nt, Homo sapiens
  misc_RNA (1)...(19): siRNA sense strand
cgagcugcacgauauguuu

SEQ ID NO: 900054 - RNA, 19 nt, Homo sapiens
  misc_RNA (1)...(19): siRNA sense strand
ucacugcagacaucaagaa

SEQ ID NO: 900055 - RNA, 19 nt, Homo sapiens
  misc_RNA (1)...(19): siRNA sense strand
guacaacguggaacauucu

SEQ ID NO: 900056 - RNA, 19 nt, Homo sapiens
  misc_RNA (1)...(19): siRNA sense strand
guaaugaccgaauauaacg

SEQ ID NO: 900057 - RNA, 19 nt, Homo sapiens
  misc_RNA (1)...(19): siRNA sense strand
acaagguucgguccaaauu

SEQ ID NO: 900058 - RNA, 19 nt, Homo sapiens
  misc_RNA (1)...(19): siRNA sense strand
gaguacaacguggaacauu

SEQ ID NO: 900059 - RNA, 19 nt, Homo sapiens
  misc_RNA (1)...(19): siRNA sense strand
uccgcgagcugcacgauau

SEQ ID NO: 900060 - RNA, 19 nt, Homo sapiens
  misc_RNA (1)...(19): siRNA sense strand
uugaacagguggaagagau

SEQ ID NO: 900061 - RNA, 19 nt, Homo sapiens
  misc_RNA (1)...(19): siRNA sense strand
gcgaaagacagugaugaug

SEQ ID NO: 900062 - RNA, 19 nt, Homo sapiens
  misc_RNA (1)...(19): siRNA sense strand
cgaagaacuggaagacaug

SEQ ID NO: 900063 - RNA, 19 nt, Homo sapiens
  misc_RNA (1)...(19): siRNA sense strand
caagguucgguccaaauug

SEQ ID NO: 900064 - RNA, 19 nt, Homo sapiens
  misc_RNA (1)...(19): siRNA sense strand
gaaacugucggaggaugug

SEQ ID NO: 900065 - RNA, 19 nt, Homo sapiens
  misc_RNA (1)...(19): siRNA sense strand
cugcagacaucaagaagac

SEQ ID NO: 900066 - RNA, 19 nt, Homo sapiens
  misc_RNA (1)...(19): siRNA sense strand
aguacaacguggaacauuc

SEQ ID NO: 900067 - RNA, 19 nt, Homo sapiens
  misc_RNA (1)...(19): siRNA sense strand
ggaucgggaccacuucaug

SEQ ID NO: 900068 - RNA, 19 nt, Homo sapiens
  misc_RNA (1)...(19): siRNA sense strand
gaucgagcaaagcauugaa

SEQ ID NO: 900069 - RNA, 19 nt, Homo sapiens
  misc_RNA (1)...(19): siRNA sense strand
caccaagaaagcagugaaa

SEQ ID NO: 900070 - RNA, 19 nt, Homo sapiens
  misc_RNA (1)...(19): siRNA sense strand
caccaacgaagaacuggaa

SEQ ID NO: 900071 - RNA, 19 nt, Homo sapiens
  misc_RNA (1)...(19): siRNA sense strand
acccagcacuccacacugu

SEQ ID NO: 900072 - RNA, 19 nt, Homo sapiens
  misc_RNA (1)...(19): siRNA sense strand
agacgaggcacaaugagau

SEQ ID NO: 900073 - RNA, 19 nt, Homo sapiens
  misc_RNA (1)...(19): siRNA sense strand
ggauguggagcaggugaaa

SEQ ID NO: 900074 - RNA, 19 nt, Homo sapiens
  misc_RNA (1)...(19): siRNA sense strand
caacgaagaacuggaagac

SEQ ID NO: 900075 - RNA, 19 nt, Homo sapiens
  misc_RNA (1)...(19): siRNA sense strand
gaaagcagugaaauaucag

SEQ ID NO: 900076 - RNA, 19 nt, Homo sapiens
  misc_RNA (1)...(19): siRNA sense strand
agguaaugaccgaauauaa

SEQ ID NO: 900077 - RNA, 19 nt, Homo sapiens
  misc_RNA (1)...(19): siRNA sense strand
agcaggcgcugaaugagau

SEQ ID NO: 900078 - RNA, 19 nt, Homo sapiens
  misc_RNA (1)...(19): siRNA sense strand
gagccagggagagaugauu

SEQ ID NO: 900079 - RNA, 19 nt, Homo sapiens
  misc_RNA (1)...(19): siRNA sense strand
agaagacggccaacaaggu

SEQ ID NO: 900080 - RNA, 19 nt, Homo sapiens
  misc_RNA (1)...(19): siRNA sense strand
aagcaggcgcugaaugaga

SEQ ID NO: 900081 - RNA, 19 nt, Homo sapiens
  misc_RNA (1)...(19): siRNA sense strand
gggcugcauugagaaacug

SEQ ID NO: 900082 - RNA, 19 nt, Homo sapiens
  misc_RNA (1)...(19): siRNA sense strand
ggaagaaggagaaauauuu

SEQ ID NO: 900083 - RNA, 19 nt, Homo sapiens
  misc_RNA (1)...(19): siRNA sense strand
gagcugaacucuuccauca

SEQ ID NO: 900084 - RNA, 19 nt, Homo sapiens
  misc_RNA (1)...(19): siRNA sense strand
ucaaagagauggacauugu

SEQ ID NO: 900085 - RNA, 19 nt, Homo sapiens
  misc_RNA (1)...(19): siRNA sense strand
ucaaugauguugucaaaga

SEQ ID NO: 900086 - RNA, 19 nt, Homo sapiens
  misc_RNA (1)...(19): siRNA sense strand
ccaaauaccacuugaaaga

SEQ ID NO: 900087 - RNA, 19 nt, Homo sapiens
  misc_RNA (1)...(19): siRNA sense strand
gcggaagggugacaucgua

SEQ ID NO: 900088 - RNA, 19 nt, Homo sapiens
  misc_RNA (1)...(19): siRNA sense strand
cuugaaagaugucauugua

SEQ ID NO: 900089 - RNA, 19 nt, Homo sapiens
  misc_RNA (1)...(19): siRNA sense strand
gaaguucucugugcgcuau

SEQ ID NO: 900090 - RNA, 19 nt, Homo sapiens
  misc_RNA (1)...(19): siRNA sense strand
gcacauacccagagcugaa

SEQ ID NO: 900091 - RNA, 19 nt, Homo sapiens
  misc_RNA (1)...(19): siRNA sense strand
ccucaaugauguugucaaa

SEQ ID NO: 900092 - RNA, 19 nt, Homo sapiens
  misc_RNA (1)...(19): siRNA sense strand
gcugaacucuuccaucaag

SEQ ID NO: 900093 - RNA, 19 nt, Homo sapiens
  misc_RNA (1)...(19): siRNA sense strand
ggagauagacaucaucaag

SEQ ID NO: 900094 - RNA, 19 nt, Homo sapiens
  misc_RNA (1)...(19): siRNA sense strand
ucaagcacauggagauaga

SEQ ID NO: 900095 - RNA, 19 nt, Homo sapiens
  misc_RNA (1)...(19): siRNA sense strand
ccaugagaaugacacgaua

SEQ ID NO: 900096 - RNA, 19 nt, Homo sapiens
  misc_RNA (1)...(19): siRNA sense strand
aaauaccacuugaaagaug

SEQ ID NO: 900097 - RNA, 19 nt, Homo sapiens
  misc_RNA (1)...(19): siRNA sense strand
ggaaauccuucugaacgau

SEQ ID NO: 900098 - RNA, 19 nt, Homo sapiens
  misc_RNA (1)...(19): siRNA sense strand
gaaccaccaugaguuugug

SEQ ID NO: 900099 - RNA, 19 nt, Homo sapiens
  misc_RNA (1)...(19): siRNA sense strand
gaagcuacgcuauuuccuu

SEQ ID NO: 900100 - RNA, 19 nt, Homo sapiens
  misc_RNA (1)...(19): siRNA sense strand
gcaucaagaucgaguucau

SEQ ID NO: 900101 - RNA, 19 nt, Homo sapiens
  misc_RNA (1)...(19): siRNA sense strand
ggccuucgacuuugaguuu

SEQ ID NO: 900102 - RNA, 19 nt, Homo sapiens
  misc_RNA (1)...(19): siRNA sense strand
caagauggagguugggauu

SEQ ID NO: 900103 - RNA, 19 nt, Homo sapiens
  misc_RNA (1)...(19): siRNA sense strand
gggaagaaggagaaauauu

SEQ ID NO: 900104 - RNA, 19 nt, Homo sapiens
  misc_RNA (1)...(19): siRNA sense strand
caaagagauggacauugua

SEQ ID NO: 900105 - RNA, 19 nt, Homo sapiens
  misc_RNA (1)...(19): siRNA sense strand
caacguguaccaugagaau

SEQ ID NO: 900106 - RNA, 19 nt, Homo sapiens
  misc_RNA (1)...(19): siRNA sense strand
gcacauggagauagacauc

SEQ ID NO: 900107 - RNA, 19 nt, Homo sapiens
  misc_RNA (1)...(19): siRNA sense strand
gcacauugaauuugaguac

SEQ ID NO: 900108 - RNA, 19 nt, Homo sapiens
  misc_RNA (1)...(19): siRNA sense strand
gcagaucgaacucuacuac

SEQ ID NO: 900109 - RNA, 19 nt, Homo sapiens
  misc_RNA (1)...(19): siRNA sense strand
ggaaccaccaugaguuugu

SEQ ID NO: 900110 - RNA, 19 nt, Homo sapiens
  misc_RNA (1)...(19): siRNA sense strand
ccacuugaaagaugucauu

SEQ ID NO: 900111 - RNA, 19 nt, Homo sapiens
  misc_RNA (1)...(19): siRNA sense strand
ggacaucaacaagaaguuc

SEQ ID NO: 900112 - RNA, 19 nt, Homo sapiens
  misc_RNA (1)...(19): siRNA sense strand
agauggagguugggauuga

SEQ ID NO: 900113 - RNA, 19 nt, Homo sapiens
  misc_RNA (1)...(19): siRNA sense strand
caaauaccacuugaaagau

SEQ ID NO: 900114 - RNA, 19 nt, Homo sapiens
  misc_RNA (1)...(19): siRNA sense strand
agagauggacauuguaguu

SEQ ID NO: 900115 - RNA, 19 nt, Homo sapiens
  misc_RNA (1)...(19): siRNA sense strand
ggugacaucguacggaaga

SEQ ID NO: 900116 - RNA, 19 nt, Homo sapiens
  misc_RNA (1)...(19): siRNA sense strand
uggaaauccuucugaacga

SEQ ID NO: 900117 - RNA, 19 nt, Homo sapiens
  misc_RNA (1)...(19): siRNA sense strand
uaaauccaaauaccacuug

SEQ ID NO: 900118 - RNA, 19 nt, Homo sapiens
  misc_RNA (1)...(19): siRNA sense strand
aauauuuccucuucuacga

SEQ ID NO: 900119 - RNA, 19 nt, Homo sapiens
  misc_RNA (1)...(19): siRNA sense strand
acgggaagaaggagaaaua

SEQ ID NO: 900120 - RNA, 19 nt, Homo sapiens
  misc_RNA (1)...(19): siRNA sense strand
gacaucaucaagcgagaaa

SEQ ID NO: 900121 - RNA, 19 nt, Homo sapiens
  misc_RNA (1)...(19): siRNA sense strand
ggacauuguaguucacaca

SEQ ID NO: 900122 - RNA, 19 nt, Homo sapiens
  misc_RNA (1)...(19): siRNA sense strand
gaaugugaagcuacgcuau

SEQ ID NO: 900123 - RNA, 19 nt, Homo sapiens
  misc_RNA (1)...(19): siRNA sense strand
agaucgaacucuacuacga

SEQ ID NO: 900124 - RNA, 19 nt, Homo sapiens
  misc_RNA (1)...(19): siRNA sense strand
aggacugucugcacauuga

SEQ ID NO: 900125 - RNA, 19 nt, Homo sapiens
  misc_RNA (1)...(19): siRNA sense strand
ugaggacugucugcacauu

SEQ ID NO: 900126 - RNA, 19 nt, Homo sapiens
  misc_RNA (1)...(19): siRNA sense strand
agauggacauuguaguuca

SEQ ID NO: 900127 - RNA, 19 nt, Homo sapiens
  misc_RNA (1)...(19): siRNA sense strand
gagauggacauuguaguuc

SEQ ID NO: 900128 - RNA, 19 nt, Homo sapiens
  misc_RNA (1)...(19): siRNA sense strand
gagguggaaauccuucuga

SEQ ID NO: 900129 - RNA, 19 nt, Homo sapiens
  misc_RNA (1)...(19): siRNA sense strand
gcgggaaccaccaugaguu

SEQ ID NO: 900130 - RNA, 19 nt, Homo sapiens
  misc_RNA (1)...(19): siRNA sense strand
ccaaguacgagaucaugga

SEQ ID NO: 900131 - RNA, 19 nt, Homo sapiens
  misc_RNA (1)...(19): siRNA sense strand
gccuucgacuuugaguuua

SEQ ID NO: 900132 - RNA, 19 nt, Homo sapiens
  misc_RNA (1)...(19): siRNA sense strand
ucgcaggccuucgacuuug

SEQ ID NO: 900133 - RNA, 19 nt, Homo sapiens
  misc_RNA (1)...(19): siRNA sense strand
ugcgggacaucaacaagaa

SEQ ID NO: 900134 - RNA, 19 nt, Homo sapiens
  misc_RNA (1)...(19): siRNA sense strand
caaugauguugucaaagag

SEQ ID NO: 900135 - RNA, 19 nt, Homo sapiens
  misc_RNA (1)...(19): siRNA sense strand
cgggaaccaccaugaguuu

SEQ ID NO: 900136 - RNA, 19 nt, Homo sapiens
  misc_RNA (1)...(19): siRNA sense strand
gcaccagggcaucaagauc

SEQ ID NO: 900137 - RNA, 19 nt, Homo sapiens
  misc_RNA (1)...(19): siRNA sense strand
augugaagcuacgcuauuu

SEQ ID NO: 900138 - RNA, 19 nt, Homo sapiens
  misc_RNA (1)...(19): siRNA sense strand
gucugcacauugaauuuga

SEQ ID NO: 900139 - RNA, 19 nt, Homo sapiens
  misc_RNA (1)...(19): siRNA sense strand
gagcaccagggcaucaaga

SEQ ID NO: 900140 - RNA, 19 nt, Homo sapiens
  misc_RNA (1)...(19): siRNA sense strand
aaagagauggacauuguag

SEQ ID NO: 900141 - RNA, 19 nt, Homo sapiens
  misc_RNA (1)...(19): siRNA sense strand
ucgggcagaucgaacucua

SEQ ID NO: 900142 - RNA, 19 nt, Homo sapiens
  misc_RNA (1)...(19): siRNA sense strand
ucaaccuggugcugauaga

SEQ ID NO: 900143 - RNA, 19 nt, Homo sapiens
  misc_RNA (1)...(19): siRNA sense strand
gaggacugucugcacauug

SEQ ID NO: 900144 - RNA, 19 nt, Homo sapiens
  misc_RNA (1)...(19): siRNA sense strand
ggacgggaagaaggagaaa

SEQ ID NO: 900145 - RNA, 19 nt, Homo sapiens
  misc_RNA (1)...(19): siRNA sense strand
ggacugucugcacauugaa

SEQ ID NO: 900146 - RNA, 19 nt, Homo sapiens
  misc_RNA (1)...(19): siRNA sense strand
augacacgauagccaagua

SEQ ID NO: 900147 - RNA, 19 nt, Homo sapiens
  misc_RNA (1)...(19): siRNA sense strand
gaaucaaaaucaagcacau

SEQ ID NO: 900148 - RNA, 19 nt, Homo sapiens
  misc_RNA (1)...(19): siRNA sense strand
aaauccaaauaccacuuga

SEQ ID NO: 900149 - RNA, 19 nt, Homo sapiens
  misc_RNA (1)...(19): siRNA sense strand
gagcguggagguggaaauc

SEQ ID NO: 900150 - RNA, 19 nt, Homo sapiens
  misc_RNA (1)...(19): siRNA sense strand
gcagagcguggagguggaa

SEQ ID NO: 900151 - RNA, 19 nt, Homo sapiens
  misc_RNA (1)...(19): siRNA sense strand
acauggagauagacaucau

SEQ ID NO: 900152 - RNA, 19 nt, Homo sapiens
  misc_RNA (1)...(19): siRNA sense strand
agacggaggacgggaagaa

SEQ ID NO: 900153 - RNA, 19 nt, Homo sapiens
  misc_RNA (1)...(19): siRNA sense strand
gcagcaggaagugguguug

SEQ ID NO: 900154 - RNA, 19 nt, Homo sapiens
  misc_RNA (1)...(19): siRNA sense strand
aaucaagcacauggagaua

SEQ ID NO: 900155 - RNA, 19 nt, Homo sapiens
  misc_RNA (1)...(19): siRNA sense strand
aaaucaagcacauggagau

SEQ ID NO: 900156 - RNA, 19 nt, Homo sapiens
  misc_RNA (1)...(19): siRNA sense strand
gggcaucaagaucgaguuc

SEQ ID NO: 900157 - RNA, 19 nt, Homo sapiens
  misc_RNA (1)...(19): siRNA sense strand
aaugugaagcuacgcuauu

SEQ ID NO: 900158 - RNA, 19 nt, Homo sapiens
  misc_RNA (1)...(19): siRNA sense strand
guggagaagccguaugagu

SEQ ID NO: 900159 - RNA, 19 nt, Homo sapiens
  misc_RNA (1)...(19): siRNA sense strand
aauaccacuugaaagaugu

SEQ ID NO: 900160 - RNA, 19 nt, Homo sapiens
  misc_RNA (1)...(19): siRNA sense strand
cgcaggccuucgacuuuga

SEQ ID NO: 900161 - RNA, 19 nt, Homo sapiens
  misc_RNA (1)...(19): siRNA sense strand
gaacuuaucaaccagauug

SEQ ID NO: 900162 - RNA, 19 nt, Homo sapiens
  misc_RNA (1)...(19): siRNA sense strand
gggcgcagcugaugaacug

SEQ ID NO: 900163 - RNA, 19 nt, Homo sapiens
  misc_RNA (1)...(19): siRNA sense strand
gcaccgaguucuuccucaa

SEQ ID NO: 900164 - RNA, 19 nt, Homo sapiens
  misc_RNA (1)...(19): siRNA sense strand
ggaacacgcuggccaacag

SEQ ID NO: 900165 - RNA, 19 nt, Homo sapiens
  misc_RNA (1)...(19): siRNA sense strand
gcuccuggccuccuucuuu

SEQ ID NO: 900166 - RNA, 19 nt, Homo sapiens
  misc_RNA (1)...(19): siRNA sense strand
gcuccacgcugucaaguac

SEQ ID NO: 900167 - RNA, 19 nt, Homo sapiens
  misc_RNA (1)...(19): siRNA sense strand
gccgcaagauggccaaguu

SEQ ID NO: 900168 - RNA, 19 nt, Homo sapiens
  misc_RNA (1)...(19): siRNA sense strand
cggcugaacuuaucaacca

SEQ ID NO: 900169 - RNA, 19 nt, Homo sapiens
  misc_RNA (1)...(19): siRNA sense strand
gcgaggagggcauggauga

SEQ ID NO: 900170 - RNA, 19 nt, Homo sapiens
  misc_RNA (1)...(19): siRNA sense strand
agauggagaucccgaacuu

SEQ ID NO: 900171 - RNA, 19 nt, Homo sapiens
  misc_RNA (1)...(19): siRNA sense strand
ggagaagggcaccgaguuc

SEQ ID NO: 900172 - RNA, 19 nt, Homo sapiens
  misc_RNA (1)...(19): siRNA sense strand
caagggcgcagcugaugaa

SEQ ID NO: 900173 - RNA, 19 nt, Homo sapiens
  misc_RNA (1)...(19): siRNA sense strand
ucaaggagagcgagaugaa

SEQ ID NO: 900174 - RNA, 19 nt, Homo sapiens
  misc_RNA (1)...(19): siRNA sense strand
gggcauggaugagcaguac

SEQ ID NO: 900175 - RNA, 19 nt, Homo sapiens
  misc_RNA (1)...(19): siRNA sense strand
ugacaggcaccaacgugua

SEQ ID NO: 900176 - RNA, 19 nt, Homo sapiens
  misc_RNA (1)...(19): siRNA sense strand
gaucgagccggacaugaug

SEQ ID NO: 900177 - RNA, 19 nt, Homo sapiens
  misc_RNA (1)...(19): siRNA sense strand
gcaccaacguguacaucac

SEQ ID NO: 900178 - RNA, 19 nt, Homo sapiens
  misc_RNA (1)...(19): siRNA sense strand
ggcaauggcagccgcaaga

SEQ ID NO: 900179 - RNA, 19 nt, Homo sapiens
  misc_RNA (1)...(19): siRNA sense strand
cagcagauccucagcuucu

SEQ ID NO: 900180 - RNA, 19 nt, Homo sapiens
  misc_RNA (1)...(19): siRNA sense strand
uggagugccucaaugaaca

SEQ ID NO: 900181 - RNA, 19 nt, Homo sapiens
  misc_RNA (1)...(19): siRNA sense strand
gaccaguuccugcucaugu

SEQ ID NO: 900182 - RNA, 19 nt, Homo sapiens
  misc_RNA (1)...(19): siRNA sense strand
ggcauccgcucuucuacca

SEQ ID NO: 900183 - RNA, 19 nt, Homo sapiens
  misc_RNA (1)...(19): siRNA sense strand
acaccaccuucaucaguga

SEQ ID NO: 900184 - RNA, 19 nt, Homo sapiens
  misc_RNA (1)...(19): siRNA sense strand
gagcaguaccggcagaucu

SEQ ID NO: 900185 - RNA, 19 nt, Homo sapiens
  misc_RNA (1)...(19): siRNA sense strand
gaugaacgucggccagaca

SEQ ID NO: 900186 - RNA, 19 nt, Homo sapiens
  misc_RNA (1)...(19): siRNA sense strand
cccagacacugcagaugga

SEQ ID NO: 900187 - RNA, 19 nt, Homo sapiens
  misc_RNA (1)...(19): siRNA sense strand
guacuacugccagaacuuc

SEQ ID NO: 900188 - RNA, 19 nt, Homo sapiens
  misc_RNA (1)...(19): siRNA sense strand
aaggagagcgagaugaaug

SEQ ID NO: 900189 - RNA, 19 nt, Homo sapiens
  misc_RNA (1)...(19): siRNA sense strand
caagaucgagccggacaug

SEQ ID NO: 900190 - RNA, 19 nt, Homo sapiens
  misc_RNA (1)...(19): siRNA sense strand
gcaagauggccaaguucuc

SEQ ID NO: 900191 - RNA, 19 nt, Homo sapiens
  misc_RNA (1)...(19): siRNA sense strand
cuacaccaccuucaucagu

SEQ ID NO: 900192 - RNA, 19 nt, Homo sapiens
  misc_RNA (1)...(19): siRNA sense strand
accaguuccugcucaugua

SEQ ID NO: 900193 - RNA, 19 nt, Homo sapiens
  misc_RNA (1)...(19): siRNA sense strand
ucacaagggcgcagcugau

SEQ ID NO: 900194 - RNA, 19 nt, Homo sapiens
  misc_RNA (1)...(19): siRNA sense strand
cuccuggccuccuucuuug

SEQ ID NO: 900195 - RNA, 19 nt, Homo sapiens
  misc_RNA (1)...(19): siRNA sense strand
caauggcagccgcaagaug

SEQ ID NO: 900196 - RNA, 19 nt, Homo sapiens
  misc_RNA (1)...(19): siRNA sense strand
caugauggguguggagcau

SEQ ID NO: 900197 - RNA, 19 nt, Homo sapiens
  misc_RNA (1)...(19): siRNA sense strand
uccacgcugucaaguacua

SEQ ID NO: 900198 - RNA, 19 nt, Homo sapiens
  misc_RNA (1)...(19): siRNA sense strand
gcaauggcagccgcaagau

SEQ ID NO: 900199 - RNA, 19 nt, Homo sapiens
  misc_RNA (1)...(19): siRNA sense strand
uccagcagauccucagcuu

SEQ ID NO: 900200 - RNA, 19 nt, Homo sapiens
  misc_RNA (1)...(19): siRNA sense strand
ucucccggcugaacuuauc

SEQ ID NO: 900201 - RNA, 19 nt, Homo sapiens
  misc_RNA (1)...(19): siRNA sense strand
gcauccggguucggcaaga

SEQ ID NO: 900202 - RNA, 19 nt, Homo sapiens
  misc_RNA (1)...(19): siRNA sense strand
ggaaaggacuaucuaauug

SEQ ID NO: 900203 - RNA, 19 nt, Homo sapiens
  misc_RNA (1)...(19): siRNA sense strand
gggaaaggacuaucuaauu

SEQ ID NO: 900204 - RNA, 19 nt, Homo sapiens
  misc_RNA (1)...(19): siRNA sense strand
cgaacaagcagaccuuuaa

SEQ ID NO: 900205 - RNA, 19 nt, Homo sapiens
  misc_RNA (1)...(19): siRNA sense strand
gaaggacgggugccuguuu

SEQ ID NO: 900206 - RNA, 19 nt, Homo sapiens
  misc_RNA (1)...(19): siRNA sense strand
gaacaggagaagcaacuga

SEQ ID NO: 900207 - RNA, 19 nt, Homo sapiens
  misc_RNA (1)...(19): siRNA sense strand
gcaggaaccucaggauuac

SEQ ID NO: 900208 - RNA, 19 nt, Homo sapiens
  misc_RNA (1)...(19): siRNA sense strand
agaagcaacugacgacaga

SEQ ID NO: 900209 - RNA, 19 nt, Homo sapiens
  misc_RNA (1)...(19): siRNA sense strand
gaaaaugccaaguggaaua

SEQ ID NO: 900210 - RNA, 19 nt, Homo sapiens
  misc_RNA (1)...(19): siRNA sense strand
gaaaggacuaucuaauugg

SEQ ID NO: 900211 - RNA, 19 nt, Homo sapiens
  misc_RNA (1)...(19): siRNA sense strand
ugcaggaaccucaggauua

SEQ ID NO: 900212 - RNA, 19 nt, Homo sapiens
  misc_RNA (1)...(19): siRNA sense strand
aaaggacuaucuaauugga

SEQ ID NO: 900213 - RNA, 19 nt, Homo sapiens
  misc_RNA (1)...(19): siRNA sense strand
caagucggcuuccaugcau

SEQ ID NO: 900214 - RNA, 19 nt, Homo sapiens
  misc_RNA (1)...(19): siRNA sense strand
gguagucccugaccaucug

SEQ ID NO: 900215 - RNA, 19 nt, Homo sapiens
  misc_RNA (1)...(19): siRNA sense strand
gaacaagcagaccuuuaac

SEQ ID NO: 900216 - RNA, 19 nt, Homo sapiens
  misc_RNA (1)...(19): siRNA sense strand
ggaagaacaggagaagcaa

SEQ ID NO: 900217 - RNA, 19 nt, Homo sapiens
  misc_RNA (1)...(19): siRNA sense strand
ccgaacaagcagaccuuua

SEQ ID NO: 900218 - RNA, 19 nt, Homo sapiens
  misc_RNA (1)...(19): siRNA sense strand
auccagagcuugaauaaaa

SEQ ID NO: 900219 - RNA, 19 nt, Homo sapiens
  misc_RNA (1)...(19): siRNA sense strand
aaccaagccugacccugaa

SEQ ID NO: 900220 - RNA, 19 nt, Homo sapiens
  misc_RNA (1)...(19): siRNA sense strand
gauuacagcaggugcagau

SEQ ID NO: 900221 - RNA, 19 nt, Homo sapiens
  misc_RNA (1)...(19): siRNA sense strand
gccugacccugaaguggaa

SEQ ID NO: 900222 - RNA, 19 nt, Homo sapiens
  misc_RNA (1)...(19): siRNA sense strand
ggagcgagaaucagagagu

SEQ ID NO: 900223 - RNA, 19 nt, Homo sapiens
  misc_RNA (1)...(19): siRNA sense strand
gaggagcgagaaucagaga

SEQ ID NO: 900224 - RNA, 19 nt, Homo sapiens
  misc_RNA (1)...(19): siRNA sense strand
gcagauccagagcuugaau

SEQ ID NO: 900225 - RNA, 19 nt, Homo sapiens
  misc_RNA (1)...(19): siRNA sense strand
gauccagagcuugaauaaa

SEQ ID NO: 900226 - RNA, 19 nt, Homo sapiens
  misc_RNA (1)...(19): siRNA sense strand
cagauccagagcuugaaua

SEQ ID NO: 900227 - RNA, 19 nt, Homo sapiens
  misc_RNA (1)...(19): siRNA sense strand
gagcuugaauaaaaugugu

SEQ ID NO: 900228 - RNA, 19 nt, Homo sapiens
  misc_RNA (1)...(19): siRNA sense strand
gcagaccuuuaacccuaca

SEQ ID NO: 900229 - RNA, 19 nt, Homo sapiens
  misc_RNA (1)...(19): siRNA sense strand
cauucuggcuaucccucua

SEQ ID NO: 900230 - RNA, 19 nt, Homo sapiens
  misc_RNA (1)...(19): siRNA sense strand
uggaagaacaggagaagca

SEQ ID NO: 900231 - RNA, 19 nt, Homo sapiens
  misc_RNA (1)...(19): siRNA sense strand
agauccagagcuugaauaa

SEQ ID NO: 900232 - RNA, 19 nt, Homo sapiens
  misc_RNA (1)...(19): siRNA sense strand
gggaaaaugccaaguggaa

SEQ ID NO: 900233 - RNA, 19 nt, Homo sapiens
  misc_RNA (1)...(19): siRNA sense strand
caagccagcagcagccaau

SEQ ID NO: 900234 - RNA, 19 nt, Homo sapiens
  misc_RNA (1)...(19): siRNA sense strand
ucaagucggcuuccaugca

SEQ ID NO: 900235 - RNA, 19 nt, Homo sapiens
  misc_RNA (1)...(19): siRNA sense strand
gaagagagcuuaugagugu

SEQ ID NO: 900236 - RNA, 19 nt, Homo sapiens
  misc_RNA (1)...(19): siRNA sense strand
gcagaaagguguagaaugu

SEQ ID NO: 900237 - RNA, 19 nt, Homo sapiens
  misc_RNA (1)...(19): siRNA sense strand
gacaacaacugaaauguaa

SEQ ID NO: 900238 - RNA, 19 nt, Homo sapiens
  misc_RNA (1)...(19): siRNA sense strand
gagaaacccuauaaaugua

SEQ ID NO: 900239 - RNA, 19 nt, Homo sapiens
  misc_RNA (1)...(19): siRNA sense strand
gagaggaccuauagaugua

SEQ ID NO: 900240 - RNA, 19 nt, Homo sapiens
  misc_RNA (1)...(19): siRNA sense strand
gaagucccaucaaucaaua

SEQ ID NO: 900241 - RNA, 19 nt, Homo sapiens
  misc_RNA (1)...(19): siRNA sense strand
gcaauaauccauccaaauu

SEQ ID NO: 900242 - RNA, 19 nt, Homo sapiens
  misc_RNA (1)...(19): siRNA sense strand
gaaauaccuuuauccagaa

SEQ ID NO: 900243 - RNA, 19 nt, Homo sapiens
  misc_RNA (1)...(19): siRNA sense strand
ggaaaggcccuauaaaugu

SEQ ID NO: 900244 - RNA, 19 nt, Homo sapiens
  misc_RNA (1)...(19): siRNA sense strand
gagaaacccuaucagugua

SEQ ID NO: 900245 - RNA, 19 nt, Homo sapiens
  misc_RNA (1)...(19): siRNA sense strand
ggacaacaacugaaaugua

SEQ ID NO: 900246 - RNA, 19 nt, Homo sapiens
  misc_RNA (1)...(19): siRNA sense strand
gaaaggcccuauaaaugug

SEQ ID NO: 900247 - RNA, 19 nt, Homo sapiens
  misc_RNA (1)...(19): siRNA sense strand
gaaaucauccugcauuaau

SEQ ID NO: 900248 - RNA, 19 nt, Homo sapiens
  misc_RNA (1)...(19): siRNA sense strand
gagagaaacccuauaaaug

SEQ ID NO: 900249 - RNA, 19 nt, Homo sapiens
  misc_RNA (1)...(19): siRNA sense strand
caagagaagucccaucaau

SEQ ID NO: 900250 - RNA, 19 nt, Homo sapiens
  misc_RNA (1)...(19): siRNA sense strand
gaagucaaaucucuuucaa

SEQ ID NO: 900251 - RNA, 19 nt, Homo sapiens
  misc_RNA (1)...(19): siRNA sense strand
ucaaaucucuuucaacauc

SEQ ID NO: 900252 - RNA, 19 nt, Homo sapiens
  misc_RNA (1)...(19): siRNA sense strand
ggagagaaacccuauaaau

SEQ ID NO: 900253 - RNA, 19 nt, Homo sapiens
  misc_RNA (1)...(19): siRNA sense strand
guagaaaguuauucaguuc

SEQ ID NO: 900254 - RNA, 19 nt, Homo sapiens
  misc_RNA (1)...(19): siRNA sense strand
caagaaauccuaucagugu

SEQ ID NO: 900255 - RNA, 19 nt, Homo sapiens
  misc_RNA (1)...(19): siRNA sense strand
gaaauguaaugccuguaga

SEQ ID NO: 900256 - RNA, 19 nt, Homo sapiens
  misc_RNA (1)...(19): siRNA sense strand
gaacucaacccucauucaa

SEQ ID NO: 900257 - RNA, 19 nt, Homo sapiens
  misc_RNA (1)...(19): siRNA sense strand
gaggaaaggcccuauaaau

SEQ ID NO: 900258 - RNA, 19 nt, Homo sapiens
  misc_RNA (1)...(19): siRNA sense strand
gaaauccaaugucaucgau

SEQ ID NO: 900259 - RNA, 19 nt, Homo sapiens
  misc_RNA (1)...(19): siRNA sense strand
gcagaagucaaaucucuuu

SEQ ID NO: 900260 - RNA, 19 nt, Homo sapiens
  misc_RNA (1)...(19): siRNA sense strand
gaauguaacagauguggaa

SEQ ID NO: 900261 - RNA, 19 nt, Homo sapiens
  misc_RNA (1)...(19): siRNA sense strand
gaaaagcccuaugaaugua

SEQ ID NO: 900262 - RNA, 19 nt, Homo sapiens
  misc_RNA (1)...(19): siRNA sense strand
ggaaguggccgugcagaaa

SEQ ID NO: 900263 - RNA, 19 nt, Homo sapiens
  misc_RNA (1)...(19): siRNA sense strand
gaacagagaaacuuguaca

SEQ ID NO: 900264 - RNA, 19 nt, Homo sapiens
  misc_RNA (1)...(19): siRNA sense strand
agucagaucuugugaaaca

SEQ ID NO: 900265 - RNA, 19 nt, Homo sapiens
  misc_RNA (1)...(19): siRNA sense strand
ggagagaggaccuauagau

SEQ ID NO: 900266 - RNA, 19 nt, Homo sapiens
  misc_RNA (1)...(19): siRNA sense strand
gaaaggagccaugguugga

SEQ ID NO: 900267 - RNA, 19 nt, Homo sapiens
  misc_RNA (1)...(19): siRNA sense strand
agagaaacccuauaaaugu

SEQ ID NO: 900268 - RNA, 19 nt, Homo sapiens
  misc_RNA (1)...(19): siRNA sense strand
uggaaaucauccugcauua

SEQ ID NO: 900269 - RNA, 19 nt, Homo sapiens
  misc_RNA (1)...(19): siRNA sense strand
gaaguggaagcuugauaaa

SEQ ID NO: 900270 - RNA, 19 nt, Homo sapiens
  misc_RNA (1)...(19): siRNA sense strand
ggaaaucauccugcauuaa

SEQ ID NO: 900271 - RNA, 19 nt, Homo sapiens
  misc_RNA (1)...(19): siRNA sense strand
agaaagguguagaauguga

SEQ ID NO: 900272 - RNA, 19 nt, Homo sapiens
  misc_RNA (1)...(19): siRNA sense strand
agucaaaucucuuucaaca

SEQ ID NO: 900273 - RNA, 19 nt, Homo sapiens
  misc_RNA (1)...(19): siRNA sense strand
gaaugugacggaucuaaga

SEQ ID NO: 900274 - RNA, 19 nt, Homo sapiens
  misc_RNA (1)...(19): siRNA sense strand
gccaagaaauccuaucagu

SEQ ID NO: 900275 - RNA, 19 nt, Homo sapiens
  misc_RNA (1)...(19): siRNA sense strand
gaaauccuaucaguguaau

SEQ ID NO: 900276 - RNA, 19 nt, Homo sapiens
  misc_RNA (1)...(19): siRNA sense strand
ugauguaucuuccuugcaa

SEQ ID NO: 900277 - RNA, 19 nt, Homo sapiens
  misc_RNA (1)...(19): siRNA sense strand
caacccucauucaacauaa

SEQ ID NO: 900278 - RNA, 19 nt, Homo sapiens
  misc_RNA (1)...(19): siRNA sense strand
uaaugccuguagaaaguua

SEQ ID NO: 900279 - RNA, 19 nt, Homo sapiens
  misc_RNA (1)...(19): siRNA sense strand
uguaaugccuguagaaagu

SEQ ID NO: 900280 - RNA, 19 nt, Homo sapiens
  misc_RNA (1)...(19): siRNA sense strand
aguggaagcuugauaaaca

SEQ ID NO: 900281 - RNA, 19 nt, Homo sapiens
  misc_RNA (1)...(19): siRNA sense strand
gagagaggaccuauagaug

SEQ ID NO: 900282 - RNA, 19 nt, Homo sapiens
  misc_RNA (1)...(19): siRNA sense strand
guuauucaguucaaaguca

SEQ ID NO: 900283 - RNA, 19 nt, Homo sapiens
  misc_RNA (1)...(19): siRNA sense strand
gcagaacucaacccucauu

SEQ ID NO: 900284 - RNA, 19 nt, Homo sapiens
  misc_RNA (1)...(19): siRNA sense strand
cauccugcauuaaucauga

SEQ ID NO: 900285 - RNA, 19 nt, Homo sapiens
  misc_RNA (1)...(19): siRNA sense strand
gcagaggaaaggcccuaua

SEQ ID NO: 900286 - RNA, 19 nt, Homo sapiens
  misc_RNA (1)...(19): siRNA sense strand
caacaacugaaauguaaug

SEQ ID NO: 900287 - RNA, 19 nt, Homo sapiens
  misc_RNA (1)...(19): siRNA sense strand
ugugaucuauguggaaaua

SEQ ID NO: 900288 - RNA, 19 nt, Homo sapiens
  misc_RNA (1)...(19): siRNA sense strand
cagaggaaaggcccuauaa

SEQ ID NO: 900289 - RNA, 19 nt, Homo sapiens
  misc_RNA (1)...(19): siRNA sense strand
ugacggaucuaagaaaaua

SEQ ID NO: 900290 - RNA, 19 nt, Homo sapiens
  misc_RNA (1)...(19): siRNA sense strand
aaagaauucacuccagaua

SEQ ID NO: 900291 - RNA, 19 nt, Homo sapiens
  misc_RNA (1)...(19): siRNA sense strand
gagaaguggaagcuugaua

SEQ ID NO: 900292 - RNA, 19 nt, Homo sapiens
  misc_RNA (1)...(19): siRNA sense strand
gggaugugaugcuggagaa

SEQ ID NO: 900293 - RNA, 19 nt, Homo sapiens
  misc_RNA (1)...(19): siRNA sense strand
ugugagaacuguggaaaug

SEQ ID NO: 900294 - RNA, 19 nt, Homo sapiens
  misc_RNA (1)...(19): siRNA sense strand
gguaaagccuucgcugaca

SEQ ID NO: 900295 - RNA, 19 nt, Homo sapiens
  misc_RNA (1)...(19): siRNA sense strand
cuauagauguagugaaugu

SEQ ID NO: 900296 - RNA, 19 nt, Homo sapiens
  misc_RNA (1)...(19): siRNA sense strand
ggaaaagcccuaugaaugu

SEQ ID NO: 900297 - RNA, 19 nt, Homo sapiens
  misc_RNA (1)...(19): siRNA sense strand
gacauuggagggcagauuu

SEQ ID NO: 900298 - RNA, 19 nt, Homo sapiens
  misc_RNA (1)...(19): siRNA sense strand
gaaaaugcauacuaaagag

SEQ ID NO: 900299 - RNA, 19 nt, Homo sapiens
  misc_RNA (1)...(19): siRNA sense strand
gaaaugccuacaagcagaa

SEQ ID NO: 900300 - RNA, 19 nt, Homo sapiens
  misc_RNA (1)...(19): siRNA sense strand
caaacccgaugugaucuug

SEQ ID NO: 900301 - RNA, 19 nt, Homo sapiens
  misc_RNA (1)...(19): siRNA sense strand
gaugauaauggauacagaa

SEQ ID NO: 900302 - RNA, 19 nt, Homo sapiens
  misc_RNA (1)...(19): siRNA sense strand
aaauguagcauaugugaga

SEQ ID NO: 900303 - RNA, 19 nt, Homo sapiens
  misc_RNA (1)...(19): siRNA sense strand
agagaaacccuaucagugu

SEQ ID NO: 900304 - RNA, 19 nt, Homo sapiens
  misc_RNA (1)...(19): siRNA sense strand
cuaaagagaaacccuauca

SEQ ID NO: 900305 - RNA, 19 nt, Homo sapiens
  misc_RNA (1)...(19): siRNA sense strand
aagcagaagucaaaucucu

SEQ ID NO: 900306 - RNA, 19 nt, Homo sapiens
  misc_RNA (1)...(19): siRNA sense strand
ugucauagcuguggaagag

SEQ ID NO: 900307 - RNA, 19 nt, Homo sapiens
  misc_RNA (1)...(19): siRNA sense strand
gaagccaaaggaugugaaa

SEQ ID NO: 900308 - RNA, 19 nt, Homo sapiens
  misc_RNA (1)...(19): siRNA sense strand
ccagaaauccaaugucauc

SEQ ID NO: 900309 - RNA, 19 nt, Homo sapiens
  misc_RNA (1)...(19): siRNA sense strand
agaaguggaagcuugauaa

SEQ ID NO: 900310 - RNA, 19 nt, Homo sapiens
  misc_RNA (1)...(19): siRNA sense strand
agagaagucccaucaauca

SEQ ID NO: 900311 - RNA, 19 nt, Homo sapiens
  misc_RNA (1)...(19): siRNA sense strand
gggaagagagcuuaugagu

SEQ ID NO: 900312 - RNA, 19 nt, Homo sapiens
  misc_RNA (1)...(19): siRNA sense strand
aagaaauccuaucagugua

SEQ ID NO: 900313 - RNA, 19 nt, Homo sapiens
  misc_RNA (1)...(19): siRNA sense strand
aggaaaggcccuauaaaug

SEQ ID NO: 900314 - RNA, 19 nt, Homo sapiens
  misc_RNA (1)...(19): siRNA sense strand
gcaacacuauguacaaaau

SEQ ID NO: 900315 - RNA, 19 nt, Homo sapiens
  misc_RNA (1)...(19): siRNA sense strand
gcggagagaggaccuauag

SEQ ID NO: 900316 - RNA, 19 nt, Homo sapiens
  misc_RNA (1)...(19): siRNA sense strand
gggaaaagcccuaugaaug

SEQ ID NO: 900317 - RNA, 19 nt, Homo sapiens
  misc_RNA (1)...(19): siRNA sense strand
guaaugaaugugagaaauc

SEQ ID NO: 900318 - RNA, 19 nt, Homo sapiens
  misc_RNA (1)...(19): siRNA sense strand
caaaucucuuucaacauca

SEQ ID NO: 900319 - RNA, 19 nt, Homo sapiens
  misc_RNA (1)...(19): siRNA sense strand
auccggaaauuaaaccuua

SEQ ID NO: 900320 - RNA, 19 nt, Homo sapiens
  misc_RNA (1)...(19): siRNA sense strand
ucccagaaauccaauguca

SEQ ID NO: 900321 - RNA, 19 nt, Homo sapiens
  misc_RNA (1)...(19): siRNA sense strand
uaucuuccuugcaacacua

SEQ ID NO: 900322 - RNA, 19 nt, Homo sapiens
  misc_RNA (1)...(19): siRNA sense strand
cccuauaaauguagcauau

SEQ ID NO: 900323 - RNA, 19 nt, Homo sapiens
  misc_RNA (1)...(19): siRNA sense strand
augugaugcuggagaauua

SEQ ID NO: 900324 - RNA, 19 nt, Homo sapiens
  misc_RNA (1)...(19): siRNA sense strand
ccuacaagcagaagucaaa

SEQ ID NO: 900325 - RNA, 19 nt, Homo sapiens
  misc_RNA (1)...(19): siRNA sense strand
cugcauuaaucaugagaaa

SEQ ID NO: 900326 - RNA, 19 nt, Homo sapiens
  misc_RNA (1)...(19): siRNA sense strand
ccuuauggauguucugaau

SEQ ID NO: 900327 - RNA, 19 nt, Homo sapiens
  misc_RNA (1)...(19): siRNA sense strand
gaugugaugcuggagaauu

SEQ ID NO: 900328 - RNA, 19 nt, Homo sapiens
  misc_RNA (1)...(19): siRNA sense strand
cgggagagaaacccuauaa

SEQ ID NO: 900329 - RNA, 19 nt, Homo sapiens
  misc_RNA (1)...(19): siRNA sense strand
acucaacccucauucaaca

SEQ ID NO: 900330 - RNA, 19 nt, Homo sapiens
  misc_RNA (1)...(19): siRNA sense strand
caaagucacgccuucaaag

SEQ ID NO: 900331 - RNA, 19 nt, Homo sapiens
  misc_RNA (1)...(19): siRNA sense strand
gcuuaugagugugaucuau

SEQ ID NO: 900332 - RNA, 19 nt, Homo sapiens
  misc_RNA (1)...(19): siRNA sense strand
aauccaaugucaucgauca

SEQ ID NO: 900333 - RNA, 19 nt, Homo sapiens
  misc_RNA (1)...(19): siRNA sense strand
aaagagaaacccuaucagu

SEQ ID NO: 900334 - RNA, 19 nt, Homo sapiens
  misc_RNA (1)...(19): siRNA sense strand
ggacauuggagggcagauu

SEQ ID NO: 900335 - RNA, 19 nt, Homo sapiens
  misc_RNA (1)...(19): siRNA sense strand
uaacagcccugacuaagaa

SEQ ID NO: 900336 - RNA, 19 nt, Homo sapiens
  misc_RNA (1)...(19): siRNA sense strand
gaacaaggaucccaguuac

SEQ ID NO: 900337 - RNA, 19 nt, Homo sapiens
  misc_RNA (1)...(19): siRNA sense strand
gcaaugcguucuuucuaaa

SEQ ID NO: 900338 - RNA, 19 nt, Homo sapiens
  misc_RNA (1)...(19): siRNA sense strand
ccaaagaccuuauuaucag

SEQ ID NO: 900339 - RNA, 19 nt, Homo sapiens
  misc_RNA (1)...(19): siRNA sense strand
ccagagaaccugagaguga

SEQ ID NO: 900340 - RNA, 19 nt, Homo sapiens
  misc_RNA (1)...(19): siRNA sense strand
uaagaagccugaugucuac

SEQ ID NO: 900341 - RNA, 19 nt, Homo sapiens
  misc_RNA (1)...(19): siRNA sense strand
ucauauaucuggaaguuca

SEQ ID NO: 900342 - RNA, 19 nt, Homo sapiens
  misc_RNA (1)...(19): siRNA sense strand
ggaccucucugugcaguau

SEQ ID NO: 900343 - RNA, 19 nt, Homo sapiens
  misc_RNA (1)...(19): siRNA sense strand
ugaacaaggaucccaguua

SEQ ID NO: 900344 - RNA, 19 nt, Homo sapiens
  misc_RNA (1)...(19): siRNA sense strand
gagcaaugcguucuuucua

SEQ ID NO: 900345 - RNA, 19 nt, Homo sapiens
  misc_RNA (1)...(19): siRNA sense strand
cuaagaagccugaugucua

SEQ ID NO: 900346 - RNA, 19 nt, Homo sapiens
  misc_RNA (1)...(19): siRNA sense strand
cgucauauaucuggaaguu

SEQ ID NO: 900347 - RNA, 19 nt, Homo sapiens
  misc_RNA (1)...(19): siRNA sense strand
ccagggaaacgucauauau

SEQ ID NO: 900348 - RNA, 19 nt, Homo sapiens
  misc_RNA (1)...(19): siRNA sense strand
guaacagcccugacuaaga

SEQ ID NO: 900349 - RNA, 19 nt, Homo sapiens
  misc_RNA (1)...(19): siRNA sense strand
ugucagggaugguuccaaa

SEQ ID NO: 900350 - RNA, 19 nt, Homo sapiens
  misc_RNA (1)...(19): siRNA sense strand
gcuuugggcuucaauugga

SEQ ID NO: 900351 - RNA, 19 nt, Homo sapiens
  misc_RNA (1)...(19): siRNA sense strand
ggaagccgugugagacaua

SEQ ID NO: 900352 - RNA, 19 nt, Homo sapiens
  misc_RNA (1)...(19): siRNA sense strand
gagaggaagccgugugaga

SEQ ID NO: 900353 - RNA, 19 nt, Homo sapiens
  misc_RNA (1)...(19): siRNA sense strand
gaccuuauuaucagcauuu

SEQ ID NO: 900354 - RNA, 19 nt, Homo sapiens
  misc_RNA (1)...(19): siRNA sense strand
gagcugccacccauucaaa

SEQ ID NO: 900355 - RNA, 19 nt, Homo sapiens
  misc_RNA (1)...(19): siRNA sense strand
gcuuauggcuacugguuca

SEQ ID NO: 900356 - RNA, 19 nt, Homo sapiens
  misc_RNA (1)...(19): siRNA sense strand
gagagaggaagccguguga

SEQ ID NO: 900357 - RNA, 19 nt, Homo sapiens
  misc_RNA (1)...(19): siRNA sense strand
agcaaugcguucuuucuaa

SEQ ID NO: 900358 - RNA, 19 nt, Homo sapiens
  misc_RNA (1)...(19): siRNA sense strand
gaugaggcaugguacuucu

SEQ ID NO: 900359 - RNA, 19 nt, Homo sapiens
  misc_RNA (1)...(19): siRNA sense strand
gcaguauccuccagagaac

SEQ ID NO: 900360 - RNA, 19 nt, Homo sapiens
  misc_RNA (1)...(19): siRNA sense strand
ccaagcaccucccacuucu

SEQ ID NO: 900361 - RNA, 19 nt, Homo sapiens
  misc_RNA (1)...(19): siRNA sense strand
gaucccaguuacagucuuc

SEQ ID NO: 900362 - RNA, 19 nt, Homo sapiens
  misc_RNA (1)...(19): siRNA sense strand
gugcuccuguggccacuaa

SEQ ID NO: 900363 - RNA, 19 nt, Homo sapiens
  misc_RNA (1)...(19): siRNA sense strand
ucgcugcccugcucgcuuu

SEQ ID NO: 900364 - RNA, 19 nt, Homo sapiens
  misc_RNA (1)...(19): siRNA sense strand
ucaaauggagcacgaagga

SEQ ID NO: 900365 - RNA, 19 nt, Homo sapiens
  misc_RNA (1)...(19): siRNA sense strand
caacacgucagcccuggaa

SEQ ID NO: 900366 - RNA, 19 nt, Homo sapiens
  misc_RNA (1)...(19): siRNA sense strand
ugacuaagaagccugaugu

SEQ ID NO: 900367 - RNA, 19 nt, Homo sapiens
  misc_RNA (1)...(19): siRNA sense strand
gggaggaugaggcauggua

SEQ ID NO: 900368 - RNA, 19 nt, Homo sapiens
  misc_RNA (1)...(19): siRNA sense strand
gacauaguuuccugagcaa

SEQ ID NO: 900369 - RNA, 19 nt, Homo sapiens
  misc_RNA (1)...(19): siRNA sense strand
cccaaagaccuuauuauca

SEQ ID NO: 900370 - RNA, 19 nt, Homo sapiens
  misc_RNA (1)...(19): siRNA sense strand
gcuccuuggugaucagaga

SEQ ID NO: 900371 - RNA, 19 nt, Homo sapiens
  misc_RNA (1)...(19): siRNA sense strand
gggugaagaucugcaggaa

SEQ ID NO: 900372 - RNA, 19 nt, Homo sapiens
  misc_RNA (1)...(19): siRNA sense strand
ccugagcaaugcguucuuu

SEQ ID NO: 900373 - RNA, 19 nt, Homo sapiens
  misc_RNA (1)...(19): siRNA sense strand
ggagaugucagggaugguu

SEQ ID NO: 900374 - RNA, 19 nt, Homo sapiens
  misc_RNA (1)...(19): siRNA sense strand
gaagaucugcaggaaggaa

SEQ ID NO: 900375 - RNA, 19 nt, Homo sapiens
  misc_RNA (1)...(19): siRNA sense strand
cagagaaccugagagugau

SEQ ID NO: 900376 - RNA, 19 nt, Homo sapiens
  misc_RNA (1)...(19): siRNA sense strand
agggaaacgucauauaucu

SEQ ID NO: 900377 - RNA, 19 nt, Homo sapiens
  misc_RNA (1)...(19): siRNA sense strand
acggucaucuguguguuua

SEQ ID NO: 900378 - RNA, 19 nt, Homo sapiens
  misc_RNA (1)...(19): siRNA sense strand
aaaguaacagcccugacua

SEQ ID NO: 900379 - RNA, 19 nt, Homo sapiens
  misc_RNA (1)...(19): siRNA sense strand
agggaugguuccaaaguga

SEQ ID NO: 900380 - RNA, 19 nt, Homo sapiens
  misc_RNA (1)...(19): siRNA sense strand
cgagucuacugcugcuuau

SEQ ID NO: 900381 - RNA, 19 nt, Homo sapiens
  misc_RNA (1)...(19): siRNA sense strand
ggucaucuguguguuuaac

SEQ ID NO: 900382 - RNA, 19 nt, Homo sapiens
  misc_RNA (1)...(19): siRNA sense strand
cagggaugguuccaaagug

SEQ ID NO: 900383 - RNA, 19 nt, Homo sapiens
  misc_RNA (1)...(19): siRNA sense strand
ggaaggaagcucgcaagag

SEQ ID NO: 900384 - RNA, 19 nt, Homo sapiens
  misc_RNA (1)...(19): siRNA sense strand
guguuuaacugggcuuuca

SEQ ID NO: 900385 - RNA, 19 nt, Homo sapiens
  misc_RNA (1)...(19): siRNA sense strand
gucgagagguggaaaugag

SEQ ID NO: 900386 - RNA, 19 nt, Homo sapiens
  misc_RNA (1)...(19): siRNA sense strand
uuaacugggcuuucaagaa

SEQ ID NO: 900387 - RNA, 19 nt, Homo sapiens
  misc_RNA (1)...(19): siRNA sense strand
caguuacagucuucaagug

SEQ ID NO: 900388 - RNA, 19 nt, Homo sapiens
  misc_RNA (1)...(19): siRNA sense strand
gaagccgugugagacauag

SEQ ID NO: 900389 - RNA, 19 nt, Homo sapiens
  misc_RNA (1)...(19): siRNA sense strand
gaggaagccgugugagaca

SEQ ID NO: 900390 - RNA, 19 nt, Homo sapiens
  misc_RNA (1)...(19): siRNA sense strand
ugaggcaugguacuucuuu

SEQ ID NO: 900391 - RNA, 19 nt, Homo sapiens
  misc_RNA (1)...(19): siRNA sense strand
cauaguuuccugagcaaug

SEQ ID NO: 900392 - RNA, 19 nt, Homo sapiens
  misc_RNA (1)...(19): siRNA sense strand
agcaggagcuccacuaugc

SEQ ID NO: 900393 - RNA, 19 nt, Homo sapiens
  misc_RNA (1)...(19): siRNA sense strand
ggaugaggcaugguacuuc

SEQ ID NO: 900394 - RNA, 19 nt, Homo sapiens
  misc_RNA (1)...(19): siRNA sense strand
ggagcacgaaggagaguuc

SEQ ID NO: 900395 - RNA, 19 nt, Homo sapiens
  misc_RNA (1)...(19): siRNA sense strand
gcaccucccacuucucagu

SEQ ID NO: 900396 - RNA, 19 nt, Homo sapiens
  misc_RNA (1)...(19): siRNA sense strand
agaagaaccagaccaagca

SEQ ID NO: 900397 - RNA, 19 nt, Homo sapiens
  misc_RNA (1)...(19): siRNA sense strand
gacggucaucuguguguuu

SEQ ID NO: 900398 - RNA, 19 nt, Homo sapiens
  misc_RNA (1)...(19): siRNA sense strand
gaccaagcaccucccacuu

SEQ ID NO: 900399 - RNA, 19 nt, Homo sapiens
  misc_RNA (1)...(19): siRNA sense strand
gugaugguuucccaagcaa

SEQ ID NO: 900400 - RNA, 19 nt, Homo sapiens
  misc_RNA (1)...(19): siRNA sense strand
cagggaaacgucauauauc

SEQ ID NO: 900401 - RNA, 19 nt, Homo sapiens
  misc_RNA (1)...(19): siRNA sense strand
uuaucagcauuucacauga

SEQ ID NO: 900402 - RNA, 19 nt, Homo sapiens
  misc_RNA (1)...(19): siRNA sense strand
guuccugccuugucgucuu

SEQ ID NO: 900403 - RNA, 19 nt, Homo sapiens
  misc_RNA (1)...(19): siRNA sense strand
aaacgucauauaucuggaa

SEQ ID NO: 900404 - RNA, 19 nt, Homo sapiens
  misc_RNA (1)...(19): siRNA sense strand
acgagucuacugcugcuua

SEQ ID NO: 900405 - RNA, 19 nt, Homo sapiens
  misc_RNA (1)...(19): siRNA sense strand
ccaguuacagucuucaagu

SEQ ID NO: 900406 - RNA, 19 nt, Homo sapiens
  misc_RNA (1)...(19): siRNA sense strand
ugcaguauccuccagagaa

SEQ ID NO: 900407 - RNA, 19 nt, Homo sapiens
  misc_RNA (1)...(19): siRNA sense strand
gaggcaugguacuucuuuc

SEQ ID NO: 900408 - RNA, 19 nt, Homo sapiens
  misc_RNA (1)...(19): siRNA sense strand
gcagucagggcuccuucga

SEQ ID NO: 900409 - RNA, 19 nt, Homo sapiens
  misc_RNA (1)...(19): siRNA sense strand
ggagcugccacccauucaa

SEQ ID NO: 900410 - RNA, 19 nt, Homo sapiens
  misc_RNA (1)...(19): siRNA sense strand
ccuagaagaaccagaccaa

SEQ ID NO: 900411 - RNA, 19 nt, Homo sapiens
  misc_RNA (1)...(19): siRNA sense strand
cgaccucaccugccaugug

SEQ ID NO: 900412 - RNA, 19 nt, Homo sapiens
  misc_RNA (1)...(19): siRNA sense strand
aaguaacagcccugacuaa

SEQ ID NO: 900413 - RNA, 19 nt, Homo sapiens
  misc_RNA (1)...(19): siRNA sense strand
gggaaacgucauauaucug

SEQ ID NO: 900414 - RNA, 19 nt, Homo sapiens
  misc_RNA (1)...(19): siRNA sense strand
ucaucuguguguuuaacug

SEQ ID NO: 900415 - RNA, 19 nt, Homo sapiens
  misc_RNA (1)...(19): siRNA sense strand
ucagggaugguuccaaagu

SEQ ID NO: 900416 - RNA, 19 nt, Homo sapiens
  misc_RNA (1)...(19): siRNA sense strand
uaucagcauuucacaugac

SEQ ID NO: 900417 - RNA, 19 nt, Homo sapiens
  misc_RNA (1)...(19): siRNA sense strand
ggaaguaacuaucaucuuu

SEQ ID NO: 900418 - RNA, 19 nt, Homo sapiens
  misc_RNA (1)...(19): siRNA sense strand
gaaauugaaucacucuuug

SEQ ID NO: 900419 - RNA, 19 nt, Homo sapiens
  misc_RNA (1)...(19): siRNA sense strand
gaacaaaucaacugucauu

SEQ ID NO: 900420 - RNA, 19 nt, Homo sapiens
  misc_RNA (1)...(19): siRNA sense strand
gaagggagauauauugaau

SEQ ID NO: 900421 - RNA, 19 nt, Homo sapiens
  misc_RNA (1)...(19): siRNA sense strand
cagcagcucucaggcauua

SEQ ID NO: 900422 - RNA, 19 nt, Homo sapiens
  misc_RNA (1)...(19): siRNA sense strand
ggaaauugaaucacucuuu

SEQ ID NO: 900423 - RNA, 19 nt, Homo sapiens
  misc_RNA (1)...(19): siRNA sense strand
ggaauaaacuggauuuuca

SEQ ID NO: 900424 - RNA, 19 nt, Homo sapiens
  misc_RNA (1)...(19): siRNA sense strand
ggaaaugcauguucaucug

SEQ ID NO: 900425 - RNA, 19 nt, Homo sapiens
  misc_RNA (1)...(19): siRNA sense strand
ucaguuaucuccagaagga

SEQ ID NO: 900426 - RNA, 19 nt, Homo sapiens
  misc_RNA (1)...(19): siRNA sense strand
cagaaggcccguagaauuu

SEQ ID NO: 900427 - RNA, 19 nt, Homo sapiens
  misc_RNA (1)...(19): siRNA sense strand
gacugugaauucugaaaua

SEQ ID NO: 900428 - RNA, 19 nt, Homo sapiens
  misc_RNA (1)...(19): siRNA sense strand
uuacagccuucacaaauuu

SEQ ID NO: 900429 - RNA, 19 nt, Homo sapiens
  misc_RNA (1)...(19): siRNA sense strand
gaugauagacuugcaauau

SEQ ID NO: 900430 - RNA, 19 nt, Homo sapiens
  misc_RNA (1)...(19): siRNA sense strand
caauauggcuggcuucagu

SEQ ID NO: 900431 - RNA, 19 nt, Homo sapiens
  misc_RNA (1)...(19): siRNA sense strand
guacuacagugcaaccauu

SEQ ID NO: 900432 - RNA, 19 nt, Homo sapiens
  misc_RNA (1)...(19): siRNA sense strand
gcacuucugggccuuauuu

SEQ ID NO: 900433 - RNA, 19 nt, Homo sapiens
  misc_RNA (1)...(19): siRNA sense strand
guuacagccuucacaaauu

SEQ ID NO: 900434 - RNA, 19 nt, Homo sapiens
  misc_RNA (1)...(19): siRNA sense strand
gaugaagggagauauauug

SEQ ID NO: 900435 - RNA, 19 nt, Homo sapiens
  misc_RNA (1)...(19): siRNA sense strand
gcauuaacaccaucaugua

SEQ ID NO: 900436 - RNA, 19 nt, Homo sapiens
  misc_RNA (1)...(19): siRNA sense strand
guaacuaucaucuuucuga

SEQ ID NO: 900437 - RNA, 19 nt, Homo sapiens
  misc_RNA (1)...(19): siRNA sense strand
ggucucaccacccaauuua

SEQ ID NO: 900438 - RNA, 19 nt, Homo sapiens
  misc_RNA (1)...(19): siRNA sense strand
cagcagaguaucuuacaua

SEQ ID NO: 900439 - RNA, 19 nt, Homo sapiens
  misc_RNA (1)...(19): siRNA sense strand
caauuuaagaggccgauua

SEQ ID NO: 900440 - RNA, 19 nt, Homo sapiens
  misc_RNA (1)...(19): siRNA sense strand
cuucugauguggaauaauu

SEQ ID NO: 900441 - RNA, 19 nt, Homo sapiens
  misc_RNA (1)...(19): siRNA sense strand
gaccauugaugaggaauau

SEQ ID NO: 900442 - RNA, 19 nt, Homo sapiens
  misc_RNA (1)...(19): siRNA sense strand
gauggagccuucaguuauc

SEQ ID NO: 900443 - RNA, 19 nt, Homo sapiens
  misc_RNA (1)...(19): siRNA sense strand
ucagaaggcccguagaauu

SEQ ID NO: 900444 - RNA, 19 nt, Homo sapiens
  misc_RNA (1)...(19): siRNA sense strand
ggagggcaguucuuugcaa

SEQ ID NO: 900445 - RNA, 19 nt, Homo sapiens
  misc_RNA (1)...(19): siRNA sense strand
gagucuggcuuguugagaa

SEQ ID NO: 900446 - RNA, 19 nt, Homo sapiens
  misc_RNA (1)...(19): siRNA sense strand
gcauguucaucuggaauaa

SEQ ID NO: 900447 - RNA, 19 nt, Homo sapiens
  misc_RNA (1)...(19): siRNA sense strand
guaaccagaccauugauga

SEQ ID NO: 900448 - RNA, 19 nt, Homo sapiens
  misc_RNA (1)...(19): siRNA sense strand
gcaguucuuugcaaguguu

SEQ ID NO: 900449 - RNA, 19 nt, Homo sapiens
  misc_RNA (1)...(19): siRNA sense strand
caaugaugcuucugaugug

SEQ ID NO: 900450 - RNA, 19 nt, Homo sapiens
  misc_RNA (1)...(19): siRNA sense strand
ggcaagaaguacaggaaau

SEQ ID NO: 900451 - RNA, 19 nt, Homo sapiens
  misc_RNA (1)...(19): siRNA sense strand
uaaagcaucuacaaaugag

SEQ ID NO: 900452 - RNA, 19 nt, Homo sapiens
  misc_RNA (1)...(19): siRNA sense strand
gcaagaaguacaggaaaug

SEQ ID NO: 900453 - RNA, 19 nt, Homo sapiens
  misc_RNA (1)...(19): siRNA sense strand
gccgauuagucaccauuaa

SEQ ID NO: 900454 - RNA, 19 nt, Homo sapiens
  misc_RNA (1)...(19): siRNA sense strand
uuaacaccaucauguacua

SEQ ID NO: 900455 - RNA, 19 nt, Homo sapiens
  misc_RNA (1)...(19): siRNA sense strand
gaaggcccguagaauuuua

SEQ ID NO: 900456 - RNA, 19 nt, Homo sapiens
  misc_RNA (1)...(19): siRNA sense strand
gcaucggcauugcuucuau

SEQ ID NO: 900457 - RNA, 19 nt, Homo sapiens
  misc_RNA (1)...(19): siRNA sense strand
gaaguaacuaucaucuuuc

SEQ ID NO: 900458 - RNA, 19 nt, Homo sapiens
  misc_RNA (1)...(19): siRNA sense strand
gaaucacucuuugacaaca

SEQ ID NO: 900459 - RNA, 19 nt, Homo sapiens
  misc_RNA (1)...(19): siRNA sense strand
cggcauugcuucuaugaca

SEQ ID NO: 900460 - RNA, 19 nt, Homo sapiens
  misc_RNA (1)...(19): siRNA sense strand
caccguagcacucauuauu

SEQ ID NO: 900461 - RNA, 19 nt, Homo sapiens
  misc_RNA (1)...(19): siRNA sense strand
gugggagucuggcuuguug

SEQ ID NO: 900462 - RNA, 19 nt, Homo sapiens
  misc_RNA (1)...(19): siRNA sense strand
gcagaaugcugaguuaucc

SEQ ID NO: 900463 - RNA, 19 nt, Homo sapiens
  misc_RNA (1)...(19): siRNA sense strand
ggagcuuucuuccucuaug

SEQ ID NO: 900464 - RNA, 19 nt, Homo sapiens
  misc_RNA (1)...(19): siRNA sense strand
ucgccgagcuuuaauugug

SEQ ID NO: 900465 - RNA, 19 nt, Homo sapiens
  misc_RNA (1)...(19): siRNA sense strand
uaaagggaaguaacuauca

SEQ ID NO: 900466 - RNA, 19 nt, Homo sapiens
  misc_RNA (1)...(19): siRNA sense strand
gggcaguucuuugcaagug

SEQ ID NO: 900467 - RNA, 19 nt, Homo sapiens
  misc_RNA (1)...(19): siRNA sense strand
ugacaaugaugcuucugau

SEQ ID NO: 900468 - RNA, 19 nt, Homo sapiens
  misc_RNA (1)...(19): siRNA sense strand
guacaggaaaugcauguuc

SEQ ID NO: 900469 - RNA, 19 nt, Homo sapiens
  misc_RNA (1)...(19): siRNA sense strand
ugauagacuugcaauaugg

SEQ ID NO: 900470 - RNA, 19 nt, Homo sapiens
  misc_RNA (1)...(19): siRNA sense strand
gaaaggacagacucagaag

SEQ ID NO: 900471 - RNA, 19 nt, Homo sapiens
  misc_RNA (1)...(19): siRNA sense strand
guacauguggcacuucaga

SEQ ID NO: 900472 - RNA, 19 nt, Homo sapiens
  misc_RNA (1)...(19): siRNA sense strand
uugaaucacucuuugacaa

SEQ ID NO: 900473 - RNA, 19 nt, Homo sapiens
  misc_RNA (1)...(19): siRNA sense strand
ggacugugaauucugaaau

SEQ ID NO: 900474 - RNA, 19 nt, Homo sapiens
  misc_RNA (1)...(19): siRNA sense strand
gaagaugauagacuugcaa

SEQ ID NO: 900475 - RNA, 19 nt, Homo sapiens
  misc_RNA (1)...(19): siRNA sense strand
ugucugguguugaagauga

SEQ ID NO: 900476 - RNA, 19 nt, Homo sapiens
  misc_RNA (1)...(19): siRNA sense strand
ugauggagccuucaguuau

SEQ ID NO: 900477 - RNA, 19 nt, Homo sapiens
  misc_RNA (1)...(19): siRNA sense strand
guaaagggaaguaacuauc

SEQ ID NO: 900478 - RNA, 19 nt, Homo sapiens
  misc_RNA (1)...(19): siRNA sense strand
gguaaagggaaguaacuau

SEQ ID NO: 900479 - RNA, 19 nt, Homo sapiens
  misc_RNA (1)...(19): siRNA sense strand
gacaacaggcuauguacau

SEQ ID NO: 900480 - RNA, 19 nt, Homo sapiens
  misc_RNA (1)...(19): siRNA sense strand
uuaagaggccgauuaguca

SEQ ID NO: 900481 - RNA, 19 nt, Homo sapiens
  misc_RNA (1)...(19): siRNA sense strand
cucgauggcuuauucagaa

SEQ ID NO: 900482 - RNA, 19 nt, Homo sapiens
  misc_RNA (1)...(19): siRNA sense strand
ccauugaugaggaauauga

SEQ ID NO: 900483 - RNA, 19 nt, Homo sapiens
  misc_RNA (1)...(19): siRNA sense strand
ucugcagaaugcugaguua

SEQ ID NO: 900484 - RNA, 19 nt, Homo sapiens
  misc_RNA (1)...(19): siRNA sense strand
caaccauucugcagauguc

SEQ ID NO: 900485 - RNA, 19 nt, Homo sapiens
  misc_RNA (1)...(19): siRNA sense strand
acuaucaucuuucugacaa

SEQ ID NO: 900486 - RNA, 19 nt, Homo sapiens
  misc_RNA (1)...(19): siRNA sense strand
uagaggaaauugaaucacu

SEQ ID NO: 900487 - RNA, 19 nt, Homo sapiens
  misc_RNA (1)...(19): siRNA sense strand
gaugucugguguugaagau

SEQ ID NO: 900488 - RNA, 19 nt, Homo sapiens
  misc_RNA (1)...(19): siRNA sense strand
agaaaggacagacucagaa

SEQ ID NO: 900489 - RNA, 19 nt, Homo sapiens
  misc_RNA (1)...(19): siRNA sense strand
guagcacucauuauucuug

SEQ ID NO: 900490 - RNA, 19 nt, Homo sapiens
  misc_RNA (1)...(19): siRNA sense strand
ccugugaucugcagaaugc

SEQ ID NO: 900491 - RNA, 19 nt, Homo sapiens
  misc_RNA (1)...(19): siRNA sense strand
ccagaccauugaugaggaa

SEQ ID NO: 900492 - RNA, 19 nt, Homo sapiens
  misc_RNA (1)...(19): siRNA sense strand
guaaugaauguauguugga

SEQ ID NO: 900493 - RNA, 19 nt, Homo sapiens
  misc_RNA (1)...(19): siRNA sense strand
ggacucggcaucggcauug

SEQ ID NO: 900494 - RNA, 19 nt, Homo sapiens
  misc_RNA (1)...(19): siRNA sense strand
acaaugaugcuucugaugu

SEQ ID NO: 900495 - RNA, 19 nt, Homo sapiens
  misc_RNA (1)...(19): siRNA sense strand
uacaggaaaugcauguuca

SEQ ID NO: 900496 - RNA, 19 nt, Homo sapiens
  misc_RNA (1)...(19): siRNA sense strand
ggcauuaacaccaucaugu

SEQ ID NO: 900497 - RNA, 19 nt, Homo sapiens
  misc_RNA (1)...(19): siRNA sense strand
gguuucugcucaagaugaa

SEQ ID NO: 900498 - RNA, 19 nt, Homo sapiens
  misc_RNA (1)...(19): siRNA sense strand
cagaaaggacagacucaga

SEQ ID NO: 900499 - RNA, 19 nt, Homo sapiens
  misc_RNA (1)...(19): siRNA sense strand
caacaggcuauguacaugu

SEQ ID NO: 900500 - RNA, 19 nt, Homo sapiens
  misc_RNA (1)...(19): siRNA sense strand
gggcaagaaguacaggaaa

SEQ ID NO: 900501 - RNA, 19 nt, Homo sapiens
  misc_RNA (1)...(19): siRNA sense strand
ccuccuguguuccaguuaa

SEQ ID NO: 900502 - RNA, 19 nt, Homo sapiens
  misc_RNA (1)...(19): siRNA sense strand
gaugaggaauaugauagca

SEQ ID NO: 900503 - RNA, 19 nt, Homo sapiens
  misc_RNA (1)...(19): siRNA sense strand
uguugaagaugauagacuu

SEQ ID NO: 900504 - RNA, 19 nt, Homo sapiens
  misc_RNA (1)...(19): siRNA sense strand
aaagggaaguaacuaucau

SEQ ID NO: 900505 - RNA, 19 nt, Homo sapiens
  misc_RNA (1)...(19): siRNA sense strand
ggucagaacgccacuugca

SEQ ID NO: 900506 - RNA, 19 nt, Homo sapiens
  misc_RNA (1)...(19): siRNA sense strand
augauagacuugcaauaug

SEQ ID NO: 900507 - RNA, 19 nt, Homo sapiens
  misc_RNA (1)...(19): siRNA sense strand
uaucaucuuucugacaaug

SEQ ID NO: 900508 - RNA, 19 nt, Homo sapiens
  misc_RNA (1)...(19): siRNA sense strand
cuuccucuaugcuggauuu

SEQ ID NO: 900509 - RNA, 19 nt, Homo sapiens
  misc_RNA (1)...(19): siRNA sense strand
ugaaauauauccccuuugg

SEQ ID NO: 900510 - RNA, 19 nt, Homo sapiens
  misc_RNA (1)...(19): siRNA sense strand
guugggacuugcacaguuc

SEQ ID NO: 900511 - RNA, 19 nt, Homo sapiens
  misc_RNA (1)...(19): siRNA sense strand
acaacaggcuauguacaug

SEQ ID NO: 900512 - RNA, 19 nt, Homo sapiens
  misc_RNA (1)...(19): siRNA sense strand
ucaauguccugguuucacu

SEQ ID NO: 900513 - RNA, 19 nt, Homo sapiens
  misc_RNA (1)...(19): siRNA sense strand
caucuggaauaaacuggau

SEQ ID NO: 900514 - RNA, 19 nt, Homo sapiens
  misc_RNA (1)...(19): siRNA sense strand
gauccagacugcgguuucu

SEQ ID NO: 900515 - RNA, 19 nt, Homo sapiens
  misc_RNA (1)...(19): siRNA sense strand
auuaauacccucuucauca

SEQ ID NO: 900516 - RNA, 19 nt, Homo sapiens
  misc_RNA (1)...(19): siRNA sense strand
cuaugacagugccagugua

SEQ ID NO: 900517 - RNA, 19 nt, Homo sapiens
  misc_RNA (1)...(19): siRNA sense strand
ccacaucccugcaugauuu

SEQ ID NO: 900518 - RNA, 19 nt, Homo sapiens
  misc_RNA (1)...(19): siRNA sense strand
aaacguagcagccucaauu

SEQ ID NO: 900519 - RNA, 19 nt, Homo sapiens
  misc_RNA (1)...(19): siRNA sense strand
gcauugcaauacaaccaua

SEQ ID NO: 900520 - RNA, 19 nt, Homo sapiens
  misc_RNA (1)...(19): siRNA sense strand
gacgacagcuuguuauggu

SEQ ID NO: 900521 - RNA, 19 nt, Homo sapiens
  misc_RNA (1)...(19): siRNA sense strand
ugagugauaaccaguauaa

SEQ ID NO: 900522 - RNA, 19 nt, Homo sapiens
  misc_RNA (1)...(19): siRNA sense strand
gauuuugccuaccauuuua

SEQ ID NO: 900523 - RNA, 19 nt, Homo sapiens
  misc_RNA (1)...(19): siRNA sense strand
caauguuccucuaccucua

SEQ ID NO: 900524 - RNA, 19 nt, Homo sapiens
  misc_RNA (1)...(19): siRNA sense strand
cuacaaggaugggucaugu

SEQ ID NO: 900525 - RNA, 19 nt, Homo sapiens
  misc_RNA (1)...(19): siRNA sense strand
gggucuggcuuuacgaaga

SEQ ID NO: 900526 - RNA, 19 nt, Homo sapiens
  misc_RNA (1)...(19): siRNA sense strand
acaaggaugggucauguuu

SEQ ID NO: 900527 - RNA, 19 nt, Homo sapiens
  misc_RNA (1)...(19): siRNA sense strand
aaggaugggucauguuugu

SEQ ID NO: 900528 - RNA, 19 nt, Homo sapiens
  misc_RNA (1)...(19): siRNA sense strand
caguuugggucuggcuuua

SEQ ID NO: 900529 - RNA, 19 nt, Homo sapiens
  misc_RNA (1)...(19): siRNA sense strand
ggucuggcuuuacgaagau

SEQ ID NO: 900530 - RNA, 19 nt, Homo sapiens
  misc_RNA (1)...(19): siRNA sense strand
gcaguuugggucuggcuuu

SEQ ID NO: 900531 - RNA, 19 nt, Homo sapiens
  misc_RNA (1)...(19): siRNA sense strand
aaauugaugcuaacuggaa

SEQ ID NO: 900532 - RNA, 19 nt, Homo sapiens
  misc_RNA (1)...(19): siRNA sense strand
ggaugggucauguuugugu

SEQ ID NO: 900533 - RNA, 19 nt, Homo sapiens
  misc_RNA (1)...(19): siRNA sense strand
gugauaaccaguauaacau

SEQ ID NO: 900534 - RNA, 19 nt, Homo sapiens
  misc_RNA (1)...(19): siRNA sense strand
ccugagugauaaccaguau

SEQ ID NO: 900535 - RNA, 19 nt, Homo sapiens
  misc_RNA (1)...(19): siRNA sense strand
ggauuuugccuaccauuuu

SEQ ID NO: 900536 - RNA, 19 nt, Homo sapiens
  misc_RNA (1)...(19): siRNA sense strand
uuaugacgacagcuuguua

SEQ ID NO: 900537 - RNA, 19 nt, Homo sapiens
  misc_RNA (1)...(19): siRNA sense strand
ccaguauaacauaaacgua

SEQ ID NO: 900538 - RNA, 19 nt, Homo sapiens
  misc_RNA (1)...(19): siRNA sense strand
caaggaugggucauguuug

SEQ ID NO: 900539 - RNA, 19 nt, Homo sapiens
  misc_RNA (1)...(19): siRNA sense strand
ggcaugguggcucaaauug

SEQ ID NO: 900540 - RNA, 19 nt, Homo sapiens
  misc_RNA (1)...(19): siRNA sense strand
uggcaugguggcucaaauu

SEQ ID NO: 900541 - RNA, 19 nt, Homo sapiens
  misc_RNA (1)...(19): siRNA sense strand
ggucuugucuggauuuugg

SEQ ID NO: 900542 - RNA, 19 nt, Homo sapiens
  misc_RNA (1)...(19): siRNA sense strand
agugauaaccaguauaaca

SEQ ID NO: 900543 - RNA, 19 nt, Homo sapiens
  misc_RNA (1)...(19): siRNA sense strand
acgaagauggcgaccguaa

SEQ ID NO: 900544 - RNA, 19 nt, Homo sapiens
  misc_RNA (1)...(19): siRNA sense strand
gaagaaagaucuagcugaa

SEQ ID NO: 900545 - RNA, 19 nt, Homo sapiens
  misc_RNA (1)...(19): siRNA sense strand
gcacucagcugacuauuga

SEQ ID NO: 900546 - RNA, 19 nt, Homo sapiens
  misc_RNA (1)...(19): siRNA sense strand
caagugagcucaugaaaga

SEQ ID NO: 900547 - RNA, 19 nt, Homo sapiens
  misc_RNA (1)...(19): siRNA sense strand
ccaagaaccugaagaaaga

SEQ ID NO: 900548 - RNA, 19 nt, Homo sapiens
  misc_RNA (1)...(19): siRNA sense strand
gaaagaaguuccaggagau

SEQ ID NO: 900549 - RNA, 19 nt, Homo sapiens
  misc_RNA (1)...(19): siRNA sense strand
ggaucaagcucauuauaau

SEQ ID NO: 900550 - RNA, 19 nt, Homo sapiens
  misc_RNA (1)...(19): siRNA sense strand
gaucuuaccuagccauaug

SEQ ID NO: 900551 - RNA, 19 nt, Homo sapiens
  misc_RNA (1)...(19): siRNA sense strand
ggaacagaaugaacagaaa

SEQ ID NO: 900552 - RNA, 19 nt, Homo sapiens
  misc_RNA (1)...(19): siRNA sense strand
aaucugggcugcaauuuaa

SEQ ID NO: 900553 - RNA, 19 nt, Homo sapiens
  misc_RNA (1)...(19): siRNA sense strand
gaaggagcguucaugaaga

SEQ ID NO: 900554 - RNA, 19 nt, Homo sapiens
  misc_RNA (1)...(19): siRNA sense strand
ugaaauacuuguuccacua

SEQ ID NO: 900555 - RNA, 19 nt, Homo sapiens
  misc_RNA (1)...(19): siRNA sense strand
ggagaugacuauaagaaca

SEQ ID NO: 900556 - RNA, 19 nt, Homo sapiens
  misc_RNA (1)...(19): siRNA sense strand
gcaauccucugacuacugu

SEQ ID NO: 900557 - RNA, 19 nt, Homo sapiens
  misc_RNA (1)...(19): siRNA sense strand
ggaaauguauggaaagcau

SEQ ID NO: 900558 - RNA, 19 nt, Homo sapiens
  misc_RNA (1)...(19): siRNA sense strand
caaagacaacccaucaaua

SEQ ID NO: 900559 - RNA, 19 nt, Homo sapiens
  misc_RNA (1)...(19): siRNA sense strand
aaacuccacugaaucauga

SEQ ID NO: 900560 - RNA, 19 nt, Homo sapiens
  misc_RNA (1)...(19): siRNA sense strand
aaacucaucuucgcaauau

SEQ ID NO: 900561 - RNA, 19 nt, Homo sapiens
  misc_RNA (1)...(19): siRNA sense strand
cuacagagccuacuacaga

SEQ ID NO: 900562 - RNA, 19 nt, Homo sapiens
  misc_RNA (1)...(19): siRNA sense strand
gaacugagccuuggaacau

SEQ ID NO: 900563 - RNA, 19 nt, Homo sapiens
  misc_RNA (1)...(19): siRNA sense strand
caucaggacuuaaaugaca

SEQ ID NO: 900564 - RNA, 19 nt, Homo sapiens
  misc_RNA (1)...(19): siRNA sense strand
aaacagacuuugccagaug

SEQ ID NO: 900565 - RNA, 19 nt, Homo sapiens
  misc_RNA (1)...(19): siRNA sense strand
caagcggacuccagaagaa

SEQ ID NO: 900566 - RNA, 19 nt, Homo sapiens
  misc_RNA (1)...(19): siRNA sense strand
aaagacaacccaucaauau

SEQ ID NO: 900567 - RNA, 19 nt, Homo sapiens
  misc_RNA (1)...(19): siRNA sense strand
cagcauacauuguccugaa

SEQ ID NO: 900568 - RNA, 19 nt, Homo sapiens
  misc_RNA (1)...(19): siRNA sense strand
gaacagaaggccuccacaa

SEQ ID NO: 900569 - RNA, 19 nt, Homo sapiens
  misc_RNA (1)...(19): siRNA sense strand
cuacagagauuggacauuc

SEQ ID NO: 900570 - RNA, 19 nt, Homo sapiens
  misc_RNA (1)...(19): siRNA sense strand
ccuccaguauuuagauuua

SEQ ID NO: 900571 - RNA, 19 nt, Homo sapiens
  misc_RNA (1)...(19): siRNA sense strand
gaacauggaacagaaugaa

SEQ ID NO: 900572 - RNA, 19 nt, Homo sapiens
  misc_RNA (1)...(19): siRNA sense strand
gaaacagacuuugccagau

SEQ ID NO: 900573 - RNA, 19 nt, Homo sapiens
  misc_RNA (1)...(19): siRNA sense strand
caacuauugucuuuacuag

SEQ ID NO: 900574 - RNA, 19 nt, Homo sapiens
  misc_RNA (1)...(19): siRNA sense strand
caacacacaucacacuuac

SEQ ID NO: 900575 - RNA, 19 nt, Homo sapiens
  misc_RNA (1)...(19): siRNA sense strand
ccagaugauuauuugagua

SEQ ID NO: 900576 - RNA, 19 nt, Homo sapiens
  misc_RNA (1)...(19): siRNA sense strand
gaagucaagugagcucaug

SEQ ID NO: 900577 - RNA, 19 nt, Homo sapiens
  misc_RNA (1)...(19): siRNA sense strand
gaggaucaagcucauuaua

SEQ ID NO: 900578 - RNA, 19 nt, Homo sapiens
  misc_RNA (1)...(19): siRNA sense strand
ucaggcagaugaaauacuu

SEQ ID NO: 900579 - RNA, 19 nt, Homo sapiens
  misc_RNA (1)...(19): siRNA sense strand
ggaaccaacugaaaauuug

SEQ ID NO: 900580 - RNA, 19 nt, Homo sapiens
  misc_RNA (1)...(19): siRNA sense strand
gaacaacacacaucacacu

SEQ ID NO: 900581 - RNA, 19 nt, Homo sapiens
  misc_RNA (1)...(19): siRNA sense strand
gcaacuauugucuuuacua

SEQ ID NO: 900582 - RNA, 19 nt, Homo sapiens
  misc_RNA (1)...(19): siRNA sense strand
gaacagaaagagcagaagu

SEQ ID NO: 900583 - RNA, 19 nt, Homo sapiens
  misc_RNA (1)...(19): siRNA sense strand
agacuuugccagaugauua

SEQ ID NO: 900584 - RNA, 19 nt, Homo sapiens
  misc_RNA (1)...(19): siRNA sense strand
caauaucugugacuguaau

SEQ ID NO: 900585 - RNA, 19 nt, Homo sapiens
  misc_RNA (1)...(19): siRNA sense strand
gcacaucaggacuuaaaug

SEQ ID NO: 900586 - RNA, 19 nt, Homo sapiens
  misc_RNA (1)...(19): siRNA sense strand
gagcguucaugaagauguu

SEQ ID NO: 900587 - RNA, 19 nt, Homo sapiens
  misc_RNA (1)...(19): siRNA sense strand
ugauggaaauguauggaaa

SEQ ID NO: 900588 - RNA, 19 nt, Homo sapiens
  misc_RNA (1)...(19): siRNA sense strand
cagaaggccuccacaagca

SEQ ID NO: 900589 - RNA, 19 nt, Homo sapiens
  misc_RNA (1)...(19): siRNA sense strand
ggaccuggagcuuagcaua

SEQ ID NO: 900590 - RNA, 19 nt, Homo sapiens
  misc_RNA (1)...(19): siRNA sense strand
ucaaguggguucaaacuac

SEQ ID NO: 900591 - RNA, 19 nt, Homo sapiens
  misc_RNA (1)...(19): siRNA sense strand
cgcaauaucugugacugua

SEQ ID NO: 900592 - RNA, 19 nt, Homo sapiens
  misc_RNA (1)...(19): siRNA sense strand
gcagaugaaauacuuguuc

SEQ ID NO: 900593 - RNA, 19 nt, Homo sapiens
  misc_RNA (1)...(19): siRNA sense strand
caaacucaucuucgcaaua

SEQ ID NO: 900594 - RNA, 19 nt, Homo sapiens
  misc_RNA (1)...(19): siRNA sense strand
caacgaggaugugagaaag

SEQ ID NO: 900595 - RNA, 19 nt, Homo sapiens
  misc_RNA (1)...(19): siRNA sense strand
ccacagcccuggagaagac

SEQ ID NO: 900596 - RNA, 19 nt, Homo sapiens
  misc_RNA (1)...(19): siRNA sense strand
gagcuuagcauaacuacag

SEQ ID NO: 900597 - RNA, 19 nt, Homo sapiens
  misc_RNA (1)...(19): siRNA sense strand
ccacuagacaguaagguuu

SEQ ID NO: 900598 - RNA, 19 nt, Homo sapiens
  misc_RNA (1)...(19): siRNA sense strand
gaaaauggaauguucagaa

SEQ ID NO: 900599 - RNA, 19 nt, Homo sapiens
  misc_RNA (1)...(19): siRNA sense strand
agucaaaccugcagaugug

SEQ ID NO: 900600 - RNA, 19 nt, Homo sapiens
  misc_RNA (1)...(19): siRNA sense strand
cguggcaacuauugucuuu

SEQ ID NO: 900601 - RNA, 19 nt, Homo sapiens
  misc_RNA (1)...(19): siRNA sense strand
gaacagaaugaacagaaag

SEQ ID NO: 900602 - RNA, 19 nt, Homo sapiens
  misc_RNA (1)...(19): siRNA sense strand
agaagcaucuguagggaau

SEQ ID NO: 900603 - RNA, 19 nt, Homo sapiens
  misc_RNA (1)...(19): siRNA sense strand
ugacugaauuaccuaagga

SEQ ID NO: 900604 - RNA, 19 nt, Homo sapiens
  misc_RNA (1)...(19): siRNA sense strand
gaaauacuuguuccacuag

SEQ ID NO: 900605 - RNA, 19 nt, Homo sapiens
  misc_RNA (1)...(19): siRNA sense strand
agaaagagcagaagucaag

SEQ ID NO: 900606 - RNA, 19 nt, Homo sapiens
  misc_RNA (1)...(19): siRNA sense strand
gcaguggcaucaacuuguc

SEQ ID NO: 900607 - RNA, 19 nt, Homo sapiens
  misc_RNA (1)...(19): siRNA sense strand
acaacacacaucacacuua

SEQ ID NO: 900608 - RNA, 19 nt, Homo sapiens
  misc_RNA (1)...(19): siRNA sense strand
gacuagagcuccucaucca

SEQ ID NO: 900609 - RNA, 19 nt, Homo sapiens
  misc_RNA (1)...(19): siRNA sense strand
gaccuggagcuuagcauaa

SEQ ID NO: 900610 - RNA, 19 nt, Homo sapiens
  misc_RNA (1)...(19): siRNA sense strand
gaugauuauuugaguaugg

SEQ ID NO: 900611 - RNA, 19 nt, Homo sapiens
  misc_RNA (1)...(19): siRNA sense strand
gguucaaacuacagaucua

SEQ ID NO: 900612 - RNA, 19 nt, Homo sapiens
  misc_RNA (1)...(19): siRNA sense strand
agacaacccaucaauauca

SEQ ID NO: 900613 - RNA, 19 nt, Homo sapiens
  misc_RNA (1)...(19): siRNA sense strand
gcaggaagcaaaggcauug

SEQ ID NO: 900614 - RNA, 19 nt, Homo sapiens
  misc_RNA (1)...(19): siRNA sense strand
ugacuaacagcauacauug

SEQ ID NO: 900615 - RNA, 19 nt, Homo sapiens
  misc_RNA (1)...(19): siRNA sense strand
caaguggguucaaacuaca

SEQ ID NO: 900616 - RNA, 19 nt, Homo sapiens
  misc_RNA (1)...(19): siRNA sense strand
ccaacgaggaugugagaaa

SEQ ID NO: 900617 - RNA, 19 nt, Homo sapiens
  misc_RNA (1)...(19): siRNA sense strand
gcauugaggcugucugcaa

SEQ ID NO: 900618 - RNA, 19 nt, Homo sapiens
  misc_RNA (1)...(19): siRNA sense strand
ugcuaucccuccaguauuu

SEQ ID NO: 900619 - RNA, 19 nt, Homo sapiens
  misc_RNA (1)...(19): siRNA sense strand
ccacaagcaccaacauaug

SEQ ID NO: 900620 - RNA, 19 nt, Homo sapiens
  misc_RNA (1)...(19): siRNA sense strand
caucgaagccugacugaag

SEQ ID NO: 900621 - RNA, 19 nt, Homo sapiens
  misc_RNA (1)...(19): siRNA sense strand
gaugacuguugaacuggaa

SEQ ID NO: 900622 - RNA, 19 nt, Homo sapiens
  misc_RNA (1)...(19): siRNA sense strand
gcaauaucugugacuguaa

SEQ ID NO: 900623 - RNA, 19 nt, Homo sapiens
  misc_RNA (1)...(19): siRNA sense strand
gagaugacuauaagaacaa

SEQ ID NO: 900624 - RNA, 19 nt, Homo sapiens
  misc_RNA (1)...(19): siRNA sense strand
ggaagcaaaggcauugaau

SEQ ID NO: 900625 - RNA, 19 nt, Homo sapiens
  misc_RNA (1)...(19): siRNA sense strand
ccagaaggagcguucauga

SEQ ID NO: 900626 - RNA, 19 nt, Homo sapiens
  misc_RNA (1)...(19): siRNA sense strand
gcccaaguuuacagucaaa

SEQ ID NO: 900627 - RNA, 19 nt, Homo sapiens
  misc_RNA (1)...(19): siRNA sense strand
guuagaaucuucgcaggau

SEQ ID NO: 900628 - RNA, 19 nt, Homo sapiens
  misc_RNA (1)...(19): siRNA sense strand
gaaccugaagaaagaucua

SEQ ID NO: 900629 - RNA, 19 nt, Homo sapiens
  misc_RNA (1)...(19): siRNA sense strand
caggagaugacuauaagaa

SEQ ID NO: 900630 - RNA, 19 nt, Homo sapiens
  misc_RNA (1)...(19): siRNA sense strand
cauguuauccggaccuuga

SEQ ID NO: 900631 - RNA, 19 nt, Homo sapiens
  misc_RNA (1)...(19): siRNA sense strand
ccacaccaauuauccaaac

SEQ ID NO: 900632 - RNA, 19 nt, Homo sapiens
  misc_RNA (1)...(19): siRNA sense strand
gcgagcagcaggaagcaaa

SEQ ID NO: 900633 - RNA, 19 nt, Homo sapiens
  misc_RNA (1)...(19): siRNA sense strand
cacgaugacuguugaacug

SEQ ID NO: 900634 - RNA, 19 nt, Homo sapiens
  misc_RNA (1)...(19): siRNA sense strand
acacacaucacacuuacaa

SEQ ID NO: 900635 - RNA, 19 nt, Homo sapiens
  misc_RNA (1)...(19): siRNA sense strand
cagagacccuugaagacau

SEQ ID NO: 900636 - RNA, 19 nt, Homo sapiens
  misc_RNA (1)...(19): siRNA sense strand
caaacuccacugaaucaug

SEQ ID NO: 900637 - RNA, 19 nt, Homo sapiens
  misc_RNA (1)...(19): siRNA sense strand
ggcggaaccuucuucuaca

SEQ ID NO: 900638 - RNA, 19 nt, Homo sapiens
  misc_RNA (1)...(19): siRNA sense strand
gaguauggacacacuguau

SEQ ID NO: 900639 - RNA, 19 nt, Homo sapiens
  misc_RNA (1)...(19): siRNA sense strand
gaugugagaaaguucaugu

SEQ ID NO: 900640 - RNA, 19 nt, Homo sapiens
  misc_RNA (1)...(19): siRNA sense strand
cauacauuguccugaagaa

SEQ ID NO: 900641 - RNA, 19 nt, Homo sapiens
  misc_RNA (1)...(19): siRNA sense strand
cacaucaggacuuaaauga

SEQ ID NO: 900642 - RNA, 19 nt, Homo sapiens
  misc_RNA (1)...(19): siRNA sense strand
ccagaacccacuacagaga

SEQ ID NO: 900643 - RNA, 19 nt, Homo sapiens
  misc_RNA (1)...(19): siRNA sense strand
cagccuaccuccagaacuc

SEQ ID NO: 900644 - RNA, 19 nt, Homo sapiens
  misc_RNA (1)...(19): siRNA sense strand
gcacaggcaugccaaauuu

SEQ ID NO: 900645 - RNA, 19 nt, Homo sapiens
  misc_RNA (1)...(19): siRNA sense strand
gagaagagaaagcuguuua

SEQ ID NO: 900646 - RNA, 19 nt, Homo sapiens
  misc_RNA (1)...(19): siRNA sense strand
gaagagauggagaaaguaa

SEQ ID NO: 900647 - RNA, 19 nt, Homo sapiens
  misc_RNA (1)...(19): siRNA sense strand
gauaagacccgagcuuuga

SEQ ID NO: 900648 - RNA, 19 nt, Homo sapiens
  misc_RNA (1)...(19): siRNA sense strand
gaaagcuguuuauccauuc

SEQ ID NO: 900649 - RNA, 19 nt, Homo sapiens
  misc_RNA (1)...(19): siRNA sense strand
agaaagcuguuuauccauu

SEQ ID NO: 900650 - RNA, 19 nt, Homo sapiens
  misc_RNA (1)...(19): siRNA sense strand
agagaaagcuguuuaucca

SEQ ID NO: 900651 - RNA, 19 nt, Homo sapiens
  misc_RNA (1)...(19): siRNA sense strand
gggugaagguacaauaaau

SEQ ID NO: 900652 - RNA, 19 nt, Homo sapiens
  misc_RNA (1)...(19): siRNA sense strand
uaaauggcuuacuggauga

SEQ ID NO: 900653 - RNA, 19 nt, Homo sapiens
  misc_RNA (1)...(19): siRNA sense strand
aggaagagauggagaaagu

SEQ ID NO: 900654 - RNA, 19 nt, Homo sapiens
  misc_RNA (1)...(19): siRNA sense strand
ggauaagacccgagcuuug

SEQ ID NO: 900655 - RNA, 19 nt, Homo sapiens
  misc_RNA (1)...(19): siRNA sense strand
uacaauaaauggcuuacug

SEQ ID NO: 900656 - RNA, 19 nt, Homo sapiens
  misc_RNA (1)...(19): siRNA sense strand
gaagagaaagcuguuuauc

SEQ ID NO: 900657 - RNA, 19 nt, Homo sapiens
  misc_RNA (1)...(19): siRNA sense strand
caaauuugcaucacauaca

SEQ ID NO: 900658 - RNA, 19 nt, Homo sapiens
  misc_RNA (1)...(19): siRNA sense strand
agacaagggugcugaacca

SEQ ID NO: 900659 - RNA, 19 nt, Homo sapiens
  misc_RNA (1)...(19): siRNA sense strand
uggcuuacuggaugaauua

SEQ ID NO: 900660 - RNA, 19 nt, Homo sapiens
  misc_RNA (1)...(19): siRNA sense strand
ggaagagauggagaaagua

SEQ ID NO: 900661 - RNA, 19 nt, Homo sapiens
  misc_RNA (1)...(19): siRNA sense strand
ggugaagguacaauaaaug

SEQ ID NO: 900662 - RNA, 19 nt, Homo sapiens
  misc_RNA (1)...(19): siRNA sense strand
cuggaugaauuauuacaga

SEQ ID NO: 900663 - RNA, 19 nt, Homo sapiens
  misc_RNA (1)...(19): siRNA sense strand
ggagaagagaaagcuguuu

SEQ ID NO: 900664 - RNA, 19 nt, Homo sapiens
  misc_RNA (1)...(19): siRNA sense strand
ugaaaaugcuacaguuaug

SEQ ID NO: 900665 - RNA, 19 nt, Homo sapiens
  misc_RNA (1)...(19): siRNA sense strand
ugacuccguuauuccgaaa

SEQ ID NO: 900666 - RNA, 19 nt, Homo sapiens
  misc_RNA (1)...(19): siRNA sense strand
gacccgagcuuugauugac

SEQ ID NO: 900667 - RNA, 19 nt, Homo sapiens
  misc_RNA (1)...(19): siRNA sense strand
uugauugacuccguuauuc

SEQ ID NO: 900668 - RNA, 19 nt, Homo sapiens
  misc_RNA (1)...(19): siRNA sense strand
uaagacccgagcuuugauu

SEQ ID NO: 900669 - RNA, 19 nt, Homo sapiens
  misc_RNA (1)...(19): siRNA sense strand
ggaugaauuauuacagaca

SEQ ID NO: 900670 - RNA, 19 nt, Homo sapiens
  misc_RNA (1)...(19): siRNA sense strand
caugggugaagguacaaua

SEQ ID NO: 900671 - RNA, 19 nt, Homo sapiens
  misc_RNA (1)...(19): siRNA sense strand
agaagagaaagcuguuuau

SEQ ID NO: 900672 - RNA, 19 nt, Homo sapiens
  misc_RNA (1)...(19): siRNA sense strand
gccaaauuugcaucacaua

SEQ ID NO: 900673 - RNA, 19 nt, Homo sapiens
  misc_RNA (1)...(19): siRNA sense strand
gugaagguacaauaaaugg

SEQ ID NO: 900674 - RNA, 19 nt, Homo sapiens
  misc_RNA (1)...(19): siRNA sense strand
uggauaagacccgagcuuu

SEQ ID NO: 900675 - RNA, 19 nt, Homo sapiens
  misc_RNA (1)...(19): siRNA sense strand
gcugaaccaggaagagaug

SEQ ID NO: 900676 - RNA, 19 nt, Homo sapiens
  misc_RNA (1)...(19): siRNA sense strand
ccaggaagagauggagaaa

SEQ ID NO: 900677 - RNA, 19 nt, Homo sapiens
  misc_RNA (1)...(19): siRNA sense strand
gagaaagcuguuuauccau

SEQ ID NO: 900678 - RNA, 19 nt, Homo sapiens
  misc_RNA (1)...(19): siRNA sense strand
gcuuugauugacuccguua

SEQ ID NO: 900679 - RNA, 19 nt, Homo sapiens
  misc_RNA (1)...(19): siRNA sense strand
auacauuugugaagaagac

SEQ ID NO: 900680 - RNA, 19 nt, Homo sapiens
  misc_RNA (1)...(19): siRNA sense strand
ccaaauaugucaucaucau

SEQ ID NO: 900681 - RNA, 19 nt, Homo sapiens
  misc_RNA (1)...(19): siRNA sense strand
ggcacaagcugcacuguau

SEQ ID NO: 900682 - RNA, 19 nt, Homo sapiens
  misc_RNA (1)...(19): siRNA sense strand
ccaaggcucucacacuuau

SEQ ID NO: 900683 - RNA, 19 nt, Homo sapiens
  misc_RNA (1)...(19): siRNA sense strand
gaaccucccagccaaauau

SEQ ID NO: 900684 - RNA, 19 nt, Homo sapiens
  misc_RNA (1)...(19): siRNA sense strand
gauauugcccuaggaauug

SEQ ID NO: 900685 - RNA, 19 nt, Homo sapiens
  misc_RNA (1)...(19): siRNA sense strand
gcaccuggccucauuucaa

SEQ ID NO: 900686 - RNA, 19 nt, Homo sapiens
  misc_RNA (1)...(19): siRNA sense strand
guaccugacuccaaacuac

SEQ ID NO: 900687 - RNA, 19 nt, Homo sapiens
  misc_RNA (1)...(19): siRNA sense strand
gggcaggcuuuguauaaca

SEQ ID NO: 900688 - RNA, 19 nt, Homo sapiens
  misc_RNA (1)...(19): siRNA sense strand
gagacacacugcccuaaaa

SEQ ID NO: 900689 - RNA, 19 nt, Homo sapiens
  misc_RNA (1)...(19): siRNA sense strand
gauccagugugccgugguu

SEQ ID NO: 900690 - RNA, 19 nt, Homo sapiens
  misc_RNA (1)...(19): siRNA sense strand
acuuauggauucaacgaua

SEQ ID NO: 900691 - RNA, 19 nt, Homo sapiens
  misc_RNA (1)...(19): siRNA sense strand
cgauauugcccuaggaauu

SEQ ID NO: 900692 - RNA, 19 nt, Homo sapiens
  misc_RNA (1)...(19): siRNA sense strand
caacgauauugcccuagga

SEQ ID NO: 900693 - RNA, 19 nt, Homo sapiens
  misc_RNA (1)...(19): siRNA sense strand
cgacguggcguacaacuuc

SEQ ID NO: 900694 - RNA, 19 nt, Homo sapiens
  misc_RNA (1)...(19): siRNA sense strand
ccaggaugguggcguguau

SEQ ID NO: 900695 - RNA, 19 nt, Homo sapiens
  misc_RNA (1)...(19): siRNA sense strand
cuucuugccuucuucauuc

SEQ ID NO: 900696 - RNA, 19 nt, Homo sapiens
  misc_RNA (1)...(19): siRNA sense strand
gccagacugucguccgaaa

SEQ ID NO: 900697 - RNA, 19 nt, Homo sapiens
  misc_RNA (1)...(19): siRNA sense strand
cuucaucggcuacuuugua

SEQ ID NO: 900698 - RNA, 19 nt, Homo sapiens
  misc_RNA (1)...(19): siRNA sense strand
gcagucccauuccgucuac

SEQ ID NO: 900699 - RNA, 19 nt, Homo sapiens
  misc_RNA (1)...(19): siRNA sense strand
gcucucacacuuauggauu

SEQ ID NO: 900700 - RNA, 19 nt, Homo sapiens
  misc_RNA (1)...(19): siRNA sense strand
gaacuuuugugacauugga

SEQ ID NO: 900701 - RNA, 19 nt, Homo sapiens
  misc_RNA (1)...(19): siRNA sense strand
ggugcgacguggcguacaa

SEQ ID NO: 900702 - RNA, 19 nt, Homo sapiens
  misc_RNA (1)...(19): siRNA sense strand
gagagacacacugcccuaa

SEQ ID NO: 900703 - RNA, 19 nt, Homo sapiens
  misc_RNA (1)...(19): siRNA sense strand
caccuggccucauuucaag

SEQ ID NO: 900704 - RNA, 19 nt, Homo sapiens
  misc_RNA (1)...(19): siRNA sense strand
gaugguggcguguaugaag

SEQ ID NO: 900705 - RNA, 19 nt, Homo sapiens
  misc_RNA (1)...(19): siRNA sense strand
agccaaauaugucaucauc

SEQ ID NO: 900706 - RNA, 19 nt, Homo sapiens
  misc_RNA (1)...(19): siRNA sense strand
ccuaggaauugccuucauc

SEQ ID NO: 900707 - RNA, 19 nt, Homo sapiens
  misc_RNA (1)...(19): siRNA sense strand
uggccuacaucaucacaga

SEQ ID NO: 900708 - RNA, 19 nt, Homo sapiens
  misc_RNA (1)...(19): siRNA sense strand
ugacauuggauaucacuuc

SEQ ID NO: 900709 - RNA, 19 nt, Homo sapiens
  misc_RNA (1)...(19): siRNA sense strand
caggguguaugaagguguu

SEQ ID NO: 900710 - RNA, 19 nt, Homo sapiens
  misc_RNA (1)...(19): siRNA sense strand
cauacaguccuuucacaug

SEQ ID NO: 900711 - RNA, 19 nt, Homo sapiens
  misc_RNA (1)...(19): siRNA sense strand
gacugucguccgaaacaua

SEQ ID NO: 900712 - RNA, 19 nt, Homo sapiens
  misc_RNA (1)...(19): siRNA sense strand
cuuauggauucaacgauau

SEQ ID NO: 900713 - RNA, 19 nt, Homo sapiens
  misc_RNA (1)...(19): siRNA sense strand
guagaaaagccuccaaaug

SEQ ID NO: 900714 - RNA, 19 nt, Homo sapiens
  misc_RNA (1)...(19): siRNA sense strand
gaugauggcaggguguaug

SEQ ID NO: 900715 - RNA, 19 nt, Homo sapiens
  misc_RNA (1)...(19): siRNA sense strand
cugggcaggcuuuguauaa

SEQ ID NO: 900716 - RNA, 19 nt, Homo sapiens
  misc_RNA (1)...(19): siRNA sense strand
acacggaacuuuugugaca

SEQ ID NO: 900717 - RNA, 19 nt, Homo sapiens
  misc_RNA (1)...(19): siRNA sense strand
gugaugcccaggaagguuu

SEQ ID NO: 900718 - RNA, 19 nt, Homo sapiens
  misc_RNA (1)...(19): siRNA sense strand
caacaucaucaaacgaucu

SEQ ID NO: 900719 - RNA, 19 nt, Homo sapiens
  misc_RNA (1)...(19): siRNA sense strand
ccuguggccuacaucauca

SEQ ID NO: 900720 - RNA, 19 nt, Homo sapiens
  misc_RNA (1)...(19): siRNA sense strand
uauauucagccacuucuuc

SEQ ID NO: 900721 - RNA, 19 nt, Homo sapiens
  misc_RNA (1)...(19): siRNA sense strand
ggcaggcuuuguauaacau

SEQ ID NO: 900722 - RNA, 19 nt, Homo sapiens
  misc_RNA (1)...(19): siRNA sense strand
gcacaagcugcacuguauc

SEQ ID NO: 900723 - RNA, 19 nt, Homo sapiens
  misc_RNA (1)...(19): siRNA sense strand
acgcugccauggcuucuug

SEQ ID NO: 900724 - RNA, 19 nt, Homo sapiens
  misc_RNA (1)...(19): siRNA sense strand
ccagggcuacaacaacauu

SEQ ID NO: 900725 - RNA, 19 nt, Homo sapiens
  misc_RNA (1)...(19): siRNA sense strand
uccaaggcucucacacuua

SEQ ID NO: 900726 - RNA, 19 nt, Homo sapiens
  misc_RNA (1)...(19): siRNA sense strand
auccaaggcucucacacuu

SEQ ID NO: 900727 - RNA, 19 nt, Homo sapiens
  misc_RNA (1)...(19): siRNA sense strand
caaauaugucaucaucauc

SEQ ID NO: 900728 - RNA, 19 nt, Homo sapiens
  misc_RNA (1)...(19): siRNA sense strand
agagacacacugcccuaaa

SEQ ID NO: 900729 - RNA, 19 nt, Homo sapiens
  misc_RNA (1)...(19): siRNA sense strand
ucacacuuauggauucaac

SEQ ID NO: 900730 - RNA, 19 nt, Homo sapiens
  misc_RNA (1)...(19): siRNA sense strand
gcuucuugccuucuucauu

SEQ ID NO: 900731 - RNA, 19 nt, Homo sapiens
  misc_RNA (1)...(19): siRNA sense strand
gauggcaggguguaugaag

SEQ ID NO: 900732 - RNA, 19 nt, Homo sapiens
  misc_RNA (1)...(19): siRNA sense strand
uuugugacauuggauauca

SEQ ID NO: 900733 - RNA, 19 nt, Homo sapiens
  misc_RNA (1)...(19): siRNA sense strand
ugaaccucccagccaaaua

SEQ ID NO: 900734 - RNA, 19 nt, Homo sapiens
  misc_RNA (1)...(19): siRNA sense strand
acccagggcuacaacaaca

SEQ ID NO: 900735 - RNA, 19 nt, Homo sapiens
  misc_RNA (1)...(19): siRNA sense strand
uggcacaagcugcacugua

SEQ ID NO: 900736 - RNA, 19 nt, Homo sapiens
  misc_RNA (1)...(19): siRNA sense strand
gguaccugacuccaaacua

SEQ ID NO: 900737 - RNA, 19 nt, Homo sapiens
  misc_RNA (1)...(19): siRNA sense strand
uagaaaagccuccaaaugc

SEQ ID NO: 900738 - RNA, 19 nt, Homo sapiens
  misc_RNA (1)...(19): siRNA sense strand
ggucuccaggcuugggaua

SEQ ID NO: 900739 - RNA, 19 nt, Homo sapiens
  misc_RNA (1)...(19): siRNA sense strand
aacauacaguccuuucaca

SEQ ID NO: 900740 - RNA, 19 nt, Homo sapiens
  misc_RNA (1)...(19): siRNA sense strand
gggaugauggcagggugua

SEQ ID NO: 900741 - RNA, 19 nt, Homo sapiens
  misc_RNA (1)...(19): siRNA sense strand
ccauuccgucuacaccaua

SEQ ID NO: 900742 - RNA, 19 nt, Homo sapiens
  misc_RNA (1)...(19): siRNA sense strand
cauggacacacggaacuuu

SEQ ID NO: 900743 - RNA, 19 nt, Homo sapiens
  misc_RNA (1)...(19): siRNA sense strand
ggacagaucugcuuguauu

SEQ ID NO: 900744 - RNA, 19 nt, Homo sapiens
  misc_RNA (1)...(19): siRNA sense strand
gaaccuaccugcaguuuga

SEQ ID NO: 900745 - RNA, 19 nt, Homo sapiens
  misc_RNA (1)...(19): siRNA sense strand
gaagcaauaugaugaguuu

SEQ ID NO: 900746 - RNA, 19 nt, Homo sapiens
  misc_RNA (1)...(19): siRNA sense strand
caauauaggugacaucgua

SEQ ID NO: 900747 - RNA, 19 nt, Homo sapiens
  misc_RNA (1)...(19): siRNA sense strand
guggagaucuuuaugaaua

SEQ ID NO: 900748 - RNA, 19 nt, Homo sapiens
  misc_RNA (1)...(19): siRNA sense strand
gcaaagcucucaugugcaa

SEQ ID NO: 900749 - RNA, 19 nt, Homo sapiens
  misc_RNA (1)...(19): siRNA sense strand
gauggaggcuuaucuuuga

SEQ ID NO: 900750 - RNA, 19 nt, Homo sapiens
  misc_RNA (1)...(19): siRNA sense strand
gaagugcacuguccaacaa

SEQ ID NO: 900751 - RNA, 19 nt, Homo sapiens
  misc_RNA (1)...(19): siRNA sense strand
gagauguccucaagguuua

SEQ ID NO: 900752 - RNA, 19 nt, Homo sapiens
  misc_RNA (1)...(19): siRNA sense strand
ccaaucaaguucucauuaa

SEQ ID NO: 900753 - RNA, 19 nt, Homo sapiens
  misc_RNA (1)...(19): siRNA sense strand
ugaaugauguggugucuuu

SEQ ID NO: 900754 - RNA, 19 nt, Homo sapiens
  misc_RNA (1)...(19): siRNA sense strand
aaaccgaggucaacuauga

SEQ ID NO: 900755 - RNA, 19 nt, Homo sapiens
  misc_RNA (1)...(19): siRNA sense strand
gaaagugagcgacauguuu

SEQ ID NO: 900756 - RNA, 19 nt, Homo sapiens
  misc_RNA (1)...(19): siRNA sense strand
gcaagaggcugggcaguga

SEQ ID NO: 900757 - RNA, 19 nt, Homo sapiens
  misc_RNA (1)...(19): siRNA sense strand
gaagacaguucucuacauc

SEQ ID NO: 900758 - RNA, 19 nt, Homo sapiens
  misc_RNA (1)...(19): siRNA sense strand
ggaggaugguuacgacuuu

SEQ ID NO: 900759 - RNA, 19 nt, Homo sapiens
  misc_RNA (1)...(19): siRNA sense strand
gauucaagcuggaguauca

SEQ ID NO: 900760 - RNA, 19 nt, Homo sapiens
  misc_RNA (1)...(19): siRNA sense strand
gaacuuacaagaaagaaga

SEQ ID NO: 900761 - RNA, 19 nt, Homo sapiens
  misc_RNA (1)...(19): siRNA sense strand
gcacuuggcuggaacuuac

SEQ ID NO: 900762 - RNA, 19 nt, Homo sapiens
  misc_RNA (1)...(19): siRNA sense strand
gaguggagcccgacuauaa

SEQ ID NO: 900763 - RNA, 19 nt, Homo sapiens
  misc_RNA (1)...(19): siRNA sense strand
ggagauguccucaagguuu

SEQ ID NO: 900764 - RNA, 19 nt, Homo sapiens
  misc_RNA (1)...(19): siRNA sense strand
gcagagaucagcuguguga

SEQ ID NO: 900765 - RNA, 19 nt, Homo sapiens
  misc_RNA (1)...(19): siRNA sense strand
gagaucagcugugugaaga

SEQ ID NO: 900766 - RNA, 19 nt, Homo sapiens
  misc_RNA (1)...(19): siRNA sense strand
gaaccaagcccgucugcaa

SEQ ID NO: 900767 - RNA, 19 nt, Homo sapiens
  misc_RNA (1)...(19): siRNA sense strand
ggaagucacugggacagaa

SEQ ID NO: 900768 - RNA, 19 nt, Homo sapiens
  misc_RNA (1)...(19): siRNA sense strand
gcaaccaccuccacugugu

SEQ ID NO: 900769 - RNA, 19 nt, Homo sapiens
  misc_RNA (1)...(19): siRNA sense strand
ucacagagaaugaagaauu

SEQ ID NO: 900770 - RNA, 19 nt, Homo sapiens
  misc_RNA (1)...(19): siRNA sense strand
gagugugacuggaaaguga

SEQ ID NO: 900771 - RNA, 19 nt, Homo sapiens
  misc_RNA (1)...(19): siRNA sense strand
ggaaacagcacccgcaugu

SEQ ID NO: 900772 - RNA, 19 nt, Homo sapiens
  misc_RNA (1)...(19): siRNA sense strand
gacccuggcuacuacuaua

SEQ ID NO: 900773 - RNA, 19 nt, Homo sapiens
  misc_RNA (1)...(19): siRNA sense strand
caacaaaacugugacauau

SEQ ID NO: 900774 - RNA, 19 nt, Homo sapiens
  misc_RNA (1)...(19): siRNA sense strand
gcaaugacuucagguacaa

SEQ ID NO: 900775 - RNA, 19 nt, Homo sapiens
  misc_RNA (1)...(19): siRNA sense strand
cggaagggcuugcaguuug

SEQ ID NO: 900776 - RNA, 19 nt, Homo sapiens
  misc_RNA (1)...(19): siRNA sense strand
gcagggaagugcagagauc

SEQ ID NO: 900777 - RNA, 19 nt, Homo sapiens
  misc_RNA (1)...(19): siRNA sense strand
guacaucggucccggaucu

SEQ ID NO: 900778 - RNA, 19 nt, Homo sapiens
  misc_RNA (1)...(19): siRNA sense strand
gaccggacauggaauggaa

SEQ ID NO: 900779 - RNA, 19 nt, Homo sapiens
  misc_RNA (1)...(19): siRNA sense strand
gggacucgcuggaaguauu

SEQ ID NO: 900780 - RNA, 19 nt, Homo sapiens
  misc_RNA (1)...(19): siRNA sense strand
caaggacuaugugguguuu

SEQ ID NO: 900781 - RNA, 19 nt, Homo sapiens
  misc_RNA (1)...(19): siRNA sense strand
ugacaacaaugcacacugu

SEQ ID NO: 900782 - RNA, 19 nt, Homo sapiens
  misc_RNA (1)...(19): siRNA sense strand
gccagaggcuuccacuuug

SEQ ID NO: 900783 - RNA, 19 nt, Homo sapiens
  misc_RNA (1)...(19): siRNA sense strand
caaggagugugacuggaaa

SEQ ID NO: 900784 - RNA, 19 nt, Homo sapiens
  misc_RNA (1)...(19): siRNA sense strand
caucagcgcugggcucuau

SEQ ID NO: 900785 - RNA, 19 nt, Homo sapiens
  misc_RNA (1)...(19): siRNA sense strand
gaagacgucuguguuaacu

SEQ ID NO: 900786 - RNA, 19 nt, Homo sapiens
  misc_RNA (1)...(19): siRNA sense strand
ggcuggaacuuacaagaaa

SEQ ID NO: 900787 - RNA, 19 nt, Homo sapiens
  misc_RNA (1)...(19): siRNA sense strand
gugacuggcuuccaaguug

SEQ ID NO: 900788 - RNA, 19 nt, Homo sapiens
  misc_RNA (1)...(19): siRNA sense strand
ggaaaggggccuaugaaua

SEQ ID NO: 900789 - RNA, 19 nt, Homo sapiens
  misc_RNA (1)...(19): siRNA sense strand
gcgagaagcaauaugauga

SEQ ID NO: 900790 - RNA, 19 nt, Homo sapiens
  misc_RNA (1)...(19): siRNA sense strand
ccaagcggaucaccuguau

SEQ ID NO: 900791 - RNA, 19 nt, Homo sapiens
  misc_RNA (1)...(19): siRNA sense strand
ccauagcuuucuccgcuua

SEQ ID NO: 900792 - RNA, 19 nt, Homo sapiens
  misc_RNA (1)...(19): siRNA sense strand
ggaaagaaccaacucaacu

SEQ ID NO: 900793 - RNA, 19 nt, Homo sapiens
  misc_RNA (1)...(19): siRNA sense strand
ccaaccagcucuaccuuca

SEQ ID NO: 900794 - RNA, 19 nt, Homo sapiens
  misc_RNA (1)...(19): siRNA sense strand
gugaggagcugcugugucu

SEQ ID NO: 900795 - RNA, 19 nt, Homo sapiens
  misc_RNA (1)...(19): siRNA sense strand
gaugaucacugggcuuuag

SEQ ID NO: 900796 - RNA, 19 nt, Homo sapiens
  misc_RNA (1)...(19): siRNA sense strand
caaccacgacuacauagaa

SEQ ID NO: 900797 - RNA, 19 nt, Homo sapiens
  misc_RNA (1)...(19): siRNA sense strand
gggcuuugccauucaauuu

SEQ ID NO: 900798 - RNA, 19 nt, Homo sapiens
  misc_RNA (1)...(19): siRNA sense strand
cagcaccaaucaucaaaug

SEQ ID NO: 900799 - RNA, 19 nt, Homo sapiens
  misc_RNA (1)...(19): siRNA sense strand
gagcugcacuuggcuggaa

SEQ ID NO: 900800 - RNA, 19 nt, Homo sapiens
  misc_RNA (1)...(19): siRNA sense strand
caauaacaaucaugaaugc

SEQ ID NO: 900801 - RNA, 19 nt, Homo sapiens
  misc_RNA (1)...(19): siRNA sense strand
gcaccuggauuaucgaaac

SEQ ID NO: 900802 - RNA, 19 nt, Homo sapiens
  misc_RNA (1)...(19): siRNA sense strand
gggagccucuggaguguga

SEQ ID NO: 900803 - RNA, 19 nt, Homo sapiens
  misc_RNA (1)...(19): siRNA sense strand
ugacucgggcuacacauua

SEQ ID NO: 900804 - RNA, 19 nt, Homo sapiens
  misc_RNA (1)...(19): siRNA sense strand
gauucaaggcuucuuauga

SEQ ID NO: 900805 - RNA, 19 nt, Homo sapiens
  misc_RNA (1)...(19): siRNA sense strand
agaagcaaauugaguugaa

SEQ ID NO: 900806 - RNA, 19 nt, Homo sapiens
  misc_RNA (1)...(19): siRNA sense strand
ccagcucuaucgucuauga

SEQ ID NO: 900807 - RNA, 19 nt, Homo sapiens
  misc_RNA (1)...(19): siRNA sense strand
gcgggaacaucacuucuuc

SEQ ID NO: 900808 - RNA, 19 nt, Homo sapiens
  misc_RNA (1)...(19): siRNA sense strand
gauccugguuccaucaaga

SEQ ID NO: 900809 - RNA, 19 nt, Homo sapiens
  misc_RNA (1)...(19): siRNA sense strand
gcaaggagugugacuggaa

SEQ ID NO: 900810 - RNA, 19 nt, Homo sapiens
  misc_RNA (1)...(19): siRNA sense strand
guauccagcucccuaugaa

SEQ ID NO: 900811 - RNA, 19 nt, Homo sapiens
  misc_RNA (1)...(19): siRNA sense strand
gcggaucaccuguaugaaa

SEQ ID NO: 900812 - RNA, 19 nt, Homo sapiens
  misc_RNA (1)...(19): siRNA sense strand
gcaaucacaugccaaaaga

SEQ ID NO: 900813 - RNA, 19 nt, Homo sapiens
  misc_RNA (1)...(19): siRNA sense strand
gaaagaaccaacucaacuc

SEQ ID NO: 900814 - RNA, 19 nt, Homo sapiens
  misc_RNA (1)...(19): siRNA sense strand
gcaccaaucaucaaaugug

SEQ ID NO: 900815 - RNA, 19 nt, Homo sapiens
  misc_RNA (1)...(19): siRNA sense strand
gaccgaggcuucuccuaca

SEQ ID NO: 900816 - RNA, 19 nt, Homo sapiens
  misc_RNA (1)...(19): siRNA sense strand
gagagcugccucaguguuu

SEQ ID NO: 900817 - RNA, 19 nt, Homo sapiens
  misc_RNA (1)...(19): siRNA sense strand
ggagucacauagaguaucu

SEQ ID NO: 900818 - RNA, 19 nt, Homo sapiens
  misc_RNA (1)...(19): siRNA sense strand
gauggagucacauagagua

SEQ ID NO: 900819 - RNA, 19 nt, Homo sapiens
  misc_RNA (1)...(19): siRNA sense strand
cuucauuucuacucagaua

SEQ ID NO: 900820 - RNA, 19 nt, Homo sapiens
  misc_RNA (1)...(19): siRNA sense strand
gaacugggacucgcuggaa

SEQ ID NO: 900821 - RNA, 19 nt, Homo sapiens
  misc_RNA (1)...(19): siRNA sense strand
cuauaacacugcagucaga

SEQ ID NO: 900822 - RNA, 19 nt, Homo sapiens
  misc_RNA (1)...(19): siRNA sense strand
cagcuucccuccuccauca

SEQ ID NO: 900823 - RNA, 19 nt, Homo sapiens
  misc_RNA (1)...(19): siRNA sense strand
gaauccagcuuguguucca

SEQ ID NO: 900824 - RNA, 19 nt, Homo sapiens
  misc_RNA (1)...(19): siRNA sense strand
gaaccagcgugggaguuug

SEQ ID NO: 900825 - RNA, 19 nt, Homo sapiens
  misc_RNA (1)...(19): siRNA sense strand
cauggccgauggaggcuua

SEQ ID NO: 900826 - RNA, 19 nt, Homo sapiens
  misc_RNA (1)...(19): siRNA sense strand
gaaccaaggccauguacag

SEQ ID NO: 900827 - RNA, 19 nt, Homo sapiens
  misc_RNA (1)...(19): siRNA sense strand
gaacagugcggcgauggaa

SEQ ID NO: 900828 - RNA, 19 nt, Homo sapiens
  misc_RNA (1)...(19): siRNA sense strand
cgucaucgcccugguauuu

SEQ ID NO: 900829 - RNA, 19 nt, Homo sapiens
  misc_RNA (1)...(19): siRNA sense strand
gugcagagaucagcugugu

SEQ ID NO: 900830 - RNA, 19 nt, Homo sapiens
  misc_RNA (1)...(19): siRNA sense strand
gaacugcaccuggauuauc

SEQ ID NO: 900831 - RNA, 19 nt, Homo sapiens
  misc_RNA (1)...(19): siRNA sense strand
gcaaagacaacagccagaa

SEQ ID NO: 900832 - RNA, 19 nt, Homo sapiens
  misc_RNA (1)...(19): siRNA sense strand
cagagugacuggcuuccaa

SEQ ID NO: 900833 - RNA, 19 nt, Homo sapiens
  misc_RNA (1)...(19): siRNA sense strand
cgaguuguguucagugaug

SEQ ID NO: 900834 - RNA, 19 nt, Homo sapiens
  misc_RNA (1)...(19): siRNA sense strand
gaaugcaacuccggcuaug

SEQ ID NO: 900835 - RNA, 19 nt, Homo sapiens
  misc_RNA (1)...(19): siRNA sense strand
ucucagcccucucauagga

SEQ ID NO: 900836 - RNA, 19 nt, Homo sapiens
  misc_RNA (1)...(19): siRNA sense strand
ucaucgcccugguauuuaa

SEQ ID NO: 900837 - RNA, 19 nt, Homo sapiens
  misc_RNA (1)...(19): siRNA sense strand
gucauccucucaccaaauu

SEQ ID NO: 900838 - RNA, 19 nt, Homo sapiens
  misc_RNA (1)...(19): siRNA sense strand
guaaauggacagcgucaug

SEQ ID NO: 900839 - RNA, 19 nt, Homo sapiens
  misc_RNA (1)...(19): siRNA sense strand
gaacaguggaggagaugga

SEQ ID NO: 900840 - RNA, 19 nt, Homo sapiens
  misc_RNA (1)...(19): siRNA sense strand
ggcaaugacuucagguaca

SEQ ID NO: 900841 - RNA, 19 nt, Homo sapiens
  misc_RNA (1)...(19): siRNA sense strand
ggaaccagcgugggaguuu

SEQ ID NO: 900842 - RNA, 19 nt, Homo sapiens
  misc_RNA (1)...(19): siRNA sense strand
ccagagcccuuugccaaug

SEQ ID NO: 900843 - RNA, 19 nt, Homo sapiens
  misc_RNA (1)...(19): siRNA sense strand
gauggaagcuuuaaccuuu

SEQ ID NO: 900844 - RNA, 19 nt, Homo sapiens
  misc_RNA (1)...(19): siRNA sense strand
gcggaaagcuguugcuaug

SEQ ID NO: 900845 - RNA, 19 nt, Homo sapiens
  misc_RNA (1)...(19): siRNA sense strand
ccucauagcuuuaaauucu

SEQ ID NO: 900846 - RNA, 19 nt, Homo sapiens
  misc_RNA (1)...(19): siRNA sense strand
ccaccuaccuccaguguca

SEQ ID NO: 900847 - RNA, 19 nt, Homo sapiens
  misc_RNA (1)...(19): siRNA sense strand
ggaggaaacuggccccaua

SEQ ID NO: 900848 - RNA, 19 nt, Homo sapiens
  misc_RNA (1)...(19): siRNA sense strand
gcucaaccacaguuuauuu

SEQ ID NO: 900849 - RNA, 19 nt, Homo sapiens
  misc_RNA (1)...(19): siRNA sense strand
caagaagaacccaccauug

SEQ ID NO: 900850 - RNA, 19 nt, Homo sapiens
  misc_RNA (1)...(19): siRNA sense strand
ccacucugauggaagcuuu

SEQ ID NO: 900851 - RNA, 19 nt, Homo sapiens
  misc_RNA (1)...(19): siRNA sense strand
ggagccaucccaaccaauu

SEQ ID NO: 900852 - RNA, 19 nt, Homo sapiens
  misc_RNA (1)...(19): siRNA sense strand
ccagaaccacccucaguuu

SEQ ID NO: 900853 - RNA, 19 nt, Homo sapiens
  misc_RNA (1)...(19): siRNA sense strand
ccaagaagaacccaccauu

SEQ ID NO: 900854 - RNA, 19 nt, Homo sapiens
  misc_RNA (1)...(19): siRNA sense strand
guauuucgauugcuagaag

SEQ ID NO: 900855 - RNA, 19 nt, Homo sapiens
  misc_RNA (1)...(19): siRNA sense strand
guggagaggcuuucccuuu

SEQ ID NO: 900856 - RNA, 19 nt, Homo sapiens
  misc_RNA (1)...(19): siRNA sense strand
ucaaugcucccucauacaa

SEQ ID NO: 900857 - RNA, 19 nt, Homo sapiens
  misc_RNA (1)...(19): siRNA sense strand
gccaggacauuaccuugga

SEQ ID NO: 900858 - RNA, 19 nt, Homo sapiens
  misc_RNA (1)...(19): siRNA sense strand
caagugcggucuggagugu

SEQ ID NO: 900859 - RNA, 19 nt, Homo sapiens
  misc_RNA (1)...(19): siRNA sense strand
ccucaaugcucccucauac

SEQ ID NO: 900860 - RNA, 19 nt, Homo sapiens
  misc_RNA (1)...(19): siRNA sense strand
uggagaggcuuucccuuuc

SEQ ID NO: 900861 - RNA, 19 nt, Homo sapiens
  misc_RNA (1)...(19): siRNA sense strand
ccuccucucuuccacugua

SEQ ID NO: 900862 - RNA, 19 nt, Homo sapiens
  misc_RNA (1)...(19): siRNA sense strand
uggcuucaauggacaaaug

SEQ ID NO: 900863 - RNA, 19 nt, Homo sapiens
  misc_RNA (1)...(19): siRNA sense strand
ggacuuaggggcauuaaug

SEQ ID NO: 900864 - RNA, 19 nt, Homo sapiens
  misc_RNA (1)...(19): siRNA sense strand
ggaaagguccccaagaaga

SEQ ID NO: 900865 - RNA, 19 nt, Homo sapiens
  misc_RNA (1)...(19): siRNA sense strand
ucaaagcccauccgaagga

SEQ ID NO: 900866 - RNA, 19 nt, Homo sapiens
  misc_RNA (1)...(19): siRNA sense strand
ugaccaagcugugcaacca

SEQ ID NO: 900867 - RNA, 19 nt, Homo sapiens
  misc_RNA (1)...(19): siRNA sense strand
gagaccaccugcucacacu

SEQ ID NO: 900868 - RNA, 19 nt, Homo sapiens
  misc_RNA (1)...(19): siRNA sense strand
gaaagguccccaagaagaa

SEQ ID NO: 900869 - RNA, 19 nt, Homo sapiens
  misc_RNA (1)...(19): siRNA sense strand
cuacaacuccacuuaaugg

SEQ ID NO: 900870 - RNA, 19 nt, Homo sapiens
  misc_RNA (1)...(19): siRNA sense strand
caaccuccuugccucuuuc

SEQ ID NO: 900871 - RNA, 19 nt, Homo sapiens
  misc_RNA (1)...(19): siRNA sense strand
ccuccuacaacuccacuua

SEQ ID NO: 900872 - RNA, 19 nt, Homo sapiens
  misc_RNA (1)...(19): siRNA sense strand
gagcaguggagcagacaga

SEQ ID NO: 900873 - RNA, 19 nt, Homo sapiens
  misc_RNA (1)...(19): siRNA sense strand
aagaagaacccaccauugg

SEQ ID NO: 900874 - RNA, 19 nt, Homo sapiens
  misc_RNA (1)...(19): siRNA sense strand
gcuacagagucuccagauc

SEQ ID NO: 900875 - RNA, 19 nt, Homo sapiens
  misc_RNA (1)...(19): siRNA sense strand
gacacgugguggcuucaau

SEQ ID NO: 900876 - RNA, 19 nt, Homo sapiens
  misc_RNA (1)...(19): siRNA sense strand
cgucguggccguaggagaa

SEQ ID NO: 900877 - RNA, 19 nt, Homo sapiens
  misc_RNA (1)...(19): siRNA sense strand
aaccaauucucccuucugu

SEQ ID NO: 900878 - RNA, 19 nt, Homo sapiens
  misc_RNA (1)...(19): siRNA sense strand
ccaggacauuaccuuggaa

SEQ ID NO: 900879 - RNA, 19 nt, Homo sapiens
  misc_RNA (1)...(19): siRNA sense strand
ggagaggcuuucccuuucc

SEQ ID NO: 900880 - RNA, 19 nt, Homo sapiens
  misc_RNA (1)...(19): siRNA sense strand
cccaccagcugccuccaaa

SEQ ID NO: 900881 - RNA, 19 nt, Homo sapiens
  misc_RNA (1)...(19): siRNA sense strand
cagaggaggacaugaccaa

SEQ ID NO: 900882 - RNA, 19 nt, Homo sapiens
  misc_RNA (1)...(19): siRNA sense strand
gccuccaccuucuccauug

SEQ ID NO: 900883 - RNA, 19 nt, Homo sapiens
  misc_RNA (1)...(19): siRNA sense strand
cagaaccacccucaguuuc

SEQ ID NO: 900884 - RNA, 19 nt, Homo sapiens
  misc_RNA (1)...(19): siRNA sense strand
uacuguauuucgauugcua

SEQ ID NO: 900885 - RNA, 19 nt, Homo sapiens
  misc_RNA (1)...(19): siRNA sense strand
uuugguggcuuccuugcuu

SEQ ID NO: 900886 - RNA, 19 nt, Homo sapiens
  misc_RNA (1)...(19): siRNA sense strand
gagccaucccaaccaauuc

SEQ ID NO: 900887 - RNA, 19 nt, Homo sapiens
  misc_RNA (1)...(19): siRNA sense strand
ucaccacggcaacuacuga

SEQ ID NO: 900888 - RNA, 19 nt, Homo sapiens
  misc_RNA (1)...(19): siRNA sense strand
uccuacaacuccacuuaau

SEQ ID NO: 900889 - RNA, 19 nt, Homo sapiens
  misc_RNA (1)...(19): siRNA sense strand
gugcugugcucuacaucag

SEQ ID NO: 900890 - RNA, 19 nt, Homo sapiens
  misc_RNA (1)...(19): siRNA sense strand
ccggagccaucccaaccaa

SEQ ID NO: 900891 - RNA, 19 nt, Homo sapiens
  misc_RNA (1)...(19): siRNA sense strand
caaccaauucucccuucug

SEQ ID NO: 900892 - RNA, 19 nt, Homo sapiens
  misc_RNA (1)...(19): siRNA sense strand
gggaguagucagaaagucu

SEQ ID NO: 900893 - RNA, 19 nt, Homo sapiens
  misc_RNA (1)...(19): siRNA sense strand
ccccaagguuuucaacuuu

SEQ ID NO: 900894 - RNA, 19 nt, Homo sapiens
  misc_RNA (1)...(19): siRNA sense strand
cccaaauguuccacacugu

SEQ ID NO: 900895 - RNA, 19 nt, Homo sapiens
  misc_RNA (1)...(19): siRNA sense strand
gaccaccuaccuccagugu

SEQ ID NO: 900896 - RNA, 19 nt, Homo sapiens
  misc_RNA (1)...(19): siRNA sense strand
ugauggaagcuuuaaccuu

SEQ ID NO: 900897 - RNA, 19 nt, Homo sapiens
  misc_RNA (1)...(19): siRNA sense strand
ccaggccuuucccacucua

SEQ ID NO: 900898 - RNA, 19 nt, Homo sapiens
  misc_RNA (1)...(19): siRNA sense strand
gcgaugggaccugcaagug

SEQ ID NO: 900899 - RNA, 19 nt, Homo sapiens
  misc_RNA (1)...(19): siRNA sense strand
ggcggaaagcuguugcuau

SEQ ID NO: 900900 - RNA, 19 nt, Homo sapiens
  misc_RNA (1)...(19): siRNA sense strand
cuucagacccuccucucuu

SEQ ID NO: 900901 - RNA, 19 nt, Homo sapiens
  misc_RNA (1)...(19): siRNA sense strand
gccucaaugcucccucaua

SEQ ID NO: 900902 - RNA, 19 nt, Homo sapiens
  misc_RNA (1)...(19): siRNA sense strand
gaaggcagaucccauguuu

SEQ ID NO: 900903 - RNA, 19 nt, Homo sapiens
  misc_RNA (1)...(19): siRNA sense strand
aaagguagaucuuguauug

SEQ ID NO: 900904 - RNA, 19 nt, Homo sapiens
  misc_RNA (1)...(19): siRNA sense strand
agaaagacaucaucugaaa

SEQ ID NO: 900905 - RNA, 19 nt, Homo sapiens
  misc_RNA (1)...(19): siRNA sense strand
gaaaucccauguucuuaga

SEQ ID NO: 900906 - RNA, 19 nt, Homo sapiens
  misc_RNA (1)...(19): siRNA sense strand
gaaaggaggagcccaggua

SEQ ID NO: 900907 - RNA, 19 nt, Homo sapiens
  misc_RNA (1)...(19): siRNA sense strand
ugacagaaaucccauguuc

SEQ ID NO: 900908 - RNA, 19 nt, Homo sapiens
  misc_RNA (1)...(19): siRNA sense strand
guagaaagacaucaucuga

SEQ ID NO: 900909 - RNA, 19 nt, Homo sapiens
  misc_RNA (1)...(19): siRNA sense strand
gauccugggucuuugagaa

SEQ ID NO: 900910 - RNA, 19 nt, Homo sapiens
  misc_RNA (1)...(19): siRNA sense strand
gcucggcuaugagggauua

SEQ ID NO: 900911 - RNA, 19 nt, Homo sapiens
  misc_RNA (1)...(19): siRNA sense strand
caaaguggacccuguauuc

SEQ ID NO: 900912 - RNA, 19 nt, Homo sapiens
  misc_RNA (1)...(19): siRNA sense strand
uagagaagauggauuucaa

SEQ ID NO: 900913 - RNA, 19 nt, Homo sapiens
  misc_RNA (1)...(19): siRNA sense strand
ggcagagccugaaaucuug

SEQ ID NO: 900914 - RNA, 19 nt, Homo sapiens
  misc_RNA (1)...(19): siRNA sense strand
gaucccauguuuacaggaa

SEQ ID NO: 900915 - RNA, 19 nt, Homo sapiens
  misc_RNA (1)...(19): siRNA sense strand
ggaaaggcaggaacuguau

SEQ ID NO: 900916 - RNA, 19 nt, Homo sapiens
  misc_RNA (1)...(19): siRNA sense strand
gggaaaggcaggaacugua

SEQ ID NO: 900917 - RNA, 19 nt, Homo sapiens
  misc_RNA (1)...(19): siRNA sense strand
caagguggauccaguuucu

SEQ ID NO: 900918 - RNA, 19 nt, Homo sapiens
  misc_RNA (1)...(19): siRNA sense strand
aaaggucgcuccuacaucu

SEQ ID NO: 900919 - RNA, 19 nt, Homo sapiens
  misc_RNA (1)...(19): siRNA sense strand
gagcccaaauccucagaug

SEQ ID NO: 900920 - RNA, 19 nt, Homo sapiens
  misc_RNA (1)...(19): siRNA sense strand
ggaaagacaaacccugugu

SEQ ID NO: 900921 - RNA, 19 nt, Homo sapiens
  misc_RNA (1)...(19): siRNA sense strand
gagcccagguauucaggaa

SEQ ID NO: 900922 - RNA, 19 nt, Homo sapiens
  misc_RNA (1)...(19): siRNA sense strand
gacccuguauucccaagaa

SEQ ID NO: 900923 - RNA, 19 nt, Homo sapiens
  misc_RNA (1)...(19): siRNA sense strand
gaucucacaucuuugaaaa

SEQ ID NO: 900924 - RNA, 19 nt, Homo sapiens
  misc_RNA (1)...(19): siRNA sense strand
caagacguauacaguguca

SEQ ID NO: 900925 - RNA, 19 nt, Homo sapiens
  misc_RNA (1)...(19): siRNA sense strand
gcuccuacaucugcagaaa

SEQ ID NO: 900926 - RNA, 19 nt, Homo sapiens
  misc_RNA (1)...(19): siRNA sense strand
cauccuguguccucagaaa

SEQ ID NO: 900927 - RNA, 19 nt, Homo sapiens
  misc_RNA (1)...(19): siRNA sense strand
ccucaaagcaggccgauuc

SEQ ID NO: 900928 - RNA, 19 nt, Homo sapiens
  misc_RNA (1)...(19): siRNA sense strand
gaaguagaaagacaucauc

SEQ ID NO: 900929 - RNA, 19 nt, Homo sapiens
  misc_RNA (1)...(19): siRNA sense strand
ggaggauccugggucuuug

SEQ ID NO: 900930 - RNA, 19 nt, Homo sapiens
  misc_RNA (1)...(19): siRNA sense strand
caaauccucagaugacaga

SEQ ID NO: 900931 - RNA, 19 nt, Homo sapiens
  misc_RNA (1)...(19): siRNA sense strand
gagaaggggaguccuguua

SEQ ID NO: 900932 - RNA, 19 nt, Homo sapiens
  misc_RNA (1)...(19): siRNA sense strand
ggucucaacuccaggaaaa

SEQ ID NO: 900933 - RNA, 19 nt, Homo sapiens
  misc_RNA (1)...(19): siRNA sense strand
cauaucugcuggaaguaga

SEQ ID NO: 900934 - RNA, 19 nt, Homo sapiens
  misc_RNA (1)...(19): siRNA sense strand
cauggagucuagacacaga

SEQ ID NO: 900935 - RNA, 19 nt, Homo sapiens
  misc_RNA (1)...(19): siRNA sense strand
ggaaguagaaagacaucau

SEQ ID NO: 900936 - RNA, 19 nt, Homo sapiens
  misc_RNA (1)...(19): siRNA sense strand
cgauuccacuuccauagga

SEQ ID NO: 900937 - RNA, 19 nt, Homo sapiens
  misc_RNA (1)...(19): siRNA sense strand
ggaaggcagaucccauguu

SEQ ID NO: 900938 - RNA, 19 nt, Homo sapiens
  misc_RNA (1)...(19): siRNA sense strand
gcauggccauccagaagca

SEQ ID NO: 900939 - RNA, 19 nt, Homo sapiens
  misc_RNA (1)...(19): siRNA sense strand
gcccaggcauggagucuag

SEQ ID NO: 900940 - RNA, 19 nt, Homo sapiens
  misc_RNA (1)...(19): siRNA sense strand
gagaagauggauuucaagu

SEQ ID NO: 900941 - RNA, 19 nt, Homo sapiens
  misc_RNA (1)...(19): siRNA sense strand
gcaaagacagaucucacau

SEQ ID NO: 900942 - RNA, 19 nt, Homo sapiens
  misc_RNA (1)...(19): siRNA sense strand
agacaaaguggacccugua

SEQ ID NO: 900943 - RNA, 19 nt, Homo sapiens
  misc_RNA (1)...(19): siRNA sense strand
gcagaucccauguuuacag

SEQ ID NO: 900944 - RNA, 19 nt, Homo sapiens
  misc_RNA (1)...(19): siRNA sense strand
gacucugugucuauaggua

SEQ ID NO: 900945 - RNA, 19 nt, Homo sapiens
  misc_RNA (1)...(19): siRNA sense strand
gcaagaaugggccuguauc

SEQ ID NO: 900946 - RNA, 19 nt, Homo sapiens
  misc_RNA (1)...(19): siRNA sense strand
gcagucugguggcaaagca

SEQ ID NO: 900947 - RNA, 19 nt, Homo sapiens
  misc_RNA (1)...(19): siRNA sense strand
ccugaaaucuugggaaagg

SEQ ID NO: 900948 - RNA, 19 nt, Homo sapiens
  misc_RNA (1)...(19): siRNA sense strand
ugggaaauguagaaacugu

SEQ ID NO: 900949 - RNA, 19 nt, Homo sapiens
  misc_RNA (1)...(19): siRNA sense strand
uggcaaagcagaaacaaag

SEQ ID NO: 900950 - RNA, 19 nt, Homo sapiens
  misc_RNA (1)...(19): siRNA sense strand
ucccaugacuguaagaaag

SEQ ID NO: 900951 - RNA, 19 nt, Homo sapiens
  misc_RNA (1)...(19): siRNA sense strand
gggcauggccauccagaag

SEQ ID NO: 900952 - RNA, 19 nt, Homo sapiens
  misc_RNA (1)...(19): siRNA sense strand
gcaugacgugggagguaua

SEQ ID NO: 900953 - RNA, 19 nt, Homo sapiens
  misc_RNA (1)...(19): siRNA sense strand
gggcaugacgugggaggua

SEQ ID NO: 900954 - RNA, 19 nt, Homo sapiens
  misc_RNA (1)...(19): siRNA sense strand
uagaaagacaucaucugaa

SEQ ID NO: 900955 - RNA, 19 nt, Homo sapiens
  misc_RNA (1)...(19): siRNA sense strand
gacccgguguccuccagaa

SEQ ID NO: 900956 - RNA, 19 nt, Homo sapiens
  misc_RNA (1)...(19): siRNA sense strand
aaauguggaucccaugucu

SEQ ID NO: 900957 - RNA, 19 nt, Homo sapiens
  misc_RNA (1)...(19): siRNA sense strand
gaugacagaaaucccaugu

SEQ ID NO: 900958 - RNA, 19 nt, Homo sapiens
  misc_RNA (1)...(19): siRNA sense strand
ggcauggagucuagacaca

SEQ ID NO: 900959 - RNA, 19 nt, Homo sapiens
  misc_RNA (1)...(19): siRNA sense strand
caaagacagaucucacauc

SEQ ID NO: 900960 - RNA, 19 nt, Homo sapiens
  misc_RNA (1)...(19): siRNA sense strand
ccgcaucugugggaaaugu

SEQ ID NO: 900961 - RNA, 19 nt, Homo sapiens
  misc_RNA (1)...(19): siRNA sense strand
gaaaagguagaucuuguau

SEQ ID NO: 900962 - RNA, 19 nt, Homo sapiens
  misc_RNA (1)...(19): siRNA sense strand
gauucugcguccacaggaa

SEQ ID NO: 900963 - RNA, 19 nt, Homo sapiens
  misc_RNA (1)...(19): siRNA sense strand
aaucccauguucuuagaga

SEQ ID NO: 900964 - RNA, 19 nt, Homo sapiens
  misc_RNA (1)...(19): siRNA sense strand
ggcaugacgugggagguau

SEQ ID NO: 900965 - RNA, 19 nt, Homo sapiens
  misc_RNA (1)...(19): siRNA sense strand
ggacaggcagagcgugugu

SEQ ID NO: 900966 - RNA, 19 nt, Homo sapiens
  misc_RNA (1)...(19): siRNA sense strand
caggaaagccagagcucuu

SEQ ID NO: 900967 - RNA, 19 nt, Homo sapiens
  misc_RNA (1)...(19): siRNA sense strand
gcaagguggauccaguuuc

SEQ ID NO: 900968 - RNA, 19 nt, Homo sapiens
  misc_RNA (1)...(19): siRNA sense strand
gaaaaggucgcuccuacau

SEQ ID NO: 900969 - RNA, 19 nt, Homo sapiens
  misc_RNA (1)...(19): siRNA sense strand
gauuucaaguccucaaagc

SEQ ID NO: 900970 - RNA, 19 nt, Homo sapiens
  misc_RNA (1)...(19): siRNA sense strand
caccacaggccucagagaa

SEQ ID NO: 900971 - RNA, 19 nt, Homo sapiens
  misc_RNA (1)...(19): siRNA sense strand
ggaacuguauccccaggaa

SEQ ID NO: 900972 - RNA, 19 nt, Homo sapiens
  misc_RNA (1)...(19): siRNA sense strand
ggaaagccagagcucuugu

SEQ ID NO: 900973 - RNA, 19 nt, Homo sapiens
  misc_RNA (1)...(19): siRNA sense strand
cagaaaagguagaucuugu

SEQ ID NO: 900974 - RNA, 19 nt, Homo sapiens
  misc_RNA (1)...(19): siRNA sense strand
gaggauccugggucuuuga

SEQ ID NO: 900975 - RNA, 19 nt, Homo sapiens
  misc_RNA (1)...(19): siRNA sense strand
agccugaaaucuugggaaa

SEQ ID NO: 900976 - RNA, 19 nt, Homo sapiens
  misc_RNA (1)...(19): siRNA sense strand
ccagcaagacguauacagu

SEQ ID NO: 900977 - RNA, 19 nt, Homo sapiens
  misc_RNA (1)...(19): siRNA sense strand
gccgcagucugguggcaaa

SEQ ID NO: 900978 - RNA, 19 nt, Homo sapiens
  misc_RNA (1)...(19): siRNA sense strand
gaaaggcaggaacuguauc

SEQ ID NO: 900979 - RNA, 19 nt, Homo sapiens
  misc_RNA (1)...(19): siRNA sense strand
gauacuacggcuucagcaa

SEQ ID NO: 900980 - RNA, 19 nt, Homo sapiens
  misc_RNA (1)...(19): siRNA sense strand
gcucaucaggcaagaaugg

SEQ ID NO: 900981 - RNA, 19 nt, Homo sapiens
  misc_RNA (1)...(19): siRNA sense strand
agguagaucuuguauuguc

SEQ ID NO: 900982 - RNA, 19 nt, Homo sapiens
  misc_RNA (1)...(19): siRNA sense strand
gcccagguauucaggaaaa

SEQ ID NO: 900983 - RNA, 19 nt, Homo sapiens
  misc_RNA (1)...(19): siRNA sense strand
gaaagacaucaucugaaaa

SEQ ID NO: 900984 - RNA, 19 nt, Homo sapiens
  misc_RNA (1)...(19): siRNA sense strand
uagguaaaguggucucaac

SEQ ID NO: 900985 - RNA, 19 nt, Homo sapiens
  misc_RNA (1)...(19): siRNA sense strand
ugugggaaauguagaaacu

SEQ ID NO: 900986 - RNA, 19 nt, Homo sapiens
  misc_RNA (1)...(19): siRNA sense strand
gcccaaauccucagaugac

SEQ ID NO: 900987 - RNA, 19 nt, Homo sapiens
  misc_RNA (1)...(19): siRNA sense strand
auacuacggcuucagcaaa

SEQ ID NO: 900988 - RNA, 19 nt, Homo sapiens
  misc_RNA (1)...(19): siRNA sense strand
gacaaaguggacccuguau

SEQ ID NO: 900989 - RNA, 19 nt, Homo sapiens
  misc_RNA (1)...(19): siRNA sense strand
gcaaagcagaaacaaagcu

SEQ ID NO: 900990 - RNA, 19 nt, Homo sapiens
  misc_RNA (1)...(19): siRNA sense strand
uggguucucugccucuaga

SEQ ID NO: 900991 - RNA, 19 nt, Homo sapiens
  misc_RNA (1)...(19): siRNA sense strand
ggcaagaaugggccuguau

SEQ ID NO: 900992 - RNA, 19 nt, Homo sapiens
  misc_RNA (1)...(19): siRNA sense strand
aggcagaucccauguuuac

SEQ ID NO: 900993 - RNA, 19 nt, Homo sapiens
  misc_RNA (1)...(19): siRNA sense strand
gacauuggaggcacaugga

SEQ ID NO: 900994 - RNA, 19 nt, Homo sapiens
  misc_RNA (1)...(19): siRNA sense strand
gcacaccccugaccaaagc

SEQ ID NO: 900995 - RNA, 19 nt, Homo sapiens
  misc_RNA (1)...(19): siRNA sense strand
gaaagccagagcucuuguc

SEQ ID NO: 900996 - RNA, 19 nt, Homo sapiens
  misc_RNA (1)...(19): siRNA sense strand
ggcaagguggauccaguuu

SEQ ID NO: 900997 - RNA, 19 nt, Homo sapiens
  misc_RNA (1)...(19): siRNA sense strand
gaaggcuggaucccacaug

SEQ ID NO: 900998 - RNA, 19 nt, Homo sapiens
  misc_RNA (1)...(19): siRNA sense strand
agcaagacguauacagugu

SEQ ID NO: 900999 - RNA, 19 nt, Homo sapiens
  misc_RNA (1)...(19): siRNA sense strand
gggacucugugucuauagg

SEQ ID NO: 901000 - RNA, 19 nt, Homo sapiens
  misc_RNA (1)...(19): siRNA sense strand
ggaggagcccagguauuca

SEQ ID NO: 901001 - RNA, 19 nt, Homo sapiens
  misc_RNA (1)...(19): siRNA sense strand
aggaggagcccagguauuc

SEQ ID NO: 901002 - RNA, 19 nt, Homo sapiens
  misc_RNA (1)...(19): siRNA sense strand
ggaaauggguucaacuuua

SEQ ID NO: 901003 - RNA, 19 nt, Homo sapiens
  misc_RNA (1)...(19): siRNA sense strand
gaaagcagcucaaauacaa

SEQ ID NO: 901004 - RNA, 19 nt, Homo sapiens
  misc_RNA (1)...(19): siRNA sense strand
ggacaaaccuuuaccagaa

SEQ ID NO: 901005 - RNA, 19 nt, Homo sapiens
  misc_RNA (1)...(19): siRNA sense strand
gaaagaacauguuuagcua

SEQ ID NO: 901006 - RNA, 19 nt, Homo sapiens
  misc_RNA (1)...(19): siRNA sense strand
gaaauggguucaacuuuaa

SEQ ID NO: 901007 - RNA, 19 nt, Homo sapiens
  misc_RNA (1)...(19): siRNA sense strand
ggagagaaauccauuguuu

SEQ ID NO: 901008 - RNA, 19 nt, Homo sapiens
  misc_RNA (1)...(19): siRNA sense strand
gaaauuaguggaucucuua

SEQ ID NO: 901009 - RNA, 19 nt, Homo sapiens
  misc_RNA (1)...(19): siRNA sense strand
ggucaacagucaccuauua

SEQ ID NO: 901010 - RNA, 19 nt, Homo sapiens
  misc_RNA (1)...(19): siRNA sense strand
ggacacaauuucacucaua

SEQ ID NO: 901011 - RNA, 19 nt, Homo sapiens
  misc_RNA (1)...(19): siRNA sense strand
gaaauaagauuggaacuca

SEQ ID NO: 901012 - RNA, 19 nt, Homo sapiens
  misc_RNA (1)...(19): siRNA sense strand
gaacgcgaguuaccuauuu

SEQ ID NO: 901013 - RNA, 19 nt, Homo sapiens
  misc_RNA (1)...(19): siRNA sense strand
ggacguggcuuuaacauca

SEQ ID NO: 901014 - RNA, 19 nt, Homo sapiens
  misc_RNA (1)...(19): siRNA sense strand
gacaauaaaucuacccaua

SEQ ID NO: 901015 - RNA, 19 nt, Homo sapiens
  misc_RNA (1)...(19): siRNA sense strand
gaacauggagcaaucauaa

SEQ ID NO: 901016 - RNA, 19 nt, Homo sapiens
  misc_RNA (1)...(19): siRNA sense strand
ggaaagggaaucaauauuu

SEQ ID NO: 901017 - RNA, 19 nt, Homo sapiens
  misc_RNA (1)...(19): siRNA sense strand
ccaauggucugcaaacaua

SEQ ID NO: 901018 - RNA, 19 nt, Homo sapiens
  misc_RNA (1)...(19): siRNA sense strand
gacggaagaugaugaauuu

SEQ ID NO: 901019 - RNA, 19 nt, Homo sapiens
  misc_RNA (1)...(19): siRNA sense strand
agacugaacugaauuauga

SEQ ID NO: 901020 - RNA, 19 nt, Homo sapiens
  misc_RNA (1)...(19): siRNA sense strand
gaaccaagauucggaagaa

SEQ ID NO: 901021 - RNA, 19 nt, Homo sapiens
  misc_RNA (1)...(19): siRNA sense strand
uaugauaccuugacaauug

SEQ ID NO: 901022 - RNA, 19 nt, Homo sapiens
  misc_RNA (1)...(19): siRNA sense strand
ucagcaaucuucucuguua

SEQ ID NO: 901023 - RNA, 19 nt, Homo sapiens
  misc_RNA (1)...(19): siRNA sense strand
ggacugacacuuaguagua

SEQ ID NO: 901024 - RNA, 19 nt, Homo sapiens
  misc_RNA (1)...(19): siRNA sense strand
gaacauagaguguguagau

SEQ ID NO: 901025 - RNA, 19 nt, Homo sapiens
  misc_RNA (1)...(19): siRNA sense strand
gauaacaccuggacuggaa

SEQ ID NO: 901026 - RNA, 19 nt, Homo sapiens
  misc_RNA (1)...(19): siRNA sense strand
guaagaagauggaauuauc

SEQ ID NO: 901027 - RNA, 19 nt, Homo sapiens
  misc_RNA (1)...(19): siRNA sense strand
gaacaauacauucggauuu

SEQ ID NO: 901028 - RNA, 19 nt, Homo sapiens
  misc_RNA (1)...(19): siRNA sense strand
gaaagaaaguuguggugau

SEQ ID NO: 901029 - RNA, 19 nt, Homo sapiens
  misc_RNA (1)...(19): siRNA sense strand
ccaggaagcucgccuaaug

SEQ ID NO: 901030 - RNA, 19 nt, Homo sapiens
  misc_RNA (1)...(19): siRNA sense strand
gcaguucucuugugaugaa

SEQ ID NO: 901031 - RNA, 19 nt, Homo sapiens
  misc_RNA (1)...(19): siRNA sense strand
gaacacgguuugcacaaug

SEQ ID NO: 901032 - RNA, 19 nt, Homo sapiens
  misc_RNA (1)...(19): siRNA sense strand
ggaagaugaugaauuugaa

SEQ ID NO: 901033 - RNA, 19 nt, Homo sapiens
  misc_RNA (1)...(19): siRNA sense strand
ucaaauaccaucuuccuua

SEQ ID NO: 901034 - RNA, 19 nt, Homo sapiens
  misc_RNA (1)...(19): siRNA sense strand
cagaaaccauacaugauua

SEQ ID NO: 901035 - RNA, 19 nt, Homo sapiens
  misc_RNA (1)...(19): siRNA sense strand
gaacagaaacaauuacaug

SEQ ID NO: 901036 - RNA, 19 nt, Homo sapiens
  misc_RNA (1)...(19): siRNA sense strand
ggacaacuuucaauuagga

SEQ ID NO: 901037 - RNA, 19 nt, Homo sapiens
  misc_RNA (1)...(19): siRNA sense strand
uaacaucacuuacaacaca

SEQ ID NO: 901038 - RNA, 19 nt, Homo sapiens
  misc_RNA (1)...(19): siRNA sense strand
caacaaugcuccaagacuu

SEQ ID NO: 901039 - RNA, 19 nt, Homo sapiens
  misc_RNA (1)...(19): siRNA sense strand
ggaaaggcucuuacaauuu

SEQ ID NO: 901040 - RNA, 19 nt, Homo sapiens
  misc_RNA (1)...(19): siRNA sense strand
gcaaaguggucaacuguuc

SEQ ID NO: 901041 - RNA, 19 nt, Homo sapiens
  misc_RNA (1)...(19): siRNA sense strand
caaauuauccacucaacua

SEQ ID NO: 901042 - RNA, 19 nt, Homo sapiens
  misc_RNA (1)...(19): siRNA sense strand
gaagaaagaacauguuuag

SEQ ID NO: 901043 - RNA, 19 nt, Homo sapiens
  misc_RNA (1)...(19): siRNA sense strand
gcacugugguauucuauga

SEQ ID NO: 901044 - RNA, 19 nt, Homo sapiens
  misc_RNA (1)...(19): siRNA sense strand
guaacauucucaugcaaua

SEQ ID NO: 901045 - RNA, 19 nt, Homo sapiens
  misc_RNA (1)...(19): siRNA sense strand
gaauauaccaccaccaauu

SEQ ID NO: 901046 - RNA, 19 nt, Homo sapiens
  misc_RNA (1)...(19): siRNA sense strand
gaucgaggauuccgacuug

SEQ ID NO: 901047 - RNA, 19 nt, Homo sapiens
  misc_RNA (1)...(19): siRNA sense strand
gaucaaggauauucucuuc

SEQ ID NO: 901048 - RNA, 19 nt, Homo sapiens
  misc_RNA (1)...(19): siRNA sense strand
ggauacaucuuucuuucaa

SEQ ID NO: 901049 - RNA, 19 nt, Homo sapiens
  misc_RNA (1)...(19): siRNA sense strand
gcucauggauuuaagguau

SEQ ID NO: 901050 - RNA, 19 nt, Homo sapiens
  misc_RNA (1)...(19): siRNA sense strand
cagggucacucucacauua

SEQ ID NO: 901051 - RNA, 19 nt, Homo sapiens
  misc_RNA (1)...(19): siRNA sense strand
gcuaagggauuucacuuug

SEQ ID NO: 901052 - RNA, 19 nt, Homo sapiens
  misc_RNA (1)...(19): siRNA sense strand
ggacaagguuaacaggauu

SEQ ID NO: 901053 - RNA, 19 nt, Homo sapiens
  misc_RNA (1)...(19): siRNA sense strand
caacuuuaaugauguggua

SEQ ID NO: 901054 - RNA, 19 nt, Homo sapiens
  misc_RNA (1)...(19): siRNA sense strand
cgaaguggauccucagaaa

SEQ ID NO: 901055 - RNA, 19 nt, Homo sapiens
  misc_RNA (1)...(19): siRNA sense strand
guaccagacuugauaguga

SEQ ID NO: 901056 - RNA, 19 nt, Homo sapiens
  misc_RNA (1)...(19): siRNA sense strand
aaacuucccucauccauau

SEQ ID NO: 901057 - RNA, 19 nt, Homo sapiens
  misc_RNA (1)...(19): siRNA sense strand
uggaaaggcucuuacaauu

SEQ ID NO: 901058 - RNA, 19 nt, Homo sapiens
  misc_RNA (1)...(19): siRNA sense strand
gaacauguuuagcuaaugg

SEQ ID NO: 901059 - RNA, 19 nt, Homo sapiens
  misc_RNA (1)...(19): siRNA sense strand
ggauacacauuaauuggaa

SEQ ID NO: 901060 - RNA, 19 nt, Homo sapiens
  misc_RNA (1)...(19): siRNA sense strand
ggaagucguucaacagguu

SEQ ID NO: 901061 - RNA, 19 nt, Homo sapiens
  misc_RNA (1)...(19): siRNA sense strand
ggauacagguugagucaug

SEQ ID NO: 901062 - RNA, 19 nt, Homo sapiens
  misc_RNA (1)...(19): siRNA sense strand
gaacauggucuggaacuuu

SEQ ID NO: 901063 - RNA, 19 nt, Homo sapiens
  misc_RNA (1)...(19): siRNA sense strand
cagaauguaucaugauuga

SEQ ID NO: 901064 - RNA, 19 nt, Homo sapiens
  misc_RNA (1)...(19): siRNA sense strand
ggacgaaaguguuggaucu

SEQ ID NO: 901065 - RNA, 19 nt, Homo sapiens
  misc_RNA (1)...(19): siRNA sense strand
caaauaccaucuuccuuau

SEQ ID NO: 901066 - RNA, 19 nt, Homo sapiens
  misc_RNA (1)...(19): siRNA sense strand
gaaggaacaucagagauca

SEQ ID NO: 901067 - RNA, 19 nt, Homo sapiens
  misc_RNA (1)...(19): siRNA sense strand
caucaugacuacuuacuga

SEQ ID NO: 901068 - RNA, 19 nt, Homo sapiens
  misc_RNA (1)...(19): siRNA sense strand
gaauuaugauguucuggaa

SEQ ID NO: 901069 - RNA, 19 nt, Homo sapiens
  misc_RNA (1)...(19): siRNA sense strand
gaaacaacccaugaccuua

SEQ ID NO: 901070 - RNA, 19 nt, Homo sapiens
  misc_RNA (1)...(19): siRNA sense strand
guuauguucuucaagguua

SEQ ID NO: 901071 - RNA, 19 nt, Homo sapiens
  misc_RNA (1)...(19): siRNA sense strand
aaacaaccaugaaugcauu

SEQ ID NO: 901072 - RNA, 19 nt, Homo sapiens
  misc_RNA (1)...(19): siRNA sense strand
gcaaacauacccaucugua

SEQ ID NO: 901073 - RNA, 19 nt, Homo sapiens
  misc_RNA (1)...(19): siRNA sense strand
ugauggagcuacuuaugua

SEQ ID NO: 901074 - RNA, 19 nt, Homo sapiens
  misc_RNA (1)...(19): siRNA sense strand
ggaguaaugccaacuugua

SEQ ID NO: 901075 - RNA, 19 nt, Homo sapiens
  misc_RNA (1)...(19): siRNA sense strand
aaucaggacuuguacaauu

SEQ ID NO: 901076 - RNA, 19 nt, Homo sapiens
  misc_RNA (1)...(19): siRNA sense strand
agaagaauacgacuacuua

SEQ ID NO: 901077 - RNA, 19 nt, Homo sapiens
  misc_RNA (1)...(19): siRNA sense strand
ggaauggcaucuacaucaa

SEQ ID NO: 901078 - RNA, 19 nt, Homo sapiens
  misc_RNA (1)...(19): siRNA sense strand
aaacagugcccaauucuuu

SEQ ID NO: 901079 - RNA, 19 nt, Homo sapiens
  misc_RNA (1)...(19): siRNA sense strand
caacacauuuggacauaau

SEQ ID NO: 901080 - RNA, 19 nt, Homo sapiens
  misc_RNA (1)...(19): siRNA sense strand
ccagaaggguauggaaaua

SEQ ID NO: 901081 - RNA, 19 nt, Homo sapiens
  misc_RNA (1)...(19): siRNA sense strand
gcaggaaagggaaucaaua

SEQ ID NO: 901082 - RNA, 19 nt, Homo sapiens
  misc_RNA (1)...(19): siRNA sense strand
ggacugagauauggagaug

SEQ ID NO: 901083 - RNA, 19 nt, Homo sapiens
  misc_RNA (1)...(19): siRNA sense strand
ucauauggcucaacagcua

SEQ ID NO: 901084 - RNA, 19 nt, Homo sapiens
  misc_RNA (1)...(19): siRNA sense strand
gcuuagugguccucaaaua

SEQ ID NO: 901085 - RNA, 19 nt, Homo sapiens
  misc_RNA (1)...(19): siRNA sense strand
auagaaagcagcucaaaua

SEQ ID NO: 901086 - RNA, 19 nt, Homo sapiens
  misc_RNA (1)...(19): siRNA sense strand
gagcaugaguagccaaaug

SEQ ID NO: 901087 - RNA, 19 nt, Homo sapiens
  misc_RNA (1)...(19): siRNA sense strand
acaaaggacugcaccuaaa

SEQ ID NO: 901088 - RNA, 19 nt, Homo sapiens
  misc_RNA (1)...(19): siRNA sense strand
gcagaagaacgaaauagaa

SEQ ID NO: 901089 - RNA, 19 nt, Homo sapiens
  misc_RNA (1)...(19): siRNA sense strand
ggagauguucuuaagauuu

SEQ ID NO: 901090 - RNA, 19 nt, Homo sapiens
  misc_RNA (1)...(19): siRNA sense strand
gaggugccuucccaucuua

SEQ ID NO: 901091 - RNA, 19 nt, Homo sapiens
  misc_RNA (1)...(19): siRNA sense strand
ggaaguucaauuucaguua

SEQ ID NO: 901092 - RNA, 19 nt, Homo sapiens
  misc_RNA (1)...(19): siRNA sense strand
ggaaacaacccaugaccuu

SEQ ID NO: 901093 - RNA, 19 nt, Homo sapiens
  misc_RNA (1)...(19): siRNA sense strand
gaggauaugucaacaggau

SEQ ID NO: 901094 - RNA, 19 nt, Homo sapiens
  misc_RNA (1)...(19): siRNA sense strand
gcacuguucuaucaccaaa

SEQ ID NO: 901095 - RNA, 19 nt, Homo sapiens
  misc_RNA (1)...(19): siRNA sense strand
ucaaggagaggaaagaaua

SEQ ID NO: 901096 - RNA, 19 nt, Homo sapiens
  misc_RNA (1)...(19): siRNA sense strand
gcacaaggagauguucuua

SEQ ID NO: 901097 - RNA, 19 nt, Homo sapiens
  misc_RNA (1)...(19): siRNA sense strand
ugacagcaaugcacaaugu

SEQ ID NO: 901098 - RNA, 19 nt, Homo sapiens
  misc_RNA (1)...(19): siRNA sense strand
gcacuuauauuugcaggau

SEQ ID NO: 901099 - RNA, 19 nt, Homo sapiens
  misc_RNA (1)...(19): siRNA sense strand
gaacucaaacuucauaugg

SEQ ID NO: 901100 - RNA, 19 nt, Homo sapiens
  misc_RNA (1)...(19): siRNA sense strand
gaaauucagcucucacaug

SEQ ID NO: 901101 - RNA, 19 nt, Homo sapiens
  misc_RNA (1)...(19): siRNA sense strand
gguagauccuggaaauauu

SEQ ID NO: 901102 - RNA, 19 nt, Homo sapiens
  misc_RNA (1)...(19): siRNA sense strand
ggaaauggguucaacuuua

SEQ ID NO: 901103 - RNA, 19 nt, Homo sapiens
  misc_RNA (1)...(19): siRNA sense strand
gaaagcagcucaaauacaa

SEQ ID NO: 901104 - RNA, 19 nt, Homo sapiens
  misc_RNA (1)...(19): siRNA sense strand
ggacaaaccuuuaccagaa

SEQ ID NO: 901105 - RNA, 19 nt, Homo sapiens
  misc_RNA (1)...(19): siRNA sense strand
gaaagaacauguuuagcua

SEQ ID NO: 901106 - RNA, 19 nt, Homo sapiens
  misc_RNA (1)...(19): siRNA sense strand
gaaauggguucaacuuuaa

SEQ ID NO: 901107 - RNA, 19 nt, Homo sapiens
  misc_RNA (1)...(19): siRNA sense strand
ggagagaaauccauuguuu

SEQ ID NO: 901108 - RNA, 19 nt, Homo sapiens
  misc_RNA (1)...(19): siRNA sense strand
gaaauuaguggaucucuua

SEQ ID NO: 901109 - RNA, 19 nt, Homo sapiens
  misc_RNA (1)...(19): siRNA sense strand
ggucaacagucaccuauua

SEQ ID NO: 901110 - RNA, 19 nt, Homo sapiens
  misc_RNA (1)...(19): siRNA sense strand
ggacacaauuucacucaua

SEQ ID NO: 901111 - RNA, 19 nt, Homo sapiens
  misc_RNA (1)...(19): siRNA sense strand
gaaauaagauuggaacuca

SEQ ID NO: 901112 - RNA, 19 nt, Homo sapiens
  misc_RNA (1)...(19): siRNA sense strand
gaacgcgaguuaccuauuu

SEQ ID NO: 901113 - RNA, 19 nt, Homo sapiens
  misc_RNA (1)...(19): siRNA sense strand
ggacguggcuuuaacauca

SEQ ID NO: 901114 - RNA, 19 nt, Homo sapiens
  misc_RNA (1)...(19): siRNA sense strand
gacaauaaaucuacccaua

SEQ ID NO: 901115 - RNA, 19 nt, Homo sapiens
  misc_RNA (1)...(19): siRNA sense strand
gaacauggagcaaucauaa

SEQ ID NO: 901116 - RNA, 19 nt, Homo sapiens
  misc_RNA (1)...(19): siRNA sense strand
ggaaagggaaucaauauuu

SEQ ID NO: 901117 - RNA, 19 nt, Homo sapiens
  misc_RNA (1)...(19): siRNA sense strand
ccaauggucugcaaacaua

SEQ ID NO: 901118 - RNA, 19 nt, Homo sapiens
  misc_RNA (1)...(19): siRNA sense strand
gacggaagaugaugaauuu

SEQ ID NO: 901119 - RNA, 19 nt, Homo sapiens
  misc_RNA (1)...(19): siRNA sense strand
agacugaacugaauuauga

SEQ ID NO: 901120 - RNA, 19 nt, Homo sapiens
  misc_RNA (1)...(19): siRNA sense strand
gaaccaagauucggaagaa

SEQ ID NO: 901121 - RNA, 19 nt, Homo sapiens
  misc_RNA (1)...(19): siRNA sense strand
uaugauaccuugacaauug

SEQ ID NO: 901122 - RNA, 19 nt, Homo sapiens
  misc_RNA (1)...(19): siRNA sense strand
ucagcaaucuucucuguua

SEQ ID NO: 901123 - RNA, 19 nt, Homo sapiens
  misc_RNA (1)...(19): siRNA sense strand
ggacugacacuuaguagua

SEQ ID NO: 901124 - RNA, 19 nt, Homo sapiens
  misc_RNA (1)...(19): siRNA sense strand
gaacauagaguguguagau

SEQ ID NO: 901125 - RNA, 19 nt, Homo sapiens
  misc_RNA (1)...(19): siRNA sense strand
gauaacaccuggacuggaa

SEQ ID NO: 901126 - RNA, 19 nt, Homo sapiens
  misc_RNA (1)...(19): siRNA sense strand
guaagaagauggaauuauc

SEQ ID NO: 901127 - RNA, 19 nt, Homo sapiens
  misc_RNA (1)...(19): siRNA sense strand
gaacaauacauucggauuu

SEQ ID NO: 901128 - RNA, 19 nt, Homo sapiens
  misc_RNA (1)...(19): siRNA sense strand
gaaagaaaguuguggugau

SEQ ID NO: 901129 - RNA, 19 nt, Homo sapiens
  misc_RNA (1)...(19): siRNA sense strand
ccaggaagcucgccuaaug

SEQ ID NO: 901130 - RNA, 19 nt, Homo sapiens
  misc_RNA (1)...(19): siRNA sense strand
gcaguucucuugugaugaa

SEQ ID NO: 901131 - RNA, 19 nt, Homo sapiens
  misc_RNA (1)...(19): siRNA sense strand
gaacacgguuugcacaaug

SEQ ID NO: 901132 - RNA, 19 nt, Homo sapiens
  misc_RNA (1)...(19): siRNA sense strand
ggaagaugaugaauuugaa

SEQ ID NO: 901133 - RNA, 19 nt, Homo sapiens
  misc_RNA (1)...(19): siRNA sense strand
ucaaauaccaucuuccuua

SEQ ID NO: 901134 - RNA, 19 nt, Homo sapiens
  misc_RNA (1)...(19): siRNA sense strand
cagaaaccauacaugauua

SEQ ID NO: 901135 - RNA, 19 nt, Homo sapiens
  misc_RNA (1)...(19): siRNA sense strand
gaacagaaacaauuacaug

SEQ ID NO: 901136 - RNA, 19 nt, Homo sapiens
  misc_RNA (1)...(19): siRNA sense strand
ggacaacuuucaauuagga

SEQ ID NO: 901137 - RNA, 19 nt, Homo sapiens
  misc_RNA (1)...(19): siRNA sense strand
uaacaucacuuacaacaca

SEQ ID NO: 901138 - RNA, 19 nt, Homo sapiens
  misc_RNA (1)...(19): siRNA sense strand
caacaaugcuccaagacuu

SEQ ID NO: 901139 - RNA, 19 nt, Homo sapiens
  misc_RNA (1)...(19): siRNA sense strand
ggaaaggcucuuacaauuu

SEQ ID NO: 901140 - RNA, 19 nt, Homo sapiens
  misc_RNA (1)...(19): siRNA sense strand
gcaaaguggucaacuguuc

SEQ ID NO: 901141 - RNA, 19 nt, Homo sapiens
  misc_RNA (1)...(19): siRNA sense strand
caaauuauccacucaacua

SEQ ID NO: 901142 - RNA, 19 nt, Homo sapiens
  misc_RNA (1)...(19): siRNA sense strand
gaagaaagaacauguuuag

SEQ ID NO: 901143 - RNA, 19 nt, Homo sapiens
  misc_RNA (1)...(19): siRNA sense strand
gcacugugguauucuauga

SEQ ID NO: 901144 - RNA, 19 nt, Homo sapiens
  misc_RNA (1)...(19): siRNA sense strand
guaacauucucaugcaaua

SEQ ID NO: 901145 - RNA, 19 nt, Homo sapiens
  misc_RNA (1)...(19): siRNA sense strand
gaauauaccaccaccaauu

SEQ ID NO: 901146 - RNA, 19 nt, Homo sapiens
  misc_RNA (1)...(19): siRNA sense strand
gaucgaggauuccgacuug

SEQ ID NO: 901147 - RNA, 19 nt, Homo sapiens
  misc_RNA (1)...(19): siRNA sense strand
gaucaaggauauucucuuc

SEQ ID NO: 901148 - RNA, 19 nt, Homo sapiens
  misc_RNA (1)...(19): siRNA sense strand
ggauacaucuuucuuucaa

SEQ ID NO: 901149 - RNA, 19 nt, Homo sapiens
  misc_RNA (1)...(19): siRNA sense strand
gcucauggauuuaagguau

SEQ ID NO: 901150 - RNA, 19 nt, Homo sapiens
  misc_RNA (1)...(19): siRNA sense strand
cagggucacucucacauua

SEQ ID NO: 901151 - RNA, 19 nt, Homo sapiens
  misc_RNA (1)...(19): siRNA sense strand
gcuaagggauuucacuuug

SEQ ID NO: 901152 - RNA, 19 nt, Homo sapiens
  misc_RNA (1)...(19): siRNA sense strand
ggacaagguuaacaggauu

SEQ ID NO: 901153 - RNA, 19 nt, Homo sapiens
  misc_RNA (1)...(19): siRNA sense strand
caacuuuaaugauguggua

SEQ ID NO: 901154 - RNA, 19 nt, Homo sapiens
  misc_RNA (1)...(19): siRNA sense strand
cgaaguggauccucagaaa

SEQ ID NO: 901155 - RNA, 19 nt, Homo sapiens
  misc_RNA (1)...(19): siRNA sense strand
guaccagacuugauaguga

SEQ ID NO: 901156 - RNA, 19 nt, Homo sapiens
  misc_RNA (1)...(19): siRNA sense strand
aaacuucccucauccauau

SEQ ID NO: 901157 - RNA, 19 nt, Homo sapiens
  misc_RNA (1)...(19): siRNA sense strand
uggaaaggcucuuacaauu

SEQ ID NO: 901158 - RNA, 19 nt, Homo sapiens
  misc_RNA (1)...(19): siRNA sense strand
gaacauguuuagcuaaugg

SEQ ID NO: 901159 - RNA, 19 nt, Homo sapiens
  misc_RNA (1)...(19): siRNA sense strand
ggauacacauuaauuggaa

SEQ ID NO: 901160 - RNA, 19 nt, Homo sapiens
  misc_RNA (1)...(19): siRNA sense strand
ggaagucguucaacagguu

SEQ ID NO: 901161 - RNA, 19 nt, Homo sapiens
  misc_RNA (1)...(19): siRNA sense strand
ggauacagguugagucaug

SEQ ID NO: 901162 - RNA, 19 nt, Homo sapiens
  misc_RNA (1)...(19): siRNA sense strand
gaacauggucuggaacuuu

SEQ ID NO: 901163 - RNA, 19 nt, Homo sapiens
  misc_RNA (1)...(19): siRNA sense strand
cagaauguaucaugauuga

SEQ ID NO: 901164 - RNA, 19 nt, Homo sapiens
  misc_RNA (1)...(19): siRNA sense strand
ggacgaaaguguuggaucu

SEQ ID NO: 901165 - RNA, 19 nt, Homo sapiens
  misc_RNA (1)...(19): siRNA sense strand
caaauaccaucuuccuuau

SEQ ID NO: 901166 - RNA, 19 nt, Homo sapiens
  misc_RNA (1)...(19): siRNA sense strand
gaaggaacaucagagauca

SEQ ID NO: 901167 - RNA, 19 nt, Homo sapiens
  misc_RNA (1)...(19): siRNA sense strand
caucaugacuacuuacuga

SEQ ID NO: 901168 - RNA, 19 nt, Homo sapiens
  misc_RNA (1)...(19): siRNA sense strand
gaauuaugauguucuggaa

SEQ ID NO: 901169 - RNA, 19 nt, Homo sapiens
  misc_RNA (1)...(19): siRNA sense strand
gaaacaacccaugaccuua

SEQ ID NO: 901170 - RNA, 19 nt, Homo sapiens
  misc_RNA (1)...(19): siRNA sense strand
guuauguucuucaagguua

SEQ ID NO: 901171 - RNA, 19 nt, Homo sapiens
  misc_RNA (1)...(19): siRNA sense strand
aaacaaccaugaaugcauu

SEQ ID NO: 901172 - RNA, 19 nt, Homo sapiens
  misc_RNA (1)...(19): siRNA sense strand
gcaaacauacccaucugua

SEQ ID NO: 901173 - RNA, 19 nt, Homo sapiens
  misc_RNA (1)...(19): siRNA sense strand
ugauggagcuacuuaugua

SEQ ID NO: 901174 - RNA, 19 nt, Homo sapiens
  misc_RNA (1)...(19): siRNA sense strand
ggaguaaugccaacuugua

SEQ ID NO: 901175 - RNA, 19 nt, Homo sapiens
  misc_RNA (1)...(19): siRNA sense strand
aaucaggacuuguacaauu

SEQ ID NO: 901176 - RNA, 19 nt, Homo sapiens
  misc_RNA (1)...(19): siRNA sense strand
agaagaauacgacuacuua

SEQ ID NO: 901177 - RNA, 19 nt, Homo sapiens
  misc_RNA (1)...(19): siRNA sense strand
ggaauggcaucuacaucaa

SEQ ID NO: 901178 - RNA, 19 nt, Homo sapiens
  misc_RNA (1)...(19): siRNA sense strand
aaacagugcccaauucuuu

SEQ ID NO: 901179 - RNA, 19 nt, Homo sapiens
  misc_RNA (1)...(19): siRNA sense strand
caacacauuuggacauaau

SEQ ID NO: 901180 - RNA, 19 nt, Homo sapiens
  misc_RNA (1)...(19): siRNA sense strand
ccagaaggguauggaaaua

SEQ ID NO: 901181 - RNA, 19 nt, Homo sapiens
  misc_RNA (1)...(19): siRNA sense strand
gcaggaaagggaaucaaua

SEQ ID NO: 901182 - RNA, 19 nt, Homo sapiens
  misc_RNA (1)...(19): siRNA sense strand
ggacugagauauggagaug

SEQ ID NO: 901183 - RNA, 19 nt, Homo sapiens
  misc_RNA (1)...(19): siRNA sense strand
ucauauggcucaacagcua

SEQ ID NO: 901184 - RNA, 19 nt, Homo sapiens
  misc_RNA (1)...(19): siRNA sense strand
gcuuagugguccucaaaua

SEQ ID NO: 901185 - RNA, 19 nt, Homo sapiens
  misc_RNA (1)...(19): siRNA sense strand
auagaaagcagcucaaaua

SEQ ID NO: 901186 - RNA, 19 nt, Homo sapiens
  misc_RNA (1)...(19): siRNA sense strand
gagcaugaguagccaaaug

SEQ ID NO: 901187 - RNA, 19 nt, Homo sapiens
  misc_RNA (1)...(19): siRNA sense strand
acaaaggacugcaccuaaa

SEQ ID NO: 901188 - RNA, 19 nt, Homo sapiens
  misc_RNA (1)...(19): siRNA sense strand
gcagaagaacgaaauagaa

SEQ ID NO: 901189 - RNA, 19 nt, Homo sapiens
  misc_RNA (1)...(19): siRNA sense strand
ggagauguucuuaagauuu

SEQ ID NO: 901190 - RNA, 19 nt, Homo sapiens
  misc_RNA (1)...(19): siRNA sense strand
gaggugccuucccaucuua

SEQ ID NO: 901191 - RNA, 19 nt, Homo sapiens
  misc_RNA (1)...(19): siRNA sense strand
ggaaguucaauuucaguua

SEQ ID NO: 901192 - RNA, 19 nt, Homo sapiens
  misc_RNA (1)...(19): siRNA sense strand
ggaaacaacccaugaccuu

SEQ ID NO: 901193 - RNA, 19 nt, Homo sapiens
  misc_RNA (1)...(19): siRNA sense strand
gaggauaugucaacaggau

SEQ ID NO: 901194 - RNA, 19 nt, Homo sapiens
  misc_RNA (1)...(19): siRNA sense strand
gcacuguucuaucaccaaa

SEQ ID NO: 901195 - RNA, 19 nt, Homo sapiens
  misc_RNA (1)...(19): siRNA sense strand
ucaaggagaggaaagaaua

SEQ ID NO: 901196 - RNA, 19 nt, Homo sapiens
  misc_RNA (1)...(19): siRNA sense strand
gcacaaggagauguucuua

SEQ ID NO: 901197 - RNA, 19 nt, Homo sapiens
  misc_RNA (1)...(19): siRNA sense strand
ugacagcaaugcacaaugu

SEQ ID NO: 901198 - RNA, 19 nt, Homo sapiens
  misc_RNA (1)...(19): siRNA sense strand
gcacuuauauuugcaggau

SEQ ID NO: 901199 - RNA, 19 nt, Homo sapiens
  misc_RNA (1)...(19): siRNA sense strand
gaacucaaacuucauaugg

SEQ ID NO: 901200 - RNA, 19 nt, Homo sapiens
  misc_RNA (1)...(19): siRNA sense strand
gaaauucagcucucacaug

SEQ ID NO: 901201 - RNA, 19 nt, Homo sapiens
  misc_RNA (1)...(19): siRNA sense strand
gguagauccuggaaauauu

SEQ ID NO: 901202 - RNA, 19 nt, Homo sapiens
  misc_RNA (1)...(19): siRNA sense strand
ggaaauggguucaacuuua

SEQ ID NO: 901203 - RNA, 19 nt, Homo sapiens
  misc_RNA (1)...(19): siRNA sense strand
gaaagcagcucaaauacaa

SEQ ID NO: 901204 - RNA, 19 nt, Homo sapiens
  misc_RNA (1)...(19): siRNA sense strand
ggacaaaccuuuaccagaa

SEQ ID NO: 901205 - RNA, 19 nt, Homo sapiens
  misc_RNA (1)...(19): siRNA sense strand
gaaagaacauguuuagcua

SEQ ID NO: 901206 - RNA, 19 nt, Homo sapiens
  misc_RNA (1)...(19): siRNA sense strand
gaaauggguucaacuuuaa

SEQ ID NO: 901207 - RNA, 19 nt, Homo sapiens
  misc_RNA (1)...(19): siRNA sense strand
ggagagaaauccauuguuu

SEQ ID NO: 901208 - RNA, 19 nt, Homo sapiens
  misc_RNA (1)...(19): siRNA sense strand
gaaauuaguggaucucuua

SEQ ID NO: 901209 - RNA, 19 nt, Homo sapiens
  misc_RNA (1)...(19): siRNA sense strand
ggucaacagucaccuauua

SEQ ID NO: 901210 - RNA, 19 nt, Homo sapiens
  misc_RNA (1)...(19): siRNA sense strand
ggacacaauuucacucaua

SEQ ID NO: 901211 - RNA, 19 nt, Homo sapiens
  misc_RNA (1)...(19): siRNA sense strand
gaaauaagauuggaacuca

SEQ ID NO: 901212 - RNA, 19 nt, Homo sapiens
  misc_RNA (1)...(19): siRNA sense strand
gaacgcgaguuaccuauuu

SEQ ID NO: 901213 - RNA, 19 nt, Homo sapiens
  misc_RNA (1)...(19): siRNA sense strand
ggacguggcuuuaacauca

SEQ ID NO: 901214 - RNA, 19 nt, Homo sapiens
  misc_RNA (1)...(19): siRNA sense strand
gacaauaaaucuacccaua

SEQ ID NO: 901215 - RNA, 19 nt, Homo sapiens
  misc_RNA (1)...(19): siRNA sense strand
gaacauggagcaaucauaa

SEQ ID NO: 901216 - RNA, 19 nt, Homo sapiens
  misc_RNA (1)...(19): siRNA sense strand
ggaaagggaaucaauauuu

SEQ ID NO: 901217 - RNA, 19 nt, Homo sapiens
  misc_RNA (1)...(19): siRNA sense strand
ccaauggucugcaaacaua

SEQ ID NO: 901218 - RNA, 19 nt, Homo sapiens
  misc_RNA (1)...(19): siRNA sense strand
gacggaagaugaugaauuu

SEQ ID NO: 901219 - RNA, 19 nt, Homo sapiens
  misc_RNA (1)...(19): siRNA sense strand
agacugaacugaauuauga

SEQ ID NO: 901220 - RNA, 19 nt, Homo sapiens
  misc_RNA (1)...(19): siRNA sense strand
gaaccaagauucggaagaa

SEQ ID NO: 901221 - RNA, 19 nt, Homo sapiens
  misc_RNA (1)...(19): siRNA sense strand
uaugauaccuugacaauug

SEQ ID NO: 901222 - RNA, 19 nt, Homo sapiens
  misc_RNA (1)...(19): siRNA sense strand
ucagcaaucuucucuguua

SEQ ID NO: 901223 - RNA, 19 nt, Homo sapiens
  misc_RNA (1)...(19): siRNA sense strand
ggacugacacuuaguagua

SEQ ID NO: 901224 - RNA, 19 nt, Homo sapiens
  misc_RNA (1)...(19): siRNA sense strand
gaacauagaguguguagau

SEQ ID NO: 901225 - RNA, 19 nt, Homo sapiens
  misc_RNA (1)...(19): siRNA sense strand
gauaacaccuggacuggaa

SEQ ID NO: 901226 - RNA, 19 nt, Homo sapiens
  misc_RNA (1)...(19): siRNA sense strand
guaagaagauggaauuauc

SEQ ID NO: 901227 - RNA, 19 nt, Homo sapiens
  misc_RNA (1)...(19): siRNA sense strand
gaacaauacauucggauuu

SEQ ID NO: 901228 - RNA, 19 nt, Homo sapiens
  misc_RNA (1)...(19): siRNA sense strand
gaaagaaaguuguggugau

SEQ ID NO: 901229 - RNA, 19 nt, Homo sapiens
  misc_RNA (1)...(19): siRNA sense strand
ccaggaagcucgccuaaug

SEQ ID NO: 901230 - RNA, 19 nt, Homo sapiens
  misc_RNA (1)...(19): siRNA sense strand
gcaguucucuugugaugaa

SEQ ID NO: 901231 - RNA, 19 nt, Homo sapiens
  misc_RNA (1)...(19): siRNA sense strand
gaacacgguuugcacaaug

SEQ ID NO: 901232 - RNA, 19 nt, Homo sapiens
  misc_RNA (1)...(19): siRNA sense strand
ggaagaugaugaauuugaa

SEQ ID NO: 901233 - RNA, 19 nt, Homo sapiens
  misc_RNA (1)...(19): siRNA sense strand
ucaaauaccaucuuccuua

SEQ ID NO: 901234 - RNA, 19 nt, Homo sapiens
  misc_RNA (1)...(19): siRNA sense strand
cagaaaccauacaugauua

SEQ ID NO: 901235 - RNA, 19 nt, Homo sapiens
  misc_RNA (1)...(19): siRNA sense strand
gaacagaaacaauuacaug

SEQ ID NO: 901236 - RNA, 19 nt, Homo sapiens
  misc_RNA (1)...(19): siRNA sense strand
ggacaacuuucaauuagga

SEQ ID NO: 901237 - RNA, 19 nt, Homo sapiens
  misc_RNA (1)...(19): siRNA sense strand
uaacaucacuuacaacaca

SEQ ID NO: 901238 - RNA, 19 nt, Homo sapiens
  misc_RNA (1)...(19): siRNA sense strand
caacaaugcuccaagacuu

SEQ ID NO: 901239 - RNA, 19 nt, Homo sapiens
  misc_RNA (1)...(19): siRNA sense strand
ggaaaggcucuuacaauuu

SEQ ID NO: 901240 - RNA, 19 nt, Homo sapiens
  misc_RNA (1)...(19): siRNA sense strand
gcaaaguggucaacuguuc

SEQ ID NO: 901241 - RNA, 19 nt, Homo sapiens
  misc_RNA (1)...(19): siRNA sense strand
caaauuauccacucaacua

SEQ ID NO: 901242 - RNA, 19 nt, Homo sapiens
  misc_RNA (1)...(19): siRNA sense strand
gaagaaagaacauguuuag

SEQ ID NO: 901243 - RNA, 19 nt, Homo sapiens
  misc_RNA (1)...(19): siRNA sense strand
gcacugugguauucuauga

SEQ ID NO: 901244 - RNA, 19 nt, Homo sapiens
  misc_RNA (1)...(19): siRNA sense strand
guaacauucucaugcaaua

SEQ ID NO: 901245 - RNA, 19 nt, Homo sapiens
  misc_RNA (1)...(19): siRNA sense strand
gaauauaccaccaccaauu

SEQ ID NO: 901246 - RNA, 19 nt, Homo sapiens
  misc_RNA (1)...(19): siRNA sense strand
gaucgaggauuccgacuug

SEQ ID NO: 901247 - RNA, 19 nt, Homo sapiens
  misc_RNA (1)...(19): siRNA sense strand
gaucaaggauauucucuuc

SEQ ID NO: 901248 - RNA, 19 nt, Homo sapiens
  misc_RNA (1)...(19): siRNA sense strand
ggauacaucuuucuuucaa

SEQ ID NO: 901249 - RNA, 19 nt, Homo sapiens
  misc_RNA (1)...(19): siRNA sense strand
gcucauggauuuaagguau

SEQ ID NO: 901250 - RNA, 19 nt, Homo sapiens
  misc_RNA (1)...(19): siRNA sense strand
cagggucacucucacauua

SEQ ID NO: 901251 - RNA, 19 nt, Homo sapiens
  misc_RNA (1)...(19): siRNA sense strand
gcuaagggauuucacuuug

SEQ ID NO: 901252 - RNA, 19 nt, Homo sapiens
  misc_RNA (1)...(19): siRNA sense strand
ggacaagguuaacaggauu

SEQ ID NO: 901253 - RNA, 19 nt, Homo sapiens
  misc_RNA (1)...(19): siRNA sense strand
caacuuuaaugauguggua

SEQ ID NO: 901254 - RNA, 19 nt, Homo sapiens
  misc_RNA (1)...(19): siRNA sense strand
cgaaguggauccucagaaa

SEQ ID NO: 901255 - RNA, 19 nt, Homo sapiens
  misc_RNA (1)...(19): siRNA sense strand
guaccagacuugauaguga

SEQ ID NO: 901256 - RNA, 19 nt, Homo sapiens
  misc_RNA (1)...(19): siRNA sense strand
aaacuucccucauccauau

SEQ ID NO: 901257 - RNA, 19 nt, Homo sapiens
  misc_RNA (1)...(19): siRNA sense strand
uggaaaggcucuuacaauu

SEQ ID NO: 901258 - RNA, 19 nt, Homo sapiens
  misc_RNA (1)...(19): siRNA sense strand
gaacauguuuagcuaaugg

SEQ ID NO: 901259 - RNA, 19 nt, Homo sapiens
  misc_RNA (1)...(19): siRNA sense strand
ggauacacauuaauuggaa

SEQ ID NO: 901260 - RNA, 19 nt, Homo sapiens
  misc_RNA (1)...(19): siRNA sense strand
ggaagucguucaacagguu

SEQ ID NO: 901261 - RNA, 19 nt, Homo sapiens
  misc_RNA (1)...(19): siRNA sense strand
ggauacagguugagucaug

SEQ ID NO: 901262 - RNA, 19 nt, Homo sapiens
  misc_RNA (1)...(19): siRNA sense strand
gaacauggucuggaacuuu

SEQ ID NO: 901263 - RNA, 19 nt, Homo sapiens
  misc_RNA (1)...(19): siRNA sense strand
cagaauguaucaugauuga

SEQ ID NO: 901264 - RNA, 19 nt, Homo sapiens
  misc_RNA (1)...(19): siRNA sense strand
ggacgaaaguguuggaucu

SEQ ID NO: 901265 - RNA, 19 nt, Homo sapiens
  misc_RNA (1)...(19): siRNA sense strand
caaauaccaucuuccuuau

SEQ ID NO: 901266 - RNA, 19 nt, Homo sapiens
  misc_RNA (1)...(19): siRNA sense strand
gaaggaacaucagagauca

SEQ ID NO: 901267 - RNA, 19 nt, Homo sapiens
  misc_RNA (1)...(19): siRNA sense strand
caucaugacuacuuacuga

SEQ ID NO: 901268 - RNA, 19 nt, Homo sapiens
  misc_RNA (1)...(19): siRNA sense strand
gaauuaugauguucuggaa

SEQ ID NO: 901269 - RNA, 19 nt, Homo sapiens
  misc_RNA (1)...(19): siRNA sense strand
gaaacaacccaugaccuua

SEQ ID NO: 901270 - RNA, 19 nt, Homo sapiens
  misc_RNA (1)...(19): siRNA sense strand
guuauguucuucaagguua

SEQ ID NO: 901271 - RNA, 19 nt, Homo sapiens
  misc_RNA (1)...(19): siRNA sense strand
aaacaaccaugaaugcauu

SEQ ID NO: 901272 - RNA, 19 nt, Homo sapiens
  misc_RNA (1)...(19): siRNA sense strand
gcaaacauacccaucugua

SEQ ID NO: 901273 - RNA, 19 nt, Homo sapiens
  misc_RNA (1)...(19): siRNA sense strand
ugauggagcuacuuaugua

SEQ ID NO: 901274 - RNA, 19 nt, Homo sapiens
  misc_RNA (1)...(19): siRNA sense strand
ggaguaaugccaacuugua

SEQ ID NO: 901275 - RNA, 19 nt, Homo sapiens
  misc_RNA (1)...(19): siRNA sense strand
aaucaggacuuguacaauu

SEQ ID NO: 901276 - RNA, 19 nt, Homo sapiens
  misc_RNA (1)...(19): siRNA sense strand
agaagaauacgacuacuua

SEQ ID NO: 901277 - RNA, 19 nt, Homo sapiens
  misc_RNA (1)...(19): siRNA sense strand
ggaauggcaucuacaucaa

SEQ ID NO: 901278 - RNA, 19 nt, Homo sapiens
  misc_RNA (1)...(19): siRNA sense strand
aaacagugcccaauucuuu

SEQ ID NO: 901279 - RNA, 19 nt, Homo sapiens
  misc_RNA (1)...(19): siRNA sense strand
caacacauuuggacauaau

SEQ ID NO: 901280 - RNA, 19 nt, Homo sapiens
  misc_RNA (1)...(19): siRNA sense strand
ccagaaggguauggaaaua

SEQ ID NO: 901281 - RNA, 19 nt, Homo sapiens
  misc_RNA (1)...(19): siRNA sense strand
gcaggaaagggaaucaaua

SEQ ID NO: 901282 - RNA, 19 nt, Homo sapiens
  misc_RNA (1)...(19): siRNA sense strand
ggacugagauauggagaug

SEQ ID NO: 901283 - RNA, 19 nt, Homo sapiens
  misc_RNA (1)...(19): siRNA sense strand
ucauauggcucaacagcua

SEQ ID NO: 901284 - RNA, 19 nt, Homo sapiens
  misc_RNA (1)...(19): siRNA sense strand
gcuuagugguccucaaaua

SEQ ID NO: 901285 - RNA, 19 nt, Homo sapiens
  misc_RNA (1)...(19): siRNA sense strand
auagaaagcagcucaaaua

SEQ ID NO: 901286 - RNA, 19 nt, Homo sapiens
  misc_RNA (1)...(19): siRNA sense strand
gagcaugaguagccaaaug

SEQ ID NO: 901287 - RNA, 19 nt, Homo sapiens
  misc_RNA (1)...(19): siRNA sense strand
acaaaggacugcaccuaaa

SEQ ID NO: 901288 - RNA, 19 nt, Homo sapiens
  misc_RNA (1)...(19): siRNA sense strand
gcagaagaacgaaauagaa

SEQ ID NO: 901289 - RNA, 19 nt, Homo sapiens
  misc_RNA (1)...(19): siRNA sense strand
ggagauguucuuaagauuu

SEQ ID NO: 901290 - RNA, 19 nt, Homo sapiens
  misc_RNA (1)...(19): siRNA sense strand
gaggugccuucccaucuua

SEQ ID NO: 901291 - RNA, 19 nt, Homo sapiens
  misc_RNA (1)...(19): siRNA sense strand
ggaaguucaauuucaguua

SEQ ID NO: 901292 - RNA, 19 nt, Homo sapiens
  misc_RNA (1)...(19): siRNA sense strand
ggaaacaacccaugaccuu

SEQ ID NO: 901293 - RNA, 19 nt, Homo sapiens
  misc_RNA (1)...(19): siRNA sense strand
gaggauaugucaacaggau

SEQ ID NO: 901294 - RNA, 19 nt, Homo sapiens
  misc_RNA (1)...(19): siRNA sense strand
gcacuguucuaucaccaaa

SEQ ID NO: 901295 - RNA, 19 nt, Homo sapiens
  misc_RNA (1)...(19): siRNA sense strand
ucaaggagaggaaagaaua

SEQ ID NO: 901296 - RNA, 19 nt, Homo sapiens
  misc_RNA (1)...(19): siRNA sense strand
gcacaaggagauguucuua

SEQ ID NO: 901297 - RNA, 19 nt, Homo sapiens
  misc_RNA (1)...(19): siRNA sense strand
ugacagcaaugcacaaugu

SEQ ID NO: 901298 - RNA, 19 nt, Homo sapiens
  misc_RNA (1)...(19): siRNA sense strand
gcacuuauauuugcaggau

SEQ ID NO: 901299 - RNA, 19 nt, Homo sapiens
  misc_RNA (1)...(19): siRNA sense strand
gaacucaaacuucauaugg

SEQ ID NO: 901300 - RNA, 19 nt, Homo sapiens
  misc_RNA (1)...(19): siRNA sense strand
gaaauucagcucucacaug

SEQ ID NO: 901301 - RNA, 19 nt, Homo sapiens
  misc_RNA (1)...(19): siRNA sense strand
gguagauccuggaaauauu

SEQ ID NO: 901302 - RNA, 19 nt, Homo sapiens
  misc_RNA (1)...(19): siRNA sense strand
gcaguugcgucgcuauuug

SEQ ID NO: 901303 - RNA, 19 nt, Homo sapiens
  misc_RNA (1)...(19): siRNA sense strand
gaaccuaagccacaaucaa

SEQ ID NO: 901304 - RNA, 19 nt, Homo sapiens
  misc_RNA (1)...(19): siRNA sense strand
ccacagggcccaucaagau

SEQ ID NO: 901305 - RNA, 19 nt, Homo sapiens
  misc_RNA (1)...(19): siRNA sense strand
ggaggcagcugagauagag

SEQ ID NO: 901306 - RNA, 19 nt, Homo sapiens
  misc_RNA (1)...(19): siRNA sense strand
gcacugaccgccuuagaca

SEQ ID NO: 901307 - RNA, 19 nt, Homo sapiens
  misc_RNA (1)...(19): siRNA sense strand
ccuauaaucgccugcauuu

SEQ ID NO: 901308 - RNA, 19 nt, Homo sapiens
  misc_RNA (1)...(19): siRNA sense strand
ggagcuccuugaugucuug

SEQ ID NO: 901309 - RNA, 19 nt, Homo sapiens
  misc_RNA (1)...(19): siRNA sense strand
aagaggcgcuggcccuuga

SEQ ID NO: 901310 - RNA, 19 nt, Homo sapiens
  misc_RNA (1)...(19): siRNA sense strand
gggauuagacagugaggaa

SEQ ID NO: 901311 - RNA, 19 nt, Homo sapiens
  misc_RNA (1)...(19): siRNA sense strand
gcaccuggauuuggcauac

SEQ ID NO: 901312 - RNA, 19 nt, Homo sapiens
  misc_RNA (1)...(19): siRNA sense strand
caucuggacaucuccuaua

SEQ ID NO: 901313 - RNA, 19 nt, Homo sapiens
  misc_RNA (1)...(19): siRNA sense strand
ggaugggauuagacaguga

SEQ ID NO: 901314 - RNA, 19 nt, Homo sapiens
  misc_RNA (1)...(19): siRNA sense strand
ggagcugcuugccguguug

SEQ ID NO: 901315 - RNA, 19 nt, Homo sapiens
  misc_RNA (1)...(19): siRNA sense strand
uauaaucgccugcauuugg

SEQ ID NO: 901316 - RNA, 19 nt, Homo sapiens
  misc_RNA (1)...(19): siRNA sense strand
agggauuccugauggauuu

SEQ ID NO: 901317 - RNA, 19 nt, Homo sapiens
  misc_RNA (1)...(19): siRNA sense strand
cuggacaucuccuauaauc

SEQ ID NO: 901318 - RNA, 19 nt, Homo sapiens
  misc_RNA (1)...(19): siRNA sense strand
uagagcagcugaggaaucu

SEQ ID NO: 901319 - RNA, 19 nt, Homo sapiens
  misc_RNA (1)...(19): siRNA sense strand
ggcagggaaugcuuucuca

SEQ ID NO: 901320 - RNA, 19 nt, Homo sapiens
  misc_RNA (1)...(19): siRNA sense strand
ugugugagcuccaccaucu

SEQ ID NO: 901321 - RNA, 19 nt, Homo sapiens
  misc_RNA (1)...(19): siRNA sense strand
ggaggccucuguuccaaaa

SEQ ID NO: 901322 - RNA, 19 nt, Homo sapiens
  misc_RNA (1)...(19): siRNA sense strand
cugcguuucuugaaccuaa

SEQ ID NO: 901323 - RNA, 19 nt, Homo sapiens
  misc_RNA (1)...(19): siRNA sense strand
ccaggagucaccacagaaa

SEQ ID NO: 901324 - RNA, 19 nt, Homo sapiens
  misc_RNA (1)...(19): siRNA sense strand
caggagaggaggaagaaga

SEQ ID NO: 901325 - RNA, 19 nt, Homo sapiens
  misc_RNA (1)...(19): siRNA sense strand
caacuucagcuacaaugca

SEQ ID NO: 901326 - RNA, 19 nt, Homo sapiens
  misc_RNA (1)...(19): siRNA sense strand
aagaggagcaggaccagaa

SEQ ID NO: 901327 - RNA, 19 nt, Homo sapiens
  misc_RNA (1)...(19): siRNA sense strand
ugacagauuuucagacuca

SEQ ID NO: 901328 - RNA, 19 nt, Homo sapiens
  misc_RNA (1)...(19): siRNA sense strand
cacucaagcugguccaugu

SEQ ID NO: 901329 - RNA, 19 nt, Homo sapiens
  misc_RNA (1)...(19): siRNA sense strand
gaaggugacuggggagaug

SEQ ID NO: 901330 - RNA, 19 nt, Homo sapiens
  misc_RNA (1)...(19): siRNA sense strand
ucaugugccuugugguugu

SEQ ID NO: 901331 - RNA, 19 nt, Homo sapiens
  misc_RNA (1)...(19): siRNA sense strand
ggaccagaaggaaguggaa

SEQ ID NO: 901332 - RNA, 19 nt, Homo sapiens
  misc_RNA (1)...(19): siRNA sense strand
gagccugcauggccuagag

SEQ ID NO: 901333 - RNA, 19 nt, Homo sapiens
  misc_RNA (1)...(19): siRNA sense strand
acagggcccaucaagauuu

SEQ ID NO: 901334 - RNA, 19 nt, Homo sapiens
  misc_RNA (1)...(19): siRNA sense strand
guucaugugccuugugguu

SEQ ID NO: 901335 - RNA, 19 nt, Homo sapiens
  misc_RNA (1)...(19): siRNA sense strand
caacagcugaaccacguau

SEQ ID NO: 901336 - RNA, 19 nt, Homo sapiens
  misc_RNA (1)...(19): siRNA sense strand
gccuagagcagcugaggaa

SEQ ID NO: 901337 - RNA, 19 nt, Homo sapiens
  misc_RNA (1)...(19): siRNA sense strand
cuuggaggcucgccaguuc

SEQ ID NO: 901338 - RNA, 19 nt, Homo sapiens
  misc_RNA (1)...(19): siRNA sense strand
ggaucugaguggcauagag

SEQ ID NO: 901339 - RNA, 19 nt, Homo sapiens
  misc_RNA (1)...(19): siRNA sense strand
cagcugaaccacguauuug

SEQ ID NO: 901340 - RNA, 19 nt, Homo sapiens
  misc_RNA (1)...(19): siRNA sense strand
ucuggaggcagcugagaua

SEQ ID NO: 901341 - RNA, 19 nt, Homo sapiens
  misc_RNA (1)...(19): siRNA sense strand
agaaucuccugcugugugu

SEQ ID NO: 901342 - RNA, 19 nt, Homo sapiens
  misc_RNA (1)...(19): siRNA sense strand
caauguggcucgggaacag

SEQ ID NO: 901343 - RNA, 19 nt, Homo sapiens
  misc_RNA (1)...(19): siRNA sense strand
cagcuggagacccugauuu

SEQ ID NO: 901344 - RNA, 19 nt, Homo sapiens
  misc_RNA (1)...(19): siRNA sense strand
uguccuaacugugguagug

SEQ ID NO: 901345 - RNA, 19 nt, Homo sapiens
  misc_RNA (1)...(19): siRNA sense strand
acagcugaaccacguauuu

SEQ ID NO: 901346 - RNA, 19 nt, Homo sapiens
  misc_RNA (1)...(19): siRNA sense strand
ccaggacugucagggauuc

SEQ ID NO: 901347 - RNA, 19 nt, Homo sapiens
  misc_RNA (1)...(19): siRNA sense strand
ugucagcucugcguuucuu

SEQ ID NO: 901348 - RNA, 19 nt, Homo sapiens
  misc_RNA (1)...(19): siRNA sense strand
agucugcgcuucuccuaca

SEQ ID NO: 901349 - RNA, 19 nt, Homo sapiens
  misc_RNA (1)...(19): siRNA sense strand
gccuugugguugugucuga

SEQ ID NO: 901350 - RNA, 19 nt, Homo sapiens
  misc_RNA (1)...(19): siRNA sense strand
gcgaugcccaggaggaguu

SEQ ID NO: 901351 - RNA, 19 nt, Homo sapiens
  misc_RNA (1)...(19): siRNA sense strand
cgggagcugucaccacugu

SEQ ID NO: 901352 - RNA, 19 nt, Homo sapiens
  misc_RNA (1)...(19): siRNA sense strand
uggcgaagccucugagaag

SEQ ID NO: 901353 - RNA, 19 nt, Homo sapiens
  misc_RNA (1)...(19): siRNA sense strand
cguccacccuguuccuguu

SEQ ID NO: 901354 - RNA, 19 nt, Homo sapiens
  misc_RNA (1)...(19): siRNA sense strand
ggcaguugcgucgcuauuu

SEQ ID NO: 901355 - RNA, 19 nt, Homo sapiens
  misc_RNA (1)...(19): siRNA sense strand
ggccagggaugcugcuacu

SEQ ID NO: 901356 - RNA, 19 nt, Homo sapiens
  misc_RNA (1)...(19): siRNA sense strand
gcuggcccuugaccgauga

SEQ ID NO: 901357 - RNA, 19 nt, Homo sapiens
  misc_RNA (1)...(19): siRNA sense strand
ggagcaggaccagaaggaa

SEQ ID NO: 901358 - RNA, 19 nt, Homo sapiens
  misc_RNA (1)...(19): siRNA sense strand
gcaacagcugaaccacgua

SEQ ID NO: 901359 - RNA, 19 nt, Homo sapiens
  misc_RNA (1)...(19): siRNA sense strand
aucuggacaucuccuauaa

SEQ ID NO: 901360 - RNA, 19 nt, Homo sapiens
  misc_RNA (1)...(19): siRNA sense strand
ggcaggagaggaggaagaa

SEQ ID NO: 901361 - RNA, 19 nt, Homo sapiens
  misc_RNA (1)...(19): siRNA sense strand
ggaggcaggagaggaggaa

SEQ ID NO: 901362 - RNA, 19 nt, Homo sapiens
  misc_RNA (1)...(19): siRNA sense strand
cacagggcccaucaagauu

SEQ ID NO: 901363 - RNA, 19 nt, Homo sapiens
  misc_RNA (1)...(19): siRNA sense strand
ggacuugcggcugcucuuc

SEQ ID NO: 901364 - RNA, 19 nt, Homo sapiens
  misc_RNA (1)...(19): siRNA sense strand
ccacccuguuccuguuaga

SEQ ID NO: 901365 - RNA, 19 nt, Homo sapiens
  misc_RNA (1)...(19): siRNA sense strand
gaaacagggagagcagucu

SEQ ID NO: 901366 - RNA, 19 nt, Homo sapiens
  misc_RNA (1)...(19): siRNA sense strand
ucacuucugcccaccuguu

SEQ ID NO: 901367 - RNA, 19 nt, Homo sapiens
  misc_RNA (1)...(19): siRNA sense strand
gaacuuggcucucauguuu

SEQ ID NO: 901368 - RNA, 19 nt, Homo sapiens
  misc_RNA (1)...(19): siRNA sense strand
gaaagaagcuaucaugaag

SEQ ID NO: 901369 - RNA, 19 nt, Homo sapiens
  misc_RNA (1)...(19): siRNA sense strand
gagugaagcucaugcauuu

SEQ ID NO: 901370 - RNA, 19 nt, Homo sapiens
  misc_RNA (1)...(19): siRNA sense strand
gauggaagaugaagaaaug

SEQ ID NO: 901371 - RNA, 19 nt, Homo sapiens
  misc_RNA (1)...(19): siRNA sense strand
guacagggcuggaguuuca

SEQ ID NO: 901372 - RNA, 19 nt, Homo sapiens
  misc_RNA (1)...(19): siRNA sense strand
gaagcuggcuggaacauca

SEQ ID NO: 901373 - RNA, 19 nt, Homo sapiens
  misc_RNA (1)...(19): siRNA sense strand
guaugcaacuuacacguua

SEQ ID NO: 901374 - RNA, 19 nt, Homo sapiens
  misc_RNA (1)...(19): siRNA sense strand
acacauagcuguuuacgau

SEQ ID NO: 901375 - RNA, 19 nt, Homo sapiens
  misc_RNA (1)...(19): siRNA sense strand
guacagcagugauccauug

SEQ ID NO: 901376 - RNA, 19 nt, Homo sapiens
  misc_RNA (1)...(19): siRNA sense strand
ucaaguguuucuucucuua

SEQ ID NO: 901377 - RNA, 19 nt, Homo sapiens
  misc_RNA (1)...(19): siRNA sense strand
gagaagugcaucaucaaua

SEQ ID NO: 901378 - RNA, 19 nt, Homo sapiens
  misc_RNA (1)...(19): siRNA sense strand
agaagugcaucaucaauaa

SEQ ID NO: 901379 - RNA, 19 nt, Homo sapiens
  misc_RNA (1)...(19): siRNA sense strand
aaagacagaugcacauuau

SEQ ID NO: 901380 - RNA, 19 nt, Homo sapiens
  misc_RNA (1)...(19): siRNA sense strand
ccaguuuccucauaguuua

SEQ ID NO: 901381 - RNA, 19 nt, Homo sapiens
  misc_RNA (1)...(19): siRNA sense strand
ggaaagaugagccagauga

SEQ ID NO: 901382 - RNA, 19 nt, Homo sapiens
  misc_RNA (1)...(19): siRNA sense strand
guagaauacuugcaagcua

SEQ ID NO: 901383 - RNA, 19 nt, Homo sapiens
  misc_RNA (1)...(19): siRNA sense strand
gaaaauacuugauggaaga

SEQ ID NO: 901384 - RNA, 19 nt, Homo sapiens
  misc_RNA (1)...(19): siRNA sense strand
gaucugugcuggaacaaau

SEQ ID NO: 901385 - RNA, 19 nt, Homo sapiens
  misc_RNA (1)...(19): siRNA sense strand
caacuuacacguuauauag

SEQ ID NO: 901386 - RNA, 19 nt, Homo sapiens
  misc_RNA (1)...(19): siRNA sense strand
aaacaaagccgucuguaga

SEQ ID NO: 901387 - RNA, 19 nt, Homo sapiens
  misc_RNA (1)...(19): siRNA sense strand
gagauuaacggaggaauuu

SEQ ID NO: 901388 - RNA, 19 nt, Homo sapiens
  misc_RNA (1)...(19): siRNA sense strand
aagaaggccuuauacauga

SEQ ID NO: 901389 - RNA, 19 nt, Homo sapiens
  misc_RNA (1)...(19): siRNA sense strand
ggacauuguuauaaguuug

SEQ ID NO: 901390 - RNA, 19 nt, Homo sapiens
  misc_RNA (1)...(19): siRNA sense strand
ggagaagccucugagcaaa

SEQ ID NO: 901391 - RNA, 19 nt, Homo sapiens
  misc_RNA (1)...(19): siRNA sense strand
ugaagaaagugaagaggaa

SEQ ID NO: 901392 - RNA, 19 nt, Homo sapiens
  misc_RNA (1)...(19): siRNA sense strand
agaagaagcugccuguuca

SEQ ID NO: 901393 - RNA, 19 nt, Homo sapiens
  misc_RNA (1)...(19): siRNA sense strand
gaagguaacugugagaaac

SEQ ID NO: 901394 - RNA, 19 nt, Homo sapiens
  misc_RNA (1)...(19): siRNA sense strand
gaagcugccuguucauauc

SEQ ID NO: 901395 - RNA, 19 nt, Homo sapiens
  misc_RNA (1)...(19): siRNA sense strand
caauaacucuugcaauagu

SEQ ID NO: 901396 - RNA, 19 nt, Homo sapiens
  misc_RNA (1)...(19): siRNA sense strand
cgaauggaaucuauagaga

SEQ ID NO: 901397 - RNA, 19 nt, Homo sapiens
  misc_RNA (1)...(19): siRNA sense strand
uaaagacagaugcacauua

SEQ ID NO: 901398 - RNA, 19 nt, Homo sapiens
  misc_RNA (1)...(19): siRNA sense strand
ugccauauguuucuuguaa

SEQ ID NO: 901399 - RNA, 19 nt, Homo sapiens
  misc_RNA (1)...(19): siRNA sense strand
ccaaggauuuagaucaauu

SEQ ID NO: 901400 - RNA, 19 nt, Homo sapiens
  misc_RNA (1)...(19): siRNA sense strand
gaaguuugcugguggugau

SEQ ID NO: 901401 - RNA, 19 nt, Homo sapiens
  misc_RNA (1)...(19): siRNA sense strand
gcacauuauuccauacugu

SEQ ID NO: 901402 - RNA, 19 nt, Homo sapiens
  misc_RNA (1)...(19): siRNA sense strand
gacaagcaguaucuagauu

SEQ ID NO: 901403 - RNA, 19 nt, Homo sapiens
  misc_RNA (1)...(19): siRNA sense strand
gaacaaauagcagcauaug

SEQ ID NO: 901404 - RNA, 19 nt, Homo sapiens
  misc_RNA (1)...(19): siRNA sense strand
guugauagaugggaaggua

SEQ ID NO: 901405 - RNA, 19 nt, Homo sapiens
  misc_RNA (1)...(19): siRNA sense strand
gcagugauccauuguaugu

SEQ ID NO: 901406 - RNA, 19 nt, Homo sapiens
  misc_RNA (1)...(19): siRNA sense strand
gaagugggucuguuccuaa

SEQ ID NO: 901407 - RNA, 19 nt, Homo sapiens
  misc_RNA (1)...(19): siRNA sense strand
gcagaaguuccaccugaua

SEQ ID NO: 901408 - RNA, 19 nt, Homo sapiens
  misc_RNA (1)...(19): siRNA sense strand
caauagugguggacaaguu

SEQ ID NO: 901409 - RNA, 19 nt, Homo sapiens
  misc_RNA (1)...(19): siRNA sense strand
guggagacaccaagaaaua

SEQ ID NO: 901410 - RNA, 19 nt, Homo sapiens
  misc_RNA (1)...(19): siRNA sense strand
gcagauucaucgcauguuc

SEQ ID NO: 901411 - RNA, 19 nt, Homo sapiens
  misc_RNA (1)...(19): siRNA sense strand
caaaccgucucccuccuuu

SEQ ID NO: 901412 - RNA, 19 nt, Homo sapiens
  misc_RNA (1)...(19): siRNA sense strand
aaagaaggccuuauacaug

SEQ ID NO: 901413 - RNA, 19 nt, Homo sapiens
  misc_RNA (1)...(19): siRNA sense strand
cgaggaagccaaggauuua

SEQ ID NO: 901414 - RNA, 19 nt, Homo sapiens
  misc_RNA (1)...(19): siRNA sense strand
cagcagugauccauuguau

SEQ ID NO: 901415 - RNA, 19 nt, Homo sapiens
  misc_RNA (1)...(19): siRNA sense strand
ugaaagaagcuaucaugaa

SEQ ID NO: 901416 - RNA, 19 nt, Homo sapiens
  misc_RNA (1)...(19): siRNA sense strand
gcaacuuacacguuauaua

SEQ ID NO: 901417 - RNA, 19 nt, Homo sapiens
  misc_RNA (1)...(19): siRNA sense strand
ugugggcccuguacaaaua

SEQ ID NO: 901418 - RNA, 19 nt, Homo sapiens
  misc_RNA (1)...(19): siRNA sense strand
ggagacaccaagaaauaaa

SEQ ID NO: 901419 - RNA, 19 nt, Homo sapiens
  misc_RNA (1)...(19): siRNA sense strand
caucgcauguuccucuuaa

SEQ ID NO: 901420 - RNA, 19 nt, Homo sapiens
  misc_RNA (1)...(19): siRNA sense strand
ggacagcguuauccugaag

SEQ ID NO: 901421 - RNA, 19 nt, Homo sapiens
  misc_RNA (1)...(19): siRNA sense strand
aagaggaacuugcagaaau

SEQ ID NO: 901422 - RNA, 19 nt, Homo sapiens
  misc_RNA (1)...(19): siRNA sense strand
gcugagauccugccucuau

SEQ ID NO: 901423 - RNA, 19 nt, Homo sapiens
  misc_RNA (1)...(19): siRNA sense strand
ucaugaagguguugaacuu

SEQ ID NO: 901424 - RNA, 19 nt, Homo sapiens
  misc_RNA (1)...(19): siRNA sense strand
uaaagaaggccuuauacau

SEQ ID NO: 901425 - RNA, 19 nt, Homo sapiens
  misc_RNA (1)...(19): siRNA sense strand
agaggaacuugcagaaauu

SEQ ID NO: 901426 - RNA, 19 nt, Homo sapiens
  misc_RNA (1)...(19): siRNA sense strand
uagaauacuugcaagcuau

SEQ ID NO: 901427 - RNA, 19 nt, Homo sapiens
  misc_RNA (1)...(19): siRNA sense strand
guggauagaucaucggaau

SEQ ID NO: 901428 - RNA, 19 nt, Homo sapiens
  misc_RNA (1)...(19): siRNA sense strand
gccauuaacuuugcaagga

SEQ ID NO: 901429 - RNA, 19 nt, Homo sapiens
  misc_RNA (1)...(19): siRNA sense strand
ccucaaaccuguccugaag

SEQ ID NO: 901430 - RNA, 19 nt, Homo sapiens
  misc_RNA (1)...(19): siRNA sense strand
gcucaagguucugcacaaa

SEQ ID NO: 901431 - RNA, 19 nt, Homo sapiens
  misc_RNA (1)...(19): siRNA sense strand
gcaccacuucccaguauaa

SEQ ID NO: 901432 - RNA, 19 nt, Homo sapiens
  misc_RNA (1)...(19): siRNA sense strand
gaauggaaucuauagagaa

SEQ ID NO: 901433 - RNA, 19 nt, Homo sapiens
  misc_RNA (1)...(19): siRNA sense strand
ggugauguauguguggaua

SEQ ID NO: 901434 - RNA, 19 nt, Homo sapiens
  misc_RNA (1)...(19): siRNA sense strand
ugaaagccaucuugaacug

SEQ ID NO: 901435 - RNA, 19 nt, Homo sapiens
  misc_RNA (1)...(19): siRNA sense strand
cauuguauguuccagauga

SEQ ID NO: 901436 - RNA, 19 nt, Homo sapiens
  misc_RNA (1)...(19): siRNA sense strand
caaguuggcaccucgauug

SEQ ID NO: 901437 - RNA, 19 nt, Homo sapiens
  misc_RNA (1)...(19): siRNA sense strand
ggacaccguuagaagaaca

SEQ ID NO: 901438 - RNA, 19 nt, Homo sapiens
  misc_RNA (1)...(19): siRNA sense strand
gugaacagcuugcacaacu

SEQ ID NO: 901439 - RNA, 19 nt, Homo sapiens
  misc_RNA (1)...(19): siRNA sense strand
agacacaguugcucaguuc

SEQ ID NO: 901440 - RNA, 19 nt, Homo sapiens
  misc_RNA (1)...(19): siRNA sense strand
gaaaucucaugcaaacucu

SEQ ID NO: 901441 - RNA, 19 nt, Homo sapiens
  misc_RNA (1)...(19): siRNA sense strand
ggaaaucucaugcaaacuc

SEQ ID NO: 901442 - RNA, 19 nt, Homo sapiens
  misc_RNA (1)...(19): siRNA sense strand
caacugaagcucccuuuag

SEQ ID NO: 901443 - RNA, 19 nt, Homo sapiens
  misc_RNA (1)...(19): siRNA sense strand
ggaagguaacugugagaaa

SEQ ID NO: 901444 - RNA, 19 nt, Homo sapiens
  misc_RNA (1)...(19): siRNA sense strand
ucacgucuaucuauaucuu

SEQ ID NO: 901445 - RNA, 19 nt, Homo sapiens
  misc_RNA (1)...(19): siRNA sense strand
aaauuggucugaagaaagu

SEQ ID NO: 901446 - RNA, 19 nt, Homo sapiens
  misc_RNA (1)...(19): siRNA sense strand
guggaaaucucaugcaaac

SEQ ID NO: 901447 - RNA, 19 nt, Homo sapiens
  misc_RNA (1)...(19): siRNA sense strand
agccagagaugcagaaaga

SEQ ID NO: 901448 - RNA, 19 nt, Homo sapiens
  misc_RNA (1)...(19): siRNA sense strand
gauacuacaauaacucuug

SEQ ID NO: 901449 - RNA, 19 nt, Homo sapiens
  misc_RNA (1)...(19): siRNA sense strand
gaacuugcagaaauugaga

SEQ ID NO: 901450 - RNA, 19 nt, Homo sapiens
  misc_RNA (1)...(19): siRNA sense strand
caaagaggaacuugcagaa

SEQ ID NO: 901451 - RNA, 19 nt, Homo sapiens
  misc_RNA (1)...(19): siRNA sense strand
ccuaagaagucaacugaag

SEQ ID NO: 901452 - RNA, 19 nt, Homo sapiens
  misc_RNA (1)...(19): siRNA sense strand
guaacugugagaaacaaua

SEQ ID NO: 901453 - RNA, 19 nt, Homo sapiens
  misc_RNA (1)...(19): siRNA sense strand
gauuacagguugguagaau

SEQ ID NO: 901454 - RNA, 19 nt, Homo sapiens
  misc_RNA (1)...(19): siRNA sense strand
guacauggacacaccaaau

SEQ ID NO: 901455 - RNA, 19 nt, Homo sapiens
  misc_RNA (1)...(19): siRNA sense strand
cagauuucaucguuucuug

SEQ ID NO: 901456 - RNA, 19 nt, Homo sapiens
  misc_RNA (1)...(19): siRNA sense strand
ccaaggagaaccugaugaa

SEQ ID NO: 901457 - RNA, 19 nt, Homo sapiens
  misc_RNA (1)...(19): siRNA sense strand
ccagagaugcagaaagaaa

SEQ ID NO: 901458 - RNA, 19 nt, Homo sapiens
  misc_RNA (1)...(19): siRNA sense strand
uaacggaggaauuucuaaa

SEQ ID NO: 901459 - RNA, 19 nt, Homo sapiens
  misc_RNA (1)...(19): siRNA sense strand
gcaaagcugcuaguuggaa

SEQ ID NO: 901460 - RNA, 19 nt, Homo sapiens
  misc_RNA (1)...(19): siRNA sense strand
ucaagguucugcacaaagu

SEQ ID NO: 901461 - RNA, 19 nt, Homo sapiens
  misc_RNA (1)...(19): siRNA sense strand
uggaacaaauagcagcaua

SEQ ID NO: 901462 - RNA, 19 nt, Homo sapiens
  misc_RNA (1)...(19): siRNA sense strand
ugacacagcuaagaagaag

SEQ ID NO: 901463 - RNA, 19 nt, Homo sapiens
  misc_RNA (1)...(19): siRNA sense strand
aaggaaacauggcagaaug

SEQ ID NO: 901464 - RNA, 19 nt, Homo sapiens
  misc_RNA (1)...(19): siRNA sense strand
uggaaacggugcggccuua

SEQ ID NO: 901465 - RNA, 19 nt, Homo sapiens
  misc_RNA (1)...(19): siRNA sense strand
gaaauugagaagugcauca

SEQ ID NO: 901466 - RNA, 19 nt, Homo sapiens
  misc_RNA (1)...(19): siRNA sense strand
gaagcucccuuuagaaccu

SEQ ID NO: 901467 - RNA, 19 nt, Homo sapiens
  misc_RNA (1)...(19): siRNA sense strand
gcaaugaccuagacuacaa

SEQ ID NO: 901468 - RNA, 19 nt, Homo sapiens
  misc_RNA (1)...(19): siRNA sense strand
caacagcccuugucaacga

SEQ ID NO: 901469 - RNA, 19 nt, Homo sapiens
  misc_RNA (1)...(19): siRNA sense strand
uaacuaauacggcacaaua

SEQ ID NO: 901470 - RNA, 19 nt, Homo sapiens
  misc_RNA (1)...(19): siRNA sense strand
gaacuucgguacuucaauc

SEQ ID NO: 901471 - RNA, 19 nt, Homo sapiens
  misc_RNA (1)...(19): siRNA sense strand
gaaauuccaugcucacaag

SEQ ID NO: 901472 - RNA, 19 nt, Homo sapiens
  misc_RNA (1)...(19): siRNA sense strand
ggagugagcuggcuuccau

SEQ ID NO: 901473 - RNA, 19 nt, Homo sapiens
  misc_RNA (1)...(19): siRNA sense strand
gggagaauauauuuaguug

SEQ ID NO: 901474 - RNA, 19 nt, Homo sapiens
  misc_RNA (1)...(19): siRNA sense strand
gagcugaugagguuaauuu

SEQ ID NO: 901475 - RNA, 19 nt, Homo sapiens
  misc_RNA (1)...(19): siRNA sense strand
uguuggagcuucucaauuu

SEQ ID NO: 901476 - RNA, 19 nt, Homo sapiens
  misc_RNA (1)...(19): siRNA sense strand
uggacgagcuccugcaaua

SEQ ID NO: 901477 - RNA, 19 nt, Homo sapiens
  misc_RNA (1)...(19): siRNA sense strand
gaccuagacuacaauaaug

SEQ ID NO: 901478 - RNA, 19 nt, Homo sapiens
  misc_RNA (1)...(19): siRNA sense strand
gaaccuaaccagaauaagu

SEQ ID NO: 901479 - RNA, 19 nt, Homo sapiens
  misc_RNA (1)...(19): siRNA sense strand
gaacgcugccucaguauuc

SEQ ID NO: 901480 - RNA, 19 nt, Homo sapiens
  misc_RNA (1)...(19): siRNA sense strand
guugguggauauucaauuu

SEQ ID NO: 901481 - RNA, 19 nt, Homo sapiens
  misc_RNA (1)...(19): siRNA sense strand
gauaucagguggaguaacu

SEQ ID NO: 901482 - RNA, 19 nt, Homo sapiens
  misc_RNA (1)...(19): siRNA sense strand
agaaggcagugaucgauuu

SEQ ID NO: 901483 - RNA, 19 nt, Homo sapiens
  misc_RNA (1)...(19): siRNA sense strand
gcagagauagcacccauga

SEQ ID NO: 901484 - RNA, 19 nt, Homo sapiens
  misc_RNA (1)...(19): siRNA sense strand
ggaaggagccaccauugug

SEQ ID NO: 901485 - RNA, 19 nt, Homo sapiens
  misc_RNA (1)...(19): siRNA sense strand
gcaauguucagucuuugua

SEQ ID NO: 901486 - RNA, 19 nt, Homo sapiens
  misc_RNA (1)...(19): siRNA sense strand
ucaaggaacuucgguacuu

SEQ ID NO: 901487 - RNA, 19 nt, Homo sapiens
  misc_RNA (1)...(19): siRNA sense strand
cagacuugcugaccucuuu

SEQ ID NO: 901488 - RNA, 19 nt, Homo sapiens
  misc_RNA (1)...(19): siRNA sense strand
ccauauagauucuuacaac

SEQ ID NO: 901489 - RNA, 19 nt, Homo sapiens
  misc_RNA (1)...(19): siRNA sense strand
gaauaccucuaugcaguug

SEQ ID NO: 901490 - RNA, 19 nt, Homo sapiens
  misc_RNA (1)...(19): siRNA sense strand
ugaaacaucucucugaacu

SEQ ID NO: 901491 - RNA, 19 nt, Homo sapiens
  misc_RNA (1)...(19): siRNA sense strand
gcagagaaggcaaagaaga

SEQ ID NO: 901492 - RNA, 19 nt, Homo sapiens
  misc_RNA (1)...(19): siRNA sense strand
guaugaaccuaaccagaau

SEQ ID NO: 901493 - RNA, 19 nt, Homo sapiens
  misc_RNA (1)...(19): siRNA sense strand
agagauagcacccaugaaa

SEQ ID NO: 901494 - RNA, 19 nt, Homo sapiens
  misc_RNA (1)...(19): siRNA sense strand
gcagucaccuacagcuguu

SEQ ID NO: 901495 - RNA, 19 nt, Homo sapiens
  misc_RNA (1)...(19): siRNA sense strand
guuggagcuucucaauuua

SEQ ID NO: 901496 - RNA, 19 nt, Homo sapiens
  misc_RNA (1)...(19): siRNA sense strand
ucaacgaggcccuggaaua

SEQ ID NO: 901497 - RNA, 19 nt, Homo sapiens
  misc_RNA (1)...(19): siRNA sense strand
aaagcaggcucuggaguuu

SEQ ID NO: 901498 - RNA, 19 nt, Homo sapiens
  misc_RNA (1)...(19): siRNA sense strand
gcccuaaccuucaaacucu

SEQ ID NO: 901499 - RNA, 19 nt, Homo sapiens
  misc_RNA (1)...(19): siRNA sense strand
agagaagggucuaccauuc

SEQ ID NO: 901500 - RNA, 19 nt, Homo sapiens
  misc_RNA (1)...(19): siRNA sense strand
ucagguggaguaacuaaua

SEQ ID NO: 901501 - RNA, 19 nt, Homo sapiens
  misc_RNA (1)...(19): siRNA sense strand
gcauacacaggacagauuu

SEQ ID NO: 901502 - RNA, 19 nt, Homo sapiens
  misc_RNA (1)...(19): siRNA sense strand
agaacaggcuaauggugua

SEQ ID NO: 901503 - RNA, 19 nt, Homo sapiens
  misc_RNA (1)...(19): siRNA sense strand
cagcaugcagugacuauuu

SEQ ID NO: 901504 - RNA, 19 nt, Homo sapiens
  misc_RNA (1)...(19): siRNA sense strand
gaagcuuuauguucuugga

SEQ ID NO: 901505 - RNA, 19 nt, Homo sapiens
  misc_RNA (1)...(19): siRNA sense strand
guauaucauuggugggaaa

SEQ ID NO: 901506 - RNA, 19 nt, Homo sapiens
  misc_RNA (1)...(19): siRNA sense strand
gaaggagccaccauugugu

SEQ ID NO: 901507 - RNA, 19 nt, Homo sapiens
  misc_RNA (1)...(19): siRNA sense strand
uaaagcaggcucuggaguu

SEQ ID NO: 901508 - RNA, 19 nt, Homo sapiens
  misc_RNA (1)...(19): siRNA sense strand
caauuuaugcucccacuau

SEQ ID NO: 901509 - RNA, 19 nt, Homo sapiens
  misc_RNA (1)...(19): siRNA sense strand
cagagaaggcaaagaagaa

SEQ ID NO: 901510 - RNA, 19 nt, Homo sapiens
  misc_RNA (1)...(19): siRNA sense strand
ggaauaccucuaugcaguu

SEQ ID NO: 901511 - RNA, 19 nt, Homo sapiens
  misc_RNA (1)...(19): siRNA sense strand
aaguggagcugaugagguu

SEQ ID NO: 901512 - RNA, 19 nt, Homo sapiens
  misc_RNA (1)...(19): siRNA sense strand
gacacucuguauaucauug

SEQ ID NO: 901513 - RNA, 19 nt, Homo sapiens
  misc_RNA (1)...(19): siRNA sense strand
guggacacguuguaauuuc

SEQ ID NO: 901514 - RNA, 19 nt, Homo sapiens
  misc_RNA (1)...(19): siRNA sense strand
cgggcaauguucagucuuu

SEQ ID NO: 901515 - RNA, 19 nt, Homo sapiens
  misc_RNA (1)...(19): siRNA sense strand
ugaccuagacuacaauaau

SEQ ID NO: 901516 - RNA, 19 nt, Homo sapiens
  misc_RNA (1)...(19): siRNA sense strand
uaaccagaauaaguggaua

SEQ ID NO: 901517 - RNA, 19 nt, Homo sapiens
  misc_RNA (1)...(19): siRNA sense strand
caaggaacuucgguacuuc

SEQ ID NO: 901518 - RNA, 19 nt, Homo sapiens
  misc_RNA (1)...(19): siRNA sense strand
gauacucuccauacaguug

SEQ ID NO: 901519 - RNA, 19 nt, Homo sapiens
  misc_RNA (1)...(19): siRNA sense strand
uaauggauguggauacucu

SEQ ID NO: 901520 - RNA, 19 nt, Homo sapiens
  misc_RNA (1)...(19): siRNA sense strand
ucuuuaaccucacuuuguu

SEQ ID NO: 901521 - RNA, 19 nt, Homo sapiens
  misc_RNA (1)...(19): siRNA sense strand
aagcagagaaggcaaagaa

SEQ ID NO: 901522 - RNA, 19 nt, Homo sapiens
  misc_RNA (1)...(19): siRNA sense strand
ggcagugaucgauuucuua

SEQ ID NO: 901523 - RNA, 19 nt, Homo sapiens
  misc_RNA (1)...(19): siRNA sense strand
gagaaggcagugaucgauu

SEQ ID NO: 901524 - RNA, 19 nt, Homo sapiens
  misc_RNA (1)...(19): siRNA sense strand
caacgaggcccuggaauac

SEQ ID NO: 901525 - RNA, 19 nt, Homo sapiens
  misc_RNA (1)...(19): siRNA sense strand
gcagugaucgauuucuuag

SEQ ID NO: 901526 - RNA, 19 nt, Homo sapiens
  misc_RNA (1)...(19): siRNA sense strand
uguaugaaccuaaccagaa

SEQ ID NO: 901527 - RNA, 19 nt, Homo sapiens
  misc_RNA (1)...(19): siRNA sense strand
uaucagaacaggcuaaugg

SEQ ID NO: 901528 - RNA, 19 nt, Homo sapiens
  misc_RNA (1)...(19): siRNA sense strand
agugaucgauuucuuagug

SEQ ID NO: 901529 - RNA, 19 nt, Homo sapiens
  misc_RNA (1)...(19): siRNA sense strand
ucacaaggcaguccuagca

SEQ ID NO: 901530 - RNA, 19 nt, Homo sapiens
  misc_RNA (1)...(19): siRNA sense strand
agaaggcaaagaagaagua

SEQ ID NO: 901531 - RNA, 19 nt, Homo sapiens
  misc_RNA (1)...(19): siRNA sense strand
caaaaugagucuggaguug

SEQ ID NO: 901532 - RNA, 19 nt, Homo sapiens
  misc_RNA (1)...(19): siRNA sense strand
uuccauggcugcuguacaa

SEQ ID NO: 901533 - RNA, 19 nt, Homo sapiens
  misc_RNA (1)...(19): siRNA sense strand
cagagaagggucuaccauu

SEQ ID NO: 901534 - RNA, 19 nt, Homo sapiens
  misc_RNA (1)...(19): siRNA sense strand
cugaugagguuaauuugca

SEQ ID NO: 901535 - RNA, 19 nt, Homo sapiens
  misc_RNA (1)...(19): siRNA sense strand
ugggugccauggaggaaua

SEQ ID NO: 901536 - RNA, 19 nt, Homo sapiens
  misc_RNA (1)...(19): siRNA sense strand
ccucaguauucaagaaaug

SEQ ID NO: 901537 - RNA, 19 nt, Homo sapiens
  misc_RNA (1)...(19): siRNA sense strand
gugaucgauuucuuaguga

SEQ ID NO: 901538 - RNA, 19 nt, Homo sapiens
  misc_RNA (1)...(19): siRNA sense strand
ggagaaggcagugaucgau

SEQ ID NO: 901539 - RNA, 19 nt, Homo sapiens
  misc_RNA (1)...(19): siRNA sense strand
aggcaaagaagaaguauuc

SEQ ID NO: 901540 - RNA, 19 nt, Homo sapiens
  misc_RNA (1)...(19): siRNA sense strand
cuaauacggcacaauauca

SEQ ID NO: 901541 - RNA, 19 nt, Homo sapiens
  misc_RNA (1)...(19): siRNA sense strand
uucuaacgcuucccuauug

SEQ ID NO: 901542 - RNA, 19 nt, Homo sapiens
  misc_RNA (1)...(19): siRNA sense strand
gguggaaaguggagcugau

SEQ ID NO: 901543 - RNA, 19 nt, Homo sapiens
  misc_RNA (1)...(19): siRNA sense strand
gggcaauguucagucuuug

SEQ ID NO: 901544 - RNA, 19 nt, Homo sapiens
  misc_RNA (1)...(19): siRNA sense strand
gaccaguggacacguugua

SEQ ID NO: 901545 - RNA, 19 nt, Homo sapiens
  misc_RNA (1)...(19): siRNA sense strand
ugaaucagcagaggaguga

SEQ ID NO: 901546 - RNA, 19 nt, Homo sapiens
  misc_RNA (1)...(19): siRNA sense strand
ugaggugguuggaacacaa

SEQ ID NO: 901547 - RNA, 19 nt, Homo sapiens
  misc_RNA (1)...(19): siRNA sense strand
guucuaacgcuucccuauu

SEQ ID NO: 901548 - RNA, 19 nt, Homo sapiens
  misc_RNA (1)...(19): siRNA sense strand
agugaaacaucucucugaa

SEQ ID NO: 901549 - RNA, 19 nt, Homo sapiens
  misc_RNA (1)...(19): siRNA sense strand
ugaccucccugagugaaga

SEQ ID NO: 901550 - RNA, 19 nt, Homo sapiens
  misc_RNA (1)...(19): siRNA sense strand
ccuucaaacucuucaagug

SEQ ID NO: 901551 - RNA, 19 nt, Homo sapiens
  misc_RNA (1)...(19): siRNA sense strand
caguggacacguuguaauu

SEQ ID NO: 901552 - RNA, 19 nt, Homo sapiens
  misc_RNA (1)...(19): siRNA sense strand
gcagagaagggucuaccau

SEQ ID NO: 901553 - RNA, 19 nt, Homo sapiens
  misc_RNA (1)...(19): siRNA sense strand
gauggucuucuuuggauau

SEQ ID NO: 901554 - RNA, 19 nt, Homo sapiens
  misc_RNA (1)...(19): siRNA sense strand
gaaggcagugaucgauuuc

SEQ ID NO: 901555 - RNA, 19 nt, Homo sapiens
  misc_RNA (1)...(19): siRNA sense strand
uuacaugcccuaaccuuca

SEQ ID NO: 901556 - RNA, 19 nt, Homo sapiens
  misc_RNA (1)...(19): siRNA sense strand
ggaguugcuguccauaaug

SEQ ID NO: 901557 - RNA, 19 nt, Homo sapiens
  misc_RNA (1)...(19): siRNA sense strand
gauauugccccaagaagaa

SEQ ID NO: 901558 - RNA, 19 nt, Homo sapiens
  misc_RNA (1)...(19): siRNA sense strand
gcuuuggccuaauggaugu

SEQ ID NO: 901559 - RNA, 19 nt, Homo sapiens
  misc_RNA (1)...(19): siRNA sense strand
uacauccgcuuuggccuaa

SEQ ID NO: 901560 - RNA, 19 nt, Homo sapiens
  misc_RNA (1)...(19): siRNA sense strand
gggaaggagccaccauugu

SEQ ID NO: 901561 - RNA, 19 nt, Homo sapiens
  misc_RNA (1)...(19): siRNA sense strand
ggacacguuguaauuucaa

SEQ ID NO: 901562 - RNA, 19 nt, Homo sapiens
  misc_RNA (1)...(19): siRNA sense strand
gaacaggcuaaugguguau

SEQ ID NO: 901563 - RNA, 19 nt, Homo sapiens
  misc_RNA (1)...(19): siRNA sense strand
ugccuacaguugagcgaua

SEQ ID NO: 901564 - RNA, 19 nt, Homo sapiens
  misc_RNA (1)...(19): siRNA sense strand
cugauggucuucuuuggau

SEQ ID NO: 901565 - RNA, 19 nt, Homo sapiens
  misc_RNA (1)...(19): siRNA sense strand
cuuacaacauagacacuga

SEQ ID NO: 901566 - RNA, 19 nt, Homo sapiens
  misc_RNA (1)...(19): siRNA sense strand
cuaaugguguaugaaccua

SEQ ID NO: 901567 - RNA, 19 nt, Homo sapiens
  misc_RNA (1)...(19): siRNA sense strand
caaauacgaucgccucuuu

SEQ ID NO: 901568 - RNA, 19 nt, Homo sapiens
  misc_RNA (1)...(19): siRNA sense strand
aaacaacacugucaacaaa

SEQ ID NO: 901569 - RNA, 19 nt, Homo sapiens
  misc_RNA (1)...(19): siRNA sense strand
gaaaccaagucaauugugu

SEQ ID NO: 901570 - RNA, 19 nt, Homo sapiens
  misc_RNA (1)...(19): siRNA sense strand
ggaggaggaugaacuuaug

SEQ ID NO: 901571 - RNA, 19 nt, Homo sapiens
  misc_RNA (1)...(19): siRNA sense strand
caagacaacugaugauaag

SEQ ID NO: 901572 - RNA, 19 nt, Homo sapiens
  misc_RNA (1)...(19): siRNA sense strand
gaaacuagagaacaaagaa

SEQ ID NO: 901573 - RNA, 19 nt, Homo sapiens
  misc_RNA (1)...(19): siRNA sense strand
gaaacaacacugucaacaa

SEQ ID NO: 901574 - RNA, 19 nt, Homo sapiens
  misc_RNA (1)...(19): siRNA sense strand
gaugagcccaguauagaua

SEQ ID NO: 901575 - RNA, 19 nt, Homo sapiens
  misc_RNA (1)...(19): siRNA sense strand
ggaggaugaacuuauguua

SEQ ID NO: 901576 - RNA, 19 nt, Homo sapiens
  misc_RNA (1)...(19): siRNA sense strand
caagggauauaugaaacua

SEQ ID NO: 901577 - RNA, 19 nt, Homo sapiens
  misc_RNA (1)...(19): siRNA sense strand
gugcucaucuccauuauag

SEQ ID NO: 901578 - RNA, 19 nt, Homo sapiens
  misc_RNA (1)...(19): siRNA sense strand
uagauaacaucacugaaga

SEQ ID NO: 901579 - RNA, 19 nt, Homo sapiens
  misc_RNA (1)...(19): siRNA sense strand
gggcagauguugugguugu

SEQ ID NO: 901580 - RNA, 19 nt, Homo sapiens
  misc_RNA (1)...(19): siRNA sense strand
gaggaugaacuuauguuaa

SEQ ID NO: 901581 - RNA, 19 nt, Homo sapiens
  misc_RNA (1)...(19): siRNA sense strand
ccaagacaacugaugauaa

SEQ ID NO: 901582 - RNA, 19 nt, Homo sapiens
  misc_RNA (1)...(19): siRNA sense strand
aaagaagacccgauggaua

SEQ ID NO: 901583 - RNA, 19 nt, Homo sapiens
  misc_RNA (1)...(19): siRNA sense strand
caaggaauuugucaaugga

SEQ ID NO: 901584 - RNA, 19 nt, Homo sapiens
  misc_RNA (1)...(19): siRNA sense strand
aaaaguaggucaaggaauu

SEQ ID NO: 901585 - RNA, 19 nt, Homo sapiens
  misc_RNA (1)...(19): siRNA sense strand
ggaacaacagcaagggaua

SEQ ID NO: 901586 - RNA, 19 nt, Homo sapiens
  misc_RNA (1)...(19): siRNA sense strand
gaacaacggaaacauccaa

SEQ ID NO: 901587 - RNA, 19 nt, Homo sapiens
  misc_RNA (1)...(19): siRNA sense strand
gaugggagaaacagaagua

SEQ ID NO: 901588 - RNA, 19 nt, Homo sapiens
  misc_RNA (1)...(19): siRNA sense strand
caacggaaacauccaaguu

SEQ ID NO: 901589 - RNA, 19 nt, Homo sapiens
  misc_RNA (1)...(19): siRNA sense strand
gaccagcggcucuaagaaa

SEQ ID NO: 901590 - RNA, 19 nt, Homo sapiens
  misc_RNA (1)...(19): siRNA sense strand
ucaaggaauuugucaaugg

SEQ ID NO: 901591 - RNA, 19 nt, Homo sapiens
  misc_RNA (1)...(19): siRNA sense strand
cauguacacugguuugaug

SEQ ID NO: 901592 - RNA, 19 nt, Homo sapiens
  misc_RNA (1)...(19): siRNA sense strand
ccaagucaauugugucauc

SEQ ID NO: 901593 - RNA, 19 nt, Homo sapiens
  misc_RNA (1)...(19): siRNA sense strand
gcaaaugaacggcauguac

SEQ ID NO: 901594 - RNA, 19 nt, Homo sapiens
  misc_RNA (1)...(19): siRNA sense strand
gaacaacagcaagggauau

SEQ ID NO: 901595 - RNA, 19 nt, Homo sapiens
  misc_RNA (1)...(19): siRNA sense strand
uaaaugaagguaagaguuc

SEQ ID NO: 901596 - RNA, 19 nt, Homo sapiens
  misc_RNA (1)...(19): siRNA sense strand
guauagauaacaucacuga

SEQ ID NO: 901597 - RNA, 19 nt, Homo sapiens
  misc_RNA (1)...(19): siRNA sense strand
gaucacagcagcaugucaa

SEQ ID NO: 901598 - RNA, 19 nt, Homo sapiens
  misc_RNA (1)...(19): siRNA sense strand
cagcaagggauauaugaaa

SEQ ID NO: 901599 - RNA, 19 nt, Homo sapiens
  misc_RNA (1)...(19): siRNA sense strand
gcauuugcauucugauaag

SEQ ID NO: 901600 - RNA, 19 nt, Homo sapiens
  misc_RNA (1)...(19): siRNA sense strand
gcucaucuccauuauagga

SEQ ID NO: 901601 - RNA, 19 nt, Homo sapiens
  misc_RNA (1)...(19): siRNA sense strand
gaacuucugaaacaagguu

SEQ ID NO: 901602 - RNA, 19 nt, Homo sapiens
  misc_RNA (1)...(19): siRNA sense strand
caacagcaagggauauaug

SEQ ID NO: 901603 - RNA, 19 nt, Homo sapiens
  misc_RNA (1)...(19): siRNA sense strand
ccaauacauccuugcauuu

SEQ ID NO: 901604 - RNA, 19 nt, Homo sapiens
  misc_RNA (1)...(19): siRNA sense strand
ccauggccguucuuggaua

SEQ ID NO: 901605 - RNA, 19 nt, Homo sapiens
  misc_RNA (1)...(19): siRNA sense strand
gggagucguugucgaguca

SEQ ID NO: 901606 - RNA, 19 nt, Homo sapiens
  misc_RNA (1)...(19): siRNA sense strand
caaaugaacggcauguaca

SEQ ID NO: 901607 - RNA, 19 nt, Homo sapiens
  misc_RNA (1)...(19): siRNA sense strand
gagcagcauuugcauucug

SEQ ID NO: 901608 - RNA, 19 nt, Homo sapiens
  misc_RNA (1)...(19): siRNA sense strand
acaacacugucaacaaaug

SEQ ID NO: 901609 - RNA, 19 nt, Homo sapiens
  misc_RNA (1)...(19): siRNA sense strand
gcagaacaacggaaacauc

SEQ ID NO: 901610 - RNA, 19 nt, Homo sapiens
  misc_RNA (1)...(19): siRNA sense strand
uccaauacauccuugcauu

SEQ ID NO: 901611 - RNA, 19 nt, Homo sapiens
  misc_RNA (1)...(19): siRNA sense strand
ccugugaucaaacuuaaua

SEQ ID NO: 901612 - RNA, 19 nt, Homo sapiens
  misc_RNA (1)...(19): siRNA sense strand
caucagugcuuuuacauug

SEQ ID NO: 901613 - RNA, 19 nt, Homo sapiens
  misc_RNA (1)...(19): siRNA sense strand
ggauuggcauuuucauuuu

SEQ ID NO: 901614 - RNA, 19 nt, Homo sapiens
  misc_RNA (1)...(19): siRNA sense strand
caauacauccuugcauuug

SEQ ID NO: 901615 - RNA, 19 nt, Homo sapiens
  misc_RNA (1)...(19): siRNA sense strand
ggucaaggaauuugucaau

SEQ ID NO: 901616 - RNA, 19 nt, Homo sapiens
  misc_RNA (1)...(19): siRNA sense strand
gacauucacacgcuaagaa

SEQ ID NO: 901617 - RNA, 19 nt, Homo sapiens
  misc_RNA (1)...(19): siRNA sense strand
gaaaugugaaaccaaguca

SEQ ID NO: 901618 - RNA, 19 nt, Homo sapiens
  misc_RNA (1)...(19): siRNA sense strand
ggauauaugaaacuagaga

SEQ ID NO: 901619 - RNA, 19 nt, Homo sapiens
  misc_RNA (1)...(19): siRNA sense strand
caaagagaccaaaaucaua

SEQ ID NO: 901620 - RNA, 19 nt, Homo sapiens
  misc_RNA (1)...(19): siRNA sense strand
gaggggaacuucugaaaca

SEQ ID NO: 901621 - RNA, 19 nt, Homo sapiens
  misc_RNA (1)...(19): siRNA sense strand
gucaauggauucccuugug

SEQ ID NO: 901622 - RNA, 19 nt, Homo sapiens
  misc_RNA (1)...(19): siRNA sense strand
gauaagaccagcggcucua

SEQ ID NO: 901623 - RNA, 19 nt, Homo sapiens
  misc_RNA (1)...(19): siRNA sense strand
caacacugucaacaaauga

SEQ ID NO: 901624 - RNA, 19 nt, Homo sapiens
  misc_RNA (1)...(19): siRNA sense strand
caaagaagacccgauggau

SEQ ID NO: 901625 - RNA, 19 nt, Homo sapiens
  misc_RNA (1)...(19): siRNA sense strand
aagaagacccgauggauag

SEQ ID NO: 901626 - RNA, 19 nt, Homo sapiens
  misc_RNA (1)...(19): siRNA sense strand
caucguccaucagugcuuu

SEQ ID NO: 901627 - RNA, 19 nt, Homo sapiens
  misc_RNA (1)...(19): siRNA sense strand
uacauugccugugaucaaa

SEQ ID NO: 901628 - RNA, 19 nt, Homo sapiens
  misc_RNA (1)...(19): siRNA sense strand
gaauugccauggccguucu

SEQ ID NO: 901629 - RNA, 19 nt, Homo sapiens
  misc_RNA (1)...(19): siRNA sense strand
ugaaggcgguguggugguu

SEQ ID NO: 901630 - RNA, 19 nt, Homo sapiens
  misc_RNA (1)...(19): siRNA sense strand
agggauauaugaaacuaga

SEQ ID NO: 901631 - RNA, 19 nt, Homo sapiens
  misc_RNA (1)...(19): siRNA sense strand
uguggugguucgcuucuuu

SEQ ID NO: 901632 - RNA, 19 nt, Homo sapiens
  misc_RNA (1)...(19): siRNA sense strand
caguacaagucaucuaugg

SEQ ID NO: 901633 - RNA, 19 nt, Homo sapiens
  misc_RNA (1)...(19): siRNA sense strand
acagugcuaccaaggaaua

SEQ ID NO: 901634 - RNA, 19 nt, Homo sapiens
  misc_RNA (1)...(19): siRNA sense strand
cagcggcucuaagaaaugu

SEQ ID NO: 901635 - RNA, 19 nt, Homo sapiens
  misc_RNA (1)...(19): siRNA sense strand
cagcauuugcauucugaua

SEQ ID NO: 901636 - RNA, 19 nt, Homo sapiens
  misc_RNA (1)...(19): siRNA sense strand
gauaucuauuccacaguca

SEQ ID NO: 901637 - RNA, 19 nt, Homo sapiens
  misc_RNA (1)...(19): siRNA sense strand
caagagaagaagcccauca

SEQ ID NO: 901638 - RNA, 19 nt, Homo sapiens
  misc_RNA (1)...(19): siRNA sense strand
gcugacaaccucaaaagua

SEQ ID NO: 901639 - RNA, 19 nt, Homo sapiens
  misc_RNA (1)...(19): siRNA sense strand
caguauagauaacaucacu

SEQ ID NO: 901640 - RNA, 19 nt, Homo sapiens
  misc_RNA (1)...(19): siRNA sense strand
gggagaaacagaaguaaaa

SEQ ID NO: 901641 - RNA, 19 nt, Homo sapiens
  misc_RNA (1)...(19): siRNA sense strand
gggauuggcauuuucauuu

SEQ ID NO: 901642 - RNA, 19 nt, Homo sapiens
  misc_RNA (1)...(19): siRNA sense strand
caaguuggccuagguugga

SEQ ID NO: 901643 - RNA, 19 nt, Homo sapiens
  misc_RNA (1)...(19): siRNA sense strand
uuacauugccugugaucaa

SEQ ID NO: 901644 - RNA, 19 nt, Homo sapiens
  misc_RNA (1)...(19): siRNA sense strand
gcaacugguggagugauaa

SEQ ID NO: 901645 - RNA, 19 nt, Homo sapiens
  misc_RNA (1)...(19): siRNA sense strand
acacaugagggauaucuau

SEQ ID NO: 901646 - RNA, 19 nt, Homo sapiens
  misc_RNA (1)...(19): siRNA sense strand
ccgggcagauguugugguu

SEQ ID NO: 901647 - RNA, 19 nt, Homo sapiens
  misc_RNA (1)...(19): siRNA sense strand
ugugaaaccaagucaauug

SEQ ID NO: 901648 - RNA, 19 nt, Homo sapiens
  misc_RNA (1)...(19): siRNA sense strand
ccagaucacagcagcaugu

SEQ ID NO: 901649 - RNA, 19 nt, Homo sapiens
  misc_RNA (1)...(19): siRNA sense strand
gcaaauacgaucgccucuu

SEQ ID NO: 901650 - RNA, 19 nt, Homo sapiens
  misc_RNA (1)...(19): siRNA sense strand
gcauucugauaagaugaaa

SEQ ID NO: 901651 - RNA, 19 nt, Homo sapiens
  misc_RNA (1)...(19): siRNA sense strand
gugcuaccaaggaauaauu

SEQ ID NO: 901652 - RNA, 19 nt, Homo sapiens
  misc_RNA (1)...(19): siRNA sense strand
gucaaggaauuugucaaug

SEQ ID NO: 901653 - RNA, 19 nt, Homo sapiens
  misc_RNA (1)...(19): siRNA sense strand
caucuccauuauaggaauu

SEQ ID NO: 901654 - RNA, 19 nt, Homo sapiens
  misc_RNA (1)...(19): siRNA sense strand
ugccugugaucaaacuuaa

SEQ ID NO: 901655 - RNA, 19 nt, Homo sapiens
  misc_RNA (1)...(19): siRNA sense strand
ggcaaaauccggcuuuauu

SEQ ID NO: 901656 - RNA, 19 nt, Homo sapiens
  misc_RNA (1)...(19): siRNA sense strand
cauggccguucuuggauau

SEQ ID NO: 901657 - RNA, 19 nt, Homo sapiens
  misc_RNA (1)...(19): siRNA sense strand
gcaaaauccggcuuuauuc

SEQ ID NO: 901658 - RNA, 19 nt, Homo sapiens
  misc_RNA (1)...(19): siRNA sense strand
aggaauuugucaauggauu

SEQ ID NO: 901659 - RNA, 19 nt, Homo sapiens
  misc_RNA (1)...(19): siRNA sense strand
uauugaugcugaaacaaca

SEQ ID NO: 901660 - RNA, 19 nt, Homo sapiens
  misc_RNA (1)...(19): siRNA sense strand
ucuaagaaaugugaaacca

SEQ ID NO: 901661 - RNA, 19 nt, Homo sapiens
  misc_RNA (1)...(19): siRNA sense strand
ccaccuccuuccaagacaa

SEQ ID NO: 901662 - RNA, 19 nt, Homo sapiens
  misc_RNA (1)...(19): siRNA sense strand
aaaguaggucaaggaauuu

SEQ ID NO: 901663 - RNA, 19 nt, Homo sapiens
  misc_RNA (1)...(19): siRNA sense strand
ucacugaagaugcugacaa

SEQ ID NO: 901664 - RNA, 19 nt, Homo sapiens
  misc_RNA (1)...(19): siRNA sense strand
agcaacugguggagugaua

SEQ ID NO: 901665 - RNA, 19 nt, Homo sapiens
  misc_RNA (1)...(19): siRNA sense strand
acaaagaagacccgaugga

SEQ ID NO: 901666 - RNA, 19 nt, Homo sapiens
  misc_RNA (1)...(19): siRNA sense strand
gcaagggauauaugaaacu

SEQ ID NO: 901667 - RNA, 19 nt, Homo sapiens
  misc_RNA (1)...(19): siRNA sense strand
ggacugcccuggugcaugu

SEQ ID NO: 901668 - RNA, 19 nt, Homo sapiens
  misc_RNA (1)...(19): siRNA sense strand
ccucaucgcugccgucauu

SEQ ID NO: 901669 - RNA, 19 nt, Homo sapiens
  misc_RNA (1)...(19): siRNA sense strand
gaaggagggcgacuacauu

SEQ ID NO: 901670 - RNA, 19 nt, Homo sapiens
  misc_RNA (1)...(19): siRNA sense strand
gcucuagacugcccagcuu

SEQ ID NO: 901671 - RNA, 19 nt, Homo sapiens
  misc_RNA (1)...(19): siRNA sense strand
gcaacaaccgggugagaga

SEQ ID NO: 901672 - RNA, 19 nt, Homo sapiens
  misc_RNA (1)...(19): siRNA sense strand
gcuccgcccucauccuuga

SEQ ID NO: 901673 - RNA, 19 nt, Homo sapiens
  misc_RNA (1)...(19): siRNA sense strand
gcucacagccuauuacaac

SEQ ID NO: 901674 - RNA, 19 nt, Homo sapiens
  misc_RNA (1)...(19): siRNA sense strand
gcgacuacauugugucagu

SEQ ID NO: 901675 - RNA, 19 nt, Homo sapiens
  misc_RNA (1)...(19): siRNA sense strand
gagcuggacuggucuacac

SEQ ID NO: 901676 - RNA, 19 nt, Homo sapiens
  misc_RNA (1)...(19): siRNA sense strand
gcagcguucucuucaacau

SEQ ID NO: 901677 - RNA, 19 nt, Homo sapiens
  misc_RNA (1)...(19): siRNA sense strand
ggucuacaccgcugaagga

SEQ ID NO: 901678 - RNA, 19 nt, Homo sapiens
  misc_RNA (1)...(19): siRNA sense strand
ggagggcgacuacauugug

SEQ ID NO: 901679 - RNA, 19 nt, Homo sapiens
  misc_RNA (1)...(19): siRNA sense strand
gggcagcguucucuucaac

SEQ ID NO: 901680 - RNA, 19 nt, Homo sapiens
  misc_RNA (1)...(19): siRNA sense strand
gagggcgacuacauugugu

SEQ ID NO: 901681 - RNA, 19 nt, Homo sapiens
  misc_RNA (1)...(19): siRNA sense strand
ugagcuacgucaacuccaa

SEQ ID NO: 901682 - RNA, 19 nt, Homo sapiens
  misc_RNA (1)...(19): siRNA sense strand
cagauucaccagcagauug

SEQ ID NO: 901683 - RNA, 19 nt, Homo sapiens
  misc_RNA (1)...(19): siRNA sense strand
ggagcgaagcugucacugu

SEQ ID NO: 901684 - RNA, 19 nt, Homo sapiens
  misc_RNA (1)...(19): siRNA sense strand
gcccaggaauguguguuug

SEQ ID NO: 901685 - RNA, 19 nt, Homo sapiens
  misc_RNA (1)...(19): siRNA sense strand
gugaggaugacuucuguga

SEQ ID NO: 901686 - RNA, 19 nt, Homo sapiens
  misc_RNA (1)...(19): siRNA sense strand
agacucgccuguccucauc

SEQ ID NO: 901687 - RNA, 19 nt, Homo sapiens
  misc_RNA (1)...(19): siRNA sense strand
gaucucagugcacuuugga

SEQ ID NO: 901688 - RNA, 19 nt, Homo sapiens
  misc_RNA (1)...(19): siRNA sense strand
ggaaggggccugacaucuu

SEQ ID NO: 901689 - RNA, 19 nt, Homo sapiens
  misc_RNA (1)...(19): siRNA sense strand
ccaggaauguguguuugag

SEQ ID NO: 901690 - RNA, 19 nt, Homo sapiens
  misc_RNA (1)...(19): siRNA sense strand
ugaaggagggcgacuacau

SEQ ID NO: 901691 - RNA, 19 nt, Homo sapiens
  misc_RNA (1)...(19): siRNA sense strand
gugacucccugacgcagau

SEQ ID NO: 901692 - RNA, 19 nt, Homo sapiens
  misc_RNA (1)...(19): siRNA sense strand
accagcagauugacaagga

SEQ ID NO: 901693 - RNA, 19 nt, Homo sapiens
  misc_RNA (1)...(19): siRNA sense strand
ggcccaggaauguguguuu

SEQ ID NO: 901694 - RNA, 19 nt, Homo sapiens
  misc_RNA (1)...(19): siRNA sense strand
ggagcucgaccgugaggau

SEQ ID NO: 901695 - RNA, 19 nt, Homo sapiens
  misc_RNA (1)...(19): siRNA sense strand
ugucaaggccgaguacuuc

SEQ ID NO: 901696 - RNA, 19 nt, Homo sapiens
  misc_RNA (1)...(19): siRNA sense strand
ccgugaggaugacuucugu

SEQ ID NO: 901697 - RNA, 19 nt, Homo sapiens
  misc_RNA (1)...(19): siRNA sense strand
ugacaaggagcugcagaug

SEQ ID NO: 901698 - RNA, 19 nt, Homo sapiens
  misc_RNA (1)...(19): siRNA sense strand
gagacucgccuguccucau

SEQ ID NO: 901699 - RNA, 19 nt, Homo sapiens
  misc_RNA (1)...(19): siRNA sense strand
gcgcugagaaccucuacag

SEQ ID NO: 901700 - RNA, 19 nt, Homo sapiens
  misc_RNA (1)...(19): siRNA sense strand
cagcuccgcccucauccuu

SEQ ID NO: 901701 - RNA, 19 nt, Homo sapiens
  misc_RNA (1)...(19): siRNA sense strand
ccggacauccagccuaaga

SEQ ID NO: 901702 - RNA, 19 nt, Homo sapiens
  misc_RNA (1)...(19): siRNA sense strand
aaggagggcgacuacauug

SEQ ID NO: 901703 - RNA, 19 nt, Homo sapiens
  misc_RNA (1)...(19): siRNA sense strand
gggcgacuacauuguguca

SEQ ID NO: 901704 - RNA, 19 nt, Homo sapiens
  misc_RNA (1)...(19): siRNA sense strand
ggagaagggugaccaugaa

SEQ ID NO: 901705 - RNA, 19 nt, Homo sapiens
  misc_RNA (1)...(19): siRNA sense strand
ggaaagagaagcaggacua

SEQ ID NO: 901706 - RNA, 19 nt, Homo sapiens
  misc_RNA (1)...(19): siRNA sense strand
gcugagagcccuaagaaga

SEQ ID NO: 901707 - RNA, 19 nt, Homo sapiens
  misc_RNA (1)...(19): siRNA sense strand
ggcaacagcuucaccaagu

SEQ ID NO: 901708 - RNA, 19 nt, Homo sapiens
  misc_RNA (1)...(19): siRNA sense strand
gcaacagcuucaccaaguu

SEQ ID NO: 901709 - RNA, 19 nt, Homo sapiens
  misc_RNA (1)...(19): siRNA sense strand
gacaacagcucuucuucca

SEQ ID NO: 901710 - RNA, 19 nt, Homo sapiens
  misc_RNA (1)...(19): siRNA sense strand
gaagcaggacuacgcguuu

SEQ ID NO: 901711 - RNA, 19 nt, Homo sapiens
  misc_RNA (1)...(19): siRNA sense strand
aagcgacccuuugcuguua

SEQ ID NO: 901712 - RNA, 19 nt, Homo sapiens
  misc_RNA (1)...(19): siRNA sense strand
gaagcgacccuuugcuguu

SEQ ID NO: 901713 - RNA, 19 nt, Homo sapiens
  misc_RNA (1)...(19): siRNA sense strand
gcacagauuggucuucuca

SEQ ID NO: 901714 - RNA, 19 nt, Homo sapiens
  misc_RNA (1)...(19): siRNA sense strand
gcccaacccugagaaaguu

SEQ ID NO: 901715 - RNA, 19 nt, Homo sapiens
  misc_RNA (1)...(19): siRNA sense strand
ccacggagcuggcauaccu

SEQ ID NO: 901716 - RNA, 19 nt, Homo sapiens
  misc_RNA (1)...(19): siRNA sense strand
caacagcuucaccaaguuu

SEQ ID NO: 901717 - RNA, 19 nt, Homo sapiens
  misc_RNA (1)...(19): siRNA sense strand
gaucaacguagcacagauu

SEQ ID NO: 901718 - RNA, 19 nt, Homo sapiens
  misc_RNA (1)...(19): siRNA sense strand
gacuggaggucucaaguuc

SEQ ID NO: 901719 - RNA, 19 nt, Homo sapiens
  misc_RNA (1)...(19): siRNA sense strand
gcgagcagaugaagucgau

SEQ ID NO: 901720 - RNA, 19 nt, Homo sapiens
  misc_RNA (1)...(19): siRNA sense strand
cccaggacaugaaagagua

SEQ ID NO: 901721 - RNA, 19 nt, Homo sapiens
  misc_RNA (1)...(19): siRNA sense strand
gggugaccaugaagaguuu

SEQ ID NO: 901722 - RNA, 19 nt, Homo sapiens
  misc_RNA (1)...(19): siRNA sense strand
ggacuggaggucucaaguu

SEQ ID NO: 901723 - RNA, 19 nt, Homo sapiens
  misc_RNA (1)...(19): siRNA sense strand
gacaaggaccgcacggaaa

SEQ ID NO: 901724 - RNA, 19 nt, Homo sapiens
  misc_RNA (1)...(19): siRNA sense strand
gcccacgccuuggcauuaa

SEQ ID NO: 901725 - RNA, 19 nt, Homo sapiens
  misc_RNA (1)...(19): siRNA sense strand
ggacagcuccagccacaca

SEQ ID NO: 901726 - RNA, 19 nt, Homo sapiens
  misc_RNA (1)...(19): siRNA sense strand
cggaaaagcugcucaagga

SEQ ID NO: 901727 - RNA, 19 nt, Homo sapiens
  misc_RNA (1)...(19): siRNA sense strand
caggacggcucggccuaua

SEQ ID NO: 901728 - RNA, 19 nt, Homo sapiens
  misc_RNA (1)...(19): siRNA sense strand
gggcaacuaccaccgcuuu

SEQ ID NO: 901729 - RNA, 19 nt, Homo sapiens
  misc_RNA (1)...(19): siRNA sense strand
cagauuggucuucucagua

SEQ ID NO: 901730 - RNA, 19 nt, Homo sapiens
  misc_RNA (1)...(19): siRNA sense strand
caacaccaagggacucuga

SEQ ID NO: 901731 - RNA, 19 nt, Homo sapiens
  misc_RNA (1)...(19): siRNA sense strand
gcccugacaucaccaagca

SEQ ID NO: 901732 - RNA, 19 nt, Homo sapiens
  misc_RNA (1)...(19): siRNA sense strand
cgaauccucuacuacaucu

SEQ ID NO: 901733 - RNA, 19 nt, Homo sapiens
  misc_RNA (1)...(19): siRNA sense strand
caagaacucgggagacauc

SEQ ID NO: 901734 - RNA, 19 nt, Homo sapiens
  misc_RNA (1)...(19): siRNA sense strand
gaaccugccaagcccaaga

SEQ ID NO: 901735 - RNA, 19 nt, Homo sapiens
  misc_RNA (1)...(19): siRNA sense strand
agacgccgaugcacgagaa

SEQ ID NO: 901736 - RNA, 19 nt, Homo sapiens
  misc_RNA (1)...(19): siRNA sense strand
gaagggugaccaugaagag

SEQ ID NO: 901737 - RNA, 19 nt, Homo sapiens
  misc_RNA (1)...(19): siRNA sense strand
caacguagcacagauuggu

SEQ ID NO: 901738 - RNA, 19 nt, Homo sapiens
  misc_RNA (1)...(19): siRNA sense strand
ggcccacgccuuggcauua

SEQ ID NO: 901739 - RNA, 19 nt, Homo sapiens
  misc_RNA (1)...(19): siRNA sense strand
agcgagagcugaagaagca

SEQ ID NO: 901740 - RNA, 19 nt, Homo sapiens
  misc_RNA (1)...(19): siRNA sense strand
gagcauguaccagagcuau

SEQ ID NO: 901741 - RNA, 19 nt, Homo sapiens
  misc_RNA (1)...(19): siRNA sense strand
gcuguacgccgagaacuug

SEQ ID NO: 901742 - RNA, 19 nt, Homo sapiens
  misc_RNA (1)...(19): siRNA sense strand
guacgugucccaggcagaa

SEQ ID NO: 901743 - RNA, 19 nt, Homo sapiens
  misc_RNA (1)...(19): siRNA sense strand
caagcgcagucgaaagaag

SEQ ID NO: 901744 - RNA, 19 nt, Homo sapiens
  misc_RNA (1)...(19): siRNA sense strand
acagauuggucuucucagu

SEQ ID NO: 901745 - RNA, 19 nt, Homo sapiens
  misc_RNA (1)...(19): siRNA sense strand
caaccgcaacgucuucaug

SEQ ID NO: 901746 - RNA, 19 nt, Homo sapiens
  misc_RNA (1)...(19): siRNA sense strand
cuggaggucucaaguucaa

SEQ ID NO: 901747 - RNA, 19 nt, Homo sapiens
  misc_RNA (1)...(19): siRNA sense strand
ggagcuggcauaccucaca

SEQ ID NO: 901748 - RNA, 19 nt, Homo sapiens
  misc_RNA (1)...(19): siRNA sense strand
ucuacuacaucuucaccaa

SEQ ID NO: 901749 - RNA, 19 nt, Homo sapiens
  misc_RNA (1)...(19): siRNA sense strand
gcuguggaaccgcaugaaa

SEQ ID NO: 901750 - RNA, 19 nt, Homo sapiens
  misc_RNA (1)...(19): siRNA sense strand
ccucaaggccaugaucaaa

SEQ ID NO: 901751 - RNA, 19 nt, Homo sapiens
  misc_RNA (1)...(19): siRNA sense strand
ccaccaagcgcagucgaaa

SEQ ID NO: 901752 - RNA, 19 nt, Homo sapiens
  misc_RNA (1)...(19): siRNA sense strand
agauuggucuucucaguac

SEQ ID NO: 901753 - RNA, 19 nt, Homo sapiens
  misc_RNA (1)...(19): siRNA sense strand
ggaggucucaaguucaaca

SEQ ID NO: 901754 - RNA, 19 nt, Homo sapiens
  misc_RNA (1)...(19): siRNA sense strand
ccuaccgaauccucuacua

SEQ ID NO: 901755 - RNA, 19 nt, Homo sapiens
  misc_RNA (1)...(19): siRNA sense strand
uggagaagggugaccauga

SEQ ID NO: 901756 - RNA, 19 nt, Homo sapiens
  misc_RNA (1)...(19): siRNA sense strand
gaaagagaagcaggacuac

SEQ ID NO: 901757 - RNA, 19 nt, Homo sapiens
  misc_RNA (1)...(19): siRNA sense strand
uggaugagagcauguccua

SEQ ID NO: 901758 - RNA, 19 nt, Homo sapiens
  misc_RNA (1)...(19): siRNA sense strand
gcaaugugggcgaguuuac

SEQ ID NO: 901759 - RNA, 19 nt, Homo sapiens
  misc_RNA (1)...(19): siRNA sense strand
ccuaugggccacacaccua

SEQ ID NO: 901760 - RNA, 19 nt, Homo sapiens
  misc_RNA (1)...(19): siRNA sense strand
gcauguaccagagcuaugg

SEQ ID NO: 901761 - RNA, 19 nt, Homo sapiens
  misc_RNA (1)...(19): siRNA sense strand
uagcacagauuggucuucu

SEQ ID NO: 901762 - RNA, 19 nt, Homo sapiens
  misc_RNA (1)...(19): siRNA sense strand
ugagagcccuaagaagaag

SEQ ID NO: 901763 - RNA, 19 nt, Homo sapiens
  misc_RNA (1)...(19): siRNA sense strand
cugagagcccuaagaagaa

SEQ ID NO: 901764 - RNA, 19 nt, Homo sapiens
  misc_RNA (1)...(19): siRNA sense strand
aagcaggacuacgcguuug

SEQ ID NO: 901765 - RNA, 19 nt, Homo sapiens
  misc_RNA (1)...(19): siRNA sense strand
ucaccacggagcuggcaua

SEQ ID NO: 901766 - RNA, 19 nt, Homo sapiens
  misc_RNA (1)...(19): siRNA sense strand
ggcaaugugggcgaguuua

SEQ ID NO: 901767 - RNA, 19 nt, Homo sapiens
  misc_RNA (1)...(19): siRNA sense strand
gcuaccucguggacaaguu

SEQ ID NO: 901768 - RNA, 19 nt, Homo sapiens
  misc_RNA (1)...(19): siRNA sense strand
uaccagcaguacaacuaug

SEQ ID NO: 901769 - RNA, 19 nt, Homo sapiens
  misc_RNA (1)...(19): siRNA sense strand
cggcucggccuauaccauu

SEQ ID NO: 901770 - RNA, 19 nt, Homo sapiens
  misc_RNA (1)...(19): siRNA sense strand
gagagcugaagaagcagaa

SEQ ID NO: 901771 - RNA, 19 nt, Homo sapiens
  misc_RNA (1)...(19): siRNA sense strand
guggacaaguuugcagauc

SEQ ID NO: 901772 - RNA, 19 nt, Homo sapiens
  misc_RNA (1)...(19): siRNA sense strand
cuaccucguggacaaguuu

SEQ ID NO: 901773 - RNA, 19 nt, Homo sapiens
  misc_RNA (1)...(19): siRNA sense strand
caaguucaacauccagaag

SEQ ID NO: 901774 - RNA, 19 nt, Homo sapiens
  misc_RNA (1)...(19): siRNA sense strand
ugcagcagcagcaguacua

SEQ ID NO: 901775 - RNA, 19 nt, Homo sapiens
  misc_RNA (1)...(19): siRNA sense strand
gcucggccuauaccauuga

SEQ ID NO: 901776 - RNA, 19 nt, Homo sapiens
  misc_RNA (1)...(19): siRNA sense strand
gaaaggcccugcugauugu

SEQ ID NO: 901777 - RNA, 19 nt, Homo sapiens
  misc_RNA (1)...(19): siRNA sense strand
uaacccagaugaugaguuu

SEQ ID NO: 901778 - RNA, 19 nt, Homo sapiens
  misc_RNA (1)...(19): siRNA sense strand
gaugagggccgaaguauga

SEQ ID NO: 901779 - RNA, 19 nt, Homo sapiens
  misc_RNA (1)...(19): siRNA sense strand
guagugagguggaaauuca

SEQ ID NO: 901780 - RNA, 19 nt, Homo sapiens
  misc_RNA (1)...(19): siRNA sense strand
gaagagaccuuugaagacu

SEQ ID NO: 901781 - RNA, 19 nt, Homo sapiens
  misc_RNA (1)...(19): siRNA sense strand
gcaggucacugagauaaug

SEQ ID NO: 901782 - RNA, 19 nt, Homo sapiens
  misc_RNA (1)...(19): siRNA sense strand
cgaaagaaaguauguggua

SEQ ID NO: 901783 - RNA, 19 nt, Homo sapiens
  misc_RNA (1)...(19): siRNA sense strand
ccaaggcagucuucauuga

SEQ ID NO: 901784 - RNA, 19 nt, Homo sapiens
  misc_RNA (1)...(19): siRNA sense strand
gcgaagagaccuuugaaga

SEQ ID NO: 901785 - RNA, 19 nt, Homo sapiens
  misc_RNA (1)...(19): siRNA sense strand
ggccaacaaugacuccaua

SEQ ID NO: 901786 - RNA, 19 nt, Homo sapiens
  misc_RNA (1)...(19): siRNA sense strand
gcagaccucuccgaagauu

SEQ ID NO: 901787 - RNA, 19 nt, Homo sapiens
  misc_RNA (1)...(19): siRNA sense strand
gaagaagagugggagaaca

SEQ ID NO: 901788 - RNA, 19 nt, Homo sapiens
  misc_RNA (1)...(19): siRNA sense strand
gaccauacagggaggcuua

SEQ ID NO: 901789 - RNA, 19 nt, Homo sapiens
  misc_RNA (1)...(19): siRNA sense strand
aggcagugaugaagaauaa

SEQ ID NO: 901790 - RNA, 19 nt, Homo sapiens
  misc_RNA (1)...(19): siRNA sense strand
acaggaaacugaaaguguu

SEQ ID NO: 901791 - RNA, 19 nt, Homo sapiens
  misc_RNA (1)...(19): siRNA sense strand
gaaauucaggacacuguga

SEQ ID NO: 901792 - RNA, 19 nt, Homo sapiens
  misc_RNA (1)...(19): siRNA sense strand
ugaacuacuuccugaaaga

SEQ ID NO: 901793 - RNA, 19 nt, Homo sapiens
  misc_RNA (1)...(19): siRNA sense strand
ugacacugcuagaggauug

SEQ ID NO: 901794 - RNA, 19 nt, Homo sapiens
  misc_RNA (1)...(19): siRNA sense strand
gcagaaagccgugcacaag

SEQ ID NO: 901795 - RNA, 19 nt, Homo sapiens
  misc_RNA (1)...(19): siRNA sense strand
gagcaggucacugagauaa

SEQ ID NO: 901796 - RNA, 19 nt, Homo sapiens
  misc_RNA (1)...(19): siRNA sense strand
cugcagaccucuccgaaga

SEQ ID NO: 901797 - RNA, 19 nt, Homo sapiens
  misc_RNA (1)...(19): siRNA sense strand
acacuacucugcccaguca

SEQ ID NO: 901798 - RNA, 19 nt, Homo sapiens
  misc_RNA (1)...(19): siRNA sense strand
gagaggaguugggaaacga

SEQ ID NO: 901799 - RNA, 19 nt, Homo sapiens
  misc_RNA (1)...(19): siRNA sense strand
agaaaggcccugcugauug

SEQ ID NO: 901800 - RNA, 19 nt, Homo sapiens
  misc_RNA (1)...(19): siRNA sense strand
gcgcagcacagacaugauu

SEQ ID NO: 901801 - RNA, 19 nt, Homo sapiens
  misc_RNA (1)...(19): siRNA sense strand
gaaacgcaggcggcuguua

SEQ ID NO: 901802 - RNA, 19 nt, Homo sapiens
  misc_RNA (1)...(19): siRNA sense strand
cagaaaggcccugcugauu

SEQ ID NO: 901803 - RNA, 19 nt, Homo sapiens
  misc_RNA (1)...(19): siRNA sense strand
caacaaugacuccauaacu

SEQ ID NO: 901804 - RNA, 19 nt, Homo sapiens
  misc_RNA (1)...(19): siRNA sense strand
aaagaugagggccgaagua

SEQ ID NO: 901805 - RNA, 19 nt, Homo sapiens
  misc_RNA (1)...(19): siRNA sense strand
aacaaugacuccauaacug

SEQ ID NO: 901806 - RNA, 19 nt, Homo sapiens
  misc_RNA (1)...(19): siRNA sense strand
gccgaaguaugacagaugu

SEQ ID NO: 901807 - RNA, 19 nt, Homo sapiens
  misc_RNA (1)...(19): siRNA sense strand
ccagucacauaccaggaaa

SEQ ID NO: 901808 - RNA, 19 nt, Homo sapiens
  misc_RNA (1)...(19): siRNA sense strand
gaacuacuuccugaaagau

SEQ ID NO: 901809 - RNA, 19 nt, Homo sapiens
  misc_RNA (1)...(19): siRNA sense strand
caaguuagauccccaccuu

SEQ ID NO: 901810 - RNA, 19 nt, Homo sapiens
  misc_RNA (1)...(19): siRNA sense strand
agaaagccgugcacaagag

SEQ ID NO: 901811 - RNA, 19 nt, Homo sapiens
  misc_RNA (1)...(19): siRNA sense strand
gcaaggggauggacaugga

SEQ ID NO: 901812 - RNA, 19 nt, Homo sapiens
  misc_RNA (1)...(19): siRNA sense strand
uagagcaggucacugagau

SEQ ID NO: 901813 - RNA, 19 nt, Homo sapiens
  misc_RNA (1)...(19): siRNA sense strand
ccugggaaguggugguaaa

SEQ ID NO: 901814 - RNA, 19 nt, Homo sapiens
  misc_RNA (1)...(19): siRNA sense strand
ugucugagguggagaagag

SEQ ID NO: 901815 - RNA, 19 nt, Homo sapiens
  misc_RNA (1)...(19): siRNA sense strand
ggcuagagcaggucacuga

SEQ ID NO: 901816 - RNA, 19 nt, Homo sapiens
  misc_RNA (1)...(19): siRNA sense strand
gaaagaugagggccgaagu

SEQ ID NO: 901817 - RNA, 19 nt, Homo sapiens
  misc_RNA (1)...(19): siRNA sense strand
cagaaagccgugcacaaga

SEQ ID NO: 901818 - RNA, 19 nt, Homo sapiens
  misc_RNA (1)...(19): siRNA sense strand
ccauauggcaagugucuga

SEQ ID NO: 901819 - RNA, 19 nt, Homo sapiens
  misc_RNA (1)...(19): siRNA sense strand
ggaguguagugagguggaa

SEQ ID NO: 901820 - RNA, 19 nt, Homo sapiens
  misc_RNA (1)...(19): siRNA sense strand
caggagaggaguugggaaa

SEQ ID NO: 901821 - RNA, 19 nt, Homo sapiens
  misc_RNA (1)...(19): siRNA sense strand
gaggcagugaugaagaaua

SEQ ID NO: 901822 - RNA, 19 nt, Homo sapiens
  misc_RNA (1)...(19): siRNA sense strand
gagccucucaguuuagguu

SEQ ID NO: 901823 - RNA, 19 nt, Homo sapiens
  misc_RNA (1)...(19): siRNA sense strand
cugaggcagugaugaagaa

SEQ ID NO: 901824 - RNA, 19 nt, Homo sapiens
  misc_RNA (1)...(19): siRNA sense strand
ccagaaaggcccugcugau

SEQ ID NO: 901825 - RNA, 19 nt, Homo sapiens
  misc_RNA (1)...(19): siRNA sense strand
gaugaagaauaaggagaag

SEQ ID NO: 901826 - RNA, 19 nt, Homo sapiens
  misc_RNA (1)...(19): siRNA sense strand
ggccugcucugucaaucau

SEQ ID NO: 901827 - RNA, 19 nt, Homo sapiens
  misc_RNA (1)...(19): siRNA sense strand
aagcagaucuuuggggaua

SEQ ID NO: 901828 - RNA, 19 nt, Homo sapiens
  misc_RNA (1)...(19): siRNA sense strand
ggagaggaguugggaaacg

SEQ ID NO: 901829 - RNA, 19 nt, Homo sapiens
  misc_RNA (1)...(19): siRNA sense strand
ugaugaagaauaaggagaa

SEQ ID NO: 901830 - RNA, 19 nt, Homo sapiens
  misc_RNA (1)...(19): siRNA sense strand
cgaagagaccuuugaagac

SEQ ID NO: 901831 - RNA, 19 nt, Homo sapiens
  misc_RNA (1)...(19): siRNA sense strand
ggcguuugcuggagagcuu

SEQ ID NO: 901832 - RNA, 19 nt, Homo sapiens
  misc_RNA (1)...(19): siRNA sense strand
cauucgagaugaagaagag

SEQ ID NO: 901833 - RNA, 19 nt, Homo sapiens
  misc_RNA (1)...(19): siRNA sense strand
gaagauuggagagaaaguc

SEQ ID NO: 901834 - RNA, 19 nt, Homo sapiens
  misc_RNA (1)...(19): siRNA sense strand
guacaggaaacugaaagug

SEQ ID NO: 901835 - RNA, 19 nt, Homo sapiens
  misc_RNA (1)...(19): siRNA sense strand
gaauaaggagaagccauca

SEQ ID NO: 901836 - RNA, 19 nt, Homo sapiens
  misc_RNA (1)...(19): siRNA sense strand
ccaauuuucuggaguuaau

SEQ ID NO: 901837 - RNA, 19 nt, Homo sapiens
  misc_RNA (1)...(19): siRNA sense strand
acuacuuccugaaagauga

SEQ ID NO: 901838 - RNA, 19 nt, Homo sapiens
  misc_RNA (1)...(19): siRNA sense strand
gcagugaugaagaauaagg

SEQ ID NO: 901839 - RNA, 19 nt, Homo sapiens
  misc_RNA (1)...(19): siRNA sense strand
gccaaggcagucuucauug

SEQ ID NO: 901840 - RNA, 19 nt, Homo sapiens
  misc_RNA (1)...(19): siRNA sense strand
ucugaaacaucucuuagcu

SEQ ID NO: 901841 - RNA, 19 nt, Homo sapiens
  misc_RNA (1)...(19): siRNA sense strand
acaaugacuccauaacugu

SEQ ID NO: 901842 - RNA, 19 nt, Homo sapiens
  misc_RNA (1)...(19): siRNA sense strand
uuuagagccuccgaaagaa

SEQ ID NO: 901843 - RNA, 19 nt, Homo sapiens
  misc_RNA (1)...(19): siRNA sense strand
gcagaucuuuggggauaaa

SEQ ID NO: 901844 - RNA, 19 nt, Homo sapiens
  misc_RNA (1)...(19): siRNA sense strand
aaagaaaguaugugguaca

SEQ ID NO: 901845 - RNA, 19 nt, Homo sapiens
  misc_RNA (1)...(19): siRNA sense strand
ugauucgucugaaacaucu

SEQ ID NO: 901846 - RNA, 19 nt, Homo sapiens
  misc_RNA (1)...(19): siRNA sense strand
gaggucaugccccaaguua

SEQ ID NO: 901847 - RNA, 19 nt, Homo sapiens
  misc_RNA (1)...(19): siRNA sense strand
aaacgcaggcggcuguuag

SEQ ID NO: 901848 - RNA, 19 nt, Homo sapiens
  misc_RNA (1)...(19): siRNA sense strand
ccaagcccugggaaacaua

SEQ ID NO: 901849 - RNA, 19 nt, Homo sapiens
  misc_RNA (1)...(19): siRNA sense strand
uacaggaaacugaaagugu

SEQ ID NO: 901850 - RNA, 19 nt, Homo sapiens
  misc_RNA (1)...(19): siRNA sense strand
ggacauggaccccagaaag

SEQ ID NO: 901851 - RNA, 19 nt, Homo sapiens
  misc_RNA (1)...(19): siRNA sense strand
ugagauaaugcccauaugg

SEQ ID NO: 901852 - RNA, 19 nt, Homo sapiens
  misc_RNA (1)...(19): siRNA sense strand
ggccgaaguaugacagaug

SEQ ID NO: 901853 - RNA, 19 nt, Homo sapiens
  misc_RNA (1)...(19): siRNA sense strand
uccgaagauuggagagaaa

SEQ ID NO: 901854 - RNA, 19 nt, Homo sapiens
  misc_RNA (1)...(19): siRNA sense strand
gccaacaaugacuccauaa

SEQ ID NO: 901855 - RNA, 19 nt, Homo sapiens
  misc_RNA (1)...(19): siRNA sense strand
gguccuagggagaauguuc

SEQ ID NO: 901856 - RNA, 19 nt, Homo sapiens
  misc_RNA (1)...(19): siRNA sense strand
ggucaugccccaaguuaga

SEQ ID NO: 901857 - RNA, 19 nt, Homo sapiens
  misc_RNA (1)...(19): siRNA sense strand
caagagcagaagccagugu

SEQ ID NO: 901858 - RNA, 19 nt, Homo sapiens
  misc_RNA (1)...(19): siRNA sense strand
uuagagccuccgaaagaaa

SEQ ID NO: 901859 - RNA, 19 nt, Homo sapiens
  misc_RNA (1)...(19): siRNA sense strand
gggauggucucaacaaaua

SEQ ID NO: 901860 - RNA, 19 nt, Homo sapiens
  misc_RNA (1)...(19): siRNA sense strand
caacaacuaugcauucuga

SEQ ID NO: 901861 - RNA, 19 nt, Homo sapiens
  misc_RNA (1)...(19): siRNA sense strand
caacaaauaugacuucuac

SEQ ID NO: 901862 - RNA, 19 nt, Homo sapiens
  misc_RNA (1)...(19): siRNA sense strand
guaacaaucacaacaacua

SEQ ID NO: 901863 - RNA, 19 nt, Homo sapiens
  misc_RNA (1)...(19): siRNA sense strand
aaugaaacuuccaacagua

SEQ ID NO: 901864 - RNA, 19 nt, Homo sapiens
  misc_RNA (1)...(19): siRNA sense strand
ucacagaacacaucucaga

SEQ ID NO: 901865 - RNA, 19 nt, Homo sapiens
  misc_RNA (1)...(19): siRNA sense strand
aaaugaaacuuccaacagu

SEQ ID NO: 901866 - RNA, 19 nt, Homo sapiens
  misc_RNA (1)...(19): siRNA sense strand
gagcuuuguuggugguauu

SEQ ID NO: 901867 - RNA, 19 nt, Homo sapiens
  misc_RNA (1)...(19): siRNA sense strand
gauaucaacauccacaaug

SEQ ID NO: 901868 - RNA, 19 nt, Homo sapiens
  misc_RNA (1)...(19): siRNA sense strand
gaagaggcauucgguaucg

SEQ ID NO: 901869 - RNA, 19 nt, Homo sapiens
  misc_RNA (1)...(19): siRNA sense strand
gccucagacuccaguaaua

SEQ ID NO: 901870 - RNA, 19 nt, Homo sapiens
  misc_RNA (1)...(19): siRNA sense strand
gacaucugcugcuucauca

SEQ ID NO: 901871 - RNA, 19 nt, Homo sapiens
  misc_RNA (1)...(19): siRNA sense strand
aaccauagaugaacaugau

SEQ ID NO: 901872 - RNA, 19 nt, Homo sapiens
  misc_RNA (1)...(19): siRNA sense strand
ccacaauaguucagugaca

SEQ ID NO: 901873 - RNA, 19 nt, Homo sapiens
  misc_RNA (1)...(19): siRNA sense strand
caaaugaaacuuccaacag

SEQ ID NO: 901874 - RNA, 19 nt, Homo sapiens
  misc_RNA (1)...(19): siRNA sense strand
ucacaacaacuaugcauuc

SEQ ID NO: 901875 - RNA, 19 nt, Homo sapiens
  misc_RNA (1)...(19): siRNA sense strand
cuuaaagucuacacccaaa

SEQ ID NO: 901876 - RNA, 19 nt, Homo sapiens
  misc_RNA (1)...(19): siRNA sense strand
gaaccauagaugaacauga

SEQ ID NO: 901877 - RNA, 19 nt, Homo sapiens
  misc_RNA (1)...(19): siRNA sense strand
gcaaagaaaggaucaaaau

SEQ ID NO: 901878 - RNA, 19 nt, Homo sapiens
  misc_RNA (1)...(19): siRNA sense strand
cagggauggucucaacaaa

SEQ ID NO: 901879 - RNA, 19 nt, Homo sapiens
  misc_RNA (1)...(19): siRNA sense strand
gaccguaacccacaauagu

SEQ ID NO: 901880 - RNA, 19 nt, Homo sapiens
  misc_RNA (1)...(19): siRNA sense strand
ugacuucuaccaccuuaaa

SEQ ID NO: 901881 - RNA, 19 nt, Homo sapiens
  misc_RNA (1)...(19): siRNA sense strand
uaugacuucuaccaccuua

SEQ ID NO: 901882 - RNA, 19 nt, Homo sapiens
  misc_RNA (1)...(19): siRNA sense strand
cuucugaccauacaaauga

SEQ ID NO: 901883 - RNA, 19 nt, Homo sapiens
  misc_RNA (1)...(19): siRNA sense strand
gauacugggagcuuuguug

SEQ ID NO: 901884 - RNA, 19 nt, Homo sapiens
  misc_RNA (1)...(19): siRNA sense strand
uguuggugguauuguauua

SEQ ID NO: 901885 - RNA, 19 nt, Homo sapiens
  misc_RNA (1)...(19): siRNA sense strand
auaucaacauccacaauga

SEQ ID NO: 901886 - RNA, 19 nt, Homo sapiens
  misc_RNA (1)...(19): siRNA sense strand
uccaacaugugccuucuga

SEQ ID NO: 901887 - RNA, 19 nt, Homo sapiens
  misc_RNA (1)...(19): siRNA sense strand
ucuaccaccuuaaagucua

SEQ ID NO: 901888 - RNA, 19 nt, Homo sapiens
  misc_RNA (1)...(19): siRNA sense strand
gguaucgaaccauagauga

SEQ ID NO: 901889 - RNA, 19 nt, Homo sapiens
  misc_RNA (1)...(19): siRNA sense strand
guauuaacgcugggaguuu

SEQ ID NO: 901890 - RNA, 19 nt, Homo sapiens
  misc_RNA (1)...(19): siRNA sense strand
ucucagauaucaacaucca

SEQ ID NO: 901891 - RNA, 19 nt, Homo sapiens
  misc_RNA (1)...(19): siRNA sense strand
auacaacggucaccaccau

SEQ ID NO: 901892 - RNA, 19 nt, Homo sapiens
  misc_RNA (1)...(19): siRNA sense strand
ucaguaacaaucacaacaa

SEQ ID NO: 901893 - RNA, 19 nt, Homo sapiens
  misc_RNA (1)...(19): siRNA sense strand
gauggucucaacaaauaug

SEQ ID NO: 901894 - RNA, 19 nt, Homo sapiens
  misc_RNA (1)...(19): siRNA sense strand
aagaagaggcauucgguau

SEQ ID NO: 901895 - RNA, 19 nt, Homo sapiens
  misc_RNA (1)...(19): siRNA sense strand
ugacaucugcugcuucauc

SEQ ID NO: 901896 - RNA, 19 nt, Homo sapiens
  misc_RNA (1)...(19): siRNA sense strand
caacggucaccaccaugaa

SEQ ID NO: 901897 - RNA, 19 nt, Homo sapiens
  misc_RNA (1)...(19): siRNA sense strand
guaucgaaccauagaugaa

SEQ ID NO: 901898 - RNA, 19 nt, Homo sapiens
  misc_RNA (1)...(19): siRNA sense strand
gcugggaguuuuaucuauu

SEQ ID NO: 901899 - RNA, 19 nt, Homo sapiens
  misc_RNA (1)...(19): siRNA sense strand
ucagugacaucugcugcuu

SEQ ID NO: 901900 - RNA, 19 nt, Homo sapiens
  misc_RNA (1)...(19): siRNA sense strand
caaugaccguaacccacaa

SEQ ID NO: 901901 - RNA, 19 nt, Homo sapiens
  misc_RNA (1)...(19): siRNA sense strand
cuacagcggcaucuaauac

SEQ ID NO: 901902 - RNA, 19 nt, Homo sapiens
  misc_RNA (1)...(19): siRNA sense strand
cacaauaguucagugacau

SEQ ID NO: 901903 - RNA, 19 nt, Homo sapiens
  misc_RNA (1)...(19): siRNA sense strand
acagcggcaucuaauacaa

SEQ ID NO: 901904 - RNA, 19 nt, Homo sapiens
  misc_RNA (1)...(19): siRNA sense strand
agugacaucugcugcuuca

SEQ ID NO: 901905 - RNA, 19 nt, Homo sapiens
  misc_RNA (1)...(19): siRNA sense strand
ccagggauggucucaacaa

SEQ ID NO: 901906 - RNA, 19 nt, Homo sapiens
  misc_RNA (1)...(19): siRNA sense strand
acaaauaugacuucuacca

SEQ ID NO: 901907 - RNA, 19 nt, Homo sapiens
  misc_RNA (1)...(19): siRNA sense strand
caugugccuucugaccaua

SEQ ID NO: 901908 - RNA, 19 nt, Homo sapiens
  misc_RNA (1)...(19): siRNA sense strand
gaaacuuccaacaguacug

SEQ ID NO: 901909 - RNA, 19 nt, Homo sapiens
  misc_RNA (1)...(19): siRNA sense strand
caguaacaaucacaacaac

SEQ ID NO: 901910 - RNA, 19 nt, Homo sapiens
  misc_RNA (1)...(19): siRNA sense strand
gaccauacaaaugaaacuu

SEQ ID NO: 901911 - RNA, 19 nt, Homo sapiens
  misc_RNA (1)...(19): siRNA sense strand
acaaaugaaacuuccaaca

SEQ ID NO: 901912 - RNA, 19 nt, Homo sapiens
  misc_RNA (1)...(19): siRNA sense strand
ggagcuuuguuggugguau

SEQ ID NO: 901913 - RNA, 19 nt, Homo sapiens
  misc_RNA (1)...(19): siRNA sense strand
aagcaaagaaaggaucaaa

SEQ ID NO: 901914 - RNA, 19 nt, Homo sapiens
  misc_RNA (1)...(19): siRNA sense strand
cacaacaacuaugcauucu

SEQ ID NO: 901915 - RNA, 19 nt, Homo sapiens
  misc_RNA (1)...(19): siRNA sense strand
ccuacagcggcaucuaaua

SEQ ID NO: 901916 - RNA, 19 nt, Homo sapiens
  misc_RNA (1)...(19): siRNA sense strand
cuuuguuggugguauugua

SEQ ID NO: 901917 - RNA, 19 nt, Homo sapiens
  misc_RNA (1)...(19): siRNA sense strand
acaacggucaccaccauga

SEQ ID NO: 901918 - RNA, 19 nt, Homo sapiens
  misc_RNA (1)...(19): siRNA sense strand
agaagaggcauucgguauc

SEQ ID NO: 901919 - RNA, 19 nt, Homo sapiens
  misc_RNA (1)...(19): siRNA sense strand
ucugcugcuucaucaguaa

SEQ ID NO: 901920 - RNA, 19 nt, Homo sapiens
  misc_RNA (1)...(19): siRNA sense strand
ucucaacaaauaugacuuc

SEQ ID NO: 901921 - RNA, 19 nt, Homo sapiens
  misc_RNA (1)...(19): siRNA sense strand
gaaauuauccgacagauga

SEQ ID NO: 901922 - RNA, 19 nt, Homo sapiens
  misc_RNA (1)...(19): siRNA sense strand
ggaaagcgaugcccuucuu

SEQ ID NO: 901923 - RNA, 19 nt, Homo sapiens
  misc_RNA (1)...(19): siRNA sense strand
ucaacacacucuaccauaa

SEQ ID NO: 901924 - RNA, 19 nt, Homo sapiens
  misc_RNA (1)...(19): siRNA sense strand
gauaauagcaagaucauca

SEQ ID NO: 901925 - RNA, 19 nt, Homo sapiens
  misc_RNA (1)...(19): siRNA sense strand
gcagaagauucagaaguuu

SEQ ID NO: 901926 - RNA, 19 nt, Homo sapiens
  misc_RNA (1)...(19): siRNA sense strand
gguuacaggugauuucuga

SEQ ID NO: 901927 - RNA, 19 nt, Homo sapiens
  misc_RNA (1)...(19): siRNA sense strand
gagcagguuugcauauaau

SEQ ID NO: 901928 - RNA, 19 nt, Homo sapiens
  misc_RNA (1)...(19): siRNA sense strand
gaagaaauuauccgacaga

SEQ ID NO: 901929 - RNA, 19 nt, Homo sapiens
  misc_RNA (1)...(19): siRNA sense strand
ugagcagguuugcauauaa

SEQ ID NO: 901930 - RNA, 19 nt, Homo sapiens
  misc_RNA (1)...(19): siRNA sense strand
ggacgagacucuggaugug

SEQ ID NO: 901931 - RNA, 19 nt, Homo sapiens
  misc_RNA (1)...(19): siRNA sense strand
gaucaucagugaggagugu

SEQ ID NO: 901932 - RNA, 19 nt, Homo sapiens
  misc_RNA (1)...(19): siRNA sense strand
ucaccacuauuacccaauu

SEQ ID NO: 901933 - RNA, 19 nt, Homo sapiens
  misc_RNA (1)...(19): siRNA sense strand
ggugauauccuggaagaaa

SEQ ID NO: 901934 - RNA, 19 nt, Homo sapiens
  misc_RNA (1)...(19): siRNA sense strand
aggagaagcuaccucauau

SEQ ID NO: 901935 - RNA, 19 nt, Homo sapiens
  misc_RNA (1)...(19): siRNA sense strand
caucgugucuaacuacaug

SEQ ID NO: 901936 - RNA, 19 nt, Homo sapiens
  misc_RNA (1)...(19): siRNA sense strand
uacaggugauuucugauuu

SEQ ID NO: 901937 - RNA, 19 nt, Homo sapiens
  misc_RNA (1)...(19): siRNA sense strand
auagcaagaucaucaguga

SEQ ID NO: 901938 - RNA, 19 nt, Homo sapiens
  misc_RNA (1)...(19): siRNA sense strand
aaaauuggcuuccugaaug

SEQ ID NO: 901939 - RNA, 19 nt, Homo sapiens
  misc_RNA (1)...(19): siRNA sense strand
gagaagcuaccucauaugg

SEQ ID NO: 901940 - RNA, 19 nt, Homo sapiens
  misc_RNA (1)...(19): siRNA sense strand
agcagaagauucagaaguu

SEQ ID NO: 901941 - RNA, 19 nt, Homo sapiens
  misc_RNA (1)...(19): siRNA sense strand
gcgaugcccuucuucuuac

SEQ ID NO: 901942 - RNA, 19 nt, Homo sapiens
  misc_RNA (1)...(19): siRNA sense strand
aaauuggcuuccugaauga

SEQ ID NO: 901943 - RNA, 19 nt, Homo sapiens
  misc_RNA (1)...(19): siRNA sense strand
aaggagaagcuaccucaua

SEQ ID NO: 901944 - RNA, 19 nt, Homo sapiens
  misc_RNA (1)...(19): siRNA sense strand
ggaccaaagcgcacaaucu

SEQ ID NO: 901945 - RNA, 19 nt, Homo sapiens
  misc_RNA (1)...(19): siRNA sense strand
gugauauccuggaagaaau

SEQ ID NO: 901946 - RNA, 19 nt, Homo sapiens
  misc_RNA (1)...(19): siRNA sense strand
ucagauagcccaggugguu

SEQ ID NO: 901947 - RNA, 19 nt, Homo sapiens
  misc_RNA (1)...(19): siRNA sense strand
auacacacauacaacaaga

SEQ ID NO: 901948 - RNA, 19 nt, Homo sapiens
  misc_RNA (1)...(19): siRNA sense strand
guuagagaguccaaugcaa

SEQ ID NO: 901949 - RNA, 19 nt, Homo sapiens
  misc_RNA (1)...(19): siRNA sense strand
gauauccuggaagaaauua

SEQ ID NO: 901950 - RNA, 19 nt, Homo sapiens
  misc_RNA (1)...(19): siRNA sense strand
gaccaaagcgcacaaucuc

SEQ ID NO: 901951 - RNA, 19 nt, Homo sapiens
  misc_RNA (1)...(19): siRNA sense strand
auucagaaguuucagauag

SEQ ID NO: 901952 - RNA, 19 nt, Homo sapiens
  misc_RNA (1)...(19): siRNA sense strand
cgcacaaucuccuauguca

SEQ ID NO: 901953 - RNA, 19 nt, Homo sapiens
  misc_RNA (1)...(19): siRNA sense strand
uugagcagguuugcauaua

SEQ ID NO: 901954 - RNA, 19 nt, Homo sapiens
  misc_RNA (1)...(19): siRNA sense strand
uagcccaggugguuagaga

SEQ ID NO: 901955 - RNA, 19 nt, Homo sapiens
  misc_RNA (1)...(19): siRNA sense strand
gaaggccacgguccugaug

SEQ ID NO: 901956 - RNA, 19 nt, Homo sapiens
  misc_RNA (1)...(19): siRNA sense strand
uacauggacuccuaugaca

SEQ ID NO: 901957 - RNA, 19 nt, Homo sapiens
  misc_RNA (1)...(19): siRNA sense strand
cagcgcuccuucaccacua

SEQ ID NO: 901958 - RNA, 19 nt, Homo sapiens
  misc_RNA (1)...(19): siRNA sense strand
uuacaggugauuucugauu

SEQ ID NO: 901959 - RNA, 19 nt, Homo sapiens
  misc_RNA (1)...(19): siRNA sense strand
ggagaagcuaccucauaug

SEQ ID NO: 901960 - RNA, 19 nt, Homo sapiens
  misc_RNA (1)...(19): siRNA sense strand
uaccucauaugguggaaug

SEQ ID NO: 901961 - RNA, 19 nt, Homo sapiens
  misc_RNA (1)...(19): siRNA sense strand
acauccacaucgugucuaa

SEQ ID NO: 901962 - RNA, 19 nt, Homo sapiens
  misc_RNA (1)...(19): siRNA sense strand
gauucagaaguuucagaua

SEQ ID NO: 901963 - RNA, 19 nt, Homo sapiens
  misc_RNA (1)...(19): siRNA sense strand
agcgaugcccuucuucuua

SEQ ID NO: 901964 - RNA, 19 nt, Homo sapiens
  misc_RNA (1)...(19): siRNA sense strand
gugucuaacuacauggauu

SEQ ID NO: 901965 - RNA, 19 nt, Homo sapiens
  misc_RNA (1)...(19): siRNA sense strand
caacauccacaucgugucu

SEQ ID NO: 901966 - RNA, 19 nt, Homo sapiens
  misc_RNA (1)...(19): siRNA sense strand
uaacaacauuccccuuuuc

SEQ ID NO: 901967 - RNA, 19 nt, Homo sapiens
  misc_RNA (1)...(19): siRNA sense strand
acucuaccauaacaacauu

SEQ ID NO: 901968 - RNA, 19 nt, Homo sapiens
  misc_RNA (1)...(19): siRNA sense strand
gaaggacgagacucuggau

SEQ ID NO: 901969 - RNA, 19 nt, Homo sapiens
  misc_RNA (1)...(19): siRNA sense strand
gaaagcgaugcccuucuuc

SEQ ID NO: 901970 - RNA, 19 nt, Homo sapiens
  misc_RNA (1)...(19): siRNA sense strand
gcccuucuucuuacaauau

SEQ ID NO: 901971 - RNA, 19 nt, Homo sapiens
  misc_RNA (1)...(19): siRNA sense strand
caaagcgcacaaucuccua

SEQ ID NO: 901972 - RNA, 19 nt, Homo sapiens
  misc_RNA (1)...(19): siRNA sense strand
caacacacucuaccauaac

SEQ ID NO: 901973 - RNA, 19 nt, Homo sapiens
  misc_RNA (1)...(19): siRNA sense strand
gcucagggagggauauaag

SEQ ID NO: 901974 - RNA, 19 nt, Homo sapiens
  misc_RNA (1)...(19): siRNA sense strand
cagauagcccaggugguua

SEQ ID NO: 901975 - RNA, 19 nt, Homo sapiens
  misc_RNA (1)...(19): siRNA sense strand
cagcagaagauucagaagu

SEQ ID NO: 901976 - RNA, 19 nt, Homo sapiens
  misc_RNA (1)...(19): siRNA sense strand
uaugucagcagaagauuca

SEQ ID NO: 901977 - RNA, 19 nt, Homo sapiens
  misc_RNA (1)...(19): siRNA sense strand
ccacaucgugucuaacuac

SEQ ID NO: 901978 - RNA, 19 nt, Homo sapiens
  misc_RNA (1)...(19): siRNA sense strand
uuggugauauccuggaaga

SEQ ID NO: 901979 - RNA, 19 nt, Homo sapiens
  misc_RNA (1)...(19): siRNA sense strand
gcuacauggacuccuauga

SEQ ID NO: 901980 - RNA, 19 nt, Homo sapiens
  misc_RNA (1)...(19): siRNA sense strand
ugucuaacuacauggauuu

SEQ ID NO: 901981 - RNA, 19 nt, Homo sapiens
  misc_RNA (1)...(19): siRNA sense strand
uccgacagaugaaaguguu

SEQ ID NO: 901982 - RNA, 19 nt, Homo sapiens
  misc_RNA (1)...(19): siRNA sense strand
cagaagauucagaaguuuc

SEQ ID NO: 901983 - RNA, 19 nt, Homo sapiens
  misc_RNA (1)...(19): siRNA sense strand
uuagagaguccaaugcaau

SEQ ID NO: 901984 - RNA, 19 nt, Homo sapiens
  misc_RNA (1)...(19): siRNA sense strand
uagagaguccaaugcaaug

SEQ ID NO: 901985 - RNA, 19 nt, Homo sapiens
  misc_RNA (1)...(19): siRNA sense strand
ugauauccuggaagaaauu

SEQ ID NO: 901986 - RNA, 19 nt, Homo sapiens
  misc_RNA (1)...(19): siRNA sense strand
ccagcaacuugagggcaaa

SEQ ID NO: 901987 - RNA, 19 nt, Homo sapiens
  misc_RNA (1)...(19): siRNA sense strand
cauggacuccuaugacauc

SEQ ID NO: 901988 - RNA, 19 nt, Homo sapiens
  misc_RNA (1)...(19): siRNA sense strand
gcagguuugcauauaaugg

SEQ ID NO: 901989 - RNA, 19 nt, Homo sapiens
  misc_RNA (1)...(19): siRNA sense strand
caaaauuggcuuccugaau

SEQ ID NO: 901990 - RNA, 19 nt, Homo sapiens
  misc_RNA (1)...(19): siRNA sense strand
acacauacaacaagaacag

SEQ ID NO: 901991 - RNA, 19 nt, Homo sapiens
  misc_RNA (1)...(19): siRNA sense strand
agaagauucagaaguuuca

SEQ ID NO: 901992 - RNA, 19 nt, Homo sapiens
  misc_RNA (1)...(19): siRNA sense strand
acaucgugcuggagaagga

SEQ ID NO: 901993 - RNA, 19 nt, Homo sapiens
  misc_RNA (1)...(19): siRNA sense strand
gguuagagaguccaaugca

SEQ ID NO: 901994 - RNA, 19 nt, Homo sapiens
  misc_RNA (1)...(19): siRNA sense strand
cauaacaacauuccccuuu

SEQ ID NO: 901995 - RNA, 19 nt, Homo sapiens
  misc_RNA (1)...(19): siRNA sense strand
ggaagauaaugaugacuua

SEQ ID NO: 901996 - RNA, 19 nt, Homo sapiens
  misc_RNA (1)...(19): siRNA sense strand
ggauugagcuucauucaga

SEQ ID NO: 901997 - RNA, 19 nt, Homo sapiens
  misc_RNA (1)...(19): siRNA sense strand
ggaagaggauaucaaagaa

SEQ ID NO: 901998 - RNA, 19 nt, Homo sapiens
  misc_RNA (1)...(19): siRNA sense strand
ggacuuggcucguauuuac

SEQ ID NO: 901999 - RNA, 19 nt, Homo sapiens
  misc_RNA (1)...(19): siRNA sense strand
ucaaagggcuccacccaaa

SEQ ID NO: 902000 - RNA, 19 nt, Homo sapiens
  misc_RNA (1)...(19): siRNA sense strand
ggaaccggauauuuaagua

SEQ ID NO: 902001 - RNA, 19 nt, Homo sapiens
  misc_RNA (1)...(19): siRNA sense strand
ggacagaacacuugggaaa

SEQ ID NO: 902002 - RNA, 19 nt, Homo sapiens
  misc_RNA (1)...(19): siRNA sense strand
gaacuggacagaacacuug

SEQ ID NO: 902003 - RNA, 19 nt, Homo sapiens
  misc_RNA (1)...(19): siRNA sense strand
gaagcucaguauauucgua

SEQ ID NO: 902004 - RNA, 19 nt, Homo sapiens
  misc_RNA (1)...(19): siRNA sense strand
gaaccugcauuuguuguug

SEQ ID NO: 902005 - RNA, 19 nt, Homo sapiens
  misc_RNA (1)...(19): siRNA sense strand
gaggaucaguuaacacaga

SEQ ID NO: 902006 - RNA, 19 nt, Homo sapiens
  misc_RNA (1)...(19): siRNA sense strand
gauaauggcaaaccagauu

SEQ ID NO: 902007 - RNA, 19 nt, Homo sapiens
  misc_RNA (1)...(19): siRNA sense strand
gaucaguuaacacagauua

SEQ ID NO: 902008 - RNA, 19 nt, Homo sapiens
  misc_RNA (1)...(19): siRNA sense strand
aaagagaguuaaacagaga

SEQ ID NO: 902009 - RNA, 19 nt, Homo sapiens
  misc_RNA (1)...(19): siRNA sense strand
gaaguggaaccggauauuu

SEQ ID NO: 902010 - RNA, 19 nt, Homo sapiens
  misc_RNA (1)...(19): siRNA sense strand
ggagccaccucaaaauuua

SEQ ID NO: 902011 - RNA, 19 nt, Homo sapiens
  misc_RNA (1)...(19): siRNA sense strand
cagagacaaugcuuacaaa

SEQ ID NO: 902012 - RNA, 19 nt, Homo sapiens
  misc_RNA (1)...(19): siRNA sense strand
uauccuugcuguuucauuu

SEQ ID NO: 902013 - RNA, 19 nt, Homo sapiens
  misc_RNA (1)...(19): siRNA sense strand
gagcuggaguacagaaaga

SEQ ID NO: 902014 - RNA, 19 nt, Homo sapiens
  misc_RNA (1)...(19): siRNA sense strand
cuacaggacuuggcucgua

SEQ ID NO: 902015 - RNA, 19 nt, Homo sapiens
  misc_RNA (1)...(19): siRNA sense strand
gguggaauaugccaaggaa

SEQ ID NO: 902016 - RNA, 19 nt, Homo sapiens
  misc_RNA (1)...(19): siRNA sense strand
gagacaaugcuuacaaaga

SEQ ID NO: 902017 - RNA, 19 nt, Homo sapiens
  misc_RNA (1)...(19): siRNA sense strand
gacgcacacuuagaaauuu

SEQ ID NO: 902018 - RNA, 19 nt, Homo sapiens
  misc_RNA (1)...(19): siRNA sense strand
guacagaaagaccaugaaa

SEQ ID NO: 902019 - RNA, 19 nt, Homo sapiens
  misc_RNA (1)...(19): siRNA sense strand
caaguaagaaugauaaugg

SEQ ID NO: 902020 - RNA, 19 nt, Homo sapiens
  misc_RNA (1)...(19): siRNA sense strand
aagaggauaucaaagaaga

SEQ ID NO: 902021 - RNA, 19 nt, Homo sapiens
  misc_RNA (1)...(19): siRNA sense strand
agaaagagaguuaaacaga

SEQ ID NO: 902022 - RNA, 19 nt, Homo sapiens
  misc_RNA (1)...(19): siRNA sense strand
gccuauagaggaucaguua

SEQ ID NO: 902023 - RNA, 19 nt, Homo sapiens
  misc_RNA (1)...(19): siRNA sense strand
cgacgcacacuuagaaauu

SEQ ID NO: 902024 - RNA, 19 nt, Homo sapiens
  misc_RNA (1)...(19): siRNA sense strand
caaccaaguaagaaugaua

SEQ ID NO: 902025 - RNA, 19 nt, Homo sapiens
  misc_RNA (1)...(19): siRNA sense strand
caccuugcauuuauucuga

SEQ ID NO: 902026 - RNA, 19 nt, Homo sapiens
  misc_RNA (1)...(19): siRNA sense strand
guacaauggugggcuuaau

SEQ ID NO: 902027 - RNA, 19 nt, Homo sapiens
  misc_RNA (1)...(19): siRNA sense strand
agacaaugcuuacaaagac

SEQ ID NO: 902028 - RNA, 19 nt, Homo sapiens
  misc_RNA (1)...(19): siRNA sense strand
gagaauuaacacuuacgua

SEQ ID NO: 902029 - RNA, 19 nt, Homo sapiens
  misc_RNA (1)...(19): siRNA sense strand
ucaggaaucuacaggacuu

SEQ ID NO: 902030 - RNA, 19 nt, Homo sapiens
  misc_RNA (1)...(19): siRNA sense strand
gucagcaccuugcauuuau

SEQ ID NO: 902031 - RNA, 19 nt, Homo sapiens
  misc_RNA (1)...(19): siRNA sense strand
gguaauugccuccagauag

SEQ ID NO: 902032 - RNA, 19 nt, Homo sapiens
  misc_RNA (1)...(19): siRNA sense strand
guaauugccuccagauagc

SEQ ID NO: 902033 - RNA, 19 nt, Homo sapiens
  misc_RNA (1)...(19): siRNA sense strand
acaaagacuuagccuggaa

SEQ ID NO: 902034 - RNA, 19 nt, Homo sapiens
  misc_RNA (1)...(19): siRNA sense strand
uacauucgacgcacacuua

SEQ ID NO: 902035 - RNA, 19 nt, Homo sapiens
  misc_RNA (1)...(19): siRNA sense strand
aaguggaaccggauauuua

SEQ ID NO: 902036 - RNA, 19 nt, Homo sapiens
  misc_RNA (1)...(19): siRNA sense strand
gaaagaccaugaaaacuac

SEQ ID NO: 902037 - RNA, 19 nt, Homo sapiens
  misc_RNA (1)...(19): siRNA sense strand
ucguggagauuacuauuug

SEQ ID NO: 902038 - RNA, 19 nt, Homo sapiens
  misc_RNA (1)...(19): siRNA sense strand
guauauucguacugaaaga

SEQ ID NO: 902039 - RNA, 19 nt, Homo sapiens
  misc_RNA (1)...(19): siRNA sense strand
ugucagcaccuugcauuua

SEQ ID NO: 902040 - RNA, 19 nt, Homo sapiens
  misc_RNA (1)...(19): siRNA sense strand
uggaagaggauaucaaaga

SEQ ID NO: 902041 - RNA, 19 nt, Homo sapiens
  misc_RNA (1)...(19): siRNA sense strand
ggaaguggaaccggauauu

SEQ ID NO: 902042 - RNA, 19 nt, Homo sapiens
  misc_RNA (1)...(19): siRNA sense strand
gaaguuauggaagcauuga

SEQ ID NO: 902043 - RNA, 19 nt, Homo sapiens
  misc_RNA (1)...(19): siRNA sense strand
gggaagauaaugaugacuu

SEQ ID NO: 902044 - RNA, 19 nt, Homo sapiens
  misc_RNA (1)...(19): siRNA sense strand
acaauggugggcuuaauuu

SEQ ID NO: 902045 - RNA, 19 nt, Homo sapiens
  misc_RNA (1)...(19): siRNA sense strand
uauagaggaucaguuaaca

SEQ ID NO: 902046 - RNA, 19 nt, Homo sapiens
  misc_RNA (1)...(19): siRNA sense strand
gaaugauaauggcaaacca

SEQ ID NO: 902047 - RNA, 19 nt, Homo sapiens
  misc_RNA (1)...(19): siRNA sense strand
gaaacuucaaccaggauug

SEQ ID NO: 902048 - RNA, 19 nt, Homo sapiens
  misc_RNA (1)...(19): siRNA sense strand
aaauauccuugcuguuuca

SEQ ID NO: 902049 - RNA, 19 nt, Homo sapiens
  misc_RNA (1)...(19): siRNA sense strand
gaucguggagauuacuauu

SEQ ID NO: 902050 - RNA, 19 nt, Homo sapiens
  misc_RNA (1)...(19): siRNA sense strand
gaagaggauaucaaagaag

SEQ ID NO: 902051 - RNA, 19 nt, Homo sapiens
  misc_RNA (1)...(19): siRNA sense strand
ggaaggcuacagagacaau

SEQ ID NO: 902052 - RNA, 19 nt, Homo sapiens
  misc_RNA (1)...(19): siRNA sense strand
cuggagagcuucaucaaaa

SEQ ID NO: 902053 - RNA, 19 nt, Homo sapiens
  misc_RNA (1)...(19): siRNA sense strand
cugcauuuguuguugguaa

SEQ ID NO: 902054 - RNA, 19 nt, Homo sapiens
  misc_RNA (1)...(19): siRNA sense strand
ccaggauugucuuuucuua

SEQ ID NO: 902055 - RNA, 19 nt, Homo sapiens
  misc_RNA (1)...(19): siRNA sense strand
gcuacagagacaaugcuua

SEQ ID NO: 902056 - RNA, 19 nt, Homo sapiens
  misc_RNA (1)...(19): siRNA sense strand
caaccaggauugucuuuuc

SEQ ID NO: 902057 - RNA, 19 nt, Homo sapiens
  misc_RNA (1)...(19): siRNA sense strand
ucagcaccuugcauuuauu

SEQ ID NO: 902058 - RNA, 19 nt, Homo sapiens
  misc_RNA (1)...(19): siRNA sense strand
aauggaagaggauaucaaa

SEQ ID NO: 902059 - RNA, 19 nt, Homo sapiens
  misc_RNA (1)...(19): siRNA sense strand
agaaagaccaugaaaacua

SEQ ID NO: 902060 - RNA, 19 nt, Homo sapiens
  misc_RNA (1)...(19): siRNA sense strand
gaguacagaaagaccauga

SEQ ID NO: 902061 - RNA, 19 nt, Homo sapiens
  misc_RNA (1)...(19): siRNA sense strand
cagaugugguggaauaugc

SEQ ID NO: 902062 - RNA, 19 nt, Homo sapiens
  misc_RNA (1)...(19): siRNA sense strand
cugugaaccugcauuuguu

SEQ ID NO: 902063 - RNA, 19 nt, Homo sapiens
  misc_RNA (1)...(19): siRNA sense strand
gcaaccaaguaagaaugau

SEQ ID NO: 902064 - RNA, 19 nt, Homo sapiens
  misc_RNA (1)...(19): siRNA sense strand
cauauuagucaugccuaua

SEQ ID NO: 902065 - RNA, 19 nt, Homo sapiens
  misc_RNA (1)...(19): siRNA sense strand
acagagacaaugcuuacaa

SEQ ID NO: 902066 - RNA, 19 nt, Homo sapiens
  misc_RNA (1)...(19): siRNA sense strand
uaucaaagaagaggaggaa

SEQ ID NO: 902067 - RNA, 19 nt, Homo sapiens
  misc_RNA (1)...(19): siRNA sense strand
gcaccuugcauuuauucug

SEQ ID NO: 902068 - RNA, 19 nt, Homo sapiens
  misc_RNA (1)...(19): siRNA sense strand
uagaggaucaguuaacaca

SEQ ID NO: 902069 - RNA, 19 nt, Homo sapiens
  misc_RNA (1)...(19): siRNA sense strand
acuaaaaguuggaggcaua

SEQ ID NO: 902070 - RNA, 19 nt, Homo sapiens
  misc_RNA (1)...(19): siRNA sense strand
ucauucagaugugguggaa

SEQ ID NO: 902071 - RNA, 19 nt, Homo sapiens
  misc_RNA (1)...(19): siRNA sense strand
gauugagcuucauucagau

SEQ ID NO: 902072 - RNA, 19 nt, Homo sapiens
  misc_RNA (1)...(19): siRNA sense strand
aguggaaccggauauuuaa

SEQ ID NO: 902073 - RNA, 19 nt, Homo sapiens
  misc_RNA (1)...(19): siRNA sense strand
cugaaguuauggaagcauu

SEQ ID NO: 902074 - RNA, 19 nt, Homo sapiens
  misc_RNA (1)...(19): siRNA sense strand
gaucacaaugaagcaauga

SEQ ID NO: 902075 - RNA, 19 nt, Homo sapiens
  misc_RNA (1)...(19): siRNA sense strand
ccaaguaagaaugauaaug

SEQ ID NO: 902076 - RNA, 19 nt, Homo sapiens
  misc_RNA (1)...(19): siRNA sense strand
cuacagagacaaugcuuac

SEQ ID NO: 902077 - RNA, 19 nt, Homo sapiens
  misc_RNA (1)...(19): siRNA sense strand
aaaaguuggaggcauauua

SEQ ID NO: 902078 - RNA, 19 nt, Homo sapiens
  misc_RNA (1)...(19): siRNA sense strand
caaugcuuacaaagacuua

SEQ ID NO: 902079 - RNA, 19 nt, Homo sapiens
  misc_RNA (1)...(19): siRNA sense strand
gccccucccugaaucuuua

SEQ ID NO: 902080 - RNA, 19 nt, Homo sapiens
  misc_RNA (1)...(19): siRNA sense strand
aaagaagcucaguauauuc

SEQ ID NO: 902081 - RNA, 19 nt, Homo sapiens
  misc_RNA (1)...(19): siRNA sense strand
ucaguuaacacagauuaug

SEQ ID NO: 902082 - RNA, 19 nt, Homo sapiens
  misc_RNA (1)...(19): siRNA sense strand
guuggaggcauauuaguca

SEQ ID NO: 902083 - RNA, 19 nt, Homo sapiens
  misc_RNA (1)...(19): siRNA sense strand
uacaauggugggcuuaauu

SEQ ID NO: 902084 - RNA, 19 nt, Homo sapiens
  misc_RNA (1)...(19): siRNA sense strand
gaaccggauauuuaaguac

SEQ ID NO: 902085 - RNA, 19 nt, Homo sapiens
  misc_RNA (1)...(19): siRNA sense strand
uauggaagcauugaaacuu

SEQ ID NO: 902086 - RNA, 19 nt, Homo sapiens
  misc_RNA (1)...(19): siRNA sense strand
uacaggacuuggcucguau

SEQ ID NO: 902087 - RNA, 19 nt, Homo sapiens
  misc_RNA (1)...(19): siRNA sense strand
gacaaugcuuacaaagacu

SEQ ID NO: 902088 - RNA, 19 nt, Homo sapiens
  misc_RNA (1)...(19): siRNA sense strand
agucaugccuauagaggau

SEQ ID NO: 902089 - RNA, 19 nt, Homo sapiens
  misc_RNA (1)...(19): siRNA sense strand
aaaguuggaggcauauuag

SEQ ID NO: 902090 - RNA, 19 nt, Homo sapiens
  misc_RNA (1)...(19): siRNA sense strand
ggauauuuaaguacaaugg

SEQ ID NO: 902091 - RNA, 19 nt, Homo sapiens
  misc_RNA (1)...(19): siRNA sense strand
aaccggauauuuaaguaca

SEQ ID NO: 902092 - RNA, 19 nt, Homo sapiens
  misc_RNA (1)...(19): siRNA sense strand
uauuagucaugccuauaga

SEQ ID NO: 902093 - RNA, 19 nt, Homo sapiens
  misc_RNA (1)...(19): siRNA sense strand
uaacacuuacguauuugug

SEQ ID NO: 902094 - RNA, 19 nt, Homo sapiens
  misc_RNA (1)...(19): siRNA sense strand
acagagaauuaacacuuac

SEQ ID NO: 902095 - RNA, 19 nt, Homo sapiens
  misc_RNA (1)...(19): siRNA sense strand
gaacguggagcucaaguuu

SEQ ID NO: 902096 - RNA, 19 nt, Homo sapiens
  misc_RNA (1)...(19): siRNA sense strand
ccaccuggcugccuuguaa

SEQ ID NO: 902097 - RNA, 19 nt, Homo sapiens
  misc_RNA (1)...(19): siRNA sense strand
gcaagaacguggagcucaa

SEQ ID NO: 902098 - RNA, 19 nt, Homo sapiens
  misc_RNA (1)...(19): siRNA sense strand
gugguggccuccucaagua

SEQ ID NO: 902099 - RNA, 19 nt, Homo sapiens
  misc_RNA (1)...(19): siRNA sense strand
cagccacugucaauuacua

SEQ ID NO: 902100 - RNA, 19 nt, Homo sapiens
  misc_RNA (1)...(19): siRNA sense strand
ugcagaagcuggugaaagu

SEQ ID NO: 902101 - RNA, 19 nt, Homo sapiens
  misc_RNA (1)...(19): siRNA sense strand
gccaagaucacgccacuga

SEQ ID NO: 902102 - RNA, 19 nt, Homo sapiens
  misc_RNA (1)...(19): siRNA sense strand
gcgagccgauucccauuca

SEQ ID NO: 902103 - RNA, 19 nt, Homo sapiens
  misc_RNA (1)...(19): siRNA sense strand
cgacuggacgcucuucuga

SEQ ID NO: 902104 - RNA, 19 nt, Homo sapiens
  misc_RNA (1)...(19): siRNA sense strand
gugcuggccugccuacuag

SEQ ID NO: 902105 - RNA, 19 nt, Homo sapiens
  misc_RNA (1)...(19): siRNA sense strand
ugccagccacugucaauua

SEQ ID NO: 902106 - RNA, 19 nt, Homo sapiens
  misc_RNA (1)...(19): siRNA sense strand
gacuacaugugcacagugu

SEQ ID NO: 902107 - RNA, 19 nt, Homo sapiens
  misc_RNA (1)...(19): siRNA sense strand
ggugcuggccugccuacua

SEQ ID NO: 902108 - RNA, 19 nt, Homo sapiens
  misc_RNA (1)...(19): siRNA sense strand
caagaucacgccacugaca

SEQ ID NO: 902109 - RNA, 19 nt, Homo sapiens
  misc_RNA (1)...(19): siRNA sense strand
ucaucucacuguccaacaa

SEQ ID NO: 902110 - RNA, 19 nt, Homo sapiens
  misc_RNA (1)...(19): siRNA sense strand
ucacgccacugacacucaa

SEQ ID NO: 902111 - RNA, 19 nt, Homo sapiens
  misc_RNA (1)...(19): siRNA sense strand
ccaguuugaauucagcaua

SEQ ID NO: 902112 - RNA, 19 nt, Homo sapiens
  misc_RNA (1)...(19): siRNA sense strand
caacaagagcggcaagaac

SEQ ID NO: 902113 - RNA, 19 nt, Homo sapiens
  misc_RNA (1)...(19): siRNA sense strand
gcauagacuccuuccagau

SEQ ID NO: 902114 - RNA, 19 nt, Homo sapiens
  misc_RNA (1)...(19): siRNA sense strand
acguggagcucaaguuugu

SEQ ID NO: 902115 - RNA, 19 nt, Homo sapiens
  misc_RNA (1)...(19): siRNA sense strand
ucuccuggcucacgccuau

SEQ ID NO: 902116 - RNA, 19 nt, Homo sapiens
  misc_RNA (1)...(19): siRNA sense strand
gugaaagugugcacagacu

SEQ ID NO: 902117 - RNA, 19 nt, Homo sapiens
  misc_RNA (1)...(19): siRNA sense strand
cauagacuccuuccagauc

SEQ ID NO: 902118 - RNA, 19 nt, Homo sapiens
  misc_RNA (1)...(19): siRNA sense strand
caguuugaauucagcauag

SEQ ID NO: 902119 - RNA, 19 nt, Homo sapiens
  misc_RNA (1)...(19): siRNA sense strand
ugagacgccaguuugaauu

SEQ ID NO: 902120 - RNA, 19 nt, Homo sapiens
  misc_RNA (1)...(19): siRNA sense strand
gcuggagccucaucucacu

SEQ ID NO: 902121 - RNA, 19 nt, Homo sapiens
  misc_RNA (1)...(19): siRNA sense strand
gagacgccaguuugaauuc

SEQ ID NO: 902122 - RNA, 19 nt, Homo sapiens
  misc_RNA (1)...(19): siRNA sense strand
gccagccacugucaauuac

SEQ ID NO: 902123 - RNA, 19 nt, Homo sapiens
  misc_RNA (1)...(19): siRNA sense strand
gagcgagccgauucccauu

SEQ ID NO: 902124 - RNA, 19 nt, Homo sapiens
  misc_RNA (1)...(19): siRNA sense strand
gugagacgccaguuugaau

SEQ ID NO: 902125 - RNA, 19 nt, Homo sapiens
  misc_RNA (1)...(19): siRNA sense strand
gaggagcagggacuacaug

SEQ ID NO: 902126 - RNA, 19 nt, Homo sapiens
  misc_RNA (1)...(19): siRNA sense strand
ccaacaagagcggcaagaa

SEQ ID NO: 902127 - RNA, 19 nt, Homo sapiens
  misc_RNA (1)...(19): siRNA sense strand
ggugagacgccaguuugaa

SEQ ID NO: 902128 - RNA, 19 nt, Homo sapiens
  misc_RNA (1)...(19): siRNA sense strand
ggugguggccuccucaagu

SEQ ID NO: 902129 - RNA, 19 nt, Homo sapiens
  misc_RNA (1)...(19): siRNA sense strand
cauccuggacucccuguug

SEQ ID NO: 902130 - RNA, 19 nt, Homo sapiens
  misc_RNA (1)...(19): siRNA sense strand
agaguggccugggcuacaa

SEQ ID NO: 902131 - RNA, 19 nt, Homo sapiens
  misc_RNA (1)...(19): siRNA sense strand
gggacuacaugugcacagu

SEQ ID NO: 902132 - RNA, 19 nt, Homo sapiens
  misc_RNA (1)...(19): siRNA sense strand
gcagugaggcauccuucca

SEQ ID NO: 902133 - RNA, 19 nt, Homo sapiens
  misc_RNA (1)...(19): siRNA sense strand
cuggcugccuuguaacuga

SEQ ID NO: 902134 - RNA, 19 nt, Homo sapiens
  misc_RNA (1)...(19): siRNA sense strand
cagaagcuggugaaagugu

SEQ ID NO: 902135 - RNA, 19 nt, Homo sapiens
  misc_RNA (1)...(19): siRNA sense strand
caugugcucccgcuucuuc

SEQ ID NO: 902136 - RNA, 19 nt, Homo sapiens
  misc_RNA (1)...(19): siRNA sense strand
gagaguggccugggcuaca

SEQ ID NO: 902137 - RNA, 19 nt, Homo sapiens
  misc_RNA (1)...(19): siRNA sense strand
auagacuccuuccagauca

SEQ ID NO: 902138 - RNA, 19 nt, Homo sapiens
  misc_RNA (1)...(19): siRNA sense strand
cguccacucccaugucuga

SEQ ID NO: 902139 - RNA, 19 nt, Homo sapiens
  misc_RNA (1)...(19): siRNA sense strand
ggagcagggacuacaugug

SEQ ID NO: 902140 - RNA, 19 nt, Homo sapiens
  misc_RNA (1)...(19): siRNA sense strand
ggacucccuguugcucuuu

SEQ ID NO: 902141 - RNA, 19 nt, Homo sapiens
  misc_RNA (1)...(19): siRNA sense strand
aggcauacgugcagaagcu

SEQ ID NO: 902142 - RNA, 19 nt, Homo sapiens
  misc_RNA (1)...(19): siRNA sense strand
agacgccaguuugaauuca

SEQ ID NO: 902143 - RNA, 19 nt, Homo sapiens
  misc_RNA (1)...(19): siRNA sense strand
ggaagaaacugcaauuuua

SEQ ID NO: 902144 - RNA, 19 nt, Homo sapiens
  misc_RNA (1)...(19): siRNA sense strand
gaaaaucacuugacaauga

SEQ ID NO: 902145 - RNA, 19 nt, Homo sapiens
  misc_RNA (1)...(19): siRNA sense strand
gaagaaggauggugguuug

SEQ ID NO: 902146 - RNA, 19 nt, Homo sapiens
  misc_RNA (1)...(19): siRNA sense strand
guagaaagcuccaagcaau

SEQ ID NO: 902147 - RNA, 19 nt, Homo sapiens
  misc_RNA (1)...(19): siRNA sense strand
gcaauaacuuaaaccagua

SEQ ID NO: 902148 - RNA, 19 nt, Homo sapiens
  misc_RNA (1)...(19): siRNA sense strand
gaaagacacagcagcguua

SEQ ID NO: 902149 - RNA, 19 nt, Homo sapiens
  misc_RNA (1)...(19): siRNA sense strand
cagcaaaucuugucauuag

SEQ ID NO: 902150 - RNA, 19 nt, Homo sapiens
  misc_RNA (1)...(19): siRNA sense strand
caagaaacaugaagcacuu

SEQ ID NO: 902151 - RNA, 19 nt, Homo sapiens
  misc_RNA (1)...(19): siRNA sense strand
gcaaagagccagaaagaca

SEQ ID NO: 902152 - RNA, 19 nt, Homo sapiens
  misc_RNA (1)...(19): siRNA sense strand
caaacugucaucaauguua

SEQ ID NO: 902153 - RNA, 19 nt, Homo sapiens
  misc_RNA (1)...(19): siRNA sense strand
caacuggaaucagcaaauu

SEQ ID NO: 902154 - RNA, 19 nt, Homo sapiens
  misc_RNA (1)...(19): siRNA sense strand
gagaacaauuugaaacuag

SEQ ID NO: 902155 - RNA, 19 nt, Homo sapiens
  misc_RNA (1)...(19): siRNA sense strand
gaagcgaacuccuacaaac

SEQ ID NO: 902156 - RNA, 19 nt, Homo sapiens
  misc_RNA (1)...(19): siRNA sense strand
ugaagaagauccuaacagu

SEQ ID NO: 902157 - RNA, 19 nt, Homo sapiens
  misc_RNA (1)...(19): siRNA sense strand
ucagcaagauugacauuga

SEQ ID NO: 902158 - RNA, 19 nt, Homo sapiens
  misc_RNA (1)...(19): siRNA sense strand
uagcagaacuugagcaaag

SEQ ID NO: 902159 - RNA, 19 nt, Homo sapiens
  misc_RNA (1)...(19): siRNA sense strand
ggaguuaccuucaaaugcu

SEQ ID NO: 902160 - RNA, 19 nt, Homo sapiens
  misc_RNA (1)...(19): siRNA sense strand
guuaacggauuacuuugaa

SEQ ID NO: 902161 - RNA, 19 nt, Homo sapiens
  misc_RNA (1)...(19): siRNA sense strand
gaaggauggugguuuggau

SEQ ID NO: 902162 - RNA, 19 nt, Homo sapiens
  misc_RNA (1)...(19): siRNA sense strand
agcggaagcuccucaauaa

SEQ ID NO: 902163 - RNA, 19 nt, Homo sapiens
  misc_RNA (1)...(19): siRNA sense strand
gaugaugaguugaauuugg

SEQ ID NO: 902164 - RNA, 19 nt, Homo sapiens
  misc_RNA (1)...(19): siRNA sense strand
gccaaacccugaccacaug

SEQ ID NO: 902165 - RNA, 19 nt, Homo sapiens
  misc_RNA (1)...(19): siRNA sense strand
gcaagaugaugaguugaau

SEQ ID NO: 902166 - RNA, 19 nt, Homo sapiens
  misc_RNA (1)...(19): siRNA sense strand
gauggugguuuggaucuuu

SEQ ID NO: 902167 - RNA, 19 nt, Homo sapiens
  misc_RNA (1)...(19): siRNA sense strand
caaauuaaggccaagaaga

SEQ ID NO: 902168 - RNA, 19 nt, Homo sapiens
  misc_RNA (1)...(19): siRNA sense strand
caggcaagaugaugaguug

SEQ ID NO: 902169 - RNA, 19 nt, Homo sapiens
  misc_RNA (1)...(19): siRNA sense strand
caaaucugaguuccuguua

SEQ ID NO: 902170 - RNA, 19 nt, Homo sapiens
  misc_RNA (1)...(19): siRNA sense strand
caguacagccaacauauuu

SEQ ID NO: 902171 - RNA, 19 nt, Homo sapiens
  misc_RNA (1)...(19): siRNA sense strand
uagagaauauugugagcaa

SEQ ID NO: 902172 - RNA, 19 nt, Homo sapiens
  misc_RNA (1)...(19): siRNA sense strand
ggagcauacucauagcuau

SEQ ID NO: 902173 - RNA, 19 nt, Homo sapiens
  misc_RNA (1)...(19): siRNA sense strand
caacccagccauccuugua

SEQ ID NO: 902174 - RNA, 19 nt, Homo sapiens
  misc_RNA (1)...(19): siRNA sense strand
cagcagcguuaauggauga

SEQ ID NO: 902175 - RNA, 19 nt, Homo sapiens
  misc_RNA (1)...(19): siRNA sense strand
gaaggaaagaauucaacuu

SEQ ID NO: 902176 - RNA, 19 nt, Homo sapiens
  misc_RNA (1)...(19): siRNA sense strand
ggaaaagggugacauugug

SEQ ID NO: 902177 - RNA, 19 nt, Homo sapiens
  misc_RNA (1)...(19): siRNA sense strand
gaaaaggagcauacucaua

SEQ ID NO: 902178 - RNA, 19 nt, Homo sapiens
  misc_RNA (1)...(19): siRNA sense strand
ccuacaaacugucaucaau

SEQ ID NO: 902179 - RNA, 19 nt, Homo sapiens
  misc_RNA (1)...(19): siRNA sense strand
cagcaagauugacauugaa

SEQ ID NO: 902180 - RNA, 19 nt, Homo sapiens
  misc_RNA (1)...(19): siRNA sense strand
ggaagcuccucaauaaacu

SEQ ID NO: 902181 - RNA, 19 nt, Homo sapiens
  misc_RNA (1)...(19): siRNA sense strand
guuaauggaugagaacaau

SEQ ID NO: 902182 - RNA, 19 nt, Homo sapiens
  misc_RNA (1)...(19): siRNA sense strand
aaauuaaggccaagaagaa

SEQ ID NO: 902183 - RNA, 19 nt, Homo sapiens
  misc_RNA (1)...(19): siRNA sense strand
gcagagcaauccagguucu

SEQ ID NO: 902184 - RNA, 19 nt, Homo sapiens
  misc_RNA (1)...(19): siRNA sense strand
uacaaacugucaucaaugu

SEQ ID NO: 902185 - RNA, 19 nt, Homo sapiens
  misc_RNA (1)...(19): siRNA sense strand
ggaagcgaacuccuacaaa

SEQ ID NO: 902186 - RNA, 19 nt, Homo sapiens
  misc_RNA (1)...(19): siRNA sense strand
ggauuacuuugaagaagau

SEQ ID NO: 902187 - RNA, 19 nt, Homo sapiens
  misc_RNA (1)...(19): siRNA sense strand
aaagauauccaggcuguaa

SEQ ID NO: 902188 - RNA, 19 nt, Homo sapiens
  misc_RNA (1)...(19): siRNA sense strand
acagugcaauggauaaaga

SEQ ID NO: 902189 - RNA, 19 nt, Homo sapiens
  misc_RNA (1)...(19): siRNA sense strand
cagcucagcagcagacuuu

SEQ ID NO: 902190 - RNA, 19 nt, Homo sapiens
  misc_RNA (1)...(19): siRNA sense strand
gggcagagcaauccagguu

SEQ ID NO: 902191 - RNA, 19 nt, Homo sapiens
  misc_RNA (1)...(19): siRNA sense strand
cggauuacuuugaagaaga

SEQ ID NO: 902192 - RNA, 19 nt, Homo sapiens
  misc_RNA (1)...(19): siRNA sense strand
gaaacuagaccuuuuggaa

SEQ ID NO: 902193 - RNA, 19 nt, Homo sapiens
  misc_RNA (1)...(19): siRNA sense strand
caaaucuugucauuagcaa

SEQ ID NO: 902194 - RNA, 19 nt, Homo sapiens
  misc_RNA (1)...(19): siRNA sense strand
ccgcuuauguggaggaguu

SEQ ID NO: 902195 - RNA, 19 nt, Homo sapiens
  misc_RNA (1)...(19): siRNA sense strand
gagauuagagaauauugug

SEQ ID NO: 902196 - RNA, 19 nt, Homo sapiens
  misc_RNA (1)...(19): siRNA sense strand
uacaagagaagaagagaaa

SEQ ID NO: 902197 - RNA, 19 nt, Homo sapiens
  misc_RNA (1)...(19): siRNA sense strand
ccuguuaacggauuacuuu

SEQ ID NO: 902198 - RNA, 19 nt, Homo sapiens
  misc_RNA (1)...(19): siRNA sense strand
gauaaagagagacgaaagu

SEQ ID NO: 902199 - RNA, 19 nt, Homo sapiens
  misc_RNA (1)...(19): siRNA sense strand
aaacauggcggguuauucu

SEQ ID NO: 902200 - RNA, 19 nt, Homo sapiens
  misc_RNA (1)...(19): siRNA sense strand
gaacuccuacaaacuguca

SEQ ID NO: 902201 - RNA, 19 nt, Homo sapiens
  misc_RNA (1)...(19): siRNA sense strand
cagauucacugugccauca

SEQ ID NO: 902202 - RNA, 19 nt, Homo sapiens
  misc_RNA (1)...(19): siRNA sense strand
gcaacuggaaucagcaaau

SEQ ID NO: 902203 - RNA, 19 nt, Homo sapiens
  misc_RNA (1)...(19): siRNA sense strand
uggaggaguuaccuucaaa

SEQ ID NO: 902204 - RNA, 19 nt, Homo sapiens
  misc_RNA (1)...(19): siRNA sense strand
cagcggaccugcaucaaaa

SEQ ID NO: 902205 - RNA, 19 nt, Homo sapiens
  misc_RNA (1)...(19): siRNA sense strand
ggagaaggaaagaauucaa

SEQ ID NO: 902206 - RNA, 19 nt, Homo sapiens
  misc_RNA (1)...(19): siRNA sense strand
gcaaaucuugucauuagca

SEQ ID NO: 902207 - RNA, 19 nt, Homo sapiens
  misc_RNA (1)...(19): siRNA sense strand
ggaaaaggaagaugaaaau

SEQ ID NO: 902208 - RNA, 19 nt, Homo sapiens
  misc_RNA (1)...(19): siRNA sense strand
aagcggaagcuccucaaua

SEQ ID NO: 902209 - RNA, 19 nt, Homo sapiens
  misc_RNA (1)...(19): siRNA sense strand
uaacggauuacuuugaaga

SEQ ID NO: 902210 - RNA, 19 nt, Homo sapiens
  misc_RNA (1)...(19): siRNA sense strand
ggaugagaacaauuugaaa

SEQ ID NO: 902211 - RNA, 19 nt, Homo sapiens
  misc_RNA (1)...(19): siRNA sense strand
ccaagcaaucuaugacuga

SEQ ID NO: 902212 - RNA, 19 nt, Homo sapiens
  misc_RNA (1)...(19): siRNA sense strand
gaggaguuaccuucaaaug

SEQ ID NO: 902213 - RNA, 19 nt, Homo sapiens
  misc_RNA (1)...(19): siRNA sense strand
cuuaucaaguccuaaaugu

SEQ ID NO: 902214 - RNA, 19 nt, Homo sapiens
  misc_RNA (1)...(19): siRNA sense strand
ggccuggaacgaaugcuua

SEQ ID NO: 902215 - RNA, 19 nt, Homo sapiens
  misc_RNA (1)...(19): siRNA sense strand
aaaucugaguuccuguuaa

SEQ ID NO: 902216 - RNA, 19 nt, Homo sapiens
  misc_RNA (1)...(19): siRNA sense strand
uaucaaguccuaaauguac

SEQ ID NO: 902217 - RNA, 19 nt, Homo sapiens
  misc_RNA (1)...(19): siRNA sense strand
aaacugucaucaauguuag

SEQ ID NO: 902218 - RNA, 19 nt, Homo sapiens
  misc_RNA (1)...(19): siRNA sense strand
aaacuuggcaaagcaauug

SEQ ID NO: 902219 - RNA, 19 nt, Homo sapiens
  misc_RNA (1)...(19): siRNA sense strand
cagcguuaauggaugagaa

SEQ ID NO: 902220 - RNA, 19 nt, Homo sapiens
  misc_RNA (1)...(19): siRNA sense strand
ccaguacagccaacauauu

SEQ ID NO: 902221 - RNA, 19 nt, Homo sapiens
  misc_RNA (1)...(19): siRNA sense strand
guacaagagaagaagagaa

SEQ ID NO: 902222 - RNA, 19 nt, Homo sapiens
  misc_RNA (1)...(19): siRNA sense strand
gcgaacuccuacaaacugu

SEQ ID NO: 902223 - RNA, 19 nt, Homo sapiens
  misc_RNA (1)...(19): siRNA sense strand
gagaaaaucacuugacaau

SEQ ID NO: 902224 - RNA, 19 nt, Homo sapiens
  misc_RNA (1)...(19): siRNA sense strand
gaaagcuccaagcaaucua

SEQ ID NO: 902225 - RNA, 19 nt, Homo sapiens
  misc_RNA (1)...(19): siRNA sense strand
acacagcuacaaaggcaua

SEQ ID NO: 902226 - RNA, 19 nt, Homo sapiens
  misc_RNA (1)...(19): siRNA sense strand
ggcaagaugaugaguugaa

SEQ ID NO: 902227 - RNA, 19 nt, Homo sapiens
  misc_RNA (1)...(19): siRNA sense strand
gaugagaacaauuugaaac

SEQ ID NO: 902228 - RNA, 19 nt, Homo sapiens
  misc_RNA (1)...(19): siRNA sense strand
uauugagacugcagagaga

SEQ ID NO: 902229 - RNA, 19 nt, Homo sapiens
  misc_RNA (1)...(19): siRNA sense strand
ggauaaagagagacgaaag

SEQ ID NO: 902230 - RNA, 19 nt, Homo sapiens
  misc_RNA (1)...(19): siRNA sense strand
uaacagugcaauggauaaa

SEQ ID NO: 902231 - RNA, 19 nt, Homo sapiens
  misc_RNA (1)...(19): siRNA sense strand
gaguuccuguuaacggauu

SEQ ID NO: 902232 - RNA, 19 nt, Homo sapiens
  misc_RNA (1)...(19): siRNA sense strand
gccaacauauuucucuuuu

SEQ ID NO: 902233 - RNA, 19 nt, Homo sapiens
  misc_RNA (1)...(19): siRNA sense strand
ccacagcggaccugcauca

SEQ ID NO: 902234 - RNA, 19 nt, Homo sapiens
  misc_RNA (1)...(19): siRNA sense strand
guggaggaguuaccuucaa

SEQ ID NO: 902235 - RNA, 19 nt, Homo sapiens
  misc_RNA (1)...(19): siRNA sense strand
agggugacauugugauuau

SEQ ID NO: 902236 - RNA, 19 nt, Homo sapiens
  misc_RNA (1)...(19): siRNA sense strand
agacacagcagcguuaaug

SEQ ID NO: 902237 - RNA, 19 nt, Homo sapiens
  misc_RNA (1)...(19): siRNA sense strand
gcaccuccuccuucucuga

SEQ ID NO: 902238 - RNA, 19 nt, Homo sapiens
  misc_RNA (1)...(19): siRNA sense strand
ugcaauggauaaagagaga

SEQ ID NO: 902239 - RNA, 19 nt, Homo sapiens
  misc_RNA (1)...(19): siRNA sense strand
gggugacauugugauuaua

SEQ ID NO: 902240 - RNA, 19 nt, Homo sapiens
  misc_RNA (1)...(19): siRNA sense strand
uguaguaauuccaucuuca

SEQ ID NO: 902241 - RNA, 19 nt, Homo sapiens
  misc_RNA (1)...(19): siRNA sense strand
caagaugaugaguugaauu

SEQ ID NO: 902242 - RNA, 19 nt, Homo sapiens
  misc_RNA (1)...(19): siRNA sense strand
gcaaauuaaggccaagaag

SEQ ID NO: 902243 - RNA, 19 nt, Homo sapiens
  misc_RNA (1)...(19): siRNA sense strand
gaaauuugcucuguagaua

SEQ ID NO: 902244 - RNA, 19 nt, Homo sapiens
  misc_RNA (1)...(19): siRNA sense strand
gcaacaagcugaagauuau

SEQ ID NO: 902245 - RNA, 19 nt, Homo sapiens
  misc_RNA (1)...(19): siRNA sense strand
caacauaccugacaauuuc

SEQ ID NO: 902246 - RNA, 19 nt, Homo sapiens
  misc_RNA (1)...(19): siRNA sense strand
aggaagagcuccaguauua

SEQ ID NO: 902247 - RNA, 19 nt, Homo sapiens
  misc_RNA (1)...(19): siRNA sense strand
ggacaaagcagaauugauu

SEQ ID NO: 902248 - RNA, 19 nt, Homo sapiens
  misc_RNA (1)...(19): siRNA sense strand
gaacucagccuuucuuaaa

SEQ ID NO: 902249 - RNA, 19 nt, Homo sapiens
  misc_RNA (1)...(19): siRNA sense strand
gcgaagaccuuggcauuua

SEQ ID NO: 902250 - RNA, 19 nt, Homo sapiens
  misc_RNA (1)...(19): siRNA sense strand
agacagagauggcaacaua

SEQ ID NO: 902251 - RNA, 19 nt, Homo sapiens
  misc_RNA (1)...(19): siRNA sense strand
ggaagagucuaaagaauau

SEQ ID NO: 902252 - RNA, 19 nt, Homo sapiens
  misc_RNA (1)...(19): siRNA sense strand
gaacaauccuuuagugcaa

SEQ ID NO: 902253 - RNA, 19 nt, Homo sapiens
  misc_RNA (1)...(19): siRNA sense strand
aaacacagcuccuuucuuc

SEQ ID NO: 902254 - RNA, 19 nt, Homo sapiens
  misc_RNA (1)...(19): siRNA sense strand
uaaaggaugugaagagauu

SEQ ID NO: 902255 - RNA, 19 nt, Homo sapiens
  misc_RNA (1)...(19): siRNA sense strand
ggagaggguuucugcagua

SEQ ID NO: 902256 - RNA, 19 nt, Homo sapiens
  misc_RNA (1)...(19): siRNA sense strand
ggaaggcuuuggagaagua

SEQ ID NO: 902257 - RNA, 19 nt, Homo sapiens
  misc_RNA (1)...(19): siRNA sense strand
gaauauagaccuggaaauu

SEQ ID NO: 902258 - RNA, 19 nt, Homo sapiens
  misc_RNA (1)...(19): siRNA sense strand
caacuccacuguuuccuuu

SEQ ID NO: 902259 - RNA, 19 nt, Homo sapiens
  misc_RNA (1)...(19): siRNA sense strand
ggagaagccaacaacauua

SEQ ID NO: 902260 - RNA, 19 nt, Homo sapiens
  misc_RNA (1)...(19): siRNA sense strand
cgaaggcggugaaagaauu

SEQ ID NO: 902261 - RNA, 19 nt, Homo sapiens
  misc_RNA (1)...(19): siRNA sense strand
caacaacauuaacugcuaa

SEQ ID NO: 902262 - RNA, 19 nt, Homo sapiens
  misc_RNA (1)...(19): siRNA sense strand
caagaaagaggaagugaaa

SEQ ID NO: 902263 - RNA, 19 nt, Homo sapiens
  misc_RNA (1)...(19): siRNA sense strand
caaacucgcugcccaggaa

SEQ ID NO: 902264 - RNA, 19 nt, Homo sapiens
  misc_RNA (1)...(19): siRNA sense strand
caagaaauuugcucuguag

SEQ ID NO: 902265 - RNA, 19 nt, Homo sapiens
  misc_RNA (1)...(19): siRNA sense strand
gaggguuucugcaguaauu

SEQ ID NO: 902266 - RNA, 19 nt, Homo sapiens
  misc_RNA (1)...(19): siRNA sense strand
ggaucacacugccuucuuu

SEQ ID NO: 902267 - RNA, 19 nt, Homo sapiens
  misc_RNA (1)...(19): siRNA sense strand
gcaacauaccugacaauuu

SEQ ID NO: 902268 - RNA, 19 nt, Homo sapiens
  misc_RNA (1)...(19): siRNA sense strand
ggagcugauuggagaauuu

SEQ ID NO: 902269 - RNA, 19 nt, Homo sapiens
  misc_RNA (1)...(19): siRNA sense strand
ugaacacucuggaaaugua

SEQ ID NO: 902270 - RNA, 19 nt, Homo sapiens
  misc_RNA (1)...(19): siRNA sense strand
gaaggaagagcuccaguau

SEQ ID NO: 902271 - RNA, 19 nt, Homo sapiens
  misc_RNA (1)...(19): siRNA sense strand
ccaacaacauuaacugcua

SEQ ID NO: 902272 - RNA, 19 nt, Homo sapiens
  misc_RNA (1)...(19): siRNA sense strand
gauaaccugucuggagaua

SEQ ID NO: 902273 - RNA, 19 nt, Homo sapiens
  misc_RNA (1)...(19): siRNA sense strand
aaaggcaacuguuccauga

SEQ ID NO: 902274 - RNA, 19 nt, Homo sapiens
  misc_RNA (1)...(19): siRNA sense strand
aaauagaggugcuucaaau

SEQ ID NO: 902275 - RNA, 19 nt, Homo sapiens
  misc_RNA (1)...(19): siRNA sense strand
ugaagagaauuuccaagaa

SEQ ID NO: 902276 - RNA, 19 nt, Homo sapiens
  misc_RNA (1)...(19): siRNA sense strand
ggacagagaagcagugugu

SEQ ID NO: 902277 - RNA, 19 nt, Homo sapiens
  misc_RNA (1)...(19): siRNA sense strand
ccucaugccugucuucaaa

SEQ ID NO: 902278 - RNA, 19 nt, Homo sapiens
  misc_RNA (1)...(19): siRNA sense strand
uaccauagauucucuuguu

SEQ ID NO: 902279 - RNA, 19 nt, Homo sapiens
  misc_RNA (1)...(19): siRNA sense strand
gcagccagaugccagcuuu

SEQ ID NO: 902280 - RNA, 19 nt, Homo sapiens
  misc_RNA (1)...(19): siRNA sense strand
caaacucuaugacaguaaa

SEQ ID NO: 902281 - RNA, 19 nt, Homo sapiens
  misc_RNA (1)...(19): siRNA sense strand
cagaggaggucaagaggaa

SEQ ID NO: 902282 - RNA, 19 nt, Homo sapiens
  misc_RNA (1)...(19): siRNA sense strand
ucaagaaauuugcucugua

SEQ ID NO: 902283 - RNA, 19 nt, Homo sapiens
  misc_RNA (1)...(19): siRNA sense strand
gggaagaccuaaaauauga

SEQ ID NO: 902284 - RNA, 19 nt, Homo sapiens
  misc_RNA (1)...(19): siRNA sense strand
agaaguaccugagaucauu

SEQ ID NO: 902285 - RNA, 19 nt, Homo sapiens
  misc_RNA (1)...(19): siRNA sense strand
ccagaaagcgucaguaugu

SEQ ID NO: 902286 - RNA, 19 nt, Homo sapiens
  misc_RNA (1)...(19): siRNA sense strand
ccaaguggauguagcauag

SEQ ID NO: 902287 - RNA, 19 nt, Homo sapiens
  misc_RNA (1)...(19): siRNA sense strand
gaaaaggaguuaucuguca

SEQ ID NO: 902288 - RNA, 19 nt, Homo sapiens
  misc_RNA (1)...(19): siRNA sense strand
gcaccugauuuccaacaaa

SEQ ID NO: 902289 - RNA, 19 nt, Homo sapiens
  misc_RNA (1)...(19): siRNA sense strand
ggacagagcagacuuuagg

SEQ ID NO: 902290 - RNA, 19 nt, Homo sapiens
  misc_RNA (1)...(19): siRNA sense strand
gaccuucauugaucaguuu

SEQ ID NO: 902291 - RNA, 19 nt, Homo sapiens
  misc_RNA (1)...(19): siRNA sense strand
gggagaagccaacaacauu

SEQ ID NO: 902292 - RNA, 19 nt, Homo sapiens
  misc_RNA (1)...(19): siRNA sense strand
ggccaugccugugugcuua

SEQ ID NO: 902293 - RNA, 19 nt, Homo sapiens
  misc_RNA (1)...(19): siRNA sense strand
aaaagugacugcugaauuu

SEQ ID NO: 902294 - RNA, 19 nt, Homo sapiens
  misc_RNA (1)...(19): siRNA sense strand
gagcagacuuuaggagcua

SEQ ID NO: 902295 - RNA, 19 nt, Homo sapiens
  misc_RNA (1)...(19): siRNA sense strand
cagagagacuguuaccauu

SEQ ID NO: 902296 - RNA, 19 nt, Homo sapiens
  misc_RNA (1)...(19): siRNA sense strand
gagaagccaacaacauuaa

SEQ ID NO: 902297 - RNA, 19 nt, Homo sapiens
  misc_RNA (1)...(19): siRNA sense strand
ggcaacaagcugaagauua

SEQ ID NO: 902298 - RNA, 19 nt, Homo sapiens
  misc_RNA (1)...(19): siRNA sense strand
gagcagagcaucucagaag

SEQ ID NO: 902299 - RNA, 19 nt, Homo sapiens
  misc_RNA (1)...(19): siRNA sense strand
gaaacaucauuaucacaca

SEQ ID NO: 902300 - RNA, 19 nt, Homo sapiens
  misc_RNA (1)...(19): siRNA sense strand
caaacucgaaacaucauua

SEQ ID NO: 902301 - RNA, 19 nt, Homo sapiens
  misc_RNA (1)...(19): siRNA sense strand
gaacgugaguuagagaaag

SEQ ID NO: 902302 - RNA, 19 nt, Homo sapiens
  misc_RNA (1)...(19): siRNA sense strand
gaaaauagaaucagcagaa

SEQ ID NO: 902303 - RNA, 19 nt, Homo sapiens
  misc_RNA (1)...(19): siRNA sense strand
caaauaccuugcuguguca

SEQ ID NO: 902304 - RNA, 19 nt, Homo sapiens
  misc_RNA (1)...(19): siRNA sense strand
cagcugaaguucucaaaca

SEQ ID NO: 902305 - RNA, 19 nt, Homo sapiens
  misc_RNA (1)...(19): siRNA sense strand
ggaaaccuuugcccucuuc

SEQ ID NO: 902306 - RNA, 19 nt, Homo sapiens
  misc_RNA (1)...(19): siRNA sense strand
uggaagagucuaaagaaua

SEQ ID NO: 902307 - RNA, 19 nt, Homo sapiens
  misc_RNA (1)...(19): siRNA sense strand
ccugagaucauuccuauuu

SEQ ID NO: 902308 - RNA, 19 nt, Homo sapiens
  misc_RNA (1)...(19): siRNA sense strand
cacgacaacugacaaauuc

SEQ ID NO: 902309 - RNA, 19 nt, Homo sapiens
  misc_RNA (1)...(19): siRNA sense strand
ugagaacaauccuuuagug

SEQ ID NO: 902310 - RNA, 19 nt, Homo sapiens
  misc_RNA (1)...(19): siRNA sense strand
acauuuagcugagggagua

SEQ ID NO: 902311 - RNA, 19 nt, Homo sapiens
  misc_RNA (1)...(19): siRNA sense strand
caguauguguuuccuguuu

SEQ ID NO: 902312 - RNA, 19 nt, Homo sapiens
  misc_RNA (1)...(19): siRNA sense strand
ccaauuuccuucccaagug

SEQ ID NO: 902313 - RNA, 19 nt, Homo sapiens
  misc_RNA (1)...(19): siRNA sense strand
gaucacacugccuucuuua

SEQ ID NO: 902314 - RNA, 19 nt, Homo sapiens
  misc_RNA (1)...(19): siRNA sense strand
gguauuaugccaagaucua

SEQ ID NO: 902315 - RNA, 19 nt, Homo sapiens
  misc_RNA (1)...(19): siRNA sense strand
uagcauaggccaaauacaa

SEQ ID NO: 902316 - RNA, 19 nt, Homo sapiens
  misc_RNA (1)...(19): siRNA sense strand
agauaagugugauagagua

SEQ ID NO: 902317 - RNA, 19 nt, Homo sapiens
  misc_RNA (1)...(19): siRNA sense strand
gaugaaacacagcuccuuu

SEQ ID NO: 902318 - RNA, 19 nt, Homo sapiens
  misc_RNA (1)...(19): siRNA sense strand
ggaaugcuauguucaaaau

SEQ ID NO: 902319 - RNA, 19 nt, Homo sapiens
  misc_RNA (1)...(19): siRNA sense strand
cgaagaccuuggcauuuau

SEQ ID NO: 902320 - RNA, 19 nt, Homo sapiens
  misc_RNA (1)...(19): siRNA sense strand
cuaguugucuuccaauaau

SEQ ID NO: 902321 - RNA, 19 nt, Homo sapiens
  misc_RNA (1)...(19): siRNA sense strand
gaaacuggagggaaggaaa

SEQ ID NO: 902322 - RNA, 19 nt, Homo sapiens
  misc_RNA (1)...(19): siRNA sense strand
ccacgacaacugacaaauu

SEQ ID NO: 902323 - RNA, 19 nt, Homo sapiens
  misc_RNA (1)...(19): siRNA sense strand
gaaagaggaagugaaacaa

SEQ ID NO: 902324 - RNA, 19 nt, Homo sapiens
  misc_RNA (1)...(19): siRNA sense strand
gagaggguuucugcaguaa

SEQ ID NO: 902325 - RNA, 19 nt, Homo sapiens
  misc_RNA (1)...(19): siRNA sense strand
acacacagcuagugaaggu

SEQ ID NO: 902326 - RNA, 19 nt, Homo sapiens
  misc_RNA (1)...(19): siRNA sense strand
uaccugagaucauuccuau

SEQ ID NO: 902327 - RNA, 19 nt, Homo sapiens
  misc_RNA (1)...(19): siRNA sense strand
agagaaagccccuaaguua

SEQ ID NO: 902328 - RNA, 19 nt, Homo sapiens
  misc_RNA (1)...(19): siRNA sense strand
uaaccugucuggagauaag

SEQ ID NO: 902329 - RNA, 19 nt, Homo sapiens
  misc_RNA (1)...(19): siRNA sense strand
gaugugaagagauugaauu

SEQ ID NO: 902330 - RNA, 19 nt, Homo sapiens
  misc_RNA (1)...(19): siRNA sense strand
gagugauccuccucaggua

SEQ ID NO: 902331 - RNA, 19 nt, Homo sapiens
  misc_RNA (1)...(19): siRNA sense strand
ggucugggcuguaccugau

SEQ ID NO: 902332 - RNA, 19 nt, Homo sapiens
  misc_RNA (1)...(19): siRNA sense strand
ggagcuaugaagagaauuu

SEQ ID NO: 902333 - RNA, 19 nt, Homo sapiens
  misc_RNA (1)...(19): siRNA sense strand
gagauaagagccagacugu

SEQ ID NO: 902334 - RNA, 19 nt, Homo sapiens
  misc_RNA (1)...(19): siRNA sense strand
caacuccacaggccaaauu

SEQ ID NO: 902335 - RNA, 19 nt, Homo sapiens
  misc_RNA (1)...(19): siRNA sense strand
ggacaugcaagguguagga

SEQ ID NO: 902336 - RNA, 19 nt, Homo sapiens
  misc_RNA (1)...(19): siRNA sense strand
cggaggagcugcacuuugg

SEQ ID NO: 902337 - RNA, 19 nt, Homo sapiens
  misc_RNA (1)...(19): siRNA sense strand
gaacacucuggaaauguaa

SEQ ID NO: 902338 - RNA, 19 nt, Homo sapiens
  misc_RNA (1)...(19): siRNA sense strand
gaaagcgucaguauguguu

SEQ ID NO: 902339 - RNA, 19 nt, Homo sapiens
  misc_RNA (1)...(19): siRNA sense strand
gcccaggaaugcuauguuc

SEQ ID NO: 902340 - RNA, 19 nt, Homo sapiens
  misc_RNA (1)...(19): siRNA sense strand
gaccagaaauaaugaugag

SEQ ID NO: 902341 - RNA, 19 nt, Homo sapiens
  misc_RNA (1)...(19): siRNA sense strand
uugcagaaauucaugaaga

SEQ ID NO: 902342 - RNA, 19 nt, Homo sapiens
  misc_RNA (1)...(19): siRNA sense strand
cccaggcaguggacauuua

SEQ ID NO: 902343 - RNA, 19 nt, Homo sapiens
  misc_RNA (1)...(19): siRNA sense strand
gaaugaaucuaccaccuuu

SEQ ID NO: 902344 - RNA, 19 nt, Homo sapiens
  misc_RNA (1)...(19): siRNA sense strand
gaaaguauauggagacacu

SEQ ID NO: 902345 - RNA, 19 nt, Homo sapiens
  misc_RNA (1)...(19): siRNA sense strand
gagaagaugagaaaguaua

SEQ ID NO: 902346 - RNA, 19 nt, Homo sapiens
  misc_RNA (1)...(19): siRNA sense strand
ggacccagcucgccugaau

SEQ ID NO: 902347 - RNA, 19 nt, Homo sapiens
  misc_RNA (1)...(19): siRNA sense strand
gaagcuagaggaauugaaa

SEQ ID NO: 902348 - RNA, 19 nt, Homo sapiens
  misc_RNA (1)...(19): siRNA sense strand
gaggaugccuggaucugaa

SEQ ID NO: 902349 - RNA, 19 nt, Homo sapiens
  misc_RNA (1)...(19): siRNA sense strand
ccacaccucuuuaaguaug

SEQ ID NO: 902350 - RNA, 19 nt, Homo sapiens
  misc_RNA (1)...(19): siRNA sense strand
gcucacagaugacaacaag

SEQ ID NO: 902351 - RNA, 19 nt, Homo sapiens
  misc_RNA (1)...(19): siRNA sense strand
gaggaagaaucuacaucaa

SEQ ID NO: 902352 - RNA, 19 nt, Homo sapiens
  misc_RNA (1)...(19): siRNA sense strand
uggagaagaugagaaagua

SEQ ID NO: 902353 - RNA, 19 nt, Homo sapiens
  misc_RNA (1)...(19): siRNA sense strand
gacaacaaguuucacagau

SEQ ID NO: 902354 - RNA, 19 nt, Homo sapiens
  misc_RNA (1)...(19): siRNA sense strand
acaaguacaugaaguucuu

SEQ ID NO: 902355 - RNA, 19 nt, Homo sapiens
  misc_RNA (1)...(19): siRNA sense strand
acccacaccucuuuaagua

SEQ ID NO: 902356 - RNA, 19 nt, Homo sapiens
  misc_RNA (1)...(19): siRNA sense strand
ucacagaugacaacaaguu

SEQ ID NO: 902357 - RNA, 19 nt, Homo sapiens
  misc_RNA (1)...(19): siRNA sense strand
ggaacauaaugauaaagca

SEQ ID NO: 902358 - RNA, 19 nt, Homo sapiens
  misc_RNA (1)...(19): siRNA sense strand
aaaguaauacccagauuga

SEQ ID NO: 902359 - RNA, 19 nt, Homo sapiens
  misc_RNA (1)...(19): siRNA sense strand
gaacgugcgagacaauguu

SEQ ID NO: 902360 - RNA, 19 nt, Homo sapiens
  misc_RNA (1)...(19): siRNA sense strand
ggccagugaugauuacaga

SEQ ID NO: 902361 - RNA, 19 nt, Homo sapiens
  misc_RNA (1)...(19): siRNA sense strand
uacgaacccuuggaacaua

SEQ ID NO: 902362 - RNA, 19 nt, Homo sapiens
  misc_RNA (1)...(19): siRNA sense strand
gaaucuaccaccuuugugu

SEQ ID NO: 902363 - RNA, 19 nt, Homo sapiens
  misc_RNA (1)...(19): siRNA sense strand
gagaaaguauauggagaca

SEQ ID NO: 902364 - RNA, 19 nt, Homo sapiens
  misc_RNA (1)...(19): siRNA sense strand
acaacaaguuucacagauc

SEQ ID NO: 902365 - RNA, 19 nt, Homo sapiens
  misc_RNA (1)...(19): siRNA sense strand
gaaugugcccaucgaggaa

SEQ ID NO: 902366 - RNA, 19 nt, Homo sapiens
  misc_RNA (1)...(19): siRNA sense strand
agaagaaugugcccaucga

SEQ ID NO: 902367 - RNA, 19 nt, Homo sapiens
  misc_RNA (1)...(19): siRNA sense strand
caagcacccacaccucuuu

SEQ ID NO: 902368 - RNA, 19 nt, Homo sapiens
  misc_RNA (1)...(19): siRNA sense strand
acgaggagauccagacugu

SEQ ID NO: 902369 - RNA, 19 nt, Homo sapiens
  misc_RNA (1)...(19): siRNA sense strand
aaacugcucuuuucagaug

SEQ ID NO: 902370 - RNA, 19 nt, Homo sapiens
  misc_RNA (1)...(19): siRNA sense strand
ugacaacaaguuucacaga

SEQ ID NO: 902371 - RNA, 19 nt, Homo sapiens
  misc_RNA (1)...(19): siRNA sense strand
gccuggaucugaagcuaga

SEQ ID NO: 902372 - RNA, 19 nt, Homo sapiens
  misc_RNA (1)...(19): siRNA sense strand
cagcucgccugaaugaauc

SEQ ID NO: 902373 - RNA, 19 nt, Homo sapiens
  misc_RNA (1)...(19): siRNA sense strand
ucaacaaguacaugaaguu

SEQ ID NO: 902374 - RNA, 19 nt, Homo sapiens
  misc_RNA (1)...(19): siRNA sense strand
ccuuggaacauaaugauaa

SEQ ID NO: 902375 - RNA, 19 nt, Homo sapiens
  misc_RNA (1)...(19): siRNA sense strand
caacaaguacaugaaguuc

SEQ ID NO: 902376 - RNA, 19 nt, Homo sapiens
  misc_RNA (1)...(19): siRNA sense strand
gaagaugagaaaguauaug

SEQ ID NO: 902377 - RNA, 19 nt, Homo sapiens
  misc_RNA (1)...(19): siRNA sense strand
ggaauugaaauccuuuguc

SEQ ID NO: 902378 - RNA, 19 nt, Homo sapiens
  misc_RNA (1)...(19): siRNA sense strand
ggagaagaugagaaaguau

SEQ ID NO: 902379 - RNA, 19 nt, Homo sapiens
  misc_RNA (1)...(19): siRNA sense strand
cagaugacaacaaguuuca

SEQ ID NO: 902380 - RNA, 19 nt, Homo sapiens
  misc_RNA (1)...(19): siRNA sense strand
gaugacaacaaguuucaca

SEQ ID NO: 902381 - RNA, 19 nt, Homo sapiens
  misc_RNA (1)...(19): siRNA sense strand
ccagcucgccugaaugaau

SEQ ID NO: 902382 - RNA, 19 nt, Homo sapiens
  misc_RNA (1)...(19): siRNA sense strand
acgaacccuuggaacauaa

SEQ ID NO: 902383 - RNA, 19 nt, Homo sapiens
  misc_RNA (1)...(19): siRNA sense strand
gaucugaagcuagaggaau

SEQ ID NO: 902384 - RNA, 19 nt, Homo sapiens
  misc_RNA (1)...(19): siRNA sense strand
agaggaagaaucuacauca

SEQ ID NO: 902385 - RNA, 19 nt, Homo sapiens
  misc_RNA (1)...(19): siRNA sense strand
cagauugacccaugagcuu

SEQ ID NO: 902386 - RNA, 19 nt, Homo sapiens
  misc_RNA (1)...(19): siRNA sense strand
ugaaugaaucuaccaccuu

SEQ ID NO: 902387 - RNA, 19 nt, Homo sapiens
  misc_RNA (1)...(19): siRNA sense strand
gagacacuacggacagaga

SEQ ID NO: 902388 - RNA, 19 nt, Homo sapiens
  misc_RNA (1)...(19): siRNA sense strand
auugaaauccuuuguccua

SEQ ID NO: 902389 - RNA, 19 nt, Homo sapiens
  misc_RNA (1)...(19): siRNA sense strand
cuaaacugcucuuuucaga

SEQ ID NO: 902390 - RNA, 19 nt, Homo sapiens
  misc_RNA (1)...(19): siRNA sense strand
gcacccacaccucuuuaag

SEQ ID NO: 902391 - RNA, 19 nt, Homo sapiens
  misc_RNA (1)...(19): siRNA sense strand
gaagaaucuacaucaagca

SEQ ID NO: 902392 - RNA, 19 nt, Homo sapiens
  misc_RNA (1)...(19): siRNA sense strand
ggcagcugguucuuacgaa

SEQ ID NO: 902393 - RNA, 19 nt, Homo sapiens
  misc_RNA (1)...(19): siRNA sense strand
ucaggcagaagaagaaugu

SEQ ID NO: 902394 - RNA, 19 nt, Homo sapiens
  misc_RNA (1)...(19): siRNA sense strand
uuacagaggaugccuggau

SEQ ID NO: 902395 - RNA, 19 nt, Homo sapiens
  misc_RNA (1)...(19): siRNA sense strand
aaaauccugugaaccaauu

SEQ ID NO: 902396 - RNA, 19 nt, Homo sapiens
  misc_RNA (1)...(19): siRNA sense strand
ccagaaggcagcacugaac

SEQ ID NO: 902397 - RNA, 19 nt, Homo sapiens
  misc_RNA (1)...(19): siRNA sense strand
ggacgcagagcagcugauc

SEQ ID NO: 902398 - RNA, 19 nt, Homo sapiens
  misc_RNA (1)...(19): siRNA sense strand
guggagaagaugagaaagu

SEQ ID NO: 902399 - RNA, 19 nt, Homo sapiens
  misc_RNA (1)...(19): siRNA sense strand
uggccuaccuccucaucga

SEQ ID NO: 902400 - RNA, 19 nt, Homo sapiens
  misc_RNA (1)...(19): siRNA sense strand
cacagaugacaacaaguuu

SEQ ID NO: 902401 - RNA, 19 nt, Homo sapiens
  misc_RNA (1)...(19): siRNA sense strand
gggcagcugguucuuacga

SEQ ID NO: 902402 - RNA, 19 nt, Homo sapiens
  misc_RNA (1)...(19): siRNA sense strand
guugaagcaccuccacaga

SEQ ID NO: 902403 - RNA, 19 nt, Homo sapiens
  misc_RNA (1)...(19): siRNA sense strand
ccuggaugguggagaagau

SEQ ID NO: 902404 - RNA, 19 nt, Homo sapiens
  misc_RNA (1)...(19): siRNA sense strand
aagaugagaaaguauaugg

SEQ ID NO: 902405 - RNA, 19 nt, Homo sapiens
  misc_RNA (1)...(19): siRNA sense strand
gcuaaagugucuuaacuca

SEQ ID NO: 902406 - RNA, 19 nt, Homo sapiens
  misc_RNA (1)...(19): siRNA sense strand
agaagccuguuuccuguua

SEQ ID NO: 902407 - RNA, 19 nt, Homo sapiens
  misc_RNA (1)...(19): siRNA sense strand
guauagagguccagaaugc

SEQ ID NO: 902408 - RNA, 19 nt, Homo sapiens
  misc_RNA (1)...(19): siRNA sense strand
ggucugaauugaauacugu

SEQ ID NO: 902409 - RNA, 19 nt, Homo sapiens
  misc_RNA (1)...(19): siRNA sense strand
gaucaacuuucuucuaggu

SEQ ID NO: 902410 - RNA, 19 nt, Homo sapiens
  misc_RNA (1)...(19): siRNA sense strand
ggaagcaagaagccuguuu

SEQ ID NO: 902411 - RNA, 19 nt, Homo sapiens
  misc_RNA (1)...(19): siRNA sense strand
gaagcaagaagccuguuuc

SEQ ID NO: 902412 - RNA, 19 nt, Homo sapiens
  misc_RNA (1)...(19): siRNA sense strand
ucagacacaugcuuuuaua

SEQ ID NO: 902413 - RNA, 19 nt, Homo sapiens
  misc_RNA (1)...(19): siRNA sense strand
ugaauacugugaggcuaaa

SEQ ID NO: 902414 - RNA, 19 nt, Homo sapiens
  misc_RNA (1)...(19): siRNA sense strand
aggaucaacuuucuucuag

SEQ ID NO: 902415 - RNA, 19 nt, Homo sapiens
  misc_RNA (1)...(19): siRNA sense strand
ccagaaugcucaaaauugu

SEQ ID NO: 902416 - RNA, 19 nt, Homo sapiens
  misc_RNA (1)...(19): siRNA sense strand
caucucagacacaugcuuu

SEQ ID NO: 902417 - RNA, 19 nt, Homo sapiens
  misc_RNA (1)...(19): siRNA sense strand
ccacagaccacggaagcaa

SEQ ID NO: 902418 - RNA, 19 nt, Homo sapiens
  misc_RNA (1)...(19): siRNA sense strand
gugaggcuaaagugucuua

SEQ ID NO: 902419 - RNA, 19 nt, Homo sapiens
  misc_RNA (1)...(19): siRNA sense strand
caucacugcccaccacaga

SEQ ID NO: 902420 - RNA, 19 nt, Homo sapiens
  misc_RNA (1)...(19): siRNA sense strand
aaagugucuuaacucauug

SEQ ID NO: 902421 - RNA, 19 nt, Homo sapiens
  misc_RNA (1)...(19): siRNA sense strand
aggcuaaagugucuuaacu

SEQ ID NO: 902422 - RNA, 19 nt, Homo sapiens
  misc_RNA (1)...(19): siRNA sense strand
aaggaucaacuuucuucua

SEQ ID NO: 902423 - RNA, 19 nt, Homo sapiens
  misc_RNA (1)...(19): siRNA sense strand
gcucaaaauuguucuucug

SEQ ID NO: 902424 - RNA, 19 nt, Homo sapiens
  misc_RNA (1)...(19): siRNA sense strand
guguauagagguccagaau

SEQ ID NO: 902425 - RNA, 19 nt, Homo sapiens
  misc_RNA (1)...(19): siRNA sense strand
gaagccuguuuccuguuac

SEQ ID NO: 902426 - RNA, 19 nt, Homo sapiens
  misc_RNA (1)...(19): siRNA sense strand
ucuucuaggucugaauuga

SEQ ID NO: 902427 - RNA, 19 nt, Homo sapiens
  misc_RNA (1)...(19): siRNA sense strand
ggaaauaccuagagaucuu

SEQ ID NO: 902428 - RNA, 19 nt, Homo sapiens
  misc_RNA (1)...(19): siRNA sense strand
ggagacaccucgaauacuu

SEQ ID NO: 902429 - RNA, 19 nt, Homo sapiens
  misc_RNA (1)...(19): siRNA sense strand
ucacaucuauucccaauga

SEQ ID NO: 902430 - RNA, 19 nt, Homo sapiens
  misc_RNA (1)...(19): siRNA sense strand
caacgacgcugaccuuugu

SEQ ID NO: 902431 - RNA, 19 nt, Homo sapiens
  misc_RNA (1)...(19): siRNA sense strand
gcauugaguuuaucgauga

SEQ ID NO: 902432 - RNA, 19 nt, Homo sapiens
  misc_RNA (1)...(19): siRNA sense strand
gaaagcagaugaaccugau

SEQ ID NO: 902433 - RNA, 19 nt, Homo sapiens
  misc_RNA (1)...(19): siRNA sense strand
gaucacaucuauucccaau

SEQ ID NO: 902434 - RNA, 19 nt, Homo sapiens
  misc_RNA (1)...(19): siRNA sense strand
agaugaaccugaugauauu

SEQ ID NO: 902435 - RNA, 19 nt, Homo sapiens
  misc_RNA (1)...(19): siRNA sense strand
ggaccuccaucaacugaga

SEQ ID NO: 902436 - RNA, 19 nt, Homo sapiens
  misc_RNA (1)...(19): siRNA sense strand
aaacguccguguuggauga

SEQ ID NO: 902437 - RNA, 19 nt, Homo sapiens
  misc_RNA (1)...(19): siRNA sense strand
gaagaaagcagaugaaccu

SEQ ID NO: 902438 - RNA, 19 nt, Homo sapiens
  misc_RNA (1)...(19): siRNA sense strand
gcagaugaaccugaugaua

SEQ ID NO: 902439 - RNA, 19 nt, Homo sapiens
  misc_RNA (1)...(19): siRNA sense strand
cagaugaaccugaugauau

SEQ ID NO: 902440 - RNA, 19 nt, Homo sapiens
  misc_RNA (1)...(19): siRNA sense strand
ucaaggaaauaccuagaga

SEQ ID NO: 902441 - RNA, 19 nt, Homo sapiens
  misc_RNA (1)...(19): siRNA sense strand
gcacugcgacuguacucua

SEQ ID NO: 902442 - RNA, 19 nt, Homo sapiens
  misc_RNA (1)...(19): siRNA sense strand
caaugcaaaucucaaggaa

SEQ ID NO: 902443 - RNA, 19 nt, Homo sapiens
  misc_RNA (1)...(19): siRNA sense strand
cccaagggcugucuuuguu

SEQ ID NO: 902444 - RNA, 19 nt, Homo sapiens
  misc_RNA (1)...(19): siRNA sense strand
gauauuagcacugugguau

SEQ ID NO: 902445 - RNA, 19 nt, Homo sapiens
  misc_RNA (1)...(19): siRNA sense strand
ggugaucucauauguggua

SEQ ID NO: 902446 - RNA, 19 nt, Homo sapiens
  misc_RNA (1)...(19): siRNA sense strand
augcaaaucucaaggaaau

SEQ ID NO: 902447 - RNA, 19 nt, Homo sapiens
  misc_RNA (1)...(19): siRNA sense strand
gcaaugcaaaucucaagga

SEQ ID NO: 902448 - RNA, 19 nt, Homo sapiens
  misc_RNA (1)...(19): siRNA sense strand
gcagaagaaagcagaugaa

SEQ ID NO: 902449 - RNA, 19 nt, Homo sapiens
  misc_RNA (1)...(19): siRNA sense strand
guuuaaaugucaccuguag

SEQ ID NO: 902450 - RNA, 19 nt, Homo sapiens
  misc_RNA (1)...(19): siRNA sense strand
cgaugagcaugccuucaaa

SEQ ID NO: 902451 - RNA, 19 nt, Homo sapiens
  misc_RNA (1)...(19): siRNA sense strand
uuaaggaccuccaucaacu

SEQ ID NO: 902452 - RNA, 19 nt, Homo sapiens
  misc_RNA (1)...(19): siRNA sense strand
gauucaaagugugcacaaa

SEQ ID NO: 902453 - RNA, 19 nt, Homo sapiens
  misc_RNA (1)...(19): siRNA sense strand
cccacaacgugaucuguaa

SEQ ID NO: 902454 - RNA, 19 nt, Homo sapiens
  misc_RNA (1)...(19): siRNA sense strand
gagcauggcguccaaucau

SEQ ID NO: 902455 - RNA, 19 nt, Homo sapiens
  misc_RNA (1)...(19): siRNA sense strand
gcaaaucucaaggaaauac

SEQ ID NO: 902456 - RNA, 19 nt, Homo sapiens
  misc_RNA (1)...(19): siRNA sense strand
gaugaaccugaugauauua

SEQ ID NO: 902457 - RNA, 19 nt, Homo sapiens
  misc_RNA (1)...(19): siRNA sense strand
gggccagaauugccaacaa

SEQ ID NO: 902458 - RNA, 19 nt, Homo sapiens
  misc_RNA (1)...(19): siRNA sense strand
aaugucaccuguagcaaug

SEQ ID NO: 902459 - RNA, 19 nt, Homo sapiens
  misc_RNA (1)...(19): siRNA sense strand
ggacuccaaucagaucaca

SEQ ID NO: 902460 - RNA, 19 nt, Homo sapiens
  misc_RNA (1)...(19): siRNA sense strand
caagggcugucuuuguucu

SEQ ID NO: 902461 - RNA, 19 nt, Homo sapiens
  misc_RNA (1)...(19): siRNA sense strand
gcccacaacgugaucugua

SEQ ID NO: 902462 - RNA, 19 nt, Homo sapiens
  misc_RNA (1)...(19): siRNA sense strand
uauuagcacugugguauag

SEQ ID NO: 902463 - RNA, 19 nt, Homo sapiens
  misc_RNA (1)...(19): siRNA sense strand
gaaauaccuagagaucuuc

SEQ ID NO: 902464 - RNA, 19 nt, Homo sapiens
  misc_RNA (1)...(19): siRNA sense strand
ucaaaggaguagcugaaac

SEQ ID NO: 902465 - RNA, 19 nt, Homo sapiens
  misc_RNA (1)...(19): siRNA sense strand
ggccagaauugccaacaac

SEQ ID NO: 902466 - RNA, 19 nt, Homo sapiens
  misc_RNA (1)...(19): siRNA sense strand
ggcagaagaaagcagauga

SEQ ID NO: 902467 - RNA, 19 nt, Homo sapiens
  misc_RNA (1)...(19): siRNA sense strand
auacugugcuuucauucug

SEQ ID NO: 902468 - RNA, 19 nt, Homo sapiens
  misc_RNA (1)...(19): siRNA sense strand
caucuauucccaaugaaau

SEQ ID NO: 902469 - RNA, 19 nt, Homo sapiens
  misc_RNA (1)...(19): siRNA sense strand
ccaugugucuccuccuaca

SEQ ID NO: 902470 - RNA, 19 nt, Homo sapiens
  misc_RNA (1)...(19): siRNA sense strand
ccaacgacgcugaccuuug

SEQ ID NO: 902471 - RNA, 19 nt, Homo sapiens
  misc_RNA (1)...(19): siRNA sense strand
gaacaugcuggcagaccau

SEQ ID NO: 902472 - RNA, 19 nt, Homo sapiens
  misc_RNA (1)...(19): siRNA sense strand
ggagcauggcguccaauca

SEQ ID NO: 902473 - RNA, 19 nt, Homo sapiens
  misc_RNA (1)...(19): siRNA sense strand
gagacaccucgaauacuug

SEQ ID NO: 902474 - RNA, 19 nt, Homo sapiens
  misc_RNA (1)...(19): siRNA sense strand
ccacaacgugaucuguaaa

SEQ ID NO: 902475 - RNA, 19 nt, Homo sapiens
  misc_RNA (1)...(19): siRNA sense strand
ugaggagcauggcguccaa

SEQ ID NO: 902476 - RNA, 19 nt, Homo sapiens
  misc_RNA (1)...(19): siRNA sense strand
uggcagaccauuccucaau

SEQ ID NO: 902477 - RNA, 19 nt, Homo sapiens
  misc_RNA (1)...(19): siRNA sense strand
ucugguagaccugugguua

SEQ ID NO: 902478 - RNA, 19 nt, Homo sapiens
  misc_RNA (1)...(19): siRNA sense strand
acaccucgaauacuugaaa

SEQ ID NO: 902479 - RNA, 19 nt, Homo sapiens
  misc_RNA (1)...(19): siRNA sense strand
uuaaaugucaccuguagca

SEQ ID NO: 902480 - RNA, 19 nt, Homo sapiens
  misc_RNA (1)...(19): siRNA sense strand
ucgaugagcaugccuucaa

SEQ ID NO: 902481 - RNA, 19 nt, Homo sapiens
  misc_RNA (1)...(19): siRNA sense strand
cugaugauauuagcacugu

SEQ ID NO: 902482 - RNA, 19 nt, Homo sapiens
  misc_RNA (1)...(19): siRNA sense strand
cuccaugugucuccuccua

SEQ ID NO: 902483 - RNA, 19 nt, Homo sapiens
  misc_RNA (1)...(19): siRNA sense strand
caaggaaauaccuagagau

SEQ ID NO: 902484 - RNA, 19 nt, Homo sapiens
  misc_RNA (1)...(19): siRNA sense strand
gauacugugcuuucauucu

SEQ ID NO: 902485 - RNA, 19 nt, Homo sapiens
  misc_RNA (1)...(19): siRNA sense strand
agagaucuuccuccugaaa

SEQ ID NO: 902486 - RNA, 19 nt, Homo sapiens
  misc_RNA (1)...(19): siRNA sense strand
aagcagaugaaccugauga

SEQ ID NO: 902487 - RNA, 19 nt, Homo sapiens
  misc_RNA (1)...(19): siRNA sense strand
aaggaaauaccuagagauc

SEQ ID NO: 902488 - RNA, 19 nt, Homo sapiens
  misc_RNA (1)...(19): siRNA sense strand
ccaagcaggcagaagaaag

SEQ ID NO: 902489 - RNA, 19 nt, Homo sapiens
  misc_RNA (1)...(19): siRNA sense strand
auguuuggcugguucacua

SEQ ID NO: 902490 - RNA, 19 nt, Homo sapiens
  misc_RNA (1)...(19): siRNA sense strand
ggauucaaagugugcacaa

SEQ ID NO: 902491 - RNA, 19 nt, Homo sapiens
  misc_RNA (1)...(19): siRNA sense strand
ugucuccuccuacaaaguu

SEQ ID NO: 902492 - RNA, 19 nt, Homo sapiens
  misc_RNA (1)...(19): siRNA sense strand
aaaugucaccuguagcaau

SEQ ID NO: 902493 - RNA, 19 nt, Homo sapiens
  misc_RNA (1)...(19): siRNA sense strand
gaaccugaugauauuagca

SEQ ID NO: 902494 - RNA, 19 nt, Homo sapiens
  misc_RNA (1)...(19): siRNA sense strand
caaaggaguagcugaaacc

SEQ ID NO: 902495 - RNA, 19 nt, Homo sapiens
  misc_RNA (1)...(19): siRNA sense strand
ggaauacugugcagacuug

SEQ ID NO: 902496 - RNA, 19 nt, Homo sapiens
  misc_RNA (1)...(19): siRNA sense strand
gaaccacgcccuacuguug

SEQ ID NO: 902497 - RNA, 19 nt, Homo sapiens
  misc_RNA (1)...(19): siRNA sense strand
gaaguugguccugcucuuu

SEQ ID NO: 902498 - RNA, 19 nt, Homo sapiens
  misc_RNA (1)...(19): siRNA sense strand
agacuugccuccuccauac

SEQ ID NO: 902499 - RNA, 19 nt, Homo sapiens
  misc_RNA (1)...(19): siRNA sense strand
ucaacaccgucuccuccua

SEQ ID NO: 902500 - RNA, 19 nt, Homo sapiens
  misc_RNA (1)...(19): siRNA sense strand
gcaaaucuuacugcuguga

SEQ ID NO: 902501 - RNA, 19 nt, Homo sapiens
  misc_RNA (1)...(19): siRNA sense strand
caacaccgucuccuccuau

SEQ ID NO: 902502 - RNA, 19 nt, Homo sapiens
  misc_RNA (1)...(19): siRNA sense strand
cgaaguugguccugcucuu

SEQ ID NO: 902503 - RNA, 19 nt, Homo sapiens
  misc_RNA (1)...(19): siRNA sense strand
cagacuugccuccuccaua

SEQ ID NO: 902504 - RNA, 19 nt, Homo sapiens
  misc_RNA (1)...(19): siRNA sense strand
uggaaacgcaaggaaauaa

SEQ ID NO: 902505 - RNA, 19 nt, Homo sapiens
  misc_RNA (1)...(19): siRNA sense strand
ggaaccacgcccuacuguu

SEQ ID NO: 902506 - RNA, 19 nt, Homo sapiens
  misc_RNA (1)...(19): siRNA sense strand
gcucaguguggcaaagauu

SEQ ID NO: 902507 - RNA, 19 nt, Homo sapiens
  misc_RNA (1)...(19): siRNA sense strand
uugcugggauugccauaug

SEQ ID NO: 902508 - RNA, 19 nt, Homo sapiens
  misc_RNA (1)...(19): siRNA sense strand
gcuccuacuacgcuuauau

SEQ ID NO: 902509 - RNA, 19 nt, Homo sapiens
  misc_RNA (1)...(19): siRNA sense strand
aaaucuuacugcugugaug

SEQ ID NO: 902510 - RNA, 19 nt, Homo sapiens
  misc_RNA (1)...(19): siRNA sense strand
caggacgacucacaucaac

SEQ ID NO: 902511 - RNA, 19 nt, Homo sapiens
  misc_RNA (1)...(19): siRNA sense strand
ggacgacucacaucaacac

SEQ ID NO: 902512 - RNA, 19 nt, Homo sapiens
  misc_RNA (1)...(19): siRNA sense strand
gaugauugccuugcucagu

SEQ ID NO: 902513 - RNA, 19 nt, Homo sapiens
  misc_RNA (1)...(19): siRNA sense strand
gggauugccauaugcaucu

SEQ ID NO: 902514 - RNA, 19 nt, Homo sapiens
  misc_RNA (1)...(19): siRNA sense strand
ucaggacgacucacaucaa

SEQ ID NO: 902515 - RNA, 19 nt, Homo sapiens
  misc_RNA (1)...(19): siRNA sense strand
ccuggaaacgcaaggaaau

SEQ ID NO: 902516 - RNA, 19 nt, Homo sapiens
  misc_RNA (1)...(19): siRNA sense strand
cuggaaacgcaaggaaaua

SEQ ID NO: 902517 - RNA, 19 nt, Homo sapiens
  misc_RNA (1)...(19): siRNA sense strand
ggagagagcugucuucaug

SEQ ID NO: 902518 - RNA, 19 nt, Homo sapiens
  misc_RNA (1)...(19): siRNA sense strand
ggaaggagaucagcacuaa

SEQ ID NO: 902519 - RNA, 19 nt, Homo sapiens
  misc_RNA (1)...(19): siRNA sense strand
ggacacacccuccaaauuc

SEQ ID NO: 902520 - RNA, 19 nt, Homo sapiens
  misc_RNA (1)...(19): siRNA sense strand
ggaacgacgugguguaugu

SEQ ID NO: 902521 - RNA, 19 nt, Homo sapiens
  misc_RNA (1)...(19): siRNA sense strand
gcugggaacuuucauccua

SEQ ID NO: 902522 - RNA, 19 nt, Homo sapiens
  misc_RNA (1)...(19): siRNA sense strand
gagauuauggcuuuguuua

SEQ ID NO: 902523 - RNA, 19 nt, Homo sapiens
  misc_RNA (1)...(19): siRNA sense strand
uuacaagggucaugaaaga

SEQ ID NO: 902524 - RNA, 19 nt, Homo sapiens
  misc_RNA (1)...(19): siRNA sense strand
gaaggaagcggccucauca

SEQ ID NO: 902525 - RNA, 19 nt, Homo sapiens
  misc_RNA (1)...(19): siRNA sense strand
gcaacgaggucaaggagau

SEQ ID NO: 902526 - RNA, 19 nt, Homo sapiens
  misc_RNA (1)...(19): siRNA sense strand
gaagcggccucaucaaugg

SEQ ID NO: 902527 - RNA, 19 nt, Homo sapiens
  misc_RNA (1)...(19): siRNA sense strand
gagaugcugucaacucaga

SEQ ID NO: 902528 - RNA, 19 nt, Homo sapiens
  misc_RNA (1)...(19): siRNA sense strand
ggaugaaccuggacuuugg

SEQ ID NO: 902529 - RNA, 19 nt, Homo sapiens
  misc_RNA (1)...(19): siRNA sense strand
gaacgaccacaucaccuuu

SEQ ID NO: 902530 - RNA, 19 nt, Homo sapiens
  misc_RNA (1)...(19): siRNA sense strand
gcuuugagauccugaacaa

SEQ ID NO: 902531 - RNA, 19 nt, Homo sapiens
  misc_RNA (1)...(19): siRNA sense strand
caucauagacaucugcuuu

SEQ ID NO: 902532 - RNA, 19 nt, Homo sapiens
  misc_RNA (1)...(19): siRNA sense strand
gaagaggacaucauagaca

SEQ ID NO: 902533 - RNA, 19 nt, Homo sapiens
  misc_RNA (1)...(19): siRNA sense strand
gauuauggcuuuguuuaca

SEQ ID NO: 902534 - RNA, 19 nt, Homo sapiens
  misc_RNA (1)...(19): siRNA sense strand
caugcgagauuauggcuuu

SEQ ID NO: 902535 - RNA, 19 nt, Homo sapiens
  misc_RNA (1)...(19): siRNA sense strand
gaguauaucaugcgagauu

SEQ ID NO: 902536 - RNA, 19 nt, Homo sapiens
  misc_RNA (1)...(19): siRNA sense strand
ggaagcggccucaucaaug

SEQ ID NO: 902537 - RNA, 19 nt, Homo sapiens
  misc_RNA (1)...(19): siRNA sense strand
caacguggauaggaacuug

SEQ ID NO: 902538 - RNA, 19 nt, Homo sapiens
  misc_RNA (1)...(19): siRNA sense strand
caagagccuguaucacuua

SEQ ID NO: 902539 - RNA, 19 nt, Homo sapiens
  misc_RNA (1)...(19): siRNA sense strand
gcgggcagccugugaagua

SEQ ID NO: 902540 - RNA, 19 nt, Homo sapiens
  misc_RNA (1)...(19): siRNA sense strand
gaacuuucauccuacuuuu

SEQ ID NO: 902541 - RNA, 19 nt, Homo sapiens
  misc_RNA (1)...(19): siRNA sense strand
caacagcaacgaugacaau

SEQ ID NO: 902542 - RNA, 19 nt, Homo sapiens
  misc_RNA (1)...(19): siRNA sense strand
ggaacuuucauccuacuuu

SEQ ID NO: 902543 - RNA, 19 nt, Homo sapiens
  misc_RNA (1)...(19): siRNA sense strand
cugcagagcuccaggaaca

SEQ ID NO: 902544 - RNA, 19 nt, Homo sapiens
  misc_RNA (1)...(19): siRNA sense strand
auagacaucugcuuugaga

SEQ ID NO: 902545 - RNA, 19 nt, Homo sapiens
  misc_RNA (1)...(19): siRNA sense strand
gacacacccuccaaauuca

SEQ ID NO: 902546 - RNA, 19 nt, Homo sapiens
  misc_RNA (1)...(19): siRNA sense strand
gaccaucgauacguacuau

SEQ ID NO: 902547 - RNA, 19 nt, Homo sapiens
  misc_RNA (1)...(19): siRNA sense strand
ggucuucgccucuguuaug

SEQ ID NO: 902548 - RNA, 19 nt, Homo sapiens
  misc_RNA (1)...(19): siRNA sense strand
gagccuguaucacuuaaag

SEQ ID NO: 902549 - RNA, 19 nt, Homo sapiens
  misc_RNA (1)...(19): siRNA sense strand
acaagagccuguaucacuu

SEQ ID NO: 902550 - RNA, 19 nt, Homo sapiens
  misc_RNA (1)...(19): siRNA sense strand
ccucaucaaugggcagaua

SEQ ID NO: 902551 - RNA, 19 nt, Homo sapiens
  misc_RNA (1)...(19): siRNA sense strand
ucauagacaucugcuuuga

SEQ ID NO: 902552 - RNA, 19 nt, Homo sapiens
  misc_RNA (1)...(19): siRNA sense strand
gguccaugcugguccuaaa

SEQ ID NO: 902553 - RNA, 19 nt, Homo sapiens
  misc_RNA (1)...(19): siRNA sense strand
caagggucaugaaagauuc

SEQ ID NO: 902554 - RNA, 19 nt, Homo sapiens
  misc_RNA (1)...(19): siRNA sense strand
aaauucaacuggaccucua

SEQ ID NO: 902555 - RNA, 19 nt, Homo sapiens
  misc_RNA (1)...(19): siRNA sense strand
uggaaugagugcuggauga

SEQ ID NO: 902556 - RNA, 19 nt, Homo sapiens
  misc_RNA (1)...(19): siRNA sense strand
ugaccgaaaugccgagaug

SEQ ID NO: 902557 - RNA, 19 nt, Homo sapiens
  misc_RNA (1)...(19): siRNA sense strand
ggaaggaagcggccucauc

SEQ ID NO: 902558 - RNA, 19 nt, Homo sapiens
  misc_RNA (1)...(19): siRNA sense strand
agagagcugucuucaugaa

SEQ ID NO: 902559 - RNA, 19 nt, Homo sapiens
  misc_RNA (1)...(19): siRNA sense strand
ucaaugggcagauagcaaa

SEQ ID NO: 902560 - RNA, 19 nt, Homo sapiens
  misc_RNA (1)...(19): siRNA sense strand
ucuguuaugugcaccguaa

SEQ ID NO: 902561 - RNA, 19 nt, Homo sapiens
  misc_RNA (1)...(19): siRNA sense strand
gcgagauuauggcuuuguu

SEQ ID NO: 902562 - RNA, 19 nt, Homo sapiens
  misc_RNA (1)...(19): siRNA sense strand
cuggagcgcuucugauuuc

SEQ ID NO: 902563 - RNA, 19 nt, Homo sapiens
  misc_RNA (1)...(19): siRNA sense strand
ccgagaugcugucaacuca

SEQ ID NO: 902564 - RNA, 19 nt, Homo sapiens
  misc_RNA (1)...(19): siRNA sense strand
cuacagcaauuacagaaac

SEQ ID NO: 902565 - RNA, 19 nt, Homo sapiens
  misc_RNA (1)...(19): siRNA sense strand
ggagaucagcacuaagaug

SEQ ID NO: 902566 - RNA, 19 nt, Homo sapiens
  misc_RNA (1)...(19): siRNA sense strand
ggugaacgccgaugaaguc

SEQ ID NO: 902567 - RNA, 19 nt, Homo sapiens
  misc_RNA (1)...(19): siRNA sense strand
caaaggcuacaaggacaua

SEQ ID NO: 902568 - RNA, 19 nt, Homo sapiens
  misc_RNA (1)...(19): siRNA sense strand
cuucugauuucaccauuga

SEQ ID NO: 902569 - RNA, 19 nt, Homo sapiens
  misc_RNA (1)...(19): siRNA sense strand
ucaguccucuggaguggaa

SEQ ID NO: 902570 - RNA, 19 nt, Homo sapiens
  misc_RNA (1)...(19): siRNA sense strand
gaccagcgccagagcauca

SEQ ID NO: 902571 - RNA, 19 nt, Homo sapiens
  misc_RNA (1)...(19): siRNA sense strand
guuugaagaggacaucaua

SEQ ID NO: 902572 - RNA, 19 nt, Homo sapiens
  misc_RNA (1)...(19): siRNA sense strand
ugaacaagagccuguauca

SEQ ID NO: 902573 - RNA, 19 nt, Homo sapiens
  misc_RNA (1)...(19): siRNA sense strand
acaagggucaugaaagauu

SEQ ID NO: 902574 - RNA, 19 nt, Homo sapiens
  misc_RNA (1)...(19): siRNA sense strand
gcgcugagaguccauguca

SEQ ID NO: 902575 - RNA, 19 nt, Homo sapiens
  misc_RNA (1)...(19): siRNA sense strand
gggcgaggacuacuccaaa

SEQ ID NO: 902576 - RNA, 19 nt, Homo sapiens
  misc_RNA (1)...(19): siRNA sense strand
ccauuacacucugaaaaua

SEQ ID NO: 902577 - RNA, 19 nt, Homo sapiens
  misc_RNA (1)...(19): siRNA sense strand
gacccgagccacauucuuc

SEQ ID NO: 902578 - RNA, 19 nt, Homo sapiens
  misc_RNA (1)...(19): siRNA sense strand
aaggagaucagcacuaaga

SEQ ID NO: 902579 - RNA, 19 nt, Homo sapiens
  misc_RNA (1)...(19): siRNA sense strand
gcugucaacucagaaacga

SEQ ID NO: 902580 - RNA, 19 nt, Homo sapiens
  misc_RNA (1)...(19): siRNA sense strand
ccaucgauacguacuauga

SEQ ID NO: 902581 - RNA, 19 nt, Homo sapiens
  misc_RNA (1)...(19): siRNA sense strand
gaacuugaccaucgauacg

SEQ ID NO: 902582 - RNA, 19 nt, Homo sapiens
  misc_RNA (1)...(19): siRNA sense strand
cuacaaguacccagaagga

SEQ ID NO: 902583 - RNA, 19 nt, Homo sapiens
  misc_RNA (1)...(19): siRNA sense strand
cuaccugccaagugaaaua

SEQ ID NO: 902584 - RNA, 19 nt, Homo sapiens
  misc_RNA (1)...(19): siRNA sense strand
gggaaggagaucagcacua

SEQ ID NO: 902585 - RNA, 19 nt, Homo sapiens
  misc_RNA (1)...(19): siRNA sense strand
ucagaaacgagacaaaaua

SEQ ID NO: 902586 - RNA, 19 nt, Homo sapiens
  misc_RNA (1)...(19): siRNA sense strand
ggagaucaaaggcuacaag

SEQ ID NO: 902587 - RNA, 19 nt, Homo sapiens
  misc_RNA (1)...(19): siRNA sense strand
gagagagcugucuucauga

SEQ ID NO: 902588 - RNA, 19 nt, Homo sapiens
  misc_RNA (1)...(19): siRNA sense strand
aaagaucucccaccaggau

SEQ ID NO: 902589 - RNA, 19 nt, Homo sapiens
  misc_RNA (1)...(19): siRNA sense strand
aguauaucaugcgagauua

SEQ ID NO: 902590 - RNA, 19 nt, Homo sapiens
  misc_RNA (1)...(19): siRNA sense strand
gaaacgagacaaaauaugg

SEQ ID NO: 902591 - RNA, 19 nt, Homo sapiens
  misc_RNA (1)...(19): siRNA sense strand
gguggugagugccaugauc

SEQ ID NO: 902592 - RNA, 19 nt, Homo sapiens
  misc_RNA (1)...(19): siRNA sense strand
aagaggacaucauagacau

SEQ ID NO: 902593 - RNA, 19 nt, Homo sapiens
  misc_RNA (1)...(19): siRNA sense strand
gccuguaucacuuaaagaa

SEQ ID NO: 902594 - RNA, 19 nt, Homo sapiens
  misc_RNA (1)...(19): siRNA sense strand
gcaauuacagaaacaagcu

SEQ ID NO: 902595 - RNA, 19 nt, Homo sapiens
  misc_RNA (1)...(19): siRNA sense strand
gaaauccuggcccacaaca

SEQ ID NO: 902596 - RNA, 19 nt, Homo sapiens
  misc_RNA (1)...(19): siRNA sense strand
gcaguuauuggccauuaca

SEQ ID NO: 902597 - RNA, 19 nt, Homo sapiens
  misc_RNA (1)...(19): siRNA sense strand
cccguguuguuuccaauuu

SEQ ID NO: 902598 - RNA, 19 nt, Homo sapiens
  misc_RNA (1)...(19): siRNA sense strand
gcagcaacgaggucaagga

SEQ ID NO: 902599 - RNA, 19 nt, Homo sapiens
  misc_RNA (1)...(19): siRNA sense strand
gcggaugaaccuggacuuu

SEQ ID NO: 902600 - RNA, 19 nt, Homo sapiens
  misc_RNA (1)...(19): siRNA sense strand
uuugagauccugaacaaga

SEQ ID NO: 902601 - RNA, 19 nt, Homo sapiens
  misc_RNA (1)...(19): siRNA sense strand
cggacacacccuccaaauu

SEQ ID NO: 902602 - RNA, 19 nt, Homo sapiens
  misc_RNA (1)...(19): siRNA sense strand
ggaaugagugcuggaugau

SEQ ID NO: 902603 - RNA, 19 nt, Homo sapiens
  misc_RNA (1)...(19): siRNA sense strand
ggaacuugaccaucgauac

SEQ ID NO: 902604 - RNA, 19 nt, Homo sapiens
  misc_RNA (1)...(19): siRNA sense strand
gaacgacgugguguaugug

SEQ ID NO: 902605 - RNA, 19 nt, Homo sapiens
  misc_RNA (1)...(19): siRNA sense strand
gaggagagagcugucuuca

SEQ ID NO: 902606 - RNA, 19 nt, Homo sapiens
  misc_RNA (1)...(19): siRNA sense strand
ucaccagcuccuacaagua

SEQ ID NO: 902607 - RNA, 19 nt, Homo sapiens
  misc_RNA (1)...(19): siRNA sense strand
gcaccguaaugagaugcuu

SEQ ID NO: 902608 - RNA, 19 nt, Homo sapiens
  misc_RNA (1)...(19): siRNA sense strand
ggcgaggacuacuccaaag

SEQ ID NO: 902609 - RNA, 19 nt, Homo sapiens
  misc_RNA (1)...(19): siRNA sense strand
cgagauuauggcuuuguuu

SEQ ID NO: 902610 - RNA, 19 nt, Homo sapiens
  misc_RNA (1)...(19): siRNA sense strand
uaugugcaccguaaugaga

SEQ ID NO: 902611 - RNA, 19 nt, Homo sapiens
  misc_RNA (1)...(19): siRNA sense strand
aagagccuguaucacuuaa

SEQ ID NO: 902612 - RNA, 19 nt, Homo sapiens
  misc_RNA (1)...(19): siRNA sense strand
augcaguuauuggccauua

SEQ ID NO: 902613 - RNA, 19 nt, Homo sapiens
  misc_RNA (1)...(19): siRNA sense strand
gaugcugucaacucagaaa

SEQ ID NO: 902614 - RNA, 19 nt, Homo sapiens
  misc_RNA (1)...(19): siRNA sense strand
cgcacaacguggauaggaa

SEQ ID NO: 902615 - RNA, 19 nt, Homo sapiens
  misc_RNA (1)...(19): siRNA sense strand
gcgcacaacguggauagga

SEQ ID NO: 902616 - RNA, 19 nt, Homo sapiens
  misc_RNA (1)...(19): siRNA sense strand
gcggaacgacgugguguau

SEQ ID NO: 902617 - RNA, 19 nt, Homo sapiens
  misc_RNA (1)...(19): siRNA sense strand
gaagacagcuaaaguggaa

SEQ ID NO: 902618 - RNA, 19 nt, Homo sapiens
  misc_RNA (1)...(19): siRNA sense strand
gaagagggcuacauuuguu

SEQ ID NO: 902619 - RNA, 19 nt, Homo sapiens
  misc_RNA (1)...(19): siRNA sense strand
gaggaaagauggaugaaga

SEQ ID NO: 902620 - RNA, 19 nt, Homo sapiens
  misc_RNA (1)...(19): siRNA sense strand
gaacagggaucaucuucau

SEQ ID NO: 902621 - RNA, 19 nt, Homo sapiens
  misc_RNA (1)...(19): siRNA sense strand
ggacgggccuucugcucua

SEQ ID NO: 902622 - RNA, 19 nt, Homo sapiens
  misc_RNA (1)...(19): siRNA sense strand
caaguuauguacuggacua

SEQ ID NO: 902623 - RNA, 19 nt, Homo sapiens
  misc_RNA (1)...(19): siRNA sense strand
caagauggaaugacuauga

SEQ ID NO: 902624 - RNA, 19 nt, Homo sapiens
  misc_RNA (1)...(19): siRNA sense strand
ccaaagacauucucuaucg

SEQ ID NO: 902625 - RNA, 19 nt, Homo sapiens
  misc_RNA (1)...(19): siRNA sense strand
caaggaacguggaguuugu

SEQ ID NO: 902626 - RNA, 19 nt, Homo sapiens
  misc_RNA (1)...(19): siRNA sense strand
caagagagguccaaaucca

SEQ ID NO: 902627 - RNA, 19 nt, Homo sapiens
  misc_RNA (1)...(19): siRNA sense strand
uaacacagaaggaaacauu

SEQ ID NO: 902628 - RNA, 19 nt, Homo sapiens
  misc_RNA (1)...(19): siRNA sense strand
gaacguggaguuugucuca

SEQ ID NO: 902629 - RNA, 19 nt, Homo sapiens
  misc_RNA (1)...(19): siRNA sense strand
ggagacuggucagauguaa

SEQ ID NO: 902630 - RNA, 19 nt, Homo sapiens
  misc_RNA (1)...(19): siRNA sense strand
cgacuacaguugucuaaag

SEQ ID NO: 902631 - RNA, 19 nt, Homo sapiens
  misc_RNA (1)...(19): siRNA sense strand
gaaacgggacuaauuugug

SEQ ID NO: 902632 - RNA, 19 nt, Homo sapiens
  misc_RNA (1)...(19): siRNA sense strand
aaaggagacuggucagaug

SEQ ID NO: 902633 - RNA, 19 nt, Homo sapiens
  misc_RNA (1)...(19): siRNA sense strand
gaaggaaacauuggcauca

SEQ ID NO: 902634 - RNA, 19 nt, Homo sapiens
  misc_RNA (1)...(19): siRNA sense strand
ugaaguaccggaggaauuu

SEQ ID NO: 902635 - RNA, 19 nt, Homo sapiens
  misc_RNA (1)...(19): siRNA sense strand
aaccaucacuggcaagauu

SEQ ID NO: 902636 - RNA, 19 nt, Homo sapiens
  misc_RNA (1)...(19): siRNA sense strand
ggaugaagagggcuacauu

SEQ ID NO: 902637 - RNA, 19 nt, Homo sapiens
  misc_RNA (1)...(19): siRNA sense strand
gccaacgucuucacacaga

SEQ ID NO: 902638 - RNA, 19 nt, Homo sapiens
  misc_RNA (1)...(19): siRNA sense strand
gaugaagagggcuacauuu

SEQ ID NO: 902639 - RNA, 19 nt, Homo sapiens
  misc_RNA (1)...(19): siRNA sense strand
gaucaagccggguuucaug

SEQ ID NO: 902640 - RNA, 19 nt, Homo sapiens
  misc_RNA (1)...(19): siRNA sense strand
gguaucaucuauauaucga

SEQ ID NO: 902641 - RNA, 19 nt, Homo sapiens
  misc_RNA (1)...(19): siRNA sense strand
ggaaacgggacuaauuugu

SEQ ID NO: 902642 - RNA, 19 nt, Homo sapiens
  misc_RNA (1)...(19): siRNA sense strand
gcagcagcaugucaaguca

SEQ ID NO: 902643 - RNA, 19 nt, Homo sapiens
  misc_RNA (1)...(19): siRNA sense strand
ccacaaauccuuccacaac

SEQ ID NO: 902644 - RNA, 19 nt, Homo sapiens
  misc_RNA (1)...(19): siRNA sense strand
ggagaaggagggcaagaga

SEQ ID NO: 902645 - RNA, 19 nt, Homo sapiens
  misc_RNA (1)...(19): siRNA sense strand
caucgggccugcagagguu

SEQ ID NO: 902646 - RNA, 19 nt, Homo sapiens
  misc_RNA (1)...(19): siRNA sense strand
uagaugcccuugccucaga

SEQ ID NO: 902647 - RNA, 19 nt, Homo sapiens
  misc_RNA (1)...(19): siRNA sense strand
caaagacauucucuaucga

SEQ ID NO: 902648 - RNA, 19 nt, Homo sapiens
  misc_RNA (1)...(19): siRNA sense strand
gagaccaucuggccuugau

SEQ ID NO: 902649 - RNA, 19 nt, Homo sapiens
  misc_RNA (1)...(19): siRNA sense strand
ggccaaagacauucucuau

SEQ ID NO: 902650 - RNA, 19 nt, Homo sapiens
  misc_RNA (1)...(19): siRNA sense strand
ggaaacauuggcaucagaa

SEQ ID NO: 902651 - RNA, 19 nt, Homo sapiens
  misc_RNA (1)...(19): siRNA sense strand
cccaggaaguaggaaauua

SEQ ID NO: 902652 - RNA, 19 nt, Homo sapiens
  misc_RNA (1)...(19): siRNA sense strand
gacuuccgaucgcugguua

SEQ ID NO: 902653 - RNA, 19 nt, Homo sapiens
  misc_RNA (1)...(19): siRNA sense strand
ccaagcuccuggugucuga

SEQ ID NO: 902654 - RNA, 19 nt, Homo sapiens
  misc_RNA (1)...(19): siRNA sense strand
gaaguaccggaggaauuua

SEQ ID NO: 902655 - RNA, 19 nt, Homo sapiens
  misc_RNA (1)...(19): siRNA sense strand
acaccaaggucaucauaca

SEQ ID NO: 902656 - RNA, 19 nt, Homo sapiens
  misc_RNA (1)...(19): siRNA sense strand
aaguggagcuucagagaga

SEQ ID NO: 902657 - RNA, 19 nt, Homo sapiens
  misc_RNA (1)...(19): siRNA sense strand
ggaggaauuuaacuuugca

SEQ ID NO: 902658 - RNA, 19 nt, Homo sapiens
  misc_RNA (1)...(19): siRNA sense strand
gacauucucuaucgacuac

SEQ ID NO: 902659 - RNA, 19 nt, Homo sapiens
  misc_RNA (1)...(19): siRNA sense strand
caagggcauugugaccaua

SEQ ID NO: 902660 - RNA, 19 nt, Homo sapiens
  misc_RNA (1)...(19): siRNA sense strand
uaaaguggagcuucagaga

SEQ ID NO: 902661 - RNA, 19 nt, Homo sapiens
  misc_RNA (1)...(19): siRNA sense strand
aggaucagcugaccaagga

SEQ ID NO: 902662 - RNA, 19 nt, Homo sapiens
  misc_RNA (1)...(19): siRNA sense strand
gauuguggcuaccauuugg

SEQ ID NO: 902663 - RNA, 19 nt, Homo sapiens
  misc_RNA (1)...(19): siRNA sense strand
guugaaggccaaagacauu

SEQ ID NO: 902664 - RNA, 19 nt, Homo sapiens
  misc_RNA (1)...(19): siRNA sense strand
gaaauuacggagccugaag

SEQ ID NO: 902665 - RNA, 19 nt, Homo sapiens
  misc_RNA (1)...(19): siRNA sense strand
aagauggaaugacuaugaa

SEQ ID NO: 902666 - RNA, 19 nt, Homo sapiens
  misc_RNA (1)...(19): siRNA sense strand
ccggaggaauuuaacuuug

SEQ ID NO: 902667 - RNA, 19 nt, Homo sapiens
  misc_RNA (1)...(19): siRNA sense strand
uccgaucgcugguuaaauc

SEQ ID NO: 902668 - RNA, 19 nt, Homo sapiens
  misc_RNA (1)...(19): siRNA sense strand
ggugaaggccuuuauuguc

SEQ ID NO: 902669 - RNA, 19 nt, Homo sapiens
  misc_RNA (1)...(19): siRNA sense strand
caucauacagacauuguug

SEQ ID NO: 902670 - RNA, 19 nt, Homo sapiens
  misc_RNA (1)...(19): siRNA sense strand
ggcaagagagguccaaauc

SEQ ID NO: 902671 - RNA, 19 nt, Homo sapiens
  misc_RNA (1)...(19): siRNA sense strand
cacaaauccuuccacaaca

SEQ ID NO: 902672 - RNA, 19 nt, Homo sapiens
  misc_RNA (1)...(19): siRNA sense strand
ugaagagggcuacauuugu

SEQ ID NO: 902673 - RNA, 19 nt, Homo sapiens
  misc_RNA (1)...(19): siRNA sense strand
guuauguacuggacuacug

SEQ ID NO: 902674 - RNA, 19 nt, Homo sapiens
  misc_RNA (1)...(19): siRNA sense strand
acaaauccuuccacaacau

SEQ ID NO: 902675 - RNA, 19 nt, Homo sapiens
  misc_RNA (1)...(19): siRNA sense strand
ccauacaaguacccaagga

SEQ ID NO: 902676 - RNA, 19 nt, Homo sapiens
  misc_RNA (1)...(19): siRNA sense strand
ggauuguggcuaccauuug

SEQ ID NO: 902677 - RNA, 19 nt, Homo sapiens
  misc_RNA (1)...(19): siRNA sense strand
ccaagggcauugugaccau

SEQ ID NO: 902678 - RNA, 19 nt, Homo sapiens
  misc_RNA (1)...(19): siRNA sense strand
ggacagaggaaagauggau

SEQ ID NO: 902679 - RNA, 19 nt, Homo sapiens
  misc_RNA (1)...(19): siRNA sense strand
ucggaaacgggacuaauuu

SEQ ID NO: 902680 - RNA, 19 nt, Homo sapiens
  misc_RNA (1)...(19): siRNA sense strand
ccugugagccucuucaugu

SEQ ID NO: 902681 - RNA, 19 nt, Homo sapiens
  misc_RNA (1)...(19): siRNA sense strand
cagcaugucaagucaguga

SEQ ID NO: 902682 - RNA, 19 nt, Homo sapiens
  misc_RNA (1)...(19): siRNA sense strand
cagagaagacagcuaaagu

SEQ ID NO: 902683 - RNA, 19 nt, Homo sapiens
  misc_RNA (1)...(19): siRNA sense strand
ccaauggucaucuucuuca

SEQ ID NO: 902684 - RNA, 19 nt, Homo sapiens
  misc_RNA (1)...(19): siRNA sense strand
ccaaggaacguggaguuug

SEQ ID NO: 902685 - RNA, 19 nt, Homo sapiens
  misc_RNA (1)...(19): siRNA sense strand
uuacggagccugaagacau

SEQ ID NO: 902686 - RNA, 19 nt, Homo sapiens
  misc_RNA (1)...(19): siRNA sense strand
gaaacauuggcaucagaau

SEQ ID NO: 902687 - RNA, 19 nt, Homo sapiens
  misc_RNA (1)...(19): siRNA sense strand
ccaaggggaugaaguaaag

SEQ ID NO: 902688 - RNA, 19 nt, Homo sapiens
  misc_RNA (1)...(19): siRNA sense strand
ggacagcggguuguacagu

SEQ ID NO: 902689 - RNA, 19 nt, Homo sapiens
  misc_RNA (1)...(19): siRNA sense strand
ggaaauuacggagccugaa

SEQ ID NO: 902690 - RNA, 19 nt, Homo sapiens
  misc_RNA (1)...(19): siRNA sense strand
gauggaaugacuaugaagu

SEQ ID NO: 902691 - RNA, 19 nt, Homo sapiens
  misc_RNA (1)...(19): siRNA sense strand
acagggaucaucuucauuc

SEQ ID NO: 902692 - RNA, 19 nt, Homo sapiens
  misc_RNA (1)...(19): siRNA sense strand
uagccaacgucuucacaca

SEQ ID NO: 902693 - RNA, 19 nt, Homo sapiens
  misc_RNA (1)...(19): siRNA sense strand
gcgaacagggaucaucuuc

SEQ ID NO: 902694 - RNA, 19 nt, Homo sapiens
  misc_RNA (1)...(19): siRNA sense strand
acaaggaucagcugaccaa

SEQ ID NO: 902695 - RNA, 19 nt, Homo sapiens
  misc_RNA (1)...(19): siRNA sense strand
guggugaaggccuuuauug

SEQ ID NO: 902696 - RNA, 19 nt, Homo sapiens
  misc_RNA (1)...(19): siRNA sense strand
gucggaaacgggacuaauu

SEQ ID NO: 902697 - RNA, 19 nt, Homo sapiens
  misc_RNA (1)...(19): siRNA sense strand
agagaagacagcuaaagug

SEQ ID NO: 902698 - RNA, 19 nt, Homo sapiens
  misc_RNA (1)...(19): siRNA sense strand
cugccggucuuuaucagaa

SEQ ID NO: 902699 - RNA, 19 nt, Homo sapiens
  misc_RNA (1)...(19): siRNA sense strand
ggacucaggauggauugug

SEQ ID NO: 902700 - RNA, 19 nt, Homo sapiens
  misc_RNA (1)...(19): siRNA sense strand
aggaaacauuggcaucaga

SEQ ID NO: 902701 - RNA, 19 nt, Homo sapiens
  misc_RNA (1)...(19): siRNA sense strand
gaagaucaagccggguuuc

SEQ ID NO: 902702 - RNA, 19 nt, Homo sapiens
  misc_RNA (1)...(19): siRNA sense strand
ucauacagacauuguugaa

SEQ ID NO: 902703 - RNA, 19 nt, Homo sapiens
  misc_RNA (1)...(19): siRNA sense strand
gacuacaguugucuaaagc

SEQ ID NO: 902704 - RNA, 19 nt, Homo sapiens
  misc_RNA (1)...(19): siRNA sense strand
gggcaagagagguccaaau

SEQ ID NO: 902705 - RNA, 19 nt, Homo sapiens
  misc_RNA (1)...(19): siRNA sense strand
ugacagccccauacaagua

SEQ ID NO: 902706 - RNA, 19 nt, Homo sapiens
  misc_RNA (1)...(19): siRNA sense strand
acagaggaaagauggauga

SEQ ID NO: 902707 - RNA, 19 nt, Homo sapiens
  misc_RNA (1)...(19): siRNA sense strand
aacauuggcaucagaauca

SEQ ID NO: 902708 - RNA, 19 nt, Homo sapiens
  misc_RNA (1)...(19): siRNA sense strand
aaacauuggcaucagaauc

SEQ ID NO: 902709 - RNA, 19 nt, Homo sapiens
  misc_RNA (1)...(19): siRNA sense strand
ccaccuaacacagaaggaa

SEQ ID NO: 902710 - RNA, 19 nt, Homo sapiens
  misc_RNA (1)...(19): siRNA sense strand
gccggucuuuaucagaauu

SEQ ID NO: 902711 - RNA, 19 nt, Homo sapiens
  misc_RNA (1)...(19): siRNA sense strand
cggaggaauuuaacuuugc

SEQ ID NO: 902712 - RNA, 19 nt, Homo sapiens
  misc_RNA (1)...(19): siRNA sense strand
cauuaaugccucuggguau

SEQ ID NO: 902713 - RNA, 19 nt, Homo sapiens
  misc_RNA (1)...(19): siRNA sense strand
gcgcugccggucuuuauca

SEQ ID NO: 902714 - RNA, 19 nt, Homo sapiens
  misc_RNA (1)...(19): siRNA sense strand
cugcgaccauccuguugaa

SEQ ID NO: 902715 - RNA, 19 nt, Homo sapiens
  misc_RNA (1)...(19): siRNA sense strand
cggaaacgggacuaauuug

SEQ ID NO: 902716 - RNA, 19 nt, Homo sapiens
  misc_RNA (1)...(19): siRNA sense strand
caagauugaacggaaggaa

SEQ ID NO: 902717 - RNA, 19 nt, Homo sapiens
  misc_RNA (1)...(19): siRNA sense strand
ggaagaagaugaauccuua

SEQ ID NO: 902718 - RNA, 19 nt, Homo sapiens
  misc_RNA (1)...(19): siRNA sense strand
gagaaagcaucuaaacuaa

SEQ ID NO: 902719 - RNA, 19 nt, Homo sapiens
  misc_RNA (1)...(19): siRNA sense strand
gcaaugcucucucaagauu

SEQ ID NO: 902720 - RNA, 19 nt, Homo sapiens
  misc_RNA (1)...(19): siRNA sense strand
ggaggagggugacgaauuu

SEQ ID NO: 902721 - RNA, 19 nt, Homo sapiens
  misc_RNA (1)...(19): siRNA sense strand
gaaagcaucuaaacuaaca

SEQ ID NO: 902722 - RNA, 19 nt, Homo sapiens
  misc_RNA (1)...(19): siRNA sense strand
ugauaaaccuuggcaauua

SEQ ID NO: 902723 - RNA, 19 nt, Homo sapiens
  misc_RNA (1)...(19): siRNA sense strand
ggaaagcccuugagaaucu

SEQ ID NO: 902724 - RNA, 19 nt, Homo sapiens
  misc_RNA (1)...(19): siRNA sense strand
gauaaaccuuggcaauuaa

SEQ ID NO: 902725 - RNA, 19 nt, Homo sapiens
  misc_RNA (1)...(19): siRNA sense strand
gcaauuaaaugcaaagaag

SEQ ID NO: 902726 - RNA, 19 nt, Homo sapiens
  misc_RNA (1)...(19): siRNA sense strand
uggaggaucuuaaugauuu

SEQ ID NO: 902727 - RNA, 19 nt, Homo sapiens
  misc_RNA (1)...(19): siRNA sense strand
gcuuaaagauggagccuaa

SEQ ID NO: 902728 - RNA, 19 nt, Homo sapiens
  misc_RNA (1)...(19): siRNA sense strand
ggucuacucugguuuguga

SEQ ID NO: 902729 - RNA, 19 nt, Homo sapiens
  misc_RNA (1)...(19): siRNA sense strand
cagaugaacucgauaagga

SEQ ID NO: 902730 - RNA, 19 nt, Homo sapiens
  misc_RNA (1)...(19): siRNA sense strand
ugagaaagcaucuaaacua

SEQ ID NO: 902731 - RNA, 19 nt, Homo sapiens
  misc_RNA (1)...(19): siRNA sense strand
gagaauggauugguagaga

SEQ ID NO: 902732 - RNA, 19 nt, Homo sapiens
  misc_RNA (1)...(19): siRNA sense strand
gaagaugaauccuuaaagc

SEQ ID NO: 902733 - RNA, 19 nt, Homo sapiens
  misc_RNA (1)...(19): siRNA sense strand
gaaucucucucgaaguauu

SEQ ID NO: 902734 - RNA, 19 nt, Homo sapiens
  misc_RNA (1)...(19): siRNA sense strand
uaaugaagaugaugcaaug

SEQ ID NO: 902735 - RNA, 19 nt, Homo sapiens
  misc_RNA (1)...(19): siRNA sense strand
gaagggauuucagaagcua

SEQ ID NO: 902736 - RNA, 19 nt, Homo sapiens
  misc_RNA (1)...(19): siRNA sense strand
ggaggaucuuaaugauuua

SEQ ID NO: 902737 - RNA, 19 nt, Homo sapiens
  misc_RNA (1)...(19): siRNA sense strand
gagacaaccuggaagaaag

SEQ ID NO: 902738 - RNA, 19 nt, Homo sapiens
  misc_RNA (1)...(19): siRNA sense strand
ggaagcagaacaagagaaa

SEQ ID NO: 902739 - RNA, 19 nt, Homo sapiens
  misc_RNA (1)...(19): siRNA sense strand
guauugcaauuucagauga

SEQ ID NO: 902740 - RNA, 19 nt, Homo sapiens
  misc_RNA (1)...(19): siRNA sense strand
ccgcugaucuucuucuuug

SEQ ID NO: 902741 - RNA, 19 nt, Homo sapiens
  misc_RNA (1)...(19): siRNA sense strand
gaugaauccuuaaagcaau

SEQ ID NO: 902742 - RNA, 19 nt, Homo sapiens
  misc_RNA (1)...(19): siRNA sense strand
gcagguaguucaucaacca

SEQ ID NO: 902743 - RNA, 19 nt, Homo sapiens
  misc_RNA (1)...(19): siRNA sense strand
ggagacaaccuggaagaaa

SEQ ID NO: 902744 - RNA, 19 nt, Homo sapiens
  misc_RNA (1)...(19): siRNA sense strand
aggaaacagugacauuuaa

SEQ ID NO: 902745 - RNA, 19 nt, Homo sapiens
  misc_RNA (1)...(19): siRNA sense strand
gaagauaguggcucuaguc

SEQ ID NO: 902746 - RNA, 19 nt, Homo sapiens
  misc_RNA (1)...(19): siRNA sense strand
uaauauuucuccaccauca

SEQ ID NO: 902747 - RNA, 19 nt, Homo sapiens
  misc_RNA (1)...(19): siRNA sense strand
ugaagaugaugcaauggaa

SEQ ID NO: 902748 - RNA, 19 nt, Homo sapiens
  misc_RNA (1)...(19): siRNA sense strand
ccgcaaugcucucucaaga

SEQ ID NO: 902749 - RNA, 19 nt, Homo sapiens
  misc_RNA (1)...(19): siRNA sense strand
ugaauugaaucacauccuu

SEQ ID NO: 902750 - RNA, 19 nt, Homo sapiens
  misc_RNA (1)...(19): siRNA sense strand
gauuucagaagcuaugaua

SEQ ID NO: 902751 - RNA, 19 nt, Homo sapiens
  misc_RNA (1)...(19): siRNA sense strand
gauggagccuaagaacaaa

SEQ ID NO: 902752 - RNA, 19 nt, Homo sapiens
  misc_RNA (1)...(19): siRNA sense strand
uaaggaaacagugacauuu

SEQ ID NO: 902753 - RNA, 19 nt, Homo sapiens
  misc_RNA (1)...(19): siRNA sense strand
gaagaaaggacagaagagu

SEQ ID NO: 902754 - RNA, 19 nt, Homo sapiens
  misc_RNA (1)...(19): siRNA sense strand
gaagaagaugaauccuuaa

SEQ ID NO: 902755 - RNA, 19 nt, Homo sapiens
  misc_RNA (1)...(19): siRNA sense strand
agaagagucacuaccaaua

SEQ ID NO: 902756 - RNA, 19 nt, Homo sapiens
  misc_RNA (1)...(19): siRNA sense strand
aaggaaacagugacauuua

SEQ ID NO: 902757 - RNA, 19 nt, Homo sapiens
  misc_RNA (1)...(19): siRNA sense strand
caagugacacagaaaguga

SEQ ID NO: 902758 - RNA, 19 nt, Homo sapiens
  misc_RNA (1)...(19): siRNA sense strand
gaagagucacuaccaauac

SEQ ID NO: 902759 - RNA, 19 nt, Homo sapiens
  misc_RNA (1)...(19): siRNA sense strand
uaaaugcaaagaagccuaa

SEQ ID NO: 902760 - RNA, 19 nt, Homo sapiens
  misc_RNA (1)...(19): siRNA sense strand
gcuggaggaucuuaaugau

SEQ ID NO: 902761 - RNA, 19 nt, Homo sapiens
  misc_RNA (1)...(19): siRNA sense strand
gcaacagcaacauaagaaa

SEQ ID NO: 902762 - RNA, 19 nt, Homo sapiens
  misc_RNA (1)...(19): siRNA sense strand
ggaaacagugacauuuaau

SEQ ID NO: 902763 - RNA, 19 nt, Homo sapiens
  misc_RNA (1)...(19): siRNA sense strand
ggacaacuucaaagaacuu

SEQ ID NO: 902764 - RNA, 19 nt, Homo sapiens
  misc_RNA (1)...(19): siRNA sense strand
gagaaacguuccgcugauc

SEQ ID NO: 902765 - RNA, 19 nt, Homo sapiens
  misc_RNA (1)...(19): siRNA sense strand
gaaaugcuacagccuccaa

SEQ ID NO: 902766 - RNA, 19 nt, Homo sapiens
  misc_RNA (1)...(19): siRNA sense strand
gggaguaacaacccuggua

SEQ ID NO: 902767 - RNA, 19 nt, Homo sapiens
  misc_RNA (1)...(19): siRNA sense strand
gccaaucccauuucucauu

SEQ ID NO: 902768 - RNA, 19 nt, Homo sapiens
  misc_RNA (1)...(19): siRNA sense strand
guaggacacucacugaaaa

SEQ ID NO: 902769 - RNA, 19 nt, Homo sapiens
  misc_RNA (1)...(19): siRNA sense strand
gcagcucuaugggcagaaa

SEQ ID NO: 902770 - RNA, 19 nt, Homo sapiens
  misc_RNA (1)...(19): siRNA sense strand
gaugaacucgauaaggaaa

SEQ ID NO: 902771 - RNA, 19 nt, Homo sapiens
  misc_RNA (1)...(19): siRNA sense strand
caucuucagucuaaacaag

SEQ ID NO: 902772 - RNA, 19 nt, Homo sapiens
  misc_RNA (1)...(19): siRNA sense strand
cagcagcaacagcaacaua

SEQ ID NO: 902773 - RNA, 19 nt, Homo sapiens
  misc_RNA (1)...(19): siRNA sense strand
gaccuugcugugucuaaua

SEQ ID NO: 902774 - RNA, 19 nt, Homo sapiens
  misc_RNA (1)...(19): siRNA sense strand
gaaacguuccgcugaucuu

SEQ ID NO: 902775 - RNA, 19 nt, Homo sapiens
  misc_RNA (1)...(19): siRNA sense strand
uugaccaucuucagucuaa

SEQ ID NO: 902776 - RNA, 19 nt, Homo sapiens
  misc_RNA (1)...(19): siRNA sense strand
agaauggauugguagagaa

SEQ ID NO: 902777 - RNA, 19 nt, Homo sapiens
  misc_RNA (1)...(19): siRNA sense strand
aaguggaacuggaggacua

SEQ ID NO: 902778 - RNA, 19 nt, Homo sapiens
  misc_RNA (1)...(19): siRNA sense strand
cuacauggaagaagaugaa

SEQ ID NO: 902779 - RNA, 19 nt, Homo sapiens
  misc_RNA (1)...(19): siRNA sense strand
acagaagagucacuaccaa

SEQ ID NO: 902780 - RNA, 19 nt, Homo sapiens
  misc_RNA (1)...(19): siRNA sense strand
ucaaggagacaaccuggaa

SEQ ID NO: 902781 - RNA, 19 nt, Homo sapiens
  misc_RNA (1)...(19): siRNA sense strand
gaacaaaggauuaaaacag

SEQ ID NO: 902782 - RNA, 19 nt, Homo sapiens
  misc_RNA (1)...(19): siRNA sense strand
gaaguauugcaauuucaga

SEQ ID NO: 902783 - RNA, 19 nt, Homo sapiens
  misc_RNA (1)...(19): siRNA sense strand
uaaagauggagccuaagaa

SEQ ID NO: 902784 - RNA, 19 nt, Homo sapiens
  misc_RNA (1)...(19): siRNA sense strand
guggacaacuucaaagaac

SEQ ID NO: 902785 - RNA, 19 nt, Homo sapiens
  misc_RNA (1)...(19): siRNA sense strand
gaagaugaugcaauggaau

SEQ ID NO: 902786 - RNA, 19 nt, Homo sapiens
  misc_RNA (1)...(19): siRNA sense strand
ggaacaagaagggauuuca

SEQ ID NO: 902787 - RNA, 19 nt, Homo sapiens
  misc_RNA (1)...(19): siRNA sense strand
gaacaagaagggauuucag

SEQ ID NO: 902788 - RNA, 19 nt, Homo sapiens
  misc_RNA (1)...(19): siRNA sense strand
agauggagccuaagaacaa

SEQ ID NO: 902789 - RNA, 19 nt, Homo sapiens
  misc_RNA (1)...(19): siRNA sense strand
caguagagcauccaaagug

SEQ ID NO: 902790 - RNA, 19 nt, Homo sapiens
  misc_RNA (1)...(19): siRNA sense strand
caagaagggauuucagaag

SEQ ID NO: 902791 - RNA, 19 nt, Homo sapiens
  misc_RNA (1)...(19): siRNA sense strand
cagccaaucccauuucuca

SEQ ID NO: 902792 - RNA, 19 nt, Homo sapiens
  misc_RNA (1)...(19): siRNA sense strand
gcagaacaagagaaacguu

SEQ ID NO: 902793 - RNA, 19 nt, Homo sapiens
  misc_RNA (1)...(19): siRNA sense strand
uaaagcaauugcagguagu

SEQ ID NO: 902794 - RNA, 19 nt, Homo sapiens
  misc_RNA (1)...(19): siRNA sense strand
gaauccaaaggaacaagaa

SEQ ID NO: 902795 - RNA, 19 nt, Homo sapiens
  misc_RNA (1)...(19): siRNA sense strand
gaauugcuggaggaucuua

SEQ ID NO: 902796 - RNA, 19 nt, Homo sapiens
  misc_RNA (1)...(19): siRNA sense strand
ccuaagaacaaaggauuaa

SEQ ID NO: 902797 - RNA, 19 nt, Homo sapiens
  misc_RNA (1)...(19): siRNA sense strand
cuugcugugucuaauauuu

SEQ ID NO: 902798 - RNA, 19 nt, Homo sapiens
  misc_RNA (1)...(19): siRNA sense strand
agaaaggacagaagaguca

SEQ ID NO: 902799 - RNA, 19 nt, Homo sapiens
  misc_RNA (1)...(19): siRNA sense strand
agagaaacguuccgcugau

SEQ ID NO: 902800 - RNA, 19 nt, Homo sapiens
  misc_RNA (1)...(19): siRNA sense strand
cagauucauucgauuccuu

SEQ ID NO: 902801 - RNA, 19 nt, Homo sapiens
  misc_RNA (1)...(19): siRNA sense strand
cagcaacagcaacauaaga

SEQ ID NO: 902802 - RNA, 19 nt, Homo sapiens
  misc_RNA (1)...(19): siRNA sense strand
ggacugaagaagcacuaau

SEQ ID NO: 902803 - RNA, 19 nt, Homo sapiens
  misc_RNA (1)...(19): siRNA sense strand
uggaauugcuggaggaucu

SEQ ID NO: 902804 - RNA, 19 nt, Homo sapiens
  misc_RNA (1)...(19): siRNA sense strand
gccuaagaacaaaggauua

SEQ ID NO: 902805 - RNA, 19 nt, Homo sapiens
  misc_RNA (1)...(19): siRNA sense strand
cagaagcuaugauaaaccu

SEQ ID NO: 902806 - RNA, 19 nt, Homo sapiens
  misc_RNA (1)...(19): siRNA sense strand
ugacgaauuugagaaagca

SEQ ID NO: 902807 - RNA, 19 nt, Homo sapiens
  misc_RNA (1)...(19): siRNA sense strand
ggaagaaaggacagaagag

SEQ ID NO: 902808 - RNA, 19 nt, Homo sapiens
  misc_RNA (1)...(19): siRNA sense strand
ccaaggccguccuacuuac

SEQ ID NO: 902809 - RNA, 19 nt, Homo sapiens
  misc_RNA (1)...(19): siRNA sense strand
ugaaggaguggaagcagaa

SEQ ID NO: 902810 - RNA, 19 nt, Homo sapiens
  misc_RNA (1)...(19): siRNA sense strand
gacugaagaagcacuaaug

SEQ ID NO: 902811 - RNA, 19 nt, Homo sapiens
  misc_RNA (1)...(19): siRNA sense strand
aaaucagaauccaaaggaa

SEQ ID NO: 902812 - RNA, 19 nt, Homo sapiens
  misc_RNA (1)...(19): siRNA sense strand
uuaaagauggagccuaaga

SEQ ID NO: 902813 - RNA, 19 nt, Homo sapiens
  misc_RNA (1)...(19): siRNA sense strand
guccuacgcuggucuacuc

SEQ ID NO: 902814 - RNA, 19 nt, Homo sapiens
  misc_RNA (1)...(19): siRNA sense strand
ugacacagaaagugaagga

SEQ ID NO: 902815 - RNA, 19 nt, Homo sapiens
  misc_RNA (1)...(19): siRNA sense strand
caacagcaacauaagaaac

SEQ ID NO: 902816 - RNA, 19 nt, Homo sapiens
  misc_RNA (1)...(19): siRNA sense strand
acaagaagggauuucagaa

SEQ ID NO: 902817 - RNA, 19 nt, Homo sapiens
  misc_RNA (1)...(19): siRNA sense strand
ggagaaggcucggaaagaa

SEQ ID NO: 902818 - RNA, 19 nt, Homo sapiens
  misc_RNA (1)...(19): siRNA sense strand
gaauucagcugcuccauca

SEQ ID NO: 902819 - RNA, 19 nt, Homo sapiens
  misc_RNA (1)...(19): siRNA sense strand
gaacuggacaaaucuuaua

SEQ ID NO: 902820 - RNA, 19 nt, Homo sapiens
  misc_RNA (1)...(19): siRNA sense strand
ucucugagcucaucucuuu

SEQ ID NO: 902821 - RNA, 19 nt, Homo sapiens
  misc_RNA (1)...(19): siRNA sense strand
agacagggcugcuaaguga

SEQ ID NO: 902822 - RNA, 19 nt, Homo sapiens
  misc_RNA (1)...(19): siRNA sense strand
gcacaauauugacacagua

SEQ ID NO: 902823 - RNA, 19 nt, Homo sapiens
  misc_RNA (1)...(19): siRNA sense strand
cauauugguuccagugaua

SEQ ID NO: 902824 - RNA, 19 nt, Homo sapiens
  misc_RNA (1)...(19): siRNA sense strand
gaucugcuguucaucauca

SEQ ID NO: 902825 - RNA, 19 nt, Homo sapiens
  misc_RNA (1)...(19): siRNA sense strand
ucaaugaccucaaugugau

SEQ ID NO: 902826 - RNA, 19 nt, Homo sapiens
  misc_RNA (1)...(19): siRNA sense strand
uaacaucucugagcucauc

SEQ ID NO: 902827 - RNA, 19 nt, Homo sapiens
  misc_RNA (1)...(19): siRNA sense strand
ccaaacaccucaccaacuc

SEQ ID NO: 902828 - RNA, 19 nt, Homo sapiens
  misc_RNA (1)...(19): siRNA sense strand
acacacagcugcagaguac

SEQ ID NO: 902829 - RNA, 19 nt, Homo sapiens
  misc_RNA (1)...(19): siRNA sense strand
guaagcagcguucacauuc

SEQ ID NO: 902830 - RNA, 19 nt, Homo sapiens
  misc_RNA (1)...(19): siRNA sense strand
uuuauuggcuggcuuagaa

SEQ ID NO: 902831 - RNA, 19 nt, Homo sapiens
  misc_RNA (1)...(19): siRNA sense strand
ucagcgaacuggacaaauc

SEQ ID NO: 902832 - RNA, 19 nt, Homo sapiens
  misc_RNA (1)...(19): siRNA sense strand
gauaauauacaaccucaca

SEQ ID NO: 902833 - RNA, 19 nt, Homo sapiens
  misc_RNA (1)...(19): siRNA sense strand
gaagcacaauauugacaca

SEQ ID NO: 902834 - RNA, 19 nt, Homo sapiens
  misc_RNA (1)...(19): siRNA sense strand
acucacugcuucaccauaa

SEQ ID NO: 902835 - RNA, 19 nt, Homo sapiens
  misc_RNA (1)...(19): siRNA sense strand
gcgaacuggacaaaucuua

SEQ ID NO: 902836 - RNA, 19 nt, Homo sapiens
  misc_RNA (1)...(19): siRNA sense strand
caacucggcaugugaugaa

SEQ ID NO: 902837 - RNA, 19 nt, Homo sapiens
  misc_RNA (1)...(19): siRNA sense strand
ggaacucccucuugcucau

SEQ ID NO: 902838 - RNA, 19 nt, Homo sapiens
  misc_RNA (1)...(19): siRNA sense strand
ccucuccaguguagcaaua

SEQ ID NO: 902839 - RNA, 19 nt, Homo sapiens
  misc_RNA (1)...(19): siRNA sense strand
gaacgauacuuugaauucc

SEQ ID NO: 902840 - RNA, 19 nt, Homo sapiens
  misc_RNA (1)...(19): siRNA sense strand
gcuccgaucugcuguucau

SEQ ID NO: 902841 - RNA, 19 nt, Homo sapiens
  misc_RNA (1)...(19): siRNA sense strand
gcccuggccuugcucaugu

SEQ ID NO: 902842 - RNA, 19 nt, Homo sapiens
  misc_RNA (1)...(19): siRNA sense strand
gaucuccucagcagaaaga

SEQ ID NO: 902843 - RNA, 19 nt, Homo sapiens
  misc_RNA (1)...(19): siRNA sense strand
uuauguguguugaaggaua

SEQ ID NO: 902844 - RNA, 19 nt, Homo sapiens
  misc_RNA (1)...(19): siRNA sense strand
cccagaagcacaauauuga

SEQ ID NO: 902845 - RNA, 19 nt, Homo sapiens
  misc_RNA (1)...(19): siRNA sense strand
agaacgauacuuugaauuc

SEQ ID NO: 902846 - RNA, 19 nt, Homo sapiens
  misc_RNA (1)...(19): siRNA sense strand
agcgguaccuggcauguaa

SEQ ID NO: 902847 - RNA, 19 nt, Homo sapiens
  misc_RNA (1)...(19): siRNA sense strand
ugaauucccuuugcuagag

SEQ ID NO: 902848 - RNA, 19 nt, Homo sapiens
  misc_RNA (1)...(19): siRNA sense strand
cugagugucuuaugugugu

SEQ ID NO: 902849 - RNA, 19 nt, Homo sapiens
  misc_RNA (1)...(19): siRNA sense strand
guuagccucuccaguguag

SEQ ID NO: 902850 - RNA, 19 nt, Homo sapiens
  misc_RNA (1)...(19): siRNA sense strand
caauauugacacaguaguu

SEQ ID NO: 902851 - RNA, 19 nt, Homo sapiens
  misc_RNA (1)...(19): siRNA sense strand
caaaggacugcgucuggaa

SEQ ID NO: 902852 - RNA, 19 nt, Homo sapiens
  misc_RNA (1)...(19): siRNA sense strand
ccacccagaagcacaauau

SEQ ID NO: 902853 - RNA, 19 nt, Homo sapiens
  misc_RNA (1)...(19): siRNA sense strand
cuggacaaaucuuauaauc

SEQ ID NO: 902854 - RNA, 19 nt, Homo sapiens
  misc_RNA (1)...(19): siRNA sense strand
cugaagauccggcagaaga

SEQ ID NO: 902855 - RNA, 19 nt, Homo sapiens
  misc_RNA (1)...(19): siRNA sense strand
ucuccaguguagcaauaua

SEQ ID NO: 902856 - RNA, 19 nt, Homo sapiens
  misc_RNA (1)...(19): siRNA sense strand
ccuccgagcuaacaucucu

SEQ ID NO: 902857 - RNA, 19 nt, Homo sapiens
  misc_RNA (1)...(19): siRNA sense strand
gaguacaugcucucagaug

SEQ ID NO: 902858 - RNA, 19 nt, Homo sapiens
  misc_RNA (1)...(19): siRNA sense strand
gagcgguaccuggcaugua

SEQ ID NO: 902859 - RNA, 19 nt, Homo sapiens
  misc_RNA (1)...(19): siRNA sense strand
ucaaugugauccuucuuuu

SEQ ID NO: 902860 - RNA, 19 nt, Homo sapiens
  misc_RNA (1)...(19): siRNA sense strand
ggacaaacgacuuuuaucu

SEQ ID NO: 902861 - RNA, 19 nt, Homo sapiens
  misc_RNA (1)...(19): siRNA sense strand
uaagugaugagacccaugu

SEQ ID NO: 902862 - RNA, 19 nt, Homo sapiens
  misc_RNA (1)...(19): siRNA sense strand
ccuauaccuuggucauuuc

SEQ ID NO: 902863 - RNA, 19 nt, Homo sapiens
  misc_RNA (1)...(19): siRNA sense strand
accuauaccuuggucauuu

SEQ ID NO: 902864 - RNA, 19 nt, Homo sapiens
  misc_RNA (1)...(19): siRNA sense strand
ggauacaaccacccagaag

SEQ ID NO: 902865 - RNA, 19 nt, Homo sapiens
  misc_RNA (1)...(19): siRNA sense strand
ccuauguguucuggaauga

SEQ ID NO: 902866 - RNA, 19 nt, Homo sapiens
  misc_RNA (1)...(19): siRNA sense strand
augagaugcucccagcuuu

SEQ ID NO: 902867 - RNA, 19 nt, Homo sapiens
  misc_RNA (1)...(19): siRNA sense strand
ccauauugguuccagugau

SEQ ID NO: 902868 - RNA, 19 nt, Homo sapiens
  misc_RNA (1)...(19): siRNA sense strand
uguaagcagcguucacauu

SEQ ID NO: 902869 - RNA, 19 nt, Homo sapiens
  misc_RNA (1)...(19): siRNA sense strand
caucagcgaacuggacaaa

SEQ ID NO: 902870 - RNA, 19 nt, Homo sapiens
  misc_RNA (1)...(19): siRNA sense strand
gacuuuauuggcuggcuua

SEQ ID NO: 902871 - RNA, 19 nt, Homo sapiens
  misc_RNA (1)...(19): siRNA sense strand
caaccacccagaagcacaa

SEQ ID NO: 902872 - RNA, 19 nt, Homo sapiens
  misc_RNA (1)...(19): siRNA sense strand
ucuuauguguguugaagga

SEQ ID NO: 902873 - RNA, 19 nt, Homo sapiens
  misc_RNA (1)...(19): siRNA sense strand
caucaaugaccucaaugug

SEQ ID NO: 902874 - RNA, 19 nt, Homo sapiens
  misc_RNA (1)...(19): siRNA sense strand
ucccaucaaugaccucaau

SEQ ID NO: 902875 - RNA, 19 nt, Homo sapiens
  misc_RNA (1)...(19): siRNA sense strand
acaaacgacuuuuaucugu

SEQ ID NO: 902876 - RNA, 19 nt, Homo sapiens
  misc_RNA (1)...(19): siRNA sense strand
ugguuccagugauaauaua

SEQ ID NO: 902877 - RNA, 19 nt, Homo sapiens
  misc_RNA (1)...(19): siRNA sense strand
cgaacuggacaaaucuuau

SEQ ID NO: 902878 - RNA, 19 nt, Homo sapiens
  misc_RNA (1)...(19): siRNA sense strand
caugcaggcugacaucacu

SEQ ID NO: 902879 - RNA, 19 nt, Homo sapiens
  misc_RNA (1)...(19): siRNA sense strand
gcugaugucccuggcauuc

SEQ ID NO: 902880 - RNA, 19 nt, Homo sapiens
  misc_RNA (1)...(19): siRNA sense strand
cagaagcacaauauugaca

SEQ ID NO: 902881 - RNA, 19 nt, Homo sapiens
  misc_RNA (1)...(19): siRNA sense strand
ggucuccgaucagcugcuu

SEQ ID NO: 902882 - RNA, 19 nt, Homo sapiens
  misc_RNA (1)...(19): siRNA sense strand
caagacagggcugcuaagu

SEQ ID NO: 902883 - RNA, 19 nt, Homo sapiens
  misc_RNA (1)...(19): siRNA sense strand
gaagauccggcagaagagu

SEQ ID NO: 902884 - RNA, 19 nt, Homo sapiens
  misc_RNA (1)...(19): siRNA sense strand
caucaagacagggcugcua

SEQ ID NO: 902885 - RNA, 19 nt, Homo sapiens
  misc_RNA (1)...(19): siRNA sense strand
caugugaugaacacccaua

SEQ ID NO: 902886 - RNA, 19 nt, Homo sapiens
  misc_RNA (1)...(19): siRNA sense strand
cacaguaguugauuuuaug

SEQ ID NO: 902887 - RNA, 19 nt, Homo sapiens
  misc_RNA (1)...(19): siRNA sense strand
gaagaguuccgaccccuau

SEQ ID NO: 902888 - RNA, 19 nt, Homo sapiens
  misc_RNA (1)...(19): siRNA sense strand
ugucuuauguguguugaag

SEQ ID NO: 902889 - RNA, 19 nt, Homo sapiens
  misc_RNA (1)...(19): siRNA sense strand
uaugagaugcucccagcuu

SEQ ID NO: 902890 - RNA, 19 nt, Homo sapiens
  misc_RNA (1)...(19): siRNA sense strand
caaccucacacggcuaugu

SEQ ID NO: 902891 - RNA, 19 nt, Homo sapiens
  misc_RNA (1)...(19): siRNA sense strand
gcacacacagcugcagagu

SEQ ID NO: 902892 - RNA, 19 nt, Homo sapiens
  misc_RNA (1)...(19): siRNA sense strand
uugacacaguaguugauuu

SEQ ID NO: 902893 - RNA, 19 nt, Homo sapiens
  misc_RNA (1)...(19): siRNA sense strand
ggcugagugucuuaugugu

SEQ ID NO: 902894 - RNA, 19 nt, Homo sapiens
  misc_RNA (1)...(19): siRNA sense strand
ggaccggauagucaaguuc

SEQ ID NO: 902895 - RNA, 19 nt, Homo sapiens
  misc_RNA (1)...(19): siRNA sense strand
ggcauucgcccaggaguuc

SEQ ID NO: 902896 - RNA, 19 nt, Homo sapiens
  misc_RNA (1)...(19): siRNA sense strand
ugaccucaaugugauccuu

SEQ ID NO: 902897 - RNA, 19 nt, Homo sapiens
  misc_RNA (1)...(19): siRNA sense strand
gagaaggcucggaaagaac

SEQ ID NO: 902898 - RNA, 19 nt, Homo sapiens
  misc_RNA (1)...(19): siRNA sense strand
uggagaaggcucggaaaga

SEQ ID NO: 902899 - RNA, 19 nt, Homo sapiens
  misc_RNA (1)...(19): siRNA sense strand
uaagcagcguucacauucg

SEQ ID NO: 902900 - RNA, 19 nt, Homo sapiens
  misc_RNA (1)...(19): siRNA sense strand
ugacacaguaguugauuuu

SEQ ID NO: 902901 - RNA, 19 nt, Homo sapiens
  misc_RNA (1)...(19): siRNA sense strand
acccagaagcacaauauug

SEQ ID NO: 902902 - RNA, 19 nt, Homo sapiens
  misc_RNA (1)...(19): siRNA sense strand
ucacaugcaggcugacauc

SEQ ID NO: 902903 - RNA, 19 nt, Homo sapiens
  misc_RNA (1)...(19): siRNA sense strand
ggaacuacuuugugaaauu

SEQ ID NO: 902904 - RNA, 19 nt, Homo sapiens
  misc_RNA (1)...(19): siRNA sense strand
gagaagaauuugaugaaga

SEQ ID NO: 902905 - RNA, 19 nt, Homo sapiens
  misc_RNA (1)...(19): siRNA sense strand
cuaaggaacuacuuuguga

SEQ ID NO: 902906 - RNA, 19 nt, Homo sapiens
  misc_RNA (1)...(19): siRNA sense strand
ggucaagugugcaaacaga

SEQ ID NO: 902907 - RNA, 19 nt, Homo sapiens
  misc_RNA (1)...(19): siRNA sense strand
gaaagugauugagcagaau

SEQ ID NO: 902908 - RNA, 19 nt, Homo sapiens
  misc_RNA (1)...(19): siRNA sense strand
ggcccuagguauugacuuu

SEQ ID NO: 902909 - RNA, 19 nt, Homo sapiens
  misc_RNA (1)...(19): siRNA sense strand
agaaagugauugagcagaa

SEQ ID NO: 902910 - RNA, 19 nt, Homo sapiens
  misc_RNA (1)...(19): siRNA sense strand
ggagaagaauuugaugaag

SEQ ID NO: 902911 - RNA, 19 nt, Homo sapiens
  misc_RNA (1)...(19): siRNA sense strand
gcaagaguuugguuaucug

SEQ ID NO: 902912 - RNA, 19 nt, Homo sapiens
  misc_RNA (1)...(19): siRNA sense strand
ggaaauguucugugaaggu

SEQ ID NO: 902913 - RNA, 19 nt, Homo sapiens
  misc_RNA (1)...(19): siRNA sense strand
caacuucgagggcuacaug

SEQ ID NO: 902914 - RNA, 19 nt, Homo sapiens
  misc_RNA (1)...(19): siRNA sense strand
caaacagacauuccagaga

SEQ ID NO: 902915 - RNA, 19 nt, Homo sapiens
  misc_RNA (1)...(19): siRNA sense strand
aacagaggcuggacccauu

SEQ ID NO: 902916 - RNA, 19 nt, Homo sapiens
  misc_RNA (1)...(19): siRNA sense strand
gaucgaaggagacaaacuc

SEQ ID NO: 902917 - RNA, 19 nt, Homo sapiens
  misc_RNA (1)...(19): siRNA sense strand
gcucagcagcgacaacuuc

SEQ ID NO: 902918 - RNA, 19 nt, Homo sapiens
  misc_RNA (1)...(19): siRNA sense strand
gaagccacagaaagugauu

SEQ ID NO: 902919 - RNA, 19 nt, Homo sapiens
  misc_RNA (1)...(19): siRNA sense strand
gaccucagcgguacuugga

SEQ ID NO: 902920 - RNA, 19 nt, Homo sapiens
  misc_RNA (1)...(19): siRNA sense strand
aaaugcaagaguuugguua

SEQ ID NO: 902921 - RNA, 19 nt, Homo sapiens
  misc_RNA (1)...(19): siRNA sense strand
ugacuuugccacucguaaa

SEQ ID NO: 902922 - RNA, 19 nt, Homo sapiens
  misc_RNA (1)...(19): siRNA sense strand
acagaggccuggacaacag

SEQ ID NO: 902923 - RNA, 19 nt, Homo sapiens
  misc_RNA (1)...(19): siRNA sense strand
uaacagaggccuggacaac

SEQ ID NO: 902924 - RNA, 19 nt, Homo sapiens
  misc_RNA (1)...(19): siRNA sense strand
uggagaagaauuugaugaa

SEQ ID NO: 902925 - RNA, 19 nt, Homo sapiens
  misc_RNA (1)...(19): siRNA sense strand
aaggaacuacuuugugaaa

SEQ ID NO: 902926 - RNA, 19 nt, Homo sapiens
  misc_RNA (1)...(19): siRNA sense strand
cuggaaauguucugugaag

SEQ ID NO: 902927 - RNA, 19 nt, Homo sapiens
  misc_RNA (1)...(19): siRNA sense strand
gcucaccuguauccagaag

SEQ ID NO: 902928 - RNA, 19 nt, Homo sapiens
  misc_RNA (1)...(19): siRNA sense strand
gaaggucaagugugcaaac

SEQ ID NO: 902929 - RNA, 19 nt, Homo sapiens
  misc_RNA (1)...(19): siRNA sense strand
cagccuaaggaacuacuuu

SEQ ID NO: 902930 - RNA, 19 nt, Homo sapiens
  misc_RNA (1)...(19): siRNA sense strand
caugcuggcccuagguauu

SEQ ID NO: 902931 - RNA, 19 nt, Homo sapiens
  misc_RNA (1)...(19): siRNA sense strand
ugcaagaguuugguuaucu

SEQ ID NO: 902932 - RNA, 19 nt, Homo sapiens
  misc_RNA (1)...(19): siRNA sense strand
uaaggaacuacuuugugaa

SEQ ID NO: 902933 - RNA, 19 nt, Homo sapiens
  misc_RNA (1)...(19): siRNA sense strand
cacacgaacagcagccuaa

SEQ ID NO: 902934 - RNA, 19 nt, Homo sapiens
  misc_RNA (1)...(19): siRNA sense strand
acgaacagcagccuaagga

SEQ ID NO: 902935 - RNA, 19 nt, Homo sapiens
  misc_RNA (1)...(19): siRNA sense strand
ccuaaggaacuacuuugug

SEQ ID NO: 902936 - RNA, 19 nt, Homo sapiens
  misc_RNA (1)...(19): siRNA sense strand
acagcagccuaaggaacua

SEQ ID NO: 902937 - RNA, 19 nt, Homo sapiens
  misc_RNA (1)...(19): siRNA sense strand
uugguuaucugggacaaug

SEQ ID NO: 902938 - RNA, 19 nt, Homo sapiens
  misc_RNA (1)...(19): siRNA sense strand
caacagaaaaugcaagagu

SEQ ID NO: 902939 - RNA, 19 nt, Homo sapiens
  misc_RNA (1)...(19): siRNA sense strand
gaaggcaucucgaaaguug

SEQ ID NO: 902940 - RNA, 19 nt, Homo sapiens
  misc_RNA (1)...(19): siRNA sense strand
ggaauuagauauaggagau

SEQ ID NO: 902941 - RNA, 19 nt, Homo sapiens
  misc_RNA (1)...(19): siRNA sense strand
gaaguaaacuguguaggau

SEQ ID NO: 902942 - RNA, 19 nt, Homo sapiens
  misc_RNA (1)...(19): siRNA sense strand
gcaaggugauccagauuug

SEQ ID NO: 902943 - RNA, 19 nt, Homo sapiens
  misc_RNA (1)...(19): siRNA sense strand
ggagucugauucuacaaua

SEQ ID NO: 902944 - RNA, 19 nt, Homo sapiens
  misc_RNA (1)...(19): siRNA sense strand
aguaaacuguguaggauua

SEQ ID NO: 902945 - RNA, 19 nt, Homo sapiens
  misc_RNA (1)...(19): siRNA sense strand
ggagaugccacccaaguuu

SEQ ID NO: 902946 - RNA, 19 nt, Homo sapiens
  misc_RNA (1)...(19): siRNA sense strand
cagcucaucugccuuguug

SEQ ID NO: 902947 - RNA, 19 nt, Homo sapiens
  misc_RNA (1)...(19): siRNA sense strand
gagaugccacccaaguuua

SEQ ID NO: 902948 - RNA, 19 nt, Homo sapiens
  misc_RNA (1)...(19): siRNA sense strand
gcacucacccuaaguaucu

SEQ ID NO: 902949 - RNA, 19 nt, Homo sapiens
  misc_RNA (1)...(19): siRNA sense strand
cagauuugccgaugucuuu

SEQ ID NO: 902950 - RNA, 19 nt, Homo sapiens
  misc_RNA (1)...(19): siRNA sense strand
ugaaguaaacuguguagga

SEQ ID NO: 902951 - RNA, 19 nt, Homo sapiens
  misc_RNA (1)...(19): siRNA sense strand
ccucagccauaacaggaua

SEQ ID NO: 902952 - RNA, 19 nt, Homo sapiens
  misc_RNA (1)...(19): siRNA sense strand
ggauaagggagaucuugaa

SEQ ID NO: 902953 - RNA, 19 nt, Homo sapiens
  misc_RNA (1)...(19): siRNA sense strand
gccagacccucagaauauu

SEQ ID NO: 902954 - RNA, 19 nt, Homo sapiens
  misc_RNA (1)...(19): siRNA sense strand
uauguagcguucuugguuu

SEQ ID NO: 902955 - RNA, 19 nt, Homo sapiens
  misc_RNA (1)...(19): siRNA sense strand
ggcaugaaguaaacugugu

SEQ ID NO: 902956 - RNA, 19 nt, Homo sapiens
  misc_RNA (1)...(19): siRNA sense strand
gaugggcacucacccuaag

SEQ ID NO: 902957 - RNA, 19 nt, Homo sapiens
  misc_RNA (1)...(19): siRNA sense strand
ugccagacccucagaauau

SEQ ID NO: 902958 - RNA, 19 nt, Homo sapiens
  misc_RNA (1)...(19): siRNA sense strand
cacccuaaguaucuagaaa

SEQ ID NO: 902959 - RNA, 19 nt, Homo sapiens
  misc_RNA (1)...(19): siRNA sense strand
gauccagauuugccgaugu

SEQ ID NO: 902960 - RNA, 19 nt, Homo sapiens
  misc_RNA (1)...(19): siRNA sense strand
ggaugggcacucacccuaa

SEQ ID NO: 902961 - RNA, 19 nt, Homo sapiens
  misc_RNA (1)...(19): siRNA sense strand
gauggaauuagauauagga

SEQ ID NO: 902962 - RNA, 19 nt, Homo sapiens
  misc_RNA (1)...(19): siRNA sense strand
caaaagcuggcaugaagua

SEQ ID NO: 902963 - RNA, 19 nt, Homo sapiens
  misc_RNA (1)...(19): siRNA sense strand
cugcuucccucagccauaa

SEQ ID NO: 902964 - RNA, 19 nt, Homo sapiens
  misc_RNA (1)...(19): siRNA sense strand
gcaugaaguaaacugugua

SEQ ID NO: 902965 - RNA, 19 nt, Homo sapiens
  misc_RNA (1)...(19): siRNA sense strand
uaccagaacuccagcucau

SEQ ID NO: 902966 - RNA, 19 nt, Homo sapiens
  misc_RNA (1)...(19): siRNA sense strand
gauaagggagaucuugaag

SEQ ID NO: 902967 - RNA, 19 nt, Homo sapiens
  misc_RNA (1)...(19): siRNA sense strand
guugcaaggugauccagau

SEQ ID NO: 902968 - RNA, 19 nt, Homo sapiens
  misc_RNA (1)...(19): siRNA sense strand
gagucugauucuacaauag

SEQ ID NO: 902969 - RNA, 19 nt, Homo sapiens
  misc_RNA (1)...(19): siRNA sense strand
aaagcuggcaugaaguaaa

SEQ ID NO: 902970 - RNA, 19 nt, Homo sapiens
  misc_RNA (1)...(19): siRNA sense strand
cccuaaguaucuagaaaug

SEQ ID NO: 902971 - RNA, 19 nt, Homo sapiens
  misc_RNA (1)...(19): siRNA sense strand
ccagacccucagaauauuu

SEQ ID NO: 902972 - RNA, 19 nt, Homo sapiens
  misc_RNA (1)...(19): siRNA sense strand
uuauguagcguucuugguu

SEQ ID NO: 902973 - RNA, 19 nt, Homo sapiens
  misc_RNA (1)...(19): siRNA sense strand
auguagcguucuugguuua

SEQ ID NO: 902974 - RNA, 19 nt, Homo sapiens
  misc_RNA (1)...(19): siRNA sense strand
gccgaugucuuuuacuuug

SEQ ID NO: 902975 - RNA, 19 nt, Homo sapiens
  misc_RNA (1)...(19): siRNA sense strand
uugaaggcaucucgaaagu

SEQ ID NO: 902976 - RNA, 19 nt, Homo sapiens
  misc_RNA (1)...(19): siRNA sense strand
ccuuguugguacugagaua

SEQ ID NO: 902977 - RNA, 19 nt, Homo sapiens
  misc_RNA (1)...(19): siRNA sense strand
ggaccucauggaaagcaaa

SEQ ID NO: 902978 - RNA, 19 nt, Homo sapiens
  misc_RNA (1)...(19): siRNA sense strand
aagcuggcaugaaguaaac

SEQ ID NO: 902979 - RNA, 19 nt, Homo sapiens
  misc_RNA (1)...(19): siRNA sense strand
ccagaacuccagcucaucu

SEQ ID NO: 902980 - RNA, 19 nt, Homo sapiens
  misc_RNA (1)...(19): siRNA sense strand
cugccagacccucagaaua

SEQ ID NO: 902981 - RNA, 19 nt, Homo sapiens
  misc_RNA (1)...(19): siRNA sense strand
uaccuggaccucauggaaa

SEQ ID NO: 902982 - RNA, 19 nt, Homo sapiens
  misc_RNA (1)...(19): siRNA sense strand
caggauaagggagaucuug

SEQ ID NO: 902983 - RNA, 19 nt, Homo sapiens
  misc_RNA (1)...(19): siRNA sense strand
gcucaucugccuuguuggu

SEQ ID NO: 902984 - RNA, 19 nt, Homo sapiens
  misc_RNA (1)...(19): siRNA sense strand
gggcacucacccuaaguau

SEQ ID NO: 902985 - RNA, 19 nt, Homo sapiens
  misc_RNA (1)...(19): siRNA sense strand
aaccagagcuucagaaaua

SEQ ID NO: 902986 - RNA, 19 nt, Homo sapiens
  misc_RNA (1)...(19): siRNA sense strand
gaaaguguguccagcuuaa

SEQ ID NO: 902987 - RNA, 19 nt, Homo sapiens
  misc_RNA (1)...(19): siRNA sense strand
aaaggaagcugcuaucuug

SEQ ID NO: 902988 - RNA, 19 nt, Homo sapiens
  misc_RNA (1)...(19): siRNA sense strand
agacagaccugcugccuaa

SEQ ID NO: 902989 - RNA, 19 nt, Homo sapiens
  misc_RNA (1)...(19): siRNA sense strand
ggaagaagaaugacagaaa

SEQ ID NO: 902990 - RNA, 19 nt, Homo sapiens
  misc_RNA (1)...(19): siRNA sense strand
ggacugagcaggugauuau

SEQ ID NO: 902991 - RNA, 19 nt, Homo sapiens
  misc_RNA (1)...(19): siRNA sense strand
gaagaagaaugacagaaag

SEQ ID NO: 902992 - RNA, 19 nt, Homo sapiens
  misc_RNA (1)...(19): siRNA sense strand
caggagagcuucugccauu

SEQ ID NO: 902993 - RNA, 19 nt, Homo sapiens
  misc_RNA (1)...(19): siRNA sense strand
gcaagagggcugcaccuua

SEQ ID NO: 902994 - RNA, 19 nt, Homo sapiens
  misc_RNA (1)...(19): siRNA sense strand
ggagaggccugcacacuca

SEQ ID NO: 902995 - RNA, 19 nt, Homo sapiens
  misc_RNA (1)...(19): siRNA sense strand
caucagagcuggaguuugg

SEQ ID NO: 902996 - RNA, 19 nt, Homo sapiens
  misc_RNA (1)...(19): siRNA sense strand
caagagggcugcaccuuag

SEQ ID NO: 902997 - RNA, 19 nt, Homo sapiens
  misc_RNA (1)...(19): siRNA sense strand
agaaagaggugaaugaagu

SEQ ID NO: 902998 - RNA, 19 nt, Homo sapiens
  misc_RNA (1)...(19): siRNA sense strand
ggacucugcuccagugaug

SEQ ID NO: 902999 - RNA, 19 nt, Homo sapiens
  misc_RNA (1)...(19): siRNA sense strand
acacaaagaugacgugaag

SEQ ID NO: 903000 - RNA, 19 nt, Homo sapiens
  misc_RNA (1)...(19): siRNA sense strand
cgacaacugugaagaaagu

SEQ ID NO: 903001 - RNA, 19 nt, Homo sapiens
  misc_RNA (1)...(19): siRNA sense strand
gaagauggaaccuuguuau

SEQ ID NO: 903002 - RNA, 19 nt, Homo sapiens
  misc_RNA (1)...(19): siRNA sense strand
ugaaggcgcucagaaaguu

SEQ ID NO: 903003 - RNA, 19 nt, Homo sapiens
  misc_RNA (1)...(19): siRNA sense strand
gauggaaccuuguuauacu

SEQ ID NO: 903004 - RNA, 19 nt, Homo sapiens
  misc_RNA (1)...(19): siRNA sense strand
ggagaagggucacuauggu

SEQ ID NO: 903005 - RNA, 19 nt, Homo sapiens
  misc_RNA (1)...(19): siRNA sense strand
ccaauaugauucacguuga

SEQ ID NO: 903006 - RNA, 19 nt, Homo sapiens
  misc_RNA (1)...(19): siRNA sense strand
gcaucaaguuucagaagga

SEQ ID NO: 903007 - RNA, 19 nt, Homo sapiens
  misc_RNA (1)...(19): siRNA sense strand
gaugaaacucugaaaguga

SEQ ID NO: 903008 - RNA, 19 nt, Homo sapiens
  misc_RNA (1)...(19): siRNA sense strand
ugaguaaccuggugaugga

SEQ ID NO: 903009 - RNA, 19 nt, Homo sapiens
  misc_RNA (1)...(19): siRNA sense strand
ccagugagcucgggauuca

SEQ ID NO: 903010 - RNA, 19 nt, Homo sapiens
  misc_RNA (1)...(19): siRNA sense strand
gaaauccagauccugagua

SEQ ID NO: 903011 - RNA, 19 nt, Homo sapiens
  misc_RNA (1)...(19): siRNA sense strand
ucaaguuucagaaggauua

SEQ ID NO: 903012 - RNA, 19 nt, Homo sapiens
  misc_RNA (1)...(19): siRNA sense strand
caucuagaccggcuuauga

SEQ ID NO: 903013 - RNA, 19 nt, Homo sapiens
  misc_RNA (1)...(19): siRNA sense strand
ccaagaaaaugaagaagaa

SEQ ID NO: 903014 - RNA, 19 nt, Homo sapiens
  misc_RNA (1)...(19): siRNA sense strand
aaauccagauccugaguaa

SEQ ID NO: 903015 - RNA, 19 nt, Homo sapiens
  misc_RNA (1)...(19): siRNA sense strand
gaaccuuguuauacuaaag

SEQ ID NO: 903016 - RNA, 19 nt, Homo sapiens
  misc_RNA (1)...(19): siRNA sense strand
gcaggugauuauuucaaga

SEQ ID NO: 903017 - RNA, 19 nt, Homo sapiens
  misc_RNA (1)...(19): siRNA sense strand
ucccagagcugcccucaga

SEQ ID NO: 903018 - RNA, 19 nt, Homo sapiens
  misc_RNA (1)...(19): siRNA sense strand
ugaaugaagucagccagaa

SEQ ID NO: 903019 - RNA, 19 nt, Homo sapiens
  misc_RNA (1)...(19): siRNA sense strand
caagguagcccguauucau

SEQ ID NO: 903020 - RNA, 19 nt, Homo sapiens
  misc_RNA (1)...(19): siRNA sense strand
gagccagguuucugaggaa

SEQ ID NO: 903021 - RNA, 19 nt, Homo sapiens
  misc_RNA (1)...(19): siRNA sense strand
ggaagcugcuaucuugaag

SEQ ID NO: 903022 - RNA, 19 nt, Homo sapiens
  misc_RNA (1)...(19): siRNA sense strand
ugacauggaucagauugug

SEQ ID NO: 903023 - RNA, 19 nt, Homo sapiens
  misc_RNA (1)...(19): siRNA sense strand
uuuagaagcugugcaauuc

SEQ ID NO: 903024 - RNA, 19 nt, Homo sapiens
  misc_RNA (1)...(19): siRNA sense strand
gacccucaguaacgaagua

SEQ ID NO: 903025 - RNA, 19 nt, Homo sapiens
  misc_RNA (1)...(19): siRNA sense strand
ggaaccuuguuauacuaaa

SEQ ID NO: 903026 - RNA, 19 nt, Homo sapiens
  misc_RNA (1)...(19): siRNA sense strand
gagcaucuagaccggcuua

SEQ ID NO: 903027 - RNA, 19 nt, Homo sapiens
  misc_RNA (1)...(19): siRNA sense strand
gcacuggcguccacaugca

SEQ ID NO: 903028 - RNA, 19 nt, Homo sapiens
  misc_RNA (1)...(19): siRNA sense strand
caaaccagagcuucagaaa

SEQ ID NO: 903029 - RNA, 19 nt, Homo sapiens
  misc_RNA (1)...(19): siRNA sense strand
gaagagaugggagggcaaa

SEQ ID NO: 903030 - RNA, 19 nt, Homo sapiens
  misc_RNA (1)...(19): siRNA sense strand
gggcaaguguaccgaggaa

SEQ ID NO: 903031 - RNA, 19 nt, Homo sapiens
  misc_RNA (1)...(19): siRNA sense strand
uaaaggaagcugcuaucuu

SEQ ID NO: 903032 - RNA, 19 nt, Homo sapiens
  misc_RNA (1)...(19): siRNA sense strand
ggacacagaacuacaugca

SEQ ID NO: 903033 - RNA, 19 nt, Homo sapiens
  misc_RNA (1)...(19): siRNA sense strand
ugaugaaacucugaaagug

SEQ ID NO: 903034 - RNA, 19 nt, Homo sapiens
  misc_RNA (1)...(19): siRNA sense strand
gaacuuccagaccaccaaa

SEQ ID NO: 903035 - RNA, 19 nt, Homo sapiens
  misc_RNA (1)...(19): siRNA sense strand
gugaaaguguguccagcuu

SEQ ID NO: 903036 - RNA, 19 nt, Homo sapiens
  misc_RNA (1)...(19): siRNA sense strand
gaaauacgagcaguucauc

SEQ ID NO: 903037 - RNA, 19 nt, Homo sapiens
  misc_RNA (1)...(19): siRNA sense strand
gcagcaccauccgaaagaa

SEQ ID NO: 903038 - RNA, 19 nt, Homo sapiens
  misc_RNA (1)...(19): siRNA sense strand
caagagccgcuucagauuc

SEQ ID NO: 903039 - RNA, 19 nt, Homo sapiens
  misc_RNA (1)...(19): siRNA sense strand
uacaucagauccugcuuga

SEQ ID NO: 903040 - RNA, 19 nt, Homo sapiens
  misc_RNA (1)...(19): siRNA sense strand
gcaaaccagagcuucagaa

SEQ ID NO: 903041 - RNA, 19 nt, Homo sapiens
  misc_RNA (1)...(19): siRNA sense strand
ugcaggagcuaauggagaa

SEQ ID NO: 903042 - RNA, 19 nt, Homo sapiens
  misc_RNA (1)...(19): siRNA sense strand
acauugaucuggugguuca

SEQ ID NO: 903043 - RNA, 19 nt, Homo sapiens
  misc_RNA (1)...(19): siRNA sense strand
cagcuuaacagaucuaaag

SEQ ID NO: 903044 - RNA, 19 nt, Homo sapiens
  misc_RNA (1)...(19): siRNA sense strand
caagaggcacuaguucaaa

SEQ ID NO: 903045 - RNA, 19 nt, Homo sapiens
  misc_RNA (1)...(19): siRNA sense strand
gaaacucugaaagugauaa

SEQ ID NO: 903046 - RNA, 19 nt, Homo sapiens
  misc_RNA (1)...(19): siRNA sense strand
gaucaagguagcccguauu

SEQ ID NO: 903047 - RNA, 19 nt, Homo sapiens
  misc_RNA (1)...(19): siRNA sense strand
gcacacucacugcccauga

SEQ ID NO: 903048 - RNA, 19 nt, Homo sapiens
  misc_RNA (1)...(19): siRNA sense strand
gauggaagaagauacgaau

SEQ ID NO: 903049 - RNA, 19 nt, Homo sapiens
  misc_RNA (1)...(19): siRNA sense strand
gagaagggucacuaugguu

SEQ ID NO: 903050 - RNA, 19 nt, Homo sapiens
  misc_RNA (1)...(19): siRNA sense strand
gagcaggugauuauuucaa

SEQ ID NO: 903051 - RNA, 19 nt, Homo sapiens
  misc_RNA (1)...(19): siRNA sense strand
aagauggaaccuuguuaua

SEQ ID NO: 903052 - RNA, 19 nt, Homo sapiens
  misc_RNA (1)...(19): siRNA sense strand
ugaaaguguguccagcuua

SEQ ID NO: 903053 - RNA, 19 nt, Homo sapiens
  misc_RNA (1)...(19): siRNA sense strand
gaggagauuuuacaucaga

SEQ ID NO: 903054 - RNA, 19 nt, Homo sapiens
  misc_RNA (1)...(19): siRNA sense strand
uugcagaucauaccaauau

SEQ ID NO: 903055 - RNA, 19 nt, Homo sapiens
  misc_RNA (1)...(19): siRNA sense strand
ucaagagccgcuucagauu

SEQ ID NO: 903056 - RNA, 19 nt, Homo sapiens
  misc_RNA (1)...(19): siRNA sense strand
gaaagaggugaaugaaguc

SEQ ID NO: 903057 - RNA, 19 nt, Homo sapiens
  misc_RNA (1)...(19): siRNA sense strand
gaagagccagaacccauca

SEQ ID NO: 903058 - RNA, 19 nt, Homo sapiens
  misc_RNA (1)...(19): siRNA sense strand
cugagcaggugauuauuuc

SEQ ID NO: 903059 - RNA, 19 nt, Homo sapiens
  misc_RNA (1)...(19): siRNA sense strand
ggcacuaguucaaaucaca

SEQ ID NO: 903060 - RNA, 19 nt, Homo sapiens
  misc_RNA (1)...(19): siRNA sense strand
ugaagauggaaccuuguua

SEQ ID NO: 903061 - RNA, 19 nt, Homo sapiens
  misc_RNA (1)...(19): siRNA sense strand
ucaagaggcacuaguucaa

SEQ ID NO: 903062 - RNA, 19 nt, Homo sapiens
  misc_RNA (1)...(19): siRNA sense strand
acaaagaugacgugaagga

SEQ ID NO: 903063 - RNA, 19 nt, Homo sapiens
  misc_RNA (1)...(19): siRNA sense strand
gaccugcugccuaagauga

SEQ ID NO: 903064 - RNA, 19 nt, Homo sapiens
  misc_RNA (1)...(19): siRNA sense strand
acaaagggccuggaaggaa

SEQ ID NO: 903065 - RNA, 19 nt, Homo sapiens
  misc_RNA (1)...(19): siRNA sense strand
caggaguucuggguaguga

SEQ ID NO: 903066 - RNA, 19 nt, Homo sapiens
  misc_RNA (1)...(19): siRNA sense strand
aagaggcacuaguucaaau

SEQ ID NO: 903067 - RNA, 19 nt, Homo sapiens
  misc_RNA (1)...(19): siRNA sense strand
uagaccggcuuaugaaucu

SEQ ID NO: 903068 - RNA, 19 nt, Homo sapiens
  misc_RNA (1)...(19): siRNA sense strand
gagcucaugggaccaguga

SEQ ID NO: 903069 - RNA, 19 nt, Homo sapiens
  misc_RNA (1)...(19): siRNA sense strand
gaucagauugugaacucaa

SEQ ID NO: 903070 - RNA, 19 nt, Homo sapiens
  misc_RNA (1)...(19): siRNA sense strand
gagaaagaggugaaugaag

SEQ ID NO: 903071 - RNA, 19 nt, Homo sapiens
  misc_RNA (1)...(19): siRNA sense strand
ggaaguaccaguggacucu

SEQ ID NO: 903072 - RNA, 19 nt, Homo sapiens
  misc_RNA (1)...(19): siRNA sense strand
aaaucacacuucccacugu

SEQ ID NO: 903073 - RNA, 19 nt, Homo sapiens
  misc_RNA (1)...(19): siRNA sense strand
cacacucacugcccaugaa

SEQ ID NO: 903074 - RNA, 19 nt, Homo sapiens
  misc_RNA (1)...(19): siRNA sense strand
aaaugaagaagaagaggaa

SEQ ID NO: 903075 - RNA, 19 nt, Homo sapiens
  misc_RNA (1)...(19): siRNA sense strand
ggaguucuggguagugaga

SEQ ID NO: 903076 - RNA, 19 nt, Homo sapiens
  misc_RNA (1)...(19): siRNA sense strand
aaaugucuaugaggagauu

SEQ ID NO: 903077 - RNA, 19 nt, Homo sapiens
  misc_RNA (1)...(19): siRNA sense strand
ugagaaagaggugaaugaa

SEQ ID NO: 903078 - RNA, 19 nt, Homo sapiens
  misc_RNA (1)...(19): siRNA sense strand
ccagguuucugaggaacaa

SEQ ID NO: 903079 - RNA, 19 nt, Homo sapiens
  misc_RNA (1)...(19): siRNA sense strand
caacugugaagaaagugaa

SEQ ID NO: 903080 - RNA, 19 nt, Homo sapiens
  misc_RNA (1)...(19): siRNA sense strand
gagagcuucugccauucug

SEQ ID NO: 903081 - RNA, 19 nt, Homo sapiens
  misc_RNA (1)...(19): siRNA sense strand
gaacuacaugcaggagcua

SEQ ID NO: 903082 - RNA, 19 nt, Homo sapiens
  misc_RNA (1)...(19): siRNA sense strand
cuugaagaaacacaacuua

SEQ ID NO: 903083 - RNA, 19 nt, Homo sapiens
  misc_RNA (1)...(19): siRNA sense strand
cccgacaacugugaagaaa

SEQ ID NO: 903084 - RNA, 19 nt, Homo sapiens
  misc_RNA (1)...(19): siRNA sense strand
ggagucagaggaagagaag

SEQ ID NO: 903085 - RNA, 19 nt, Homo sapiens
  misc_RNA (1)...(19): siRNA sense strand
aaccagagcuucagaaaua

SEQ ID NO: 903086 - RNA, 19 nt, Homo sapiens
  misc_RNA (1)...(19): siRNA sense strand
gaaaguguguccagcuuaa

SEQ ID NO: 903087 - RNA, 19 nt, Homo sapiens
  misc_RNA (1)...(19): siRNA sense strand
aaaggaagcugcuaucuug

SEQ ID NO: 903088 - RNA, 19 nt, Homo sapiens
  misc_RNA (1)...(19): siRNA sense strand
agacagaccugcugccuaa

SEQ ID NO: 903089 - RNA, 19 nt, Homo sapiens
  misc_RNA (1)...(19): siRNA sense strand
gagauacguuguaguuaaa

SEQ ID NO: 903090 - RNA, 19 nt, Homo sapiens
  misc_RNA (1)...(19): siRNA sense strand
ggaagaagaaugacagaaa

SEQ ID NO: 903091 - RNA, 19 nt, Homo sapiens
  misc_RNA (1)...(19): siRNA sense strand
ggacugagcaggugauuau

SEQ ID NO: 903092 - RNA, 19 nt, Homo sapiens
  misc_RNA (1)...(19): siRNA sense strand
gaagaagaaugacagaaag

SEQ ID NO: 903093 - RNA, 19 nt, Homo sapiens
  misc_RNA (1)...(19): siRNA sense strand
aagcagagcuaucacaauu

SEQ ID NO: 903094 - RNA, 19 nt, Homo sapiens
  misc_RNA (1)...(19): siRNA sense strand
gcaagagggcugcaccuua

SEQ ID NO: 903095 - RNA, 19 nt, Homo sapiens
  misc_RNA (1)...(19): siRNA sense strand
caggagagcuucugccauu

SEQ ID NO: 903096 - RNA, 19 nt, Homo sapiens
  misc_RNA (1)...(19): siRNA sense strand
ggagaacacucagcccuuu

SEQ ID NO: 903097 - RNA, 19 nt, Homo sapiens
  misc_RNA (1)...(19): siRNA sense strand
ggagaggccugcacacuca

SEQ ID NO: 903098 - RNA, 19 nt, Homo sapiens
  misc_RNA (1)...(19): siRNA sense strand
ggagagauacguuguaguu

SEQ ID NO: 903099 - RNA, 19 nt, Homo sapiens
  misc_RNA (1)...(19): siRNA sense strand
caucagagcuggaguuugg

SEQ ID NO: 903100 - RNA, 19 nt, Homo sapiens
  misc_RNA (1)...(19): siRNA sense strand
ugaagcagaugacauuuga

SEQ ID NO: 903101 - RNA, 19 nt, Homo sapiens
  misc_RNA (1)...(19): siRNA sense strand
agagauacguuguaguuaa

SEQ ID NO: 903102 - RNA, 19 nt, Homo sapiens
  misc_RNA (1)...(19): siRNA sense strand
ggagagcuaugagaauaaa

SEQ ID NO: 903103 - RNA, 19 nt, Homo sapiens
  misc_RNA (1)...(19): siRNA sense strand
guggagagcuaugagaaua

SEQ ID NO: 903104 - RNA, 19 nt, Homo sapiens
  misc_RNA (1)...(19): siRNA sense strand
caagagggcugcaccuuag

SEQ ID NO: 903105 - RNA, 19 nt, Homo sapiens
  misc_RNA (1)...(19): siRNA sense strand
gaacagcaaagagauuuaa

SEQ ID NO: 903106 - RNA, 19 nt, Homo sapiens
  misc_RNA (1)...(19): siRNA sense strand
agaaagaggugaaugaagu

SEQ ID NO: 903107 - RNA, 19 nt, Homo sapiens
  misc_RNA (1)...(19): siRNA sense strand
ucaggcaucucaaucauga

SEQ ID NO: 903108 - RNA, 19 nt, Homo sapiens
  misc_RNA (1)...(19): siRNA sense strand
acacaaagaugacgugaag

SEQ ID NO: 903109 - RNA, 19 nt, Homo sapiens
  misc_RNA (1)...(19): siRNA sense strand
cgacaacugugaagaaagu

SEQ ID NO: 903110 - RNA, 19 nt, Homo sapiens
  misc_RNA (1)...(19): siRNA sense strand
ggacucugcuccagugaug

SEQ ID NO: 903111 - RNA, 19 nt, Homo sapiens
  misc_RNA (1)...(19): siRNA sense strand
uaaagaggccuaucagaga

SEQ ID NO: 903112 - RNA, 19 nt, Homo sapiens
  misc_RNA (1)...(19): siRNA sense strand
gaagauggaaccuuguuau

SEQ ID NO: 903113 - RNA, 19 nt, Homo sapiens
  misc_RNA (1)...(19): siRNA sense strand
gcuccuaaaugucgaauuc

SEQ ID NO: 903114 - RNA, 19 nt, Homo sapiens
  misc_RNA (1)...(19): siRNA sense strand
ccaaggaauucccagugua

SEQ ID NO: 903115 - RNA, 19 nt, Homo sapiens
  misc_RNA (1)...(19): siRNA sense strand
ugaaggcgcucagaaaguu

SEQ ID NO: 903116 - RNA, 19 nt, Homo sapiens
  misc_RNA (1)...(19): siRNA sense strand
ggagaagggucacuauggu

SEQ ID NO: 903117 - RNA, 19 nt, Homo sapiens
  misc_RNA (1)...(19): siRNA sense strand
ccaauaugauucacguuga

SEQ ID NO: 903118 - RNA, 19 nt, Homo sapiens
  misc_RNA (1)...(19): siRNA sense strand
gauggaaccuuguuauacu

SEQ ID NO: 903119 - RNA, 19 nt, Homo sapiens
  misc_RNA (1)...(19): siRNA sense strand
gcaaucacgugcgcacuga

SEQ ID NO: 903120 - RNA, 19 nt, Homo sapiens
  misc_RNA (1)...(19): siRNA sense strand
gcagagcuaucacaauuuu

SEQ ID NO: 903121 - RNA, 19 nt, Homo sapiens
  misc_RNA (1)...(19): siRNA sense strand
ccucagaagaugaauauaa

SEQ ID NO: 903122 - RNA, 19 nt, Homo sapiens
  misc_RNA (1)...(19): siRNA sense strand
gaugaaacucugaaaguga

SEQ ID NO: 903123 - RNA, 19 nt, Homo sapiens
  misc_RNA (1)...(19): siRNA sense strand
gcaucaaguuucagaagga

SEQ ID NO: 903124 - RNA, 19 nt, Homo sapiens
  misc_RNA (1)...(19): siRNA sense strand
gaaggagagauacguugua

SEQ ID NO: 903125 - RNA, 19 nt, Homo sapiens
  misc_RNA (1)...(19): siRNA sense strand
ccagugagcucgggauuca

SEQ ID NO: 903126 - RNA, 19 nt, Homo sapiens
  misc_RNA (1)...(19): siRNA sense strand
ugaguaaccuggugaugga

SEQ ID NO: 903127 - RNA, 19 nt, Homo sapiens
  misc_RNA (1)...(19): siRNA sense strand
gaaauccagauccugagua

SEQ ID NO: 903128 - RNA, 19 nt, Homo sapiens
  misc_RNA (1)...(19): siRNA sense strand
ucaaguuucagaaggauua

SEQ ID NO: 903129 - RNA, 19 nt, Homo sapiens
  misc_RNA (1)...(19): siRNA sense strand
aaauccagauccugaguaa

SEQ ID NO: 903130 - RNA, 19 nt, Homo sapiens
  misc_RNA (1)...(19): siRNA sense strand
ccaagaaaaugaagaagaa

SEQ ID NO: 903131 - RNA, 19 nt, Homo sapiens
  misc_RNA (1)...(19): siRNA sense strand
gaaccuuguuauacuaaag

SEQ ID NO: 903132 - RNA, 19 nt, Homo sapiens
  misc_RNA (1)...(19): siRNA sense strand
caucuagaccggcuuauga

SEQ ID NO: 903133 - RNA, 19 nt, Homo sapiens
  misc_RNA (1)...(19): siRNA sense strand
gcaggugauuauuucaaga

SEQ ID NO: 903134 - RNA, 19 nt, Homo sapiens
  misc_RNA (1)...(19): siRNA sense strand
ucccagagcugcccucaga

SEQ ID NO: 903135 - RNA, 19 nt, Homo sapiens
  misc_RNA (1)...(19): siRNA sense strand
gagagauacguuguaguua

SEQ ID NO: 903136 - RNA, 19 nt, Homo sapiens
  misc_RNA (1)...(19): siRNA sense strand
caagguagcccguauucau

SEQ ID NO: 903137 - RNA, 19 nt, Homo sapiens
  misc_RNA (1)...(19): siRNA sense strand
gagccagguuucugaggaa

SEQ ID NO: 903138 - RNA, 19 nt, Homo sapiens
  misc_RNA (1)...(19): siRNA sense strand
ggaagcugcuaucuugaag

SEQ ID NO: 903139 - RNA, 19 nt, Homo sapiens
  misc_RNA (1)...(19): siRNA sense strand
ugaaugaagucagccagaa

SEQ ID NO: 903140 - RNA, 19 nt, Homo sapiens
  misc_RNA (1)...(19): siRNA sense strand
uuuagaagcugugcaauuc

SEQ ID NO: 903141 - RNA, 19 nt, Homo sapiens
  misc_RNA (1)...(19): siRNA sense strand
gacccucaguaacgaagua

SEQ ID NO: 903142 - RNA, 19 nt, Homo sapiens
  misc_RNA (1)...(19): siRNA sense strand
ggaaccuuguuauacuaaa

SEQ ID NO: 903143 - RNA, 19 nt, Homo sapiens
  misc_RNA (1)...(19): siRNA sense strand
ugacauggaucagauugug

SEQ ID NO: 903144 - RNA, 19 nt, Homo sapiens
  misc_RNA (1)...(19): siRNA sense strand
gagcaucuagaccggcuua

SEQ ID NO: 903145 - RNA, 19 nt, Homo sapiens
  misc_RNA (1)...(19): siRNA sense strand
gcacuggcguccacaugca

SEQ ID NO: 903146 - RNA, 19 nt, Homo sapiens
  misc_RNA (1)...(19): siRNA sense strand
gaagaccaagccaccauug

SEQ ID NO: 903147 - RNA, 19 nt, Homo sapiens
  misc_RNA (1)...(19): siRNA sense strand
gaagagaugggagggcaaa

SEQ ID NO: 903148 - RNA, 19 nt, Homo sapiens
  misc_RNA (1)...(19): siRNA sense strand
gggcaaguguaccgaggaa

SEQ ID NO: 903149 - RNA, 19 nt, Homo sapiens
  misc_RNA (1)...(19): siRNA sense strand
uaaaggaagcugcuaucuu

SEQ ID NO: 903150 - RNA, 19 nt, Homo sapiens
  misc_RNA (1)...(19): siRNA sense strand
caaaccagagcuucagaaa

SEQ ID NO: 903151 - RNA, 19 nt, Homo sapiens
  misc_RNA (1)...(19): siRNA sense strand
uuagugcccuccugaguga

SEQ ID NO: 903152 - RNA, 19 nt, Homo sapiens
  misc_RNA (1)...(19): siRNA sense strand
gguguuaaccucagaagau

SEQ ID NO: 903153 - RNA, 19 nt, Homo sapiens
  misc_RNA (1)...(19): siRNA sense strand
ggacacagaacuacaugca

SEQ ID NO: 903154 - RNA, 19 nt, Homo sapiens
  misc_RNA (1)...(19): siRNA sense strand
agaaguggaaggagagaua

SEQ ID NO: 903155 - RNA, 19 nt, Homo sapiens
  misc_RNA (1)...(19): siRNA sense strand
aaacuucagucccuacuac

SEQ ID NO: 903156 - RNA, 19 nt, Homo sapiens
  misc_RNA (1)...(19): siRNA sense strand
ugaugaaacucugaaagug

SEQ ID NO: 903157 - RNA, 19 nt, Homo sapiens
  misc_RNA (1)...(19): siRNA sense strand
aaacugaggcugccaucaa

SEQ ID NO: 903158 - RNA, 19 nt, Homo sapiens
  misc_RNA (1)...(19): siRNA sense strand
ccucuugccuccagugaga

SEQ ID NO: 903159 - RNA, 19 nt, Homo sapiens
  misc_RNA (1)...(19): siRNA sense strand
ggaaggagagauacguugu

SEQ ID NO: 903160 - RNA, 19 nt, Homo sapiens
  misc_RNA (1)...(19): siRNA sense strand
gugaaaguguguccagcuu

SEQ ID NO: 903161 - RNA, 19 nt, Homo sapiens
  misc_RNA (1)...(19): siRNA sense strand
guagaacagcaaagagauu

SEQ ID NO: 903162 - RNA, 19 nt, Homo sapiens
  misc_RNA (1)...(19): siRNA sense strand
gaaauacgagcaguucauc

SEQ ID NO: 903163 - RNA, 19 nt, Homo sapiens
  misc_RNA (1)...(19): siRNA sense strand
aaagagauuuaacgucaca

SEQ ID NO: 903164 - RNA, 19 nt, Homo sapiens
  misc_RNA (1)...(19): siRNA sense strand
gcagcaccauccgaaagaa

SEQ ID NO: 903165 - RNA, 19 nt, Homo sapiens
  misc_RNA (1)...(19): siRNA sense strand
gaacuuccagaccaccaaa

SEQ ID NO: 903166 - RNA, 19 nt, Homo sapiens
  misc_RNA (1)...(19): siRNA sense strand
caagagccgcuucagauuc

SEQ ID NO: 903167 - RNA, 19 nt, Homo sapiens
  misc_RNA (1)...(19): siRNA sense strand
uacaucagauccugcuuga

SEQ ID NO: 903168 - RNA, 19 nt, Homo sapiens
  misc_RNA (1)...(19): siRNA sense strand
gcaaaccagagcuucagaa

SEQ ID NO: 903169 - RNA, 19 nt, Homo sapiens
  misc_RNA (1)...(19): siRNA sense strand
ugcaggagcuaauggagaa

SEQ ID NO: 903170 - RNA, 19 nt, Homo sapiens
  misc_RNA (1)...(19): siRNA sense strand
cugaagacauaaagaagug

SEQ ID NO: 903171 - RNA, 19 nt, Homo sapiens
  misc_RNA (1)...(19): siRNA sense strand
agauuuaacgucacaguuu

SEQ ID NO: 903172 - RNA, 19 nt, Homo sapiens
  misc_RNA (1)...(19): siRNA sense strand
cagcuuaacagaucuaaag

SEQ ID NO: 903173 - RNA, 19 nt, Homo sapiens
  misc_RNA (1)...(19): siRNA sense strand
caagaggcacuaguucaaa

SEQ ID NO: 903174 - RNA, 19 nt, Homo sapiens
  misc_RNA (1)...(19): siRNA sense strand
acauugaucuggugguuca

SEQ ID NO: 903175 - RNA, 19 nt, Homo sapiens
  misc_RNA (1)...(19): siRNA sense strand
gaagcagagcuaucacaau

SEQ ID NO: 903176 - RNA, 19 nt, Homo sapiens
  misc_RNA (1)...(19): siRNA sense strand
gaccagaagagguuuagug

SEQ ID NO: 903177 - RNA, 19 nt, Homo sapiens
  misc_RNA (1)...(19): siRNA sense strand
gaauaaagaggccuaucag

SEQ ID NO: 903178 - RNA, 19 nt, Homo sapiens
  misc_RNA (1)...(19): siRNA sense strand
gaucaagguagcccguauu

SEQ ID NO: 903179 - RNA, 19 nt, Homo sapiens
  misc_RNA (1)...(19): siRNA sense strand
gcacacucacugcccauga

SEQ ID NO: 903180 - RNA, 19 nt, Homo sapiens
  misc_RNA (1)...(19): siRNA sense strand
gauggaagaagauacgaau

SEQ ID NO: 903181 - RNA, 19 nt, Homo sapiens
  misc_RNA (1)...(19): siRNA sense strand
gagcaggugauuauuucaa

SEQ ID NO: 903182 - RNA, 19 nt, Homo sapiens
  misc_RNA (1)...(19): siRNA sense strand
gaaacucugaaagugauaa

SEQ ID NO: 903183 - RNA, 19 nt, Homo sapiens
  misc_RNA (1)...(19): siRNA sense strand
gagaagggucacuaugguu

SEQ ID NO: 903184 - RNA, 19 nt, Homo sapiens
  misc_RNA (1)...(19): siRNA sense strand
ugaaguagaacagcaaaga

SEQ ID NO: 903185 - RNA, 19 nt, Homo sapiens
  misc_RNA (1)...(19): siRNA sense strand
aaaggcaugugucauauuu

SEQ ID NO: 903186 - RNA, 19 nt, Homo sapiens
  misc_RNA (1)...(19): siRNA sense strand
gcgccaacccuaucauuua

SEQ ID NO: 903187 - RNA, 19 nt, Homo sapiens
  misc_RNA (1)...(19): siRNA sense strand
acagauaucucucucaugu

SEQ ID NO: 903188 - RNA, 19 nt, Homo sapiens
  misc_RNA (1)...(19): siRNA sense strand
ccaacccuaucauuuauuu

SEQ ID NO: 903189 - RNA, 19 nt, Homo sapiens
  misc_RNA (1)...(19): siRNA sense strand
guaaaggcaugugucauau

SEQ ID NO: 903190 - RNA, 19 nt, Homo sapiens
  misc_RNA (1)...(19): siRNA sense strand
cgaaugaaaccauacauau

SEQ ID NO: 903191 - RNA, 19 nt, Homo sapiens
  misc_RNA (1)...(19): siRNA sense strand
gcaugugucauauuucuaa

SEQ ID NO: 903192 - RNA, 19 nt, Homo sapiens
  misc_RNA (1)...(19): siRNA sense strand
ugagacgaaugaaaccaua

SEQ ID NO: 903193 - RNA, 19 nt, Homo sapiens
  misc_RNA (1)...(19): siRNA sense strand
gcccugcccuugaauauca

SEQ ID NO: 903194 - RNA, 19 nt, Homo sapiens
  misc_RNA (1)...(19): siRNA sense strand
ccucauaacagauuucaaa

SEQ ID NO: 903195 - RNA, 19 nt, Homo sapiens
  misc_RNA (1)...(19): siRNA sense strand
uguaaaggcaugugucaua

SEQ ID NO: 903196 - RNA, 19 nt, Homo sapiens
  misc_RNA (1)...(19): siRNA sense strand
ucacagauaucucucucau

SEQ ID NO: 903197 - RNA, 19 nt, Homo sapiens
  misc_RNA (1)...(19): siRNA sense strand
gucaccaccuccuauuuaa

SEQ ID NO: 903198 - RNA, 19 nt, Homo sapiens
  misc_RNA (1)...(19): siRNA sense strand
ugacucugcuaacuuauca

SEQ ID NO: 903199 - RNA, 19 nt, Homo sapiens
  misc_RNA (1)...(19): siRNA sense strand
agauaucucucucauguag

SEQ ID NO: 903200 - RNA, 19 nt, Homo sapiens
  misc_RNA (1)...(19): siRNA sense strand
ugucaccaccuccuauuua

SEQ ID NO: 903201 - RNA, 19 nt, Homo sapiens
  misc_RNA (1)...(19): siRNA sense strand
gcucuuccaugcuauccuu

SEQ ID NO: 903202 - RNA, 19 nt, Homo sapiens
  misc_RNA (1)...(19): siRNA sense strand
aggugacucugcuaacuua

SEQ ID NO: 903203 - RNA, 19 nt, Homo sapiens
  misc_RNA (1)...(19): siRNA sense strand
caccaccuccuauuuaauu

SEQ ID NO: 903204 - RNA, 19 nt, Homo sapiens
  misc_RNA (1)...(19): siRNA sense strand
acccaaaccugguaucuca

SEQ ID NO: 903205 - RNA, 19 nt, Homo sapiens
  misc_RNA (1)...(19): siRNA sense strand
cgccaacccuaucauuuau

SEQ ID NO: 903206 - RNA, 19 nt, Homo sapiens
  misc_RNA (1)...(19): siRNA sense strand
ucagcucuguggcgucuuu

SEQ ID NO: 903207 - RNA, 19 nt, Homo sapiens
  misc_RNA (1)...(19): siRNA sense strand
gacaguguuugcugaguca

SEQ ID NO: 903208 - RNA, 19 nt, Homo sapiens
  misc_RNA (1)...(19): siRNA sense strand
cuaacuuacuggaaacaug

SEQ ID NO: 903209 - RNA, 19 nt, Homo sapiens
  misc_RNA (1)...(19): siRNA sense strand
caugcuauccuuucacuug

SEQ ID NO: 903210 - RNA, 19 nt, Homo sapiens
  misc_RNA (1)...(19): siRNA sense strand
ccacgaaucccuacauggu

SEQ ID NO: 903211 - RNA, 19 nt, Homo sapiens
  misc_RNA (1)...(19): siRNA sense strand
cuacucagcauguggagaa

SEQ ID NO: 903212 - RNA, 19 nt, Homo sapiens
  misc_RNA (1)...(19): siRNA sense strand
uaacuuacuggaaacaugu

SEQ ID NO: 903213 - RNA, 19 nt, Homo sapiens
  misc_RNA (1)...(19): siRNA sense strand
agaaaaggcugaaggaauc

SEQ ID NO: 903214 - RNA, 19 nt, Homo sapiens
  misc_RNA (1)...(19): siRNA sense strand
gaaagaaaaggcugaagga

SEQ ID NO: 903215 - RNA, 19 nt, Homo sapiens
  misc_RNA (1)...(19): siRNA sense strand
ggccacgaaucccuacaug

SEQ ID NO: 903216 - RNA, 19 nt, Homo sapiens
  misc_RNA (1)...(19): siRNA sense strand
ucugggcucuuccaugcua

SEQ ID NO: 903217 - RNA, 19 nt, Homo sapiens
  misc_RNA (1)...(19): siRNA sense strand
uaaaggcaugugucauauu

SEQ ID NO: 903218 - RNA, 19 nt, Homo sapiens
  misc_RNA (1)...(19): siRNA sense strand
ggucgcugcugacgugauc

SEQ ID NO: 903219 - RNA, 19 nt, Homo sapiens
  misc_RNA (1)...(19): siRNA sense strand
uguggcgucuuucuucaaa

SEQ ID NO: 903220 - RNA, 19 nt, Homo sapiens
  misc_RNA (1)...(19): siRNA sense strand
ccuuguuccucauuauaaa

SEQ ID NO: 903221 - RNA, 19 nt, Homo sapiens
  misc_RNA (1)...(19): siRNA sense strand
cugauuuccuggccauauu

SEQ ID NO: 903222 - RNA, 19 nt, Homo sapiens
  misc_RNA (1)...(19): siRNA sense strand
ucugcuaacuuaucaugga

SEQ ID NO: 903223 - RNA, 19 nt, Homo sapiens
  misc_RNA (1)...(19): siRNA sense strand
acgaaucccuacaugguau

SEQ ID NO: 903224 - RNA, 19 nt, Homo sapiens
  misc_RNA (1)...(19): siRNA sense strand
ccugguaucucagcucugu

SEQ ID NO: 903225 - RNA, 19 nt, Homo sapiens
  misc_RNA (1)...(19): siRNA sense strand
gagcguggcaccccucaua

SEQ ID NO: 903226 - RNA, 19 nt, Homo sapiens
  misc_RNA (1)...(19): siRNA sense strand
gacgugaucuaucuuugcu

SEQ ID NO: 903227 - RNA, 19 nt, Homo sapiens
  misc_RNA (1)...(19): siRNA sense strand
gcugacgugaucuaucuuu

SEQ ID NO: 903228 - RNA, 19 nt, Homo sapiens
  misc_RNA (1)...(19): siRNA sense strand
cugcugacgugaucuaucu

SEQ ID NO: 903229 - RNA, 19 nt, Homo sapiens
  misc_RNA (1)...(19): siRNA sense strand
acgaaugaaaccauacaua

SEQ ID NO: 903230 - RNA, 19 nt, Homo sapiens
  misc_RNA (1)...(19): siRNA sense strand
caaaaugagacgaaugaaa

SEQ ID NO: 903231 - RNA, 19 nt, Homo sapiens
  misc_RNA (1)...(19): siRNA sense strand
cagcuggcaucgacccaau

SEQ ID NO: 903232 - RNA, 19 nt, Homo sapiens
  misc_RNA (1)...(19): siRNA sense strand
gaacccaaaccugguaucu

SEQ ID NO: 903233 - RNA, 19 nt, Homo sapiens
  misc_RNA (1)...(19): siRNA sense strand
uuacaggugacucugcuaa

SEQ ID NO: 903234 - RNA, 19 nt, Homo sapiens
  misc_RNA (1)...(19): siRNA sense strand
cagggucgauguggaaaca

SEQ ID NO: 903235 - RNA, 19 nt, Homo sapiens
  misc_RNA (1)...(19): siRNA sense strand
cacgaaucccuacauggua

SEQ ID NO: 903236 - RNA, 19 nt, Homo sapiens
  misc_RNA (1)...(19): siRNA sense strand
ucuaugcgguggugcagau

SEQ ID NO: 903237 - RNA, 19 nt, Homo sapiens
  misc_RNA (1)...(19): siRNA sense strand
gggaaaauuugcugguuca

SEQ ID NO: 903238 - RNA, 19 nt, Homo sapiens
  misc_RNA (1)...(19): siRNA sense strand
acagaacccaaaccuggua

SEQ ID NO: 903239 - RNA, 19 nt, Homo sapiens
  misc_RNA (1)...(19): siRNA sense strand
aggcaugugucauauuucu

SEQ ID NO: 903240 - RNA, 19 nt, Homo sapiens
  misc_RNA (1)...(19): siRNA sense strand
gagcaaccacacucuacuc

SEQ ID NO: 903241 - RNA, 19 nt, Homo sapiens
  misc_RNA (1)...(19): siRNA sense strand
cgaaucccuacaugguaua

SEQ ID NO: 903242 - RNA, 19 nt, Homo sapiens
  misc_RNA (1)...(19): siRNA sense strand
cagauaucucucucaugua

SEQ ID NO: 903243 - RNA, 19 nt, Homo sapiens
  misc_RNA (1)...(19): siRNA sense strand
cagcagcgccaacccuauc

SEQ ID NO: 903244 - RNA, 19 nt, Homo sapiens
  misc_RNA (1)...(19): siRNA sense strand
guguguguguguccucuuc

SEQ ID NO: 903245 - RNA, 19 nt, Homo sapiens
  misc_RNA (1)...(19): siRNA sense strand
ccuccuauuuaauuuccuu

SEQ ID NO: 903246 - RNA, 19 nt, Homo sapiens
  misc_RNA (1)...(19): siRNA sense strand
gcaucaacauaguaaaauc

SEQ ID NO: 903247 - RNA, 19 nt, Homo sapiens
  misc_RNA (1)...(19): siRNA sense strand
ccaaaauacacaucuaaug

SEQ ID NO: 903248 - RNA, 19 nt, Homo sapiens
  misc_RNA (1)...(19): siRNA sense strand
ucucucauguagccuuugu

SEQ ID NO: 903249 - RNA, 19 nt, Homo sapiens
  misc_RNA (1)...(19): siRNA sense strand
cagcgccaacccuaucauu

SEQ ID NO: 903250 - RNA, 19 nt, Homo sapiens
  misc_RNA (1)...(19): siRNA sense strand
gcucuguggcgucuuucuu

SEQ ID NO: 903251 - RNA, 19 nt, Homo sapiens
  misc_RNA (1)...(19): siRNA sense strand
gaagugaguucggcaaaga

SEQ ID NO: 903252 - RNA, 19 nt, Homo sapiens
  misc_RNA (1)...(19): siRNA sense strand
ucacaaggcuaugcagaaa

SEQ ID NO: 903253 - RNA, 19 nt, Homo sapiens
  misc_RNA (1)...(19): siRNA sense strand
aaaagacgcuguuccuuaa

SEQ ID NO: 903254 - RNA, 19 nt, Homo sapiens
  misc_RNA (1)...(19): siRNA sense strand
gugcaguccucaugaucuu

SEQ ID NO: 903255 - RNA, 19 nt, Homo sapiens
  misc_RNA (1)...(19): siRNA sense strand
gggaugauucugaguguau

SEQ ID NO: 903256 - RNA, 19 nt, Homo sapiens
  misc_RNA (1)...(19): siRNA sense strand
gaguguaucacaaggcuau

SEQ ID NO: 903257 - RNA, 19 nt, Homo sapiens
  misc_RNA (1)...(19): siRNA sense strand
agaaggccacggagaauga

SEQ ID NO: 903258 - RNA, 19 nt, Homo sapiens
  misc_RNA (1)...(19): siRNA sense strand
gauucugaguguaucacaa

SEQ ID NO: 903259 - RNA, 19 nt, Homo sapiens
  misc_RNA (1)...(19): siRNA sense strand
gagaaggccacggagaaug

SEQ ID NO: 903260 - RNA, 19 nt, Homo sapiens
  misc_RNA (1)...(19): siRNA sense strand
aagagaaggccacggagaa

SEQ ID NO: 903261 - RNA, 19 nt, Homo sapiens
  misc_RNA (1)...(19): siRNA sense strand
ggaugauucugaguguauc

SEQ ID NO: 903262 - RNA, 19 nt, Homo sapiens
  misc_RNA (1)...(19): siRNA sense strand
gauagauggcuccccaaua

SEQ ID NO: 903263 - RNA, 19 nt, Homo sapiens
  misc_RNA (1)...(19): siRNA sense strand
cagaagugaguucggcaaa

SEQ ID NO: 903264 - RNA, 19 nt, Homo sapiens
  misc_RNA (1)...(19): siRNA sense strand
ccucaugaucuuccuguug

SEQ ID NO: 903265 - RNA, 19 nt, Homo sapiens
  misc_RNA (1)...(19): siRNA sense strand
uaaguguggcccaggaaug

SEQ ID NO: 903266 - RNA, 19 nt, Homo sapiens
  misc_RNA (1)...(19): siRNA sense strand
ggguuucccucaggccuau

SEQ ID NO: 903267 - RNA, 19 nt, Homo sapiens
  misc_RNA (1)...(19): siRNA sense strand
aagacgcuguuccuuaagu

SEQ ID NO: 903268 - RNA, 19 nt, Homo sapiens
  misc_RNA (1)...(19): siRNA sense strand
ccgggaugauucugagugu

SEQ ID NO: 903269 - RNA, 19 nt, Homo sapiens
  misc_RNA (1)...(19): siRNA sense strand
agacgcuguuccuuaagug

SEQ ID NO: 903270 - RNA, 19 nt, Homo sapiens
  misc_RNA (1)...(19): siRNA sense strand
ccucuaagcuccaagaauu

SEQ ID NO: 903271 - RNA, 19 nt, Homo sapiens
  misc_RNA (1)...(19): siRNA sense strand
gaaagccucucgcccgaau

SEQ ID NO: 903272 - RNA, 19 nt, Homo sapiens
  misc_RNA (1)...(19): siRNA sense strand
gaaccugagcgaccucuau

SEQ ID NO: 903273 - RNA, 19 nt, Homo sapiens
  misc_RNA (1)...(19): siRNA sense strand
gcagcuccaucuccuguca

SEQ ID NO: 903274 - RNA, 19 nt, Homo sapiens
  misc_RNA (1)...(19): siRNA sense strand
ucaaccaccugccgaaauc

SEQ ID NO: 903275 - RNA, 19 nt, Homo sapiens
  misc_RNA (1)...(19): siRNA sense strand
gcaccuggccguggaauuc

SEQ ID NO: 903276 - RNA, 19 nt, Homo sapiens
  misc_RNA (1)...(19): siRNA sense strand
caacaaauugcaaguacug

SEQ ID NO: 903277 - RNA, 19 nt, Homo sapiens
  misc_RNA (1)...(19): siRNA sense strand
ggaccucuccaauaacuca

SEQ ID NO: 903278 - RNA, 19 nt, Homo sapiens
  misc_RNA (1)...(19): siRNA sense strand
ggacacccugguauugaaa

SEQ ID NO: 903279 - RNA, 19 nt, Homo sapiens
  misc_RNA (1)...(19): siRNA sense strand
ucuagaaggcaacaaauug

SEQ ID NO: 903280 - RNA, 19 nt, Homo sapiens
  misc_RNA (1)...(19): siRNA sense strand
gaacggcuacaucuagaag

SEQ ID NO: 903281 - RNA, 19 nt, Homo sapiens
  misc_RNA (1)...(19): siRNA sense strand
gcaauuagaacggcuacau

SEQ ID NO: 903282 - RNA, 19 nt, Homo sapiens
  misc_RNA (1)...(19): siRNA sense strand
ggaccugcgcuaccucuuc

SEQ ID NO: 903283 - RNA, 19 nt, Homo sapiens
  misc_RNA (1)...(19): siRNA sense strand
uggacacccugguauugaa

SEQ ID NO: 903284 - RNA, 19 nt, Homo sapiens
  misc_RNA (1)...(19): siRNA sense strand
ccaaagacugccagguguu

SEQ ID NO: 903285 - RNA, 19 nt, Homo sapiens
  misc_RNA (1)...(19): siRNA sense strand
acccugguauugaaagaaa

SEQ ID NO: 903286 - RNA, 19 nt, Homo sapiens
  misc_RNA (1)...(19): siRNA sense strand
caaagacugccagguguuc

SEQ ID NO: 903287 - RNA, 19 nt, Homo sapiens
  misc_RNA (1)...(19): siRNA sense strand
caagauguuuucccagaau

SEQ ID NO: 903288 - RNA, 19 nt, Homo sapiens
  misc_RNA (1)...(19): siRNA sense strand
ggaaccgccuccggaaacu

SEQ ID NO: 903289 - RNA, 19 nt, Homo sapiens
  misc_RNA (1)...(19): siRNA sense strand
gagcagacagcgaccaaaa

SEQ ID NO: 903290 - RNA, 19 nt, Homo sapiens
  misc_RNA (1)...(19): siRNA sense strand
agaaccaguuggagaccuu

SEQ ID NO: 903291 - RNA, 19 nt, Homo sapiens
  misc_RNA (1)...(19): siRNA sense strand
caauuagaacggcuacauc

SEQ ID NO: 903292 - RNA, 19 nt, Homo sapiens
  misc_RNA (1)...(19): siRNA sense strand
ugagggugcuggaucuaac

SEQ ID NO: 903293 - RNA, 19 nt, Homo sapiens
  misc_RNA (1)...(19): siRNA sense strand
caucuagaaggcaacaaau

SEQ ID NO: 903294 - RNA, 19 nt, Homo sapiens
  misc_RNA (1)...(19): siRNA sense strand
acacccugguauugaaaga

SEQ ID NO: 903295 - RNA, 19 nt, Homo sapiens
  misc_RNA (1)...(19): siRNA sense strand
gaacagacaagcacuauua

SEQ ID NO: 903296 - RNA, 19 nt, Homo sapiens
  misc_RNA (1)...(19): siRNA sense strand
gcaaguacaucacaagaua

SEQ ID NO: 903297 - RNA, 19 nt, Homo sapiens
  misc_RNA (1)...(19): siRNA sense strand
gaaagaaucuauccuguau

SEQ ID NO: 903298 - RNA, 19 nt, Homo sapiens
  misc_RNA (1)...(19): siRNA sense strand
ggauaaagcuuaauacaga

SEQ ID NO: 903299 - RNA, 19 nt, Homo sapiens
  misc_RNA (1)...(19): siRNA sense strand
caacacagaugcauuacua

SEQ ID NO: 903300 - RNA, 19 nt, Homo sapiens
  misc_RNA (1)...(19): siRNA sense strand
ggagagagcugcagacaga

SEQ ID NO: 903301 - RNA, 19 nt, Homo sapiens
  misc_RNA (1)...(19): siRNA sense strand
gggaguaucuuaauuugua

SEQ ID NO: 903302 - RNA, 19 nt, Homo sapiens
  misc_RNA (1)...(19): siRNA sense strand
gaaguaacaucaaaccauu

SEQ ID NO: 903303 - RNA, 19 nt, Homo sapiens
  misc_RNA (1)...(19): siRNA sense strand
ggacaacacagaugcauua

SEQ ID NO: 903304 - RNA, 19 nt, Homo sapiens
  misc_RNA (1)...(19): siRNA sense strand
gaaaguuuguccauaauug

SEQ ID NO: 903305 - RNA, 19 nt, Homo sapiens
  misc_RNA (1)...(19): siRNA sense strand
ggacuacuauugauuggua

SEQ ID NO: 903306 - RNA, 19 nt, Homo sapiens
  misc_RNA (1)...(19): siRNA sense strand
ugaaucagcucaacucuuu

SEQ ID NO: 903307 - RNA, 19 nt, Homo sapiens
  misc_RNA (1)...(19): siRNA sense strand
cacaagauaugcauacuua

SEQ ID NO: 903308 - RNA, 19 nt, Homo sapiens
  misc_RNA (1)...(19): siRNA sense strand
ggaauuggcuuuaguacug

SEQ ID NO: 903309 - RNA, 19 nt, Homo sapiens
  misc_RNA (1)...(19): siRNA sense strand
gaagggaugccuauuauuu

SEQ ID NO: 903310 - RNA, 19 nt, Homo sapiens
  misc_RNA (1)...(19): siRNA sense strand
cgacuaagauagaucauuu

SEQ ID NO: 903311 - RNA, 19 nt, Homo sapiens
  misc_RNA (1)...(19): siRNA sense strand
gagaagaguuugccaugaa

SEQ ID NO: 903312 - RNA, 19 nt, Homo sapiens
  misc_RNA (1)...(19): siRNA sense strand
gaacaggauugucacgaaa

SEQ ID NO: 903313 - RNA, 19 nt, Homo sapiens
  misc_RNA (1)...(19): siRNA sense strand
ucagaaaguuuguccauaa

SEQ ID NO: 903314 - RNA, 19 nt, Homo sapiens
  misc_RNA (1)...(19): siRNA sense strand
aaacgggccucuuuagaua

SEQ ID NO: 903315 - RNA, 19 nt, Homo sapiens
  misc_RNA (1)...(19): siRNA sense strand
ggaagaagccagaaugauu

SEQ ID NO: 903316 - RNA, 19 nt, Homo sapiens
  misc_RNA (1)...(19): siRNA sense strand
caacagaacucaaugaacu

SEQ ID NO: 903317 - RNA, 19 nt, Homo sapiens
  misc_RNA (1)...(19): siRNA sense strand
gaaauggguucaaagacaa

SEQ ID NO: 903318 - RNA, 19 nt, Homo sapiens
  misc_RNA (1)...(19): siRNA sense strand
gauauaagcagaacuguga

SEQ ID NO: 903319 - RNA, 19 nt, Homo sapiens
  misc_RNA (1)...(19): siRNA sense strand
ggaagcagcagcccuuaua

SEQ ID NO: 903320 - RNA, 19 nt, Homo sapiens
  misc_RNA (1)...(19): siRNA sense strand
gugcuacccuuccuaauuu

SEQ ID NO: 903321 - RNA, 19 nt, Homo sapiens
  misc_RNA (1)...(19): siRNA sense strand
acacagggauuaaucaauu

SEQ ID NO: 903322 - RNA, 19 nt, Homo sapiens
  misc_RNA (1)...(19): siRNA sense strand
ggaagacaguucagcacua

SEQ ID NO: 903323 - RNA, 19 nt, Homo sapiens
  misc_RNA (1)...(19): siRNA sense strand
gaauccaugugcccuguua

SEQ ID NO: 903324 - RNA, 19 nt, Homo sapiens
  misc_RNA (1)...(19): siRNA sense strand
gugagaagcuggcagauau

SEQ ID NO: 903325 - RNA, 19 nt, Homo sapiens
  misc_RNA (1)...(19): siRNA sense strand
ucaaagaaauggugugaga

SEQ ID NO: 903326 - RNA, 19 nt, Homo sapiens
  misc_RNA (1)...(19): siRNA sense strand
cauauucucuaucugguua

SEQ ID NO: 903327 - RNA, 19 nt, Homo sapiens
  misc_RNA (1)...(19): siRNA sense strand
uaucauugcucgagaguuu

SEQ ID NO: 903328 - RNA, 19 nt, Homo sapiens
  misc_RNA (1)...(19): siRNA sense strand
ggaagaaagcuuuguuuau

SEQ ID NO: 903329 - RNA, 19 nt, Homo sapiens
  misc_RNA (1)...(19): siRNA sense strand
gaaaggaguggacacagua

SEQ ID NO: 903330 - RNA, 19 nt, Homo sapiens
  misc_RNA (1)...(19): siRNA sense strand
ggagagggauaucauugaa

SEQ ID NO: 903331 - RNA, 19 nt, Homo sapiens
  misc_RNA (1)...(19): siRNA sense strand
ggaccauguuguuaguuua

SEQ ID NO: 903332 - RNA, 19 nt, Homo sapiens
  misc_RNA (1)...(19): siRNA sense strand
ggaaagaaucuauccugua

SEQ ID NO: 903333 - RNA, 19 nt, Homo sapiens
  misc_RNA (1)...(19): siRNA sense strand
ggagaaaggaggaaauuau

SEQ ID NO: 903334 - RNA, 19 nt, Homo sapiens
  misc_RNA (1)...(19): siRNA sense strand
aaagacaacagcccuauua

SEQ ID NO: 903335 - RNA, 19 nt, Homo sapiens
  misc_RNA (1)...(19): siRNA sense strand
gcaaugaagggcuuuguuu

SEQ ID NO: 903336 - RNA, 19 nt, Homo sapiens
  misc_RNA (1)...(19): siRNA sense strand
gcaaaucguuggcaugagu

SEQ ID NO: 903337 - RNA, 19 nt, Homo sapiens
  misc_RNA (1)...(19): siRNA sense strand
gagagcagaugggcauuaa

SEQ ID NO: 903338 - RNA, 19 nt, Homo sapiens
  misc_RNA (1)...(19): siRNA sense strand
gauccaagccugacuuuga

SEQ ID NO: 903339 - RNA, 19 nt, Homo sapiens
  misc_RNA (1)...(19): siRNA sense strand
uaagaacucugagaaauca

SEQ ID NO: 903340 - RNA, 19 nt, Homo sapiens
  misc_RNA (1)...(19): siRNA sense strand
caggauggauuacaguuaa

SEQ ID NO: 903341 - RNA, 19 nt, Homo sapiens
  misc_RNA (1)...(19): siRNA sense strand
ggacaauguggauauauuu

SEQ ID NO: 903342 - RNA, 19 nt, Homo sapiens
  misc_RNA (1)...(19): siRNA sense strand
gaacagaaggaaaggugua

SEQ ID NO: 903343 - RNA, 19 nt, Homo sapiens
  misc_RNA (1)...(19): siRNA sense strand
gcaguugacuuguuccaau

SEQ ID NO: 903344 - RNA, 19 nt, Homo sapiens
  misc_RNA (1)...(19): siRNA sense strand
acaauuaccugauaugcaa

SEQ ID NO: 903345 - RNA, 19 nt, Homo sapiens
  misc_RNA (1)...(19): siRNA sense strand
gacaagcacuauuaccaaa

SEQ ID NO: 903346 - RNA, 19 nt, Homo sapiens
  misc_RNA (1)...(19): siRNA sense strand
uaaaugaagugcugauaca

SEQ ID NO: 903347 - RNA, 19 nt, Homo sapiens
  misc_RNA (1)...(19): siRNA sense strand
gaauaaaaguagacgguua

SEQ ID NO: 903348 - RNA, 19 nt, Homo sapiens
  misc_RNA (1)...(19): siRNA sense strand
cgaauaaccuuuacagaac

SEQ ID NO: 903349 - RNA, 19 nt, Homo sapiens
  misc_RNA (1)...(19): siRNA sense strand
ggaaagguguaucauccaa

SEQ ID NO: 903350 - RNA, 19 nt, Homo sapiens
  misc_RNA (1)...(19): siRNA sense strand
ggaaaggaguggacacagu

SEQ ID NO: 903351 - RNA, 19 nt, Homo sapiens
  misc_RNA (1)...(19): siRNA sense strand
ggaguagcauuucaucaug

SEQ ID NO: 903352 - RNA, 19 nt, Homo sapiens
  misc_RNA (1)...(19): siRNA sense strand
gaauggugguuguggauga

SEQ ID NO: 903353 - RNA, 19 nt, Homo sapiens
  misc_RNA (1)...(19): siRNA sense strand
gcauacaaguuccuuuaau

SEQ ID NO: 903354 - RNA, 19 nt, Homo sapiens
  misc_RNA (1)...(19): siRNA sense strand
gaucuuggcucauuuaucc

SEQ ID NO: 903355 - RNA, 19 nt, Homo sapiens
  misc_RNA (1)...(19): siRNA sense strand
ggagcaaaguuaugaagau

SEQ ID NO: 903356 - RNA, 19 nt, Homo sapiens
  misc_RNA (1)...(19): siRNA sense strand
caacagauggcaacugaaa

SEQ ID NO: 903357 - RNA, 19 nt, Homo sapiens
  misc_RNA (1)...(19): siRNA sense strand
gugaaaggauaaagcuuaa

SEQ ID NO: 903358 - RNA, 19 nt, Homo sapiens
  misc_RNA (1)...(19): siRNA sense strand
gaccaagauuugcuauauu

SEQ ID NO: 903359 - RNA, 19 nt, Homo sapiens
  misc_RNA (1)...(19): siRNA sense strand
ggagaagaaucacuaaugc

SEQ ID NO: 903360 - RNA, 19 nt, Homo sapiens
  misc_RNA (1)...(19): siRNA sense strand
gaaaugcccucucaguacu

SEQ ID NO: 903361 - RNA, 19 nt, Homo sapiens
  misc_RNA (1)...(19): siRNA sense strand
caugacauccauccaauua

SEQ ID NO: 903362 - RNA, 19 nt, Homo sapiens
  misc_RNA (1)...(19): siRNA sense strand
gcucuuggcucauaacgau

SEQ ID NO: 903363 - RNA, 19 nt, Homo sapiens
  misc_RNA (1)...(19): siRNA sense strand
gugaagcagucaguaguua

SEQ ID NO: 903364 - RNA, 19 nt, Homo sapiens
  misc_RNA (1)...(19): siRNA sense strand
ugaccaagauuugcuauau

SEQ ID NO: 903365 - RNA, 19 nt, Homo sapiens
  misc_RNA (1)...(19): siRNA sense strand
gcuaugggaucauuuaugg

SEQ ID NO: 903366 - RNA, 19 nt, Homo sapiens
  misc_RNA (1)...(19): siRNA sense strand
gaauggagaagaaucacua

SEQ ID NO: 903367 - RNA, 19 nt, Homo sapiens
  misc_RNA (1)...(19): siRNA sense strand
gaagacaguucagcacuag

SEQ ID NO: 903368 - RNA, 19 nt, Homo sapiens
  misc_RNA (1)...(19): siRNA sense strand
ggauauauuuccuguccaa

SEQ ID NO: 903369 - RNA, 19 nt, Homo sapiens
  misc_RNA (1)...(19): siRNA sense strand
gcaaagacgagaaggagaa

SEQ ID NO: 903370 - RNA, 19 nt, Homo sapiens
  misc_RNA (1)...(19): siRNA sense strand
guagggaguaucuuaauuu

SEQ ID NO: 903371 - RNA, 19 nt, Homo sapiens
  misc_RNA (1)...(19): siRNA sense strand
gaagcuggcagauaucauu

SEQ ID NO: 903372 - RNA, 19 nt, Homo sapiens
  misc_RNA (1)...(19): siRNA sense strand
gaagauguccgcagcuguu

SEQ ID NO: 903373 - RNA, 19 nt, Homo sapiens
  misc_RNA (1)...(19): siRNA sense strand
uagcucagauugucaagaa

SEQ ID NO: 903374 - RNA, 19 nt, Homo sapiens
  misc_RNA (1)...(19): siRNA sense strand
gcagaugggcauuaaagaa

SEQ ID NO: 903375 - RNA, 19 nt, Homo sapiens
  misc_RNA (1)...(19): siRNA sense strand
gaaugggagcuaaaucuuu

SEQ ID NO: 903376 - RNA, 19 nt, Homo sapiens
  misc_RNA (1)...(19): siRNA sense strand
cagcaggacuuaguugaaa

SEQ ID NO: 903377 - RNA, 19 nt, Homo sapiens
  misc_RNA (1)...(19): siRNA sense strand
ugaagaacgucgcaauaug

SEQ ID NO: 903378 - RNA, 19 nt, Homo sapiens
  misc_RNA (1)...(19): siRNA sense strand
gagcuauucuggagauaau

SEQ ID NO: 903379 - RNA, 19 nt, Homo sapiens
  misc_RNA (1)...(19): siRNA sense strand
gcauuucucuucauuggau

SEQ ID NO: 903380 - RNA, 19 nt, Homo sapiens
  misc_RNA (1)...(19): siRNA sense strand
ggaaucugauaaagaaugu

SEQ ID NO: 903381 - RNA, 19 nt, Homo sapiens
  misc_RNA (1)...(19): siRNA sense strand
gacaacagcccuauuagug

SEQ ID NO: 903382 - RNA, 19 nt, Homo sapiens
  misc_RNA (1)...(19): siRNA sense strand
gaguagaaauggguucaaa

SEQ ID NO: 903383 - RNA, 19 nt, Homo sapiens
  misc_RNA (1)...(19): siRNA sense strand
agaacuaagugauccagua

SEQ ID NO: 903384 - RNA, 19 nt, Homo sapiens
  misc_RNA (1)...(19): siRNA sense strand
gaaugaaguuucuguuacu

SEQ ID NO: 903385 - RNA, 19 nt, Homo sapiens
  misc_RNA (1)...(19): siRNA sense strand
gcaaggaauucagagaaau

SEQ ID NO: 903386 - RNA, 19 nt, Homo sapiens
  misc_RNA (1)...(19): siRNA sense strand
ggaaggaaagaauuuaguu

SEQ ID NO: 903387 - RNA, 19 nt, Homo sapiens
  misc_RNA (1)...(19): siRNA sense strand
uauaugaagugguagaaga

SEQ ID NO: 903388 - RNA, 19 nt, Homo sapiens
  misc_RNA (1)...(19): siRNA sense strand
ugacaucgcugagguuuua

SEQ ID NO: 903389 - RNA, 19 nt, Homo sapiens
  misc_RNA (1)...(19): siRNA sense strand
uaagguggcaugcugguua

SEQ ID NO: 903390 - RNA, 19 nt, Homo sapiens
  misc_RNA (1)...(19): siRNA sense strand
gcagaggaguagcuguuga

SEQ ID NO: 903391 - RNA, 19 nt, Homo sapiens
  misc_RNA (1)...(19): siRNA sense strand
gaagacccguuuaccuuag

SEQ ID NO: 903392 - RNA, 19 nt, Homo sapiens
  misc_RNA (1)...(19): siRNA sense strand
guucggguauccuuacuaa

SEQ ID NO: 903393 - RNA, 19 nt, Homo sapiens
  misc_RNA (1)...(19): siRNA sense strand
ucagaagcgucuuacguuu

SEQ ID NO: 903394 - RNA, 19 nt, Homo sapiens
  misc_RNA (1)...(19): siRNA sense strand
caaggcauuucucuucauu

SEQ ID NO: 903395 - RNA, 19 nt, Homo sapiens
  misc_RNA (1)...(19): siRNA sense strand
guaggaaucucaagaauug

SEQ ID NO: 903396 - RNA, 19 nt, Homo sapiens
  misc_RNA (1)...(19): siRNA sense strand
gguccaaacucuugaauaa

SEQ ID NO: 903397 - RNA, 19 nt, Homo sapiens
  misc_RNA (1)...(19): siRNA sense strand
gggcaagguuucagugaua

SEQ ID NO: 903398 - RNA, 19 nt, Homo sapiens
  misc_RNA (1)...(19): siRNA sense strand
gagaaagaaugauggaaga

SEQ ID NO: 903399 - RNA, 19 nt, Homo sapiens
  misc_RNA (1)...(19): siRNA sense strand
gauccacgcugcuguaaug

SEQ ID NO: 903400 - RNA, 19 nt, Homo sapiens
  misc_RNA (1)...(19): siRNA sense strand
ggauauuccuggcuaauca

SEQ ID NO: 903401 - RNA, 19 nt, Homo sapiens
  misc_RNA (1)...(19): siRNA sense strand
gggagaaacugcuaugagu

SEQ ID NO: 903402 - RNA, 19 nt, Homo sapiens
  misc_RNA (1)...(19): siRNA sense strand
gaauugcgaaagucaaaua

SEQ ID NO: 903403 - RNA, 19 nt, Homo sapiens
  misc_RNA (1)...(19): siRNA sense strand
gaacaggccagaaagugaa

SEQ ID NO: 903404 - RNA, 19 nt, Homo sapiens
  misc_RNA (1)...(19): siRNA sense strand
aaagaaagguccaaacucu

SEQ ID NO: 903405 - RNA, 19 nt, Homo sapiens
  misc_RNA (1)...(19): siRNA sense strand
gaagaagaguccagaacag

SEQ ID NO: 903406 - RNA, 19 nt, Homo sapiens
  misc_RNA (1)...(19): siRNA sense strand
ggagaaacugcuaugagua

SEQ ID NO: 903407 - RNA, 19 nt, Homo sapiens
  misc_RNA (1)...(19): siRNA sense strand
uauagaaccugccgaguca

SEQ ID NO: 903408 - RNA, 19 nt, Homo sapiens
  misc_RNA (1)...(19): siRNA sense strand
gagaaacugcuaugaguau

SEQ ID NO: 903409 - RNA, 19 nt, Homo sapiens
  misc_RNA (1)...(19): siRNA sense strand
aaagaaugauggaagaaga

SEQ ID NO: 903410 - RNA, 19 nt, Homo sapiens
  misc_RNA (1)...(19): siRNA sense strand
gaagucaguccuccucauu

SEQ ID NO: 903411 - RNA, 19 nt, Homo sapiens
  misc_RNA (1)...(19): siRNA sense strand
gugaacugcuggucuggua

SEQ ID NO: 903412 - RNA, 19 nt, Homo sapiens
  misc_RNA (1)...(19): siRNA sense strand
gucaagagaucaaagaaag

SEQ ID NO: 903413 - RNA, 19 nt, Homo sapiens
  misc_RNA (1)...(19): siRNA sense strand
ggaagaagaguccagaaca

SEQ ID NO: 903414 - RNA, 19 nt, Homo sapiens
  misc_RNA (1)...(19): siRNA sense strand
gaacgaggcaucugaucug

SEQ ID NO: 903415 - RNA, 19 nt, Homo sapiens
  misc_RNA (1)...(19): siRNA sense strand
agugauaagucagauguua

SEQ ID NO: 903416 - RNA, 19 nt, Homo sapiens
  misc_RNA (1)...(19): siRNA sense strand
ggaugaguauggccaggaa

SEQ ID NO: 903417 - RNA, 19 nt, Homo sapiens
  misc_RNA (1)...(19): siRNA sense strand
acaggcagaucuucuauag

SEQ ID NO: 903418 - RNA, 19 nt, Homo sapiens
  misc_RNA (1)...(19): siRNA sense strand
agucagaccuccucaguca

SEQ ID NO: 903419 - RNA, 19 nt, Homo sapiens
  misc_RNA (1)...(19): siRNA sense strand
gaagucagaccuccucagu

SEQ ID NO: 903420 - RNA, 19 nt, Homo sapiens
  misc_RNA (1)...(19): siRNA sense strand
gaugagguaugugaacugu

SEQ ID NO: 903421 - RNA, 19 nt, Homo sapiens
  misc_RNA (1)...(19): siRNA sense strand
gguaggaaucucaagaauu

SEQ ID NO: 903422 - RNA, 19 nt, Homo sapiens
  misc_RNA (1)...(19): siRNA sense strand
gaacuucccaggaccaucu

SEQ ID NO: 903423 - RNA, 19 nt, Homo sapiens
  misc_RNA (1)...(19): siRNA sense strand
aaccaaaggucaagagauc

SEQ ID NO: 903424 - RNA, 19 nt, Homo sapiens
  misc_RNA (1)...(19): siRNA sense strand
agucaaauauggagagugu

SEQ ID NO: 903425 - RNA, 19 nt, Homo sapiens
  misc_RNA (1)...(19): siRNA sense strand
ggucaagagaucaaagaaa

SEQ ID NO: 903426 - RNA, 19 nt, Homo sapiens
  misc_RNA (1)...(19): siRNA sense strand
cgcaaucacuccucucaga

SEQ ID NO: 903427 - RNA, 19 nt, Homo sapiens
  misc_RNA (1)...(19): siRNA sense strand
ggcaagguuucagugauaa

SEQ ID NO: 903428 - RNA, 19 nt, Homo sapiens
  misc_RNA (1)...(19): siRNA sense strand
ggaacacaggcaaauuauu

SEQ ID NO: 903429 - RNA, 19 nt, Homo sapiens
  misc_RNA (1)...(19): siRNA sense strand
ccaacuggaugagguaugu

SEQ ID NO: 903430 - RNA, 19 nt, Homo sapiens
  misc_RNA (1)...(19): siRNA sense strand
agucagauguuauuacaca

SEQ ID NO: 903431 - RNA, 19 nt, Homo sapiens
  misc_RNA (1)...(19): siRNA sense strand
gaaagguccaaacucuuga

SEQ ID NO: 903432 - RNA, 19 nt, Homo sapiens
  misc_RNA (1)...(19): siRNA sense strand
gagcggcaauauucugauc

SEQ ID NO: 903433 - RNA, 19 nt, Homo sapiens
  misc_RNA (1)...(19): siRNA sense strand
gcaaucacuccucucagaa

SEQ ID NO: 903434 - RNA, 19 nt, Homo sapiens
  misc_RNA (1)...(19): siRNA sense strand
gcagcaaguggaagaaaga

SEQ ID NO: 903435 - RNA, 19 nt, Homo sapiens
  misc_RNA (1)...(19): siRNA sense strand
gaaagaaugauggaagaag

SEQ ID NO: 903436 - RNA, 19 nt, Homo sapiens
  misc_RNA (1)...(19): siRNA sense strand
agaaagguccaaacucuug

SEQ ID NO: 903437 - RNA, 19 nt, Homo sapiens
  misc_RNA (1)...(19): siRNA sense strand
gaucaaagaaagguccaaa

SEQ ID NO: 903438 - RNA, 19 nt, Homo sapiens
  misc_RNA (1)...(19): siRNA sense strand
ccacgcugcuguaaugaca

SEQ ID NO: 903439 - RNA, 19 nt, Homo sapiens
  misc_RNA (1)...(19): siRNA sense strand
gaacugcuggucugguaug

SEQ ID NO: 903440 - RNA, 19 nt, Homo sapiens
  misc_RNA (1)...(19): siRNA sense strand
ggguaggaaucucaagaau

SEQ ID NO: 903441 - RNA, 19 nt, Homo sapiens
  misc_RNA (1)...(19): siRNA sense strand
gaaacugcuaugaguaugu

SEQ ID NO: 903442 - RNA, 19 nt, Homo sapiens
  misc_RNA (1)...(19): siRNA sense strand
ucucaagaauugcgaaagu

SEQ ID NO: 903443 - RNA, 19 nt, Homo sapiens
  misc_RNA (1)...(19): siRNA sense strand
agggaacacaggcaaauua

SEQ ID NO: 903444 - RNA, 19 nt, Homo sapiens
  misc_RNA (1)...(19): siRNA sense strand
ggacauggcagagggagau

SEQ ID NO: 903445 - RNA, 19 nt, Homo sapiens
  misc_RNA (1)...(19): siRNA sense strand
gggaacacaggcaaauuau

SEQ ID NO: 903446 - RNA, 19 nt, Homo sapiens
  misc_RNA (1)...(19): siRNA sense strand
ccaggaccaucugcaagaa

SEQ ID NO: 903447 - RNA, 19 nt, Homo sapiens
  misc_RNA (1)...(19): siRNA sense strand
gagagugugggcaagguuu

SEQ ID NO: 903448 - RNA, 19 nt, Homo sapiens
  misc_RNA (1)...(19): siRNA sense strand
guccagaacaggccagaaa

SEQ ID NO: 903449 - RNA, 19 nt, Homo sapiens
  misc_RNA (1)...(19): siRNA sense strand
aaacugcuaugaguaugug

SEQ ID NO: 903450 - RNA, 19 nt, Homo sapiens
  misc_RNA (1)...(19): siRNA sense strand
gauguuauuacacaccaaa

SEQ ID NO: 903451 - RNA, 19 nt, Homo sapiens
  misc_RNA (1)...(19): siRNA sense strand
ggaacgaggcaucugaucu

SEQ ID NO: 903452 - RNA, 19 nt, Homo sapiens
  misc_RNA (1)...(19): siRNA sense strand
gcugagaauugggccauca

SEQ ID NO: 903453 - RNA, 19 nt, Homo sapiens
  misc_RNA (1)...(19): siRNA sense strand
caaagaaagguccaaacuc

SEQ ID NO: 903454 - RNA, 19 nt, Homo sapiens
  misc_RNA (1)...(19): siRNA sense strand
ucacuccucucagaacuuc

SEQ ID NO: 903455 - RNA, 19 nt, Homo sapiens
  misc_RNA (1)...(19): siRNA sense strand
gaaccugccgagucauuag

SEQ ID NO: 903456 - RNA, 19 nt, Homo sapiens
  misc_RNA (1)...(19): siRNA sense strand
gauaaauccucggccaacu

SEQ ID NO: 903457 - RNA, 19 nt, Homo sapiens
  misc_RNA (1)...(19): siRNA sense strand
gccacugggucugcacuuu

SEQ ID NO: 903458 - RNA, 19 nt, Homo sapiens
  misc_RNA (1)...(19): siRNA sense strand
gcucauggcagggagagaa

SEQ ID NO: 903459 - RNA, 19 nt, Homo sapiens
  misc_RNA (1)...(19): siRNA sense strand
ccaaaggucaagagaucaa

SEQ ID NO: 903460 - RNA, 19 nt, Homo sapiens
  misc_RNA (1)...(19): siRNA sense strand
uugcgaaagucaaauaugg

SEQ ID NO: 903461 - RNA, 19 nt, Homo sapiens
  misc_RNA (1)...(19): siRNA sense strand
ucaaagaaagguccaaacu

SEQ ID NO: 903462 - RNA, 19 nt, Homo sapiens
  misc_RNA (1)...(19): siRNA sense strand
cgaagaggcagccaacagu

SEQ ID NO: 903463 - RNA, 19 nt, Homo sapiens
  misc_RNA (1)...(19): siRNA sense strand
agaacaggccagaaaguga

SEQ ID NO: 903464 - RNA, 19 nt, Homo sapiens
  misc_RNA (1)...(19): siRNA sense strand
augaguauguggauggaaa

SEQ ID NO: 903465 - RNA, 19 nt, Homo sapiens
  misc_RNA (1)...(19): siRNA sense strand
ccagagauccauccauguc

SEQ ID NO: 903466 - RNA, 19 nt, Homo sapiens
  misc_RNA (1)...(19): siRNA sense strand
ccacugggucugcacuuug

SEQ ID NO: 903467 - RNA, 19 nt, Homo sapiens
  misc_RNA (1)...(19): siRNA sense strand
gaauuacagaagacgaaga

SEQ ID NO: 903468 - RNA, 19 nt, Homo sapiens
  misc_RNA (1)...(19): siRNA sense strand
agucaguccuccucauuca

SEQ ID NO: 903469 - RNA, 19 nt, Homo sapiens
  misc_RNA (1)...(19): siRNA sense strand
guuauuacacaccaaagga

SEQ ID NO: 903470 - RNA, 19 nt, Homo sapiens
  misc_RNA (1)...(19): siRNA sense strand
aaucaggagcggcaauauu

SEQ ID NO: 903471 - RNA, 19 nt, Homo sapiens
  misc_RNA (1)...(19): siRNA sense strand
ggcagcaaguggaagaaag

SEQ ID NO: 903472 - RNA, 19 nt, Homo sapiens
  misc_RNA (1)...(19): siRNA sense strand
ccacaggcagaucuucuau

SEQ ID NO: 903473 - RNA, 19 nt, Homo sapiens
  misc_RNA (1)...(19): siRNA sense strand
caagagaucaaagaaaggu

SEQ ID NO: 903474 - RNA, 19 nt, Homo sapiens
  misc_RNA (1)...(19): siRNA sense strand
ccuuaugucugcagagagu

SEQ ID NO: 903475 - RNA, 19 nt, Homo sapiens
  misc_RNA (1)...(19): siRNA sense strand
ggacagugcaguggacaag

SEQ ID NO: 903476 - RNA, 19 nt, Homo sapiens
  misc_RNA (1)...(19): siRNA sense strand
caacauguggaacgcaauc

SEQ ID NO: 903477 - RNA, 19 nt, Homo sapiens
  misc_RNA (1)...(19): siRNA sense strand
aagaauugcgaaagucaaa

SEQ ID NO: 903478 - RNA, 19 nt, Homo sapiens
  misc_RNA (1)...(19): siRNA sense strand
ucaagaauugcgaaaguca

SEQ ID NO: 903479 - RNA, 19 nt, Homo sapiens
  misc_RNA (1)...(19): siRNA sense strand
gaaucaggagcggcaauau

SEQ ID NO: 903480 - RNA, 19 nt, Homo sapiens
  misc_RNA (1)...(19): siRNA sense strand
agaaucaggagcggcaaua

SEQ ID NO: 903481 - RNA, 19 nt, Homo sapiens
  misc_RNA (1)...(19): siRNA sense strand
gcagccaacaguggauauu

SEQ ID NO: 903482 - RNA, 19 nt, Homo sapiens
  misc_RNA (1)...(19): siRNA sense strand
cagaacaggccagaaagug

SEQ ID NO: 903483 - RNA, 19 nt, Homo sapiens
  misc_RNA (1)...(19): siRNA sense strand
gggaugaugaagagcagaa

SEQ ID NO: 903484 - RNA, 19 nt, Homo sapiens
  misc_RNA (1)...(19): siRNA sense strand
ucagugauaagucagaugu

SEQ ID NO: 903485 - RNA, 19 nt, Homo sapiens
  misc_RNA (1)...(19): siRNA sense strand
ggagagugugggcaagguu

SEQ ID NO: 903486 - RNA, 19 nt, Homo sapiens
  misc_RNA (1)...(19): siRNA sense strand
caagaauugcgaaagucaa

SEQ ID NO: 903487 - RNA, 19 nt, Homo sapiens
  misc_RNA (1)...(19): siRNA sense strand
gcucuagagugggagaaag

SEQ ID NO: 903488 - RNA, 19 nt, Homo sapiens
  misc_RNA (1)...(19): siRNA sense strand
ggacaaauggggagcucua

SEQ ID NO: 903489 - RNA, 19 nt, Homo sapiens
  misc_RNA (1)...(19): siRNA sense strand
aaauuucucagucaacaug

SEQ ID NO: 903490 - RNA, 19 nt, Homo sapiens
  misc_RNA (1)...(19): siRNA sense strand
acgcugcuguaaugacaaa

SEQ ID NO: 903491 - RNA, 19 nt, Homo sapiens
  misc_RNA (1)...(19): siRNA sense strand
uagaaccugccgagucauu

SEQ ID NO: 903492 - RNA, 19 nt, Homo sapiens
  misc_RNA (1)...(19): siRNA sense strand
agagugggagaaagaauga

SEQ ID NO: 903493 - RNA, 19 nt, Homo sapiens
  misc_RNA (1)...(19): siRNA sense strand
agaaacugcuaugaguaug

SEQ ID NO: 903494 - RNA, 19 nt, Homo sapiens
  misc_RNA (1)...(19): siRNA sense strand
gggcagcaaguggaagaaa

SEQ ID NO: 903495 - RNA, 19 nt, Homo sapiens
  misc_RNA (1)...(19): siRNA sense strand
uaagaaagcugacaacaaa

SEQ ID NO: 903496 - RNA, 19 nt, Homo sapiens
  misc_RNA (1)...(19): siRNA sense strand
gagaagaaaugccgauaua

SEQ ID NO: 903497 - RNA, 19 nt, Homo sapiens
  misc_RNA (1)...(19): siRNA sense strand
gaaggaagcugaacacaug

SEQ ID NO: 903498 - RNA, 19 nt, Homo sapiens
  misc_RNA (1)...(19): siRNA sense strand
ggagauaaauagagaagua

SEQ ID NO: 903499 - RNA, 19 nt, Homo sapiens
  misc_RNA (1)...(19): siRNA sense strand
ggaaauagccacacugaaa

SEQ ID NO: 903500 - RNA, 19 nt, Homo sapiens
  misc_RNA (1)...(19): siRNA sense strand
gcagauauauguggaguaa

SEQ ID NO: 903501 - RNA, 19 nt, Homo sapiens
  misc_RNA (1)...(19): siRNA sense strand
gaagaaaugccgauauauu

SEQ ID NO: 903502 - RNA, 19 nt, Homo sapiens
  misc_RNA (1)...(19): siRNA sense strand
cgaaugcaguuaauaagua

SEQ ID NO: 903503 - RNA, 19 nt, Homo sapiens
  misc_RNA (1)...(19): siRNA sense strand
caagagcucugcaguguga

SEQ ID NO: 903504 - RNA, 19 nt, Homo sapiens
  misc_RNA (1)...(19): siRNA sense strand
ggaaagaguuagaagugaa

SEQ ID NO: 903505 - RNA, 19 nt, Homo sapiens
  misc_RNA (1)...(19): siRNA sense strand
acacaaugcucacuucuaa

SEQ ID NO: 903506 - RNA, 19 nt, Homo sapiens
  misc_RNA (1)...(19): siRNA sense strand
ugaacaggcucucagaaua

SEQ ID NO: 903507 - RNA, 19 nt, Homo sapiens
  misc_RNA (1)...(19): siRNA sense strand
ugaaggacaugcaaacuuu

SEQ ID NO: 903508 - RNA, 19 nt, Homo sapiens
  misc_RNA (1)...(19): siRNA sense strand
gcaagaguaacaucuaaua

SEQ ID NO: 903509 - RNA, 19 nt, Homo sapiens
  misc_RNA (1)...(19): siRNA sense strand
gagauugacuuuaaaccaa

SEQ ID NO: 903510 - RNA, 19 nt, Homo sapiens
  misc_RNA (1)...(19): siRNA sense strand
gaaaagaagugagcaaauu

SEQ ID NO: 903511 - RNA, 19 nt, Homo sapiens
  misc_RNA (1)...(19): siRNA sense strand
uuagaagggucuccuguua

SEQ ID NO: 903512 - RNA, 19 nt, Homo sapiens
  misc_RNA (1)...(19): siRNA sense strand
gaagaaacaccuagggaaa

SEQ ID NO: 903513 - RNA, 19 nt, Homo sapiens
  misc_RNA (1)...(19): siRNA sense strand
gaacacaggacaccucuga

SEQ ID NO: 903514 - RNA, 19 nt, Homo sapiens
  misc_RNA (1)...(19): siRNA sense strand
gaagagaagagaagaaaug

SEQ ID NO: 903515 - RNA, 19 nt, Homo sapiens
  misc_RNA (1)...(19): siRNA sense strand
agaggaagaugaagaauau

SEQ ID NO: 903516 - RNA, 19 nt, Homo sapiens
  misc_RNA (1)...(19): siRNA sense strand
gauguucccuucagaauca

SEQ ID NO: 903517 - RNA, 19 nt, Homo sapiens
  misc_RNA (1)...(19): siRNA sense strand
gaugaaggcucuacaaugc

SEQ ID NO: 903518 - RNA, 19 nt, Homo sapiens
  misc_RNA (1)...(19): siRNA sense strand
gcugaaagcuugguggaaa

SEQ ID NO: 903519 - RNA, 19 nt, Homo sapiens
  misc_RNA (1)...(19): siRNA sense strand
gcaauuaguucaugcacau

SEQ ID NO: 903520 - RNA, 19 nt, Homo sapiens
  misc_RNA (1)...(19): siRNA sense strand
caaauaaagccuuggaauu

SEQ ID NO: 903521 - RNA, 19 nt, Homo sapiens
  misc_RNA (1)...(19): siRNA sense strand
caaauaaagccuuggaauu

SEQ ID NO: 903522 - RNA, 19 nt, Homo sapiens
  misc_RNA (1)...(19): siRNA sense strand
caaauaaagccuuggaauu

SEQ ID NO: 903523 - RNA, 19 nt, Homo sapiens
  misc_RNA (1)...(19): siRNA sense strand
gcugaaagcuugguggaaa

SEQ ID NO: 903524 - RNA, 19 nt, Homo sapiens
  misc_RNA (1)...(19): siRNA sense strand
gugcaaauauucugauaga

SEQ ID NO: 903525 - RNA, 19 nt, Homo sapiens
  misc_RNA (1)...(19): siRNA sense strand
agaagagucuccuaauaaa

SEQ ID NO: 903526 - RNA, 19 nt, Homo sapiens
  misc_RNA (1)...(19): siRNA sense strand
gaaggaacaucugcaggaa

SEQ ID NO: 903527 - RNA, 19 nt, Homo sapiens
  misc_RNA (1)...(19): siRNA sense strand
uagaagagccuccuaagaa

SEQ ID NO: 903528 - RNA, 19 nt, Homo sapiens
  misc_RNA (1)...(19): siRNA sense strand
uagaagagucuccuaauaa

SEQ ID NO: 903529 - RNA, 19 nt, Homo sapiens
  misc_RNA (1)...(19): siRNA sense strand
gaaccugcuuuccacauug

SEQ ID NO: 903530 - RNA, 19 nt, Homo sapiens
  misc_RNA (1)...(19): siRNA sense strand
ggagaugcuuguuugcaaa

SEQ ID NO: 903531 - RNA, 19 nt, Homo sapiens
  misc_RNA (1)...(19): siRNA sense strand
cgucuuugcugcagauaua

SEQ ID NO: 903532 - RNA, 19 nt, Homo sapiens
  misc_RNA (1)...(19): siRNA sense strand
gaccaucaaccuuaauaua

SEQ ID NO: 903533 - RNA, 19 nt, Homo sapiens
  misc_RNA (1)...(19): siRNA sense strand
ggaaagaacaccugacaca

SEQ ID NO: 903534 - RNA, 19 nt, Homo sapiens
  misc_RNA (1)...(19): siRNA sense strand
caacagcaauuaguucaug

SEQ ID NO: 903535 - RNA, 19 nt, Homo sapiens
  misc_RNA (1)...(19): siRNA sense strand
acaagaccaugaucaaauu

SEQ ID NO: 903536 - RNA, 19 nt, Homo sapiens
  misc_RNA (1)...(19): siRNA sense strand
gaagaucgcaugggagaaa

SEQ ID NO: 903537 - RNA, 19 nt, Homo sapiens
  misc_RNA (1)...(19): siRNA sense strand
gaagaucgcaugggagaaa

SEQ ID NO: 903538 - RNA, 19 nt, Homo sapiens
  misc_RNA (1)...(19): siRNA sense strand
ggagggaacaucugacaaa

SEQ ID NO: 903539 - RNA, 19 nt, Homo sapiens
  misc_RNA (1)...(19): siRNA sense strand
agaagggucuccuguuaaa

SEQ ID NO: 903540 - RNA, 19 nt, Homo sapiens
  misc_RNA (1)...(19): siRNA sense strand
gcaaaacucuguuccaaau

SEQ ID NO: 903541 - RNA, 19 nt, Homo sapiens
  misc_RNA (1)...(19): siRNA sense strand
gaacuucagaugacccuaa

SEQ ID NO: 903542 - RNA, 19 nt, Homo sapiens
  misc_RNA (1)...(19): siRNA sense strand
ugaagaguguagaaaguaa

SEQ ID NO: 903543 - RNA, 19 nt, Homo sapiens
  misc_RNA (1)...(19): siRNA sense strand
gcaaaagucuguuccaaau

SEQ ID NO: 903544 - RNA, 19 nt, Homo sapiens
  misc_RNA (1)...(19): siRNA sense strand
gcaaaagucuguuccaaau

SEQ ID NO: 903545 - RNA, 19 nt, Homo sapiens
  misc_RNA (1)...(19): siRNA sense strand
gaagacacaccuagggaaa

SEQ ID NO: 903546 - RNA, 19 nt, Homo sapiens
  misc_RNA (1)...(19): siRNA sense strand
acaaugaggugcuccauca

SEQ ID NO: 903547 - RNA, 19 nt, Homo sapiens
  misc_RNA (1)...(19): siRNA sense strand
uuagaagagucuccugaua

SEQ ID NO: 903548 - RNA, 19 nt, Homo sapiens
  misc_RNA (1)...(19): siRNA sense strand
acagaaggauguguguuua

SEQ ID NO: 903549 - RNA, 19 nt, Homo sapiens
  misc_RNA (1)...(19): siRNA sense strand
acagaaggauguguguuua

SEQ ID NO: 903550 - RNA, 19 nt, Homo sapiens
  misc_RNA (1)...(19): siRNA sense strand
acagaaggauguguguuua

SEQ ID NO: 903551 - RNA, 19 nt, Homo sapiens
  misc_RNA (1)...(19): siRNA sense strand
gaucagagguucccaucag

SEQ ID NO: 903552 - RNA, 19 nt, Homo sapiens
  misc_RNA (1)...(19): siRNA sense strand
gggaacaucugacaaaauu

SEQ ID NO: 903553 - RNA, 19 nt, Homo sapiens
  misc_RNA (1)...(19): siRNA sense strand
aaauaaagccuuggaauug

SEQ ID NO: 903554 - RNA, 19 nt, Homo sapiens
  misc_RNA (1)...(19): siRNA sense strand
ugauggacaugcaaacuuu

SEQ ID NO: 903555 - RNA, 19 nt, Homo sapiens
  misc_RNA (1)...(19): siRNA sense strand
aaauaaagccuuggaauug

SEQ ID NO: 903556 - RNA, 19 nt, Homo sapiens
  misc_RNA (1)...(19): siRNA sense strand
ugauggacaugcaaacuuu

SEQ ID NO: 903557 - RNA, 19 nt, Homo sapiens
  misc_RNA (1)...(19): siRNA sense strand
aaauaaagccuuggaauug

SEQ ID NO: 903558 - RNA, 19 nt, Homo sapiens
  misc_RNA (1)...(19): siRNA sense strand
ugagaguucugcaaagauu

SEQ ID NO: 903559 - RNA, 19 nt, Homo sapiens
  misc_RNA (1)...(19): siRNA sense strand
gcaaaagucugucccaaau

SEQ ID NO: 903560 - RNA, 19 nt, Homo sapiens
  misc_RNA (1)...(19): siRNA sense strand
caaaugcgaaugcaguuaa

SEQ ID NO: 903561 - RNA, 19 nt, Homo sapiens
  misc_RNA (1)...(19): siRNA sense strand
caauauagugggcagcuua

SEQ ID NO: 903562 - RNA, 19 nt, Homo sapiens
  misc_RNA (1)...(19): siRNA sense strand
gaaagaguuagaagugaaa

SEQ ID NO: 903563 - RNA, 19 nt, Homo sapiens
  misc_RNA (1)...(19): siRNA sense strand
aagaagaccaucaaccuua

SEQ ID NO: 903564 - RNA, 19 nt, Homo sapiens
  misc_RNA (1)...(19): siRNA sense strand
agugugagauugacuuuaa

SEQ ID NO: 903565 - RNA, 19 nt, Homo sapiens
  misc_RNA (1)...(19): siRNA sense strand
uagaagagucuccugauaa

SEQ ID NO: 903566 - RNA, 19 nt, Homo sapiens
  misc_RNA (1)...(19): siRNA sense strand
gaaauuacgaguccugcaa

SEQ ID NO: 903567 - RNA, 19 nt, Homo sapiens
  misc_RNA (1)...(19): siRNA sense strand
ucaggaggcuugugcaaau

SEQ ID NO: 903568 - RNA, 19 nt, Homo sapiens
  misc_RNA (1)...(19): siRNA sense strand
gcucucagaauacaagaua

SEQ ID NO: 903569 - RNA, 19 nt, Homo sapiens
  misc_RNA (1)...(19): siRNA sense strand
ggauacaguucauucuugu

SEQ ID NO: 903570 - RNA, 19 nt, Homo sapiens
  misc_RNA (1)...(19): siRNA sense strand
gaagaagaccaucaaccuu

SEQ ID NO: 903571 - RNA, 19 nt, Homo sapiens
  misc_RNA (1)...(19): siRNA sense strand
agaagaccaucaaccuuaa

SEQ ID NO: 903572 - RNA, 19 nt, Homo sapiens
  misc_RNA (1)...(19): siRNA sense strand
caaagagaccaacgugaaa

SEQ ID NO: 903573 - RNA, 19 nt, Homo sapiens
  misc_RNA (1)...(19): siRNA sense strand
gaaagaggaaucauuaacu

SEQ ID NO: 903574 - RNA, 19 nt, Homo sapiens
  misc_RNA (1)...(19): siRNA sense strand
gagagcagaucagauguuc

SEQ ID NO: 903575 - RNA, 19 nt, Homo sapiens
  misc_RNA (1)...(19): siRNA sense strand
ccaccagaauccaaacaaa

SEQ ID NO: 903576 - RNA, 19 nt, Homo sapiens
  misc_RNA (1)...(19): siRNA sense strand
agaaacaccuagggaaauu

SEQ ID NO: 903577 - RNA, 19 nt, Homo sapiens
  misc_RNA (1)...(19): siRNA sense strand
gcaaaauguugacgucuuu

SEQ ID NO: 903578 - RNA, 19 nt, Homo sapiens
  misc_RNA (1)...(19): siRNA sense strand
agaagagucuccugauaau

SEQ ID NO: 903579 - RNA, 19 nt, Homo sapiens
  misc_RNA (1)...(19): siRNA sense strand
gaacaggcucucagaauac

SEQ ID NO: 903580 - RNA, 19 nt, Homo sapiens
  misc_RNA (1)...(19): siRNA sense strand
gaucagauguucccuucag

SEQ ID NO: 903581 - RNA, 19 nt, Homo sapiens
  misc_RNA (1)...(19): siRNA sense strand
gcaaaugcgaaugcaguua

SEQ ID NO: 903582 - RNA, 19 nt, Homo sapiens
  misc_RNA (1)...(19): siRNA sense strand
gaacaaacacacugaacag

SEQ ID NO: 903583 - RNA, 19 nt, Homo sapiens
  misc_RNA (1)...(19): siRNA sense strand
aaaggaaauugccaugcua

SEQ ID NO: 903584 - RNA, 19 nt, Homo sapiens
  misc_RNA (1)...(19): siRNA sense strand
gaagaagagaagagaagaa

SEQ ID NO: 903585 - RNA, 19 nt, Homo sapiens
  misc_RNA (1)...(19): siRNA sense strand
aauaaagccuuggaauuga

SEQ ID NO: 903586 - RNA, 19 nt, Homo sapiens
  misc_RNA (1)...(19): siRNA sense strand
ggacaugcaaacuuucaaa

SEQ ID NO: 903587 - RNA, 19 nt, Homo sapiens
  misc_RNA (1)...(19): siRNA sense strand
aauaaagccuuggaauuga

SEQ ID NO: 903588 - RNA, 19 nt, Homo sapiens
  misc_RNA (1)...(19): siRNA sense strand
ggacaugcaaacuuucaaa

SEQ ID NO: 903589 - RNA, 19 nt, Homo sapiens
  misc_RNA (1)...(19): siRNA sense strand
aauaaagccuuggaauuga

SEQ ID NO: 903590 - RNA, 19 nt, Homo sapiens
  misc_RNA (1)...(19): siRNA sense strand
ggacaugcaaacuuucaaa

SEQ ID NO: 903591 - RNA, 19 nt, Homo sapiens
  misc_RNA (1)...(19): siRNA sense strand
gaaacaccuagggaaauua

SEQ ID NO: 903592 - RNA, 19 nt, Homo sapiens
  misc_RNA (1)...(19): siRNA sense strand
agacacaccuagggaaauu

SEQ ID NO: 903593 - RNA, 19 nt, Homo sapiens
  misc_RNA (1)...(19): siRNA sense strand
uagacuggcuucugcugua

SEQ ID NO: 903594 - RNA, 19 nt, Homo sapiens
  misc_RNA (1)...(19): siRNA sense strand
gagagcagauccgauguuc

SEQ ID NO: 903595 - RNA, 19 nt, Homo sapiens
  misc_RNA (1)...(19): siRNA sense strand
cuucgucgauuuguguuua

SEQ ID NO: 903596 - RNA, 19 nt, Homo sapiens
  misc_RNA (1)...(19): siRNA sense strand
guguuuacaucaucgacua

SEQ ID NO: 903597 - RNA, 19 nt, Homo sapiens
  misc_RNA (1)...(19): siRNA sense strand
gacggaagccuguccuuuc

SEQ ID NO: 903598 - RNA, 19 nt, Homo sapiens
  misc_RNA (1)...(19): siRNA sense strand
ggccugcguucccacguuu

SEQ ID NO: 903599 - RNA, 19 nt, Homo sapiens
  misc_RNA (1)...(19): siRNA sense strand
gagcuucgucgauuugugu

SEQ ID NO: 903600 - RNA, 19 nt, Homo sapiens
  misc_RNA (1)...(19): siRNA sense strand
gauuuguguuuacaucauc

SEQ ID NO: 903601 - RNA, 19 nt, Homo sapiens
  misc_RNA (1)...(19): siRNA sense strand
ggagcuucgucgauuugug

SEQ ID NO: 903602 - RNA, 19 nt, Homo sapiens
  misc_RNA (1)...(19): siRNA sense strand
cgauuuguguuuacaucau

SEQ ID NO: 903603 - RNA, 19 nt, Homo sapiens
  misc_RNA (1)...(19): siRNA sense strand
gugcgagcuugcugugguu

SEQ ID NO: 903604 - RNA, 19 nt, Homo sapiens
  misc_RNA (1)...(19): siRNA sense strand
gccuguccuuucuuccuuu

SEQ ID NO: 903605 - RNA, 19 nt, Homo sapiens
  misc_RNA (1)...(19): siRNA sense strand
gguccuuccacuuguagaa

SEQ ID NO: 903606 - RNA, 19 nt, Homo sapiens
  misc_RNA (1)...(19): siRNA sense strand
acggaagccuguccuuucu

SEQ ID NO: 903607 - RNA, 19 nt, Homo sapiens
  misc_RNA (1)...(19): siRNA sense strand
gaucacagauacauccauu

SEQ ID NO: 903608 - RNA, 19 nt, Homo sapiens
  misc_RNA (1)...(19): siRNA sense strand
gcagacacuuuaccaaauc

SEQ ID NO: 903609 - RNA, 19 nt, Homo sapiens
  misc_RNA (1)...(19): siRNA sense strand
uaaauugacuccggacaga

SEQ ID NO: 903610 - RNA, 19 nt, Homo sapiens
  misc_RNA (1)...(19): siRNA sense strand
cgcugcagcucaccaauua

SEQ ID NO: 903611 - RNA, 19 nt, Homo sapiens
  misc_RNA (1)...(19): siRNA sense strand
ucacaaaacuuuacacaug

SEQ ID NO: 903612 - RNA, 19 nt, Homo sapiens
  misc_RNA (1)...(19): siRNA sense strand
auacauccauuccaaagaa

SEQ ID NO: 903613 - RNA, 19 nt, Homo sapiens
  misc_RNA (1)...(19): siRNA sense strand
gcaaaguguucaggcgaaa

SEQ ID NO: 903614 - RNA, 19 nt, Homo sapiens
  misc_RNA (1)...(19): siRNA sense strand
ggcagacacuuuaccaaau

SEQ ID NO: 903615 - RNA, 19 nt, Homo sapiens
  misc_RNA (1)...(19): siRNA sense strand
acagauacauccauuccaa

SEQ ID NO: 903616 - RNA, 19 nt, Homo sapiens
  misc_RNA (1)...(19): siRNA sense strand
gaguuuaucugcaaguuuu

SEQ ID NO: 903617 - RNA, 19 nt, Homo sapiens
  misc_RNA (1)...(19): siRNA sense strand
gaaaggauuuugucagucu

SEQ ID NO: 903618 - RNA, 19 nt, Homo sapiens
  misc_RNA (1)...(19): siRNA sense strand
gagcagugcggcaaagugu

SEQ ID NO: 903619 - RNA, 19 nt, Homo sapiens
  misc_RNA (1)...(19): siRNA sense strand
ucucgggccucaguaaauu

SEQ ID NO: 903620 - RNA, 19 nt, Homo sapiens
  misc_RNA (1)...(19): siRNA sense strand
cggcagacacuuuaccaaa

SEQ ID NO: 903621 - RNA, 19 nt, Homo sapiens
  misc_RNA (1)...(19): siRNA sense strand
gcagugcggcaaaguguuc

SEQ ID NO: 903622 - RNA, 19 nt, Homo sapiens
  misc_RNA (1)...(19): siRNA sense strand
ggagugugggaaaggauuu

SEQ ID NO: 903623 - RNA, 19 nt, Homo sapiens
  misc_RNA (1)...(19): siRNA sense strand
gauacauccauuccaaaga

SEQ ID NO: 903624 - RNA, 19 nt, Homo sapiens
  misc_RNA (1)...(19): siRNA sense strand
gggaaaggauuuugucagu

SEQ ID NO: 903625 - RNA, 19 nt, Homo sapiens
  misc_RNA (1)...(19): siRNA sense strand
ucccagcccugcacaagga

SEQ ID NO: 903626 - RNA, 19 nt, Homo sapiens
  misc_RNA (1)...(19): siRNA sense strand
cuucaaaugucaggagugu

SEQ ID NO: 903627 - RNA, 19 nt, Homo sapiens
  misc_RNA (1)...(19): siRNA sense strand
uacauccauuccaaagaaa

SEQ ID NO: 903628 - RNA, 19 nt, Homo sapiens
  misc_RNA (1)...(19): siRNA sense strand
gcagacaucaagcccuaca

SEQ ID NO: 903629 - RNA, 19 nt, Homo sapiens
  misc_RNA (1)...(19): siRNA sense strand
cagauacauccauuccaaa

SEQ ID NO: 903630 - RNA, 19 nt, Homo sapiens
  misc_RNA (1)...(19): siRNA sense strand
ucaggagugugggaaagga

SEQ ID NO: 903631 - RNA, 19 nt, Homo sapiens
  misc_RNA (1)...(19): siRNA sense strand
ggucucagcgcgguacaga

SEQ ID NO: 903632 - RNA, 19 nt, Homo sapiens
  misc_RNA (1)...(19): siRNA sense strand
guuuugacuuugccaauuu

SEQ ID NO: 903633 - RNA, 19 nt, Homo sapiens
  misc_RNA (1)...(19): siRNA sense strand
caucucgggccucaguaaa

SEQ ID NO: 903634 - RNA, 19 nt, Homo sapiens
  misc_RNA (1)...(19): siRNA sense strand
aagaguuuaucugcaaguu

SEQ ID NO: 903635 - RNA, 19 nt, Homo sapiens
  misc_RNA (1)...(19): siRNA sense strand
gacacuuuaccaaauccua

SEQ ID NO: 903636 - RNA, 19 nt, Homo sapiens
  misc_RNA (1)...(19): siRNA sense strand
gaaaugggauguaacagua

SEQ ID NO: 903637 - RNA, 19 nt, Homo sapiens
  misc_RNA (1)...(19): siRNA sense strand
ugacauaacugcccuuaaa

SEQ ID NO: 903638 - RNA, 19 nt, Homo sapiens
  misc_RNA (1)...(19): siRNA sense strand
gaaaagaucuacuuggaua

SEQ ID NO: 903639 - RNA, 19 nt, Homo sapiens
  misc_RNA (1)...(19): siRNA sense strand
gcaaagaaaccacgaauug

SEQ ID NO: 903640 - RNA, 19 nt, Homo sapiens
  misc_RNA (1)...(19): siRNA sense strand
gaacaacuaucuuacaaag

SEQ ID NO: 903641 - RNA, 19 nt, Homo sapiens
  misc_RNA (1)...(19): siRNA sense strand
caaacgagcugcagaugaa

SEQ ID NO: 903642 - RNA, 19 nt, Homo sapiens
  misc_RNA (1)...(19): siRNA sense strand
gcuaccaccucuuuaauaa

SEQ ID NO: 903643 - RNA, 19 nt, Homo sapiens
  misc_RNA (1)...(19): siRNA sense strand
cagaagcgcucccuuagaa

SEQ ID NO: 903644 - RNA, 19 nt, Homo sapiens
  misc_RNA (1)...(19): siRNA sense strand
gagauuggcugcccguuug

SEQ ID NO: 903645 - RNA, 19 nt, Homo sapiens
  misc_RNA (1)...(19): siRNA sense strand
gaacucagcuaucacaaac

SEQ ID NO: 903646 - RNA, 19 nt, Homo sapiens
  misc_RNA (1)...(19): siRNA sense strand
gaucuacuaucaagacuga

SEQ ID NO: 903647 - RNA, 19 nt, Homo sapiens
  misc_RNA (1)...(19): siRNA sense strand
caggaaagauucaaaggaa

SEQ ID NO: 903648 - RNA, 19 nt, Homo sapiens
  misc_RNA (1)...(19): siRNA sense strand
uacaguaccuuauagagua

SEQ ID NO: 903649 - RNA, 19 nt, Homo sapiens
  misc_RNA (1)...(19): siRNA sense strand
agacugaucuagaugauga

SEQ ID NO: 903650 - RNA, 19 nt, Homo sapiens
  misc_RNA (1)...(19): siRNA sense strand
gaaaagaucuacuaucaag

SEQ ID NO: 903651 - RNA, 19 nt, Homo sapiens
  misc_RNA (1)...(19): siRNA sense strand
ggauagaccaguguucuua

SEQ ID NO: 903652 - RNA, 19 nt, Homo sapiens
  misc_RNA (1)...(19): siRNA sense strand
ugaucuagaugaugacaua

SEQ ID NO: 903653 - RNA, 19 nt, Homo sapiens
  misc_RNA (1)...(19): siRNA sense strand
guucagaaaugggauguaa

SEQ ID NO: 903654 - RNA, 19 nt, Homo sapiens
  misc_RNA (1)...(19): siRNA sense strand
gaagaaaggaucucgaaca

SEQ ID NO: 903655 - RNA, 19 nt, Homo sapiens
  misc_RNA (1)...(19): siRNA sense strand
uaaccaugcuuaaugcaaa

SEQ ID NO: 903656 - RNA, 19 nt, Homo sapiens
  misc_RNA (1)...(19): siRNA sense strand
ccaagaaugugaagaccaa

SEQ ID NO: 903657 - RNA, 19 nt, Homo sapiens
  misc_RNA (1)...(19): siRNA sense strand
gggaaacauuggacaggua

SEQ ID NO: 903658 - RNA, 19 nt, Homo sapiens
  misc_RNA (1)...(19): siRNA sense strand
uaacagauacgaucaggaa

SEQ ID NO: 903659 - RNA, 19 nt, Homo sapiens
  misc_RNA (1)...(19): siRNA sense strand
guacagacugaacagauua

SEQ ID NO: 903660 - RNA, 19 nt, Homo sapiens
  misc_RNA (1)...(19): siRNA sense strand
ggauguaacaguauuagaa

SEQ ID NO: 903661 - RNA, 19 nt, Homo sapiens
  misc_RNA (1)...(19): siRNA sense strand
gaacagauuaggucuuugu

SEQ ID NO: 903662 - RNA, 19 nt, Homo sapiens
  misc_RNA (1)...(19): siRNA sense strand
gaagggagacgaagugauc

SEQ ID NO: 903663 - RNA, 19 nt, Homo sapiens
  misc_RNA (1)...(19): siRNA sense strand
gaagcuaugucaguggaaa

SEQ ID NO: 903664 - RNA, 19 nt, Homo sapiens
  misc_RNA (1)...(19): siRNA sense strand
agaaggagauuguggugaa

SEQ ID NO: 903665 - RNA, 19 nt, Homo sapiens
  misc_RNA (1)...(19): siRNA sense strand
gcauaaaucgcacuugaga

SEQ ID NO: 903666 - RNA, 19 nt, Homo sapiens
  misc_RNA (1)...(19): siRNA sense strand
gcagcuaccaccucuuuaa

SEQ ID NO: 903667 - RNA, 19 nt, Homo sapiens
  misc_RNA (1)...(19): siRNA sense strand
aagcauaaaucgcacuuga

SEQ ID NO: 903668 - RNA, 19 nt, Homo sapiens
  misc_RNA (1)...(19): siRNA sense strand
agacagaagcgcucccuua

SEQ ID NO: 903669 - RNA, 19 nt, Homo sapiens
  misc_RNA (1)...(19): siRNA sense strand
gcaauucuucaaucuguaa

SEQ ID NO: 903670 - RNA, 19 nt, Homo sapiens
  misc_RNA (1)...(19): siRNA sense strand
ggauccaaauguucagaaa

SEQ ID NO: 903671 - RNA, 19 nt, Homo sapiens
  misc_RNA (1)...(19): siRNA sense strand
guaugacacugaaaucugu

SEQ ID NO: 903672 - RNA, 19 nt, Homo sapiens
  misc_RNA (1)...(19): siRNA sense strand
gauacgaucaggaaagauu

SEQ ID NO: 903673 - RNA, 19 nt, Homo sapiens
  misc_RNA (1)...(19): siRNA sense strand
caaagaaaccacgaauuga

SEQ ID NO: 903674 - RNA, 19 nt, Homo sapiens
  misc_RNA (1)...(19): siRNA sense strand
acaacuaucuuacaaagca

SEQ ID NO: 903675 - RNA, 19 nt, Homo sapiens
  misc_RNA (1)...(19): siRNA sense strand
gaugugacccgagauauug

SEQ ID NO: 903676 - RNA, 19 nt, Homo sapiens
  misc_RNA (1)...(19): siRNA sense strand
gacacgaacaacuaucuua

SEQ ID NO: 903677 - RNA, 19 nt, Homo sapiens
  misc_RNA (1)...(19): siRNA sense strand
gcaccuuucucauccuguu

SEQ ID NO: 903678 - RNA, 19 nt, Homo sapiens
  misc_RNA (1)...(19): siRNA sense strand
gcauggcaguucaaagguu

SEQ ID NO: 903679 - RNA, 19 nt, Homo sapiens
  misc_RNA (1)...(19): siRNA sense strand
gcaaucaaagccaaaauua

SEQ ID NO: 903680 - RNA, 19 nt, Homo sapiens
  misc_RNA (1)...(19): siRNA sense strand
gaaaauauuccugugguua

SEQ ID NO: 903681 - RNA, 19 nt, Homo sapiens
  misc_RNA (1)...(19): siRNA sense strand
ugaaauuugucccaucaga

SEQ ID NO: 903682 - RNA, 19 nt, Homo sapiens
  misc_RNA (1)...(19): siRNA sense strand
gcgaucuacucaagucaaa

SEQ ID NO: 903683 - RNA, 19 nt, Homo sapiens
  misc_RNA (1)...(19): siRNA sense strand
uagaagaccugaucgaaaa

SEQ ID NO: 903684 - RNA, 19 nt, Homo sapiens
  misc_RNA (1)...(19): siRNA sense strand
cagauacgaucaggaaaga

SEQ ID NO: 903685 - RNA, 19 nt, Homo sapiens
  misc_RNA (1)...(19): siRNA sense strand
cuacuuggauaucucaaug

SEQ ID NO: 903686 - RNA, 19 nt, Homo sapiens
  misc_RNA (1)...(19): siRNA sense strand
gguacaugguaaagcauaa

SEQ ID NO: 903687 - RNA, 19 nt, Homo sapiens
  misc_RNA (1)...(19): siRNA sense strand
uauuagaacucagcuauca

SEQ ID NO: 903688 - RNA, 19 nt, Homo sapiens
  misc_RNA (1)...(19): siRNA sense strand
gaaguaugaugaaguucgu

SEQ ID NO: 903689 - RNA, 19 nt, Homo sapiens
  misc_RNA (1)...(19): siRNA sense strand
gcaauuaguguuacaguac

SEQ ID NO: 903690 - RNA, 19 nt, Homo sapiens
  misc_RNA (1)...(19): siRNA sense strand
gaagcgcucccuuagaaau

SEQ ID NO: 903691 - RNA, 19 nt, Homo sapiens
  misc_RNA (1)...(19): siRNA sense strand
caaagcacaggaaagaauu

SEQ ID NO: 903692 - RNA, 19 nt, Homo sapiens
  misc_RNA (1)...(19): siRNA sense strand
guagaugugacccgagaua

SEQ ID NO: 903693 - RNA, 19 nt, Homo sapiens
  misc_RNA (1)...(19): siRNA sense strand
cugaacagauuaggucuuu

SEQ ID NO: 903694 - RNA, 19 nt, Homo sapiens
  misc_RNA (1)...(19): siRNA sense strand
gauuaggucuuugucugaa

SEQ ID NO: 903695 - RNA, 19 nt, Homo sapiens
  misc_RNA (1)...(19): siRNA sense strand
ggaucucgaacacccauua

SEQ ID NO: 903696 - RNA, 19 nt, Homo sapiens
  misc_RNA (1)...(19): siRNA sense strand
gauauugucagcagagaga

SEQ ID NO: 903697 - RNA, 19 nt, Homo sapiens
  misc_RNA (1)...(19): siRNA sense strand
uuaauaacgugcaccuuuc

SEQ ID NO: 903698 - RNA, 19 nt, Homo sapiens
  misc_RNA (1)...(19): siRNA sense strand
auuaaagccuuccaucuga

SEQ ID NO: 903699 - RNA, 19 nt, Homo sapiens
  misc_RNA (1)...(19): siRNA sense strand
ccagagaguacuacacauu

SEQ ID NO: 903700 - RNA, 19 nt, Homo sapiens
  misc_RNA (1)...(19): siRNA sense strand
uuacaaagcacaggaaaga

SEQ ID NO: 903701 - RNA, 19 nt, Homo sapiens
  misc_RNA (1)...(19): siRNA sense strand
caagacugaucuagaugau

SEQ ID NO: 903702 - RNA, 19 nt, Homo sapiens
  misc_RNA (1)...(19): siRNA sense strand
ucugaaguaugaugaaguu

SEQ ID NO: 903703 - RNA, 19 nt, Homo sapiens
  misc_RNA (1)...(19): siRNA sense strand
uaauaaccaugcuuaaugc

SEQ ID NO: 903704 - RNA, 19 nt, Homo sapiens
  misc_RNA (1)...(19): siRNA sense strand
gaccagccccuuaaacuua

SEQ ID NO: 903705 - RNA, 19 nt, Homo sapiens
  misc_RNA (1)...(19): siRNA sense strand
uguacagacugaacagauu

SEQ ID NO: 903706 - RNA, 19 nt, Homo sapiens
  misc_RNA (1)...(19): siRNA sense strand
guaacaguauuagaacuca

SEQ ID NO: 903707 - RNA, 19 nt, Homo sapiens
  misc_RNA (1)...(19): siRNA sense strand
gaaauuugucccaucagau

SEQ ID NO: 903708 - RNA, 19 nt, Homo sapiens
  misc_RNA (1)...(19): siRNA sense strand
ucgaacacccauuaucaua

SEQ ID NO: 903709 - RNA, 19 nt, Homo sapiens
  misc_RNA (1)...(19): siRNA sense strand
acgaacaacuaucuuacaa

SEQ ID NO: 903710 - RNA, 19 nt, Homo sapiens
  misc_RNA (1)...(19): siRNA sense strand
cuuaauaacgugcaccuuu

SEQ ID NO: 903711 - RNA, 19 nt, Homo sapiens
  misc_RNA (1)...(19): siRNA sense strand
caacaucggcaaguauaga

SEQ ID NO: 903712 - RNA, 19 nt, Homo sapiens
  misc_RNA (1)...(19): siRNA sense strand
ccugaaauuugucccauca

SEQ ID NO: 903713 - RNA, 19 nt, Homo sapiens
  misc_RNA (1)...(19): siRNA sense strand
cagaagaaaggaucucgaa

SEQ ID NO: 903714 - RNA, 19 nt, Homo sapiens
  misc_RNA (1)...(19): siRNA sense strand
gaugacauaacugcccuua

SEQ ID NO: 903715 - RNA, 19 nt, Homo sapiens
  misc_RNA (1)...(19): siRNA sense strand
acagguacaugguaaagca

SEQ ID NO: 903716 - RNA, 19 nt, Homo sapiens
  misc_RNA (1)...(19): siRNA sense strand
ggaggacacgaacaacuau

SEQ ID NO: 903717 - RNA, 19 nt, Homo sapiens
  misc_RNA (1)...(19): siRNA sense strand
gagauauugucagcagaga

SEQ ID NO: 903718 - RNA, 19 nt, Homo sapiens
  misc_RNA (1)...(19): siRNA sense strand
gacagaagcgcucccuuag

SEQ ID NO: 903719 - RNA, 19 nt, Homo sapiens
  misc_RNA (1)...(19): siRNA sense strand
gaaggagauuguggugaag

SEQ ID NO: 903720 - RNA, 19 nt, Homo sapiens
  misc_RNA (1)...(19): siRNA sense strand
gaaaagaagaaacaagguu

SEQ ID NO: 903721 - RNA, 19 nt, Homo sapiens
  misc_RNA (1)...(19): siRNA sense strand
aguacaacauccagaagaa

SEQ ID NO: 903722 - RNA, 19 nt, Homo sapiens
  misc_RNA (1)...(19): siRNA sense strand
ccaaaauuauggcuaagaa

SEQ ID NO: 903723 - RNA, 19 nt, Homo sapiens
  misc_RNA (1)...(19): siRNA sense strand
gagugugugcgccuugaua

SEQ ID NO: 903724 - RNA, 19 nt, Homo sapiens
  misc_RNA (1)...(19): siRNA sense strand
uuagaagaccugaucgaaa

SEQ ID NO: 903725 - RNA, 19 nt, Homo sapiens
  misc_RNA (1)...(19): siRNA sense strand
auccaaauguucagaaaug

SEQ ID NO: 903726 - RNA, 19 nt, Homo sapiens
  misc_RNA (1)...(19): siRNA sense strand
uuaaagccuuccaucugaa

SEQ ID NO: 903727 - RNA, 19 nt, Homo sapiens
  misc_RNA (1)...(19): siRNA sense strand
cagagaguacuacacauug

SEQ ID NO: 903728 - RNA, 19 nt, Homo sapiens
  misc_RNA (1)...(19): siRNA sense strand
agacugggaccgcguugua

SEQ ID NO: 903729 - RNA, 19 nt, Homo sapiens
  misc_RNA (1)...(19): siRNA sense strand
ugcaauuaguguuacagua

SEQ ID NO: 903730 - RNA, 19 nt, Homo sapiens
  misc_RNA (1)...(19): siRNA sense strand
ggaaagauucaaaggaaaa

SEQ ID NO: 903731 - RNA, 19 nt, Homo sapiens
  misc_RNA (1)...(19): siRNA sense strand
gaucaggaaagauucaaag

SEQ ID NO: 903732 - RNA, 19 nt, Homo sapiens
  misc_RNA (1)...(19): siRNA sense strand
gacaguacaacauccagaa

SEQ ID NO: 903733 - RNA, 19 nt, Homo sapiens
  misc_RNA (1)...(19): siRNA sense strand
gaagcaaagaaaccacgaa

SEQ ID NO: 903734 - RNA, 19 nt, Homo sapiens
  misc_RNA (1)...(19): siRNA sense strand
gucaacaucggcaaguaua

SEQ ID NO: 903735 - RNA, 19 nt, Homo sapiens
  misc_RNA (1)...(19): siRNA sense strand
ucagaaaugggauguaaca

SEQ ID NO: 903736 - RNA, 19 nt, Homo sapiens
  misc_RNA (1)...(19): siRNA sense strand
gaggagacguuccagugua

SEQ ID NO: 903737 - RNA, 19 nt, Homo sapiens
  misc_RNA (1)...(19): siRNA sense strand
ggaaggaccggaucaagaa

SEQ ID NO: 903738 - RNA, 19 nt, Homo sapiens
  misc_RNA (1)...(19): siRNA sense strand
gcaagggcauggccugugu

SEQ ID NO: 903739 - RNA, 19 nt, Homo sapiens
  misc_RNA (1)...(19): siRNA sense strand
gcaagaagaaggcgaagau

SEQ ID NO: 903740 - RNA, 19 nt, Homo sapiens
  misc_RNA (1)...(19): siRNA sense strand
uguacaaggucaaugagua

SEQ ID NO: 903741 - RNA, 19 nt, Homo sapiens
  misc_RNA (1)...(19): siRNA sense strand
gaacagucuugugaucaga

SEQ ID NO: 903742 - RNA, 19 nt, Homo sapiens
  misc_RNA (1)...(19): siRNA sense strand
gccauacccucuucgacua

SEQ ID NO: 903743 - RNA, 19 nt, Homo sapiens
  misc_RNA (1)...(19): siRNA sense strand
ggacggccauacccucuuc

SEQ ID NO: 903744 - RNA, 19 nt, Homo sapiens
  misc_RNA (1)...(19): siRNA sense strand
cgacauggccuuccacauc

SEQ ID NO: 903745 - RNA, 19 nt, Homo sapiens
  misc_RNA (1)...(19): siRNA sense strand
cagcagagcagccucauca

SEQ ID NO: 903746 - RNA, 19 nt, Homo sapiens
  misc_RNA (1)...(19): siRNA sense strand
ggaacagucuugugaucag

SEQ ID NO: 903747 - RNA, 19 nt, Homo sapiens
  misc_RNA (1)...(19): siRNA sense strand
gggaaggaccggaucaaga

SEQ ID NO: 903748 - RNA, 19 nt, Homo sapiens
  misc_RNA (1)...(19): siRNA sense strand
gacauggccuuccacaucu

SEQ ID NO: 903749 - RNA, 19 nt, Homo sapiens
  misc_RNA (1)...(19): siRNA sense strand
gcagagcagccucaucaga

SEQ ID NO: 903750 - RNA, 19 nt, Homo sapiens
  misc_RNA (1)...(19): siRNA sense strand
gagagaaggagaacagcaa

SEQ ID NO: 903751 - RNA, 19 nt, Homo sapiens
  misc_RNA (1)...(19): siRNA sense strand
gaggacaugugggaugaga

SEQ ID NO: 903752 - RNA, 19 nt, Homo sapiens
  misc_RNA (1)...(19): siRNA sense strand
uggaggaggacgucauuua

SEQ ID NO: 903753 - RNA, 19 nt, Homo sapiens
  misc_RNA (1)...(19): siRNA sense strand
ugucaaggguggcaagaau

SEQ ID NO: 903754 - RNA, 19 nt, Homo sapiens
  misc_RNA (1)...(19): siRNA sense strand
gcuaugccaugcaggugaa

SEQ ID NO: 903755 - RNA, 19 nt, Homo sapiens
  misc_RNA (1)...(19): siRNA sense strand
gaacggcgugguccagaug

SEQ ID NO: 903756 - RNA, 19 nt, Homo sapiens
  misc_RNA (1)...(19): siRNA sense strand
gcggaacagucuugugauc

SEQ ID NO: 903757 - RNA, 19 nt, Homo sapiens
  misc_RNA (1)...(19): siRNA sense strand
ccacguggcuggcauacac

SEQ ID NO: 903758 - RNA, 19 nt, Homo sapiens
  misc_RNA (1)...(19): siRNA sense strand
acgccaagcuguggaauga

SEQ ID NO: 903759 - RNA, 19 nt, Homo sapiens
  misc_RNA (1)...(19): siRNA sense strand
gcuuugcucccaucaauga

SEQ ID NO: 903760 - RNA, 19 nt, Homo sapiens
  misc_RNA (1)...(19): siRNA sense strand
ggaggaggacgucauuuac

SEQ ID NO: 903761 - RNA, 19 nt, Homo sapiens
  misc_RNA (1)...(19): siRNA sense strand
gaaauacuggcccgagaag

SEQ ID NO: 903762 - RNA, 19 nt, Homo sapiens
  misc_RNA (1)...(19): siRNA sense strand
ucccaucaaugaccaagaa

SEQ ID NO: 903763 - RNA, 19 nt, Homo sapiens
  misc_RNA (1)...(19): siRNA sense strand
ggaggagacguuccagugu

SEQ ID NO: 903764 - RNA, 19 nt, Homo sapiens
  misc_RNA (1)...(19): siRNA sense strand
guaaaguggaggagacguu

SEQ ID NO: 903765 - RNA, 19 nt, Homo sapiens
  misc_RNA (1)...(19): siRNA sense strand
guggagcccuacagucuca

SEQ ID NO: 903766 - RNA, 19 nt, Homo sapiens
  misc_RNA (1)...(19): siRNA sense strand
gcagcccguuccaguuguu

SEQ ID NO: 903767 - RNA, 19 nt, Homo sapiens
  misc_RNA (1)...(19): siRNA sense strand
gaagauccaggagcuguuc

SEQ ID NO: 903768 - RNA, 19 nt, Homo sapiens
  misc_RNA (1)...(19): siRNA sense strand
agagcagccucaucagaga

SEQ ID NO: 903769 - RNA, 19 nt, Homo sapiens
  misc_RNA (1)...(19): siRNA sense strand
ucagagaggacaagagcaa

SEQ ID NO: 903770 - RNA, 19 nt, Homo sapiens
  misc_RNA (1)...(19): siRNA sense strand
ccgcggaacagucuuguga

SEQ ID NO: 903771 - RNA, 19 nt, Homo sapiens
  misc_RNA (1)...(19): siRNA sense strand
gaccaugcaguauccagaa

SEQ ID NO: 903772 - RNA, 19 nt, Homo sapiens
  misc_RNA (1)...(19): siRNA sense strand
acagggcgcuggcucucaa

SEQ ID NO: 903773 - RNA, 19 nt, Homo sapiens
  misc_RNA (1)...(19): siRNA sense strand
ggaagauccaggagcuguu

SEQ ID NO: 903774 - RNA, 19 nt, Homo sapiens
  misc_RNA (1)...(19): siRNA sense strand
gagaaggagaacagcaaga

SEQ ID NO: 903775 - RNA, 19 nt, Homo sapiens
  misc_RNA (1)...(19): siRNA sense strand
ugaaauacuggcccgagaa

SEQ ID NO: 903776 - RNA, 19 nt, Homo sapiens
  misc_RNA (1)...(19): siRNA sense strand
ccagcgaggacgaguggua

SEQ ID NO: 903777 - RNA, 19 nt, Homo sapiens
  misc_RNA (1)...(19): siRNA sense strand
cugcuuugcucccaucaau

SEQ ID NO: 903778 - RNA, 19 nt, Homo sapiens
  misc_RNA (1)...(19): siRNA sense strand
gcaaggacgacgugaacag

SEQ ID NO: 903779 - RNA, 19 nt, Homo sapiens
  misc_RNA (1)...(19): siRNA sense strand
gagguccgccugaaugaca

SEQ ID NO: 903780 - RNA, 19 nt, Homo sapiens
  misc_RNA (1)...(19): siRNA sense strand
caaccgagagcgagagaag

SEQ ID NO: 903781 - RNA, 19 nt, Homo sapiens
  misc_RNA (1)...(19): siRNA sense strand
gucaaggguggcaagaaua

SEQ ID NO: 903782 - RNA, 19 nt, Homo sapiens
  misc_RNA (1)...(19): siRNA sense strand
ggaccgcggaacagucuug

SEQ ID NO: 903783 - RNA, 19 nt, Homo sapiens
  misc_RNA (1)...(19): siRNA sense strand
caaggacgacgugaacaga

SEQ ID NO: 903784 - RNA, 19 nt, Homo sapiens
  misc_RNA (1)...(19): siRNA sense strand
gggaugauucucugaacga

SEQ ID NO: 903785 - RNA, 19 nt, Homo sapiens
  misc_RNA (1)...(19): siRNA sense strand
gcaacgccaagcuguggaa

SEQ ID NO: 903786 - RNA, 19 nt, Homo sapiens
  misc_RNA (1)...(19): siRNA sense strand
aggagacguuccaguguau

SEQ ID NO: 903787 - RNA, 19 nt, Homo sapiens
  misc_RNA (1)...(19): siRNA sense strand
gcuggaggaggacgucauu

SEQ ID NO: 903788 - RNA, 19 nt, Homo sapiens
  misc_RNA (1)...(19): siRNA sense strand
gagugguacugcccugagu

SEQ ID NO: 903789 - RNA, 19 nt, Homo sapiens
  misc_RNA (1)...(19): siRNA sense strand
uccaguuguuccugaguaa

SEQ ID NO: 903790 - RNA, 19 nt, Homo sapiens
  misc_RNA (1)...(19): siRNA sense strand
gggcugaccaugcaguauc

SEQ ID NO: 903791 - RNA, 19 nt, Homo sapiens
  misc_RNA (1)...(19): siRNA sense strand
acagucuugugaucagaaa

SEQ ID NO: 903792 - RNA, 19 nt, Homo sapiens
  misc_RNA (1)...(19): siRNA sense strand
ugacguggaccaugggaau

SEQ ID NO: 903793 - RNA, 19 nt, Homo sapiens
  misc_RNA (1)...(19): siRNA sense strand
guaccaucgucccguccaa

SEQ ID NO: 903794 - RNA, 19 nt, Homo sapiens
  misc_RNA (1)...(19): siRNA sense strand
cgucauuuaccacgugaaa

SEQ ID NO: 903795 - RNA, 19 nt, Homo sapiens
  misc_RNA (1)...(19): siRNA sense strand
gcaaguggaagcggaaguc

SEQ ID NO: 903796 - RNA, 19 nt, Homo sapiens
  misc_RNA (1)...(19): siRNA sense strand
ucaaggguggcaagaauag

SEQ ID NO: 903797 - RNA, 19 nt, Homo sapiens
  misc_RNA (1)...(19): siRNA sense strand
uguccaggcugaccaaggu

SEQ ID NO: 903798 - RNA, 19 nt, Homo sapiens
  misc_RNA (1)...(19): siRNA sense strand
gaggagcugaggcggaaga

SEQ ID NO: 903799 - RNA, 19 nt, Homo sapiens
  misc_RNA (1)...(19): siRNA sense strand
ggguagugguggucgagau

SEQ ID NO: 903800 - RNA, 19 nt, Homo sapiens
  misc_RNA (1)...(19): siRNA sense strand
caagaagaaggcgaagaug

SEQ ID NO: 903801 - RNA, 19 nt, Homo sapiens
  misc_RNA (1)...(19): siRNA sense strand
gaggaccgcggaacagucu

SEQ ID NO: 903802 - RNA, 19 nt, Homo sapiens
  misc_RNA (1)...(19): siRNA sense strand
cgagaucuuuccggcaaca

SEQ ID NO: 903803 - RNA, 19 nt, Homo sapiens
  misc_RNA (1)...(19): siRNA sense strand
caagguggagcccuacagu

SEQ ID NO: 903804 - RNA, 19 nt, Homo sapiens
  misc_RNA (1)...(19): siRNA sense strand
uggcaagaauagcaaguac

SEQ ID NO: 903805 - RNA, 19 nt, Homo sapiens
  misc_RNA (1)...(19): siRNA sense strand
cagagugagucagacaagu

SEQ ID NO: 903806 - RNA, 19 nt, Homo sapiens
  misc_RNA (1)...(19): siRNA sense strand
gccagguggucaugcucaa

SEQ ID NO: 903807 - RNA, 19 nt, Homo sapiens
  misc_RNA (1)...(19): siRNA sense strand
ggcuguacaaggucaauga

SEQ ID NO: 903808 - RNA, 19 nt, Homo sapiens
  misc_RNA (1)...(19): siRNA sense strand
gagagcgagagaaggagaa

SEQ ID NO: 903809 - RNA, 19 nt, Homo sapiens
  misc_RNA (1)...(19): siRNA sense strand
gaaggaccggaucaagaag

SEQ ID NO: 903810 - RNA, 19 nt, Homo sapiens
  misc_RNA (1)...(19): siRNA sense strand
guggcaagaauagcaagua

SEQ ID NO: 903811 - RNA, 19 nt, Homo sapiens
  misc_RNA (1)...(19): siRNA sense strand
ucaggguggugcgcaaugu

SEQ ID NO: 903812 - RNA, 19 nt, Homo sapiens
  misc_RNA (1)...(19): siRNA sense strand
ggucaaugaguacgucgau

SEQ ID NO: 903813 - RNA, 19 nt, Homo sapiens
  misc_RNA (1)...(19): siRNA sense strand
ccugagugccggaaugaug

SEQ ID NO: 903814 - RNA, 19 nt, Homo sapiens
  misc_RNA (1)...(19): siRNA sense strand
aggaggacgucauuuacca

SEQ ID NO: 903815 - RNA, 19 nt, Homo sapiens
  misc_RNA (1)...(19): siRNA sense strand
uuccaguuguuccugagua

SEQ ID NO: 903816 - RNA, 19 nt, Homo sapiens
  misc_RNA (1)...(19): siRNA sense strand
gaacgggacucaucuucug

SEQ ID NO: 903817 - RNA, 19 nt, Homo sapiens
  misc_RNA (1)...(19): siRNA sense strand
gaagagcgcuuugcugagu

SEQ ID NO: 903818 - RNA, 19 nt, Homo sapiens
  misc_RNA (1)...(19): siRNA sense strand
ccaaggagaagcagaagua

SEQ ID NO: 903819 - RNA, 19 nt, Homo sapiens
  misc_RNA (1)...(19): siRNA sense strand
gaagaagaccuuugacucu

SEQ ID NO: 903820 - RNA, 19 nt, Homo sapiens
  misc_RNA (1)...(19): siRNA sense strand
gaaagaaguccagcucaga

SEQ ID NO: 903821 - RNA, 19 nt, Homo sapiens
  misc_RNA (1)...(19): siRNA sense strand
gcaagagacccgaaagugu

SEQ ID NO: 903822 - RNA, 19 nt, Homo sapiens
  misc_RNA (1)...(19): siRNA sense strand
gugaggacaugacgaguga

SEQ ID NO: 903823 - RNA, 19 nt, Homo sapiens
  misc_RNA (1)...(19): siRNA sense strand
gaacggcuacacacaguug

SEQ ID NO: 903824 - RNA, 19 nt, Homo sapiens
  misc_RNA (1)...(19): siRNA sense strand
gcugaggcgucuccaaaug

SEQ ID NO: 903825 - RNA, 19 nt, Homo sapiens
  misc_RNA (1)...(19): siRNA sense strand
gaccauggccagcaaauuc

SEQ ID NO: 903826 - RNA, 19 nt, Homo sapiens
  misc_RNA (1)...(19): siRNA sense strand
ggugucagcuuaguguauu

SEQ ID NO: 903827 - RNA, 19 nt, Homo sapiens
  misc_RNA (1)...(19): siRNA sense strand
caacaaggaccgaaagaag

SEQ ID NO: 903828 - RNA, 19 nt, Homo sapiens
  misc_RNA (1)...(19): siRNA sense strand
agacagagagugaccauga

SEQ ID NO: 903829 - RNA, 19 nt, Homo sapiens
  misc_RNA (1)...(19): siRNA sense strand
gcggagaaguagacaguca

SEQ ID NO: 903830 - RNA, 19 nt, Homo sapiens
  misc_RNA (1)...(19): siRNA sense strand
gcaagaagaggaagaacuc

SEQ ID NO: 903831 - RNA, 19 nt, Homo sapiens
  misc_RNA (1)...(19): siRNA sense strand
ccaccagaaucaccuaugu

SEQ ID NO: 903832 - RNA, 19 nt, Homo sapiens
  misc_RNA (1)...(19): siRNA sense strand
gaaacauccugcagacacu

SEQ ID NO: 903833 - RNA, 19 nt, Homo sapiens
  misc_RNA (1)...(19): siRNA sense strand
gugauccguuccuccuuua

SEQ ID NO: 903834 - RNA, 19 nt, Homo sapiens
  misc_RNA (1)...(19): siRNA sense strand
cggcagcuguugcucauga

SEQ ID NO: 903835 - RNA, 19 nt, Homo sapiens
  misc_RNA (1)...(19): siRNA sense strand
gcaggugccaggacugaaa

SEQ ID NO: 903836 - RNA, 19 nt, Homo sapiens
  misc_RNA (1)...(19): siRNA sense strand
caaacaaggaggagcaaga

SEQ ID NO: 903837 - RNA, 19 nt, Homo sapiens
  misc_RNA (1)...(19): siRNA sense strand
ggagccacaugcccugaga

SEQ ID NO: 903838 - RNA, 19 nt, Homo sapiens
  misc_RNA (1)...(19): siRNA sense strand
gaaucacccagguacagua

SEQ ID NO: 903839 - RNA, 19 nt, Homo sapiens
  misc_RNA (1)...(19): siRNA sense strand
gggcugaggcgucuccaaa

SEQ ID NO: 903840 - RNA, 19 nt, Homo sapiens
  misc_RNA (1)...(19): siRNA sense strand
ggucaucugugaggaggaa

SEQ ID NO: 903841 - RNA, 19 nt, Homo sapiens
  misc_RNA (1)...(19): siRNA sense strand
gcaacaaggaccgaaagaa

SEQ ID NO: 903842 - RNA, 19 nt, Homo sapiens
  misc_RNA (1)...(19): siRNA sense strand
gauuggaaguggugcaaca

SEQ ID NO: 903843 - RNA, 19 nt, Homo sapiens
  misc_RNA (1)...(19): siRNA sense strand
ccaacaagcgggagaagga

SEQ ID NO: 903844 - RNA, 19 nt, Homo sapiens
  misc_RNA (1)...(19): siRNA sense strand
gggccauccugggcucuua

SEQ ID NO: 903845 - RNA, 19 nt, Homo sapiens
  misc_RNA (1)...(19): siRNA sense strand
ggaaguggugcaacaagga

SEQ ID NO: 903846 - RNA, 19 nt, Homo sapiens
  misc_RNA (1)...(19): siRNA sense strand
ggacuucgaagagcgcuuu

SEQ ID NO: 903847 - RNA, 19 nt, Homo sapiens
  misc_RNA (1)...(19): siRNA sense strand
cagaacggcuacacacagu

SEQ ID NO: 903848 - RNA, 19 nt, Homo sapiens
  misc_RNA (1)...(19): siRNA sense strand
gacagagagugaccaugau

SEQ ID NO: 903849 - RNA, 19 nt, Homo sapiens
  misc_RNA (1)...(19): siRNA sense strand
uacaggaacugacgcagau

SEQ ID NO: 903850 - RNA, 19 nt, Homo sapiens
  misc_RNA (1)...(19): siRNA sense strand
gagauccaguugccucuac

SEQ ID NO: 903851 - RNA, 19 nt, Homo sapiens
  misc_RNA (1)...(19): siRNA sense strand
ucaggaccauggcuucuuc

SEQ ID NO: 903852 - RNA, 19 nt, Homo sapiens
  misc_RNA (1)...(19): siRNA sense strand
caauggauccugccaccuu

SEQ ID NO: 903853 - RNA, 19 nt, Homo sapiens
  misc_RNA (1)...(19): siRNA sense strand
ugugauccguuccuccuuu

SEQ ID NO: 903854 - RNA, 19 nt, Homo sapiens
  misc_RNA (1)...(19): siRNA sense strand
ucagugcccuacccaagga

SEQ ID NO: 903855 - RNA, 19 nt, Homo sapiens
  misc_RNA (1)...(19): siRNA sense strand
gaggugcgccagaagauca

SEQ ID NO: 903856 - RNA, 19 nt, Homo sapiens
  misc_RNA (1)...(19): siRNA sense strand
caagguuugucugcaguug

SEQ ID NO: 903857 - RNA, 19 nt, Homo sapiens
  misc_RNA (1)...(19): siRNA sense strand
ccaaagcccagucaguuuc

SEQ ID NO: 903858 - RNA, 19 nt, Homo sapiens
  misc_RNA (1)...(19): siRNA sense strand
caaagccuucuacccagua

SEQ ID NO: 903859 - RNA, 19 nt, Homo sapiens
  misc_RNA (1)...(19): siRNA sense strand
ccaaggaacgggacucauc

SEQ ID NO: 903860 - RNA, 19 nt, Homo sapiens
  misc_RNA (1)...(19): siRNA sense strand
ggauccuccuguagccuuu

SEQ ID NO: 903861 - RNA, 19 nt, Homo sapiens
  misc_RNA (1)...(19): siRNA sense strand
cuggaacagucaccucgua

SEQ ID NO: 903862 - RNA, 19 nt, Homo sapiens
  misc_RNA (1)...(19): siRNA sense strand
ggagcuagaguaugacaag

SEQ ID NO: 903863 - RNA, 19 nt, Homo sapiens
  misc_RNA (1)...(19): siRNA sense strand
agaagaccuuugacucugu

SEQ ID NO: 903864 - RNA, 19 nt, Homo sapiens
  misc_RNA (1)...(19): siRNA sense strand
ucaaggcccacccagauug

SEQ ID NO: 903865 - RNA, 19 nt, Homo sapiens
  misc_RNA (1)...(19): siRNA sense strand
acagugagacagagaguga

SEQ ID NO: 903866 - RNA, 19 nt, Homo sapiens
  misc_RNA (1)...(19): siRNA sense strand
cggcaccacugacauugau

SEQ ID NO: 903867 - RNA, 19 nt, Homo sapiens
  misc_RNA (1)...(19): siRNA sense strand
ggaaggggaugaugauguc

SEQ ID NO: 903868 - RNA, 19 nt, Homo sapiens
  misc_RNA (1)...(19): siRNA sense strand
ggacaugacgagugaugag

SEQ ID NO: 903869 - RNA, 19 nt, Homo sapiens
  misc_RNA (1)...(19): siRNA sense strand
cggagguccugucauaaca

SEQ ID NO: 903870 - RNA, 19 nt, Homo sapiens
  misc_RNA (1)...(19): siRNA sense strand
uuccaugaccuacagcuua

SEQ ID NO: 903871 - RNA, 19 nt, Homo sapiens
  misc_RNA (1)...(19): siRNA sense strand
ccgcuaugcagacaucuuu

SEQ ID NO: 903872 - RNA, 19 nt, Homo sapiens
  misc_RNA (1)...(19): siRNA sense strand
ggggacaucuucaccuuug

SEQ ID NO: 903873 - RNA, 19 nt, Homo sapiens
  misc_RNA (1)...(19): siRNA sense strand
gaggacaugacgagugaug

SEQ ID NO: 903874 - RNA, 19 nt, Homo sapiens
  misc_RNA (1)...(19): siRNA sense strand
uugcugaguugccugaguu

SEQ ID NO: 903875 - RNA, 19 nt, Homo sapiens
  misc_RNA (1)...(19): siRNA sense strand
ggaacgggacucaucuucu

SEQ ID NO: 903876 - RNA, 19 nt, Homo sapiens
  misc_RNA (1)...(19): siRNA sense strand
gggacaucuucaccuuuga

SEQ ID NO: 903877 - RNA, 19 nt, Homo sapiens
  misc_RNA (1)...(19): siRNA sense strand
gagagugaccaugaugaug

SEQ ID NO: 903878 - RNA, 19 nt, Homo sapiens
  misc_RNA (1)...(19): siRNA sense strand
ccuggacggcggagaagua

SEQ ID NO: 903879 - RNA, 19 nt, Homo sapiens
  misc_RNA (1)...(19): siRNA sense strand
gcagccaucgccagcauuc

SEQ ID NO: 903880 - RNA, 19 nt, Homo sapiens
  misc_RNA (1)...(19): siRNA sense strand
cccaaagcccagucaguuu

SEQ ID NO: 903881 - RNA, 19 nt, Homo sapiens
  misc_RNA (1)...(19): siRNA sense strand
ugucuggcccugcaucgua

SEQ ID NO: 903882 - RNA, 19 nt, Homo sapiens
  misc_RNA (1)...(19): siRNA sense strand
caagccuggucuacacugu

SEQ ID NO: 903883 - RNA, 19 nt, Homo sapiens
  misc_RNA (1)...(19): siRNA sense strand
ggacggcggagaaguagac

SEQ ID NO: 903884 - RNA, 19 nt, Homo sapiens
  misc_RNA (1)...(19): siRNA sense strand
caucuuucccuccaagguu

SEQ ID NO: 903885 - RNA, 19 nt, Homo sapiens
  misc_RNA (1)...(19): siRNA sense strand
guacuggcaagaaggugaa

SEQ ID NO: 903886 - RNA, 19 nt, Homo sapiens
  misc_RNA (1)...(19): siRNA sense strand
ggaaucacccagguacagu

SEQ ID NO: 903887 - RNA, 19 nt, Homo sapiens
  misc_RNA (1)...(19): siRNA sense strand
ggacagugagacagagagu

SEQ ID NO: 903888 - RNA, 19 nt, Homo sapiens
  misc_RNA (1)...(19): siRNA sense strand
cagagagugaccaugauga

SEQ ID NO: 903889 - RNA, 19 nt, Homo sapiens
  misc_RNA (1)...(19): siRNA sense strand
ccccggagguccugucaua

SEQ ID NO: 903890 - RNA, 19 nt, Homo sapiens
  misc_RNA (1)...(19): siRNA sense strand
caaggaacgggacucaucu

SEQ ID NO: 903891 - RNA, 19 nt, Homo sapiens
  misc_RNA (1)...(19): siRNA sense strand
ccaccucucagccucagaa

SEQ ID NO: 903892 - RNA, 19 nt, Homo sapiens
  misc_RNA (1)...(19): siRNA sense strand
cagcggaggaggaaacauc

SEQ ID NO: 903893 - RNA, 19 nt, Homo sapiens
  misc_RNA (1)...(19): siRNA sense strand
ggacccagagggcaacaag

SEQ ID NO: 903894 - RNA, 19 nt, Homo sapiens
  misc_RNA (1)...(19): siRNA sense strand
ucacugggcucaggaaccu

SEQ ID NO: 903895 - RNA, 19 nt, Homo sapiens
  misc_RNA (1)...(19): siRNA sense strand
ccucucagccucagaaggu

SEQ ID NO: 903896 - RNA, 19 nt, Homo sapiens
  misc_RNA (1)...(19): siRNA sense strand
gcgcaagagacccgaaagu

SEQ ID NO: 903897 - RNA, 19 nt, Homo sapiens
  misc_RNA (1)...(19): siRNA sense strand
uccaugaccuacagcuuag

SEQ ID NO: 903898 - RNA, 19 nt, Homo sapiens
  misc_RNA (1)...(19): siRNA sense strand
ccaagggcccugagaccau

SEQ ID NO: 903899 - RNA, 19 nt, Homo sapiens
  misc_RNA (1)...(19): siRNA sense strand
gaggagcgcauggucaucu

SEQ ID NO: 903900 - RNA, 19 nt, Homo sapiens
  misc_RNA (1)...(19): siRNA sense strand
agguuugucugcaguugaa

SEQ ID NO: 903901 - RNA, 19 nt, Homo sapiens
  misc_RNA (1)...(19): siRNA sense strand
gcaccacugacauugaucu

SEQ ID NO: 903902 - RNA, 19 nt, Homo sapiens
  misc_RNA (1)...(19): siRNA sense strand
cuucaaggcccacccagau

SEQ ID NO: 903903 - RNA, 19 nt, Homo sapiens
  misc_RNA (1)...(19): siRNA sense strand
agagcgcuuugcugaguug

SEQ ID NO: 903904 - RNA, 19 nt, Homo sapiens
  misc_RNA (1)...(19): siRNA sense strand
caguaccugugcagaaugg

SEQ ID NO: 903905 - RNA, 19 nt, Homo sapiens
  misc_RNA (1)...(19): siRNA sense strand
cucaguaccugugcagaau

SEQ ID NO: 903906 - RNA, 19 nt, Homo sapiens
  misc_RNA (1)...(19): siRNA sense strand
ucucaguaccugugcagaa

SEQ ID NO: 903907 - RNA, 19 nt, Homo sapiens
  misc_RNA (1)...(19): siRNA sense strand
ccaccaccagcauccguuu

SEQ ID NO: 903908 - RNA, 19 nt, Homo sapiens
  misc_RNA (1)...(19): siRNA sense strand
cagcaggugccaggacuga

SEQ ID NO: 903909 - RNA, 19 nt, Homo sapiens
  misc_RNA (1)...(19): siRNA sense strand
gccuuccucuccaucaugu

SEQ ID NO: 903910 - RNA, 19 nt, Homo sapiens
  misc_RNA (1)...(19): siRNA sense strand
acaaggaccgaaagaaguc

SEQ ID NO: 903911 - RNA, 19 nt, Homo sapiens
  misc_RNA (1)...(19): siRNA sense strand
uagaagagcuuauucagaa

SEQ ID NO: 903912 - RNA, 19 nt, Homo sapiens
  misc_RNA (1)...(19): siRNA sense strand
ggauggagaugcaguaaau

SEQ ID NO: 903913 - RNA, 19 nt, Homo sapiens
  misc_RNA (1)...(19): siRNA sense strand
gcacaaaggauguagaaga

SEQ ID NO: 903914 - RNA, 19 nt, Homo sapiens
  misc_RNA (1)...(19): siRNA sense strand
guacauaagucuaggaaag

SEQ ID NO: 903915 - RNA, 19 nt, Homo sapiens
  misc_RNA (1)...(19): siRNA sense strand
ucagaaggcuggacaauca

SEQ ID NO: 903916 - RNA, 19 nt, Homo sapiens
  misc_RNA (1)...(19): siRNA sense strand
gaaagaggcagacugaaau

SEQ ID NO: 903917 - RNA, 19 nt, Homo sapiens
  misc_RNA (1)...(19): siRNA sense strand
guaccaaaguaguguauga

SEQ ID NO: 903918 - RNA, 19 nt, Homo sapiens
  misc_RNA (1)...(19): siRNA sense strand
ggaaauuaauguggagaaa

SEQ ID NO: 903919 - RNA, 19 nt, Homo sapiens
  misc_RNA (1)...(19): siRNA sense strand
gaaaggagucaaagucuau

SEQ ID NO: 903920 - RNA, 19 nt, Homo sapiens
  misc_RNA (1)...(19): siRNA sense strand
gaaauacaaacgcuagaaa

SEQ ID NO: 903921 - RNA, 19 nt, Homo sapiens
  misc_RNA (1)...(19): siRNA sense strand
gagcaaaucauccuagaga

SEQ ID NO: 903922 - RNA, 19 nt, Homo sapiens
  misc_RNA (1)...(19): siRNA sense strand
ggagaaagacaaacaaaca

SEQ ID NO: 903923 - RNA, 19 nt, Homo sapiens
  misc_RNA (1)...(19): siRNA sense strand
gaggcagacugaaauagaa

SEQ ID NO: 903924 - RNA, 19 nt, Homo sapiens
  misc_RNA (1)...(19): siRNA sense strand
gcaaaucauccuagagaaa

SEQ ID NO: 903925 - RNA, 19 nt, Homo sapiens
  misc_RNA (1)...(19): siRNA sense strand
uacaaacgcuagaaaguga

SEQ ID NO: 903926 - RNA, 19 nt, Homo sapiens
  misc_RNA (1)...(19): siRNA sense strand
gaggaugaguucagaguca

SEQ ID NO: 903927 - RNA, 19 nt, Homo sapiens
  misc_RNA (1)...(19): siRNA sense strand
gaacgcggcugagcuugug

SEQ ID NO: 903928 - RNA, 19 nt, Homo sapiens
  misc_RNA (1)...(19): siRNA sense strand
ccaauccucuguucacgaa

SEQ ID NO: 903929 - RNA, 19 nt, Homo sapiens
  misc_RNA (1)...(19): siRNA sense strand
gaacacaugcucugcaaag

SEQ ID NO: 903930 - RNA, 19 nt, Homo sapiens
  misc_RNA (1)...(19): siRNA sense strand
gagucaaagucuaugauga

SEQ ID NO: 903931 - RNA, 19 nt, Homo sapiens
  misc_RNA (1)...(19): siRNA sense strand
ccaaagugcuucgggagaa

SEQ ID NO: 903932 - RNA, 19 nt, Homo sapiens
  misc_RNA (1)...(19): siRNA sense strand
gaagagagccuagcuacag

SEQ ID NO: 903933 - RNA, 19 nt, Homo sapiens
  misc_RNA (1)...(19): siRNA sense strand
gaauugguccucauugaug

SEQ ID NO: 903934 - RNA, 19 nt, Homo sapiens
  misc_RNA (1)...(19): siRNA sense strand
gaaaugguacauaagucua

SEQ ID NO: 903935 - RNA, 19 nt, Homo sapiens
  misc_RNA (1)...(19): siRNA sense strand
cugcaaagaagcuaaguua

SEQ ID NO: 903936 - RNA, 19 nt, Homo sapiens
  misc_RNA (1)...(19): siRNA sense strand
aaauggagugcacaaauua

SEQ ID NO: 903937 - RNA, 19 nt, Homo sapiens
  misc_RNA (1)...(19): siRNA sense strand
gaucagcccgucaccauga

SEQ ID NO: 903938 - RNA, 19 nt, Homo sapiens
  misc_RNA (1)...(19): siRNA sense strand
aaagaaagaggcagacuga

SEQ ID NO: 903939 - RNA, 19 nt, Homo sapiens
  misc_RNA (1)...(19): siRNA sense strand
agaaaggagucaaagucua

SEQ ID NO: 903940 - RNA, 19 nt, Homo sapiens
  misc_RNA (1)...(19): siRNA sense strand
caaagucuaugaugauggu

SEQ ID NO: 903941 - RNA, 19 nt, Homo sapiens
  misc_RNA (1)...(19): siRNA sense strand
gaggagggcacgugucuga

SEQ ID NO: 903942 - RNA, 19 nt, Homo sapiens
  misc_RNA (1)...(19): siRNA sense strand
ucaaugcuguguugucaug

SEQ ID NO: 903943 - RNA, 19 nt, Homo sapiens
  misc_RNA (1)...(19): siRNA sense strand
agaaagaggcagacugaaa

SEQ ID NO: 903944 - RNA, 19 nt, Homo sapiens
  misc_RNA (1)...(19): siRNA sense strand
ccaagauucucucuacauc

SEQ ID NO: 903945 - RNA, 19 nt, Homo sapiens
  misc_RNA (1)...(19): siRNA sense strand
uagagaaacugaaggaaac

SEQ ID NO: 903946 - RNA, 19 nt, Homo sapiens
  misc_RNA (1)...(19): siRNA sense strand
gaaacugaaggaaacagaa

SEQ ID NO: 903947 - RNA, 19 nt, Homo sapiens
  misc_RNA (1)...(19): siRNA sense strand
gaggcuggagcaagaaaua

SEQ ID NO: 903948 - RNA, 19 nt, Homo sapiens
  misc_RNA (1)...(19): siRNA sense strand
gugcuaggcuaugaugaaa

SEQ ID NO: 903949 - RNA, 19 nt, Homo sapiens
  misc_RNA (1)...(19): siRNA sense strand
caaagugcuucgggagaaa

SEQ ID NO: 903950 - RNA, 19 nt, Homo sapiens
  misc_RNA (1)...(19): siRNA sense strand
ggagggcacgugucugaaa

SEQ ID NO: 903951 - RNA, 19 nt, Homo sapiens
  misc_RNA (1)...(19): siRNA sense strand
guagaagagcuuauucaga

SEQ ID NO: 903952 - RNA, 19 nt, Homo sapiens
  misc_RNA (1)...(19): siRNA sense strand
cacaaaggauguagaagag

SEQ ID NO: 903953 - RNA, 19 nt, Homo sapiens
  misc_RNA (1)...(19): siRNA sense strand
ugaugaagaugaugagaag

SEQ ID NO: 903954 - RNA, 19 nt, Homo sapiens
  misc_RNA (1)...(19): siRNA sense strand
gcaacuugaagauaacauu

SEQ ID NO: 903955 - RNA, 19 nt, Homo sapiens
  misc_RNA (1)...(19): siRNA sense strand
agaccaagauucucucuac

SEQ ID NO: 903956 - RNA, 19 nt, Homo sapiens
  misc_RNA (1)...(19): siRNA sense strand
caaauuaagcacaaaggau

SEQ ID NO: 903957 - RNA, 19 nt, Homo sapiens
  misc_RNA (1)...(19): siRNA sense strand
cuagagaaacugaaggaaa

SEQ ID NO: 903958 - RNA, 19 nt, Homo sapiens
  misc_RNA (1)...(19): siRNA sense strand
aaagaggcagacugaaaua

SEQ ID NO: 903959 - RNA, 19 nt, Homo sapiens
  misc_RNA (1)...(19): siRNA sense strand
aaaauggagugcacaaauu

SEQ ID NO: 903960 - RNA, 19 nt, Homo sapiens
  misc_RNA (1)...(19): siRNA sense strand
cugaauugguccucauuga

SEQ ID NO: 903961 - RNA, 19 nt, Homo sapiens
  misc_RNA (1)...(19): siRNA sense strand
ugaaaggacugugauugca

SEQ ID NO: 903962 - RNA, 19 nt, Homo sapiens
  misc_RNA (1)...(19): siRNA sense strand
ugaugaugguaccaaagua

SEQ ID NO: 903963 - RNA, 19 nt, Homo sapiens
  misc_RNA (1)...(19): siRNA sense strand
ccucagccaucccaaggaa

SEQ ID NO: 903964 - RNA, 19 nt, Homo sapiens
  misc_RNA (1)...(19): siRNA sense strand
ggauguagaagagcuuauu

SEQ ID NO: 903965 - RNA, 19 nt, Homo sapiens
  misc_RNA (1)...(19): siRNA sense strand
gaaaauggagugcacaaau

SEQ ID NO: 903966 - RNA, 19 nt, Homo sapiens
  misc_RNA (1)...(19): siRNA sense strand
aaacugaaggaaacagaaa

SEQ ID NO: 903967 - RNA, 19 nt, Homo sapiens
  misc_RNA (1)...(19): siRNA sense strand
uguacgccauggaaauuaa

SEQ ID NO: 903968 - RNA, 19 nt, Homo sapiens
  misc_RNA (1)...(19): siRNA sense strand
ggagucaaagucuaugaug

SEQ ID NO: 903969 - RNA, 19 nt, Homo sapiens
  misc_RNA (1)...(19): siRNA sense strand
gaaauuaauguggagaaag

SEQ ID NO: 903970 - RNA, 19 nt, Homo sapiens
  misc_RNA (1)...(19): siRNA sense strand
gcacaaauuaagcacaaag

SEQ ID NO: 903971 - RNA, 19 nt, Homo sapiens
  misc_RNA (1)...(19): siRNA sense strand
gaccaagauucucucuaca

SEQ ID NO: 903972 - RNA, 19 nt, Homo sapiens
  misc_RNA (1)...(19): siRNA sense strand
cagagcggcugcuguguac

SEQ ID NO: 903973 - RNA, 19 nt, Homo sapiens
  misc_RNA (1)...(19): siRNA sense strand
ugaagaugaugagaaguca

SEQ ID NO: 903974 - RNA, 19 nt, Homo sapiens
  misc_RNA (1)...(19): siRNA sense strand
ggaggcggcagucugaaga

SEQ ID NO: 903975 - RNA, 19 nt, Homo sapiens
  misc_RNA (1)...(19): siRNA sense strand
cacaugcucugcaaagaag

SEQ ID NO: 903976 - RNA, 19 nt, Homo sapiens
  misc_RNA (1)...(19): siRNA sense strand
gagggcacgugucugaaag

SEQ ID NO: 903977 - RNA, 19 nt, Homo sapiens
  misc_RNA (1)...(19): siRNA sense strand
ggaggcaccguaguagaaa

SEQ ID NO: 903978 - RNA, 19 nt, Homo sapiens
  misc_RNA (1)...(19): siRNA sense strand
caaagagcaaaucauccua

SEQ ID NO: 903979 - RNA, 19 nt, Homo sapiens
  misc_RNA (1)...(19): siRNA sense strand
uagaaaugguacauaaguc

SEQ ID NO: 903980 - RNA, 19 nt, Homo sapiens
  misc_RNA (1)...(19): siRNA sense strand
ucagaaaggagucaaaguc

SEQ ID NO: 903981 - RNA, 19 nt, Homo sapiens
  misc_RNA (1)...(19): siRNA sense strand
caacuugaagauaacauuc

SEQ ID NO: 903982 - RNA, 19 nt, Homo sapiens
  misc_RNA (1)...(19): siRNA sense strand
gcuggacaaucaagcuuag

SEQ ID NO: 903983 - RNA, 19 nt, Homo sapiens
  misc_RNA (1)...(19): siRNA sense strand
ugucaaugcuguguuguca

SEQ ID NO: 903984 - RNA, 19 nt, Homo sapiens
  misc_RNA (1)...(19): siRNA sense strand
aagagagccuagcuacaga

SEQ ID NO: 903985 - RNA, 19 nt, Homo sapiens
  misc_RNA (1)...(19): siRNA sense strand
gggcauacccgcuggaacu

SEQ ID NO: 903986 - RNA, 19 nt, Homo sapiens
  misc_RNA (1)...(19): siRNA sense strand
ggugcuaggcuaugaugaa

SEQ ID NO: 903987 - RNA, 19 nt, Homo sapiens
  misc_RNA (1)...(19): siRNA sense strand
auggagaugcaguaaauua

SEQ ID NO: 903988 - RNA, 19 nt, Homo sapiens
  misc_RNA (1)...(19): siRNA sense strand
ggaagagagccuagcuaca

SEQ ID NO: 903989 - RNA, 19 nt, Homo sapiens
  misc_RNA (1)...(19): siRNA sense strand
gugaagagucccagauauc

SEQ ID NO: 903990 - RNA, 19 nt, Homo sapiens
  misc_RNA (1)...(19): siRNA sense strand
acacaugcucugcaaagaa

SEQ ID NO: 903991 - RNA, 19 nt, Homo sapiens
  misc_RNA (1)...(19): siRNA sense strand
gaugaugguaccaaaguag

SEQ ID NO: 903992 - RNA, 19 nt, Homo sapiens
  misc_RNA (1)...(19): siRNA sense strand
gucaaagucuaugaugaug

SEQ ID NO: 903993 - RNA, 19 nt, Homo sapiens
  misc_RNA (1)...(19): siRNA sense strand
caggagagaccaagauucu

SEQ ID NO: 903994 - RNA, 19 nt, Homo sapiens
  misc_RNA (1)...(19): siRNA sense strand
aagagcaaaucauccuaga

SEQ ID NO: 903995 - RNA, 19 nt, Homo sapiens
  misc_RNA (1)...(19): siRNA sense strand
gggcacgugucugaaagga

SEQ ID NO: 903996 - RNA, 19 nt, Homo sapiens
  misc_RNA (1)...(19): siRNA sense strand
ggaacgcggcugagcuugu

SEQ ID NO: 903997 - RNA, 19 nt, Homo sapiens
  misc_RNA (1)...(19): siRNA sense strand
ggaugaagaggagacgaaa

SEQ ID NO: 903998 - RNA, 19 nt, Homo sapiens
  misc_RNA (1)...(19): siRNA sense strand
uuuaugggcuaccaaaaua

SEQ ID NO: 903999 - RNA, 19 nt, Homo sapiens
  misc_RNA (1)...(19): siRNA sense strand
agugaagagucccagauau

SEQ ID NO: 904000 - RNA, 19 nt, Homo sapiens
  misc_RNA (1)...(19): siRNA sense strand
gaaggaagagagccuagcu

SEQ ID NO: 904001 - RNA, 19 nt, Homo sapiens
  misc_RNA (1)...(19): siRNA sense strand
ggagugcacaaauuaagca

SEQ ID NO: 904002 - RNA, 19 nt, Homo sapiens
  misc_RNA (1)...(19): siRNA sense strand
cuaugaugaugguaccaaa

SEQ ID NO: 904003 - RNA, 19 nt, Homo sapiens
  misc_RNA (1)...(19): siRNA sense strand
gagaaagacaaacaaacag

SEQ ID NO: 904004 - RNA, 19 nt, Homo sapiens
  misc_RNA (1)...(19): siRNA sense strand
caaaucauccuagagaaac

SEQ ID NO: 904005 - RNA, 19 nt, Homo sapiens
  misc_RNA (1)...(19): siRNA sense strand
aaacaggagagaccaagau

SEQ ID NO: 904006 - RNA, 19 nt, Homo sapiens
  misc_RNA (1)...(19): siRNA sense strand
gcggcagucugaagaggau

SEQ ID NO: 904007 - RNA, 19 nt, Homo sapiens
  misc_RNA (1)...(19): siRNA sense strand
guggagaaagacaaacaaa

SEQ ID NO: 904008 - RNA, 19 nt, Homo sapiens
  misc_RNA (1)...(19): siRNA sense strand
gauguagaagagcuuauuc

SEQ ID NO: 904009 - RNA, 19 nt, Homo sapiens
  misc_RNA (1)...(19): siRNA sense strand
agaggcagacugaaauaga

SEQ ID NO: 904010 - RNA, 19 nt, Homo sapiens
  misc_RNA (1)...(19): siRNA sense strand
uucagaggcuggagcaaga

SEQ ID NO: 904011 - RNA, 19 nt, Homo sapiens
  misc_RNA (1)...(19): siRNA sense strand
gcagcaaucuucauuauuu

SEQ ID NO: 904012 - RNA, 19 nt, Homo sapiens
  misc_RNA (1)...(19): siRNA sense strand
gaaauacugugguuugcuu

SEQ ID NO: 904013 - RNA, 19 nt, Homo sapiens
  misc_RNA (1)...(19): siRNA sense strand
uaacacugcuggacaauau

SEQ ID NO: 904014 - RNA, 19 nt, Homo sapiens
  misc_RNA (1)...(19): siRNA sense strand
ggccauaagugauuuacua

SEQ ID NO: 904015 - RNA, 19 nt, Homo sapiens
  misc_RNA (1)...(19): siRNA sense strand
gacacaaacucuucagaaa

SEQ ID NO: 904016 - RNA, 19 nt, Homo sapiens
  misc_RNA (1)...(19): siRNA sense strand
agacucaacucccagaaua

SEQ ID NO: 904017 - RNA, 19 nt, Homo sapiens
  misc_RNA (1)...(19): siRNA sense strand
uaacagcagugagauuuaa

SEQ ID NO: 904018 - RNA, 19 nt, Homo sapiens
  misc_RNA (1)...(19): siRNA sense strand
gaacaaacauaugcacaca

SEQ ID NO: 904019 - RNA, 19 nt, Homo sapiens
  misc_RNA (1)...(19): siRNA sense strand
ucacuaaucucuucaucuu

SEQ ID NO: 904020 - RNA, 19 nt, Homo sapiens
  misc_RNA (1)...(19): siRNA sense strand
guaaugaggaacaaacaua

SEQ ID NO: 904021 - RNA, 19 nt, Homo sapiens
  misc_RNA (1)...(19): siRNA sense strand
gugguuugcuuuauuguaa

SEQ ID NO: 904022 - RNA, 19 nt, Homo sapiens
  misc_RNA (1)...(19): siRNA sense strand
ggacacaaacucuucagaa

SEQ ID NO: 904023 - RNA, 19 nt, Homo sapiens
  misc_RNA (1)...(19): siRNA sense strand
ugucgcagcuucagucuuu

SEQ ID NO: 904024 - RNA, 19 nt, Homo sapiens
  misc_RNA (1)...(19): siRNA sense strand
acacaaagcaucaucugua

SEQ ID NO: 904025 - RNA, 19 nt, Homo sapiens
  misc_RNA (1)...(19): siRNA sense strand
ggggaaaccuugcuuuaua

SEQ ID NO: 904026 - RNA, 19 nt, Homo sapiens
  misc_RNA (1)...(19): siRNA sense strand
gaaacacgaugugcaagau

SEQ ID NO: 904027 - RNA, 19 nt, Homo sapiens
  misc_RNA (1)...(19): siRNA sense strand
aaacacaucuaaucagcuu

SEQ ID NO: 904028 - RNA, 19 nt, Homo sapiens
  misc_RNA (1)...(19): siRNA sense strand
aaccaaagcucacuaucaa

SEQ ID NO: 904029 - RNA, 19 nt, Homo sapiens
  misc_RNA (1)...(19): siRNA sense strand
caucauguauggaaggauu

SEQ ID NO: 904030 - RNA, 19 nt, Homo sapiens
  misc_RNA (1)...(19): siRNA sense strand
aaaccuugcuuuauaggaa

SEQ ID NO: 904031 - RNA, 19 nt, Homo sapiens
  misc_RNA (1)...(19): siRNA sense strand
ccaggaaucuacauuucaa

SEQ ID NO: 904032 - RNA, 19 nt, Homo sapiens
  misc_RNA (1)...(19): siRNA sense strand
gggaaaccuugcuuuauag

SEQ ID NO: 904033 - RNA, 19 nt, Homo sapiens
  misc_RNA (1)...(19): siRNA sense strand
uuaccuaugugaacuacua

SEQ ID NO: 904034 - RNA, 19 nt, Homo sapiens
  misc_RNA (1)...(19): siRNA sense strand
uaaugaugcucucagacua

SEQ ID NO: 904035 - RNA, 19 nt, Homo sapiens
  misc_RNA (1)...(19): siRNA sense strand
gaugggaaauacugugguu

SEQ ID NO: 904036 - RNA, 19 nt, Homo sapiens
  misc_RNA (1)...(19): siRNA sense strand
cuacaccacugugcuguuu

SEQ ID NO: 904037 - RNA, 19 nt, Homo sapiens
  misc_RNA (1)...(19): siRNA sense strand
ggaaacacgaugugcaaga

SEQ ID NO: 904038 - RNA, 19 nt, Homo sapiens
  misc_RNA (1)...(19): siRNA sense strand
uaugugaacuacuaucuuc

SEQ ID NO: 904039 - RNA, 19 nt, Homo sapiens
  misc_RNA (1)...(19): siRNA sense strand
caucauuuaugguuucuuc

SEQ ID NO: 904040 - RNA, 19 nt, Homo sapiens
  misc_RNA (1)...(19): siRNA sense strand
gaaaugaggaagaucuaca

SEQ ID NO: 904041 - RNA, 19 nt, Homo sapiens
  misc_RNA (1)...(19): siRNA sense strand
ccaaagcucacuaucaaga

SEQ ID NO: 904042 - RNA, 19 nt, Homo sapiens
  misc_RNA (1)...(19): siRNA sense strand
gauuggaauuucacucuuc

SEQ ID NO: 904043 - RNA, 19 nt, Homo sapiens
  misc_RNA (1)...(19): siRNA sense strand
gaaaugggacacaaacucu

SEQ ID NO: 904044 - RNA, 19 nt, Homo sapiens
  misc_RNA (1)...(19): siRNA sense strand
agacuacgcugaccuuucu

SEQ ID NO: 904045 - RNA, 19 nt, Homo sapiens
  misc_RNA (1)...(19): siRNA sense strand
cagcuucagucuuuacguu

SEQ ID NO: 904046 - RNA, 19 nt, Homo sapiens
  misc_RNA (1)...(19): siRNA sense strand
uuaagaugcuccugauugu

SEQ ID NO: 904047 - RNA, 19 nt, Homo sapiens
  misc_RNA (1)...(19): siRNA sense strand
uggcagcaaucuucauuau

SEQ ID NO: 904048 - RNA, 19 nt, Homo sapiens
  misc_RNA (1)...(19): siRNA sense strand
ccaaaugaacugcagauca

SEQ ID NO: 904049 - RNA, 19 nt, Homo sapiens
  misc_RNA (1)...(19): siRNA sense strand
acgcugaccuuucuccaaa

SEQ ID NO: 904050 - RNA, 19 nt, Homo sapiens
  misc_RNA (1)...(19): siRNA sense strand
acaaacauaugcacacagu

SEQ ID NO: 904051 - RNA, 19 nt, Homo sapiens
  misc_RNA (1)...(19): siRNA sense strand
caucccaucuggaauguca

SEQ ID NO: 904052 - RNA, 19 nt, Homo sapiens
  misc_RNA (1)...(19): siRNA sense strand
gagaauuuccgccgugguu

SEQ ID NO: 904053 - RNA, 19 nt, Homo sapiens
  misc_RNA (1)...(19): siRNA sense strand
gaacugcagaucaucaaca

SEQ ID NO: 904054 - RNA, 19 nt, Homo sapiens
  misc_RNA (1)...(19): siRNA sense strand
aaacauaugcacacaguca

SEQ ID NO: 904055 - RNA, 19 nt, Homo sapiens
  misc_RNA (1)...(19): siRNA sense strand
aaagccaugugcucauaaa

SEQ ID NO: 904056 - RNA, 19 nt, Homo sapiens
  misc_RNA (1)...(19): siRNA sense strand
gugucaaucccaucauuua

SEQ ID NO: 904057 - RNA, 19 nt, Homo sapiens
  misc_RNA (1)...(19): siRNA sense strand
ggauuggaauuucacucuu

SEQ ID NO: 904058 - RNA, 19 nt, Homo sapiens
  misc_RNA (1)...(19): siRNA sense strand
cagcguuugucauuauuau

SEQ ID NO: 904059 - RNA, 19 nt, Homo sapiens
  misc_RNA (1)...(19): siRNA sense strand
ugaccuuucuccaaaugaa

SEQ ID NO: 904060 - RNA, 19 nt, Homo sapiens
  misc_RNA (1)...(19): siRNA sense strand
uaaaagccaugugcucaua

SEQ ID NO: 904061 - RNA, 19 nt, Homo sapiens
  misc_RNA (1)...(19): siRNA sense strand
cuauaacacugcuggacaa

SEQ ID NO: 904062 - RNA, 19 nt, Homo sapiens
  misc_RNA (1)...(19): siRNA sense strand
ggaauuagugauggaagaa

SEQ ID NO: 904063 - RNA, 19 nt, Homo sapiens
  misc_RNA (1)...(19): siRNA sense strand
ucaucaacaucuacaucua

SEQ ID NO: 904064 - RNA, 19 nt, Homo sapiens
  misc_RNA (1)...(19): siRNA sense strand
aaaccaaagcucacuauca

SEQ ID NO: 904065 - RNA, 19 nt, Homo sapiens
  misc_RNA (1)...(19): siRNA sense strand
acacugcuggacaauauua

SEQ ID NO: 904066 - RNA, 19 nt, Homo sapiens
  misc_RNA (1)...(19): siRNA sense strand
guccaggaaucuacauuuc

SEQ ID NO: 904067 - RNA, 19 nt, Homo sapiens
  misc_RNA (1)...(19): siRNA sense strand
caaaucaggaaaugaggaa

SEQ ID NO: 904068 - RNA, 19 nt, Homo sapiens
  misc_RNA (1)...(19): siRNA sense strand
cgggaagacuggccaaauc

SEQ ID NO: 904069 - RNA, 19 nt, Homo sapiens
  misc_RNA (1)...(19): siRNA sense strand
caauugcuguagauagguu

SEQ ID NO: 904070 - RNA, 19 nt, Homo sapiens
  misc_RNA (1)...(19): siRNA sense strand
cagcaaucuucauuauuuc

SEQ ID NO: 904071 - RNA, 19 nt, Homo sapiens
  misc_RNA (1)...(19): siRNA sense strand
ccuguggacucuaaugaug

SEQ ID NO: 904072 - RNA, 19 nt, Homo sapiens
  misc_RNA (1)...(19): siRNA sense strand
ucaaguggcagcaaucuuc

SEQ ID NO: 904073 - RNA, 19 nt, Homo sapiens
  misc_RNA (1)...(19): siRNA sense strand
gguccuagccaucaccauu

SEQ ID NO: 904074 - RNA, 19 nt, Homo sapiens
  misc_RNA (1)...(19): siRNA sense strand
cacagucacuaaucucuuc

SEQ ID NO: 904075 - RNA, 19 nt, Homo sapiens
  misc_RNA (1)...(19): siRNA sense strand
gcucauaaacacaucuaau

SEQ ID NO: 904076 - RNA, 19 nt, Homo sapiens
  misc_RNA (1)...(19): siRNA sense strand
gcugaccuuucuccaaaug

SEQ ID NO: 904077 - RNA, 19 nt, Homo sapiens
  misc_RNA (1)...(19): siRNA sense strand
gcaggauggccauuuggaa

SEQ ID NO: 904078 - RNA, 19 nt, Homo sapiens
  misc_RNA (1)...(19): siRNA sense strand
gaucaucaacaucuacauc

SEQ ID NO: 904079 - RNA, 19 nt, Homo sapiens
  misc_RNA (1)...(19): siRNA sense strand
ucauuaagaugcuccugau

SEQ ID NO: 904080 - RNA, 19 nt, Homo sapiens
  misc_RNA (1)...(19): siRNA sense strand
gcagaagaucauuaagaug

SEQ ID NO: 904081 - RNA, 19 nt, Homo sapiens
  misc_RNA (1)...(19): siRNA sense strand
agcagaagaucauuaagau

SEQ ID NO: 904082 - RNA, 19 nt, Homo sapiens
  misc_RNA (1)...(19): siRNA sense strand
aagcagaagaucauuaaga

SEQ ID NO: 904083 - RNA, 19 nt, Homo sapiens
  misc_RNA (1)...(19): siRNA sense strand
guccuagccaucaccauua

SEQ ID NO: 904084 - RNA, 19 nt, Homo sapiens
  misc_RNA (1)...(19): siRNA sense strand
uagauagguuccagugugu

SEQ ID NO: 904085 - RNA, 19 nt, Homo sapiens
  misc_RNA (1)...(19): siRNA sense strand
caggauggccauuuggaaa

SEQ ID NO: 904086 - RNA, 19 nt, Homo sapiens
  misc_RNA (1)...(19): siRNA sense strand
acaucuacaucuacccuuu

SEQ ID NO: 904087 - RNA, 19 nt, Homo sapiens
  misc_RNA (1)...(19): siRNA sense strand
caucuuaaaccuggccaua

SEQ ID NO: 904088 - RNA, 19 nt, Homo sapiens
  misc_RNA (1)...(19): siRNA sense strand
cuaacagcagugagauuua

SEQ ID NO: 904089 - RNA, 19 nt, Homo sapiens
  misc_RNA (1)...(19): siRNA sense strand
cagugucaaucccaucauu

SEQ ID NO: 904090 - RNA, 19 nt, Homo sapiens
  misc_RNA (1)...(19): siRNA sense strand
gggaagacuggccaaauca

SEQ ID NO: 904091 - RNA, 19 nt, Homo sapiens
  misc_RNA (1)...(19): siRNA sense strand
cacaaagcaucaucuguac

SEQ ID NO: 904092 - RNA, 19 nt, Homo sapiens
  misc_RNA (1)...(19): siRNA sense strand
ggauggccauuuggaaaca

SEQ ID NO: 904093 - RNA, 19 nt, Homo sapiens
  misc_RNA (1)...(19): siRNA sense strand
uauggaaggauuggaauuu

SEQ ID NO: 904094 - RNA, 19 nt, Homo sapiens
  misc_RNA (1)...(19): siRNA sense strand
caaagcaucaucuguacuc

SEQ ID NO: 904095 - RNA, 19 nt, Homo sapiens
  misc_RNA (1)...(19): siRNA sense strand
uuuacuaguuggcauauuc

SEQ ID NO: 904096 - RNA, 19 nt, Homo sapiens
  misc_RNA (1)...(19): siRNA sense strand
gaaaccuugcuuuauagga

SEQ ID NO: 904097 - RNA, 19 nt, Homo sapiens
  misc_RNA (1)...(19): siRNA sense strand
ucaaugacacaaagcauca

SEQ ID NO: 904098 - RNA, 19 nt, Homo sapiens
  misc_RNA (1)...(19): siRNA sense strand
uggaaggauuggaauuuca

SEQ ID NO: 904099 - RNA, 19 nt, Homo sapiens
  misc_RNA (1)...(19): siRNA sense strand
gcuggacaauauuauagca

SEQ ID NO: 904100 - RNA, 19 nt, Homo sapiens
  misc_RNA (1)...(19): siRNA sense strand
aaagcucacuaucaagaca

SEQ ID NO: 904101 - RNA, 19 nt, Homo sapiens
  misc_RNA (1)...(19): siRNA sense strand
gaauuuccgccgugguuuc

SEQ ID NO: 904102 - RNA, 19 nt, Homo sapiens
  misc_RNA (1)...(19): siRNA sense strand
gguuugcuuuauuguaaug

SEQ ID NO: 904103 - RNA, 19 nt, Homo sapiens
  misc_RNA (1)...(19): siRNA sense strand
ggauugguccagggaauau

SEQ ID NO: 904104 - RNA, 19 nt, Homo sapiens
  misc_RNA (1)...(19): siRNA sense strand
acuaacagcagugagauuu

SEQ ID NO: 904105 - RNA, 19 nt, Homo sapiens
  misc_RNA (1)...(19): siRNA sense strand
ccaacaggaauuagugaug

SEQ ID NO: 904106 - RNA, 19 nt, Homo sapiens
  misc_RNA (1)...(19): siRNA sense strand
gcacacagucacuaaucuc

SEQ ID NO: 904107 - RNA, 19 nt, Homo sapiens
  misc_RNA (1)...(19): siRNA sense strand
gggaaauacugugguuugc

SEQ ID NO: 904108 - RNA, 19 nt, Homo sapiens
  misc_RNA (1)...(19): siRNA sense strand
gcuucagucuuuacguuag

SEQ ID NO: 904109 - RNA, 19 nt, Homo sapiens
  misc_RNA (1)...(19): siRNA sense strand
auagcaggauggccauuug

SEQ ID NO: 904110 - RNA, 19 nt, Homo sapiens
  misc_RNA (1)...(19): siRNA sense strand
aaugagaaaugggacacaa

SEQ ID NO: 904111 - RNA, 19 nt, Homo sapiens
  misc_RNA (1)...(19): siRNA sense strand
gcagcaaucuucauuauuu

SEQ ID NO: 904112 - RNA, 19 nt, Homo sapiens
  misc_RNA (1)...(19): siRNA sense strand
gaaauacugugguuugcuu

SEQ ID NO: 904113 - RNA, 19 nt, Homo sapiens
  misc_RNA (1)...(19): siRNA sense strand
uaacacugcuggacaauau

SEQ ID NO: 904114 - RNA, 19 nt, Homo sapiens
  misc_RNA (1)...(19): siRNA sense strand
ggccauaagugauuuacua

SEQ ID NO: 904115 - RNA, 19 nt, Homo sapiens
  misc_RNA (1)...(19): siRNA sense strand
gacacaaacucuucagaaa

SEQ ID NO: 904116 - RNA, 19 nt, Homo sapiens
  misc_RNA (1)...(19): siRNA sense strand
agacucaacucccagaaua

SEQ ID NO: 904117 - RNA, 19 nt, Homo sapiens
  misc_RNA (1)...(19): siRNA sense strand
uaacagcagugagauuuaa

SEQ ID NO: 904118 - RNA, 19 nt, Homo sapiens
  misc_RNA (1)...(19): siRNA sense strand
gaacaaacauaugcacaca

SEQ ID NO: 904119 - RNA, 19 nt, Homo sapiens
  misc_RNA (1)...(19): siRNA sense strand
ucacuaaucucuucaucuu

SEQ ID NO: 904120 - RNA, 19 nt, Homo sapiens
  misc_RNA (1)...(19): siRNA sense strand
guaaugaggaacaaacaua

SEQ ID NO: 904121 - RNA, 19 nt, Homo sapiens
  misc_RNA (1)...(19): siRNA sense strand
gugguuugcuuuauuguaa

SEQ ID NO: 904122 - RNA, 19 nt, Homo sapiens
  misc_RNA (1)...(19): siRNA sense strand
ggacacaaacucuucagaa

SEQ ID NO: 904123 - RNA, 19 nt, Homo sapiens
  misc_RNA (1)...(19): siRNA sense strand
ugucgcagcuucagucuuu

SEQ ID NO: 904124 - RNA, 19 nt, Homo sapiens
  misc_RNA (1)...(19): siRNA sense strand
acacaaagcaucaucugua

SEQ ID NO: 904125 - RNA, 19 nt, Homo sapiens
  misc_RNA (1)...(19): siRNA sense strand
ggggaaaccuugcuuuaua

SEQ ID NO: 904126 - RNA, 19 nt, Homo sapiens
  misc_RNA (1)...(19): siRNA sense strand
gaaacacgaugugcaagau

SEQ ID NO: 904127 - RNA, 19 nt, Homo sapiens
  misc_RNA (1)...(19): siRNA sense strand
aaacacaucuaaucagcuu

SEQ ID NO: 904128 - RNA, 19 nt, Homo sapiens
  misc_RNA (1)...(19): siRNA sense strand
aaccaaagcucacuaucaa

SEQ ID NO: 904129 - RNA, 19 nt, Homo sapiens
  misc_RNA (1)...(19): siRNA sense strand
caucauguauggaaggauu

SEQ ID NO: 904130 - RNA, 19 nt, Homo sapiens
  misc_RNA (1)...(19): siRNA sense strand
aaaccuugcuuuauaggaa

SEQ ID NO: 904131 - RNA, 19 nt, Homo sapiens
  misc_RNA (1)...(19): siRNA sense strand
ccaggaaucuacauuucaa

SEQ ID NO: 904132 - RNA, 19 nt, Homo sapiens
  misc_RNA (1)...(19): siRNA sense strand
gggaaaccuugcuuuauag

SEQ ID NO: 904133 - RNA, 19 nt, Homo sapiens
  misc_RNA (1)...(19): siRNA sense strand
uuaccuaugugaacuacua

SEQ ID NO: 904134 - RNA, 19 nt, Homo sapiens
  misc_RNA (1)...(19): siRNA sense strand
uaaugaugcucucagacua

SEQ ID NO: 904135 - RNA, 19 nt, Homo sapiens
  misc_RNA (1)...(19): siRNA sense strand
gaugggaaauacugugguu

SEQ ID NO: 904136 - RNA, 19 nt, Homo sapiens
  misc_RNA (1)...(19): siRNA sense strand
cuacaccacugugcuguuu

SEQ ID NO: 904137 - RNA, 19 nt, Homo sapiens
  misc_RNA (1)...(19): siRNA sense strand
ggaaacacgaugugcaaga

SEQ ID NO: 904138 - RNA, 19 nt, Homo sapiens
  misc_RNA (1)...(19): siRNA sense strand
uaugugaacuacuaucuuc

SEQ ID NO: 904139 - RNA, 19 nt, Homo sapiens
  misc_RNA (1)...(19): siRNA sense strand
caucauuuaugguuucuuc

SEQ ID NO: 904140 - RNA, 19 nt, Homo sapiens
  misc_RNA (1)...(19): siRNA sense strand
gaaaugaggaagaucuaca

SEQ ID NO: 904141 - RNA, 19 nt, Homo sapiens
  misc_RNA (1)...(19): siRNA sense strand
ccaaagcucacuaucaaga

SEQ ID NO: 904142 - RNA, 19 nt, Homo sapiens
  misc_RNA (1)...(19): siRNA sense strand
gauuggaauuucacucuuc

SEQ ID NO: 904143 - RNA, 19 nt, Homo sapiens
  misc_RNA (1)...(19): siRNA sense strand
gaaaugggacacaaacucu

SEQ ID NO: 904144 - RNA, 19 nt, Homo sapiens
  misc_RNA (1)...(19): siRNA sense strand
agacuacgcugaccuuucu

SEQ ID NO: 904145 - RNA, 19 nt, Homo sapiens
  misc_RNA (1)...(19): siRNA sense strand
cagcuucagucuuuacguu

SEQ ID NO: 904146 - RNA, 19 nt, Homo sapiens
  misc_RNA (1)...(19): siRNA sense strand
uuaagaugcuccugauugu

SEQ ID NO: 904147 - RNA, 19 nt, Homo sapiens
  misc_RNA (1)...(19): siRNA sense strand
uggcagcaaucuucauuau

SEQ ID NO: 904148 - RNA, 19 nt, Homo sapiens
  misc_RNA (1)...(19): siRNA sense strand
ccaaaugaacugcagauca

SEQ ID NO: 904149 - RNA, 19 nt, Homo sapiens
  misc_RNA (1)...(19): siRNA sense strand
acgcugaccuuucuccaaa

SEQ ID NO: 904150 - RNA, 19 nt, Homo sapiens
  misc_RNA (1)...(19): siRNA sense strand
acaaacauaugcacacagu

SEQ ID NO: 904151 - RNA, 19 nt, Homo sapiens
  misc_RNA (1)...(19): siRNA sense strand
caucccaucuggaauguca

SEQ ID NO: 904152 - RNA, 19 nt, Homo sapiens
  misc_RNA (1)...(19): siRNA sense strand
gagaauuuccgccgugguu

SEQ ID NO: 904153 - RNA, 19 nt, Homo sapiens
  misc_RNA (1)...(19): siRNA sense strand
gaacugcagaucaucaaca

SEQ ID NO: 904154 - RNA, 19 nt, Homo sapiens
  misc_RNA (1)...(19): siRNA sense strand
aaacauaugcacacaguca

SEQ ID NO: 904155 - RNA, 19 nt, Homo sapiens
  misc_RNA (1)...(19): siRNA sense strand
aaagccaugugcucauaaa

SEQ ID NO: 904156 - RNA, 19 nt, Homo sapiens
  misc_RNA (1)...(19): siRNA sense strand
gugucaaucccaucauuua

SEQ ID NO: 904157 - RNA, 19 nt, Homo sapiens
  misc_RNA (1)...(19): siRNA sense strand
ggauuggaauuucacucuu

SEQ ID NO: 904158 - RNA, 19 nt, Homo sapiens
  misc_RNA (1)...(19): siRNA sense strand
cagcguuugucauuauuau

SEQ ID NO: 904159 - RNA, 19 nt, Homo sapiens
  misc_RNA (1)...(19): siRNA sense strand
ugaccuuucuccaaaugaa

SEQ ID NO: 904160 - RNA, 19 nt, Homo sapiens
  misc_RNA (1)...(19): siRNA sense strand
uaaaagccaugugcucaua

SEQ ID NO: 904161 - RNA, 19 nt, Homo sapiens
  misc_RNA (1)...(19): siRNA sense strand
cuauaacacugcuggacaa

SEQ ID NO: 904162 - RNA, 19 nt, Homo sapiens
  misc_RNA (1)...(19): siRNA sense strand
ggaauuagugauggaagaa

SEQ ID NO: 904163 - RNA, 19 nt, Homo sapiens
  misc_RNA (1)...(19): siRNA sense strand
ucaucaacaucuacaucua

SEQ ID NO: 904164 - RNA, 19 nt, Homo sapiens
  misc_RNA (1)...(19): siRNA sense strand
aaaccaaagcucacuauca

SEQ ID NO: 904165 - RNA, 19 nt, Homo sapiens
  misc_RNA (1)...(19): siRNA sense strand
acacugcuggacaauauua

SEQ ID NO: 904166 - RNA, 19 nt, Homo sapiens
  misc_RNA (1)...(19): siRNA sense strand
guccaggaaucuacauuuc

SEQ ID NO: 904167 - RNA, 19 nt, Homo sapiens
  misc_RNA (1)...(19): siRNA sense strand
caaaucaggaaaugaggaa

SEQ ID NO: 904168 - RNA, 19 nt, Homo sapiens
  misc_RNA (1)...(19): siRNA sense strand
cgggaagacuggccaaauc

SEQ ID NO: 904169 - RNA, 19 nt, Homo sapiens
  misc_RNA (1)...(19): siRNA sense strand
caauugcuguagauagguu

SEQ ID NO: 904170 - RNA, 19 nt, Homo sapiens
  misc_RNA (1)...(19): siRNA sense strand
cagcaaucuucauuauuuc

SEQ ID NO: 904171 - RNA, 19 nt, Homo sapiens
  misc_RNA (1)...(19): siRNA sense strand
ccuguggacucuaaugaug

SEQ ID NO: 904172 - RNA, 19 nt, Homo sapiens
  misc_RNA (1)...(19): siRNA sense strand
ucaaguggcagcaaucuuc

SEQ ID NO: 904173 - RNA, 19 nt, Homo sapiens
  misc_RNA (1)...(19): siRNA sense strand
gguccuagccaucaccauu

SEQ ID NO: 904174 - RNA, 19 nt, Homo sapiens
  misc_RNA (1)...(19): siRNA sense strand
cacagucacuaaucucuuc

SEQ ID NO: 904175 - RNA, 19 nt, Homo sapiens
  misc_RNA (1)...(19): siRNA sense strand
gcucauaaacacaucuaau

SEQ ID NO: 904176 - RNA, 19 nt, Homo sapiens
  misc_RNA (1)...(19): siRNA sense strand
gcugaccuuucuccaaaug

SEQ ID NO: 904177 - RNA, 19 nt, Homo sapiens
  misc_RNA (1)...(19): siRNA sense strand
gcaggauggccauuuggaa

SEQ ID NO: 904178 - RNA, 19 nt, Homo sapiens
  misc_RNA (1)...(19): siRNA sense strand
gaucaucaacaucuacauc

SEQ ID NO: 904179 - RNA, 19 nt, Homo sapiens
  misc_RNA (1)...(19): siRNA sense strand
ucauuaagaugcuccugau

SEQ ID NO: 904180 - RNA, 19 nt, Homo sapiens
  misc_RNA (1)...(19): siRNA sense strand
gcagaagaucauuaagaug

SEQ ID NO: 904181 - RNA, 19 nt, Homo sapiens
  misc_RNA (1)...(19): siRNA sense strand
agcagaagaucauuaagau

SEQ ID NO: 904182 - RNA, 19 nt, Homo sapiens
  misc_RNA (1)...(19): siRNA sense strand
aagcagaagaucauuaaga

SEQ ID NO: 904183 - RNA, 19 nt, Homo sapiens
  misc_RNA (1)...(19): siRNA sense strand
guccuagccaucaccauua

SEQ ID NO: 904184 - RNA, 19 nt, Homo sapiens
  misc_RNA (1)...(19): siRNA sense strand
uagauagguuccagugugu

SEQ ID NO: 904185 - RNA, 19 nt, Homo sapiens
  misc_RNA (1)...(19): siRNA sense strand
caggauggccauuuggaaa

SEQ ID NO: 904186 - RNA, 19 nt, Homo sapiens
  misc_RNA (1)...(19): siRNA sense strand
acaucuacaucuacccuuu

SEQ ID NO: 904187 - RNA, 19 nt, Homo sapiens
  misc_RNA (1)...(19): siRNA sense strand
caucuuaaaccuggccaua

SEQ ID NO: 904188 - RNA, 19 nt, Homo sapiens
  misc_RNA (1)...(19): siRNA sense strand
cuaacagcagugagauuua

SEQ ID NO: 904189 - RNA, 19 nt, Homo sapiens
  misc_RNA (1)...(19): siRNA sense strand
cagugucaaucccaucauu

SEQ ID NO: 904190 - RNA, 19 nt, Homo sapiens
  misc_RNA (1)...(19): siRNA sense strand
gggaagacuggccaaauca

SEQ ID NO: 904191 - RNA, 19 nt, Homo sapiens
  misc_RNA (1)...(19): siRNA sense strand
cacaaagcaucaucuguac

SEQ ID NO: 904192 - RNA, 19 nt, Homo sapiens
  misc_RNA (1)...(19): siRNA sense strand
ggauggccauuuggaaaca

SEQ ID NO: 904193 - RNA, 19 nt, Homo sapiens
  misc_RNA (1)...(19): siRNA sense strand
uauggaaggauuggaauuu

SEQ ID NO: 904194 - RNA, 19 nt, Homo sapiens
  misc_RNA (1)...(19): siRNA sense strand
caaagcaucaucuguacuc

SEQ ID NO: 904195 - RNA, 19 nt, Homo sapiens
  misc_RNA (1)...(19): siRNA sense strand
uuuacuaguuggcauauuc

SEQ ID NO: 904196 - RNA, 19 nt, Homo sapiens
  misc_RNA (1)...(19): siRNA sense strand
gaaaccuugcuuuauagga

SEQ ID NO: 904197 - RNA, 19 nt, Homo sapiens
  misc_RNA (1)...(19): siRNA sense strand
ucaaugacacaaagcauca

SEQ ID NO: 904198 - RNA, 19 nt, Homo sapiens
  misc_RNA (1)...(19): siRNA sense strand
uggaaggauuggaauuuca

SEQ ID NO: 904199 - RNA, 19 nt, Homo sapiens
  misc_RNA (1)...(19): siRNA sense strand
gcuggacaauauuauagca

SEQ ID NO: 904200 - RNA, 19 nt, Homo sapiens
  misc_RNA (1)...(19): siRNA sense strand
aaagcucacuaucaagaca

SEQ ID NO: 904201 - RNA, 19 nt, Homo sapiens
  misc_RNA (1)...(19): siRNA sense strand
gaauuuccgccgugguuuc

SEQ ID NO: 904202 - RNA, 19 nt, Homo sapiens
  misc_RNA (1)...(19): siRNA sense strand
gguuugcuuuauuguaaug

SEQ ID NO: 904203 - RNA, 19 nt, Homo sapiens
  misc_RNA (1)...(19): siRNA sense strand
ggauugguccagggaauau

SEQ ID NO: 904204 - RNA, 19 nt, Homo sapiens
  misc_RNA (1)...(19): siRNA sense strand
acuaacagcagugagauuu

SEQ ID NO: 904205 - RNA, 19 nt, Homo sapiens
  misc_RNA (1)...(19): siRNA sense strand
ccaacaggaauuagugaug

SEQ ID NO: 904206 - RNA, 19 nt, Homo sapiens
  misc_RNA (1)...(19): siRNA sense strand
gcacacagucacuaaucuc

SEQ ID NO: 904207 - RNA, 19 nt, Homo sapiens
  misc_RNA (1)...(19): siRNA sense strand
gggaaauacugugguuugc

SEQ ID NO: 904208 - RNA, 19 nt, Homo sapiens
  misc_RNA (1)...(19): siRNA sense strand
gcuucagucuuuacguuag

SEQ ID NO: 904209 - RNA, 19 nt, Homo sapiens
  misc_RNA (1)...(19): siRNA sense strand
auagcaggauggccauuug

SEQ ID NO: 904210 - RNA, 19 nt, Homo sapiens
  misc_RNA (1)...(19): siRNA sense strand
aaugagaaaugggacacaa

SEQ ID NO: 904211 - RNA, 19 nt, Homo sapiens
  misc_RNA (1)...(19): siRNA sense strand
gaauaaaccagaugccuua

SEQ ID NO: 904212 - RNA, 19 nt, Homo sapiens
  misc_RNA (1)...(19): siRNA sense strand
guacagaccugcugaaugc

SEQ ID NO: 904213 - RNA, 19 nt, Homo sapiens
  misc_RNA (1)...(19): siRNA sense strand
gaaagagcuuguucagaga

SEQ ID NO: 904214 - RNA, 19 nt, Homo sapiens
  misc_RNA (1)...(19): siRNA sense strand
gaauacagccauuggauga

SEQ ID NO: 904215 - RNA, 19 nt, Homo sapiens
  misc_RNA (1)...(19): siRNA sense strand
uaacauugcucacaugaag

SEQ ID NO: 904216 - RNA, 19 nt, Homo sapiens
  misc_RNA (1)...(19): siRNA sense strand
ggaugaauaugaagacaau

SEQ ID NO: 904217 - RNA, 19 nt, Homo sapiens
  misc_RNA (1)...(19): siRNA sense strand
gcagaaagggccaacguaa

SEQ ID NO: 904218 - RNA, 19 nt, Homo sapiens
  misc_RNA (1)...(19): siRNA sense strand
gaagaagugggaucaguuu

SEQ ID NO: 904219 - RNA, 19 nt, Homo sapiens
  misc_RNA (1)...(19): siRNA sense strand
cuaaggaaauggaggaauu

SEQ ID NO: 904220 - RNA, 19 nt, Homo sapiens
  misc_RNA (1)...(19): siRNA sense strand
ugauacaucucgguuguua

SEQ ID NO: 904221 - RNA, 19 nt, Homo sapiens
  misc_RNA (1)...(19): siRNA sense strand
cuacaagagucaagauuug

SEQ ID NO: 904222 - RNA, 19 nt, Homo sapiens
  misc_RNA (1)...(19): siRNA sense strand
guuaagagauggucagaca

SEQ ID NO: 904223 - RNA, 19 nt, Homo sapiens
  misc_RNA (1)...(19): siRNA sense strand
ugaagacaauccugaaaga

SEQ ID NO: 904224 - RNA, 19 nt, Homo sapiens
  misc_RNA (1)...(19): siRNA sense strand
ccaaaugugugauaugaag

SEQ ID NO: 904225 - RNA, 19 nt, Homo sapiens
  misc_RNA (1)...(19): siRNA sense strand
gguaggcauuccauuguuu

SEQ ID NO: 904226 - RNA, 19 nt, Homo sapiens
  misc_RNA (1)...(19): siRNA sense strand
caagaaauccugugggaau

SEQ ID NO: 904227 - RNA, 19 nt, Homo sapiens
  misc_RNA (1)...(19): siRNA sense strand
gagauuugaugggaauaaa

SEQ ID NO: 904228 - RNA, 19 nt, Homo sapiens
  misc_RNA (1)...(19): siRNA sense strand
caucucgguuguuacuuua

SEQ ID NO: 904229 - RNA, 19 nt, Homo sapiens
  misc_RNA (1)...(19): siRNA sense strand
gccauuggaugaauaugaa

SEQ ID NO: 904230 - RNA, 19 nt, Homo sapiens
  misc_RNA (1)...(19): siRNA sense strand
gaagacccacuaccuuauu

SEQ ID NO: 904231 - RNA, 19 nt, Homo sapiens
  misc_RNA (1)...(19): siRNA sense strand
gugggaauuucaugacaua

SEQ ID NO: 904232 - RNA, 19 nt, Homo sapiens
  misc_RNA (1)...(19): siRNA sense strand
agaaagggccaacguaauu

SEQ ID NO: 904233 - RNA, 19 nt, Homo sapiens
  misc_RNA (1)...(19): siRNA sense strand
uaacauaccguuuguguac

SEQ ID NO: 904234 - RNA, 19 nt, Homo sapiens
  misc_RNA (1)...(19): siRNA sense strand
caagggagcagcuguuaga

SEQ ID NO: 904235 - RNA, 19 nt, Homo sapiens
  misc_RNA (1)...(19): siRNA sense strand
ucaauuuccucauccauuc

SEQ ID NO: 904236 - RNA, 19 nt, Homo sapiens
  misc_RNA (1)...(19): siRNA sense strand
caacaugaucaaccaguaa

SEQ ID NO: 904237 - RNA, 19 nt, Homo sapiens
  misc_RNA (1)...(19): siRNA sense strand
gcugauacaucucgguugu

SEQ ID NO: 904238 - RNA, 19 nt, Homo sapiens
  misc_RNA (1)...(19): siRNA sense strand
ggauugaauuugugaugug

SEQ ID NO: 904239 - RNA, 19 nt, Homo sapiens
  misc_RNA (1)...(19): siRNA sense strand
cgagcagucuucuggauug

SEQ ID NO: 904240 - RNA, 19 nt, Homo sapiens
  misc_RNA (1)...(19): siRNA sense strand
ucaacaugaucaaccagua

SEQ ID NO: 904241 - RNA, 19 nt, Homo sapiens
  misc_RNA (1)...(19): siRNA sense strand
guacuggcaucuucagcuu

SEQ ID NO: 904242 - RNA, 19 nt, Homo sapiens
  misc_RNA (1)...(19): siRNA sense strand
uaagagauggucagacauu

SEQ ID NO: 904243 - RNA, 19 nt, Homo sapiens
  misc_RNA (1)...(19): siRNA sense strand
gaaagggccaacguaauug

SEQ ID NO: 904244 - RNA, 19 nt, Homo sapiens
  misc_RNA (1)...(19): siRNA sense strand
gcagucuucuggauugaau

SEQ ID NO: 904245 - RNA, 19 nt, Homo sapiens
  misc_RNA (1)...(19): siRNA sense strand
ggaagacccacuaccuuau

SEQ ID NO: 904246 - RNA, 19 nt, Homo sapiens
  misc_RNA (1)...(19): siRNA sense strand
uaaaccagaugccuuaggu

SEQ ID NO: 904247 - RNA, 19 nt, Homo sapiens
  misc_RNA (1)...(19): siRNA sense strand
ccagaugccuuaggucuca

SEQ ID NO: 904248 - RNA, 19 nt, Homo sapiens
  misc_RNA (1)...(19): siRNA sense strand
ugacuguacuggcaucuuc

SEQ ID NO: 904249 - RNA, 19 nt, Homo sapiens
  misc_RNA (1)...(19): siRNA sense strand
ggggaaagcugacauaugg

SEQ ID NO: 904250 - RNA, 19 nt, Homo sapiens
  misc_RNA (1)...(19): siRNA sense strand
gccaaacaccuucgaguug

SEQ ID NO: 904251 - RNA, 19 nt, Homo sapiens
  misc_RNA (1)...(19): siRNA sense strand
gauaacauugcucacauga

SEQ ID NO: 904252 - RNA, 19 nt, Homo sapiens
  misc_RNA (1)...(19): siRNA sense strand
gggaauuucaugacauauu

SEQ ID NO: 904253 - RNA, 19 nt, Homo sapiens
  misc_RNA (1)...(19): siRNA sense strand
ucuggaaguuugcuagaaa

SEQ ID NO: 904254 - RNA, 19 nt, Homo sapiens
  misc_RNA (1)...(19): siRNA sense strand
uguggcaacugugauauuu

SEQ ID NO: 904255 - RNA, 19 nt, Homo sapiens
  misc_RNA (1)...(19): siRNA sense strand
cuacuuaacauaccguuug

SEQ ID NO: 904256 - RNA, 19 nt, Homo sapiens
  misc_RNA (1)...(19): siRNA sense strand
cuguaaagauguaguuuca

SEQ ID NO: 904257 - RNA, 19 nt, Homo sapiens
  misc_RNA (1)...(19): siRNA sense strand
acaucucgguuguuacuuu

SEQ ID NO: 904258 - RNA, 19 nt, Homo sapiens
  misc_RNA (1)...(19): siRNA sense strand
ggagauuugaugggaauaa

SEQ ID NO: 904259 - RNA, 19 nt, Homo sapiens
  misc_RNA (1)...(19): siRNA sense strand
ccucauccauucuuaccaa

SEQ ID NO: 904260 - RNA, 19 nt, Homo sapiens
  misc_RNA (1)...(19): siRNA sense strand
cccacuaccuuauuugaga

SEQ ID NO: 904261 - RNA, 19 nt, Homo sapiens
  misc_RNA (1)...(19): siRNA sense strand
aggaagacccacuaccuua

SEQ ID NO: 904262 - RNA, 19 nt, Homo sapiens
  misc_RNA (1)...(19): siRNA sense strand
caugaucuaugugcuuuau

SEQ ID NO: 904263 - RNA, 19 nt, Homo sapiens
  misc_RNA (1)...(19): siRNA sense strand
gaaaagggaagaagggaaa

SEQ ID NO: 904264 - RNA, 19 nt, Homo sapiens
  misc_RNA (1)...(19): siRNA sense strand
ugcaacagguuaagagaug

SEQ ID NO: 904265 - RNA, 19 nt, Homo sapiens
  misc_RNA (1)...(19): siRNA sense strand
uggcaacugugauauuugu

SEQ ID NO: 904266 - RNA, 19 nt, Homo sapiens
  misc_RNA (1)...(19): siRNA sense strand
gagcagucuucuggauuga

SEQ ID NO: 904267 - RNA, 19 nt, Homo sapiens
  misc_RNA (1)...(19): siRNA sense strand
uaacaugacagcagaaagg

SEQ ID NO: 904268 - RNA, 19 nt, Homo sapiens
  misc_RNA (1)...(19): siRNA sense strand
gagauggucagacauucaa

SEQ ID NO: 904269 - RNA, 19 nt, Homo sapiens
  misc_RNA (1)...(19): siRNA sense strand
guaccacucuuuggaugug

SEQ ID NO: 904270 - RNA, 19 nt, Homo sapiens
  misc_RNA (1)...(19): siRNA sense strand
ucagugauaaguaacauga

SEQ ID NO: 904271 - RNA, 19 nt, Homo sapiens
  misc_RNA (1)...(19): siRNA sense strand
ugugugauaugaagaagug

SEQ ID NO: 904272 - RNA, 19 nt, Homo sapiens
  misc_RNA (1)...(19): siRNA sense strand
gauccuucauauaaagaga

SEQ ID NO: 904273 - RNA, 19 nt, Homo sapiens
  misc_RNA (1)...(19): siRNA sense strand
cauccauucuuaccaaaca

SEQ ID NO: 904274 - RNA, 19 nt, Homo sapiens
  misc_RNA (1)...(19): siRNA sense strand
aagacccacuaccuuauuu

SEQ ID NO: 904275 - RNA, 19 nt, Homo sapiens
  misc_RNA (1)...(19): siRNA sense strand
cgaaguuuauccuacaucu

SEQ ID NO: 904276 - RNA, 19 nt, Homo sapiens
  misc_RNA (1)...(19): siRNA sense strand
acuccuggcuacacaauug

SEQ ID NO: 904277 - RNA, 19 nt, Homo sapiens
  misc_RNA (1)...(19): siRNA sense strand
aagaaauccugugggaauu

SEQ ID NO: 904278 - RNA, 19 nt, Homo sapiens
  misc_RNA (1)...(19): siRNA sense strand
uuccaaaugugugauauga

SEQ ID NO: 904279 - RNA, 19 nt, Homo sapiens
  misc_RNA (1)...(19): siRNA sense strand
gccaagggagcagcuguua

SEQ ID NO: 904280 - RNA, 19 nt, Homo sapiens
  misc_RNA (1)...(19): siRNA sense strand
guggagauuugaugggaau

SEQ ID NO: 904281 - RNA, 19 nt, Homo sapiens
  misc_RNA (1)...(19): siRNA sense strand
ugauaacauugcucacaug

SEQ ID NO: 904282 - RNA, 19 nt, Homo sapiens
  misc_RNA (1)...(19): siRNA sense strand
ggacugauuuucccuccuu

SEQ ID NO: 904283 - RNA, 19 nt, Homo sapiens
  misc_RNA (1)...(19): siRNA sense strand
ugaagaagugggaucaguu

SEQ ID NO: 904284 - RNA, 19 nt, Homo sapiens
  misc_RNA (1)...(19): siRNA sense strand
gggaucaguuuuacaguga

SEQ ID NO: 904285 - RNA, 19 nt, Homo sapiens
  misc_RNA (1)...(19): siRNA sense strand
aagguucuguggagauuug

SEQ ID NO: 904286 - RNA, 19 nt, Homo sapiens
  misc_RNA (1)...(19): siRNA sense strand
uaccuguuguuaugucaaa

SEQ ID NO: 904287 - RNA, 19 nt, Homo sapiens
  misc_RNA (1)...(19): siRNA sense strand
uacagccauuggaugaaua

SEQ ID NO: 904288 - RNA, 19 nt, Homo sapiens
  misc_RNA (1)...(19): siRNA sense strand
cugaagacaguaauuaaug

SEQ ID NO: 904289 - RNA, 19 nt, Homo sapiens
  misc_RNA (1)...(19): siRNA sense strand
cagaaagggccaacguaau

SEQ ID NO: 904290 - RNA, 19 nt, Homo sapiens
  misc_RNA (1)...(19): siRNA sense strand
gaaguuuauccuacaucuu

SEQ ID NO: 904291 - RNA, 19 nt, Homo sapiens
  misc_RNA (1)...(19): siRNA sense strand
gacccacuaccuuauuuga

SEQ ID NO: 904292 - RNA, 19 nt, Homo sapiens
  misc_RNA (1)...(19): siRNA sense strand
agaauaucaucaugcaaca

SEQ ID NO: 904293 - RNA, 19 nt, Homo sapiens
  misc_RNA (1)...(19): siRNA sense strand
gcaucuaugaggcaaucua

SEQ ID NO: 904294 - RNA, 19 nt, Homo sapiens
  misc_RNA (1)...(19): siRNA sense strand
gaagacaauccugaaagag

SEQ ID NO: 904295 - RNA, 19 nt, Homo sapiens
  misc_RNA (1)...(19): siRNA sense strand
caaacaccuucgaguugca

SEQ ID NO: 904296 - RNA, 19 nt, Homo sapiens
  misc_RNA (1)...(19): siRNA sense strand
uacuuuagcucugggaguu

SEQ ID NO: 904297 - RNA, 19 nt, Homo sapiens
  misc_RNA (1)...(19): siRNA sense strand
acuacaagagucaagauuu

SEQ ID NO: 904298 - RNA, 19 nt, Homo sapiens
  misc_RNA (1)...(19): siRNA sense strand
ggucagugauaaguaacau

SEQ ID NO: 904299 - RNA, 19 nt, Homo sapiens
  misc_RNA (1)...(19): siRNA sense strand
uaugaagacaauccugaaa

SEQ ID NO: 904300 - RNA, 19 nt, Homo sapiens
  misc_RNA (1)...(19): siRNA sense strand
ccacaaaggagccaaacac

SEQ ID NO: 904301 - RNA, 19 nt, Homo sapiens
  misc_RNA (1)...(19): siRNA sense strand
cgcauucacucuuaaacuc

SEQ ID NO: 904302 - RNA, 19 nt, Homo sapiens
  misc_RNA (1)...(19): siRNA sense strand
auacagccauuggaugaau

SEQ ID NO: 904303 - RNA, 19 nt, Homo sapiens
  misc_RNA (1)...(19): siRNA sense strand
gaagugggaucaguuuuac

SEQ ID NO: 904304 - RNA, 19 nt, Homo sapiens
  misc_RNA (1)...(19): siRNA sense strand
gaaacuucuguaaagaugu

SEQ ID NO: 904305 - RNA, 19 nt, Homo sapiens
  misc_RNA (1)...(19): siRNA sense strand
aaccagagcuuuuauaacu

SEQ ID NO: 904306 - RNA, 19 nt, Homo sapiens
  misc_RNA (1)...(19): siRNA sense strand
gguguggaccggugaauac

SEQ ID NO: 904307 - RNA, 19 nt, Homo sapiens
  misc_RNA (1)...(19): siRNA sense strand
ccacugcaaaccugccaaa

SEQ ID NO: 904308 - RNA, 19 nt, Homo sapiens
  misc_RNA (1)...(19): siRNA sense strand
cugauaacauugcucacau

SEQ ID NO: 904309 - RNA, 19 nt, Homo sapiens
  misc_RNA (1)...(19): siRNA sense strand
agugauaaguaacaugaca

SEQ ID NO: 904310 - RNA, 19 nt, Homo sapiens
  misc_RNA (1)...(19): siRNA sense strand
aaaugguguugugguguuu

SEQ ID NO: 904311 - RNA, 19 nt, Homo sapiens
  misc_RNA (1)...(19): siRNA sense strand
agucuuggcucccucagaa

SEQ ID NO: 904312 - RNA, 19 nt, Homo sapiens
  misc_RNA (1)...(19): siRNA sense strand
gaauuugccaccaccaauc

SEQ ID NO: 904313 - RNA, 19 nt, Homo sapiens
  misc_RNA (1)...(19): siRNA sense strand
ccucagaagcaucgugaaa

SEQ ID NO: 904314 - RNA, 19 nt, Homo sapiens
  misc_RNA (1)...(19): siRNA sense strand
gaaaagccuccuucugguu

SEQ ID NO: 904315 - RNA, 19 nt, Homo sapiens
  misc_RNA (1)...(19): siRNA sense strand
ccaccaaucagaucagucu

SEQ ID NO: 904316 - RNA, 19 nt, Homo sapiens
  misc_RNA (1)...(19): siRNA sense strand
ugacagaggugcuuuucca

SEQ ID NO: 904317 - RNA, 19 nt, Homo sapiens
  misc_RNA (1)...(19): siRNA sense strand
ugaauuugccaccaccaau

SEQ ID NO: 904318 - RNA, 19 nt, Homo sapiens
  misc_RNA (1)...(19): siRNA sense strand
cgaaagugcgguuguggau

SEQ ID NO: 904319 - RNA, 19 nt, Homo sapiens
  misc_RNA (1)...(19): siRNA sense strand
ugaaagcacugaaacauuu

SEQ ID NO: 904320 - RNA, 19 nt, Homo sapiens
  misc_RNA (1)...(19): siRNA sense strand
gaagaaauccugaaacaga

SEQ ID NO: 904321 - RNA, 19 nt, Homo sapiens
  misc_RNA (1)...(19): siRNA sense strand
gagaagaaauccugaaaca

SEQ ID NO: 904322 - RNA, 19 nt, Homo sapiens
  misc_RNA (1)...(19): siRNA sense strand
gaucaaaccugcagaugug

SEQ ID NO: 904323 - RNA, 19 nt, Homo sapiens
  misc_RNA (1)...(19): siRNA sense strand
gaacagaaacgccuaagag

SEQ ID NO: 904324 - RNA, 19 nt, Homo sapiens
  misc_RNA (1)...(19): siRNA sense strand
gaacuguuguuucucuuuc

SEQ ID NO: 904325 - RNA, 19 nt, Homo sapiens
  misc_RNA (1)...(19): siRNA sense strand
cacaaagccuggcgugaaa

SEQ ID NO: 904326 - RNA, 19 nt, Homo sapiens
  misc_RNA (1)...(19): siRNA sense strand
aaaccaggaugucaguauu

SEQ ID NO: 904327 - RNA, 19 nt, Homo sapiens
  misc_RNA (1)...(19): siRNA sense strand
cagcacaagugaaaccuau

SEQ ID NO: 904328 - RNA, 19 nt, Homo sapiens
  misc_RNA (1)...(19): siRNA sense strand
gcuuaaagauagaagaaca

SEQ ID NO: 904329 - RNA, 19 nt, Homo sapiens
  misc_RNA (1)...(19): siRNA sense strand
gggaaagacggaagugaaa

SEQ ID NO: 904330 - RNA, 19 nt, Homo sapiens
  misc_RNA (1)...(19): siRNA sense strand
gaagaacagaaacgccuaa

SEQ ID NO: 904331 - RNA, 19 nt, Homo sapiens
  misc_RNA (1)...(19): siRNA sense strand
aagaaauccugaaacagaa

SEQ ID NO: 904332 - RNA, 19 nt, Homo sapiens
  misc_RNA (1)...(19): siRNA sense strand
gaaagacggaagugaaagu

SEQ ID NO: 904333 - RNA, 19 nt, Homo sapiens
  misc_RNA (1)...(19): siRNA sense strand
caacaugcaguaucaagga

SEQ ID NO: 904334 - RNA, 19 nt, Homo sapiens
  misc_RNA (1)...(19): siRNA sense strand
gugccaacaugcaguauca

SEQ ID NO: 904335 - RNA, 19 nt, Homo sapiens
  misc_RNA (1)...(19): siRNA sense strand
cauaauacaacuucucaga

SEQ ID NO: 904336 - RNA, 19 nt, Homo sapiens
  misc_RNA (1)...(19): siRNA sense strand
cagaaacgccuaagagaag

SEQ ID NO: 904337 - RNA, 19 nt, Homo sapiens
  misc_RNA (1)...(19): siRNA sense strand
gaaagcacugaaacauuug

SEQ ID NO: 904338 - RNA, 19 nt, Homo sapiens
  misc_RNA (1)...(19): siRNA sense strand
gaugaaagcacugaaacau

SEQ ID NO: 904339 - RNA, 19 nt, Homo sapiens
  misc_RNA (1)...(19): siRNA sense strand
auaaagugcucccgaucaa

SEQ ID NO: 904340 - RNA, 19 nt, Homo sapiens
  misc_RNA (1)...(19): siRNA sense strand
agacggaagugaaagucaa

SEQ ID NO: 904341 - RNA, 19 nt, Homo sapiens
  misc_RNA (1)...(19): siRNA sense strand
gguuauaucgcuuaaagau

SEQ ID NO: 904342 - RNA, 19 nt, Homo sapiens
  misc_RNA (1)...(19): siRNA sense strand
gaggaaacaagguuauauc

SEQ ID NO: 904343 - RNA, 19 nt, Homo sapiens
  misc_RNA (1)...(19): siRNA sense strand
caacagaugaaagcacuga

SEQ ID NO: 904344 - RNA, 19 nt, Homo sapiens
  misc_RNA (1)...(19): siRNA sense strand
uaucaaggacaacagauga

SEQ ID NO: 904345 - RNA, 19 nt, Homo sapiens
  misc_RNA (1)...(19): siRNA sense strand
ugaugaagaugaggaaaca

SEQ ID NO: 904346 - RNA, 19 nt, Homo sapiens
  misc_RNA (1)...(19): siRNA sense strand
aagguuauaucgcuuaaag

SEQ ID NO: 904347 - RNA, 19 nt, Homo sapiens
  misc_RNA (1)...(19): siRNA sense strand
gcccucagcacaagugaaa

SEQ ID NO: 904348 - RNA, 19 nt, Homo sapiens
  misc_RNA (1)...(19): siRNA sense strand
acacaaagccuggcgugaa

SEQ ID NO: 904349 - RNA, 19 nt, Homo sapiens
  misc_RNA (1)...(19): siRNA sense strand
acagaaacgccuaagagaa

SEQ ID NO: 904350 - RNA, 19 nt, Homo sapiens
  misc_RNA (1)...(19): siRNA sense strand
gcacaggucagacaaaaug

SEQ ID NO: 904351 - RNA, 19 nt, Homo sapiens
  misc_RNA (1)...(19): siRNA sense strand
acaagguuauaucgcuuaa

SEQ ID NO: 904352 - RNA, 19 nt, Homo sapiens
  misc_RNA (1)...(19): siRNA sense strand
ggaagagcaggcacuguca

SEQ ID NO: 904353 - RNA, 19 nt, Homo sapiens
  misc_RNA (1)...(19): siRNA sense strand
uaugaacuguuguuucucu

SEQ ID NO: 904354 - RNA, 19 nt, Homo sapiens
  misc_RNA (1)...(19): siRNA sense strand
agaguuuccugaugaagau

SEQ ID NO: 904355 - RNA, 19 nt, Homo sapiens
  misc_RNA (1)...(19): siRNA sense strand
gccguugcauccuccauug

SEQ ID NO: 904356 - RNA, 19 nt, Homo sapiens
  misc_RNA (1)...(19): siRNA sense strand
gaagaugaggaaacaaggu

SEQ ID NO: 904357 - RNA, 19 nt, Homo sapiens
  misc_RNA (1)...(19): siRNA sense strand
aaccauuuaugaacuguug

SEQ ID NO: 904358 - RNA, 19 nt, Homo sapiens
  misc_RNA (1)...(19): siRNA sense strand
gaugaggaaacaagguuau

SEQ ID NO: 904359 - RNA, 19 nt, Homo sapiens
  misc_RNA (1)...(19): siRNA sense strand
cauaaagugcucccgauca

SEQ ID NO: 904360 - RNA, 19 nt, Homo sapiens
  misc_RNA (1)...(19): siRNA sense strand
gugauuaugcccgguguaa

SEQ ID NO: 904361 - RNA, 19 nt, Homo sapiens
  misc_RNA (1)...(19): siRNA sense strand
gagacagaccagaacaguu

SEQ ID NO: 904362 - RNA, 19 nt, Homo sapiens
  misc_RNA (1)...(19): siRNA sense strand
cugaaacauuugagacaga

SEQ ID NO: 904363 - RNA, 19 nt, Homo sapiens
  misc_RNA (1)...(19): siRNA sense strand
agaaacgccuaagagaaga

SEQ ID NO: 904364 - RNA, 19 nt, Homo sapiens
  misc_RNA (1)...(19): siRNA sense strand
ggaugucaguauuucaaac

SEQ ID NO: 904365 - RNA, 19 nt, Homo sapiens
  misc_RNA (1)...(19): siRNA sense strand
uaagagaagaaauccugaa

SEQ ID NO: 904366 - RNA, 19 nt, Homo sapiens
  misc_RNA (1)...(19): siRNA sense strand
gaaacgccuaagagaagaa

SEQ ID NO: 904367 - RNA, 19 nt, Homo sapiens
  misc_RNA (1)...(19): siRNA sense strand
cagaguuuccugaugaaga

SEQ ID NO: 904368 - RNA, 19 nt, Homo sapiens
  misc_RNA (1)...(19): siRNA sense strand
ccaaggucagggugauuaa

SEQ ID NO: 904369 - RNA, 19 nt, Homo sapiens
  misc_RNA (1)...(19): siRNA sense strand
ucaaggacaacagaugaaa

SEQ ID NO: 904370 - RNA, 19 nt, Homo sapiens
  misc_RNA (1)...(19): siRNA sense strand
caucacccaccaacgguaa

SEQ ID NO: 904371 - RNA, 19 nt, Homo sapiens
  misc_RNA (1)...(19): siRNA sense strand
aagagaagaaauccugaaa

SEQ ID NO: 904372 - RNA, 19 nt, Homo sapiens
  misc_RNA (1)...(19): siRNA sense strand
ggcauaauacaacuucuca

SEQ ID NO: 904373 - RNA, 19 nt, Homo sapiens
  misc_RNA (1)...(19): siRNA sense strand
gcacaagugaaaccuaucg

SEQ ID NO: 904374 - RNA, 19 nt, Homo sapiens
  misc_RNA (1)...(19): siRNA sense strand
gccaaggaacagcaauuug

SEQ ID NO: 904375 - RNA, 19 nt, Homo sapiens
  misc_RNA (1)...(19): siRNA sense strand
acagaugaaagcacugaaa

SEQ ID NO: 904376 - RNA, 19 nt, Homo sapiens
  misc_RNA (1)...(19): siRNA sense strand
ccagugccaacaugcagua

SEQ ID NO: 904377 - RNA, 19 nt, Homo sapiens
  misc_RNA (1)...(19): siRNA sense strand
caggaugucaguauuucaa

SEQ ID NO: 904378 - RNA, 19 nt, Homo sapiens
  misc_RNA (1)...(19): siRNA sense strand
gacaaaaugugaagaacag

SEQ ID NO: 904379 - RNA, 19 nt, Homo sapiens
  misc_RNA (1)...(19): siRNA sense strand
ugaggaaacaagguuauau

SEQ ID NO: 904380 - RNA, 19 nt, Homo sapiens
  misc_RNA (1)...(19): siRNA sense strand
ggaaagacggaagugaaag

SEQ ID NO: 904381 - RNA, 19 nt, Homo sapiens
  misc_RNA (1)...(19): siRNA sense strand
gcgccaaggaacagcaauu

SEQ ID NO: 904382 - RNA, 19 nt, Homo sapiens
  misc_RNA (1)...(19): siRNA sense strand
cgaucaaaccugcagaugu

SEQ ID NO: 904383 - RNA, 19 nt, Homo sapiens
  misc_RNA (1)...(19): siRNA sense strand
gguguaaccauuuaugaac

SEQ ID NO: 904384 - RNA, 19 nt, Homo sapiens
  misc_RNA (1)...(19): siRNA sense strand
ugucaguauuucaaacguu

SEQ ID NO: 904385 - RNA, 19 nt, Homo sapiens
  misc_RNA (1)...(19): siRNA sense strand
gagcaggcacugucaccau

SEQ ID NO: 904386 - RNA, 19 nt, Homo sapiens
  misc_RNA (1)...(19): siRNA sense strand
uggcucaaccuaaagaaga

SEQ ID NO: 904387 - RNA, 19 nt, Homo sapiens
  misc_RNA (1)...(19): siRNA sense strand
cccuguggcucaaccuaaa

SEQ ID NO: 904388 - RNA, 19 nt, Homo sapiens
  misc_RNA (1)...(19): siRNA sense strand
gugaaagucaagccagcua

SEQ ID NO: 904389 - RNA, 19 nt, Homo sapiens
  misc_RNA (1)...(19): siRNA sense strand
guaucaaggacaacagaug

SEQ ID NO: 904390 - RNA, 19 nt, Homo sapiens
  misc_RNA (1)...(19): siRNA sense strand
caugcaguaucaaggacaa

SEQ ID NO: 904391 - RNA, 19 nt, Homo sapiens
  misc_RNA (1)...(19): siRNA sense strand
gcuccaaggucagggugau

SEQ ID NO: 904392 - RNA, 19 nt, Homo sapiens
  misc_RNA (1)...(19): siRNA sense strand
uaaagugcucccgaucaaa

SEQ ID NO: 904393 - RNA, 19 nt, Homo sapiens
  misc_RNA (1)...(19): siRNA sense strand
ugaacuguuguuucucuuu

SEQ ID NO: 904394 - RNA, 19 nt, Homo sapiens
  misc_RNA (1)...(19): siRNA sense strand
ugcccgguguaaccauuua

SEQ ID NO: 904395 - RNA, 19 nt, Homo sapiens
  misc_RNA (1)...(19): siRNA sense strand
ggagagacucgcgcagcaa

SEQ ID NO: 904396 - RNA, 19 nt, Homo sapiens
  misc_RNA (1)...(19): siRNA sense strand
ccugaaacagaaggaguua

SEQ ID NO: 904397 - RNA, 19 nt, Homo sapiens
  misc_RNA (1)...(19): siRNA sense strand
gcccuguggcucaaccuaa

SEQ ID NO: 904398 - RNA, 19 nt, Homo sapiens
  misc_RNA (1)...(19): siRNA sense strand
guaaccauuuaugaacugu

SEQ ID NO: 904399 - RNA, 19 nt, Homo sapiens
  misc_RNA (1)...(19): siRNA sense strand
guguaaccauuuaugaacu

SEQ ID NO: 904400 - RNA, 19 nt, Homo sapiens
  misc_RNA (1)...(19): siRNA sense strand
uccaaggucagggugauua

SEQ ID NO: 904401 - RNA, 19 nt, Homo sapiens
  misc_RNA (1)...(19): siRNA sense strand
cgccaaggaacagcaauuu

SEQ ID NO: 904402 - RNA, 19 nt, Homo sapiens
  misc_RNA (1)...(19): siRNA sense strand
cauuugagacagaccagaa

SEQ ID NO: 904403 - RNA, 19 nt, Homo sapiens
  misc_RNA (1)...(19): siRNA sense strand
uguaaccauuuaugaacug

SEQ ID NO: 904404 - RNA, 19 nt, Homo sapiens
  misc_RNA (1)...(19): siRNA sense strand
gugcacaggucagacaaaa

SEQ ID NO: 904405 - RNA, 19 nt, Homo sapiens
  misc_RNA (1)...(19): siRNA sense strand
aacaagguuauaucgcuua

SEQ ID NO: 904406 - RNA, 19 nt, Homo sapiens
  misc_RNA (1)...(19): siRNA sense strand
uguuguuucucuuucuuug

SEQ ID NO: 904407 - RNA, 19 nt, Homo sapiens
  misc_RNA (1)...(19): siRNA sense strand
aacagaaacgccuaagaga

SEQ ID NO: 904408 - RNA, 19 nt, Homo sapiens
  misc_RNA (1)...(19): siRNA sense strand
aacagaguuuccugaugaa

SEQ ID NO: 904409 - RNA, 19 nt, Homo sapiens
  misc_RNA (1)...(19): siRNA sense strand
uaugcccgguguaaccauu

SEQ ID NO: 904410 - RNA, 19 nt, Homo sapiens
  misc_RNA (1)...(19): siRNA sense strand
caaggacaacagaugaaag

SEQ ID NO: 904411 - RNA, 19 nt, Homo sapiens
  misc_RNA (1)...(19): siRNA sense strand
gggcuccggcauaauacaa

SEQ ID NO: 904412 - RNA, 19 nt, Homo sapiens
  misc_RNA (1)...(19): siRNA sense strand
aaccaggaugucaguauuu

SEQ ID NO: 904413 - RNA, 19 nt, Homo sapiens
  misc_RNA (1)...(19): siRNA sense strand
gcaggcacugucaccauca

SEQ ID NO: 904414 - RNA, 19 nt, Homo sapiens
  misc_RNA (1)...(19): siRNA sense strand
uugcgugaauuacccauag

SEQ ID NO: 904415 - RNA, 19 nt, Homo sapiens
  misc_RNA (1)...(19): siRNA sense strand
ucgcuuaaagauagaagaa

SEQ ID NO: 904416 - RNA, 19 nt, Homo sapiens
  misc_RNA (1)...(19): siRNA sense strand
agaugaggaaacaagguua

SEQ ID NO: 904417 - RNA, 19 nt, Homo sapiens
  misc_RNA (1)...(19): siRNA sense strand
aagaugaggaaacaagguu

SEQ ID NO: 904418 - RNA, 19 nt, Homo sapiens
  misc_RNA (1)...(19): siRNA sense strand
gcaagaggagcuuccacua

SEQ ID NO: 904419 - RNA, 19 nt, Homo sapiens
  misc_RNA (1)...(19): siRNA sense strand
ggaggagggcaaagagaaa

SEQ ID NO: 904420 - RNA, 19 nt, Homo sapiens
  misc_RNA (1)...(19): siRNA sense strand
gaggcacccguuacagaua

SEQ ID NO: 904421 - RNA, 19 nt, Homo sapiens
  misc_RNA (1)...(19): siRNA sense strand
ggaggcacccguuacagau

SEQ ID NO: 904422 - RNA, 19 nt, Homo sapiens
  misc_RNA (1)...(19): siRNA sense strand
caaauugggaggaagaagu

SEQ ID NO: 904423 - RNA, 19 nt, Homo sapiens
  misc_RNA (1)...(19): siRNA sense strand
aaauugggaggaagaagua

SEQ ID NO: 904424 - RNA, 19 nt, Homo sapiens
  misc_RNA (1)...(19): siRNA sense strand
caucaugaaccuccucuuc

SEQ ID NO: 904425 - RNA, 19 nt, Homo sapiens
  misc_RNA (1)...(19): siRNA sense strand
gaaccuccucuucaacauc

SEQ ID NO: 904426 - RNA, 19 nt, Homo sapiens
  misc_RNA (1)...(19): siRNA sense strand
gcgcaaauugggaggaaga

SEQ ID NO: 904427 - RNA, 19 nt, Homo sapiens
  misc_RNA (1)...(19): siRNA sense strand
caagaggagcuuccacuac

SEQ ID NO: 904428 - RNA, 19 nt, Homo sapiens
  misc_RNA (1)...(19): siRNA sense strand
ccaccaacaucaugaaccu

SEQ ID NO: 904429 - RNA, 19 nt, Homo sapiens
  misc_RNA (1)...(19): siRNA sense strand
gaggaggagggcaaagaga

SEQ ID NO: 904430 - RNA, 19 nt, Homo sapiens
  misc_RNA (1)...(19): siRNA sense strand
caccugauggcgcaaauug

SEQ ID NO: 904431 - RNA, 19 nt, Homo sapiens
  misc_RNA (1)...(19): siRNA sense strand
gcugaugccgguccacuuc

SEQ ID NO: 904432 - RNA, 19 nt, Homo sapiens
  misc_RNA (1)...(19): siRNA sense strand
ggaggaggagggcaaagag

SEQ ID NO: 904433 - RNA, 19 nt, Homo sapiens
  misc_RNA (1)...(19): siRNA sense strand
caaagccaagcccaucuuc

SEQ ID NO: 904434 - RNA, 19 nt, Homo sapiens
  misc_RNA (1)...(19): siRNA sense strand
ucaacaccgcccugucuga

SEQ ID NO: 904435 - RNA, 19 nt, Homo sapiens
  misc_RNA (1)...(19): siRNA sense strand
cggaggcacccguuacaga

SEQ ID NO: 904436 - RNA, 19 nt, Homo sapiens
  misc_RNA (1)...(19): siRNA sense strand
ucaaagacaucgacaagaa

SEQ ID NO: 904437 - RNA, 19 nt, Homo sapiens
  misc_RNA (1)...(19): siRNA sense strand
caagauccaucccaagaaa

SEQ ID NO: 904438 - RNA, 19 nt, Homo sapiens
  misc_RNA (1)...(19): siRNA sense strand
ggucagcaguggaauuuau

SEQ ID NO: 904439 - RNA, 19 nt, Homo sapiens
  misc_RNA (1)...(19): siRNA sense strand
ucacagaguuccaagacaa

SEQ ID NO: 904440 - RNA, 19 nt, Homo sapiens
  misc_RNA (1)...(19): siRNA sense strand
gaacgacgaccuccucuuc

SEQ ID NO: 904441 - RNA, 19 nt, Homo sapiens
  misc_RNA (1)...(19): siRNA sense strand
gacaagaagucggacauug

SEQ ID NO: 904442 - RNA, 19 nt, Homo sapiens
  misc_RNA (1)...(19): siRNA sense strand
gaccgagucuccucuccua

SEQ ID NO: 904443 - RNA, 19 nt, Homo sapiens
  misc_RNA (1)...(19): siRNA sense strand
caacgggcguccucuagug

SEQ ID NO: 904444 - RNA, 19 nt, Homo sapiens
  misc_RNA (1)...(19): siRNA sense strand
gaggucagcaguggaauuu

SEQ ID NO: 904445 - RNA, 19 nt, Homo sapiens
  misc_RNA (1)...(19): siRNA sense strand
gaucaaagacuggaagaag

SEQ ID NO: 904446 - RNA, 19 nt, Homo sapiens
  misc_RNA (1)...(19): siRNA sense strand
ggacauugccaccaucaag

SEQ ID NO: 904447 - RNA, 19 nt, Homo sapiens
  misc_RNA (1)...(19): siRNA sense strand
ucacacgguuccucacaga

SEQ ID NO: 904448 - RNA, 19 nt, Homo sapiens
  misc_RNA (1)...(19): siRNA sense strand
gguucuggcuucaucaugu

SEQ ID NO: 904449 - RNA, 19 nt, Homo sapiens
  misc_RNA (1)...(19): siRNA sense strand
aagacaagcagaucaaaga

SEQ ID NO: 904450 - RNA, 19 nt, Homo sapiens
  misc_RNA (1)...(19): siRNA sense strand
caucaaagacaucgacaag

SEQ ID NO: 904451 - RNA, 19 nt, Homo sapiens
  misc_RNA (1)...(19): siRNA sense strand
ucagagaggcggcauccaa

SEQ ID NO: 904452 - RNA, 19 nt, Homo sapiens
  misc_RNA (1)...(19): siRNA sense strand
aaagcucccuguguuguug

SEQ ID NO: 904453 - RNA, 19 nt, Homo sapiens
  misc_RNA (1)...(19): siRNA sense strand
gcaggcagcagcucaaggu

SEQ ID NO: 904454 - RNA, 19 nt, Homo sapiens
  misc_RNA (1)...(19): siRNA sense strand
gacauugccaccaucaaga

SEQ ID NO: 904455 - RNA, 19 nt, Homo sapiens
  misc_RNA (1)...(19): siRNA sense strand
ccagaggucagcaguggaa

SEQ ID NO: 904456 - RNA, 19 nt, Homo sapiens
  misc_RNA (1)...(19): siRNA sense strand
cagcgguucuggcuucauc

SEQ ID NO: 904457 - RNA, 19 nt, Homo sapiens
  misc_RNA (1)...(19): siRNA sense strand
caagagguugcgccgaauu

SEQ ID NO: 904458 - RNA, 19 nt, Homo sapiens
  misc_RNA (1)...(19): siRNA sense strand
ggucaacgggcguccucua

SEQ ID NO: 904459 - RNA, 19 nt, Homo sapiens
  misc_RNA (1)...(19): siRNA sense strand
gagaggcggcauccaagau

SEQ ID NO: 904460 - RNA, 19 nt, Homo sapiens
  misc_RNA (1)...(19): siRNA sense strand
ucaaggugcagcuacagaa

SEQ ID NO: 904461 - RNA, 19 nt, Homo sapiens
  misc_RNA (1)...(19): siRNA sense strand
ucaagauccaucccaagaa

SEQ ID NO: 904462 - RNA, 19 nt, Homo sapiens
  misc_RNA (1)...(19): siRNA sense strand
caaagacaucgacaagaag

SEQ ID NO: 904463 - RNA, 19 nt, Homo sapiens
  misc_RNA (1)...(19): siRNA sense strand
caguggaauuuaugugcaa

SEQ ID NO: 904464 - RNA, 19 nt, Homo sapiens
  misc_RNA (1)...(19): siRNA sense strand
cuacagaacacagugacaa

SEQ ID NO: 904465 - RNA, 19 nt, Homo sapiens
  misc_RNA (1)...(19): siRNA sense strand
ccuaugaggccaccaucaa

SEQ ID NO: 904466 - RNA, 19 nt, Homo sapiens
  misc_RNA (1)...(19): siRNA sense strand
caagacaagcagaucaaag

SEQ ID NO: 904467 - RNA, 19 nt, Homo sapiens
  misc_RNA (1)...(19): siRNA sense strand
uugcugacgugguggagaa

SEQ ID NO: 904468 - RNA, 19 nt, Homo sapiens
  misc_RNA (1)...(19): siRNA sense strand
caaggugcagcuacagaau

SEQ ID NO: 904469 - RNA, 19 nt, Homo sapiens
  misc_RNA (1)...(19): siRNA sense strand
ccaagacaagcagaucaaa

SEQ ID NO: 904470 - RNA, 19 nt, Homo sapiens
  misc_RNA (1)...(19): siRNA sense strand
ugagacacccgcuguuugg

SEQ ID NO: 904471 - RNA, 19 nt, Homo sapiens
  misc_RNA (1)...(19): siRNA sense strand
cuaugaggccaccaucaaa

SEQ ID NO: 904472 - RNA, 19 nt, Homo sapiens
  misc_RNA (1)...(19): siRNA sense strand
cacgguuccucacagaguu

SEQ ID NO: 904473 - RNA, 19 nt, Homo sapiens
  misc_RNA (1)...(19): siRNA sense strand
cgagucuccucuccuacug

SEQ ID NO: 904474 - RNA, 19 nt, Homo sapiens
  misc_RNA (1)...(19): siRNA sense strand
ggaacgacgaccuccucuu

SEQ ID NO: 904475 - RNA, 19 nt, Homo sapiens
  misc_RNA (1)...(19): siRNA sense strand
ccugagacacccgcuguuu

SEQ ID NO: 904476 - RNA, 19 nt, Homo sapiens
  misc_RNA (1)...(19): siRNA sense strand
aaagacaucgacaagaagu

SEQ ID NO: 904477 - RNA, 19 nt, Homo sapiens
  misc_RNA (1)...(19): siRNA sense strand
gcaucaacacgcucaaggu

SEQ ID NO: 904478 - RNA, 19 nt, Homo sapiens
  misc_RNA (1)...(19): siRNA sense strand
gcagucccuucgcccuaca

SEQ ID NO: 904479 - RNA, 19 nt, Homo sapiens
  misc_RNA (1)...(19): siRNA sense strand
gcaccuacuucaccaccau

SEQ ID NO: 904480 - RNA, 19 nt, Homo sapiens
  misc_RNA (1)...(19): siRNA sense strand
caaguucgucuucgagaug

SEQ ID NO: 904481 - RNA, 19 nt, Homo sapiens
  misc_RNA (1)...(19): siRNA sense strand
gggcucagcaccuacuuca

SEQ ID NO: 904482 - RNA, 19 nt, Homo sapiens
  misc_RNA (1)...(19): siRNA sense strand
ucaaguucgucuucgagau

SEQ ID NO: 904483 - RNA, 19 nt, Homo sapiens
  misc_RNA (1)...(19): siRNA sense strand
gcgccugucgggucaacua

SEQ ID NO: 904484 - RNA, 19 nt, Homo sapiens
  misc_RNA (1)...(19): siRNA sense strand
gcucugguucggccucauu

SEQ ID NO: 904485 - RNA, 19 nt, Homo sapiens
  misc_RNA (1)...(19): siRNA sense strand
guucuuagccaguuucuug

SEQ ID NO: 904486 - RNA, 19 nt, Homo sapiens
  misc_RNA (1)...(19): siRNA sense strand
ugguugagcucagggaaua

SEQ ID NO: 904487 - RNA, 19 nt, Homo sapiens
  misc_RNA (1)...(19): siRNA sense strand
cagggaauaugguucuuag

SEQ ID NO: 904488 - RNA, 19 nt, Homo sapiens
  misc_RNA (1)...(19): siRNA sense strand
gccaguuucuuggugauau

SEQ ID NO: 904489 - RNA, 19 nt, Homo sapiens
  misc_RNA (1)...(19): siRNA sense strand
gagcucagggaauaugguu

SEQ ID NO: 904490 - RNA, 19 nt, Homo sapiens
  misc_RNA (1)...(19): siRNA sense strand
ucagggaauaugguucuua

SEQ ID NO: 904491 - RNA, 19 nt, Homo sapiens
  misc_RNA (1)...(19): siRNA sense strand
gcucagggaauaugguucu

SEQ ID NO: 904492 - RNA, 19 nt, Homo sapiens
  misc_RNA (1)...(19): siRNA sense strand
ccaguuucuuggugauauc

SEQ ID NO: 904493 - RNA, 19 nt, Homo sapiens
  misc_RNA (1)...(19): siRNA sense strand
gcggucagguccaucauac

SEQ ID NO: 904494 - RNA, 19 nt, Homo sapiens
  misc_RNA (1)...(19): siRNA sense strand
gcggucagguccaucauac

SEQ ID NO: 904495 - RNA, 19 nt, Homo sapiens
  misc_RNA (1)...(19): siRNA sense strand
gcggucagguccaucauac

SEQ ID NO: 904496 - RNA, 19 nt, Homo sapiens
  misc_RNA (1)...(19): siRNA sense strand
gcggucagguccaucauac

SEQ ID NO: 904497 - RNA, 19 nt, Homo sapiens
  misc_RNA (1)...(19): siRNA sense strand
gcggucagguccaucauac

SEQ ID NO: 904498 - RNA, 19 nt, Homo sapiens
  misc_RNA (1)...(19): siRNA sense strand
gcggucagguccaucauac

SEQ ID NO: 904499 - RNA, 19 nt, Homo sapiens
  misc_RNA (1)...(19): siRNA sense strand
ggucagguccaucauacag

SEQ ID NO: 904500 - RNA, 19 nt, Homo sapiens
  misc_RNA (1)...(19): siRNA sense strand
ggucagguccaucauacag

SEQ ID NO: 904501 - RNA, 19 nt, Homo sapiens
  misc_RNA (1)...(19): siRNA sense strand
caagaaagauaccaugauu

SEQ ID NO: 904502 - RNA, 19 nt, Homo sapiens
  misc_RNA (1)...(19): siRNA sense strand
gaacacagcgggacugaug

SEQ ID NO: 904503 - RNA, 19 nt, Homo sapiens
  misc_RNA (1)...(19): siRNA sense strand
cagcagagcucaccagaag

SEQ ID NO: 904504 - RNA, 19 nt, Homo sapiens
  misc_RNA (1)...(19): siRNA sense strand
cuccaaaccucacgugaua

SEQ ID NO: 904505 - RNA, 19 nt, Homo sapiens
  misc_RNA (1)...(19): siRNA sense strand
gcugagagaugcauuggau

SEQ ID NO: 904506 - RNA, 19 nt, Homo sapiens
  misc_RNA (1)...(19): siRNA sense strand
guucuaagcauaucuuuga

SEQ ID NO: 904507 - RNA, 19 nt, Homo sapiens
  misc_RNA (1)...(19): siRNA sense strand
agaaagauaccaugauuga

SEQ ID NO: 904508 - RNA, 19 nt, Homo sapiens
  misc_RNA (1)...(19): siRNA sense strand
gagaugcauuggauucaga

SEQ ID NO: 904509 - RNA, 19 nt, Homo sapiens
  misc_RNA (1)...(19): siRNA sense strand
ccagucagcuagcucaguu

SEQ ID NO: 904510 - RNA, 19 nt, Homo sapiens
  misc_RNA (1)...(19): siRNA sense strand
gccauggcauccagucuuu

SEQ ID NO: 904511 - RNA, 19 nt, Homo sapiens
  misc_RNA (1)...(19): siRNA sense strand
gagccucccuccucccauu

SEQ ID NO: 904512 - RNA, 19 nt, Homo sapiens
  misc_RNA (1)...(19): siRNA sense strand
gcccaagaauugagucgaa

SEQ ID NO: 904513 - RNA, 19 nt, Homo sapiens
  misc_RNA (1)...(19): siRNA sense strand
gagaggagggucuggacua

SEQ ID NO: 904514 - RNA, 19 nt, Homo sapiens
  misc_RNA (1)...(19): siRNA sense strand
aaggaugguucuaagcaua

SEQ ID NO: 904515 - RNA, 19 nt, Homo sapiens
  misc_RNA (1)...(19): siRNA sense strand
gcagguggcugaggacuac

SEQ ID NO: 904516 - RNA, 19 nt, Homo sapiens
  misc_RNA (1)...(19): siRNA sense strand
gcaagaaagauaccaugau

SEQ ID NO: 904517 - RNA, 19 nt, Homo sapiens
  misc_RNA (1)...(19): siRNA sense strand
gacaguaacccgccuggaa

SEQ ID NO: 904518 - RNA, 19 nt, Homo sapiens
  misc_RNA (1)...(19): siRNA sense strand
ucaaccaagugucgucuga

SEQ ID NO: 904519 - RNA, 19 nt, Homo sapiens
  misc_RNA (1)...(19): siRNA sense strand
gagugagcaucgagaguug

SEQ ID NO: 904520 - RNA, 19 nt, Homo sapiens
  misc_RNA (1)...(19): siRNA sense strand
gcaagcagcaggagacagu

SEQ ID NO: 904521 - RNA, 19 nt, Homo sapiens
  misc_RNA (1)...(19): siRNA sense strand
cggcuucgcccaagaauug

SEQ ID NO: 904522 - RNA, 19 nt, Homo sapiens
  misc_RNA (1)...(19): siRNA sense strand
ggguggagcugguggaaag

SEQ ID NO: 904523 - RNA, 19 nt, Homo sapiens
  misc_RNA (1)...(19): siRNA sense strand
gaauugagucgaagcuugu

SEQ ID NO: 904524 - RNA, 19 nt, Homo sapiens
  misc_RNA (1)...(19): siRNA sense strand
aaccagaccucacuucauc

SEQ ID NO: 904525 - RNA, 19 nt, Homo sapiens
  misc_RNA (1)...(19): siRNA sense strand
gcauuggauucagagcaua

SEQ ID NO: 904526 - RNA, 19 nt, Homo sapiens
  misc_RNA (1)...(19): siRNA sense strand
gaaagauaccaugauugaa

SEQ ID NO: 904527 - RNA, 19 nt, Homo sapiens
  misc_RNA (1)...(19): siRNA sense strand
agagcuacagcaacaauua

SEQ ID NO: 904528 - RNA, 19 nt, Homo sapiens
  misc_RNA (1)...(19): siRNA sense strand
gaggaaaggcaagcucuga

SEQ ID NO: 904529 - RNA, 19 nt, Homo sapiens
  misc_RNA (1)...(19): siRNA sense strand
ggaagcaagggacgagcua

SEQ ID NO: 904530 - RNA, 19 nt, Homo sapiens
  misc_RNA (1)...(19): siRNA sense strand
gcacagccaccuugcucaa

SEQ ID NO: 904531 - RNA, 19 nt, Homo sapiens
  misc_RNA (1)...(19): siRNA sense strand
uggcauuggugcagucuga

SEQ ID NO: 904532 - RNA, 19 nt, Homo sapiens
  misc_RNA (1)...(19): siRNA sense strand
gccagggccuccacucaau

SEQ ID NO: 904533 - RNA, 19 nt, Homo sapiens
  misc_RNA (1)...(19): siRNA sense strand
gcagagcucaccagaagca

SEQ ID NO: 904534 - RNA, 19 nt, Homo sapiens
  misc_RNA (1)...(19): siRNA sense strand
cagcaagagcaccagcuua

SEQ ID NO: 904535 - RNA, 19 nt, Homo sapiens
  misc_RNA (1)...(19): siRNA sense strand
ccagcucuaugcuucuuug

SEQ ID NO: 904536 - RNA, 19 nt, Homo sapiens
  misc_RNA (1)...(19): siRNA sense strand
caagugucgucugaaguga

SEQ ID NO: 904537 - RNA, 19 nt, Homo sapiens
  misc_RNA (1)...(19): siRNA sense strand
ggaaggagagcuggauaca

SEQ ID NO: 904538 - RNA, 19 nt, Homo sapiens
  misc_RNA (1)...(19): siRNA sense strand
ccaagugucgucugaagug

SEQ ID NO: 904539 - RNA, 19 nt, Homo sapiens
  misc_RNA (1)...(19): siRNA sense strand
gagcgccuccuguucuuug

SEQ ID NO: 904540 - RNA, 19 nt, Homo sapiens
  misc_RNA (1)...(19): siRNA sense strand
ucagcuagcucaguucaag

SEQ ID NO: 904541 - RNA, 19 nt, Homo sapiens
  misc_RNA (1)...(19): siRNA sense strand
aaagauaccaugauugaac

SEQ ID NO: 904542 - RNA, 19 nt, Homo sapiens
  misc_RNA (1)...(19): siRNA sense strand
caaaccagaccucacuuca

SEQ ID NO: 904543 - RNA, 19 nt, Homo sapiens
  misc_RNA (1)...(19): siRNA sense strand
cagcagagccgggaagcaa

SEQ ID NO: 904544 - RNA, 19 nt, Homo sapiens
  misc_RNA (1)...(19): siRNA sense strand
ggacuccuuugacagugau

SEQ ID NO: 904545 - RNA, 19 nt, Homo sapiens
  misc_RNA (1)...(19): siRNA sense strand
gagcccagcuguauuuacc

SEQ ID NO: 904546 - RNA, 19 nt, Homo sapiens
  misc_RNA (1)...(19): siRNA sense strand
agcaggagcuggccaguca

SEQ ID NO: 904547 - RNA, 19 nt, Homo sapiens
  misc_RNA (1)...(19): siRNA sense strand
ucagggaacaucacaggaa

SEQ ID NO: 904548 - RNA, 19 nt, Homo sapiens
  misc_RNA (1)...(19): siRNA sense strand
uaacccgccuggaacaaag

SEQ ID NO: 904549 - RNA, 19 nt, Homo sapiens
  misc_RNA (1)...(19): siRNA sense strand
aagauaccaugauugaaca

SEQ ID NO: 904550 - RNA, 19 nt, Homo sapiens
  misc_RNA (1)...(19): siRNA sense strand
gggcugggcaacugaguga

SEQ ID NO: 904551 - RNA, 19 nt, Homo sapiens
  misc_RNA (1)...(19): siRNA sense strand
ugagagaugcauuggauuc

SEQ ID NO: 904552 - RNA, 19 nt, Homo sapiens
  misc_RNA (1)...(19): siRNA sense strand
caagagcaccagcuuaagg

SEQ ID NO: 904553 - RNA, 19 nt, Homo sapiens
  misc_RNA (1)...(19): siRNA sense strand
ggaaaagaacuugaagaaa

SEQ ID NO: 904554 - RNA, 19 nt, Homo sapiens
  misc_RNA (1)...(19): siRNA sense strand
gauaauguccccagaagga

SEQ ID NO: 904555 - RNA, 19 nt, Homo sapiens
  misc_RNA (1)...(19): siRNA sense strand
ggagaugggcuuacauucc

SEQ ID NO: 904556 - RNA, 19 nt, Homo sapiens
  misc_RNA (1)...(19): siRNA sense strand
ggagacccagcaccaguug

SEQ ID NO: 904557 - RNA, 19 nt, Homo sapiens
  misc_RNA (1)...(19): siRNA sense strand
agcaagagcaccagcuuaa

SEQ ID NO: 904558 - RNA, 19 nt, Homo sapiens
  misc_RNA (1)...(19): siRNA sense strand
cuaucgggauccucucauu

SEQ ID NO: 904559 - RNA, 19 nt, Homo sapiens
  misc_RNA (1)...(19): siRNA sense strand
gagcuacagcaacaauuag

SEQ ID NO: 904560 - RNA, 19 nt, Homo sapiens
  misc_RNA (1)...(19): siRNA sense strand
ugauggaggugucucaacu

SEQ ID NO: 904561 - RNA, 19 nt, Homo sapiens
  misc_RNA (1)...(19): siRNA sense strand
guggagaugggcuuacauu

SEQ ID NO: 904562 - RNA, 19 nt, Homo sapiens
  misc_RNA (1)...(19): siRNA sense strand
gcaacugagugagcaucga

SEQ ID NO: 904563 - RNA, 19 nt, Homo sapiens
  misc_RNA (1)...(19): siRNA sense strand
guaacccgccuggaacaaa

SEQ ID NO: 904564 - RNA, 19 nt, Homo sapiens
  misc_RNA (1)...(19): siRNA sense strand
ccugcagacccgaguguua

SEQ ID NO: 904565 - RNA, 19 nt, Homo sapiens
  misc_RNA (1)...(19): siRNA sense strand
aaaccaaaguucccuuagc

SEQ ID NO: 904566 - RNA, 19 nt, Homo sapiens
  misc_RNA (1)...(19): siRNA sense strand
ccucaagugccacguauuc

SEQ ID NO: 904567 - RNA, 19 nt, Homo sapiens
  misc_RNA (1)...(19): siRNA sense strand
agaggagggucuggacuau

SEQ ID NO: 904568 - RNA, 19 nt, Homo sapiens
  misc_RNA (1)...(19): siRNA sense strand
gccgaccgcaagaaagaua

SEQ ID NO: 904569 - RNA, 19 nt, Homo sapiens
  misc_RNA (1)...(19): siRNA sense strand
gcucggagagagagagaug

SEQ ID NO: 904570 - RNA, 19 nt, Homo sapiens
  misc_RNA (1)...(19): siRNA sense strand
ugagugagcaucgagaguu

SEQ ID NO: 904571 - RNA, 19 nt, Homo sapiens
  misc_RNA (1)...(19): siRNA sense strand
aaaggaugguucuaagcau

SEQ ID NO: 904572 - RNA, 19 nt, Homo sapiens
  misc_RNA (1)...(19): siRNA sense strand
ggaaaggcaagcucugacu

SEQ ID NO: 904573 - RNA, 19 nt, Homo sapiens
  misc_RNA (1)...(19): siRNA sense strand
gcagcagagcucaccagaa

SEQ ID NO: 904574 - RNA, 19 nt, Homo sapiens
  misc_RNA (1)...(19): siRNA sense strand
ccaaaccucacgugauaca

SEQ ID NO: 904575 - RNA, 19 nt, Homo sapiens
  misc_RNA (1)...(19): siRNA sense strand
ccagagagagguggagaug

SEQ ID NO: 904576 - RNA, 19 nt, Homo sapiens
  misc_RNA (1)...(19): siRNA sense strand
caaaaccaaaguucccuua

SEQ ID NO: 904577 - RNA, 19 nt, Homo sapiens
  misc_RNA (1)...(19): siRNA sense strand
gaaagggagaaggagaaga

SEQ ID NO: 904578 - RNA, 19 nt, Homo sapiens
  misc_RNA (1)...(19): siRNA sense strand
gcauugugagcgccauauu

SEQ ID NO: 904579 - RNA, 19 nt, Homo sapiens
  misc_RNA (1)...(19): siRNA sense strand
gagagaugcauuggauuca

SEQ ID NO: 904580 - RNA, 19 nt, Homo sapiens
  misc_RNA (1)...(19): siRNA sense strand
uaccaugauugaacaacug

SEQ ID NO: 904581 - RNA, 19 nt, Homo sapiens
  misc_RNA (1)...(19): siRNA sense strand
gggagacccagcaccaguu

SEQ ID NO: 904582 - RNA, 19 nt, Homo sapiens
  misc_RNA (1)...(19): siRNA sense strand
gcuccaaaccucacgugau

SEQ ID NO: 904583 - RNA, 19 nt, Homo sapiens
  misc_RNA (1)...(19): siRNA sense strand
uugaacaacuggacaagac

SEQ ID NO: 904584 - RNA, 19 nt, Homo sapiens
  misc_RNA (1)...(19): siRNA sense strand
gacccgaguguuagagcua

SEQ ID NO: 904585 - RNA, 19 nt, Homo sapiens
  misc_RNA (1)...(19): siRNA sense strand
acagccaccuugcucaaca

SEQ ID NO: 904586 - RNA, 19 nt, Homo sapiens
  misc_RNA (1)...(19): siRNA sense strand
gcucagagagacgggaaga

SEQ ID NO: 904587 - RNA, 19 nt, Homo sapiens
  misc_RNA (1)...(19): siRNA sense strand
uuucagagccagcauucuu

SEQ ID NO: 904588 - RNA, 19 nt, Homo sapiens
  misc_RNA (1)...(19): siRNA sense strand
aaagggagaaggagaagag

SEQ ID NO: 904589 - RNA, 19 nt, Homo sapiens
  misc_RNA (1)...(19): siRNA sense strand
ggaaagggagaaggagaag

SEQ ID NO: 904590 - RNA, 19 nt, Homo sapiens
  misc_RNA (1)...(19): siRNA sense strand
gcaagagcaccagcuuaag

SEQ ID NO: 904591 - RNA, 19 nt, Homo sapiens
  misc_RNA (1)...(19): siRNA sense strand
cagcaacgggaaagagaga

SEQ ID NO: 904592 - RNA, 19 nt, Homo sapiens
  misc_RNA (1)...(19): siRNA sense strand
cccgagcccagcuguauuu

SEQ ID NO: 904593 - RNA, 19 nt, Homo sapiens
  misc_RNA (1)...(19): siRNA sense strand
ugugagcgccauauucaga

SEQ ID NO: 904594 - RNA, 19 nt, Homo sapiens
  misc_RNA (1)...(19): siRNA sense strand
ccaaaccagaccucacuuc

SEQ ID NO: 904595 - RNA, 19 nt, Homo sapiens
  misc_RNA (1)...(19): siRNA sense strand
aagcuugucagucggauug

SEQ ID NO: 904596 - RNA, 19 nt, Homo sapiens
  misc_RNA (1)...(19): siRNA sense strand
ggaugguucuaagcauauc

SEQ ID NO: 904597 - RNA, 19 nt, Homo sapiens
  misc_RNA (1)...(19): siRNA sense strand
gcaacgggaaagagagaca

SEQ ID NO: 904598 - RNA, 19 nt, Homo sapiens
  misc_RNA (1)...(19): siRNA sense strand
aaccaagugucgucugaag

SEQ ID NO: 904599 - RNA, 19 nt, Homo sapiens
  misc_RNA (1)...(19): siRNA sense strand
gauacagcucggagagaga

SEQ ID NO: 904600 - RNA, 19 nt, Homo sapiens
  misc_RNA (1)...(19): siRNA sense strand
uggaaagggagaaggagaa

SEQ ID NO: 904601 - RNA, 19 nt, Homo sapiens
  misc_RNA (1)...(19): siRNA sense strand
gaacagagucucacguuaa

SEQ ID NO: 904602 - RNA, 19 nt, Homo sapiens
  misc_RNA (1)...(19): siRNA sense strand
gaaagaagggauacugaua

SEQ ID NO: 904603 - RNA, 19 nt, Homo sapiens
  misc_RNA (1)...(19): siRNA sense strand
gcaagaagauggagcuguu

SEQ ID NO: 904604 - RNA, 19 nt, Homo sapiens
  misc_RNA (1)...(19): siRNA sense strand
ccacucaccuuacgaaauu

SEQ ID NO: 904605 - RNA, 19 nt, Homo sapiens
  misc_RNA (1)...(19): siRNA sense strand
ugacagcacuggagagauu

SEQ ID NO: 904606 - RNA, 19 nt, Homo sapiens
  misc_RNA (1)...(19): siRNA sense strand
gcacagguuugaaagagaa

SEQ ID NO: 904607 - RNA, 19 nt, Homo sapiens
  misc_RNA (1)...(19): siRNA sense strand
gaacuggaaucuccugcuu

SEQ ID NO: 904608 - RNA, 19 nt, Homo sapiens
  misc_RNA (1)...(19): siRNA sense strand
gaagugcaguucagcaaga

SEQ ID NO: 904609 - RNA, 19 nt, Homo sapiens
  misc_RNA (1)...(19): siRNA sense strand
gcagauacccaggaacuaa

SEQ ID NO: 904610 - RNA, 19 nt, Homo sapiens
  misc_RNA (1)...(19): siRNA sense strand
gaaauguggucuucagcau

SEQ ID NO: 904611 - RNA, 19 nt, Homo sapiens
  misc_RNA (1)...(19): siRNA sense strand
gagaagacguggacgacau

SEQ ID NO: 904612 - RNA, 19 nt, Homo sapiens
  misc_RNA (1)...(19): siRNA sense strand
agauggagcuguuagaaga

SEQ ID NO: 904613 - RNA, 19 nt, Homo sapiens
  misc_RNA (1)...(19): siRNA sense strand
gacauggccuaucguuuga

SEQ ID NO: 904614 - RNA, 19 nt, Homo sapiens
  misc_RNA (1)...(19): siRNA sense strand
aaacaaagcccagggaaga

SEQ ID NO: 904615 - RNA, 19 nt, Homo sapiens
  misc_RNA (1)...(19): siRNA sense strand
gaagauggagcuguuagaa

SEQ ID NO: 904616 - RNA, 19 nt, Homo sapiens
  misc_RNA (1)...(19): siRNA sense strand
aaagaagggauacugauaa

SEQ ID NO: 904617 - RNA, 19 nt, Homo sapiens
  misc_RNA (1)...(19): siRNA sense strand
gcacacagacccaggaaca

SEQ ID NO: 904618 - RNA, 19 nt, Homo sapiens
  misc_RNA (1)...(19): siRNA sense strand
aagaagggauacugauaaa

SEQ ID NO: 904619 - RNA, 19 nt, Homo sapiens
  misc_RNA (1)...(19): siRNA sense strand
ggagguggcggacagauug

SEQ ID NO: 904620 - RNA, 19 nt, Homo sapiens
  misc_RNA (1)...(19): siRNA sense strand
agagugagcuggagagaca

SEQ ID NO: 904621 - RNA, 19 nt, Homo sapiens
  misc_RNA (1)...(19): siRNA sense strand
agaacagagucucacguua

SEQ ID NO: 904622 - RNA, 19 nt, Homo sapiens
  misc_RNA (1)...(19): siRNA sense strand
gaccaguugugaacccuuu

SEQ ID NO: 904623 - RNA, 19 nt, Homo sapiens
  misc_RNA (1)...(19): siRNA sense strand
gagagauucuggucagcuu

SEQ ID NO: 904624 - RNA, 19 nt, Homo sapiens
  misc_RNA (1)...(19): siRNA sense strand
ugagaggccuggacaagau

SEQ ID NO: 904625 - RNA, 19 nt, Homo sapiens
  misc_RNA (1)...(19): siRNA sense strand
agacauggccuaucguuug

SEQ ID NO: 904626 - RNA, 19 nt, Homo sapiens
  misc_RNA (1)...(19): siRNA sense strand
auacaugacuccaguucuu

SEQ ID NO: 904627 - RNA, 19 nt, Homo sapiens
  misc_RNA (1)...(19): siRNA sense strand
ggaaagaagggauacugau

SEQ ID NO: 904628 - RNA, 19 nt, Homo sapiens
  misc_RNA (1)...(19): siRNA sense strand
aacagagucucacguuaaa

SEQ ID NO: 904629 - RNA, 19 nt, Homo sapiens
  misc_RNA (1)...(19): siRNA sense strand
ggaugaagaggcugaccua

SEQ ID NO: 904630 - RNA, 19 nt, Homo sapiens
  misc_RNA (1)...(19): siRNA sense strand
gcuguuagaagaugcauug

SEQ ID NO: 904631 - RNA, 19 nt, Homo sapiens
  misc_RNA (1)...(19): siRNA sense strand
gggaagaugucuccaugac

SEQ ID NO: 904632 - RNA, 19 nt, Homo sapiens
  misc_RNA (1)...(19): siRNA sense strand
gaagacaccaccggaaaca

SEQ ID NO: 904633 - RNA, 19 nt, Homo sapiens
  misc_RNA (1)...(19): siRNA sense strand
gccaagaugccagagguua

SEQ ID NO: 904634 - RNA, 19 nt, Homo sapiens
  misc_RNA (1)...(19): siRNA sense strand
cgccagcgguuuauuggaa

SEQ ID NO: 904635 - RNA, 19 nt, Homo sapiens
  misc_RNA (1)...(19): siRNA sense strand
gggaaagaagggauacuga

SEQ ID NO: 904636 - RNA, 19 nt, Homo sapiens
  misc_RNA (1)...(19): siRNA sense strand
gggagcugcugcugucuca

SEQ ID NO: 904637 - RNA, 19 nt, Homo sapiens
  misc_RNA (1)...(19): siRNA sense strand
caagaagauggagcuguua

SEQ ID NO: 904638 - RNA, 19 nt, Homo sapiens
  misc_RNA (1)...(19): siRNA sense strand
uggacaagauggagucaga

SEQ ID NO: 904639 - RNA, 19 nt, Homo sapiens
  misc_RNA (1)...(19): siRNA sense strand
ggacagauugcugacagaa

SEQ ID NO: 904640 - RNA, 19 nt, Homo sapiens
  misc_RNA (1)...(19): siRNA sense strand
agacaccaccggaaacaaa

SEQ ID NO: 904641 - RNA, 19 nt, Homo sapiens
  misc_RNA (1)...(19): siRNA sense strand
gaaauacaugacuccaguu

SEQ ID NO: 904642 - RNA, 19 nt, Homo sapiens
  misc_RNA (1)...(19): siRNA sense strand
aauguggucuucagcauca

SEQ ID NO: 904643 - RNA, 19 nt, Homo sapiens
  misc_RNA (1)...(19): siRNA sense strand
ugaggcagauacccaggaa

SEQ ID NO: 904644 - RNA, 19 nt, Homo sapiens
  misc_RNA (1)...(19): siRNA sense strand
cagaacagagucucacguu

SEQ ID NO: 904645 - RNA, 19 nt, Homo sapiens
  misc_RNA (1)...(19): siRNA sense strand
ucagcaucaucgagcauuu

SEQ ID NO: 904646 - RNA, 19 nt, Homo sapiens
  misc_RNA (1)...(19): siRNA sense strand
acagauugcugacagaacu

SEQ ID NO: 904647 - RNA, 19 nt, Homo sapiens
  misc_RNA (1)...(19): siRNA sense strand
gccagcgguuuauuggaaa

SEQ ID NO: 904648 - RNA, 19 nt, Homo sapiens
  misc_RNA (1)...(19): siRNA sense strand
cgacaucaagguccacuca

SEQ ID NO: 904649 - RNA, 19 nt, Homo sapiens
  misc_RNA (1)...(19): siRNA sense strand
gggcaaccuugaccaucga

SEQ ID NO: 904650 - RNA, 19 nt, Homo sapiens
  misc_RNA (1)...(19): siRNA sense strand
cacaacaggcggaugaaga

SEQ ID NO: 904651 - RNA, 19 nt, Homo sapiens
  misc_RNA (1)...(19): siRNA sense strand
ccaagaugccagagguuau

SEQ ID NO: 904652 - RNA, 19 nt, Homo sapiens
  misc_RNA (1)...(19): siRNA sense strand
ggaccuuggcgcacacaga

SEQ ID NO: 904653 - RNA, 19 nt, Homo sapiens
  misc_RNA (1)...(19): siRNA sense strand
ggaagacaccaccggaaac

SEQ ID NO: 904654 - RNA, 19 nt, Homo sapiens
  misc_RNA (1)...(19): siRNA sense strand
aagcacaacaggcggauga

SEQ ID NO: 904655 - RNA, 19 nt, Homo sapiens
  misc_RNA (1)...(19): siRNA sense strand
ggagcugacgggacucaug

SEQ ID NO: 904656 - RNA, 19 nt, Homo sapiens
  misc_RNA (1)...(19): siRNA sense strand
uggaagacaccaccggaaa

SEQ ID NO: 904657 - RNA, 19 nt, Homo sapiens
  misc_RNA (1)...(19): siRNA sense strand
ccugcuugguggcccuuua

SEQ ID NO: 904658 - RNA, 19 nt, Homo sapiens
  misc_RNA (1)...(19): siRNA sense strand
cagaagaggccuggaccuu

SEQ ID NO: 904659 - RNA, 19 nt, Homo sapiens
  misc_RNA (1)...(19): siRNA sense strand
acacagacccaggaacaga

SEQ ID NO: 904660 - RNA, 19 nt, Homo sapiens
  misc_RNA (1)...(19): siRNA sense strand
ccaucaccauccuggagaa

SEQ ID NO: 904661 - RNA, 19 nt, Homo sapiens
  misc_RNA (1)...(19): siRNA sense strand
caaccuugaccaucgacaa

SEQ ID NO: 904662 - RNA, 19 nt, Homo sapiens
  misc_RNA (1)...(19): siRNA sense strand
cccaggaacuaacccagau

SEQ ID NO: 904663 - RNA, 19 nt, Homo sapiens
  misc_RNA (1)...(19): siRNA sense strand
ccagacauggccuaucguu

SEQ ID NO: 904664 - RNA, 19 nt, Homo sapiens
  misc_RNA (1)...(19): siRNA sense strand
ugucuggguuggaaauaca

SEQ ID NO: 904665 - RNA, 19 nt, Homo sapiens
  misc_RNA (1)...(19): siRNA sense strand
caagaugccagagguuauc

SEQ ID NO: 904666 - RNA, 19 nt, Homo sapiens
  misc_RNA (1)...(19): siRNA sense strand
ccaguucuuugcucaugca

SEQ ID NO: 904667 - RNA, 19 nt, Homo sapiens
  misc_RNA (1)...(19): siRNA sense strand
uagaagugcaguucagcaa

SEQ ID NO: 904668 - RNA, 19 nt, Homo sapiens
  misc_RNA (1)...(19): siRNA sense strand
gagguuauccccauuuuag

SEQ ID NO: 904669 - RNA, 19 nt, Homo sapiens
  misc_RNA (1)...(19): siRNA sense strand
gguccacucaccuuacgaa

SEQ ID NO: 904670 - RNA, 19 nt, Homo sapiens
  misc_RNA (1)...(19): siRNA sense strand
aaggaggcuucacauuuua

SEQ ID NO: 904671 - RNA, 19 nt, Homo sapiens
  misc_RNA (1)...(19): siRNA sense strand
gcggccaagucgaaaugug

SEQ ID NO: 904672 - RNA, 19 nt, Homo sapiens
  misc_RNA (1)...(19): siRNA sense strand
gcacaacaggcggaugaag

SEQ ID NO: 904673 - RNA, 19 nt, Homo sapiens
  misc_RNA (1)...(19): siRNA sense strand
gugcaguucagcaagaaga

SEQ ID NO: 904674 - RNA, 19 nt, Homo sapiens
  misc_RNA (1)...(19): siRNA sense strand
caaagcccagggaagaugu

SEQ ID NO: 904675 - RNA, 19 nt, Homo sapiens
  misc_RNA (1)...(19): siRNA sense strand
cagacauggccuaucguuu

SEQ ID NO: 904676 - RNA, 19 nt, Homo sapiens
  misc_RNA (1)...(19): siRNA sense strand
agacguggacgacaucaag

SEQ ID NO: 904677 - RNA, 19 nt, Homo sapiens
  misc_RNA (1)...(19): siRNA sense strand
gcaguucagcaagaagaug

SEQ ID NO: 904678 - RNA, 19 nt, Homo sapiens
  misc_RNA (1)...(19): siRNA sense strand
cguuugauaucugccaaga

SEQ ID NO: 904679 - RNA, 19 nt, Homo sapiens
  misc_RNA (1)...(19): siRNA sense strand
gagaaucaccuuaaagaua

SEQ ID NO: 904680 - RNA, 19 nt, Homo sapiens
  misc_RNA (1)...(19): siRNA sense strand
aaggaaagcuuaucgguua

SEQ ID NO: 904681 - RNA, 19 nt, Homo sapiens
  misc_RNA (1)...(19): siRNA sense strand
gaagucaucccuacacaua

SEQ ID NO: 904682 - RNA, 19 nt, Homo sapiens
  misc_RNA (1)...(19): siRNA sense strand
gaugacgacuugaaacuuu

SEQ ID NO: 904683 - RNA, 19 nt, Homo sapiens
  misc_RNA (1)...(19): siRNA sense strand
gaagggagaaugauaguga

SEQ ID NO: 904684 - RNA, 19 nt, Homo sapiens
  misc_RNA (1)...(19): siRNA sense strand
gaaugauagugacugcuua

SEQ ID NO: 904685 - RNA, 19 nt, Homo sapiens
  misc_RNA (1)...(19): siRNA sense strand
gggacaacgugaaacaaua

SEQ ID NO: 904686 - RNA, 19 nt, Homo sapiens
  misc_RNA (1)...(19): siRNA sense strand
cgucagaaauuugaucaua

SEQ ID NO: 904687 - RNA, 19 nt, Homo sapiens
  misc_RNA (1)...(19): siRNA sense strand
agaauaguguaguagcuua

SEQ ID NO: 904688 - RNA, 19 nt, Homo sapiens
  misc_RNA (1)...(19): siRNA sense strand
gauagugacugcuuaugag

SEQ ID NO: 904689 - RNA, 19 nt, Homo sapiens
  misc_RNA (1)...(19): siRNA sense strand
gaaaggaucaucacgaaac

SEQ ID NO: 904690 - RNA, 19 nt, Homo sapiens
  misc_RNA (1)...(19): siRNA sense strand
ucuaugcucuuaacauuga

SEQ ID NO: 904691 - RNA, 19 nt, Homo sapiens
  misc_RNA (1)...(19): siRNA sense strand
gaagaauaguguaguagcu

SEQ ID NO: 904692 - RNA, 19 nt, Homo sapiens
  misc_RNA (1)...(19): siRNA sense strand
ugucuaugcucuuaacauu

SEQ ID NO: 904693 - RNA, 19 nt, Homo sapiens
  misc_RNA (1)...(19): siRNA sense strand
augaagagcugcagcaaga

SEQ ID NO: 904694 - RNA, 19 nt, Homo sapiens
  misc_RNA (1)...(19): siRNA sense strand
gaaacuuuguucccacaca

SEQ ID NO: 904695 - RNA, 19 nt, Homo sapiens
  misc_RNA (1)...(19): siRNA sense strand
gcuuaucgguuacgagaug

SEQ ID NO: 904696 - RNA, 19 nt, Homo sapiens
  misc_RNA (1)...(19): siRNA sense strand
ccugaagaauaguguagua

SEQ ID NO: 904697 - RNA, 19 nt, Homo sapiens
  misc_RNA (1)...(19): siRNA sense strand
agccauaccugaagaauag

SEQ ID NO: 904698 - RNA, 19 nt, Homo sapiens
  misc_RNA (1)...(19): siRNA sense strand
aagaggaguuugaccuuga

SEQ ID NO: 904699 - RNA, 19 nt, Homo sapiens
  misc_RNA (1)...(19): siRNA sense strand
ccuugaagcucauagacuu

SEQ ID NO: 904700 - RNA, 19 nt, Homo sapiens
  misc_RNA (1)...(19): siRNA sense strand
ucaguugugucaagaagga

SEQ ID NO: 904701 - RNA, 19 nt, Homo sapiens
  misc_RNA (1)...(19): siRNA sense strand
gugaacauguacgaucuuu

SEQ ID NO: 904702 - RNA, 19 nt, Homo sapiens
  misc_RNA (1)...(19): siRNA sense strand
caaaggauccccaagauga

SEQ ID NO: 904703 - RNA, 19 nt, Homo sapiens
  misc_RNA (1)...(19): siRNA sense strand
uugaaaggaucaucacgaa

SEQ ID NO: 904704 - RNA, 19 nt, Homo sapiens
  misc_RNA (1)...(19): siRNA sense strand
gaucagcaaagaggaguuu

SEQ ID NO: 904705 - RNA, 19 nt, Homo sapiens
  misc_RNA (1)...(19): siRNA sense strand
uguuucagcuguugucuau

SEQ ID NO: 904706 - RNA, 19 nt, Homo sapiens
  misc_RNA (1)...(19): siRNA sense strand
ggagaaucaccuuaaagau

SEQ ID NO: 904707 - RNA, 19 nt, Homo sapiens
  misc_RNA (1)...(19): siRNA sense strand
ggacaacgugaaacaauac

SEQ ID NO: 904708 - RNA, 19 nt, Homo sapiens
  misc_RNA (1)...(19): siRNA sense strand
gaaacucuggcauccaaau

SEQ ID NO: 904709 - RNA, 19 nt, Homo sapiens
  misc_RNA (1)...(19): siRNA sense strand
auacugggcuaaccuaaag

SEQ ID NO: 904710 - RNA, 19 nt, Homo sapiens
  misc_RNA (1)...(19): siRNA sense strand
agacuucucacacaggaua

SEQ ID NO: 904711 - RNA, 19 nt, Homo sapiens
  misc_RNA (1)...(19): siRNA sense strand
gaaagcuuaucgguuacga

SEQ ID NO: 904712 - RNA, 19 nt, Homo sapiens
  misc_RNA (1)...(19): siRNA sense strand
gucagaaauuugaucauag

SEQ ID NO: 904713 - RNA, 19 nt, Homo sapiens
  misc_RNA (1)...(19): siRNA sense strand
gaagagcugcagcaagaca

SEQ ID NO: 904714 - RNA, 19 nt, Homo sapiens
  misc_RNA (1)...(19): siRNA sense strand
gcucuuaacauugaaagga

SEQ ID NO: 904715 - RNA, 19 nt, Homo sapiens
  misc_RNA (1)...(19): siRNA sense strand
guuacgagauggucauuuu

SEQ ID NO: 904716 - RNA, 19 nt, Homo sapiens
  misc_RNA (1)...(19): siRNA sense strand
ucuaugcuguggagaauca

SEQ ID NO: 904717 - RNA, 19 nt, Homo sapiens
  misc_RNA (1)...(19): siRNA sense strand
gagcaugggcuggacaaug

SEQ ID NO: 904718 - RNA, 19 nt, Homo sapiens
  misc_RNA (1)...(19): siRNA sense strand
acgaaacucuggcauccaa

SEQ ID NO: 904719 - RNA, 19 nt, Homo sapiens
  misc_RNA (1)...(19): siRNA sense strand
gcuugaagggagaaugaua

SEQ ID NO: 904720 - RNA, 19 nt, Homo sapiens
  misc_RNA (1)...(19): siRNA sense strand
uggagaaucaccuuaaaga

SEQ ID NO: 904721 - RNA, 19 nt, Homo sapiens
  misc_RNA (1)...(19): siRNA sense strand
ugauagugacugcuuauga

SEQ ID NO: 904722 - RNA, 19 nt, Homo sapiens
  misc_RNA (1)...(19): siRNA sense strand
ugucaagaaggaaagcuua

SEQ ID NO: 904723 - RNA, 19 nt, Homo sapiens
  misc_RNA (1)...(19): siRNA sense strand
gcauccaaaucaugaagag

SEQ ID NO: 904724 - RNA, 19 nt, Homo sapiens
  misc_RNA (1)...(19): siRNA sense strand
cagccauaccugaagaaua

SEQ ID NO: 904725 - RNA, 19 nt, Homo sapiens
  misc_RNA (1)...(19): siRNA sense strand
ucucacgcguugucagauu

SEQ ID NO: 904726 - RNA, 19 nt, Homo sapiens
  misc_RNA (1)...(19): siRNA sense strand
uguggagaaucaccuuaaa

SEQ ID NO: 904727 - RNA, 19 nt, Homo sapiens
  misc_RNA (1)...(19): siRNA sense strand
agcaugggcuggacaaugu

SEQ ID NO: 904728 - RNA, 19 nt, Homo sapiens
  misc_RNA (1)...(19): siRNA sense strand
cagcuugaagggagaauga

SEQ ID NO: 904729 - RNA, 19 nt, Homo sapiens
  misc_RNA (1)...(19): siRNA sense strand
ccgcagccauaccugaaga

SEQ ID NO: 904730 - RNA, 19 nt, Homo sapiens
  misc_RNA (1)...(19): siRNA sense strand
cucaggagcccagcaauuu

SEQ ID NO: 904731 - RNA, 19 nt, Homo sapiens
  misc_RNA (1)...(19): siRNA sense strand
agcagaagaucagcaaaga

SEQ ID NO: 904732 - RNA, 19 nt, Homo sapiens
  misc_RNA (1)...(19): siRNA sense strand
gacgucaguugugucaaga

SEQ ID NO: 904733 - RNA, 19 nt, Homo sapiens
  misc_RNA (1)...(19): siRNA sense strand
agaggaguuugaccuugaa

SEQ ID NO: 904734 - RNA, 19 nt, Homo sapiens
  misc_RNA (1)...(19): siRNA sense strand
cacucuaccugcaucuuug

SEQ ID NO: 904735 - RNA, 19 nt, Homo sapiens
  misc_RNA (1)...(19): siRNA sense strand
acacucuaccugcaucuuu

SEQ ID NO: 904736 - RNA, 19 nt, Homo sapiens
  misc_RNA (1)...(19): siRNA sense strand
gcuuacaacaacuuaauag

SEQ ID NO: 904737 - RNA, 19 nt, Homo sapiens
  misc_RNA (1)...(19): siRNA sense strand
ugccuccggugaacaugua

SEQ ID NO: 904738 - RNA, 19 nt, Homo sapiens
  misc_RNA (1)...(19): siRNA sense strand
ucaagcagaagaucagcaa

SEQ ID NO: 904739 - RNA, 19 nt, Homo sapiens
  misc_RNA (1)...(19): siRNA sense strand
cauagauuccagccucaaa

SEQ ID NO: 904740 - RNA, 19 nt, Homo sapiens
  misc_RNA (1)...(19): siRNA sense strand
ugaaaggaucaucacgaaa

SEQ ID NO: 904741 - RNA, 19 nt, Homo sapiens
  misc_RNA (1)...(19): siRNA sense strand
ggaagucaucccuacacau

SEQ ID NO: 904742 - RNA, 19 nt, Homo sapiens
  misc_RNA (1)...(19): siRNA sense strand
caucuuugccuccggugaa

SEQ ID NO: 904743 - RNA, 19 nt, Homo sapiens
  misc_RNA (1)...(19): siRNA sense strand
caagaaggaaagcuuaucg

SEQ ID NO: 904744 - RNA, 19 nt, Homo sapiens
  misc_RNA (1)...(19): siRNA sense strand
caccuuaaagauauacuga

SEQ ID NO: 904745 - RNA, 19 nt, Homo sapiens
  misc_RNA (1)...(19): siRNA sense strand
ucaggagcccagcaauuug

SEQ ID NO: 904746 - RNA, 19 nt, Homo sapiens
  misc_RNA (1)...(19): siRNA sense strand
agaaugauagugacugcuu

SEQ ID NO: 904747 - RNA, 19 nt, Homo sapiens
  misc_RNA (1)...(19): siRNA sense strand
gaaacaauacugggcuaac

SEQ ID NO: 904748 - RNA, 19 nt, Homo sapiens
  misc_RNA (1)...(19): siRNA sense strand
caauacugggcuaaccuaa

SEQ ID NO: 904749 - RNA, 19 nt, Homo sapiens
  misc_RNA (1)...(19): siRNA sense strand
gcuguggagaaucaccuua

SEQ ID NO: 904750 - RNA, 19 nt, Homo sapiens
  misc_RNA (1)...(19): siRNA sense strand
ugucuaugcuguggagaau

SEQ ID NO: 904751 - RNA, 19 nt, Homo sapiens
  misc_RNA (1)...(19): siRNA sense strand
aaaggaucaucacgaaacu

SEQ ID NO: 904752 - RNA, 19 nt, Homo sapiens
  misc_RNA (1)...(19): siRNA sense strand
cgucaguugugucaagaag

SEQ ID NO: 904753 - RNA, 19 nt, Homo sapiens
  misc_RNA (1)...(19): siRNA sense strand
ucucaggagcccagcaauu

SEQ ID NO: 904754 - RNA, 19 nt, Homo sapiens
  misc_RNA (1)...(19): siRNA sense strand
acaauacugggcuaaccua

SEQ ID NO: 904755 - RNA, 19 nt, Homo sapiens
  misc_RNA (1)...(19): siRNA sense strand
ggagacacucuaccugcau

SEQ ID NO: 904756 - RNA, 19 nt, Homo sapiens
  misc_RNA (1)...(19): siRNA sense strand
cucauagacuucucacaca

SEQ ID NO: 904757 - RNA, 19 nt, Homo sapiens
  misc_RNA (1)...(19): siRNA sense strand
gcagaagaucagcaaagag

SEQ ID NO: 904758 - RNA, 19 nt, Homo sapiens
  misc_RNA (1)...(19): siRNA sense strand
ggcaaaggauccccaagau

SEQ ID NO: 904759 - RNA, 19 nt, Homo sapiens
  misc_RNA (1)...(19): siRNA sense strand
ggaguuugaccuugaagcu

SEQ ID NO: 904760 - RNA, 19 nt, Homo sapiens
  misc_RNA (1)...(19): siRNA sense strand
ucccugugcuggucagaau

SEQ ID NO: 904761 - RNA, 19 nt, Homo sapiens
  misc_RNA (1)...(19): siRNA sense strand
caggagcccagcaauuugu

SEQ ID NO: 904762 - RNA, 19 nt, Homo sapiens
  misc_RNA (1)...(19): siRNA sense strand
aagaugaugacgacuugaa

SEQ ID NO: 904763 - RNA, 19 nt, Homo sapiens
  misc_RNA (1)...(19): siRNA sense strand
aaacaauacugggcuaacc

SEQ ID NO: 904764 - RNA, 19 nt, Homo sapiens
  misc_RNA (1)...(19): siRNA sense strand
uuucagcuguugucuaugc

SEQ ID NO: 904765 - RNA, 19 nt, Homo sapiens
  misc_RNA (1)...(19): siRNA sense strand
gaugaugacgacuugaaac

SEQ ID NO: 904766 - RNA, 19 nt, Homo sapiens
  misc_RNA (1)...(19): siRNA sense strand
cucacgcguugucagauuu

SEQ ID NO: 904767 - RNA, 19 nt, Homo sapiens
  misc_RNA (1)...(19): siRNA sense strand
guaguagcuuacaacaacu

SEQ ID NO: 904768 - RNA, 19 nt, Homo sapiens
  misc_RNA (1)...(19): siRNA sense strand
ugaaacaauacugggcuaa

SEQ ID NO: 904769 - RNA, 19 nt, Homo sapiens
  misc_RNA (1)...(19): siRNA sense strand
gugcaaagcugcuaaagug

SEQ ID NO: 904770 - RNA, 19 nt, Homo sapiens
  misc_RNA (1)...(19): siRNA sense strand
gcaccaaaguugaggagaa

SEQ ID NO: 904771 - RNA, 19 nt, Homo sapiens
  misc_RNA (1)...(19): siRNA sense strand
gaaggcagcaccaaaguug

SEQ ID NO: 904772 - RNA, 19 nt, Homo sapiens
  misc_RNA (1)...(19): siRNA sense strand
gaacagagggugggacuga

SEQ ID NO: 904773 - RNA, 19 nt, Homo sapiens
  misc_RNA (1)...(19): siRNA sense strand
gcaagauugucccuuccua

SEQ ID NO: 904774 - RNA, 19 nt, Homo sapiens
  misc_RNA (1)...(19): siRNA sense strand
gcgguuaccugcuccucua

SEQ ID NO: 904775 - RNA, 19 nt, Homo sapiens
  misc_RNA (1)...(19): siRNA sense strand
gugaagacgacaucaauuu

SEQ ID NO: 904776 - RNA, 19 nt, Homo sapiens
  misc_RNA (1)...(19): siRNA sense strand
gaagacgacaucaauuuca

SEQ ID NO: 904777 - RNA, 19 nt, Homo sapiens
  misc_RNA (1)...(19): siRNA sense strand
gcacaagaccauuaagaag

SEQ ID NO: 904778 - RNA, 19 nt, Homo sapiens
  misc_RNA (1)...(19): siRNA sense strand
gaagaugacauggaguuug

SEQ ID NO: 904779 - RNA, 19 nt, Homo sapiens
  misc_RNA (1)...(19): siRNA sense strand
acaagaccauuaagaagga

SEQ ID NO: 904780 - RNA, 19 nt, Homo sapiens
  misc_RNA (1)...(19): siRNA sense strand
ggacugaaggcaagauugu

SEQ ID NO: 904781 - RNA, 19 nt, Homo sapiens
  misc_RNA (1)...(19): siRNA sense strand
gaucgcuacuuguccauca

SEQ ID NO: 904782 - RNA, 19 nt, Homo sapiens
  misc_RNA (1)...(19): siRNA sense strand
gcuguacaaugucaagaga

SEQ ID NO: 904783 - RNA, 19 nt, Homo sapiens
  misc_RNA (1)...(19): siRNA sense strand
gaccaaccguuuuaucuuu

SEQ ID NO: 904784 - RNA, 19 nt, Homo sapiens
  misc_RNA (1)...(19): siRNA sense strand
caaagcugcuaaagugauc

SEQ ID NO: 904785 - RNA, 19 nt, Homo sapiens
  misc_RNA (1)...(19): siRNA sense strand
gcaaugcucucugcuccau

SEQ ID NO: 904786 - RNA, 19 nt, Homo sapiens
  misc_RNA (1)...(19): siRNA sense strand
caucgucauuccacugauu

SEQ ID NO: 904787 - RNA, 19 nt, Homo sapiens
  misc_RNA (1)...(19): siRNA sense strand
gcaaagcugcuaaagugau

SEQ ID NO: 904788 - RNA, 19 nt, Homo sapiens
  misc_RNA (1)...(19): siRNA sense strand
gucaguggaucgcuacuug

SEQ ID NO: 904789 - RNA, 19 nt, Homo sapiens
  misc_RNA (1)...(19): siRNA sense strand
ggaaggcagcaccaaaguu

SEQ ID NO: 904790 - RNA, 19 nt, Homo sapiens
  misc_RNA (1)...(19): siRNA sense strand
gcaugaaggugaggucaag

SEQ ID NO: 904791 - RNA, 19 nt, Homo sapiens
  misc_RNA (1)...(19): siRNA sense strand
gaagagggagcagagaaga

SEQ ID NO: 904792 - RNA, 19 nt, Homo sapiens
  misc_RNA (1)...(19): siRNA sense strand
gauugucccuuccuacgau

SEQ ID NO: 904793 - RNA, 19 nt, Homo sapiens
  misc_RNA (1)...(19): siRNA sense strand
gagcacuccuccacucuac

SEQ ID NO: 904794 - RNA, 19 nt, Homo sapiens
  misc_RNA (1)...(19): siRNA sense strand
gcucugcuguacaauguca

SEQ ID NO: 904795 - RNA, 19 nt, Homo sapiens
  misc_RNA (1)...(19): siRNA sense strand
gcauugacuugggugaaga

SEQ ID NO: 904796 - RNA, 19 nt, Homo sapiens
  misc_RNA (1)...(19): siRNA sense strand
ccacugauugucaugauug

SEQ ID NO: 904797 - RNA, 19 nt, Homo sapiens
  misc_RNA (1)...(19): siRNA sense strand
uaaggaaggcagcaccaaa

SEQ ID NO: 904798 - RNA, 19 nt, Homo sapiens
  misc_RNA (1)...(19): siRNA sense strand
aggaggaguuccaggauga

SEQ ID NO: 904799 - RNA, 19 nt, Homo sapiens
  misc_RNA (1)...(19): siRNA sense strand
gaaggaggaguuccaggau

SEQ ID NO: 904800 - RNA, 19 nt, Homo sapiens
  misc_RNA (1)...(19): siRNA sense strand
agaaggaaauccaggacau

SEQ ID NO: 904801 - RNA, 19 nt, Homo sapiens
  misc_RNA (1)...(19): siRNA sense strand
gaaggaaauccaggacaug

SEQ ID NO: 904802 - RNA, 19 nt, Homo sapiens
  misc_RNA (1)...(19): siRNA sense strand
caaggacuguguggagaau

SEQ ID NO: 904803 - RNA, 19 nt, Homo sapiens
  misc_RNA (1)...(19): siRNA sense strand
uccaggacaugcugaagaa

SEQ ID NO: 904804 - RNA, 19 nt, Homo sapiens
  misc_RNA (1)...(19): siRNA sense strand
cagagaagaaggaggaguu

SEQ ID NO: 904805 - RNA, 19 nt, Homo sapiens
  misc_RNA (1)...(19): siRNA sense strand
caacagcacgcgcgagagu

SEQ ID NO: 904806 - RNA, 19 nt, Homo sapiens
  misc_RNA (1)...(19): siRNA sense strand
gcucucugcuccaugaucu

SEQ ID NO: 904807 - RNA, 19 nt, Homo sapiens
  misc_RNA (1)...(19): siRNA sense strand
ggugaagacgacaucaauu

SEQ ID NO: 904808 - RNA, 19 nt, Homo sapiens
  misc_RNA (1)...(19): siRNA sense strand
ugacauggaguuuggugaa

SEQ ID NO: 904809 - RNA, 19 nt, Homo sapiens
  misc_RNA (1)...(19): siRNA sense strand
aagaugacauggaguuugg

SEQ ID NO: 904810 - RNA, 19 nt, Homo sapiens
  misc_RNA (1)...(19): siRNA sense strand
gcagcgaggaggucagaga

SEQ ID NO: 904811 - RNA, 19 nt, Homo sapiens
  misc_RNA (1)...(19): siRNA sense strand
gugaagaugacauggaguu

SEQ ID NO: 904812 - RNA, 19 nt, Homo sapiens
  misc_RNA (1)...(19): siRNA sense strand
aaugcucucugcuccauga

SEQ ID NO: 904813 - RNA, 19 nt, Homo sapiens
  misc_RNA (1)...(19): siRNA sense strand
ugaagacgacaucaauuuc

SEQ ID NO: 904814 - RNA, 19 nt, Homo sapiens
  misc_RNA (1)...(19): siRNA sense strand
ugacuugggugaagaugac

SEQ ID NO: 904815 - RNA, 19 nt, Homo sapiens
  misc_RNA (1)...(19): siRNA sense strand
gucaaccagugcagcauug

SEQ ID NO: 904816 - RNA, 19 nt, Homo sapiens
  misc_RNA (1)...(19): siRNA sense strand
cagcauggaggguaaggaa

SEQ ID NO: 904817 - RNA, 19 nt, Homo sapiens
  misc_RNA (1)...(19): siRNA sense strand
caaggagggcagaauggaa

SEQ ID NO: 904818 - RNA, 19 nt, Homo sapiens
  misc_RNA (1)...(19): siRNA sense strand
ggaugucgaaacccaggua

SEQ ID NO: 904819 - RNA, 19 nt, Homo sapiens
  misc_RNA (1)...(19): siRNA sense strand
aggacaugcugaagaaguu

SEQ ID NO: 904820 - RNA, 19 nt, Homo sapiens
  misc_RNA (1)...(19): siRNA sense strand
uacaugcacaagaccauua

SEQ ID NO: 904821 - RNA, 19 nt, Homo sapiens
  misc_RNA (1)...(19): siRNA sense strand
ggagaaugaggaugaagag

SEQ ID NO: 904822 - RNA, 19 nt, Homo sapiens
  misc_RNA (1)...(19): siRNA sense strand
ggucaaccagugcagcauu

SEQ ID NO: 904823 - RNA, 19 nt, Homo sapiens
  misc_RNA (1)...(19): siRNA sense strand
aggacuguguggagaauga

SEQ ID NO: 904824 - RNA, 19 nt, Homo sapiens
  misc_RNA (1)...(19): siRNA sense strand
gcagaauggaagccaagga

SEQ ID NO: 904825 - RNA, 19 nt, Homo sapiens
  misc_RNA (1)...(19): siRNA sense strand
caagaccauuaagaaggaa

SEQ ID NO: 904826 - RNA, 19 nt, Homo sapiens
  misc_RNA (1)...(19): siRNA sense strand
gacauggaguuuggugaag

SEQ ID NO: 904827 - RNA, 19 nt, Homo sapiens
  misc_RNA (1)...(19): siRNA sense strand
ccaccucugugccucucuu

SEQ ID NO: 904828 - RNA, 19 nt, Homo sapiens
  misc_RNA (1)...(19): siRNA sense strand
cuacgauucugcuacuuuu

SEQ ID NO: 904829 - RNA, 19 nt, Homo sapiens
  misc_RNA (1)...(19): siRNA sense strand
ccuacgauucugcuacuuu

SEQ ID NO: 904830 - RNA, 19 nt, Homo sapiens
  misc_RNA (1)...(19): siRNA sense strand
acagcacgcgcgagaguaa

SEQ ID NO: 904831 - RNA, 19 nt, Homo sapiens
  misc_RNA (1)...(19): siRNA sense strand
acauggaguuuggugaaga

SEQ ID NO: 904832 - RNA, 19 nt, Homo sapiens
  misc_RNA (1)...(19): siRNA sense strand
cugcuaaagugaucuucau

SEQ ID NO: 904833 - RNA, 19 nt, Homo sapiens
  misc_RNA (1)...(19): siRNA sense strand
guuaccugcuccucuaugg

SEQ ID NO: 904834 - RNA, 19 nt, Homo sapiens
  misc_RNA (1)...(19): siRNA sense strand
ugcacaagaccauuaagaa

SEQ ID NO: 904835 - RNA, 19 nt, Homo sapiens
  misc_RNA (1)...(19): siRNA sense strand
ucaauuucagugaggauga

SEQ ID NO: 904836 - RNA, 19 nt, Homo sapiens
  misc_RNA (1)...(19): siRNA sense strand
ggccaaggagggcagaaug

SEQ ID NO: 904837 - RNA, 19 nt, Homo sapiens
  misc_RNA (1)...(19): siRNA sense strand
ucaaggacuguguggagaa

SEQ ID NO: 904838 - RNA, 19 nt, Homo sapiens
  misc_RNA (1)...(19): siRNA sense strand
gcuacuccgugguguucug

SEQ ID NO: 904839 - RNA, 19 nt, Homo sapiens
  misc_RNA (1)...(19): siRNA sense strand
ccagugcagcauugacuug

SEQ ID NO: 904840 - RNA, 19 nt, Homo sapiens
  misc_RNA (1)...(19): siRNA sense strand
caccaaaguugaggagaac

SEQ ID NO: 904841 - RNA, 19 nt, Homo sapiens
  misc_RNA (1)...(19): siRNA sense strand
gaccagugagaguagugua

SEQ ID NO: 904842 - RNA, 19 nt, Homo sapiens
  misc_RNA (1)...(19): siRNA sense strand
ggaguuccaggaugagagu

SEQ ID NO: 904843 - RNA, 19 nt, Homo sapiens
  misc_RNA (1)...(19): siRNA sense strand
guguggagaaugaggauga

SEQ ID NO: 904844 - RNA, 19 nt, Homo sapiens
  misc_RNA (1)...(19): siRNA sense strand
gcaugccccucuccaaaau

SEQ ID NO: 904845 - RNA, 19 nt, Homo sapiens
  misc_RNA (1)...(19): siRNA sense strand
ccaaggagggcagaaugga

SEQ ID NO: 904846 - RNA, 19 nt, Homo sapiens
  misc_RNA (1)...(19): siRNA sense strand
ugaagaugacauggaguuu

SEQ ID NO: 904847 - RNA, 19 nt, Homo sapiens
  misc_RNA (1)...(19): siRNA sense strand
ccaggaugagagugaguuu

SEQ ID NO: 904848 - RNA, 19 nt, Homo sapiens
  misc_RNA (1)...(19): siRNA sense strand
accauaaucaucuggcuuu

SEQ ID NO: 904849 - RNA, 19 nt, Homo sapiens
  misc_RNA (1)...(19): siRNA sense strand
caucaucauuuucuccuau

SEQ ID NO: 904850 - RNA, 19 nt, Homo sapiens
  misc_RNA (1)...(19): siRNA sense strand
acauagugcuggcgcuagu

SEQ ID NO: 904851 - RNA, 19 nt, Homo sapiens
  misc_RNA (1)...(19): siRNA sense strand
ccagugagaguaguguaga

SEQ ID NO: 904852 - RNA, 19 nt, Homo sapiens
  misc_RNA (1)...(19): siRNA sense strand
gggacugaaggcaagauug

SEQ ID NO: 904853 - RNA, 19 nt, Homo sapiens
  misc_RNA (1)...(19): siRNA sense strand
ccagugcaaagcugcuaaa

SEQ ID NO: 904854 - RNA, 19 nt, Homo sapiens
  misc_RNA (1)...(19): siRNA sense strand
guaaggaaggcagcaccaa

SEQ ID NO: 904855 - RNA, 19 nt, Homo sapiens
  misc_RNA (1)...(19): siRNA sense strand
guagguggcugucaaauua

SEQ ID NO: 904856 - RNA, 19 nt, Homo sapiens
  misc_RNA (1)...(19): siRNA sense strand
ggaaaucucuuaguaauga

SEQ ID NO: 904857 - RNA, 19 nt, Homo sapiens
  misc_RNA (1)...(19): siRNA sense strand
gaauggaucuuguauugaa

SEQ ID NO: 904858 - RNA, 19 nt, Homo sapiens
  misc_RNA (1)...(19): siRNA sense strand
gugaauggaucuuguauug

SEQ ID NO: 904859 - RNA, 19 nt, Homo sapiens
  misc_RNA (1)...(19): siRNA sense strand
ugacuucuguucuucauuu

SEQ ID NO: 904860 - RNA, 19 nt, Homo sapiens
  misc_RNA (1)...(19): siRNA sense strand
gcuaguucaucaaccauua

SEQ ID NO: 904861 - RNA, 19 nt, Homo sapiens
  misc_RNA (1)...(19): siRNA sense strand
guggagagcugcugguauu

SEQ ID NO: 904862 - RNA, 19 nt, Homo sapiens
  misc_RNA (1)...(19): siRNA sense strand
ggucuuugcuggcuguauu

SEQ ID NO: 904863 - RNA, 19 nt, Homo sapiens
  misc_RNA (1)...(19): siRNA sense strand
gcuguuggagugcuuauua

SEQ ID NO: 904864 - RNA, 19 nt, Homo sapiens
  misc_RNA (1)...(19): siRNA sense strand
gguacuagcauuuguuauu

SEQ ID NO: 904865 - RNA, 19 nt, Homo sapiens
  misc_RNA (1)...(19): siRNA sense strand
guaaugacuucuguucuuc

SEQ ID NO: 904866 - RNA, 19 nt, Homo sapiens
  misc_RNA (1)...(19): siRNA sense strand
guucaucaaccauuaguuu

SEQ ID NO: 904867 - RNA, 19 nt, Homo sapiens
  misc_RNA (1)...(19): siRNA sense strand
uauuauaacucagccauga

SEQ ID NO: 904868 - RNA, 19 nt, Homo sapiens
  misc_RNA (1)...(19): siRNA sense strand
ggccugugcugacuucuug

SEQ ID NO: 904869 - RNA, 19 nt, Homo sapiens
  misc_RNA (1)...(19): siRNA sense strand
guagaaucauccucagaga

SEQ ID NO: 904870 - RNA, 19 nt, Homo sapiens
  misc_RNA (1)...(19): siRNA sense strand
ggucuaugcuaccaaguuc

SEQ ID NO: 904871 - RNA, 19 nt, Homo sapiens
  misc_RNA (1)...(19): siRNA sense strand
gcuggguguugauagauuu

SEQ ID NO: 904872 - RNA, 19 nt, Homo sapiens
  misc_RNA (1)...(19): siRNA sense strand
cuucauaccuacccuuguu

SEQ ID NO: 904873 - RNA, 19 nt, Homo sapiens
  misc_RNA (1)...(19): siRNA sense strand
gcuaaacaacaagcuauaa

SEQ ID NO: 904874 - RNA, 19 nt, Homo sapiens
  misc_RNA (1)...(19): siRNA sense strand
ggaugugaauggaucuugu

SEQ ID NO: 904875 - RNA, 19 nt, Homo sapiens
  misc_RNA (1)...(19): siRNA sense strand
uuuaaaggcuaguucauca

SEQ ID NO: 904876 - RNA, 19 nt, Homo sapiens
  misc_RNA (1)...(19): siRNA sense strand
guauugaaacucccuauuc

SEQ ID NO: 904877 - RNA, 19 nt, Homo sapiens
  misc_RNA (1)...(19): siRNA sense strand
aguaaugacuucuguucuu

SEQ ID NO: 904878 - RNA, 19 nt, Homo sapiens
  misc_RNA (1)...(19): siRNA sense strand
gaugugaauggaucuugua

SEQ ID NO: 904879 - RNA, 19 nt, Homo sapiens
  misc_RNA (1)...(19): siRNA sense strand
acucagccaugaauccuuu

SEQ ID NO: 904880 - RNA, 19 nt, Homo sapiens
  misc_RNA (1)...(19): siRNA sense strand
uaugaaauuugcuguugga

SEQ ID NO: 904881 - RNA, 19 nt, Homo sapiens
  misc_RNA (1)...(19): siRNA sense strand
ucuaugaaauuugcuguug

SEQ ID NO: 904882 - RNA, 19 nt, Homo sapiens
  misc_RNA (1)...(19): siRNA sense strand
gguacauugugguuacuga

SEQ ID NO: 904883 - RNA, 19 nt, Homo sapiens
  misc_RNA (1)...(19): siRNA sense strand
gcuaugaggaugugaaugg

SEQ ID NO: 904884 - RNA, 19 nt, Homo sapiens
  misc_RNA (1)...(19): siRNA sense strand
guagcaaaguagaaucauc

SEQ ID NO: 904885 - RNA, 19 nt, Homo sapiens
  misc_RNA (1)...(19): siRNA sense strand
ggauucugccucucacgua

SEQ ID NO: 904886 - RNA, 19 nt, Homo sapiens
  misc_RNA (1)...(19): siRNA sense strand
gagagaggaaagcagcuaa

SEQ ID NO: 904887 - RNA, 19 nt, Homo sapiens
  misc_RNA (1)...(19): siRNA sense strand
augaugggcuggaggaauu

SEQ ID NO: 904888 - RNA, 19 nt, Homo sapiens
  misc_RNA (1)...(19): siRNA sense strand
gaaucauccucagagaguu

SEQ ID NO: 904889 - RNA, 19 nt, Homo sapiens
  misc_RNA (1)...(19): siRNA sense strand
uauugaaacucccuauucu

SEQ ID NO: 904890 - RNA, 19 nt, Homo sapiens
  misc_RNA (1)...(19): siRNA sense strand
gcugucaaauuauuguaag

SEQ ID NO: 904891 - RNA, 19 nt, Homo sapiens
  misc_RNA (1)...(19): siRNA sense strand
ucacgguacuagcauuugu

SEQ ID NO: 904892 - RNA, 19 nt, Homo sapiens
  misc_RNA (1)...(19): siRNA sense strand
cagcugcacucuccaacca

SEQ ID NO: 904893 - RNA, 19 nt, Homo sapiens
  misc_RNA (1)...(19): siRNA sense strand
ggucacgguacuagcauuu

SEQ ID NO: 904894 - RNA, 19 nt, Homo sapiens
  misc_RNA (1)...(19): siRNA sense strand
uuuguacucuucacaguug

SEQ ID NO: 904895 - RNA, 19 nt, Homo sapiens
  misc_RNA (1)...(19): siRNA sense strand
gagagcugcugguauuuug

SEQ ID NO: 904896 - RNA, 19 nt, Homo sapiens
  misc_RNA (1)...(19): siRNA sense strand
uaccuacccuuguuaugau

SEQ ID NO: 904897 - RNA, 19 nt, Homo sapiens
  misc_RNA (1)...(19): siRNA sense strand
cgacagguacauugugguu

SEQ ID NO: 904898 - RNA, 19 nt, Homo sapiens
  misc_RNA (1)...(19): siRNA sense strand
gcugcacucuccaaccaau

SEQ ID NO: 904899 - RNA, 19 nt, Homo sapiens
  misc_RNA (1)...(19): siRNA sense strand
aaucauccucagagaguua

SEQ ID NO: 904900 - RNA, 19 nt, Homo sapiens
  misc_RNA (1)...(19): siRNA sense strand
ggucccggguaauucugua

SEQ ID NO: 904901 - RNA, 19 nt, Homo sapiens
  misc_RNA (1)...(19): siRNA sense strand
ucaucugcaucgacaggua

SEQ ID NO: 904902 - RNA, 19 nt, Homo sapiens
  misc_RNA (1)...(19): siRNA sense strand
cugccuauaucuaugaaau

SEQ ID NO: 904903 - RNA, 19 nt, Homo sapiens
  misc_RNA (1)...(19): siRNA sense strand
gcugugauguggcauuuug

SEQ ID NO: 904904 - RNA, 19 nt, Homo sapiens
  misc_RNA (1)...(19): siRNA sense strand
ggcuggguguugauagauu

SEQ ID NO: 904905 - RNA, 19 nt, Homo sapiens
  misc_RNA (1)...(19): siRNA sense strand
acagguacauugugguuac

SEQ ID NO: 904906 - RNA, 19 nt, Homo sapiens
  misc_RNA (1)...(19): siRNA sense strand
gggcuggaggaauuaguaa

SEQ ID NO: 904907 - RNA, 19 nt, Homo sapiens
  misc_RNA (1)...(19): siRNA sense strand
auaccuacccuuguuauga

SEQ ID NO: 904908 - RNA, 19 nt, Homo sapiens
  misc_RNA (1)...(19): siRNA sense strand
gacagguacauugugguua

SEQ ID NO: 904909 - RNA, 19 nt, Homo sapiens
  misc_RNA (1)...(19): siRNA sense strand
ucuccugggucccggguaa

SEQ ID NO: 904910 - RNA, 19 nt, Homo sapiens
  misc_RNA (1)...(19): siRNA sense strand
cguagguggcugucaaauu

SEQ ID NO: 904911 - RNA, 19 nt, Homo sapiens
  misc_RNA (1)...(19): siRNA sense strand
agaaucauccucagagagu

SEQ ID NO: 904912 - RNA, 19 nt, Homo sapiens
  misc_RNA (1)...(19): siRNA sense strand
cugcguagguggcugucaa

SEQ ID NO: 904913 - RNA, 19 nt, Homo sapiens
  misc_RNA (1)...(19): siRNA sense strand
ggugugacugugaugcuuu

SEQ ID NO: 904914 - RNA, 19 nt, Homo sapiens
  misc_RNA (1)...(19): siRNA sense strand
uugugcagcuuugcuauga

SEQ ID NO: 904915 - RNA, 19 nt, Homo sapiens
  misc_RNA (1)...(19): siRNA sense strand
ucagaguggccaagagaga

SEQ ID NO: 904916 - RNA, 19 nt, Homo sapiens
  misc_RNA (1)...(19): siRNA sense strand
aaucagaguggccaagaga

SEQ ID NO: 904917 - RNA, 19 nt, Homo sapiens
  misc_RNA (1)...(19): siRNA sense strand
gcuggaggaauuaguaagu

SEQ ID NO: 904918 - RNA, 19 nt, Homo sapiens
  misc_RNA (1)...(19): siRNA sense strand
gaugaugggcuggaggaau

SEQ ID NO: 904919 - RNA, 19 nt, Homo sapiens
  misc_RNA (1)...(19): siRNA sense strand
caagagagagaggaaagca

SEQ ID NO: 904920 - RNA, 19 nt, Homo sapiens
  misc_RNA (1)...(19): siRNA sense strand
aaggcuggguguugauaga

SEQ ID NO: 904921 - RNA, 19 nt, Homo sapiens
  misc_RNA (1)...(19): siRNA sense strand
gaauuaguaagugcucuca

SEQ ID NO: 904922 - RNA, 19 nt, Homo sapiens
  misc_RNA (1)...(19): siRNA sense strand
ugaauggaucuuguauuga

SEQ ID NO: 904923 - RNA, 19 nt, Homo sapiens
  misc_RNA (1)...(19): siRNA sense strand
gaaaucucuuaguaaugac

SEQ ID NO: 904924 - RNA, 19 nt, Homo sapiens
  misc_RNA (1)...(19): siRNA sense strand
guccuccacuugugcuuca

SEQ ID NO: 904925 - RNA, 19 nt, Homo sapiens
  misc_RNA (1)...(19): siRNA sense strand
uaccguauacaguugauau

SEQ ID NO: 904926 - RNA, 19 nt, Homo sapiens
  misc_RNA (1)...(19): siRNA sense strand
gcaucgacagguacauugu

SEQ ID NO: 904927 - RNA, 19 nt, Homo sapiens
  misc_RNA (1)...(19): siRNA sense strand
uuaguaaugacuucuguuc

SEQ ID NO: 904928 - RNA, 19 nt, Homo sapiens
  misc_RNA (1)...(19): siRNA sense strand
uguuggagugcuuauuaua

SEQ ID NO: 904929 - RNA, 19 nt, Homo sapiens
  misc_RNA (1)...(19): siRNA sense strand
gggucacgguacuagcauu

SEQ ID NO: 904930 - RNA, 19 nt, Homo sapiens
  misc_RNA (1)...(19): siRNA sense strand
cuguuauucuucauaccua

SEQ ID NO: 904931 - RNA, 19 nt, Homo sapiens
  misc_RNA (1)...(19): siRNA sense strand
ggagagcugcugguauuuu

SEQ ID NO: 904932 - RNA, 19 nt, Homo sapiens
  misc_RNA (1)...(19): siRNA sense strand
uuucaugguuaccguauac

SEQ ID NO: 904933 - RNA, 19 nt, Homo sapiens
  misc_RNA (1)...(19): siRNA sense strand
acgguacuagcauuuguua

SEQ ID NO: 904934 - RNA, 19 nt, Homo sapiens
  misc_RNA (1)...(19): siRNA sense strand
gccaagagagagaggaaag

SEQ ID NO: 904935 - RNA, 19 nt, Homo sapiens
  misc_RNA (1)...(19): siRNA sense strand
cauccucagagaguuauaa

SEQ ID NO: 904936 - RNA, 19 nt, Homo sapiens
  misc_RNA (1)...(19): siRNA sense strand
ggcugucaaauuauuguaa

SEQ ID NO: 904937 - RNA, 19 nt, Homo sapiens
  misc_RNA (1)...(19): siRNA sense strand
gagcaucgaugaagcuaua

SEQ ID NO: 904938 - RNA, 19 nt, Homo sapiens
  misc_RNA (1)...(19): siRNA sense strand
ccacaccacucaagcuuau

SEQ ID NO: 904939 - RNA, 19 nt, Homo sapiens
  misc_RNA (1)...(19): siRNA sense strand
ugaaggcccucaccgagaa

SEQ ID NO: 904940 - RNA, 19 nt, Homo sapiens
  misc_RNA (1)...(19): siRNA sense strand
ggaagaagugggugcagaa

SEQ ID NO: 904941 - RNA, 19 nt, Homo sapiens
  misc_RNA (1)...(19): siRNA sense strand
uggccgaccucuucuguga

SEQ ID NO: 904942 - RNA, 19 nt, Homo sapiens
  misc_RNA (1)...(19): siRNA sense strand
agaagugggugcagaagag

SEQ ID NO: 904943 - RNA, 19 nt, Homo sapiens
  misc_RNA (1)...(19): siRNA sense strand
acaggaggaugcucaacga

SEQ ID NO: 904944 - RNA, 19 nt, Homo sapiens
  misc_RNA (1)...(19): siRNA sense strand
ucucggagguucucucucu

SEQ ID NO: 904945 - RNA, 19 nt, Homo sapiens
  misc_RNA (1)...(19): siRNA sense strand
ccucuugccuccuccuuca

SEQ ID NO: 904946 - RNA, 19 nt, Homo sapiens
  misc_RNA (1)...(19): siRNA sense strand
ucaacaagcugaaaaucga

SEQ ID NO: 904947 - RNA, 19 nt, Homo sapiens
  misc_RNA (1)...(19): siRNA sense strand
cgacaucaacaagcugaaa

SEQ ID NO: 904948 - RNA, 19 nt, Homo sapiens
  misc_RNA (1)...(19): siRNA sense strand
gcuuucagagcaucgauga

SEQ ID NO: 904949 - RNA, 19 nt, Homo sapiens
  misc_RNA (1)...(19): siRNA sense strand
gaagaagugggugcagaag

SEQ ID NO: 904950 - RNA, 19 nt, Homo sapiens
  misc_RNA (1)...(19): siRNA sense strand
gaaggcccucaccgagaaa

SEQ ID NO: 904951 - RNA, 19 nt, Homo sapiens
  misc_RNA (1)...(19): siRNA sense strand
ugagcuggccgaccucuuc

SEQ ID NO: 904952 - RNA, 19 nt, Homo sapiens
  misc_RNA (1)...(19): siRNA sense strand
acaccacucaagcuuauug

SEQ ID NO: 904953 - RNA, 19 nt, Homo sapiens
  misc_RNA (1)...(19): siRNA sense strand
ucaacgaugccaccuacga

SEQ ID NO: 904954 - RNA, 19 nt, Homo sapiens
  misc_RNA (1)...(19): siRNA sense strand
gaagaaugcauaccgauua

SEQ ID NO: 904955 - RNA, 19 nt, Homo sapiens
  misc_RNA (1)...(19): siRNA sense strand
aagggaaacuucacaaaga

SEQ ID NO: 904956 - RNA, 19 nt, Homo sapiens
  misc_RNA (1)...(19): siRNA sense strand
caaagggaaacuucacaaa

SEQ ID NO: 904957 - RNA, 19 nt, Homo sapiens
  misc_RNA (1)...(19): siRNA sense strand
gagcugcuauuccggagau

SEQ ID NO: 904958 - RNA, 19 nt, Homo sapiens
  misc_RNA (1)...(19): siRNA sense strand
gaaucgccaugagcugcua

SEQ ID NO: 904959 - RNA, 19 nt, Homo sapiens
  misc_RNA (1)...(19): siRNA sense strand
agaaguacaaggugaagaa

SEQ ID NO: 904960 - RNA, 19 nt, Homo sapiens
  misc_RNA (1)...(19): siRNA sense strand
ggaggccgguagugcugaa

SEQ ID NO: 904961 - RNA, 19 nt, Homo sapiens
  misc_RNA (1)...(19): siRNA sense strand
gaaugcauaccgauuacau

SEQ ID NO: 904962 - RNA, 19 nt, Homo sapiens
  misc_RNA (1)...(19): siRNA sense strand
uuccggagauucuaugcua

SEQ ID NO: 904963 - RNA, 19 nt, Homo sapiens
  misc_RNA (1)...(19): siRNA sense strand
ugaagaaugcauaccgauu

SEQ ID NO: 904964 - RNA, 19 nt, Homo sapiens
  misc_RNA (1)...(19): siRNA sense strand
gaaguacaaggugaagaau

SEQ ID NO: 904965 - RNA, 19 nt, Homo sapiens
  misc_RNA (1)...(19): siRNA sense strand
aaagggaaacuucacaaag

SEQ ID NO: 904966 - RNA, 19 nt, Homo sapiens
  misc_RNA (1)...(19): siRNA sense strand
acaaggugaagaaugcaua

SEQ ID NO: 904967 - RNA, 19 nt, Homo sapiens
  misc_RNA (1)...(19): siRNA sense strand
ucaaagggaaacuucacaa

SEQ ID NO: 904968 - RNA, 19 nt, Homo sapiens
  misc_RNA (1)...(19): siRNA sense strand
aguacaaggugaagaaugc

SEQ ID NO: 904969 - RNA, 19 nt, Homo sapiens
  misc_RNA (1)...(19): siRNA sense strand
ggagauucuaugcuacaga

SEQ ID NO: 904970 - RNA, 19 nt, Homo sapiens
  misc_RNA (1)...(19): siRNA sense strand
aagaaugcauaccgauuac

SEQ ID NO: 904971 - RNA, 19 nt, Homo sapiens
  misc_RNA (1)...(19): siRNA sense strand
acauggggcuggaugaaaa

SEQ ID NO: 904972 - RNA, 19 nt, Homo sapiens
  misc_RNA (1)...(19): siRNA sense strand
gcuauuccggagauucuau

SEQ ID NO: 904973 - RNA, 19 nt, Homo sapiens
  misc_RNA (1)...(19): siRNA sense strand
caaacacucugauuacaug

SEQ ID NO: 904974 - RNA, 19 nt, Homo sapiens
  misc_RNA (1)...(19): siRNA sense strand
ccagagaaauccaccaagu

SEQ ID NO: 904975 - RNA, 19 nt, Homo sapiens
  misc_RNA (1)...(19): siRNA sense strand
gcugguugauguggaauaa

SEQ ID NO: 904976 - RNA, 19 nt, Homo sapiens
  misc_RNA (1)...(19): siRNA sense strand
ggacccaaguaccugauuc

SEQ ID NO: 904977 - RNA, 19 nt, Homo sapiens
  misc_RNA (1)...(19): siRNA sense strand
cagagaaauccaccaagua

SEQ ID NO: 904978 - RNA, 19 nt, Homo sapiens
  misc_RNA (1)...(19): siRNA sense strand
caacaacaggcuucaugaa

SEQ ID NO: 904979 - RNA, 19 nt, Homo sapiens
  misc_RNA (1)...(19): siRNA sense strand
ggugacuacuuuccagaga

SEQ ID NO: 904980 - RNA, 19 nt, Homo sapiens
  misc_RNA (1)...(19): siRNA sense strand
guucaaggcuccgcaguac

SEQ ID NO: 904981 - RNA, 19 nt, Homo sapiens
  misc_RNA (1)...(19): siRNA sense strand
ccaacaacaggcuucauga

SEQ ID NO: 904982 - RNA, 19 nt, Homo sapiens
  misc_RNA (1)...(19): siRNA sense strand
gugacuacuuuccagagaa

SEQ ID NO: 904983 - RNA, 19 nt, Homo sapiens
  misc_RNA (1)...(19): siRNA sense strand
guaccugauuccaccaaca

SEQ ID NO: 904984 - RNA, 19 nt, Homo sapiens
  misc_RNA (1)...(19): siRNA sense strand
cagccuaccgccaaacuga

SEQ ID NO: 904985 - RNA, 19 nt, Homo sapiens
  misc_RNA (1)...(19): siRNA sense strand
gcacccagccacuccaucu

SEQ ID NO: 904986 - RNA, 19 nt, Homo sapiens
  misc_RNA (1)...(19): siRNA sense strand
gcgacgaccuacacaagac

SEQ ID NO: 904987 - RNA, 19 nt, Homo sapiens
  misc_RNA (1)...(19): siRNA sense strand
caauguaaaccccaagaua

SEQ ID NO: 904988 - RNA, 19 nt, Homo sapiens
  misc_RNA (1)...(19): siRNA sense strand
agagaaauccaccaaguac

SEQ ID NO: 904989 - RNA, 19 nt, Homo sapiens
  misc_RNA (1)...(19): siRNA sense strand
caaguacguguucgacuca

SEQ ID NO: 904990 - RNA, 19 nt, Homo sapiens
  misc_RNA (1)...(19): siRNA sense strand
guugucaccuucggcauca

SEQ ID NO: 904991 - RNA, 19 nt, Homo sapiens
  misc_RNA (1)...(19): siRNA sense strand
ucaaacacucugauuacau

SEQ ID NO: 904992 - RNA, 19 nt, Homo sapiens
  misc_RNA (1)...(19): siRNA sense strand
ugguccaggugacuacuuu

SEQ ID NO: 904993 - RNA, 19 nt, Homo sapiens
  misc_RNA (1)...(19): siRNA sense strand
ccaugcuccuggcagagaa

SEQ ID NO: 904994 - RNA, 19 nt, Homo sapiens
  misc_RNA (1)...(19): siRNA sense strand
cagcgacgaccuacacaag

SEQ ID NO: 904995 - RNA, 19 nt, Homo sapiens
  misc_RNA (1)...(19): siRNA sense strand
gcaggaagccuuggaauuu

SEQ ID NO: 904996 - RNA, 19 nt, Homo sapiens
  misc_RNA (1)...(19): siRNA sense strand
guaaaccgcugcaaacuca

SEQ ID NO: 904997 - RNA, 19 nt, Homo sapiens
  misc_RNA (1)...(19): siRNA sense strand
gaucugccauuuaugauga

SEQ ID NO: 904998 - RNA, 19 nt, Homo sapiens
  misc_RNA (1)...(19): siRNA sense strand
gcugguaccucuguuauaa

SEQ ID NO: 904999 - RNA, 19 nt, Homo sapiens
  misc_RNA (1)...(19): siRNA sense strand
uaacacagguggaagugaa

SEQ ID NO: 905000 - RNA, 19 nt, Homo sapiens
  misc_RNA (1)...(19): siRNA sense strand
ggaaagaauggaagaggua

SEQ ID NO: 905001 - RNA, 19 nt, Homo sapiens
  misc_RNA (1)...(19): siRNA sense strand
gaagcagauucaacaagaa

SEQ ID NO: 905002 - RNA, 19 nt, Homo sapiens
  misc_RNA (1)...(19): siRNA sense strand
gaucaauaguuucgugguu

SEQ ID NO: 905003 - RNA, 19 nt, Homo sapiens
  misc_RNA (1)...(19): siRNA sense strand
cagcuuaccuccugcauca

SEQ ID NO: 905004 - RNA, 19 nt, Homo sapiens
  misc_RNA (1)...(19): siRNA sense strand
gaaacuuuguucaccgauu

SEQ ID NO: 905005 - RNA, 19 nt, Homo sapiens
  misc_RNA (1)...(19): siRNA sense strand
ugaaccaucucaauacuau

SEQ ID NO: 905006 - RNA, 19 nt, Homo sapiens
  misc_RNA (1)...(19): siRNA sense strand
gaucaucauuuggaaagaa

SEQ ID NO: 905007 - RNA, 19 nt, Homo sapiens
  misc_RNA (1)...(19): siRNA sense strand
ccgcaagucuuugaucuuu

SEQ ID NO: 905008 - RNA, 19 nt, Homo sapiens
  misc_RNA (1)...(19): siRNA sense strand
agaagcagauucaacaaga

SEQ ID NO: 905009 - RNA, 19 nt, Homo sapiens
  misc_RNA (1)...(19): siRNA sense strand
gacuggaucugccauuuau

SEQ ID NO: 905010 - RNA, 19 nt, Homo sapiens
  misc_RNA (1)...(19): siRNA sense strand
ugaagagacuggauauauc

SEQ ID NO: 905011 - RNA, 19 nt, Homo sapiens
  misc_RNA (1)...(19): siRNA sense strand
gagaaaaccuugaaagaca

SEQ ID NO: 905012 - RNA, 19 nt, Homo sapiens
  misc_RNA (1)...(19): siRNA sense strand
agaugaagcuuauggcuau

SEQ ID NO: 905013 - RNA, 19 nt, Homo sapiens
  misc_RNA (1)...(19): siRNA sense strand
gcaaacucaucaccaggaa

SEQ ID NO: 905014 - RNA, 19 nt, Homo sapiens
  misc_RNA (1)...(19): siRNA sense strand
guaccucuguuauaaagga

SEQ ID NO: 905015 - RNA, 19 nt, Homo sapiens
  misc_RNA (1)...(19): siRNA sense strand
ucaauaguuucgugguuaa

SEQ ID NO: 905016 - RNA, 19 nt, Homo sapiens
  misc_RNA (1)...(19): siRNA sense strand
gaagagguaccaguucaaa

SEQ ID NO: 905017 - RNA, 19 nt, Homo sapiens
  misc_RNA (1)...(19): siRNA sense strand
ccagugaucucugcaacuu

SEQ ID NO: 905018 - RNA, 19 nt, Homo sapiens
  misc_RNA (1)...(19): siRNA sense strand
cuucaaagcagaacuacua

SEQ ID NO: 905019 - RNA, 19 nt, Homo sapiens
  misc_RNA (1)...(19): siRNA sense strand
aaacuuuguucaccgauug

SEQ ID NO: 905020 - RNA, 19 nt, Homo sapiens
  misc_RNA (1)...(19): siRNA sense strand
aagcagaacuacuaugcaa

SEQ ID NO: 905021 - RNA, 19 nt, Homo sapiens
  misc_RNA (1)...(19): siRNA sense strand
ggaauuccagauauugaaa

SEQ ID NO: 905022 - RNA, 19 nt, Homo sapiens
  misc_RNA (1)...(19): siRNA sense strand
uaagaugcagucuccauuu

SEQ ID NO: 905023 - RNA, 19 nt, Homo sapiens
  misc_RNA (1)...(19): siRNA sense strand
caggaagccuuggaauuug

SEQ ID NO: 905024 - RNA, 19 nt, Homo sapiens
  misc_RNA (1)...(19): siRNA sense strand
gagagagaaauuagagaaa

SEQ ID NO: 905025 - RNA, 19 nt, Homo sapiens
  misc_RNA (1)...(19): siRNA sense strand
ccaguucaaauuccaauaa

SEQ ID NO: 905026 - RNA, 19 nt, Homo sapiens
  misc_RNA (1)...(19): siRNA sense strand
agaggcaaaugacaagaaa

SEQ ID NO: 905027 - RNA, 19 nt, Homo sapiens
  misc_RNA (1)...(19): siRNA sense strand
agagguaccaguucaaauu

SEQ ID NO: 905028 - RNA, 19 nt, Homo sapiens
  misc_RNA (1)...(19): siRNA sense strand
caaugggacuccucaugau

SEQ ID NO: 905029 - RNA, 19 nt, Homo sapiens
  misc_RNA (1)...(19): siRNA sense strand
acaccaagcugaagagacu

SEQ ID NO: 905030 - RNA, 19 nt, Homo sapiens
  misc_RNA (1)...(19): siRNA sense strand
ggaagaggcaaaugacaag

SEQ ID NO: 905031 - RNA, 19 nt, Homo sapiens
  misc_RNA (1)...(19): siRNA sense strand
gacaguggccugaggaugu

SEQ ID NO: 905032 - RNA, 19 nt, Homo sapiens
  misc_RNA (1)...(19): siRNA sense strand
agaaggaagaggcaaauga

SEQ ID NO: 905033 - RNA, 19 nt, Homo sapiens
  misc_RNA (1)...(19): siRNA sense strand
aagaugcagucuccauuug

SEQ ID NO: 905034 - RNA, 19 nt, Homo sapiens
  misc_RNA (1)...(19): siRNA sense strand
gaacacucuucagggaaau

SEQ ID NO: 905035 - RNA, 19 nt, Homo sapiens
  misc_RNA (1)...(19): siRNA sense strand
acaaugggacuccucauga

SEQ ID NO: 905036 - RNA, 19 nt, Homo sapiens
  misc_RNA (1)...(19): siRNA sense strand
agacuggaucugccauuua

SEQ ID NO: 905037 - RNA, 19 nt, Homo sapiens
  misc_RNA (1)...(19): siRNA sense strand
cgucuuacuccuaauauga

SEQ ID NO: 905038 - RNA, 19 nt, Homo sapiens
  misc_RNA (1)...(19): siRNA sense strand
guuuagaaauggcacaaca

SEQ ID NO: 905039 - RNA, 19 nt, Homo sapiens
  misc_RNA (1)...(19): siRNA sense strand
uggaagagguaccaguuca

SEQ ID NO: 905040 - RNA, 19 nt, Homo sapiens
  misc_RNA (1)...(19): siRNA sense strand
uagacuggaucugccauuu

SEQ ID NO: 905041 - RNA, 19 nt, Homo sapiens
  misc_RNA (1)...(19): siRNA sense strand
gaaggaagaggcaaaugac

SEQ ID NO: 905042 - RNA, 19 nt, Homo sapiens
  misc_RNA (1)...(19): siRNA sense strand
cuccuaauaugaucaauag

SEQ ID NO: 905043 - RNA, 19 nt, Homo sapiens
  misc_RNA (1)...(19): siRNA sense strand
uggauucccuggaccauuc

SEQ ID NO: 905044 - RNA, 19 nt, Homo sapiens
  misc_RNA (1)...(19): siRNA sense strand
ggaaauggaagccaaaaug

SEQ ID NO: 905045 - RNA, 19 nt, Homo sapiens
  misc_RNA (1)...(19): siRNA sense strand
agaaccaccugcuaaccaa

SEQ ID NO: 905046 - RNA, 19 nt, Homo sapiens
  misc_RNA (1)...(19): siRNA sense strand
ugcaaggagguaacuauua

SEQ ID NO: 905047 - RNA, 19 nt, Homo sapiens
  misc_RNA (1)...(19): siRNA sense strand
caaagcagaacuacuaugc

SEQ ID NO: 905048 - RNA, 19 nt, Homo sapiens
  misc_RNA (1)...(19): siRNA sense strand
cuauagagagagagaaauu

SEQ ID NO: 905049 - RNA, 19 nt, Homo sapiens
  misc_RNA (1)...(19): siRNA sense strand
gagcugguaccucuguuau

SEQ ID NO: 905050 - RNA, 19 nt, Homo sapiens
  misc_RNA (1)...(19): siRNA sense strand
ggagaagcagauucaacaa

SEQ ID NO: 905051 - RNA, 19 nt, Homo sapiens
  misc_RNA (1)...(19): siRNA sense strand
cugaagagacuggauauau

SEQ ID NO: 905052 - RNA, 19 nt, Homo sapiens
  misc_RNA (1)...(19): siRNA sense strand
ggagcaggcacuuaagcaa

SEQ ID NO: 905053 - RNA, 19 nt, Homo sapiens
  misc_RNA (1)...(19): siRNA sense strand
uggagacucuguugaccaa

SEQ ID NO: 905054 - RNA, 19 nt, Homo sapiens
  misc_RNA (1)...(19): siRNA sense strand
ggaagagguaccaguucaa

SEQ ID NO: 905055 - RNA, 19 nt, Homo sapiens
  misc_RNA (1)...(19): siRNA sense strand
gauaagaugcagucuccau

SEQ ID NO: 905056 - RNA, 19 nt, Homo sapiens
  misc_RNA (1)...(19): siRNA sense strand
gcaccaaugccagaaggaa

SEQ ID NO: 905057 - RNA, 19 nt, Homo sapiens
  misc_RNA (1)...(19): siRNA sense strand
caggaaagacuucgaaacu

SEQ ID NO: 905058 - RNA, 19 nt, Homo sapiens
  misc_RNA (1)...(19): siRNA sense strand
aggaaagacuucgaaacuu

SEQ ID NO: 905059 - RNA, 19 nt, Homo sapiens
  misc_RNA (1)...(19): siRNA sense strand
gcagaacuacuaugcaaaa

SEQ ID NO: 905060 - RNA, 19 nt, Homo sapiens
  misc_RNA (1)...(19): siRNA sense strand
aucaauaguuucgugguua

SEQ ID NO: 905061 - RNA, 19 nt, Homo sapiens
  misc_RNA (1)...(19): siRNA sense strand
ugaagucacccuuggacaa

SEQ ID NO: 905062 - RNA, 19 nt, Homo sapiens
  misc_RNA (1)...(19): siRNA sense strand
gagguaccaguucaaauuc

SEQ ID NO: 905063 - RNA, 19 nt, Homo sapiens
  misc_RNA (1)...(19): siRNA sense strand
gcuaaccaauagacuggau

SEQ ID NO: 905064 - RNA, 19 nt, Homo sapiens
  misc_RNA (1)...(19): siRNA sense strand
aggaagccuuggaauuuga

SEQ ID NO: 905065 - RNA, 19 nt, Homo sapiens
  misc_RNA (1)...(19): siRNA sense strand
agagagagaaauuagagaa

SEQ ID NO: 905066 - RNA, 19 nt, Homo sapiens
  misc_RNA (1)...(19): siRNA sense strand
gagaagcagauucaacaag

SEQ ID NO: 905067 - RNA, 19 nt, Homo sapiens
  misc_RNA (1)...(19): siRNA sense strand
ugaagcuuauggcuaugaa

SEQ ID NO: 905068 - RNA, 19 nt, Homo sapiens
  misc_RNA (1)...(19): siRNA sense strand
cugaggauguuaaaagaua

SEQ ID NO: 905069 - RNA, 19 nt, Homo sapiens
  misc_RNA (1)...(19): siRNA sense strand
gaagaggcaaaugacaaga

SEQ ID NO: 905070 - RNA, 19 nt, Homo sapiens
  misc_RNA (1)...(19): siRNA sense strand
ccauggcaaugaaucagau

SEQ ID NO: 905071 - RNA, 19 nt, Homo sapiens
  misc_RNA (1)...(19): siRNA sense strand
gcaaaugacaagaaaacaa

SEQ ID NO: 905072 - RNA, 19 nt, Homo sapiens
  misc_RNA (1)...(19): siRNA sense strand
gcugaagagacuggauaua

SEQ ID NO: 905073 - RNA, 19 nt, Homo sapiens
  misc_RNA (1)...(19): siRNA sense strand
gagagagagaaauuagaga

SEQ ID NO: 905074 - RNA, 19 nt, Homo sapiens
  misc_RNA (1)...(19): siRNA sense strand
ggaucaucauuuggaaaga

SEQ ID NO: 905075 - RNA, 19 nt, Homo sapiens
  misc_RNA (1)...(19): siRNA sense strand
caaugaaucagaugaacca

SEQ ID NO: 905076 - RNA, 19 nt, Homo sapiens
  misc_RNA (1)...(19): siRNA sense strand
aagcugaagagacuggaua

SEQ ID NO: 905077 - RNA, 19 nt, Homo sapiens
  misc_RNA (1)...(19): siRNA sense strand
aagcagauucaacaagaaa

SEQ ID NO: 905078 - RNA, 19 nt, Homo sapiens
  misc_RNA (1)...(19): siRNA sense strand
ggaucugccauuuaugaug

SEQ ID NO: 905079 - RNA, 19 nt, Homo sapiens
  misc_RNA (1)...(19): siRNA sense strand
ggacggccaggaacugauc

SEQ ID NO: 905080 - RNA, 19 nt, Homo sapiens
  misc_RNA (1)...(19): siRNA sense strand
acaguggccugaggauguu

SEQ ID NO: 905081 - RNA, 19 nt, Homo sapiens
  misc_RNA (1)...(19): siRNA sense strand
ggaagccuuggaauuugaa

SEQ ID NO: 905082 - RNA, 19 nt, Homo sapiens
  misc_RNA (1)...(19): siRNA sense strand
gaugcagucuccauuugcu

SEQ ID NO: 905083 - RNA, 19 nt, Homo sapiens
  misc_RNA (1)...(19): siRNA sense strand
aaacucaucaccaggaaag

SEQ ID NO: 905084 - RNA, 19 nt, Homo sapiens
  misc_RNA (1)...(19): siRNA sense strand
aaugggacuccucaugaua

SEQ ID NO: 905085 - RNA, 19 nt, Homo sapiens
  misc_RNA (1)...(19): siRNA sense strand
ccucgucuuacuccuaaua

SEQ ID NO: 905086 - RNA, 19 nt, Homo sapiens
  misc_RNA (1)...(19): siRNA sense strand
cagaagaugaagcuuaugg

SEQ ID NO: 905087 - RNA, 19 nt, Homo sapiens
  misc_RNA (1)...(19): siRNA sense strand
gggauaaagauaagaugca

SEQ ID NO: 905088 - RNA, 19 nt, Homo sapiens
  misc_RNA (1)...(19): siRNA sense strand
ccuccugggauaaagauaa

SEQ ID NO: 905089 - RNA, 19 nt, Homo sapiens
  misc_RNA (1)...(19): siRNA sense strand
cuggaucugccauuuauga

SEQ ID NO: 905090 - RNA, 19 nt, Homo sapiens
  misc_RNA (1)...(19): siRNA sense strand
gguaaaccgcugcaaacuc

SEQ ID NO: 905091 - RNA, 19 nt, Homo sapiens
  misc_RNA (1)...(19): siRNA sense strand
gcaacaccaacaccaacga

SEQ ID NO: 905092 - RNA, 19 nt, Homo sapiens
  misc_RNA (1)...(19): siRNA sense strand
gguaccaguucaaauucca

SEQ ID NO: 905093 - RNA, 19 nt, Homo sapiens
  misc_RNA (1)...(19): siRNA sense strand
ugguaccucuguuauaaag

SEQ ID NO: 905094 - RNA, 19 nt, Homo sapiens
  misc_RNA (1)...(19): siRNA sense strand
gaugaagcuuauggcuaug

SEQ ID NO: 905095 - RNA, 19 nt, Homo sapiens
  misc_RNA (1)...(19): siRNA sense strand
gaacugaucuccaaauuug

SEQ ID NO: 905096 - RNA, 19 nt, Homo sapiens
  misc_RNA (1)...(19): siRNA sense strand
uaaaggaacugaucuccaa

SEQ ID NO: 905097 - RNA, 19 nt, Homo sapiens
  misc_RNA (1)...(19): siRNA sense strand
gagagaaacacggguauua

SEQ ID NO: 905098 - RNA, 19 nt, Homo sapiens
  misc_RNA (1)...(19): siRNA sense strand
uaacagcgauuauguggau

SEQ ID NO: 905099 - RNA, 19 nt, Homo sapiens
  misc_RNA (1)...(19): siRNA sense strand
ggagaggauugaaauuaga

SEQ ID NO: 905100 - RNA, 19 nt, Homo sapiens
  misc_RNA (1)...(19): siRNA sense strand
gaaauuagaguuggaaaca

SEQ ID NO: 905101 - RNA, 19 nt, Homo sapiens
  misc_RNA (1)...(19): siRNA sense strand
ggaacugaucuccaaauuu

SEQ ID NO: 905102 - RNA, 19 nt, Homo sapiens
  misc_RNA (1)...(19): siRNA sense strand
acacggguauuacaggaua

SEQ ID NO: 905103 - RNA, 19 nt, Homo sapiens
  misc_RNA (1)...(19): siRNA sense strand
gauggcaacuuucuuuuaa

SEQ ID NO: 905104 - RNA, 19 nt, Homo sapiens
  misc_RNA (1)...(19): siRNA sense strand
uaccgaaucuucagagaga

SEQ ID NO: 905105 - RNA, 19 nt, Homo sapiens
  misc_RNA (1)...(19): siRNA sense strand
gauacagacugcagaaggu

SEQ ID NO: 905106 - RNA, 19 nt, Homo sapiens
  misc_RNA (1)...(19): siRNA sense strand
gcgauuauguggaugucuu

SEQ ID NO: 905107 - RNA, 19 nt, Homo sapiens
  misc_RNA (1)...(19): siRNA sense strand
gagaaacacggguauuaca

SEQ ID NO: 905108 - RNA, 19 nt, Homo sapiens
  misc_RNA (1)...(19): siRNA sense strand
gagauggagaggauugaaa

SEQ ID NO: 905109 - RNA, 19 nt, Homo sapiens
  misc_RNA (1)...(19): siRNA sense strand
guuggaaacauuugugaaa

SEQ ID NO: 905110 - RNA, 19 nt, Homo sapiens
  misc_RNA (1)...(19): siRNA sense strand
uggagaggauugaaauuag

SEQ ID NO: 905111 - RNA, 19 nt, Homo sapiens
  misc_RNA (1)...(19): siRNA sense strand
guggauggcaacuuucuuu

SEQ ID NO: 905112 - RNA, 19 nt, Homo sapiens
  misc_RNA (1)...(19): siRNA sense strand
ugaccaagcaagacuguga

SEQ ID NO: 905113 - RNA, 19 nt, Homo sapiens
  misc_RNA (1)...(19): siRNA sense strand
aggaacugaucuccaaauu

SEQ ID NO: 905114 - RNA, 19 nt, Homo sapiens
  misc_RNA (1)...(19): siRNA sense strand
aaaguaacagcgauuaugu

SEQ ID NO: 905115 - RNA, 19 nt, Homo sapiens
  misc_RNA (1)...(19): siRNA sense strand
cuacacauaccgaaucuuc

SEQ ID NO: 905116 - RNA, 19 nt, Homo sapiens
  misc_RNA (1)...(19): siRNA sense strand
gauugaaauuagaguugga

SEQ ID NO: 905117 - RNA, 19 nt, Homo sapiens
  misc_RNA (1)...(19): siRNA sense strand
ggaucugccuuacuaccau

SEQ ID NO: 905118 - RNA, 19 nt, Homo sapiens
  misc_RNA (1)...(19): siRNA sense strand
gugccucugugucucguuu

SEQ ID NO: 905119 - RNA, 19 nt, Homo sapiens
  misc_RNA (1)...(19): siRNA sense strand
gauggagaggauugaaauu

SEQ ID NO: 905120 - RNA, 19 nt, Homo sapiens
  misc_RNA (1)...(19): siRNA sense strand
ggauggcaacuuucuuuua

SEQ ID NO: 905121 - RNA, 19 nt, Homo sapiens
  misc_RNA (1)...(19): siRNA sense strand
ggaaacauuugugaaaagu

SEQ ID NO: 905122 - RNA, 19 nt, Homo sapiens
  misc_RNA (1)...(19): siRNA sense strand
cauaccgaaucuucagaga

SEQ ID NO: 905123 - RNA, 19 nt, Homo sapiens
  misc_RNA (1)...(19): siRNA sense strand
auggagaggauugaaauua

SEQ ID NO: 905124 - RNA, 19 nt, Homo sapiens
  misc_RNA (1)...(19): siRNA sense strand
uaagagacagcgagucgau

SEQ ID NO: 905125 - RNA, 19 nt, Homo sapiens
  misc_RNA (1)...(19): siRNA sense strand
uaaagccaauaaagagaac

SEQ ID NO: 905126 - RNA, 19 nt, Homo sapiens
  misc_RNA (1)...(19): siRNA sense strand
gaguuggaaacauuuguga

SEQ ID NO: 905127 - RNA, 19 nt, Homo sapiens
  misc_RNA (1)...(19): siRNA sense strand
gaggauugaaauuagaguu

SEQ ID NO: 905128 - RNA, 19 nt, Homo sapiens
  misc_RNA (1)...(19): siRNA sense strand
gccucugugucucguuuaa

SEQ ID NO: 905129 - RNA, 19 nt, Homo sapiens
  misc_RNA (1)...(19): siRNA sense strand
gaaaaguaacagcgauuau

SEQ ID NO: 905130 - RNA, 19 nt, Homo sapiens
  misc_RNA (1)...(19): siRNA sense strand
gagaggauugaaauuagag

SEQ ID NO: 905131 - RNA, 19 nt, Homo sapiens
  misc_RNA (1)...(19): siRNA sense strand
caggauacagacugcagaa

SEQ ID NO: 905132 - RNA, 19 nt, Homo sapiens
  misc_RNA (1)...(19): siRNA sense strand
guucaugacucuccucuuc

SEQ ID NO: 905133 - RNA, 19 nt, Homo sapiens
  misc_RNA (1)...(19): siRNA sense strand
guaaaggagccguccauga

SEQ ID NO: 905134 - RNA, 19 nt, Homo sapiens
  misc_RNA (1)...(19): siRNA sense strand
agacguccuugacucagua

SEQ ID NO: 905135 - RNA, 19 nt, Homo sapiens
  misc_RNA (1)...(19): siRNA sense strand
gaaaagaugcagucgaaga

SEQ ID NO: 905136 - RNA, 19 nt, Homo sapiens
  misc_RNA (1)...(19): siRNA sense strand
uaaaggagccguccaugac

SEQ ID NO: 905137 - RNA, 19 nt, Homo sapiens
  misc_RNA (1)...(19): siRNA sense strand
uaaagacguccuugacuca

SEQ ID NO: 905138 - RNA, 19 nt, Homo sapiens
  misc_RNA (1)...(19): siRNA sense strand
guccuugacucaguacuau

SEQ ID NO: 905139 - RNA, 19 nt, Homo sapiens
  misc_RNA (1)...(19): siRNA sense strand
agucgaagaucuagaaagc

SEQ ID NO: 905140 - RNA, 19 nt, Homo sapiens
  misc_RNA (1)...(19): siRNA sense strand
cuagaaagcguggguaaag

SEQ ID NO: 905141 - RNA, 19 nt, Homo sapiens
  misc_RNA (1)...(19): siRNA sense strand
ggggaacccuugccaugaa

SEQ ID NO: 905142 - RNA, 19 nt, Homo sapiens
  misc_RNA (1)...(19): siRNA sense strand
ggaaaacuaggaaaagaug

SEQ ID NO: 905143 - RNA, 19 nt, Homo sapiens
  misc_RNA (1)...(19): siRNA sense strand
gggaacccuugccaugaag

SEQ ID NO: 905144 - RNA, 19 nt, Homo sapiens
  misc_RNA (1)...(19): siRNA sense strand
gcagucgaagaucuagaaa

SEQ ID NO: 905145 - RNA, 19 nt, Homo sapiens
  misc_RNA (1)...(19): siRNA sense strand
aggaaaagaugcagucgaa

SEQ ID NO: 905146 - RNA, 19 nt, Homo sapiens
  misc_RNA (1)...(19): siRNA sense strand
agaaagcguggguaaagga

SEQ ID NO: 905147 - RNA, 19 nt, Homo sapiens
  misc_RNA (1)...(19): siRNA sense strand
gcccuggucugugccuaug

SEQ ID NO: 905148 - RNA, 19 nt, Homo sapiens
  misc_RNA (1)...(19): siRNA sense strand
aaaggaaaaugcaggugaa

SEQ ID NO: 905149 - RNA, 19 nt, Homo sapiens
  misc_RNA (1)...(19): siRNA sense strand
uagaaagcguggguaaagg

SEQ ID NO: 905150 - RNA, 19 nt, Homo sapiens
  misc_RNA (1)...(19): siRNA sense strand
caccaaagccaaggaagca

SEQ ID NO: 905151 - RNA, 19 nt, Homo sapiens
  misc_RNA (1)...(19): siRNA sense strand
gaacauagaccaaauggaa

SEQ ID NO: 905152 - RNA, 19 nt, Homo sapiens
  misc_RNA (1)...(19): siRNA sense strand
ccacaugccuccaguuuaa

SEQ ID NO: 905153 - RNA, 19 nt, Homo sapiens
  misc_RNA (1)...(19): siRNA sense strand
gagaagaugugugagaaua

SEQ ID NO: 905154 - RNA, 19 nt, Homo sapiens
  misc_RNA (1)...(19): siRNA sense strand
gaaauucaacugucagaua

SEQ ID NO: 905155 - RNA, 19 nt, Homo sapiens
  misc_RNA (1)...(19): siRNA sense strand
guacauagcaccuuuaaug

SEQ ID NO: 905156 - RNA, 19 nt, Homo sapiens
  misc_RNA (1)...(19): siRNA sense strand
guaguaaacuucaaagaug

SEQ ID NO: 905157 - RNA, 19 nt, Homo sapiens
  misc_RNA (1)...(19): siRNA sense strand
gccagcaucuucuuuauug

SEQ ID NO: 905158 - RNA, 19 nt, Homo sapiens
  misc_RNA (1)...(19): siRNA sense strand
uaauggagcuucuacagau

SEQ ID NO: 905159 - RNA, 19 nt, Homo sapiens
  misc_RNA (1)...(19): siRNA sense strand
gaagaugugugagaauaca

SEQ ID NO: 905160 - RNA, 19 nt, Homo sapiens
  misc_RNA (1)...(19): siRNA sense strand
gcagccagcaucuucuuua

SEQ ID NO: 905161 - RNA, 19 nt, Homo sapiens
  misc_RNA (1)...(19): siRNA sense strand
gcucauggauggacgaauc

SEQ ID NO: 905162 - RNA, 19 nt, Homo sapiens
  misc_RNA (1)...(19): siRNA sense strand
ggacgaaucaucuuuggau

SEQ ID NO: 905163 - RNA, 19 nt, Homo sapiens
  misc_RNA (1)...(19): siRNA sense strand
gcagugacuucucaguuuc

SEQ ID NO: 905164 - RNA, 19 nt, Homo sapiens
  misc_RNA (1)...(19): siRNA sense strand
ggagaagucguacaucgaa

SEQ ID NO: 905165 - RNA, 19 nt, Homo sapiens
  misc_RNA (1)...(19): siRNA sense strand
gcgaugaaguuuagaagag

SEQ ID NO: 905166 - RNA, 19 nt, Homo sapiens
  misc_RNA (1)...(19): siRNA sense strand
agaagaugauaccaagaua

SEQ ID NO: 905167 - RNA, 19 nt, Homo sapiens
  misc_RNA (1)...(19): siRNA sense strand
gacgaaucaucuuuggaua

SEQ ID NO: 905168 - RNA, 19 nt, Homo sapiens
  misc_RNA (1)...(19): siRNA sense strand
cagauaaguucaaccaauc

SEQ ID NO: 905169 - RNA, 19 nt, Homo sapiens
  misc_RNA (1)...(19): siRNA sense strand
cgaagaagaacaauuuaug

SEQ ID NO: 905170 - RNA, 19 nt, Homo sapiens
  misc_RNA (1)...(19): siRNA sense strand
gauaauggcacagcacuug

SEQ ID NO: 905171 - RNA, 19 nt, Homo sapiens
  misc_RNA (1)...(19): siRNA sense strand
gaauacagaaccaguggaa

SEQ ID NO: 905172 - RNA, 19 nt, Homo sapiens
  misc_RNA (1)...(19): siRNA sense strand
guacaucuccaggauaauu

SEQ ID NO: 905173 - RNA, 19 nt, Homo sapiens
  misc_RNA (1)...(19): siRNA sense strand
cauauacacuggagaaguc

SEQ ID NO: 905174 - RNA, 19 nt, Homo sapiens
  misc_RNA (1)...(19): siRNA sense strand
auacagaccacaauuacua

SEQ ID NO: 905175 - RNA, 19 nt, Homo sapiens
  misc_RNA (1)...(19): siRNA sense strand
acagauaaguucaaccaau

SEQ ID NO: 905176 - RNA, 19 nt, Homo sapiens
  misc_RNA (1)...(19): siRNA sense strand
aaauuucgaucccagugua

SEQ ID NO: 905177 - RNA, 19 nt, Homo sapiens
  misc_RNA (1)...(19): siRNA sense strand
caccuuuaauggcaaauuu

SEQ ID NO: 905178 - RNA, 19 nt, Homo sapiens
  misc_RNA (1)...(19): siRNA sense strand
gagugaaucuguccuucga

SEQ ID NO: 905179 - RNA, 19 nt, Homo sapiens
  misc_RNA (1)...(19): siRNA sense strand
ccacaggauccaacaaauu

SEQ ID NO: 905180 - RNA, 19 nt, Homo sapiens
  misc_RNA (1)...(19): siRNA sense strand
cgaaucaucuuuggauaca

SEQ ID NO: 905181 - RNA, 19 nt, Homo sapiens
  misc_RNA (1)...(19): siRNA sense strand
ccaccagccucccuacaga

SEQ ID NO: 905182 - RNA, 19 nt, Homo sapiens
  misc_RNA (1)...(19): siRNA sense strand
ugaaccaguuggagagaaa

SEQ ID NO: 905183 - RNA, 19 nt, Homo sapiens
  misc_RNA (1)...(19): siRNA sense strand
gagcaagcgucggccaaga

SEQ ID NO: 905184 - RNA, 19 nt, Homo sapiens
  misc_RNA (1)...(19): siRNA sense strand
gagcagugacuucucaguu

SEQ ID NO: 905185 - RNA, 19 nt, Homo sapiens
  misc_RNA (1)...(19): siRNA sense strand
guggaaacuucuucucgaa

SEQ ID NO: 905186 - RNA, 19 nt, Homo sapiens
  misc_RNA (1)...(19): siRNA sense strand
caaaagagaagauguguga

SEQ ID NO: 905187 - RNA, 19 nt, Homo sapiens
  misc_RNA (1)...(19): siRNA sense strand
gauuggcaguauggaguua

SEQ ID NO: 905188 - RNA, 19 nt, Homo sapiens
  misc_RNA (1)...(19): siRNA sense strand
gagagacgcccaagcagau

SEQ ID NO: 905189 - RNA, 19 nt, Homo sapiens
  misc_RNA (1)...(19): siRNA sense strand
cacaguacauagcaccuuu

SEQ ID NO: 905190 - RNA, 19 nt, Homo sapiens
  misc_RNA (1)...(19): siRNA sense strand
ucaaggcgguagacacgaa

SEQ ID NO: 905191 - RNA, 19 nt, Homo sapiens
  misc_RNA (1)...(19): siRNA sense strand
aagagaagaugugugagaa

SEQ ID NO: 905192 - RNA, 19 nt, Homo sapiens
  misc_RNA (1)...(19): siRNA sense strand
ggccugcgaugaaguuuag

SEQ ID NO: 905193 - RNA, 19 nt, Homo sapiens
  misc_RNA (1)...(19): siRNA sense strand
gaagaugauaccaagauag

SEQ ID NO: 905194 - RNA, 19 nt, Homo sapiens
  misc_RNA (1)...(19): siRNA sense strand
gcaggaguuauguuacuuu

SEQ ID NO: 905195 - RNA, 19 nt, Homo sapiens
  misc_RNA (1)...(19): siRNA sense strand
gaugaugggcaggacaaua

SEQ ID NO: 905196 - RNA, 19 nt, Homo sapiens
  misc_RNA (1)...(19): siRNA sense strand
cagaaccaguggaaacuuc

SEQ ID NO: 905197 - RNA, 19 nt, Homo sapiens
  misc_RNA (1)...(19): siRNA sense strand
gacaguggaugcccugaag

SEQ ID NO: 905198 - RNA, 19 nt, Homo sapiens
  misc_RNA (1)...(19): siRNA sense strand
caaccaaucauccagugaa

SEQ ID NO: 905199 - RNA, 19 nt, Homo sapiens
  misc_RNA (1)...(19): siRNA sense strand
gaggauacagaccacaauu

SEQ ID NO: 905200 - RNA, 19 nt, Homo sapiens
  misc_RNA (1)...(19): siRNA sense strand
cccaguguauccagaaauu

SEQ ID NO: 905201 - RNA, 19 nt, Homo sapiens
  misc_RNA (1)...(19): siRNA sense strand
ggauacagaccacaauuac

SEQ ID NO: 905202 - RNA, 19 nt, Homo sapiens
  misc_RNA (1)...(19): siRNA sense strand
ggagguggaaguugauuca

SEQ ID NO: 905203 - RNA, 19 nt, Homo sapiens
  misc_RNA (1)...(19): siRNA sense strand
agcagugacuucucaguuu

SEQ ID NO: 905204 - RNA, 19 nt, Homo sapiens
  misc_RNA (1)...(19): siRNA sense strand
ucacggaccaguuucaguu

SEQ ID NO: 905205 - RNA, 19 nt, Homo sapiens
  misc_RNA (1)...(19): siRNA sense strand
aggaggagguggaaguuga

SEQ ID NO: 905206 - RNA, 19 nt, Homo sapiens
  misc_RNA (1)...(19): siRNA sense strand
agucguacaucgaaugcua

SEQ ID NO: 905207 - RNA, 19 nt, Homo sapiens
  misc_RNA (1)...(19): siRNA sense strand
cagugcagcugagaagaaa

SEQ ID NO: 905208 - RNA, 19 nt, Homo sapiens
  misc_RNA (1)...(19): siRNA sense strand
cagccagcaucuucuuuau

SEQ ID NO: 905209 - RNA, 19 nt, Homo sapiens
  misc_RNA (1)...(19): siRNA sense strand
gagaagucguacaucgaau

SEQ ID NO: 905210 - RNA, 19 nt, Homo sapiens
  misc_RNA (1)...(19): siRNA sense strand
aaagagaagaugugugaga

SEQ ID NO: 905211 - RNA, 19 nt, Homo sapiens
  misc_RNA (1)...(19): siRNA sense strand
ucaguucgccgaugggaaa

SEQ ID NO: 905212 - RNA, 19 nt, Homo sapiens
  misc_RNA (1)...(19): siRNA sense strand
caggaguuauguuacuuug

SEQ ID NO: 905213 - RNA, 19 nt, Homo sapiens
  misc_RNA (1)...(19): siRNA sense strand
gcuaacagccacacaguac

SEQ ID NO: 905214 - RNA, 19 nt, Homo sapiens
  misc_RNA (1)...(19): siRNA sense strand
ccauguacaucuccaggau

SEQ ID NO: 905215 - RNA, 19 nt, Homo sapiens
  misc_RNA (1)...(19): siRNA sense strand
agaaggcuuuauuguauca

SEQ ID NO: 905216 - RNA, 19 nt, Homo sapiens
  misc_RNA (1)...(19): siRNA sense strand
uauguuacuuugccacuuc

SEQ ID NO: 905217 - RNA, 19 nt, Homo sapiens
  misc_RNA (1)...(19): siRNA sense strand
cagaagaugauaccaagau

SEQ ID NO: 905218 - RNA, 19 nt, Homo sapiens
  misc_RNA (1)...(19): siRNA sense strand
uggaugcccugaagaguca

SEQ ID NO: 905219 - RNA, 19 nt, Homo sapiens
  misc_RNA (1)...(19): siRNA sense strand
uccaacaaauucccaaugu

SEQ ID NO: 905220 - RNA, 19 nt, Homo sapiens
  misc_RNA (1)...(19): siRNA sense strand
ccaaucauccagugaaagu

SEQ ID NO: 905221 - RNA, 19 nt, Homo sapiens
  misc_RNA (1)...(19): siRNA sense strand
caucuucuuuauugagaga

SEQ ID NO: 905222 - RNA, 19 nt, Homo sapiens
  misc_RNA (1)...(19): siRNA sense strand
gauaauggagcuucuacag

SEQ ID NO: 905223 - RNA, 19 nt, Homo sapiens
  misc_RNA (1)...(19): siRNA sense strand
cacaggauccaacaaauuc

SEQ ID NO: 905224 - RNA, 19 nt, Homo sapiens
  misc_RNA (1)...(19): siRNA sense strand
cagaccugcugcuggauga

SEQ ID NO: 905225 - RNA, 19 nt, Homo sapiens
  misc_RNA (1)...(19): siRNA sense strand
gagcgacaaccacccaguu

SEQ ID NO: 905226 - RNA, 19 nt, Homo sapiens
  misc_RNA (1)...(19): siRNA sense strand
gaaacuucuucucgaacca

SEQ ID NO: 905227 - RNA, 19 nt, Homo sapiens
  misc_RNA (1)...(19): siRNA sense strand
gaaacccggagaccaaauc

SEQ ID NO: 905228 - RNA, 19 nt, Homo sapiens
  misc_RNA (1)...(19): siRNA sense strand
ggacaguggaugcccugaa

SEQ ID NO: 905229 - RNA, 19 nt, Homo sapiens
  misc_RNA (1)...(19): siRNA sense strand
guacaucgaaugcuaacag

SEQ ID NO: 905230 - RNA, 19 nt, Homo sapiens
  misc_RNA (1)...(19): siRNA sense strand
cuacagaagaugauaccaa

SEQ ID NO: 905231 - RNA, 19 nt, Homo sapiens
  misc_RNA (1)...(19): siRNA sense strand
auguacaucuccaggauaa

SEQ ID NO: 905232 - RNA, 19 nt, Homo sapiens
  misc_RNA (1)...(19): siRNA sense strand
ggacaauaacacucagauc

SEQ ID NO: 905233 - RNA, 19 nt, Homo sapiens
  misc_RNA (1)...(19): siRNA sense strand
gggugaacauagaccaaau

SEQ ID NO: 905234 - RNA, 19 nt, Homo sapiens
  misc_RNA (1)...(19): siRNA sense strand
aggauacagaccacaauua

SEQ ID NO: 905235 - RNA, 19 nt, Homo sapiens
  misc_RNA (1)...(19): siRNA sense strand
aggcaacccugcucaugga

SEQ ID NO: 905236 - RNA, 19 nt, Homo sapiens
  misc_RNA (1)...(19): siRNA sense strand
ugccuaugcugaaguugaa

SEQ ID NO: 905237 - RNA, 19 nt, Homo sapiens
  misc_RNA (1)...(19): siRNA sense strand
aaccaaucauccagugaaa

SEQ ID NO: 905238 - RNA, 19 nt, Homo sapiens
  misc_RNA (1)...(19): siRNA sense strand
ucacacagauaaguucaac

SEQ ID NO: 905239 - RNA, 19 nt, Homo sapiens
  misc_RNA (1)...(19): siRNA sense strand
ggaggauacagaccacaau

SEQ ID NO: 905240 - RNA, 19 nt, Homo sapiens
  misc_RNA (1)...(19): siRNA sense strand
ccagcaucuucuuuauuga

SEQ ID NO: 905241 - RNA, 19 nt, Homo sapiens
  misc_RNA (1)...(19): siRNA sense strand
cagccucccuacagaagau

SEQ ID NO: 905242 - RNA, 19 nt, Homo sapiens
  misc_RNA (1)...(19): siRNA sense strand
acucaggccuucccucaca

SEQ ID NO: 905243 - RNA, 19 nt, Homo sapiens
  misc_RNA (1)...(19): siRNA sense strand
caaauucccaauguucgaa

SEQ ID NO: 905244 - RNA, 19 nt, Homo sapiens
  misc_RNA (1)...(19): siRNA sense strand
guccuucgauuuuccauuu

SEQ ID NO: 905245 - RNA, 19 nt, Homo sapiens
  misc_RNA (1)...(19): siRNA sense strand
caagagugaaucuguccuu

SEQ ID NO: 905246 - RNA, 19 nt, Homo sapiens
  misc_RNA (1)...(19): siRNA sense strand
cauuguagccacagccauu

SEQ ID NO: 905247 - RNA, 19 nt, Homo sapiens
  misc_RNA (1)...(19): siRNA sense strand
augaugggcaggacaauaa

SEQ ID NO: 905248 - RNA, 19 nt, Homo sapiens
  misc_RNA (1)...(19): siRNA sense strand
uacaucuccaggauaauua

SEQ ID NO: 905249 - RNA, 19 nt, Homo sapiens
  misc_RNA (1)...(19): siRNA sense strand
guccacaggauccaacaaa

SEQ ID NO: 905250 - RNA, 19 nt, Homo sapiens
  misc_RNA (1)...(19): siRNA sense strand
uuaugaauaccaccgagua

SEQ ID NO: 905251 - RNA, 19 nt, Homo sapiens
  misc_RNA (1)...(19): siRNA sense strand
gagcgaaacuaccgucuaa

SEQ ID NO: 905252 - RNA, 19 nt, Homo sapiens
  misc_RNA (1)...(19): siRNA sense strand
aaacauaucuggaaacauc

SEQ ID NO: 905253 - RNA, 19 nt, Homo sapiens
  misc_RNA (1)...(19): siRNA sense strand
ggagggauuccacucauua

SEQ ID NO: 905254 - RNA, 19 nt, Homo sapiens
  misc_RNA (1)...(19): siRNA sense strand
caugauggauguagucuau

SEQ ID NO: 905255 - RNA, 19 nt, Homo sapiens
  misc_RNA (1)...(19): siRNA sense strand
gcaucacacucaccaacua

SEQ ID NO: 905256 - RNA, 19 nt, Homo sapiens
  misc_RNA (1)...(19): siRNA sense strand
gcaagaagguggagaucgu

SEQ ID NO: 905257 - RNA, 19 nt, Homo sapiens
  misc_RNA (1)...(19): siRNA sense strand
caugaccucugcugucuuu

SEQ ID NO: 905258 - RNA, 19 nt, Homo sapiens
  misc_RNA (1)...(19): siRNA sense strand
guuuagaucucuccaacaa

SEQ ID NO: 905259 - RNA, 19 nt, Homo sapiens
  misc_RNA (1)...(19): siRNA sense strand
cgacuaaacauaucuggaa

SEQ ID NO: 905260 - RNA, 19 nt, Homo sapiens
  misc_RNA (1)...(19): siRNA sense strand
caucacagcugcagucaac

SEQ ID NO: 905261 - RNA, 19 nt, Homo sapiens
  misc_RNA (1)...(19): siRNA sense strand
gacuaaacauaucuggaaa

SEQ ID NO: 905262 - RNA, 19 nt, Homo sapiens
  misc_RNA (1)...(19): siRNA sense strand
cagcacaucucagugaaug

SEQ ID NO: 905263 - RNA, 19 nt, Homo sapiens
  misc_RNA (1)...(19): siRNA sense strand
ugacucagguucccuucuu

SEQ ID NO: 905264 - RNA, 19 nt, Homo sapiens
  misc_RNA (1)...(19): siRNA sense strand
gcacacacaccaccucauc

SEQ ID NO: 905265 - RNA, 19 nt, Homo sapiens
  misc_RNA (1)...(19): siRNA sense strand
cuacaucccuguggcuuug

SEQ ID NO: 905266 - RNA, 19 nt, Homo sapiens
  misc_RNA (1)...(19): siRNA sense strand
cuaaacauaucuggaaaca

SEQ ID NO: 905267 - RNA, 19 nt, Homo sapiens
  misc_RNA (1)...(19): siRNA sense strand
cgaggaacguggcauugga

SEQ ID NO: 905268 - RNA, 19 nt, Homo sapiens
  misc_RNA (1)...(19): siRNA sense strand
gagcugaagcguuuagauc

SEQ ID NO: 905269 - RNA, 19 nt, Homo sapiens
  misc_RNA (1)...(19): siRNA sense strand
ggauuccacucauuaucug

SEQ ID NO: 905270 - RNA, 19 nt, Homo sapiens
  misc_RNA (1)...(19): siRNA sense strand
cgucuucacucaccacugu

SEQ ID NO: 905271 - RNA, 19 nt, Homo sapiens
  misc_RNA (1)...(19): siRNA sense strand
ccacgcacuuccuguacuu

SEQ ID NO: 905272 - RNA, 19 nt, Homo sapiens
  misc_RNA (1)...(19): siRNA sense strand
gacugucacugcuggagaa

SEQ ID NO: 905273 - RNA, 19 nt, Homo sapiens
  misc_RNA (1)...(19): siRNA sense strand
gcucaucaccuggaucuau

SEQ ID NO: 905274 - RNA, 19 nt, Homo sapiens
  misc_RNA (1)...(19): siRNA sense strand
gcucagaugauccagaaau

SEQ ID NO: 905275 - RNA, 19 nt, Homo sapiens
  misc_RNA (1)...(19): siRNA sense strand
ggacuugggcaccgaguuc

SEQ ID NO: 905276 - RNA, 19 nt, Homo sapiens
  misc_RNA (1)...(19): siRNA sense strand
uggcucagaugauccagaa

SEQ ID NO: 905277 - RNA, 19 nt, Homo sapiens
  misc_RNA (1)...(19): siRNA sense strand
cagucaacauccacaacua

SEQ ID NO: 905278 - RNA, 19 nt, Homo sapiens
  misc_RNA (1)...(19): siRNA sense strand
ugauggauguagucuaugu

SEQ ID NO: 905279 - RNA, 19 nt, Homo sapiens
  misc_RNA (1)...(19): siRNA sense strand
uuugaucgcuggagggauu

SEQ ID NO: 905280 - RNA, 19 nt, Homo sapiens
  misc_RNA (1)...(19): siRNA sense strand
gaaacaucuucuccagucu

SEQ ID NO: 905281 - RNA, 19 nt, Homo sapiens
  misc_RNA (1)...(19): siRNA sense strand
ccgaguuccugaccuguga

SEQ ID NO: 905282 - RNA, 19 nt, Homo sapiens
  misc_RNA (1)...(19): siRNA sense strand
gagcugacgcugucucaca

SEQ ID NO: 905283 - RNA, 19 nt, Homo sapiens
  misc_RNA (1)...(19): siRNA sense strand
gcacuacuccucccuaucc

SEQ ID NO: 905284 - RNA, 19 nt, Homo sapiens
  misc_RNA (1)...(19): siRNA sense strand
gcccaucaaugccuccaau

SEQ ID NO: 905285 - RNA, 19 nt, Homo sapiens
  misc_RNA (1)...(19): siRNA sense strand
gaucaaagagcugguagag

SEQ ID NO: 905286 - RNA, 19 nt, Homo sapiens
  misc_RNA (1)...(19): siRNA sense strand
ggcacaugcugcugaacuu

SEQ ID NO: 905287 - RNA, 19 nt, Homo sapiens
  misc_RNA (1)...(19): siRNA sense strand
gcccagcacaucucaguga

SEQ ID NO: 905288 - RNA, 19 nt, Homo sapiens
  misc_RNA (1)...(19): siRNA sense strand
caaggcaacgccagcaaga

SEQ ID NO: 905289 - RNA, 19 nt, Homo sapiens
  misc_RNA (1)...(19): siRNA sense strand
gauggugacagccucuauu

SEQ ID NO: 905290 - RNA, 19 nt, Homo sapiens
  misc_RNA (1)...(19): siRNA sense strand
ucagaugauccagaaauuu

SEQ ID NO: 905291 - RNA, 19 nt, Homo sapiens
  misc_RNA (1)...(19): siRNA sense strand
ucaccuacauccucaacca

SEQ ID NO: 905292 - RNA, 19 nt, Homo sapiens
  misc_RNA (1)...(19): siRNA sense strand
gcaucacccugcacuacuc

SEQ ID NO: 905293 - RNA, 19 nt, Homo sapiens
  misc_RNA (1)...(19): siRNA sense strand
ucaucaagccgcacagcua

SEQ ID NO: 905294 - RNA, 19 nt, Homo sapiens
  misc_RNA (1)...(19): siRNA sense strand
gcacaugcugcugaacuug

SEQ ID NO: 905295 - RNA, 19 nt, Homo sapiens
  misc_RNA (1)...(19): siRNA sense strand
gcuggcacaugcugcugaa

SEQ ID NO: 905296 - RNA, 19 nt, Homo sapiens
  misc_RNA (1)...(19): siRNA sense strand
cucagaugauccagaaauu

SEQ ID NO: 905297 - RNA, 19 nt, Homo sapiens
  misc_RNA (1)...(19): siRNA sense strand
ugaccacgcacuuccugua

SEQ ID NO: 905298 - RNA, 19 nt, Homo sapiens
  misc_RNA (1)...(19): siRNA sense strand
gcugaagcguuuagaucuc

SEQ ID NO: 905299 - RNA, 19 nt, Homo sapiens
  misc_RNA (1)...(19): siRNA sense strand
gccaugaccucugcugucu

SEQ ID NO: 905300 - RNA, 19 nt, Homo sapiens
  misc_RNA (1)...(19): siRNA sense strand
gaccugaggaacaacauca

SEQ ID NO: 905301 - RNA, 19 nt, Homo sapiens
  misc_RNA (1)...(19): siRNA sense strand
gggauuccacucauuaucu

SEQ ID NO: 905302 - RNA, 19 nt, Homo sapiens
  misc_RNA (1)...(19): siRNA sense strand
cgcgagugcuccauaagga

SEQ ID NO: 905303 - RNA, 19 nt, Homo sapiens
  misc_RNA (1)...(19): siRNA sense strand
cugcucgucuuccgaaaug

SEQ ID NO: 905304 - RNA, 19 nt, Homo sapiens
  misc_RNA (1)...(19): siRNA sense strand
cucaucaccuggaucuauu

SEQ ID NO: 905305 - RNA, 19 nt, Homo sapiens
  misc_RNA (1)...(19): siRNA sense strand
ggugacagccucuauucuc

SEQ ID NO: 905306 - RNA, 19 nt, Homo sapiens
  misc_RNA (1)...(19): siRNA sense strand
cagaugauccagaaauuuu

SEQ ID NO: 905307 - RNA, 19 nt, Homo sapiens
  misc_RNA (1)...(19): siRNA sense strand
ccuaugcuccgguucuauu

SEQ ID NO: 905308 - RNA, 19 nt, Homo sapiens
  misc_RNA (1)...(19): siRNA sense strand
gagggauuccacucauuau

SEQ ID NO: 905309 - RNA, 19 nt, Homo sapiens
  misc_RNA (1)...(19): siRNA sense strand
ugccagcccuuaagguugu

SEQ ID NO: 905310 - RNA, 19 nt, Homo sapiens
  misc_RNA (1)...(19): siRNA sense strand
gacucagguucccuucuug

SEQ ID NO: 905311 - RNA, 19 nt, Homo sapiens
  misc_RNA (1)...(19): siRNA sense strand
gcagucaacauccacaacu

SEQ ID NO: 905312 - RNA, 19 nt, Homo sapiens
  misc_RNA (1)...(19): siRNA sense strand
caauguggccgugcucaug

SEQ ID NO: 905313 - RNA, 19 nt, Homo sapiens
  misc_RNA (1)...(19): siRNA sense strand
cuauguggcucagaugauc

SEQ ID NO: 905314 - RNA, 19 nt, Homo sapiens
  misc_RNA (1)...(19): siRNA sense strand
cucauuaucuguggcauca

SEQ ID NO: 905315 - RNA, 19 nt, Homo sapiens
  misc_RNA (1)...(19): siRNA sense strand
guccuaugcuccgguucua

SEQ ID NO: 905316 - RNA, 19 nt, Homo sapiens
  misc_RNA (1)...(19): siRNA sense strand
ucagguucccuucuugcua

SEQ ID NO: 905317 - RNA, 19 nt, Homo sapiens
  misc_RNA (1)...(19): siRNA sense strand
cccuggagcugcacacaca

SEQ ID NO: 905318 - RNA, 19 nt, Homo sapiens
  misc_RNA (1)...(19): siRNA sense strand
augcuccgguucuauuuga

SEQ ID NO: 905319 - RNA, 19 nt, Homo sapiens
  misc_RNA (1)...(19): siRNA sense strand
aggcgcgagugcuccauaa

SEQ ID NO: 905320 - RNA, 19 nt, Homo sapiens
  misc_RNA (1)...(19): siRNA sense strand
ccaccaucaucaccuacau

SEQ ID NO: 905321 - RNA, 19 nt, Homo sapiens
  misc_RNA (1)...(19): siRNA sense strand
uggguuaugucgaccagau

SEQ ID NO: 905322 - RNA, 19 nt, Homo sapiens
  misc_RNA (1)...(19): siRNA sense strand
cccuuaagguuguggacuu

SEQ ID NO: 905323 - RNA, 19 nt, Homo sapiens
  misc_RNA (1)...(19): siRNA sense strand
ggagcugaagcguuuagau

SEQ ID NO: 905324 - RNA, 19 nt, Homo sapiens
  misc_RNA (1)...(19): siRNA sense strand
ucgccaccaucaucaccua

SEQ ID NO: 905325 - RNA, 19 nt, Homo sapiens
  misc_RNA (1)...(19): siRNA sense strand
caucuucuccagucugcaa

SEQ ID NO: 905326 - RNA, 19 nt, Homo sapiens
  misc_RNA (1)...(19): siRNA sense strand
ccuuaagguuguggacuug

SEQ ID NO: 905327 - RNA, 19 nt, Homo sapiens
  misc_RNA (1)...(19): siRNA sense strand
ggauggugacagccucuau

SEQ ID NO: 905328 - RNA, 19 nt, Homo sapiens
  misc_RNA (1)...(19): siRNA sense strand
cagcugcagucaacaucca

SEQ ID NO: 905329 - RNA, 19 nt, Homo sapiens
  misc_RNA (1)...(19): siRNA sense strand
cccacugucucuacaccaa

SEQ ID NO: 905330 - RNA, 19 nt, Homo sapiens
  misc_RNA (1)...(19): siRNA sense strand
ccaggcuucuccgacuaaa

SEQ ID NO: 905331 - RNA, 19 nt, Homo sapiens
  misc_RNA (1)...(19): siRNA sense strand
gggcaucacccugcacuac

SEQ ID NO: 905332 - RNA, 19 nt, Homo sapiens
  misc_RNA (1)...(19): siRNA sense strand
gcuccagccagcccaaugu

SEQ ID NO: 905333 - RNA, 19 nt, Homo sapiens
  misc_RNA (1)...(19): siRNA sense strand
caagaaagcuggagauuug

SEQ ID NO: 905334 - RNA, 19 nt, Homo sapiens
  misc_RNA (1)...(19): siRNA sense strand
ccacgaagcugcccugaga

SEQ ID NO: 905335 - RNA, 19 nt, Homo sapiens
  misc_RNA (1)...(19): siRNA sense strand
gaaaugcuaccacaagaaa

SEQ ID NO: 905336 - RNA, 19 nt, Homo sapiens
  misc_RNA (1)...(19): siRNA sense strand
gaagcucccucaaggaaau

SEQ ID NO: 905337 - RNA, 19 nt, Homo sapiens
  misc_RNA (1)...(19): siRNA sense strand
gaccacaccuugucuguca

SEQ ID NO: 905338 - RNA, 19 nt, Homo sapiens
  misc_RNA (1)...(19): siRNA sense strand
gaaggaggaucuggacaau

SEQ ID NO: 905339 - RNA, 19 nt, Homo sapiens
  misc_RNA (1)...(19): siRNA sense strand
guacaaggcggauauuuca

SEQ ID NO: 905340 - RNA, 19 nt, Homo sapiens
  misc_RNA (1)...(19): siRNA sense strand
gcacaaaggaggacgugaa

SEQ ID NO: 905341 - RNA, 19 nt, Homo sapiens
  misc_RNA (1)...(19): siRNA sense strand
gaaccucagugcagaugga

SEQ ID NO: 905342 - RNA, 19 nt, Homo sapiens
  misc_RNA (1)...(19): siRNA sense strand
gcaaggaguccauguguuc

SEQ ID NO: 905343 - RNA, 19 nt, Homo sapiens
  misc_RNA (1)...(19): siRNA sense strand
gaaauuuguucaagacacu

SEQ ID NO: 905344 - RNA, 19 nt, Homo sapiens
  misc_RNA (1)...(19): siRNA sense strand
caaauguccuucccgacuu

SEQ ID NO: 905345 - RNA, 19 nt, Homo sapiens
  misc_RNA (1)...(19): siRNA sense strand
agaacucacuccuaucuga

SEQ ID NO: 905346 - RNA, 19 nt, Homo sapiens
  misc_RNA (1)...(19): siRNA sense strand
ggacaaugccagcaaagau

SEQ ID NO: 905347 - RNA, 19 nt, Homo sapiens
  misc_RNA (1)...(19): siRNA sense strand
gagaccagguugugaaugg

SEQ ID NO: 905348 - RNA, 19 nt, Homo sapiens
  misc_RNA (1)...(19): siRNA sense strand
ggaaggaggaucuggacaa

SEQ ID NO: 905349 - RNA, 19 nt, Homo sapiens
  misc_RNA (1)...(19): siRNA sense strand
uauuaucgauggcagaauu

SEQ ID NO: 905350 - RNA, 19 nt, Homo sapiens
  misc_RNA (1)...(19): siRNA sense strand
gaaaggcugguguggacua

SEQ ID NO: 905351 - RNA, 19 nt, Homo sapiens
  misc_RNA (1)...(19): siRNA sense strand
cagcaaagaugaccguuuu

SEQ ID NO: 905352 - RNA, 19 nt, Homo sapiens
  misc_RNA (1)...(19): siRNA sense strand
gaacaagaaagcuggagau

SEQ ID NO: 905353 - RNA, 19 nt, Homo sapiens
  misc_RNA (1)...(19): siRNA sense strand
gugaaaugcuaccacaaga

SEQ ID NO: 905354 - RNA, 19 nt, Homo sapiens
  misc_RNA (1)...(19): siRNA sense strand
ccagagacaccguauguga

SEQ ID NO: 905355 - RNA, 19 nt, Homo sapiens
  misc_RNA (1)...(19): siRNA sense strand
cacaacagacccacugaua

SEQ ID NO: 905356 - RNA, 19 nt, Homo sapiens
  misc_RNA (1)...(19): siRNA sense strand
gacaggaaguggaucaaag

SEQ ID NO: 905357 - RNA, 19 nt, Homo sapiens
  misc_RNA (1)...(19): siRNA sense strand
guguucaacuccagcauuu

SEQ ID NO: 905358 - RNA, 19 nt, Homo sapiens
  misc_RNA (1)...(19): siRNA sense strand
cccaggaccucgauauuau

SEQ ID NO: 905359 - RNA, 19 nt, Homo sapiens
  misc_RNA (1)...(19): siRNA sense strand
gcaaggcuccucugcugaa

SEQ ID NO: 905360 - RNA, 19 nt, Homo sapiens
  misc_RNA (1)...(19): siRNA sense strand
ggacggauaagacggaaga

SEQ ID NO: 905361 - RNA, 19 nt, Homo sapiens
  misc_RNA (1)...(19): siRNA sense strand
cagcaacguuggugaagau

SEQ ID NO: 905362 - RNA, 19 nt, Homo sapiens
  misc_RNA (1)...(19): siRNA sense strand
gcucgaaugaaccauauuu

SEQ ID NO: 905363 - RNA, 19 nt, Homo sapiens
  misc_RNA (1)...(19): siRNA sense strand
gaacaagccaucgccaugu

SEQ ID NO: 905364 - RNA, 19 nt, Homo sapiens
  misc_RNA (1)...(19): siRNA sense strand
ccagauaguccaggugaua

SEQ ID NO: 905365 - RNA, 19 nt, Homo sapiens
  misc_RNA (1)...(19): siRNA sense strand
cagcugcccuucuccaaau

SEQ ID NO: 905366 - RNA, 19 nt, Homo sapiens
  misc_RNA (1)...(19): siRNA sense strand
caaggcggauauuucaaga

SEQ ID NO: 905367 - RNA, 19 nt, Homo sapiens
  misc_RNA (1)...(19): siRNA sense strand
caacgaccacggugugauu

SEQ ID NO: 905368 - RNA, 19 nt, Homo sapiens
  misc_RNA (1)...(19): siRNA sense strand
gcagcaacguuggugaaga

SEQ ID NO: 905369 - RNA, 19 nt, Homo sapiens
  misc_RNA (1)...(19): siRNA sense strand
ccagugccauugucaacuu

SEQ ID NO: 905370 - RNA, 19 nt, Homo sapiens
  misc_RNA (1)...(19): siRNA sense strand
gcagcccucucccagcaaa

SEQ ID NO: 905371 - RNA, 19 nt, Homo sapiens
  misc_RNA (1)...(19): siRNA sense strand
ucaaaggucaugauugguu

SEQ ID NO: 905372 - RNA, 19 nt, Homo sapiens
  misc_RNA (1)...(19): siRNA sense strand
gaaagggugcucgaaugaa

SEQ ID NO: 905373 - RNA, 19 nt, Homo sapiens
  misc_RNA (1)...(19): siRNA sense strand
gugauaaacuugugaucgu

SEQ ID NO: 905374 - RNA, 19 nt, Homo sapiens
  misc_RNA (1)...(19): siRNA sense strand
gcaucacccugacagacaa

SEQ ID NO: 905375 - RNA, 19 nt, Homo sapiens
  misc_RNA (1)...(19): siRNA sense strand
gcuacgggcugguguuugg

SEQ ID NO: 905376 - RNA, 19 nt, Homo sapiens
  misc_RNA (1)...(19): siRNA sense strand
gcagugccacggauaaugu

SEQ ID NO: 905377 - RNA, 19 nt, Homo sapiens
  misc_RNA (1)...(19): siRNA sense strand
ugaaagggugcucgaauga

SEQ ID NO: 905378 - RNA, 19 nt, Homo sapiens
  misc_RNA (1)...(19): siRNA sense strand
gaagggagugcgguugaaa

SEQ ID NO: 905379 - RNA, 19 nt, Homo sapiens
  misc_RNA (1)...(19): siRNA sense strand
gcccaucccuacccacaug

SEQ ID NO: 905380 - RNA, 19 nt, Homo sapiens
  misc_RNA (1)...(19): siRNA sense strand
ugacagacaaucagaggaa

SEQ ID NO: 905381 - RNA, 19 nt, Homo sapiens
  misc_RNA (1)...(19): siRNA sense strand
gacaaugccagcaaagaug

SEQ ID NO: 905382 - RNA, 19 nt, Homo sapiens
  misc_RNA (1)...(19): siRNA sense strand
gaggaaauagcagaaaguu

SEQ ID NO: 905383 - RNA, 19 nt, Homo sapiens
  misc_RNA (1)...(19): siRNA sense strand
cuggagauuuggccaauga

SEQ ID NO: 905384 - RNA, 19 nt, Homo sapiens
  misc_RNA (1)...(19): siRNA sense strand
gguacaaggcggauauuuc

SEQ ID NO: 905385 - RNA, 19 nt, Homo sapiens
  misc_RNA (1)...(19): siRNA sense strand
ugaaggaucgggagacaga

SEQ ID NO: 905386 - RNA, 19 nt, Homo sapiens
  misc_RNA (1)...(19): siRNA sense strand
agccagaacucacuccuau

SEQ ID NO: 905387 - RNA, 19 nt, Homo sapiens
  misc_RNA (1)...(19): siRNA sense strand
gcagcugcccuucuccaaa

SEQ ID NO: 905388 - RNA, 19 nt, Homo sapiens
  misc_RNA (1)...(19): siRNA sense strand
gcggauauuucaagagaac

SEQ ID NO: 905389 - RNA, 19 nt, Homo sapiens
  misc_RNA (1)...(19): siRNA sense strand
aaugcuaccacaagaaaua

SEQ ID NO: 905390 - RNA, 19 nt, Homo sapiens
  misc_RNA (1)...(19): siRNA sense strand
aaauguccuucccgacuuu

SEQ ID NO: 905391 - RNA, 19 nt, Homo sapiens
  misc_RNA (1)...(19): siRNA sense strand
caacagcccagaccacagu

SEQ ID NO: 905392 - RNA, 19 nt, Homo sapiens
  misc_RNA (1)...(19): siRNA sense strand
aaagauggcccuuccucaa

SEQ ID NO: 905393 - RNA, 19 nt, Homo sapiens
  misc_RNA (1)...(19): siRNA sense strand
cagaaggcccugagcauca

SEQ ID NO: 905394 - RNA, 19 nt, Homo sapiens
  misc_RNA (1)...(19): siRNA sense strand
acaagaaagcuggagauuu

SEQ ID NO: 905395 - RNA, 19 nt, Homo sapiens
  misc_RNA (1)...(19): siRNA sense strand
aggcggauauuucaagaga

SEQ ID NO: 905396 - RNA, 19 nt, Homo sapiens
  misc_RNA (1)...(19): siRNA sense strand
ggaagcucccucaaggaaa

SEQ ID NO: 905397 - RNA, 19 nt, Homo sapiens
  misc_RNA (1)...(19): siRNA sense strand
ggccacccgugacgucauu

SEQ ID NO: 905398 - RNA, 19 nt, Homo sapiens
  misc_RNA (1)...(19): siRNA sense strand
gugcucgaaugaaccauau

SEQ ID NO: 905399 - RNA, 19 nt, Homo sapiens
  misc_RNA (1)...(19): siRNA sense strand
agagacaccguaugugaaa

SEQ ID NO: 905400 - RNA, 19 nt, Homo sapiens
  misc_RNA (1)...(19): siRNA sense strand
uugaaagggugcucgaaug

SEQ ID NO: 905401 - RNA, 19 nt, Homo sapiens
  misc_RNA (1)...(19): siRNA sense strand
gcuucuuccugcaccauuu

SEQ ID NO: 905402 - RNA, 19 nt, Homo sapiens
  misc_RNA (1)...(19): siRNA sense strand
caaaggaggacgugaacca

SEQ ID NO: 905403 - RNA, 19 nt, Homo sapiens
  misc_RNA (1)...(19): siRNA sense strand
gguccgaacacuuguacaa

SEQ ID NO: 905404 - RNA, 19 nt, Homo sapiens
  misc_RNA (1)...(19): siRNA sense strand
uaaugugugccaccuguuu

SEQ ID NO: 905405 - RNA, 19 nt, Homo sapiens
  misc_RNA (1)...(19): siRNA sense strand
cgaagggagugcgguugaa

SEQ ID NO: 905406 - RNA, 19 nt, Homo sapiens
  misc_RNA (1)...(19): siRNA sense strand
cuaugggaagguugaauua

SEQ ID NO: 905407 - RNA, 19 nt, Homo sapiens
  misc_RNA (1)...(19): siRNA sense strand
caacagacccacugauacg

SEQ ID NO: 905408 - RNA, 19 nt, Homo sapiens
  misc_RNA (1)...(19): siRNA sense strand
ggaggaaauagcagaaagu

SEQ ID NO: 905409 - RNA, 19 nt, Homo sapiens
  misc_RNA (1)...(19): siRNA sense strand
uggagacgcugcucugaag

SEQ ID NO: 905410 - RNA, 19 nt, Homo sapiens
  misc_RNA (1)...(19): siRNA sense strand
cagugcagauggagaagug

SEQ ID NO: 905411 - RNA, 19 nt, Homo sapiens
  misc_RNA (1)...(19): siRNA sense strand
caagacaggaaguggauca

SEQ ID NO: 905412 - RNA, 19 nt, Homo sapiens
  misc_RNA (1)...(19): siRNA sense strand
aaagggugcucgaaugaac

SEQ ID NO: 905413 - RNA, 19 nt, Homo sapiens
  misc_RNA (1)...(19): siRNA sense strand
gaacucguccggcacuuuu

SEQ ID NO: 905414 - RNA, 19 nt, Homo sapiens
  misc_RNA (1)...(19): siRNA sense strand
ggugaaaugcuaccacaag

SEQ ID NO: 905415 - RNA, 19 nt, Homo sapiens
  misc_RNA (1)...(19): siRNA sense strand
acgcgaaggugaggaagaa

SEQ ID NO: 905416 - RNA, 19 nt, Homo sapiens
  misc_RNA (1)...(19): siRNA sense strand
ugaaaugcuaccacaagaa

SEQ ID NO: 905417 - RNA, 19 nt, Homo sapiens
  misc_RNA (1)...(19): siRNA sense strand
ugaacucuguggagaugga

SEQ ID NO: 905418 - RNA, 19 nt, Homo sapiens
  misc_RNA (1)...(19): siRNA sense strand
aggaggaucuggacaaugc

SEQ ID NO: 905419 - RNA, 19 nt, Homo sapiens
  misc_RNA (1)...(19): siRNA sense strand
ccagaacucacuccuaucu

SEQ ID NO: 905420 - RNA, 19 nt, Homo sapiens
  misc_RNA (1)...(19): siRNA sense strand
gaaaugacugaugcucgaa

SEQ ID NO: 905421 - RNA, 19 nt, Homo sapiens
  misc_RNA (1)...(19): siRNA sense strand
cagagacaccguaugugaa

SEQ ID NO: 905422 - RNA, 19 nt, Homo sapiens
  misc_RNA (1)...(19): siRNA sense strand
aagauggcccuuccucaaa

SEQ ID NO: 905423 - RNA, 19 nt, Homo sapiens
  misc_RNA (1)...(19): siRNA sense strand
cagauaguccaggugauaa

SEQ ID NO: 905424 - RNA, 19 nt, Homo sapiens
  misc_RNA (1)...(19): siRNA sense strand
ccgaacacuuguacaacga

SEQ ID NO: 905425 - RNA, 19 nt, Homo sapiens
  misc_RNA (1)...(19): siRNA sense strand
ggauauuucaagagaacaa

SEQ ID NO: 905426 - RNA, 19 nt, Homo sapiens
  misc_RNA (1)...(19): siRNA sense strand
caggagaccagguugugaa

SEQ ID NO: 905427 - RNA, 19 nt, Homo sapiens
  misc_RNA (1)...(19): siRNA sense strand
ccagacggcagccaauuca

SEQ ID NO: 905428 - RNA, 19 nt, Homo sapiens
  misc_RNA (1)...(19): siRNA sense strand
uccugcagcugaacaagaa

SEQ ID NO: 905429 - RNA, 19 nt, Homo sapiens
  misc_RNA (1)...(19): siRNA sense strand
gauggcagaauuuuaagua

SEQ ID NO: 905430 - RNA, 19 nt, Homo sapiens
  misc_RNA (1)...(19): siRNA sense strand
uggaagcucccucaaggaa

SEQ ID NO: 905431 - RNA, 19 nt, Homo sapiens
  misc_RNA (1)...(19): siRNA sense strand
caagccaucgccauguuga

SEQ ID NO: 905432 - RNA, 19 nt, Homo sapiens
  misc_RNA (1)...(19): siRNA sense strand
acaggaaguggaucaaaga

SEQ ID NO: 905433 - RNA, 19 nt, Homo sapiens
  misc_RNA (1)...(19): siRNA sense strand
ccacaaagcacuuauauag

SEQ ID NO: 905434 - RNA, 19 nt, Homo sapiens
  misc_RNA (1)...(19): siRNA sense strand
cgagaucgguucacuuugu

SEQ ID NO: 905435 - RNA, 19 nt, Homo sapiens
  misc_RNA (1)...(19): siRNA sense strand
caaagcacuuauauaguug

SEQ ID NO: 905436 - RNA, 19 nt, Homo sapiens
  misc_RNA (1)...(19): siRNA sense strand
gagaucgguucacuuugug

SEQ ID NO: 905437 - RNA, 19 nt, Homo sapiens
  misc_RNA (1)...(19): siRNA sense strand
caccuggccucaccaagug

SEQ ID NO: 905438 - RNA, 19 nt, Homo sapiens
  misc_RNA (1)...(19): siRNA sense strand
ucaccugggucucucacuu

SEQ ID NO: 905439 - RNA, 19 nt, Homo sapiens
  misc_RNA (1)...(19): siRNA sense strand
gccacaaagcacuuauaua

SEQ ID NO: 905440 - RNA, 19 nt, Homo sapiens
  misc_RNA (1)...(19): siRNA sense strand
ucucucagaucuacuagca

SEQ ID NO: 905441 - RNA, 19 nt, Homo sapiens
  misc_RNA (1)...(19): siRNA sense strand
gggacagucucugcaggaa

SEQ ID NO: 905442 - RNA, 19 nt, Homo sapiens
  misc_RNA (1)...(19): siRNA sense strand
ucacaugucaccucucuac

SEQ ID NO: 905443 - RNA, 19 nt, Homo sapiens
  misc_RNA (1)...(19): siRNA sense strand
caccugggucucucacuuu

SEQ ID NO: 905444 - RNA, 19 nt, Homo sapiens
  misc_RNA (1)...(19): siRNA sense strand
cagccacaaagcacuuaua

SEQ ID NO: 905445 - RNA, 19 nt, Homo sapiens
  misc_RNA (1)...(19): siRNA sense strand
ucaccuggccucaccaagu

SEQ ID NO: 905446 - RNA, 19 nt, Homo sapiens
  misc_RNA (1)...(19): siRNA sense strand
gcuccuaccugccccauca

SEQ ID NO: 905447 - RNA, 19 nt, Homo sapiens
  misc_RNA (1)...(19): siRNA sense strand
cuucacaugucaccucucu

SEQ ID NO: 905448 - RNA, 19 nt, Homo sapiens
  misc_RNA (1)...(19): siRNA sense strand
cacaaagcacuuauauagu

SEQ ID NO: 905449 - RNA, 19 nt, Homo sapiens
  misc_RNA (1)...(19): siRNA sense strand
gaaggauucugaugucuua

SEQ ID NO: 905450 - RNA, 19 nt, Homo sapiens
  misc_RNA (1)...(19): siRNA sense strand
guacaacagugaauggaaa

SEQ ID NO: 905451 - RNA, 19 nt, Homo sapiens
  misc_RNA (1)...(19): siRNA sense strand
ggauucugaugucuuauuu

SEQ ID NO: 905452 - RNA, 19 nt, Homo sapiens
  misc_RNA (1)...(19): siRNA sense strand
gaacagaaaguacaacagu

SEQ ID NO: 905453 - RNA, 19 nt, Homo sapiens
  misc_RNA (1)...(19): siRNA sense strand
ggacauugcugagguggau

SEQ ID NO: 905454 - RNA, 19 nt, Homo sapiens
  misc_RNA (1)...(19): siRNA sense strand
gcuuccagauuauaaauug

SEQ ID NO: 905455 - RNA, 19 nt, Homo sapiens
  misc_RNA (1)...(19): siRNA sense strand
gaaaguacaacagugaaug

SEQ ID NO: 905456 - RNA, 19 nt, Homo sapiens
  misc_RNA (1)...(19): siRNA sense strand
ucagugguuccuaauauua

SEQ ID NO: 905457 - RNA, 19 nt, Homo sapiens
  misc_RNA (1)...(19): siRNA sense strand
ggcauucagugguuccuaa

SEQ ID NO: 905458 - RNA, 19 nt, Homo sapiens
  misc_RNA (1)...(19): siRNA sense strand
guuguccugucaucucuua

SEQ ID NO: 905459 - RNA, 19 nt, Homo sapiens
  misc_RNA (1)...(19): siRNA sense strand
caauuucccuagcuucuuc

SEQ ID NO: 905460 - RNA, 19 nt, Homo sapiens
  misc_RNA (1)...(19): siRNA sense strand
gagaagcagucugguguag

SEQ ID NO: 905461 - RNA, 19 nt, Homo sapiens
  misc_RNA (1)...(19): siRNA sense strand
ucaguaacuucuucuguuc

SEQ ID NO: 905462 - RNA, 19 nt, Homo sapiens
  misc_RNA (1)...(19): siRNA sense strand
caacagugaauggaaauga

SEQ ID NO: 905463 - RNA, 19 nt, Homo sapiens
  misc_RNA (1)...(19): siRNA sense strand
uuauggaucuggaaggauu

SEQ ID NO: 905464 - RNA, 19 nt, Homo sapiens
  misc_RNA (1)...(19): siRNA sense strand
ggaacgccuucucugucua

SEQ ID NO: 905465 - RNA, 19 nt, Homo sapiens
  misc_RNA (1)...(19): siRNA sense strand
gcaggaacgccuucucugu

SEQ ID NO: 905466 - RNA, 19 nt, Homo sapiens
  misc_RNA (1)...(19): siRNA sense strand
guucuguggcuucuuauuu

SEQ ID NO: 905467 - RNA, 19 nt, Homo sapiens
  misc_RNA (1)...(19): siRNA sense strand
uaaauugccugguguaccu

SEQ ID NO: 905468 - RNA, 19 nt, Homo sapiens
  misc_RNA (1)...(19): siRNA sense strand
uucuguggcuucuuauuua

SEQ ID NO: 905469 - RNA, 19 nt, Homo sapiens
  misc_RNA (1)...(19): siRNA sense strand
gaaaugaccaagcccuucu

SEQ ID NO: 905470 - RNA, 19 nt, Homo sapiens
  misc_RNA (1)...(19): siRNA sense strand
guaccucaguaacuucuuc

SEQ ID NO: 905471 - RNA, 19 nt, Homo sapiens
  misc_RNA (1)...(19): siRNA sense strand
ucagacauuugauuucauc

SEQ ID NO: 905472 - RNA, 19 nt, Homo sapiens
  misc_RNA (1)...(19): siRNA sense strand
ggaaggauucugaugucuu

SEQ ID NO: 905473 - RNA, 19 nt, Homo sapiens
  misc_RNA (1)...(19): siRNA sense strand
gaugaccugugccuaccuu

SEQ ID NO: 905474 - RNA, 19 nt, Homo sapiens
  misc_RNA (1)...(19): siRNA sense strand
ugucagcggucgugugugu

SEQ ID NO: 905475 - RNA, 19 nt, Homo sapiens
  misc_RNA (1)...(19): siRNA sense strand
acagaaaguacaacaguga

SEQ ID NO: 905476 - RNA, 19 nt, Homo sapiens
  misc_RNA (1)...(19): siRNA sense strand
cucaguaacuucuucuguu

SEQ ID NO: 905477 - RNA, 19 nt, Homo sapiens
  misc_RNA (1)...(19): siRNA sense strand
auucagugguuccuaauau

SEQ ID NO: 905478 - RNA, 19 nt, Homo sapiens
  misc_RNA (1)...(19): siRNA sense strand
ucauauucauccaguuuca

SEQ ID NO: 905479 - RNA, 19 nt, Homo sapiens
  misc_RNA (1)...(19): siRNA sense strand
ccggagaugucgagaagca

SEQ ID NO: 905480 - RNA, 19 nt, Homo sapiens
  misc_RNA (1)...(19): siRNA sense strand
ugaccaagcccuucuucug

SEQ ID NO: 905481 - RNA, 19 nt, Homo sapiens
  misc_RNA (1)...(19): siRNA sense strand
ugucauauucauccaguuu

SEQ ID NO: 905482 - RNA, 19 nt, Homo sapiens
  misc_RNA (1)...(19): siRNA sense strand
ggaucuggaaggauucuga

SEQ ID NO: 905483 - RNA, 19 nt, Homo sapiens
  misc_RNA (1)...(19): siRNA sense strand
uauuauggaucuggaagga

SEQ ID NO: 905484 - RNA, 19 nt, Homo sapiens
  misc_RNA (1)...(19): siRNA sense strand
gauggugacucugguuggu

SEQ ID NO: 905485 - RNA, 19 nt, Homo sapiens
  misc_RNA (1)...(19): siRNA sense strand
cgagaagcagucuggugua

SEQ ID NO: 905486 - RNA, 19 nt, Homo sapiens
  misc_RNA (1)...(19): siRNA sense strand
ucacagugcugguguuccu

SEQ ID NO: 905487 - RNA, 19 nt, Homo sapiens
  misc_RNA (1)...(19): siRNA sense strand
gaacgccuucucugucuac

SEQ ID NO: 905488 - RNA, 19 nt, Homo sapiens
  misc_RNA (1)...(19): siRNA sense strand
gggaacagaaaguacaaca

SEQ ID NO: 905489 - RNA, 19 nt, Homo sapiens
  misc_RNA (1)...(19): siRNA sense strand
gugccaaccccaucauuua

SEQ ID NO: 905490 - RNA, 19 nt, Homo sapiens
  misc_RNA (1)...(19): siRNA sense strand
uguuccaucuccaucaauu

SEQ ID NO: 905491 - RNA, 19 nt, Homo sapiens
  misc_RNA (1)...(19): siRNA sense strand
cagaaaguacaacagugaa

SEQ ID NO: 905492 - RNA, 19 nt, Homo sapiens
  misc_RNA (1)...(19): siRNA sense strand
ugaccauccugcucacagu

SEQ ID NO: 905493 - RNA, 19 nt, Homo sapiens
  misc_RNA (1)...(19): siRNA sense strand
ccaucaauuucccuagcuu

SEQ ID NO: 905494 - RNA, 19 nt, Homo sapiens
  misc_RNA (1)...(19): siRNA sense strand
uucagugguuccuaauauu

SEQ ID NO: 905495 - RNA, 19 nt, Homo sapiens
  misc_RNA (1)...(19): siRNA sense strand
ugguguaccucaguaacuu

SEQ ID NO: 905496 - RNA, 19 nt, Homo sapiens
  misc_RNA (1)...(19): siRNA sense strand
cuggaaggauucugauguc

SEQ ID NO: 905497 - RNA, 19 nt, Homo sapiens
  misc_RNA (1)...(19): siRNA sense strand
gcgcaggaacgccuucucu

SEQ ID NO: 905498 - RNA, 19 nt, Homo sapiens
  misc_RNA (1)...(19): siRNA sense strand
guccugucaucucuuaaca

SEQ ID NO: 905499 - RNA, 19 nt, Homo sapiens
  misc_RNA (1)...(19): siRNA sense strand
ccuuuggcauucagugguu

SEQ ID NO: 905500 - RNA, 19 nt, Homo sapiens
  misc_RNA (1)...(19): siRNA sense strand
gaucuggaaggauucugau

SEQ ID NO: 905501 - RNA, 19 nt, Homo sapiens
  misc_RNA (1)...(19): siRNA sense strand
cauucagugguuccuaaua

SEQ ID NO: 905502 - RNA, 19 nt, Homo sapiens
  misc_RNA (1)...(19): siRNA sense strand
guacagaacugacaccaau

SEQ ID NO: 905503 - RNA, 19 nt, Homo sapiens
  misc_RNA (1)...(19): siRNA sense strand
gggcugacgugcaucguuu

SEQ ID NO: 905504 - RNA, 19 nt, Homo sapiens
  misc_RNA (1)...(19): siRNA sense strand
ggaacgcugucuccaucua

SEQ ID NO: 905505 - RNA, 19 nt, Homo sapiens
  misc_RNA (1)...(19): siRNA sense strand
gaugaccuuucccuacuuu

SEQ ID NO: 905506 - RNA, 19 nt, Homo sapiens
  misc_RNA (1)...(19): siRNA sense strand
cauuauauguucgccguua

SEQ ID NO: 905507 - RNA, 19 nt, Homo sapiens
  misc_RNA (1)...(19): siRNA sense strand
gaccuuucccuacuuuaua

SEQ ID NO: 905508 - RNA, 19 nt, Homo sapiens
  misc_RNA (1)...(19): siRNA sense strand
ggauuggaaagucuuauuu

SEQ ID NO: 905509 - RNA, 19 nt, Homo sapiens
  misc_RNA (1)...(19): siRNA sense strand
ggugugaaacgucagauuu

SEQ ID NO: 905510 - RNA, 19 nt, Homo sapiens
  misc_RNA (1)...(19): siRNA sense strand
cgucagauuucauuacaau

SEQ ID NO: 905511 - RNA, 19 nt, Homo sapiens
  misc_RNA (1)...(19): siRNA sense strand
uggaguggauguucuguga

SEQ ID NO: 905512 - RNA, 19 nt, Homo sapiens
  misc_RNA (1)...(19): siRNA sense strand
ggacacgccugagguggau

SEQ ID NO: 905513 - RNA, 19 nt, Homo sapiens
  misc_RNA (1)...(19): siRNA sense strand
ugucaucggucaugugugu

SEQ ID NO: 905514 - RNA, 19 nt, Homo sapiens
  misc_RNA (1)...(19): siRNA sense strand
gugcaucuaguuuccauuu

SEQ ID NO: 905515 - RNA, 19 nt, Homo sapiens
  misc_RNA (1)...(19): siRNA sense strand
cguuacgccucaucaauau

SEQ ID NO: 905516 - RNA, 19 nt, Homo sapiens
  misc_RNA (1)...(19): siRNA sense strand
ccguuacgccucaucaaua

SEQ ID NO: 905517 - RNA, 19 nt, Homo sapiens
  misc_RNA (1)...(19): siRNA sense strand
uuccuuagcggccacauua

SEQ ID NO: 905518 - RNA, 19 nt, Homo sapiens
  misc_RNA (1)...(19): siRNA sense strand
acaaucgcguggcugguuu

SEQ ID NO: 905519 - RNA, 19 nt, Homo sapiens
  misc_RNA (1)...(19): siRNA sense strand
gugaugaccuuucccuacu

SEQ ID NO: 905520 - RNA, 19 nt, Homo sapiens
  misc_RNA (1)...(19): siRNA sense strand
guucugugacuuccuguuu

SEQ ID NO: 905521 - RNA, 19 nt, Homo sapiens
  misc_RNA (1)...(19): siRNA sense strand
caacggacgugaggagacu

SEQ ID NO: 905522 - RNA, 19 nt, Homo sapiens
  misc_RNA (1)...(19): siRNA sense strand
ccuuagcggccacauuaua

SEQ ID NO: 905523 - RNA, 19 nt, Homo sapiens
  misc_RNA (1)...(19): siRNA sense strand
gaguggauguucugugacu

SEQ ID NO: 905524 - RNA, 19 nt, Homo sapiens
  misc_RNA (1)...(19): siRNA sense strand
gugcaucguuucccuuguc

SEQ ID NO: 905525 - RNA, 19 nt, Homo sapiens
  misc_RNA (1)...(19): siRNA sense strand
gcaggaacgcugucuccau

SEQ ID NO: 905526 - RNA, 19 nt, Homo sapiens
  misc_RNA (1)...(19): siRNA sense strand
ccaccuggauuggaaaguc

SEQ ID NO: 905527 - RNA, 19 nt, Homo sapiens
  misc_RNA (1)...(19): siRNA sense strand
ucacagugcuggucuuccu

SEQ ID NO: 905528 - RNA, 19 nt, Homo sapiens
  misc_RNA (1)...(19): siRNA sense strand
ugucaugugcaucuaguuu

SEQ ID NO: 905529 - RNA, 19 nt, Homo sapiens
  misc_RNA (1)...(19): siRNA sense strand
gccgacuuccucuuccuua

SEQ ID NO: 905530 - RNA, 19 nt, Homo sapiens
  misc_RNA (1)...(19): siRNA sense strand
gcaucuaguuuccauuuuc

SEQ ID NO: 905531 - RNA, 19 nt, Homo sapiens
  misc_RNA (1)...(19): siRNA sense strand
ugaccuuucccuacuuuau

SEQ ID NO: 905532 - RNA, 19 nt, Homo sapiens
  misc_RNA (1)...(19): siRNA sense strand
gugccaaccccaucauuua

SEQ ID NO: 905533 - RNA, 19 nt, Homo sapiens
  misc_RNA (1)...(19): siRNA sense strand
uucugugacuuccuguuua

SEQ ID NO: 905534 - RNA, 19 nt, Homo sapiens
  misc_RNA (1)...(19): siRNA sense strand
ggaaagucuuauuuuguca

SEQ ID NO: 905535 - RNA, 19 nt, Homo sapiens
  misc_RNA (1)...(19): siRNA sense strand
ugaccauccuccucacagu

SEQ ID NO: 905536 - RNA, 19 nt, Homo sapiens
  misc_RNA (1)...(19): siRNA sense strand
gaacgcugucuccaucuac

SEQ ID NO: 905537 - RNA, 19 nt, Homo sapiens
  misc_RNA (1)...(19): siRNA sense strand
ucaguccugugaugaccuu

SEQ ID NO: 905538 - RNA, 19 nt, Homo sapiens
  misc_RNA (1)...(19): siRNA sense strand
aacgucagauuucauuaca

SEQ ID NO: 905539 - RNA, 19 nt, Homo sapiens
  misc_RNA (1)...(19): siRNA sense strand
ugaugaccuuucccuacuu

SEQ ID NO: 905540 - RNA, 19 nt, Homo sapiens
  misc_RNA (1)...(19): siRNA sense strand
aauccucaguccugugaug

SEQ ID NO: 905541 - RNA, 19 nt, Homo sapiens
  misc_RNA (1)...(19): siRNA sense strand
ucugugacuuccuguuuag

SEQ ID NO: 905542 - RNA, 19 nt, Homo sapiens
  misc_RNA (1)...(19): siRNA sense strand
acagaacugacaccaauca

SEQ ID NO: 905543 - RNA, 19 nt, Homo sapiens
  misc_RNA (1)...(19): siRNA sense strand
aaacgucagauuucauuac

SEQ ID NO: 905544 - RNA, 19 nt, Homo sapiens
  misc_RNA (1)...(19): siRNA sense strand
cuuagcggccacauuauau

SEQ ID NO: 905545 - RNA, 19 nt, Homo sapiens
  misc_RNA (1)...(19): siRNA sense strand
gauuauacguucgccauua

SEQ ID NO: 905546 - RNA, 19 nt, Homo sapiens
  misc_RNA (1)...(19): siRNA sense strand
gugcugacgugcaucauuu

SEQ ID NO: 905547 - RNA, 19 nt, Homo sapiens
  misc_RNA (1)...(19): siRNA sense strand
ggaacgcugucuccaucua

SEQ ID NO: 905548 - RNA, 19 nt, Homo sapiens
  misc_RNA (1)...(19): siRNA sense strand
ggacaagccugagguggau

SEQ ID NO: 905549 - RNA, 19 nt, Homo sapiens
  misc_RNA (1)...(19): siRNA sense strand
ccauuacgccucaucaaua

SEQ ID NO: 905550 - RNA, 19 nt, Homo sapiens
  misc_RNA (1)...(19): siRNA sense strand
gaugaccuuucccuacuuu

SEQ ID NO: 905551 - RNA, 19 nt, Homo sapiens
  misc_RNA (1)...(19): siRNA sense strand
uuccucagcuuccagauua

SEQ ID NO: 905552 - RNA, 19 nt, Homo sapiens
  misc_RNA (1)...(19): siRNA sense strand
gauucuaguuggugugaaa

SEQ ID NO: 905553 - RNA, 19 nt, Homo sapiens
  misc_RNA (1)...(19): siRNA sense strand
guacaaaacugacaccaau

SEQ ID NO: 905554 - RNA, 19 nt, Homo sapiens
  misc_RNA (1)...(19): siRNA sense strand
cauuacgccucaucaauau

SEQ ID NO: 905555 - RNA, 19 nt, Homo sapiens
  misc_RNA (1)...(19): siRNA sense strand
ggugugaaacgucagauuu

SEQ ID NO: 905556 - RNA, 19 nt, Homo sapiens
  misc_RNA (1)...(19): siRNA sense strand
gcaaaauccucguuucugu

SEQ ID NO: 905557 - RNA, 19 nt, Homo sapiens
  misc_RNA (1)...(19): siRNA sense strand
gaagucuuauauugucaug

SEQ ID NO: 905558 - RNA, 19 nt, Homo sapiens
  misc_RNA (1)...(19): siRNA sense strand
gcaugucccuguccucucu

SEQ ID NO: 905559 - RNA, 19 nt, Homo sapiens
  misc_RNA (1)...(19): siRNA sense strand
ccagucgcguggcugauuu

SEQ ID NO: 905560 - RNA, 19 nt, Homo sapiens
  misc_RNA (1)...(19): siRNA sense strand
gaguggagguucugugacu

SEQ ID NO: 905561 - RNA, 19 nt, Homo sapiens
  misc_RNA (1)...(19): siRNA sense strand
ugucagcggucgugugugu

SEQ ID NO: 905562 - RNA, 19 nt, Homo sapiens
  misc_RNA (1)...(19): siRNA sense strand
gugaugaccuuucccuacu

SEQ ID NO: 905563 - RNA, 19 nt, Homo sapiens
  misc_RNA (1)...(19): siRNA sense strand
ugagguggauaaaggugaa

SEQ ID NO: 905564 - RNA, 19 nt, Homo sapiens
  misc_RNA (1)...(19): siRNA sense strand
guucugugacuuccuguuu

SEQ ID NO: 905565 - RNA, 19 nt, Homo sapiens
  misc_RNA (1)...(19): siRNA sense strand
ugucauguuuaucugguuu

SEQ ID NO: 905566 - RNA, 19 nt, Homo sapiens
  misc_RNA (1)...(19): siRNA sense strand
caacggacgugaggagacu

SEQ ID NO: 905567 - RNA, 19 nt, Homo sapiens
  misc_RNA (1)...(19): siRNA sense strand
gagacuccuugcuacaauc

SEQ ID NO: 905568 - RNA, 19 nt, Homo sapiens
  misc_RNA (1)...(19): siRNA sense strand
ggccugucccugcuguuua

SEQ ID NO: 905569 - RNA, 19 nt, Homo sapiens
  misc_RNA (1)...(19): siRNA sense strand
gcaggaacgcugucuccau

SEQ ID NO: 905570 - RNA, 19 nt, Homo sapiens
  misc_RNA (1)...(19): siRNA sense strand
gagcgcugccugucuguuc

SEQ ID NO: 905571 - RNA, 19 nt, Homo sapiens
  misc_RNA (1)...(19): siRNA sense strand
caauaucagccaucucauc

SEQ ID NO: 905572 - RNA, 19 nt, Homo sapiens
  misc_RNA (1)...(19): siRNA sense strand
gccauuacgccucaucaau

SEQ ID NO: 905573 - RNA, 19 nt, Homo sapiens
  misc_RNA (1)...(19): siRNA sense strand
ucacagugcuggucuuccu

SEQ ID NO: 905574 - RNA, 19 nt, Homo sapiens
  misc_RNA (1)...(19): siRNA sense strand
uaugugugguucucugugu

SEQ ID NO: 905575 - RNA, 19 nt, Homo sapiens
  misc_RNA (1)...(19): siRNA sense strand
gauccaaccgucccagucu

SEQ ID NO: 905576 - RNA, 19 nt, Homo sapiens
  misc_RNA (1)...(19): siRNA sense strand
gugccaaccccaucauuua

SEQ ID NO: 905577 - RNA, 19 nt, Homo sapiens
  misc_RNA (1)...(19): siRNA sense strand
gugcaucauuucccuuguc

SEQ ID NO: 905578 - RNA, 19 nt, Homo sapiens
  misc_RNA (1)...(19): siRNA sense strand
aauccucguuucugugaug

SEQ ID NO: 905579 - RNA, 19 nt, Homo sapiens
  misc_RNA (1)...(19): siRNA sense strand
uuggaagucuuauauuguc

SEQ ID NO: 905580 - RNA, 19 nt, Homo sapiens
  misc_RNA (1)...(19): siRNA sense strand
uucugugacuuccuguuua

SEQ ID NO: 905581 - RNA, 19 nt, Homo sapiens
  misc_RNA (1)...(19): siRNA sense strand
gccugucccugcuguuuag

SEQ ID NO: 905582 - RNA, 19 nt, Homo sapiens
  misc_RNA (1)...(19): siRNA sense strand
gaacgcugucuccaucuac

SEQ ID NO: 905583 - RNA, 19 nt, Homo sapiens
  misc_RNA (1)...(19): siRNA sense strand
ugaccauccugcucacagu

SEQ ID NO: 905584 - RNA, 19 nt, Homo sapiens
  misc_RNA (1)...(19): siRNA sense strand
ugucccugcuguuuaguau

SEQ ID NO: 905585 - RNA, 19 nt, Homo sapiens
  misc_RNA (1)...(19): siRNA sense strand
gggccugucccugcuguuu

SEQ ID NO: 905586 - RNA, 19 nt, Homo sapiens
  misc_RNA (1)...(19): siRNA sense strand
gaccuuucccuacuuuaca

SEQ ID NO: 905587 - RNA, 19 nt, Homo sapiens
  misc_RNA (1)...(19): siRNA sense strand
ugaugaccuuucccuacuu

SEQ ID NO: 905588 - RNA, 19 nt, Homo sapiens
  misc_RNA (1)...(19): siRNA sense strand
ccucagcuuccagauuaua

SEQ ID NO: 905589 - RNA, 19 nt, Homo sapiens
  misc_RNA (1)...(19): siRNA sense strand
ucugugacuuccuguuuag

SEQ ID NO: 905590 - RNA, 19 nt, Homo sapiens
  misc_RNA (1)...(19): siRNA sense strand
uuacgccucaucaauauca

SEQ ID NO: 905591 - RNA, 19 nt, Homo sapiens
  misc_RNA (1)...(19): siRNA sense strand
uguccucucuaaacaguag

SEQ ID NO: 905592 - RNA, 19 nt, Homo sapiens
  misc_RNA (1)...(19): siRNA sense strand
gacaggaaacgcgguagug

SEQ ID NO: 905593 - RNA, 19 nt, Homo sapiens
  misc_RNA (1)...(19): siRNA sense strand
ggugcugacgugcaucauu

SEQ ID NO: 905594 - RNA, 19 nt, Homo sapiens
  misc_RNA (1)...(19): siRNA sense strand
agccugagguggauaaagg

SEQ ID NO: 905595 - RNA, 19 nt, Homo sapiens
  misc_RNA (1)...(19): siRNA sense strand
ccaaacagcuuuaucauga

SEQ ID NO: 905596 - RNA, 19 nt, Homo sapiens
  misc_RNA (1)...(19): siRNA sense strand
gaagaggucuaaauuacau

SEQ ID NO: 905597 - RNA, 19 nt, Homo sapiens
  misc_RNA (1)...(19): siRNA sense strand
caacgaugcuagaagaauu

SEQ ID NO: 905598 - RNA, 19 nt, Homo sapiens
  misc_RNA (1)...(19): siRNA sense strand
ucauagaccucgagaguga

SEQ ID NO: 905599 - RNA, 19 nt, Homo sapiens
  misc_RNA (1)...(19): siRNA sense strand
cagaagaggucuaaauuac

SEQ ID NO: 905600 - RNA, 19 nt, Homo sapiens
  misc_RNA (1)...(19): siRNA sense strand
ggaaaguauuguggugaua

SEQ ID NO: 905601 - RNA, 19 nt, Homo sapiens
  misc_RNA (1)...(19): siRNA sense strand
caaagaaucagcuuauaga

SEQ ID NO: 905602 - RNA, 19 nt, Homo sapiens
  misc_RNA (1)...(19): siRNA sense strand
gcagugcccucuccucaga

SEQ ID NO: 905603 - RNA, 19 nt, Homo sapiens
  misc_RNA (1)...(19): siRNA sense strand
ccaaauagcaaauguacuu

SEQ ID NO: 905604 - RNA, 19 nt, Homo sapiens
  misc_RNA (1)...(19): siRNA sense strand
ucagaagaggucuaaauua

SEQ ID NO: 905605 - RNA, 19 nt, Homo sapiens
  misc_RNA (1)...(19): siRNA sense strand
gauaacuacugccgauaug

SEQ ID NO: 905606 - RNA, 19 nt, Homo sapiens
  misc_RNA (1)...(19): siRNA sense strand
uagcaaauguacuuggaaa

SEQ ID NO: 905607 - RNA, 19 nt, Homo sapiens
  misc_RNA (1)...(19): siRNA sense strand
cuagaagaauuggaaagua

SEQ ID NO: 905608 - RNA, 19 nt, Homo sapiens
  misc_RNA (1)...(19): siRNA sense strand
gaucaucaacaucuacaaa

SEQ ID NO: 905609 - RNA, 19 nt, Homo sapiens
  misc_RNA (1)...(19): siRNA sense strand
guuuauuggucacuacaua

SEQ ID NO: 905610 - RNA, 19 nt, Homo sapiens
  misc_RNA (1)...(19): siRNA sense strand
gcuaugacuuuguggaugu

SEQ ID NO: 905611 - RNA, 19 nt, Homo sapiens
  misc_RNA (1)...(19): siRNA sense strand
uggagagucuggauuuauu

SEQ ID NO: 905612 - RNA, 19 nt, Homo sapiens
  misc_RNA (1)...(19): siRNA sense strand
gaagaauuggaaaguauug

SEQ ID NO: 905613 - RNA, 19 nt, Homo sapiens
  misc_RNA (1)...(19): siRNA sense strand
guauuagccggcacuguua

SEQ ID NO: 905614 - RNA, 19 nt, Homo sapiens
  misc_RNA (1)...(19): siRNA sense strand
aaacagcuuuaucaugaug

SEQ ID NO: 905615 - RNA, 19 nt, Homo sapiens
  misc_RNA (1)...(19): siRNA sense strand
gaguguacccuccaaauag

SEQ ID NO: 905616 - RNA, 19 nt, Homo sapiens
  misc_RNA (1)...(19): siRNA sense strand
ucaucaacaucuacaaaga

SEQ ID NO: 905617 - RNA, 19 nt, Homo sapiens
  misc_RNA (1)...(19): siRNA sense strand
ggaagucaacgaugcuaga

SEQ ID NO: 905618 - RNA, 19 nt, Homo sapiens
  misc_RNA (1)...(19): siRNA sense strand
ccaauugugucugagagaa

SEQ ID NO: 905619 - RNA, 19 nt, Homo sapiens
  misc_RNA (1)...(19): siRNA sense strand
agucaacgaugcuagaaga

SEQ ID NO: 905620 - RNA, 19 nt, Homo sapiens
  misc_RNA (1)...(19): siRNA sense strand
ccaaagaaucagcuuauag

SEQ ID NO: 905621 - RNA, 19 nt, Homo sapiens
  misc_RNA (1)...(19): siRNA sense strand
gcacuguuaucacaaccau

SEQ ID NO: 905622 - RNA, 19 nt, Homo sapiens
  misc_RNA (1)...(19): siRNA sense strand
cccaaagaaucagcuuaua

SEQ ID NO: 905623 - RNA, 19 nt, Homo sapiens
  misc_RNA (1)...(19): siRNA sense strand
ggacucuggagggcaauua

SEQ ID NO: 905624 - RNA, 19 nt, Homo sapiens
  misc_RNA (1)...(19): siRNA sense strand
caaacagcuuuaucaugau

SEQ ID NO: 905625 - RNA, 19 nt, Homo sapiens
  misc_RNA (1)...(19): siRNA sense strand
aaucacaguucccgaagga

SEQ ID NO: 905626 - RNA, 19 nt, Homo sapiens
  misc_RNA (1)...(19): siRNA sense strand
gaaaguauuguggugauag

SEQ ID NO: 905627 - RNA, 19 nt, Homo sapiens
  misc_RNA (1)...(19): siRNA sense strand
aaaguagucguucucaauu

SEQ ID NO: 905628 - RNA, 19 nt, Homo sapiens
  misc_RNA (1)...(19): siRNA sense strand
gaagucaacgaugcuagaa

SEQ ID NO: 905629 - RNA, 19 nt, Homo sapiens
  misc_RNA (1)...(19): siRNA sense strand
gaugcuagaagaauuggaa

SEQ ID NO: 905630 - RNA, 19 nt, Homo sapiens
  misc_RNA (1)...(19): siRNA sense strand
gcaggagucacuugugugu

SEQ ID NO: 905631 - RNA, 19 nt, Homo sapiens
  misc_RNA (1)...(19): siRNA sense strand
gaagcuccuggaugccuua

SEQ ID NO: 905632 - RNA, 19 nt, Homo sapiens
  misc_RNA (1)...(19): siRNA sense strand
gagggaaauuuggcgauuc

SEQ ID NO: 905633 - RNA, 19 nt, Homo sapiens
  misc_RNA (1)...(19): siRNA sense strand
aaguagucguucucaauuu

SEQ ID NO: 905634 - RNA, 19 nt, Homo sapiens
  misc_RNA (1)...(19): siRNA sense strand
ggagagucuggauuuauug

SEQ ID NO: 905635 - RNA, 19 nt, Homo sapiens
  misc_RNA (1)...(19): siRNA sense strand
gaaaaguagucguucucaa

SEQ ID NO: 905636 - RNA, 19 nt, Homo sapiens
  misc_RNA (1)...(19): siRNA sense strand
guucucaauuuccgauuca

SEQ ID NO: 905637 - RNA, 19 nt, Homo sapiens
  misc_RNA (1)...(19): siRNA sense strand
aauagcaaauguacuugga

SEQ ID NO: 905638 - RNA, 19 nt, Homo sapiens
  misc_RNA (1)...(19): siRNA sense strand
gacaaccugugccgcuaug

SEQ ID NO: 905639 - RNA, 19 nt, Homo sapiens
  misc_RNA (1)...(19): siRNA sense strand
uguauuagccggcacuguu

SEQ ID NO: 905640 - RNA, 19 nt, Homo sapiens
  misc_RNA (1)...(19): siRNA sense strand
gcuccuggaugccuuaaaa

SEQ ID NO: 905641 - RNA, 19 nt, Homo sapiens
  misc_RNA (1)...(19): siRNA sense strand
gccaaacagcuuuaucaug

SEQ ID NO: 905642 - RNA, 19 nt, Homo sapiens
  misc_RNA (1)...(19): siRNA sense strand
gagauaacuacugccgaua

SEQ ID NO: 905643 - RNA, 19 nt, Homo sapiens
  misc_RNA (1)...(19): siRNA sense strand
agagggaaauuuggcgauu

SEQ ID NO: 905644 - RNA, 19 nt, Homo sapiens
  misc_RNA (1)...(19): siRNA sense strand
acaagaugauggugcagau

SEQ ID NO: 905645 - RNA, 19 nt, Homo sapiens
  misc_RNA (1)...(19): siRNA sense strand
gauuauguggcuguguuua

SEQ ID NO: 905646 - RNA, 19 nt, Homo sapiens
  misc_RNA (1)...(19): siRNA sense strand
uaacuacugccgauaugau

SEQ ID NO: 905647 - RNA, 19 nt, Homo sapiens
  misc_RNA (1)...(19): siRNA sense strand
gcuagaagaauuggaaagu

SEQ ID NO: 905648 - RNA, 19 nt, Homo sapiens
  misc_RNA (1)...(19): siRNA sense strand
uuucacaugugguggcauu

SEQ ID NO: 905649 - RNA, 19 nt, Homo sapiens
  misc_RNA (1)...(19): siRNA sense strand
aguagucguucucaauuuc

SEQ ID NO: 905650 - RNA, 19 nt, Homo sapiens
  misc_RNA (1)...(19): siRNA sense strand
uuauguggcuguguuuaau

SEQ ID NO: 905651 - RNA, 19 nt, Homo sapiens
  misc_RNA (1)...(19): siRNA sense strand
gaugauggugcagaugauu

SEQ ID NO: 905652 - RNA, 19 nt, Homo sapiens
  misc_RNA (1)...(19): siRNA sense strand
gaagaugggcgaggcaaaa

SEQ ID NO: 905653 - RNA, 19 nt, Homo sapiens
  misc_RNA (1)...(19): siRNA sense strand
acuggagagucuggauuua

SEQ ID NO: 905654 - RNA, 19 nt, Homo sapiens
  misc_RNA (1)...(19): siRNA sense strand
aaaguauuguggugauagu

SEQ ID NO: 905655 - RNA, 19 nt, Homo sapiens
  misc_RNA (1)...(19): siRNA sense strand
agagagaccuguuuucaca

SEQ ID NO: 905656 - RNA, 19 nt, Homo sapiens
  misc_RNA (1)...(19): siRNA sense strand
cugcaggagucacuugugu

SEQ ID NO: 905657 - RNA, 19 nt, Homo sapiens
  misc_RNA (1)...(19): siRNA sense strand
cgaaagaggggaucaguau

SEQ ID NO: 905658 - RNA, 19 nt, Homo sapiens
  misc_RNA (1)...(19): siRNA sense strand
caaauagcaaauguacuug

SEQ ID NO: 905659 - RNA, 19 nt, Homo sapiens
  misc_RNA (1)...(19): siRNA sense strand
ucaagaccaagaaucagaa

SEQ ID NO: 905660 - RNA, 19 nt, Homo sapiens
  misc_RNA (1)...(19): siRNA sense strand
caauugugucugagagaaa

SEQ ID NO: 905661 - RNA, 19 nt, Homo sapiens
  misc_RNA (1)...(19): siRNA sense strand
uggaaaguauuguggugau

SEQ ID NO: 905662 - RNA, 19 nt, Homo sapiens
  misc_RNA (1)...(19): siRNA sense strand
gcgcauuggccgcuucugu

SEQ ID NO: 905663 - RNA, 19 nt, Homo sapiens
  misc_RNA (1)...(19): siRNA sense strand
aaucaugccaaacagcuuu

SEQ ID NO: 905664 - RNA, 19 nt, Homo sapiens
  misc_RNA (1)...(19): siRNA sense strand
cucagaagaggucuaaauu

SEQ ID NO: 905665 - RNA, 19 nt, Homo sapiens
  misc_RNA (1)...(19): siRNA sense strand
agggaaauuuggcgauuca

SEQ ID NO: 905666 - RNA, 19 nt, Homo sapiens
  misc_RNA (1)...(19): siRNA sense strand
ggaguuugcacgccacagu

SEQ ID NO: 905667 - RNA, 19 nt, Homo sapiens
  misc_RNA (1)...(19): siRNA sense strand
gcaaauguacuuggaaaau

SEQ ID NO: 905668 - RNA, 19 nt, Homo sapiens
  misc_RNA (1)...(19): siRNA sense strand
caaauguacuuggaaaauc

SEQ ID NO: 905669 - RNA, 19 nt, Homo sapiens
  misc_RNA (1)...(19): siRNA sense strand
aagaugauggugcagauga

SEQ ID NO: 905670 - RNA, 19 nt, Homo sapiens
  misc_RNA (1)...(19): siRNA sense strand
ucucaauuuccgauucaua

SEQ ID NO: 905671 - RNA, 19 nt, Homo sapiens
  misc_RNA (1)...(19): siRNA sense strand
gcuuuaucaugauguucaa

SEQ ID NO: 905672 - RNA, 19 nt, Homo sapiens
  misc_RNA (1)...(19): siRNA sense strand
cuacugccgauaugauuau

SEQ ID NO: 905673 - RNA, 19 nt, Homo sapiens
  misc_RNA (1)...(19): siRNA sense strand
acaugugguggcauucuua

SEQ ID NO: 905674 - RNA, 19 nt, Homo sapiens
  misc_RNA (1)...(19): siRNA sense strand
gauuucugaugccaacaca

SEQ ID NO: 905675 - RNA, 19 nt, Homo sapiens
  misc_RNA (1)...(19): siRNA sense strand
ccgcuucuguggcacuuuc

SEQ ID NO: 905676 - RNA, 19 nt, Homo sapiens
  misc_RNA (1)...(19): siRNA sense strand
cacaugugguggcauucuu

SEQ ID NO: 905677 - RNA, 19 nt, Homo sapiens
  misc_RNA (1)...(19): siRNA sense strand
agaagaggucuaaauuaca

SEQ ID NO: 905678 - RNA, 19 nt, Homo sapiens
  misc_RNA (1)...(19): siRNA sense strand
gaaagaggggaucaguauu

SEQ ID NO: 905679 - RNA, 19 nt, Homo sapiens
  misc_RNA (1)...(19): siRNA sense strand
gcaaaaucaugccaaacag

SEQ ID NO: 905680 - RNA, 19 nt, Homo sapiens
  misc_RNA (1)...(19): siRNA sense strand
uaacugcagauggguuuau

SEQ ID NO: 905681 - RNA, 19 nt, Homo sapiens
  misc_RNA (1)...(19): siRNA sense strand
augauuauguggcuguguu

SEQ ID NO: 905682 - RNA, 19 nt, Homo sapiens
  misc_RNA (1)...(19): siRNA sense strand
cugccgauaugauuaugug

SEQ ID NO: 905683 - RNA, 19 nt, Homo sapiens
  misc_RNA (1)...(19): siRNA sense strand
agauaacuacugccgauau

SEQ ID NO: 905684 - RNA, 19 nt, Homo sapiens
  misc_RNA (1)...(19): siRNA sense strand
gugccgcuaugacuuugug

SEQ ID NO: 905685 - RNA, 19 nt, Homo sapiens
  misc_RNA (1)...(19): siRNA sense strand
caucaacaucuacaaagag

SEQ ID NO: 905686 - RNA, 19 nt, Homo sapiens
  misc_RNA (1)...(19): siRNA sense strand
cugcgccaauugugucuga

SEQ ID NO: 905687 - RNA, 19 nt, Homo sapiens
  misc_RNA (1)...(19): siRNA sense strand
ccugugccgcuaugacuuu

SEQ ID NO: 905688 - RNA, 19 nt, Homo sapiens
  misc_RNA (1)...(19): siRNA sense strand
acagcuuuaucaugauguu

SEQ ID NO: 905689 - RNA, 19 nt, Homo sapiens
  misc_RNA (1)...(19): siRNA sense strand
cauguucuccgcugcugaa

SEQ ID NO: 905690 - RNA, 19 nt, Homo sapiens
  misc_RNA (1)...(19): siRNA sense strand
ucaauuuccgauucauaga

SEQ ID NO: 905691 - RNA, 19 nt, Homo sapiens
  misc_RNA (1)...(19): siRNA sense strand
ggauuuauuggcagugaag

SEQ ID NO: 905692 - RNA, 19 nt, Homo sapiens
  misc_RNA (1)...(19): siRNA sense strand
ccuggaagcucucauggau

SEQ ID NO: 905693 - RNA, 19 nt, Homo sapiens
  misc_RNA (1)...(19): siRNA sense strand
cuucugagccugagauuga

SEQ ID NO: 905694 - RNA, 19 nt, Homo sapiens
  misc_RNA (1)...(19): siRNA sense strand
ucagucaacucaagaaacu

SEQ ID NO: 905695 - RNA, 19 nt, Homo sapiens
  misc_RNA (1)...(19): siRNA sense strand
ggagaacccauguaagaag

SEQ ID NO: 905696 - RNA, 19 nt, Homo sapiens
  misc_RNA (1)...(19): siRNA sense strand
cagaggagcagaagacuca

SEQ ID NO: 905697 - RNA, 19 nt, Homo sapiens
  misc_RNA (1)...(19): siRNA sense strand
gccugacagugaaguauga

SEQ ID NO: 905698 - RNA, 19 nt, Homo sapiens
  misc_RNA (1)...(19): siRNA sense strand
gggagaacccauguaagaa

SEQ ID NO: 905699 - RNA, 19 nt, Homo sapiens
  misc_RNA (1)...(19): siRNA sense strand
uggaagcucucauggaucu

SEQ ID NO: 905700 - RNA, 19 nt, Homo sapiens
  misc_RNA (1)...(19): siRNA sense strand
ggcuggagauggagcaaug

SEQ ID NO: 905701 - RNA, 19 nt, Homo sapiens
  misc_RNA (1)...(19): siRNA sense strand
ucaagaaacuccggagacu

SEQ ID NO: 905702 - RNA, 19 nt, Homo sapiens
  misc_RNA (1)...(19): siRNA sense strand
gaagcucucauggaucuau

SEQ ID NO: 905703 - RNA, 19 nt, Homo sapiens
  misc_RNA (1)...(19): siRNA sense strand
gaaggacaucauccacaga

SEQ ID NO: 905704 - RNA, 19 nt, Homo sapiens
  misc_RNA (1)...(19): siRNA sense strand
gacaucauccacagacuca

SEQ ID NO: 905705 - RNA, 19 nt, Homo sapiens
  misc_RNA (1)...(19): siRNA sense strand
aagaaacuccggagacuca

SEQ ID NO: 905706 - RNA, 19 nt, Homo sapiens
  misc_RNA (1)...(19): siRNA sense strand
ccacagaggagcagaagac

SEQ ID NO: 905707 - RNA, 19 nt, Homo sapiens
  misc_RNA (1)...(19): siRNA sense strand
gcucagucaacucaagaaa

SEQ ID NO: 905708 - RNA, 19 nt, Homo sapiens
  misc_RNA (1)...(19): siRNA sense strand
cacccggacuccuccaaga

SEQ ID NO: 905709 - RNA, 19 nt, Homo sapiens
  misc_RNA (1)...(19): siRNA sense strand
ggggagaacccauguaaga

SEQ ID NO: 905710 - RNA, 19 nt, Homo sapiens
  misc_RNA (1)...(19): siRNA sense strand
gcaauggguggaugcucaa

SEQ ID NO: 905711 - RNA, 19 nt, Homo sapiens
  misc_RNA (1)...(19): siRNA sense strand
caucauccacagacucaga

SEQ ID NO: 905712 - RNA, 19 nt, Homo sapiens
  misc_RNA (1)...(19): siRNA sense strand
ggaggagaaggacaucauc

SEQ ID NO: 905713 - RNA, 19 nt, Homo sapiens
  misc_RNA (1)...(19): siRNA sense strand
gguggaugcucaaguucag

SEQ ID NO: 905714 - RNA, 19 nt, Homo sapiens
  misc_RNA (1)...(19): siRNA sense strand
ccagccgccugacagugaa

SEQ ID NO: 905715 - RNA, 19 nt, Homo sapiens
  misc_RNA (1)...(19): siRNA sense strand
cccggacuccuccaagaua

SEQ ID NO: 905716 - RNA, 19 nt, Homo sapiens
  misc_RNA (1)...(19): siRNA sense strand
gggaggagaaggacaucau

SEQ ID NO: 905717 - RNA, 19 nt, Homo sapiens
  misc_RNA (1)...(19): siRNA sense strand
gcugcucagucaacucaag

SEQ ID NO: 905718 - RNA, 19 nt, Homo sapiens
  misc_RNA (1)...(19): siRNA sense strand
auggguggaugcucaaguu

SEQ ID NO: 905719 - RNA, 19 nt, Homo sapiens
  misc_RNA (1)...(19): siRNA sense strand
cagcuggaggccauucuug

SEQ ID NO: 905720 - RNA, 19 nt, Homo sapiens
  misc_RNA (1)...(19): siRNA sense strand
gaagaaauguggaaagaua

SEQ ID NO: 905721 - RNA, 19 nt, Homo sapiens
  misc_RNA (1)...(19): siRNA sense strand
ggaaagauauggaagaaug

SEQ ID NO: 905722 - RNA, 19 nt, Homo sapiens
  misc_RNA (1)...(19): siRNA sense strand
ggaagaaugucagaauaaa

SEQ ID NO: 905723 - RNA, 19 nt, Homo sapiens
  misc_RNA (1)...(19): siRNA sense strand
ggaauugccuugagacauc

SEQ ID NO: 905724 - RNA, 19 nt, Homo sapiens
  misc_RNA (1)...(19): siRNA sense strand
gcucagcuaucauuguuaa

SEQ ID NO: 905725 - RNA, 19 nt, Homo sapiens
  misc_RNA (1)...(19): siRNA sense strand
gaagauccaacccgaauaa

SEQ ID NO: 905726 - RNA, 19 nt, Homo sapiens
  misc_RNA (1)...(19): siRNA sense strand
gaaaugguacuguccacua

SEQ ID NO: 905727 - RNA, 19 nt, Homo sapiens
  misc_RNA (1)...(19): siRNA sense strand
uagagaaugugaagaaaug

SEQ ID NO: 905728 - RNA, 19 nt, Homo sapiens
  misc_RNA (1)...(19): siRNA sense strand
cgaauaagauuagaagcuu

SEQ ID NO: 905729 - RNA, 19 nt, Homo sapiens
  misc_RNA (1)...(19): siRNA sense strand
gaagaagaacuuauuagag

SEQ ID NO: 905730 - RNA, 19 nt, Homo sapiens
  misc_RNA (1)...(19): siRNA sense strand
gugaagaaauguggaaaga

SEQ ID NO: 905731 - RNA, 19 nt, Homo sapiens
  misc_RNA (1)...(19): siRNA sense strand
gaacagcaacagauaaugg

SEQ ID NO: 905732 - RNA, 19 nt, Homo sapiens
  misc_RNA (1)...(19): siRNA sense strand
ccacuaaggagucaaagaa

SEQ ID NO: 905733 - RNA, 19 nt, Homo sapiens
  misc_RNA (1)...(19): siRNA sense strand
ggaugaacagcaacagaua

SEQ ID NO: 905734 - RNA, 19 nt, Homo sapiens
  misc_RNA (1)...(19): siRNA sense strand
gaaaagaagaguuccaaaa

SEQ ID NO: 905735 - RNA, 19 nt, Homo sapiens
  misc_RNA (1)...(19): siRNA sense strand
uagaagcuuuccaucagua

SEQ ID NO: 905736 - RNA, 19 nt, Homo sapiens
  misc_RNA (1)...(19): siRNA sense strand
ugauaacacugcaugaaau

SEQ ID NO: 905737 - RNA, 19 nt, Homo sapiens
  misc_RNA (1)...(19): siRNA sense strand
aaacaauucccuugacuga

SEQ ID NO: 905738 - RNA, 19 nt, Homo sapiens
  misc_RNA (1)...(19): siRNA sense strand
ugaagacguucucauaaca

SEQ ID NO: 905739 - RNA, 19 nt, Homo sapiens
  misc_RNA (1)...(19): siRNA sense strand
gacugaagacguucucaua

SEQ ID NO: 905740 - RNA, 19 nt, Homo sapiens
  misc_RNA (1)...(19): siRNA sense strand
aaaugguacuguccacuaa

SEQ ID NO: 905741 - RNA, 19 nt, Homo sapiens
  misc_RNA (1)...(19): siRNA sense strand
gauccaacccgaauaagau

SEQ ID NO: 905742 - RNA, 19 nt, Homo sapiens
  misc_RNA (1)...(19): siRNA sense strand
gaugaacagcaacagauaa

SEQ ID NO: 905743 - RNA, 19 nt, Homo sapiens
  misc_RNA (1)...(19): siRNA sense strand
caugaaauguuagagauuc

SEQ ID NO: 905744 - RNA, 19 nt, Homo sapiens
  misc_RNA (1)...(19): siRNA sense strand
guggaaagauauggaagaa

SEQ ID NO: 905745 - RNA, 19 nt, Homo sapiens
  misc_RNA (1)...(19): siRNA sense strand
ggaaucucuuaauguacua

SEQ ID NO: 905746 - RNA, 19 nt, Homo sapiens
  misc_RNA (1)...(19): siRNA sense strand
acaauucccuugacugaag

SEQ ID NO: 905747 - RNA, 19 nt, Homo sapiens
  misc_RNA (1)...(19): siRNA sense strand
gauuagaagcuuuccauca

SEQ ID NO: 905748 - RNA, 19 nt, Homo sapiens
  misc_RNA (1)...(19): siRNA sense strand
uaauggaauugccuugaga

SEQ ID NO: 905749 - RNA, 19 nt, Homo sapiens
  misc_RNA (1)...(19): siRNA sense strand
guuaaaggaagacuuagaa

SEQ ID NO: 905750 - RNA, 19 nt, Homo sapiens
  misc_RNA (1)...(19): siRNA sense strand
cugaaacacucaccgauuc

SEQ ID NO: 905751 - RNA, 19 nt, Homo sapiens
  misc_RNA (1)...(19): siRNA sense strand
cuacagaugugggagaugu

SEQ ID NO: 905752 - RNA, 19 nt, Homo sapiens
  misc_RNA (1)...(19): siRNA sense strand
guaauggaauugccuugag

SEQ ID NO: 905753 - RNA, 19 nt, Homo sapiens
  misc_RNA (1)...(19): siRNA sense strand
ggauaguacuacagaugug

SEQ ID NO: 905754 - RNA, 19 nt, Homo sapiens
  misc_RNA (1)...(19): siRNA sense strand
cuaaggagucaaagaauga

SEQ ID NO: 905755 - RNA, 19 nt, Homo sapiens
  misc_RNA (1)...(19): siRNA sense strand
cgauucaaaugcucagcua

SEQ ID NO: 905756 - RNA, 19 nt, Homo sapiens
  misc_RNA (1)...(19): siRNA sense strand
gauaacacugcaugaaaug

SEQ ID NO: 905757 - RNA, 19 nt, Homo sapiens
  misc_RNA (1)...(19): siRNA sense strand
ugugggagauguuacaaau

SEQ ID NO: 905758 - RNA, 19 nt, Homo sapiens
  misc_RNA (1)...(19): siRNA sense strand
gaaagauauggaagaaugu

SEQ ID NO: 905759 - RNA, 19 nt, Homo sapiens
  misc_RNA (1)...(19): siRNA sense strand
ugggagauguuacaaauac

SEQ ID NO: 905760 - RNA, 19 nt, Homo sapiens
  misc_RNA (1)...(19): siRNA sense strand
uggaagaaugucagaauaa

SEQ ID NO: 905761 - RNA, 19 nt, Homo sapiens
  misc_RNA (1)...(19): siRNA sense strand
gagcugcugcugcguaaug

SEQ ID NO: 905762 - RNA, 19 nt, Homo sapiens
  misc_RNA (1)...(19): siRNA sense strand
gcaugaaauguuagagauu

SEQ ID NO: 905763 - RNA, 19 nt, Homo sapiens
  misc_RNA (1)...(19): siRNA sense strand
guacuacacagugaauuga

SEQ ID NO: 905764 - RNA, 19 nt, Homo sapiens
  misc_RNA (1)...(19): siRNA sense strand
auggaagaaugucagaaua

SEQ ID NO: 905765 - RNA, 19 nt, Homo sapiens
  misc_RNA (1)...(19): siRNA sense strand
ucaagaaucaucuguaaac

SEQ ID NO: 905766 - RNA, 19 nt, Homo sapiens
  misc_RNA (1)...(19): siRNA sense strand
gaacuuauuagagaaugug

SEQ ID NO: 905767 - RNA, 19 nt, Homo sapiens
  misc_RNA (1)...(19): siRNA sense strand
ucacuuauuggaacugaaa

SEQ ID NO: 905768 - RNA, 19 nt, Homo sapiens
  misc_RNA (1)...(19): siRNA sense strand
gaauauaaggagaaacucu

SEQ ID NO: 905769 - RNA, 19 nt, Homo sapiens
  misc_RNA (1)...(19): siRNA sense strand
aaaggaagacuuagaaagg

SEQ ID NO: 905770 - RNA, 19 nt, Homo sapiens
  misc_RNA (1)...(19): siRNA sense strand
acuaaggagucaaagaaug

SEQ ID NO: 905771 - RNA, 19 nt, Homo sapiens
  misc_RNA (1)...(19): siRNA sense strand
uaaaggaagacuuagaaag

SEQ ID NO: 905772 - RNA, 19 nt, Homo sapiens
  misc_RNA (1)...(19): siRNA sense strand
aagacguucucauaacauu

SEQ ID NO: 905773 - RNA, 19 nt, Homo sapiens
  misc_RNA (1)...(19): siRNA sense strand
gagauguuacaaauacuga

SEQ ID NO: 905774 - RNA, 19 nt, Homo sapiens
  misc_RNA (1)...(19): siRNA sense strand
gugguuggaugaacagcaa

SEQ ID NO: 905775 - RNA, 19 nt, Homo sapiens
  misc_RNA (1)...(19): siRNA sense strand
gaagacguucucauaacau

SEQ ID NO: 905776 - RNA, 19 nt, Homo sapiens
  misc_RNA (1)...(19): siRNA sense strand
cagaagauccaacccgaau

SEQ ID NO: 905777 - RNA, 19 nt, Homo sapiens
  misc_RNA (1)...(19): siRNA sense strand
cuugagacauccagaagau

SEQ ID NO: 905778 - RNA, 19 nt, Homo sapiens
  misc_RNA (1)...(19): siRNA sense strand
ugaaacaauucccuugacu

SEQ ID NO: 905779 - RNA, 19 nt, Homo sapiens
  misc_RNA (1)...(19): siRNA sense strand
gaaacacucaccgauucaa

SEQ ID NO: 905780 - RNA, 19 nt, Homo sapiens
  misc_RNA (1)...(19): siRNA sense strand
uggaaucucuuaauguacu

SEQ ID NO: 905781 - RNA, 19 nt, Homo sapiens
  misc_RNA (1)...(19): siRNA sense strand
ggagauguuacaaauacug

SEQ ID NO: 905782 - RNA, 19 nt, Homo sapiens
  misc_RNA (1)...(19): siRNA sense strand
gaaucaggaggaucuagau

SEQ ID NO: 905783 - RNA, 19 nt, Homo sapiens
  misc_RNA (1)...(19): siRNA sense strand
ucccuugacugaagacguu

SEQ ID NO: 905784 - RNA, 19 nt, Homo sapiens
  misc_RNA (1)...(19): siRNA sense strand
aaacacucaccgauucaaa

SEQ ID NO: 905785 - RNA, 19 nt, Homo sapiens
  misc_RNA (1)...(19): siRNA sense strand
gauauggaagaaugucaga

SEQ ID NO: 905786 - RNA, 19 nt, Homo sapiens
  misc_RNA (1)...(19): siRNA sense strand
gcugcugcguaauggaauu

SEQ ID NO: 905787 - RNA, 19 nt, Homo sapiens
  misc_RNA (1)...(19): siRNA sense strand
cugauaacacugcaugaaa

SEQ ID NO: 905788 - RNA, 19 nt, Homo sapiens
  misc_RNA (1)...(19): siRNA sense strand
acuacacagugaauugaaa

SEQ ID NO: 905789 - RNA, 19 nt, Homo sapiens
  misc_RNA (1)...(19): siRNA sense strand
caauucccuugacugaaga

SEQ ID NO: 905790 - RNA, 19 nt, Homo sapiens
  misc_RNA (1)...(19): siRNA sense strand
cugaagacguucucauaac

SEQ ID NO: 905791 - RNA, 19 nt, Homo sapiens
  misc_RNA (1)...(19): siRNA sense strand
ugcaugaaauguuagagau

SEQ ID NO: 905792 - RNA, 19 nt, Homo sapiens
  misc_RNA (1)...(19): siRNA sense strand
gaacugaaaacuaaaaugc

SEQ ID NO: 905793 - RNA, 19 nt, Homo sapiens
  misc_RNA (1)...(19): siRNA sense strand
gagaaugugaagaaaugug

SEQ ID NO: 905794 - RNA, 19 nt, Homo sapiens
  misc_RNA (1)...(19): siRNA sense strand
augcucagcuaucauuguu

SEQ ID NO: 905795 - RNA, 19 nt, Homo sapiens
  misc_RNA (1)...(19): siRNA sense strand
acagaugugggagauguua

SEQ ID NO: 905796 - RNA, 19 nt, Homo sapiens
  misc_RNA (1)...(19): siRNA sense strand
acugaagacguucucauaa

SEQ ID NO: 905797 - RNA, 19 nt, Homo sapiens
  misc_RNA (1)...(19): siRNA sense strand
uaucacuuauuggaacuga

SEQ ID NO: 905798 - RNA, 19 nt, Homo sapiens
  misc_RNA (1)...(19): siRNA sense strand
gacguucucauaacauuag

SEQ ID NO: 905799 - RNA, 19 nt, Homo sapiens
  misc_RNA (1)...(19): siRNA sense strand
uauggaagaaugucagaau

SEQ ID NO: 905800 - RNA, 19 nt, Homo sapiens
  misc_RNA (1)...(19): siRNA sense strand
gaaauguggaaagauaugg

SEQ ID NO: 905801 - RNA, 19 nt, Homo sapiens
  misc_RNA (1)...(19): siRNA sense strand
gugggagauguuacaaaua

SEQ ID NO: 905802 - RNA, 19 nt, Homo sapiens
  misc_RNA (1)...(19): siRNA sense strand
acacucaccgauucaaaug

SEQ ID NO: 905803 - RNA, 19 nt, Homo sapiens
  misc_RNA (1)...(19): siRNA sense strand
auuagaagcuuuccaucag

SEQ ID NO: 905804 - RNA, 19 nt, Homo sapiens
  misc_RNA (1)...(19): siRNA sense strand
caacccgaauaagauuaga

SEQ ID NO: 905805 - RNA, 19 nt, Homo sapiens
  misc_RNA (1)...(19): siRNA sense strand
agacguucucauaacauua

SEQ ID NO: 905806 - RNA, 19 nt, Homo sapiens
  misc_RNA (1)...(19): siRNA sense strand
cuguaaaccugauaacacu

SEQ ID NO: 905807 - RNA, 19 nt, Homo sapiens
  misc_RNA (1)...(19): siRNA sense strand
uuagaagcuuuccaucagu

SEQ ID NO: 905808 - RNA, 19 nt, Homo sapiens
  misc_RNA (1)...(19): siRNA sense strand
ccugaaacaauucccuuga

SEQ ID NO: 905809 - RNA, 19 nt, Homo sapiens
  misc_RNA (1)...(19): siRNA sense strand
agaagauccaacccgaaua

SEQ ID NO: 905810 - RNA, 19 nt, Homo sapiens
  misc_RNA (1)...(19): siRNA sense strand
gauguuacaaauacugaag

SEQ ID NO: 905811 - RNA, 19 nt, Homo sapiens
  misc_RNA (1)...(19): siRNA sense strand
gggcgaguuucuagaagac

SEQ ID NO: 905812 - RNA, 19 nt, Homo sapiens
  misc_RNA (1)...(19): siRNA sense strand
ugggcgaguuucuagaaga

SEQ ID NO: 905813 - RNA, 19 nt, Homo sapiens
  misc_RNA (1)...(19): siRNA sense strand
guucucauaacauuaggaa

SEQ ID NO: 905814 - RNA, 19 nt, Homo sapiens
  misc_RNA (1)...(19): siRNA sense strand
uucaaaugcucagcuauca

SEQ ID NO: 905815 - RNA, 19 nt, Homo sapiens
  misc_RNA (1)...(19): siRNA sense strand
uugagcugcugcugcguaa

SEQ ID NO: 905816 - RNA, 19 nt, Homo sapiens
  misc_RNA (1)...(19): siRNA sense strand
gaucuugaaaugguacugu

SEQ ID NO: 905817 - RNA, 19 nt, Homo sapiens
  misc_RNA (1)...(19): siRNA sense strand
agaaauguggaaagauaug

SEQ ID NO: 905818 - RNA, 19 nt, Homo sapiens
  misc_RNA (1)...(19): siRNA sense strand
cagcaacagauaauggaau

SEQ ID NO: 905819 - RNA, 19 nt, Homo sapiens
  misc_RNA (1)...(19): siRNA sense strand
cuagauccggauaguacua

SEQ ID NO: 905820 - RNA, 19 nt, Homo sapiens
  misc_RNA (1)...(19): siRNA sense strand
cagcauuacuuccaucuuu

SEQ ID NO: 905821 - RNA, 19 nt, Homo sapiens
  misc_RNA (1)...(19): siRNA sense strand
ucaacaagaucgugcagua

SEQ ID NO: 905822 - RNA, 19 nt, Homo sapiens
  misc_RNA (1)...(19): siRNA sense strand
gaaggucaauaacaagcua

SEQ ID NO: 905823 - RNA, 19 nt, Homo sapiens
  misc_RNA (1)...(19): siRNA sense strand
gaaugaaggcaaguuaaua

SEQ ID NO: 905824 - RNA, 19 nt, Homo sapiens
  misc_RNA (1)...(19): siRNA sense strand
gcacugggccaucuaugua

SEQ ID NO: 905825 - RNA, 19 nt, Homo sapiens
  misc_RNA (1)...(19): siRNA sense strand
gcauaaagcccaaaccaau

SEQ ID NO: 905826 - RNA, 19 nt, Homo sapiens
  misc_RNA (1)...(19): siRNA sense strand
ggagaaggcuguaguuagc

SEQ ID NO: 905827 - RNA, 19 nt, Homo sapiens
  misc_RNA (1)...(19): siRNA sense strand
gaaggcaaguuaauaaagc

SEQ ID NO: 905828 - RNA, 19 nt, Homo sapiens
  misc_RNA (1)...(19): siRNA sense strand
cauaaagcccaaaccaaua

SEQ ID NO: 905829 - RNA, 19 nt, Homo sapiens
  misc_RNA (1)...(19): siRNA sense strand
gagaaugaaggcaaguuaa

SEQ ID NO: 905830 - RNA, 19 nt, Homo sapiens
  misc_RNA (1)...(19): siRNA sense strand
ccuggaaggucaauaacaa

SEQ ID NO: 905831 - RNA, 19 nt, Homo sapiens
  misc_RNA (1)...(19): siRNA sense strand
gcaagcagcugagggaaaa

SEQ ID NO: 905832 - RNA, 19 nt, Homo sapiens
  misc_RNA (1)...(19): siRNA sense strand
gcaguuauuucagcuguag

SEQ ID NO: 905833 - RNA, 19 nt, Homo sapiens
  misc_RNA (1)...(19): siRNA sense strand
ugagaaugaaggcaaguua

SEQ ID NO: 905834 - RNA, 19 nt, Homo sapiens
  misc_RNA (1)...(19): siRNA sense strand
gaaagcagacuggaguuca

SEQ ID NO: 905835 - RNA, 19 nt, Homo sapiens
  misc_RNA (1)...(19): siRNA sense strand
uuccaaagccugagaauga

SEQ ID NO: 905836 - RNA, 19 nt, Homo sapiens
  misc_RNA (1)...(19): siRNA sense strand
gcuccuggaaggucaauaa

SEQ ID NO: 905837 - RNA, 19 nt, Homo sapiens
  misc_RNA (1)...(19): siRNA sense strand
ucaauggccucagauaugg

SEQ ID NO: 905838 - RNA, 19 nt, Homo sapiens
  misc_RNA (1)...(19): siRNA sense strand
gaccacacccagccagaaa

SEQ ID NO: 905839 - RNA, 19 nt, Homo sapiens
  misc_RNA (1)...(19): siRNA sense strand
auaaagcccaaaccaauaa

SEQ ID NO: 905840 - RNA, 19 nt, Homo sapiens
  misc_RNA (1)...(19): siRNA sense strand
agcauuacuuccaucuuua

SEQ ID NO: 905841 - RNA, 19 nt, Homo sapiens
  misc_RNA (1)...(19): siRNA sense strand
gaggugggcagcauuacuu

SEQ ID NO: 905842 - RNA, 19 nt, Homo sapiens
  misc_RNA (1)...(19): siRNA sense strand
ccacucaggucuaaauagc

SEQ ID NO: 905843 - RNA, 19 nt, Homo sapiens
  misc_RNA (1)...(19): siRNA sense strand
uuacuuccaucuuuagcaa

SEQ ID NO: 905844 - RNA, 19 nt, Homo sapiens
  misc_RNA (1)...(19): siRNA sense strand
gggagaaggcuguaguuag

SEQ ID NO: 905845 - RNA, 19 nt, Homo sapiens
  misc_RNA (1)...(19): siRNA sense strand
gucaauggccucagauaug

SEQ ID NO: 905846 - RNA, 19 nt, Homo sapiens
  misc_RNA (1)...(19): siRNA sense strand
aaagcagacuggaguucaa

SEQ ID NO: 905847 - RNA, 19 nt, Homo sapiens
  misc_RNA (1)...(19): siRNA sense strand
cuggagaccugauugagau

SEQ ID NO: 905848 - RNA, 19 nt, Homo sapiens
  misc_RNA (1)...(19): siRNA sense strand
uauuucagcuguaguggau

SEQ ID NO: 905849 - RNA, 19 nt, Homo sapiens
  misc_RNA (1)...(19): siRNA sense strand
gcagacuggaguucaauuc

SEQ ID NO: 905850 - RNA, 19 nt, Homo sapiens
  misc_RNA (1)...(19): siRNA sense strand
ggagaccugauugagauuu

SEQ ID NO: 905851 - RNA, 19 nt, Homo sapiens
  misc_RNA (1)...(19): siRNA sense strand
gaacugugagcacuuuguc

SEQ ID NO: 905852 - RNA, 19 nt, Homo sapiens
  misc_RNA (1)...(19): siRNA sense strand
uguaguggauagcauaaag

SEQ ID NO: 905853 - RNA, 19 nt, Homo sapiens
  misc_RNA (1)...(19): siRNA sense strand
ugugagcacuuugucaaug

SEQ ID NO: 905854 - RNA, 19 nt, Homo sapiens
  misc_RNA (1)...(19): siRNA sense strand
agaaugaaggcaaguuaau

SEQ ID NO: 905855 - RNA, 19 nt, Homo sapiens
  misc_RNA (1)...(19): siRNA sense strand
gugagcacuuugucaaugg

SEQ ID NO: 905856 - RNA, 19 nt, Homo sapiens
  misc_RNA (1)...(19): siRNA sense strand
gggcagaagcauccagcaa

SEQ ID NO: 905857 - RNA, 19 nt, Homo sapiens
  misc_RNA (1)...(19): siRNA sense strand
gcaguacagccugauugaa

SEQ ID NO: 905858 - RNA, 19 nt, Homo sapiens
  misc_RNA (1)...(19): siRNA sense strand
acagucgucuggaggaugu

SEQ ID NO: 905859 - RNA, 19 nt, Homo sapiens
  misc_RNA (1)...(19): siRNA sense strand
uccaaagccugagaaugaa

SEQ ID NO: 905860 - RNA, 19 nt, Homo sapiens
  misc_RNA (1)...(19): siRNA sense strand
ggaacugugagcacuuugu

SEQ ID NO: 905861 - RNA, 19 nt, Homo sapiens
  misc_RNA (1)...(19): siRNA sense strand
gucaauaacaagcuagaug

SEQ ID NO: 905862 - RNA, 19 nt, Homo sapiens
  misc_RNA (1)...(19): siRNA sense strand
agaaggcuguaguuagcuu

SEQ ID NO: 905863 - RNA, 19 nt, Homo sapiens
  misc_RNA (1)...(19): siRNA sense strand
ugaaggcaaguuaauaaag

SEQ ID NO: 905864 - RNA, 19 nt, Homo sapiens
  misc_RNA (1)...(19): siRNA sense strand
caguacagccugauugaag

SEQ ID NO: 905865 - RNA, 19 nt, Homo sapiens
  misc_RNA (1)...(19): siRNA sense strand
gcauuacuuccaucuuuag

SEQ ID NO: 905866 - RNA, 19 nt, Homo sapiens
  misc_RNA (1)...(19): siRNA sense strand
gaccuggagaccugauuga

SEQ ID NO: 905867 - RNA, 19 nt, Homo sapiens
  misc_RNA (1)...(19): siRNA sense strand
gagaccugauugagauuuu

SEQ ID NO: 905868 - RNA, 19 nt, Homo sapiens
  misc_RNA (1)...(19): siRNA sense strand
gugcaguacagccugauug

SEQ ID NO: 905869 - RNA, 19 nt, Homo sapiens
  misc_RNA (1)...(19): siRNA sense strand
gcuguaguggauagcauaa

SEQ ID NO: 905870 - RNA, 19 nt, Homo sapiens
  misc_RNA (1)...(19): siRNA sense strand
gguagagcacgcccugaug

SEQ ID NO: 905871 - RNA, 19 nt, Homo sapiens
  misc_RNA (1)...(19): siRNA sense strand
ugauugaagggaacuguga

SEQ ID NO: 905872 - RNA, 19 nt, Homo sapiens
  misc_RNA (1)...(19): siRNA sense strand
agggaacugugagcacuuu

SEQ ID NO: 905873 - RNA, 19 nt, Homo sapiens
  misc_RNA (1)...(19): siRNA sense strand
acucaggucuaaauagcau

SEQ ID NO: 905874 - RNA, 19 nt, Homo sapiens
  misc_RNA (1)...(19): siRNA sense strand
ugucaauggccucagauau

SEQ ID NO: 905875 - RNA, 19 nt, Homo sapiens
  misc_RNA (1)...(19): siRNA sense strand
aaaagauggucaacaagau

SEQ ID NO: 905876 - RNA, 19 nt, Homo sapiens
  misc_RNA (1)...(19): siRNA sense strand
gaucauccagcguacaaaa

SEQ ID NO: 905877 - RNA, 19 nt, Homo sapiens
  misc_RNA (1)...(19): siRNA sense strand
uaugagcacugggccaucu

SEQ ID NO: 905878 - RNA, 19 nt, Homo sapiens
  misc_RNA (1)...(19): siRNA sense strand
aaagauggucaacaagauc

SEQ ID NO: 905879 - RNA, 19 nt, Homo sapiens
  misc_RNA (1)...(19): siRNA sense strand
ccuggagaccugauugaga

SEQ ID NO: 905880 - RNA, 19 nt, Homo sapiens
  misc_RNA (1)...(19): siRNA sense strand
caacaagaucgugcaguac

SEQ ID NO: 905881 - RNA, 19 nt, Homo sapiens
  misc_RNA (1)...(19): siRNA sense strand
ggaaugagcacaccaccua

SEQ ID NO: 905882 - RNA, 19 nt, Homo sapiens
  misc_RNA (1)...(19): siRNA sense strand
gacaagcccucuaucaguu

SEQ ID NO: 905883 - RNA, 19 nt, Homo sapiens
  misc_RNA (1)...(19): siRNA sense strand
gaaguacuuucucugcaaa

SEQ ID NO: 905884 - RNA, 19 nt, Homo sapiens
  misc_RNA (1)...(19): siRNA sense strand
gcccuccucuccaucauua

SEQ ID NO: 905885 - RNA, 19 nt, Homo sapiens
  misc_RNA (1)...(19): siRNA sense strand
gcaaagacaaguacuaugg

SEQ ID NO: 905886 - RNA, 19 nt, Homo sapiens
  misc_RNA (1)...(19): siRNA sense strand
gcaggaaccaccagaaaga

SEQ ID NO: 905887 - RNA, 19 nt, Homo sapiens
  misc_RNA (1)...(19): siRNA sense strand
ucuaucaguuccuacauaa

SEQ ID NO: 905888 - RNA, 19 nt, Homo sapiens
  misc_RNA (1)...(19): siRNA sense strand
guucauaccgcuucuauuc

SEQ ID NO: 905889 - RNA, 19 nt, Homo sapiens
  misc_RNA (1)...(19): siRNA sense strand
aaagacaaguacuauggaa

SEQ ID NO: 905890 - RNA, 19 nt, Homo sapiens
  misc_RNA (1)...(19): siRNA sense strand
gcacaccaccuacgaugga

SEQ ID NO: 905891 - RNA, 19 nt, Homo sapiens
  misc_RNA (1)...(19): siRNA sense strand
gacaaguacuauggaagaa

SEQ ID NO: 905892 - RNA, 19 nt, Homo sapiens
  misc_RNA (1)...(19): siRNA sense strand
uacaagggcuacuggaaug

SEQ ID NO: 905893 - RNA, 19 nt, Homo sapiens
  misc_RNA (1)...(19): siRNA sense strand
gcucucuccuugucaucua

SEQ ID NO: 905894 - RNA, 19 nt, Homo sapiens
  misc_RNA (1)...(19): siRNA sense strand
gggcaggaaccaccagaaa

SEQ ID NO: 905895 - RNA, 19 nt, Homo sapiens
  misc_RNA (1)...(19): siRNA sense strand
caaguacuauggaagaaaa

SEQ ID NO: 905896 - RNA, 19 nt, Homo sapiens
  misc_RNA (1)...(19): siRNA sense strand
uaucaguuccuacauaaug

SEQ ID NO: 905897 - RNA, 19 nt, Homo sapiens
  misc_RNA (1)...(19): siRNA sense strand
ucaaacagauaagaaguac

SEQ ID NO: 905898 - RNA, 19 nt, Homo sapiens
  misc_RNA (1)...(19): siRNA sense strand
guugacauccgcaugauug

SEQ ID NO: 905899 - RNA, 19 nt, Homo sapiens
  misc_RNA (1)...(19): siRNA sense strand
agacaaguacuauggaaga

SEQ ID NO: 905900 - RNA, 19 nt, Homo sapiens
  misc_RNA (1)...(19): siRNA sense strand
uauccaagagggagaauga

SEQ ID NO: 905901 - RNA, 19 nt, Homo sapiens
  misc_RNA (1)...(19): siRNA sense strand
caaagacaaguacuaugga

SEQ ID NO: 905902 - RNA, 19 nt, Homo sapiens
  misc_RNA (1)...(19): siRNA sense strand
guucagacaagcccucuau

SEQ ID NO: 905903 - RNA, 19 nt, Homo sapiens
  misc_RNA (1)...(19): siRNA sense strand
ucagacaagcccucuauca

SEQ ID NO: 905904 - RNA, 19 nt, Homo sapiens
  misc_RNA (1)...(19): siRNA sense strand
agacaagcccucuaucagu

SEQ ID NO: 905905 - RNA, 19 nt, Homo sapiens
  misc_RNA (1)...(19): siRNA sense strand
ggaagacaccaacggaaac

SEQ ID NO: 905906 - RNA, 19 nt, Homo sapiens
  misc_RNA (1)...(19): siRNA sense strand
uggaagacaccaacggaaa

SEQ ID NO: 905907 - RNA, 19 nt, Homo sapiens
  misc_RNA (1)...(19): siRNA sense strand
cucuaucaguuccuacaua

SEQ ID NO: 905908 - RNA, 19 nt, Homo sapiens
  misc_RNA (1)...(19): siRNA sense strand
ucauaccgcuucuauucca

SEQ ID NO: 905909 - RNA, 19 nt, Homo sapiens
  misc_RNA (1)...(19): siRNA sense strand
gaguucauaccgcuucuau

SEQ ID NO: 905910 - RNA, 19 nt, Homo sapiens
  misc_RNA (1)...(19): siRNA sense strand
aaaauguagugucacagua

SEQ ID NO: 905911 - RNA, 19 nt, Homo sapiens
  misc_RNA (1)...(19): siRNA sense strand
cauacaagggcuacuggaa

SEQ ID NO: 905912 - RNA, 19 nt, Homo sapiens
  misc_RNA (1)...(19): siRNA sense strand
ugauugacuuugcucauac

SEQ ID NO: 905913 - RNA, 19 nt, Homo sapiens
  misc_RNA (1)...(19): siRNA sense strand
gcuggaaaauguaguguca

SEQ ID NO: 905914 - RNA, 19 nt, Homo sapiens
  misc_RNA (1)...(19): siRNA sense strand
ccgaguacccagagaacaa

SEQ ID NO: 905915 - RNA, 19 nt, Homo sapiens
  misc_RNA (1)...(19): siRNA sense strand
gaaaauguagugucacagu

SEQ ID NO: 905916 - RNA, 19 nt, Homo sapiens
  misc_RNA (1)...(19): siRNA sense strand
ggcaugcagguuuaucaaa

SEQ ID NO: 905917 - RNA, 19 nt, Homo sapiens
  misc_RNA (1)...(19): siRNA sense strand
auacaagggcuacuggaau

SEQ ID NO: 905918 - RNA, 19 nt, Homo sapiens
  misc_RNA (1)...(19): siRNA sense strand
uggaaaaccucaucaggau

SEQ ID NO: 905919 - RNA, 19 nt, Homo sapiens
  misc_RNA (1)...(19): siRNA sense strand
ccagcucucuccuugucau

SEQ ID NO: 905920 - RNA, 19 nt, Homo sapiens
  misc_RNA (1)...(19): siRNA sense strand
ccacauacaagggcuacug

SEQ ID NO: 905921 - RNA, 19 nt, Homo sapiens
  misc_RNA (1)...(19): siRNA sense strand
ccuguguccuggaucugaa

SEQ ID NO: 905922 - RNA, 19 nt, Homo sapiens
  misc_RNA (1)...(19): siRNA sense strand
ggauauccaagagggagaa

SEQ ID NO: 905923 - RNA, 19 nt, Homo sapiens
  misc_RNA (1)...(19): siRNA sense strand
gcuccgaguacccagagaa

SEQ ID NO: 905924 - RNA, 19 nt, Homo sapiens
  misc_RNA (1)...(19): siRNA sense strand
cagacaagcccucuaucag

SEQ ID NO: 905925 - RNA, 19 nt, Homo sapiens
  misc_RNA (1)...(19): siRNA sense strand
cugcaaagacaaguacuau

SEQ ID NO: 905926 - RNA, 19 nt, Homo sapiens
  misc_RNA (1)...(19): siRNA sense strand
agaaagauaugguugaaga

SEQ ID NO: 905927 - RNA, 19 nt, Homo sapiens
  misc_RNA (1)...(19): siRNA sense strand
caagaaagauaugguugaa

SEQ ID NO: 905928 - RNA, 19 nt, Homo sapiens
  misc_RNA (1)...(19): siRNA sense strand
gaaguaagcagcaagaaag

SEQ ID NO: 905929 - RNA, 19 nt, Homo sapiens
  misc_RNA (1)...(19): siRNA sense strand
guaagcagcaagaaagaua

SEQ ID NO: 905930 - RNA, 19 nt, Homo sapiens
  misc_RNA (1)...(19): siRNA sense strand
ggagaagcagugaaagaua

SEQ ID NO: 905931 - RNA, 19 nt, Homo sapiens
  misc_RNA (1)...(19): siRNA sense strand
gagaagcagugaaagauac

SEQ ID NO: 905932 - RNA, 19 nt, Homo sapiens
  misc_RNA (1)...(19): siRNA sense strand
gcaagaaagauaugguuga

SEQ ID NO: 905933 - RNA, 19 nt, Homo sapiens
  misc_RNA (1)...(19): siRNA sense strand
caccaggaauuauugauga

SEQ ID NO: 905934 - RNA, 19 nt, Homo sapiens
  misc_RNA (1)...(19): siRNA sense strand
caagugaucccagccuaua

SEQ ID NO: 905935 - RNA, 19 nt, Homo sapiens
  misc_RNA (1)...(19): siRNA sense strand
gaaacaaugcaaagaugga

SEQ ID NO: 905936 - RNA, 19 nt, Homo sapiens
  misc_RNA (1)...(19): siRNA sense strand
agaccucucuuccaaaugu

SEQ ID NO: 905937 - RNA, 19 nt, Homo sapiens
  misc_RNA (1)...(19): siRNA sense strand
gaagaccacaggcgaguuc

SEQ ID NO: 905938 - RNA, 19 nt, Homo sapiens
  misc_RNA (1)...(19): siRNA sense strand
agugaaagauacaugcaaa

SEQ ID NO: 905939 - RNA, 19 nt, Homo sapiens
  misc_RNA (1)...(19): siRNA sense strand
ugaaguaagcagcaagaaa

SEQ ID NO: 905940 - RNA, 19 nt, Homo sapiens
  misc_RNA (1)...(19): siRNA sense strand
gaucagggcacugcaggaa

SEQ ID NO: 905941 - RNA, 19 nt, Homo sapiens
  misc_RNA (1)...(19): siRNA sense strand
gcugcuggcucuuccuaug

SEQ ID NO: 905942 - RNA, 19 nt, Homo sapiens
  misc_RNA (1)...(19): siRNA sense strand
gcaggaaacaaugcaaaga

SEQ ID NO: 905943 - RNA, 19 nt, Homo sapiens
  misc_RNA (1)...(19): siRNA sense strand
ugacucaacaccaggaauu

SEQ ID NO: 905944 - RNA, 19 nt, Homo sapiens
  misc_RNA (1)...(19): siRNA sense strand
aggaaacaaugcaaagaug

SEQ ID NO: 905945 - RNA, 19 nt, Homo sapiens
  misc_RNA (1)...(19): siRNA sense strand
guucacgacagacuacuuu

SEQ ID NO: 905946 - RNA, 19 nt, Homo sapiens
  misc_RNA (1)...(19): siRNA sense strand
caacaccaggaauuauuga

SEQ ID NO: 905947 - RNA, 19 nt, Homo sapiens
  misc_RNA (1)...(19): siRNA sense strand
caguaagguucacgacaga

SEQ ID NO: 905948 - RNA, 19 nt, Homo sapiens
  misc_RNA (1)...(19): siRNA sense strand
augcaaagauggagaagca

SEQ ID NO: 905949 - RNA, 19 nt, Homo sapiens
  misc_RNA (1)...(19): siRNA sense strand
ucuucgagcuugcugcauu

SEQ ID NO: 905950 - RNA, 19 nt, Homo sapiens
  misc_RNA (1)...(19): siRNA sense strand
ccaggaauuauugaugaua

SEQ ID NO: 905951 - RNA, 19 nt, Homo sapiens
  misc_RNA (1)...(19): siRNA sense strand
gacucaacaccaggaauua

SEQ ID NO: 905952 - RNA, 19 nt, Homo sapiens
  misc_RNA (1)...(19): siRNA sense strand
cagcaagaaagauaugguu

SEQ ID NO: 905953 - RNA, 19 nt, Homo sapiens
  misc_RNA (1)...(19): siRNA sense strand
ucaacaccaggaauuauug

SEQ ID NO: 905954 - RNA, 19 nt, Homo sapiens
  misc_RNA (1)...(19): siRNA sense strand
uuccaaauguucaccauag

SEQ ID NO: 905955 - RNA, 19 nt, Homo sapiens
  misc_RNA (1)...(19): siRNA sense strand
ucacgacagacuacuuuga

SEQ ID NO: 905956 - RNA, 19 nt, Homo sapiens
  misc_RNA (1)...(19): siRNA sense strand
caggaaacaaugcaaagau

SEQ ID NO: 905957 - RNA, 19 nt, Homo sapiens
  misc_RNA (1)...(19): siRNA sense strand
ucagggcacugcaggaaac

SEQ ID NO: 905958 - RNA, 19 nt, Homo sapiens
  misc_RNA (1)...(19): siRNA sense strand
cacgacagacuacuuugaa

SEQ ID NO: 905959 - RNA, 19 nt, Homo sapiens
  misc_RNA (1)...(19): siRNA sense strand
gaaagauaugguugaagag

SEQ ID NO: 905960 - RNA, 19 nt, Homo sapiens
  misc_RNA (1)...(19): siRNA sense strand
agauaugguugaagagucu

SEQ ID NO: 905961 - RNA, 19 nt, Homo sapiens
  misc_RNA (1)...(19): siRNA sense strand
agauggagaagcagugaaa

SEQ ID NO: 905962 - RNA, 19 nt, Homo sapiens
  misc_RNA (1)...(19): siRNA sense strand
cgagcuugcugcauuccau

SEQ ID NO: 905963 - RNA, 19 nt, Homo sapiens
  misc_RNA (1)...(19): siRNA sense strand
uaagguucacgacagacua

SEQ ID NO: 905964 - RNA, 19 nt, Homo sapiens
  misc_RNA (1)...(19): siRNA sense strand
gcagugaaagauacaugca

SEQ ID NO: 905965 - RNA, 19 nt, Homo sapiens
  misc_RNA (1)...(19): siRNA sense strand
gggcacugcaggaaacaau

SEQ ID NO: 905966 - RNA, 19 nt, Homo sapiens
  misc_RNA (1)...(19): siRNA sense strand
uaagcagcaagaaagauau

SEQ ID NO: 905967 - RNA, 19 nt, Homo sapiens
  misc_RNA (1)...(19): siRNA sense strand
acaaugcaaagauggagaa

SEQ ID NO: 905968 - RNA, 19 nt, Homo sapiens
  misc_RNA (1)...(19): siRNA sense strand
gaccucucuuccaaauguu

SEQ ID NO: 905969 - RNA, 19 nt, Homo sapiens
  misc_RNA (1)...(19): siRNA sense strand
ccaagugaucccagccuau

SEQ ID NO: 905970 - RNA, 19 nt, Homo sapiens
  misc_RNA (1)...(19): siRNA sense strand
gcacugcaggaaacaaugc

SEQ ID NO: 905971 - RNA, 19 nt, Homo sapiens
  misc_RNA (1)...(19): siRNA sense strand
gcgaguuccugcgacaucu

SEQ ID NO: 905972 - RNA, 19 nt, Homo sapiens
  misc_RNA (1)...(19): siRNA sense strand
gcagcaagaaagauauggu

SEQ ID NO: 905973 - RNA, 19 nt, Homo sapiens
  misc_RNA (1)...(19): siRNA sense strand
acaccaggaauuauugaug

SEQ ID NO: 905974 - RNA, 19 nt, Homo sapiens
  misc_RNA (1)...(19): siRNA sense strand
aaagauggagaagcaguga

SEQ ID NO: 905975 - RNA, 19 nt, Homo sapiens
  misc_RNA (1)...(19): siRNA sense strand
gaagaaagaaguugaauca

SEQ ID NO: 905976 - RNA, 19 nt, Homo sapiens
  misc_RNA (1)...(19): siRNA sense strand
gcaaugaggaugugacuaa

SEQ ID NO: 905977 - RNA, 19 nt, Homo sapiens
  misc_RNA (1)...(19): siRNA sense strand
agaaggagaugaucaagaa

SEQ ID NO: 905978 - RNA, 19 nt, Homo sapiens
  misc_RNA (1)...(19): siRNA sense strand
gaaggaauaugcugaaagg

SEQ ID NO: 905979 - RNA, 19 nt, Homo sapiens
  misc_RNA (1)...(19): siRNA sense strand
ggauauauuuccuuacuca

SEQ ID NO: 905980 - RNA, 19 nt, Homo sapiens
  misc_RNA (1)...(19): siRNA sense strand
ggaagaagauaagccaaga

SEQ ID NO: 905981 - RNA, 19 nt, Homo sapiens
  misc_RNA (1)...(19): siRNA sense strand
gaaagaagcagcagaucga

SEQ ID NO: 905982 - RNA, 19 nt, Homo sapiens
  misc_RNA (1)...(19): siRNA sense strand
gacuaaagcaguugacaua

SEQ ID NO: 905983 - RNA, 19 nt, Homo sapiens
  misc_RNA (1)...(19): siRNA sense strand
ggagauagauaacaaucca

SEQ ID NO: 905984 - RNA, 19 nt, Homo sapiens
  misc_RNA (1)...(19): siRNA sense strand
cagcaucuguuaaucuaaa

SEQ ID NO: 905985 - RNA, 19 nt, Homo sapiens
  misc_RNA (1)...(19): siRNA sense strand
gaacucaugagacugcuuu

SEQ ID NO: 905986 - RNA, 19 nt, Homo sapiens
  misc_RNA (1)...(19): siRNA sense strand
gaaaggccaacaugagaaa

SEQ ID NO: 905987 - RNA, 19 nt, Homo sapiens
  misc_RNA (1)...(19): siRNA sense strand
ucgccaagaugaaagguua

SEQ ID NO: 905988 - RNA, 19 nt, Homo sapiens
  misc_RNA (1)...(19): siRNA sense strand
agagugacaucauuacuga

SEQ ID NO: 905989 - RNA, 19 nt, Homo sapiens
  misc_RNA (1)...(19): siRNA sense strand
gcaacuaaacaaucaaaug

SEQ ID NO: 905990 - RNA, 19 nt, Homo sapiens
  misc_RNA (1)...(19): siRNA sense strand
ggaugugacuaaagcaguu

SEQ ID NO: 905991 - RNA, 19 nt, Homo sapiens
  misc_RNA (1)...(19): siRNA sense strand
caaacaaacuacccauuuu

SEQ ID NO: 905992 - RNA, 19 nt, Homo sapiens
  misc_RNA (1)...(19): siRNA sense strand
gcaagaggaacaaauggaa

SEQ ID NO: 905993 - RNA, 19 nt, Homo sapiens
  misc_RNA (1)...(19): siRNA sense strand
acaaacaaacuacccauuu

SEQ ID NO: 905994 - RNA, 19 nt, Homo sapiens
  misc_RNA (1)...(19): siRNA sense strand
ugacauaacuacuccaaaa

SEQ ID NO: 905995 - RNA, 19 nt, Homo sapiens
  misc_RNA (1)...(19): siRNA sense strand
gaagauaccgaccaugaag

SEQ ID NO: 905996 - RNA, 19 nt, Homo sapiens
  misc_RNA (1)...(19): siRNA sense strand
ggcagcaacuaaacaauca

SEQ ID NO: 905997 - RNA, 19 nt, Homo sapiens
  misc_RNA (1)...(19): siRNA sense strand
ucagagagugacaucauua

SEQ ID NO: 905998 - RNA, 19 nt, Homo sapiens
  misc_RNA (1)...(19): siRNA sense strand
ggaagauaccgaccaugaa

SEQ ID NO: 905999 - RNA, 19 nt, Homo sapiens
  misc_RNA (1)...(19): siRNA sense strand
uaugggagauagauaacaa

SEQ ID NO: 906000 - RNA, 19 nt, Homo sapiens
  misc_RNA (1)...(19): siRNA sense strand
guaaagccacccacaaaca

SEQ ID NO: 906001 - RNA, 19 nt, Homo sapiens
  misc_RNA (1)...(19): siRNA sense strand
aggaacaaauggaaacuga

SEQ ID NO: 906002 - RNA, 19 nt, Homo sapiens
  misc_RNA (1)...(19): siRNA sense strand
caagcaagaggaacaaaug

SEQ ID NO: 906003 - RNA, 19 nt, Homo sapiens
  misc_RNA (1)...(19): siRNA sense strand
agacgaaguuccugaugga

SEQ ID NO: 906004 - RNA, 19 nt, Homo sapiens
  misc_RNA (1)...(19): siRNA sense strand
caaugaggaugugacuaaa

SEQ ID NO: 906005 - RNA, 19 nt, Homo sapiens
  misc_RNA (1)...(19): siRNA sense strand
caacuaaacaaucaaaugc

SEQ ID NO: 906006 - RNA, 19 nt, Homo sapiens
  misc_RNA (1)...(19): siRNA sense strand
gaagguuuaugggagauag

SEQ ID NO: 906007 - RNA, 19 nt, Homo sapiens
  misc_RNA (1)...(19): siRNA sense strand
gaagaagauaagccaagaa

SEQ ID NO: 906008 - RNA, 19 nt, Homo sapiens
  misc_RNA (1)...(19): siRNA sense strand
cagaaggaauaugcugaaa

SEQ ID NO: 906009 - RNA, 19 nt, Homo sapiens
  misc_RNA (1)...(19): siRNA sense strand
gaagauaagccaagaaaag

SEQ ID NO: 906010 - RNA, 19 nt, Homo sapiens
  misc_RNA (1)...(19): siRNA sense strand
caagaggaacaaauggaaa

SEQ ID NO: 906011 - RNA, 19 nt, Homo sapiens
  misc_RNA (1)...(19): siRNA sense strand
gcaagcaagaggaacaaau

SEQ ID NO: 906012 - RNA, 19 nt, Homo sapiens
  misc_RNA (1)...(19): siRNA sense strand
ggaagaaagaaguugaauc

SEQ ID NO: 906013 - RNA, 19 nt, Homo sapiens
  misc_RNA (1)...(19): siRNA sense strand
uaaagccacccacaaacaa

SEQ ID NO: 906014 - RNA, 19 nt, Homo sapiens
  misc_RNA (1)...(19): siRNA sense strand
cuaaagcaguugacauaac

SEQ ID NO: 906015 - RNA, 19 nt, Homo sapiens
  misc_RNA (1)...(19): siRNA sense strand
gccagaaggaagaagauaa

SEQ ID NO: 906016 - RNA, 19 nt, Homo sapiens
  misc_RNA (1)...(19): siRNA sense strand
acaaucaaaugcaucaucu

SEQ ID NO: 906017 - RNA, 19 nt, Homo sapiens
  misc_RNA (1)...(19): siRNA sense strand
gagagugacaucauuacug

SEQ ID NO: 906018 - RNA, 19 nt, Homo sapiens
  misc_RNA (1)...(19): siRNA sense strand
ggaccaaaggauauauuuc

SEQ ID NO: 906019 - RNA, 19 nt, Homo sapiens
  misc_RNA (1)...(19): siRNA sense strand
aagaagauaagccaagaaa

SEQ ID NO: 906020 - RNA, 19 nt, Homo sapiens
  misc_RNA (1)...(19): siRNA sense strand
aaucaaaugcaucaucuga

SEQ ID NO: 906021 - RNA, 19 nt, Homo sapiens
  misc_RNA (1)...(19): siRNA sense strand
caaacuacccauuuucuuu

SEQ ID NO: 906022 - RNA, 19 nt, Homo sapiens
  misc_RNA (1)...(19): siRNA sense strand
aaaggaagauaccgaccau

SEQ ID NO: 906023 - RNA, 19 nt, Homo sapiens
  misc_RNA (1)...(19): siRNA sense strand
ggaaaaguauggcaaacca

SEQ ID NO: 906024 - RNA, 19 nt, Homo sapiens
  misc_RNA (1)...(19): siRNA sense strand
aaaagugaguccuaaaaga

SEQ ID NO: 906025 - RNA, 19 nt, Homo sapiens
  misc_RNA (1)...(19): siRNA sense strand
aaguauggcaaaccaaaua

SEQ ID NO: 906026 - RNA, 19 nt, Homo sapiens
  misc_RNA (1)...(19): siRNA sense strand
gaagaggacaaaaguaaga

SEQ ID NO: 906027 - RNA, 19 nt, Homo sapiens
  misc_RNA (1)...(19): siRNA sense strand
ugaagaagaaggagaugau

SEQ ID NO: 906028 - RNA, 19 nt, Homo sapiens
  misc_RNA (1)...(19): siRNA sense strand
gucaacaggcagcaacuaa

SEQ ID NO: 906029 - RNA, 19 nt, Homo sapiens
  misc_RNA (1)...(19): siRNA sense strand
ugaaaggccaacaugagaa

SEQ ID NO: 906030 - RNA, 19 nt, Homo sapiens
  misc_RNA (1)...(19): siRNA sense strand
ucaagaaggugaaaagaag

SEQ ID NO: 906031 - RNA, 19 nt, Homo sapiens
  misc_RNA (1)...(19): siRNA sense strand
gaagaagaaggagaugauc

SEQ ID NO: 906032 - RNA, 19 nt, Homo sapiens
  misc_RNA (1)...(19): siRNA sense strand
ugacaucauuacugaagag

SEQ ID NO: 906033 - RNA, 19 nt, Homo sapiens
  misc_RNA (1)...(19): siRNA sense strand
gaaagagaaaggcagaaaa

SEQ ID NO: 906034 - RNA, 19 nt, Homo sapiens
  misc_RNA (1)...(19): siRNA sense strand
caacaggcagcaacuaaac

SEQ ID NO: 906035 - RNA, 19 nt, Homo sapiens
  misc_RNA (1)...(19): siRNA sense strand
ucaacaggcagcaacuaaa

SEQ ID NO: 906036 - RNA, 19 nt, Homo sapiens
  misc_RNA (1)...(19): siRNA sense strand
caagaaaagagccggauaa

SEQ ID NO: 906037 - RNA, 19 nt, Homo sapiens
  misc_RNA (1)...(19): siRNA sense strand
ugagaaagaagcagcagau

SEQ ID NO: 906038 - RNA, 19 nt, Homo sapiens
  misc_RNA (1)...(19): siRNA sense strand
gcugaaaggccaacaugag

SEQ ID NO: 906039 - RNA, 19 nt, Homo sapiens
  misc_RNA (1)...(19): siRNA sense strand
agaagaaggagaugaucaa

SEQ ID NO: 906040 - RNA, 19 nt, Homo sapiens
  misc_RNA (1)...(19): siRNA sense strand
cagcaacuaaacaaucaaa

SEQ ID NO: 906041 - RNA, 19 nt, Homo sapiens
  misc_RNA (1)...(19): siRNA sense strand
gcucacagaaggaauaugc

SEQ ID NO: 906042 - RNA, 19 nt, Homo sapiens
  misc_RNA (1)...(19): siRNA sense strand
aggaagauaccgaccauga

SEQ ID NO: 906043 - RNA, 19 nt, Homo sapiens
  misc_RNA (1)...(19): siRNA sense strand
agaaagagaaaggcagaaa

SEQ ID NO: 906044 - RNA, 19 nt, Homo sapiens
  misc_RNA (1)...(19): siRNA sense strand
gaccaaaggauauauuucc

SEQ ID NO: 906045 - RNA, 19 nt, Homo sapiens
  misc_RNA (1)...(19): siRNA sense strand
gaagaaggagaugaucaag

SEQ ID NO: 906046 - RNA, 19 nt, Homo sapiens
  misc_RNA (1)...(19): siRNA sense strand
ggaggcaggaguagugaca

SEQ ID NO: 906047 - RNA, 19 nt, Homo sapiens
  misc_RNA (1)...(19): siRNA sense strand
guauggcaaaccaaauaaa

SEQ ID NO: 906048 - RNA, 19 nt, Homo sapiens
  misc_RNA (1)...(19): siRNA sense strand
ccagaaggaagaagauaag

SEQ ID NO: 906049 - RNA, 19 nt, Homo sapiens
  misc_RNA (1)...(19): siRNA sense strand
ggaugaagagggccagaag

SEQ ID NO: 906050 - RNA, 19 nt, Homo sapiens
  misc_RNA (1)...(19): siRNA sense strand
gacaacagcaacagcaucu

SEQ ID NO: 906051 - RNA, 19 nt, Homo sapiens
  misc_RNA (1)...(19): siRNA sense strand
ggaguagugacaacagcaa

SEQ ID NO: 906052 - RNA, 19 nt, Homo sapiens
  misc_RNA (1)...(19): siRNA sense strand
gauaacaauccaaaaguga

SEQ ID NO: 906053 - RNA, 19 nt, Homo sapiens
  misc_RNA (1)...(19): siRNA sense strand
gaagaaaaggaaacuagug

SEQ ID NO: 906054 - RNA, 19 nt, Homo sapiens
  misc_RNA (1)...(19): siRNA sense strand
gauguugaaguugaagaaa

SEQ ID NO: 906055 - RNA, 19 nt, Homo sapiens
  misc_RNA (1)...(19): siRNA sense strand
gcuguaaagccacccacaa

SEQ ID NO: 906056 - RNA, 19 nt, Homo sapiens
  misc_RNA (1)...(19): siRNA sense strand
cugaaaggccaacaugaga

SEQ ID NO: 906057 - RNA, 19 nt, Homo sapiens
  misc_RNA (1)...(19): siRNA sense strand
caaccuccgauucugaaga

SEQ ID NO: 906058 - RNA, 19 nt, Homo sapiens
  misc_RNA (1)...(19): siRNA sense strand
ggccagaaggaagaagaua

SEQ ID NO: 906059 - RNA, 19 nt, Homo sapiens
  misc_RNA (1)...(19): siRNA sense strand
gugacaucauuacugaaga

SEQ ID NO: 906060 - RNA, 19 nt, Homo sapiens
  misc_RNA (1)...(19): siRNA sense strand
ugaggaggcaggaguagug

SEQ ID NO: 906061 - RNA, 19 nt, Homo sapiens
  misc_RNA (1)...(19): siRNA sense strand
gaaagguuauccccauugg

SEQ ID NO: 906062 - RNA, 19 nt, Homo sapiens
  misc_RNA (1)...(19): siRNA sense strand
ccauuggccagcucgagua

SEQ ID NO: 906063 - RNA, 19 nt, Homo sapiens
  misc_RNA (1)...(19): siRNA sense strand
aaaagcagccuaagaagga

SEQ ID NO: 906064 - RNA, 19 nt, Homo sapiens
  misc_RNA (1)...(19): siRNA sense strand
gcccuguccuucagagagu

SEQ ID NO: 906065 - RNA, 19 nt, Homo sapiens
  misc_RNA (1)...(19): siRNA sense strand
gacccaaaaugguaaaaca

SEQ ID NO: 906066 - RNA, 19 nt, Homo sapiens
  misc_RNA (1)...(19): siRNA sense strand
cuguaaagccacccacaaa

SEQ ID NO: 906067 - RNA, 19 nt, Homo sapiens
  misc_RNA (1)...(19): siRNA sense strand
aaagccacccacaaacaaa

SEQ ID NO: 906068 - RNA, 19 nt, Homo sapiens
  misc_RNA (1)...(19): siRNA sense strand
aaacagggguuacuucaac

SEQ ID NO: 906069 - RNA, 19 nt, Homo sapiens
  misc_RNA (1)...(19): siRNA sense strand
acagaaggaauaugcugaa

SEQ ID NO: 906070 - RNA, 19 nt, Homo sapiens
  misc_RNA (1)...(19): siRNA sense strand
ggugggaggaacuuucaga

SEQ ID NO: 906071 - RNA, 19 nt, Homo sapiens
  misc_RNA (1)...(19): siRNA sense strand
agauaccgaccaugaagaa

SEQ ID NO: 906072 - RNA, 19 nt, Homo sapiens
  misc_RNA (1)...(19): siRNA sense strand
guagacgaaguuccugaug

SEQ ID NO: 906073 - RNA, 19 nt, Homo sapiens
  misc_RNA (1)...(19): siRNA sense strand
gaugaucaagaaggugaaa

SEQ ID NO: 906074 - RNA, 19 nt, Homo sapiens
  misc_RNA (1)...(19): siRNA sense strand
ugaagagggccagaaggaa

SEQ ID NO: 906075 - RNA, 19 nt, Homo sapiens
  misc_RNA (1)...(19): siRNA sense strand
gaagaaagaaguugaauca

SEQ ID NO: 906076 - RNA, 19 nt, Homo sapiens
  misc_RNA (1)...(19): siRNA sense strand
gcaaugaggaugugacuaa

SEQ ID NO: 906077 - RNA, 19 nt, Homo sapiens
  misc_RNA (1)...(19): siRNA sense strand
agaaggagaugaucaagaa

SEQ ID NO: 906078 - RNA, 19 nt, Homo sapiens
  misc_RNA (1)...(19): siRNA sense strand
gaaggaauaugcugaaagg

SEQ ID NO: 906079 - RNA, 19 nt, Homo sapiens
  misc_RNA (1)...(19): siRNA sense strand
ggauauauuuccuuacuca

SEQ ID NO: 906080 - RNA, 19 nt, Homo sapiens
  misc_RNA (1)...(19): siRNA sense strand
ggaagaagauaagccaaga

SEQ ID NO: 906081 - RNA, 19 nt, Homo sapiens
  misc_RNA (1)...(19): siRNA sense strand
gaaagaagcagcagaucga

SEQ ID NO: 906082 - RNA, 19 nt, Homo sapiens
  misc_RNA (1)...(19): siRNA sense strand
gacuaaagcaguugacaua

SEQ ID NO: 906083 - RNA, 19 nt, Homo sapiens
  misc_RNA (1)...(19): siRNA sense strand
ggagauagauaacaaucca

SEQ ID NO: 906084 - RNA, 19 nt, Homo sapiens
  misc_RNA (1)...(19): siRNA sense strand
cagcaucuguuaaucuaaa

SEQ ID NO: 906085 - RNA, 19 nt, Homo sapiens
  misc_RNA (1)...(19): siRNA sense strand
gaacucaugagacugcuuu

SEQ ID NO: 906086 - RNA, 19 nt, Homo sapiens
  misc_RNA (1)...(19): siRNA sense strand
gaaaggccaacaugagaaa

SEQ ID NO: 906087 - RNA, 19 nt, Homo sapiens
  misc_RNA (1)...(19): siRNA sense strand
ucgccaagaugaaagguua

SEQ ID NO: 906088 - RNA, 19 nt, Homo sapiens
  misc_RNA (1)...(19): siRNA sense strand
agagugacaucauuacuga

SEQ ID NO: 906089 - RNA, 19 nt, Homo sapiens
  misc_RNA (1)...(19): siRNA sense strand
gcaacuaaacaaucaaaug

SEQ ID NO: 906090 - RNA, 19 nt, Homo sapiens
  misc_RNA (1)...(19): siRNA sense strand
ggaugugacuaaagcaguu

SEQ ID NO: 906091 - RNA, 19 nt, Homo sapiens
  misc_RNA (1)...(19): siRNA sense strand
caaacaaacuacccauuuu

SEQ ID NO: 906092 - RNA, 19 nt, Homo sapiens
  misc_RNA (1)...(19): siRNA sense strand
gcaagaggaacaaauggaa

SEQ ID NO: 906093 - RNA, 19 nt, Homo sapiens
  misc_RNA (1)...(19): siRNA sense strand
acaaacaaacuacccauuu

SEQ ID NO: 906094 - RNA, 19 nt, Homo sapiens
  misc_RNA (1)...(19): siRNA sense strand
ugacauaacuacuccaaaa

SEQ ID NO: 906095 - RNA, 19 nt, Homo sapiens
  misc_RNA (1)...(19): siRNA sense strand
gaagauaccgaccaugaag

SEQ ID NO: 906096 - RNA, 19 nt, Homo sapiens
  misc_RNA (1)...(19): siRNA sense strand
ggcagcaacuaaacaauca

SEQ ID NO: 906097 - RNA, 19 nt, Homo sapiens
  misc_RNA (1)...(19): siRNA sense strand
ucagagagugacaucauua

SEQ ID NO: 906098 - RNA, 19 nt, Homo sapiens
  misc_RNA (1)...(19): siRNA sense strand
ggaagauaccgaccaugaa

SEQ ID NO: 906099 - RNA, 19 nt, Homo sapiens
  misc_RNA (1)...(19): siRNA sense strand
uaugggagauagauaacaa

SEQ ID NO: 906100 - RNA, 19 nt, Homo sapiens
  misc_RNA (1)...(19): siRNA sense strand
guaaagccacccacaaaca

SEQ ID NO: 906101 - RNA, 19 nt, Homo sapiens
  misc_RNA (1)...(19): siRNA sense strand
aggaacaaauggaaacuga

SEQ ID NO: 906102 - RNA, 19 nt, Homo sapiens
  misc_RNA (1)...(19): siRNA sense strand
caagcaagaggaacaaaug

SEQ ID NO: 906103 - RNA, 19 nt, Homo sapiens
  misc_RNA (1)...(19): siRNA sense strand
agacgaaguuccugaugga

SEQ ID NO: 906104 - RNA, 19 nt, Homo sapiens
  misc_RNA (1)...(19): siRNA sense strand
caaugaggaugugacuaaa

SEQ ID NO: 906105 - RNA, 19 nt, Homo sapiens
  misc_RNA (1)...(19): siRNA sense strand
caacuaaacaaucaaaugc

SEQ ID NO: 906106 - RNA, 19 nt, Homo sapiens
  misc_RNA (1)...(19): siRNA sense strand
gaagguuuaugggagauag

SEQ ID NO: 906107 - RNA, 19 nt, Homo sapiens
  misc_RNA (1)...(19): siRNA sense strand
gaagaagauaagccaagaa

SEQ ID NO: 906108 - RNA, 19 nt, Homo sapiens
  misc_RNA (1)...(19): siRNA sense strand
cagaaggaauaugcugaaa

SEQ ID NO: 906109 - RNA, 19 nt, Homo sapiens
  misc_RNA (1)...(19): siRNA sense strand
gaagauaagccaagaaaag

SEQ ID NO: 906110 - RNA, 19 nt, Homo sapiens
  misc_RNA (1)...(19): siRNA sense strand
caagaggaacaaauggaaa

SEQ ID NO: 906111 - RNA, 19 nt, Homo sapiens
  misc_RNA (1)...(19): siRNA sense strand
gcaagcaagaggaacaaau

SEQ ID NO: 906112 - RNA, 19 nt, Homo sapiens
  misc_RNA (1)...(19): siRNA sense strand
ggaagaaagaaguugaauc

SEQ ID NO: 906113 - RNA, 19 nt, Homo sapiens
  misc_RNA (1)...(19): siRNA sense strand
uaaagccacccacaaacaa

SEQ ID NO: 906114 - RNA, 19 nt, Homo sapiens
  misc_RNA (1)...(19): siRNA sense strand
cuaaagcaguugacauaac

SEQ ID NO: 906115 - RNA, 19 nt, Homo sapiens
  misc_RNA (1)...(19): siRNA sense strand
gccagaaggaagaagauaa

SEQ ID NO: 906116 - RNA, 19 nt, Homo sapiens
  misc_RNA (1)...(19): siRNA sense strand
acaaucaaaugcaucaucu

SEQ ID NO: 906117 - RNA, 19 nt, Homo sapiens
  misc_RNA (1)...(19): siRNA sense strand
gagagugacaucauuacug

SEQ ID NO: 906118 - RNA, 19 nt, Homo sapiens
  misc_RNA (1)...(19): siRNA sense strand
cuacagaagucaagauucc

SEQ ID NO: 906119 - RNA, 19 nt, Homo sapiens
  misc_RNA (1)...(19): siRNA sense strand
ggaccaaaggauauauuuc

SEQ ID NO: 906120 - RNA, 19 nt, Homo sapiens
  misc_RNA (1)...(19): siRNA sense strand
aagaagauaagccaagaaa

SEQ ID NO: 906121 - RNA, 19 nt, Homo sapiens
  misc_RNA (1)...(19): siRNA sense strand
aaucaaaugcaucaucuga

SEQ ID NO: 906122 - RNA, 19 nt, Homo sapiens
  misc_RNA (1)...(19): siRNA sense strand
caaacuacccauuuucuuu

SEQ ID NO: 906123 - RNA, 19 nt, Homo sapiens
  misc_RNA (1)...(19): siRNA sense strand
aaaggaagauaccgaccau

SEQ ID NO: 906124 - RNA, 19 nt, Homo sapiens
  misc_RNA (1)...(19): siRNA sense strand
ggaaaaguauggcaaacca

SEQ ID NO: 906125 - RNA, 19 nt, Homo sapiens
  misc_RNA (1)...(19): siRNA sense strand
aaaagugaguccuaaaaga

SEQ ID NO: 906126 - RNA, 19 nt, Homo sapiens
  misc_RNA (1)...(19): siRNA sense strand
aaguauggcaaaccaaaua

SEQ ID NO: 906127 - RNA, 19 nt, Homo sapiens
  misc_RNA (1)...(19): siRNA sense strand
gaagaggacaaaaguaaga

SEQ ID NO: 906128 - RNA, 19 nt, Homo sapiens
  misc_RNA (1)...(19): siRNA sense strand
ugaagaagaaggagaugau

SEQ ID NO: 906129 - RNA, 19 nt, Homo sapiens
  misc_RNA (1)...(19): siRNA sense strand
gucaacaggcagcaacuaa

SEQ ID NO: 906130 - RNA, 19 nt, Homo sapiens
  misc_RNA (1)...(19): siRNA sense strand
ugaaaggccaacaugagaa

SEQ ID NO: 906131 - RNA, 19 nt, Homo sapiens
  misc_RNA (1)...(19): siRNA sense strand
ucaagaaggugaaaagaag

SEQ ID NO: 906132 - RNA, 19 nt, Homo sapiens
  misc_RNA (1)...(19): siRNA sense strand
gaagaagaaggagaugauc

SEQ ID NO: 906133 - RNA, 19 nt, Homo sapiens
  misc_RNA (1)...(19): siRNA sense strand
ugacaucauuacugaagag

SEQ ID NO: 906134 - RNA, 19 nt, Homo sapiens
  misc_RNA (1)...(19): siRNA sense strand
gaaagagaaaggcagaaaa

SEQ ID NO: 906135 - RNA, 19 nt, Homo sapiens
  misc_RNA (1)...(19): siRNA sense strand
caacaggcagcaacuaaac

SEQ ID NO: 906136 - RNA, 19 nt, Homo sapiens
  misc_RNA (1)...(19): siRNA sense strand
ucaacaggcagcaacuaaa

SEQ ID NO: 906137 - RNA, 19 nt, Homo sapiens
  misc_RNA (1)...(19): siRNA sense strand
caagaaaagagccggauaa

SEQ ID NO: 906138 - RNA, 19 nt, Homo sapiens
  misc_RNA (1)...(19): siRNA sense strand
ugagaaagaagcagcagau

SEQ ID NO: 906139 - RNA, 19 nt, Homo sapiens
  misc_RNA (1)...(19): siRNA sense strand
gcugaaaggccaacaugag

SEQ ID NO: 906140 - RNA, 19 nt, Homo sapiens
  misc_RNA (1)...(19): siRNA sense strand
agaagaaggagaugaucaa

SEQ ID NO: 906141 - RNA, 19 nt, Homo sapiens
  misc_RNA (1)...(19): siRNA sense strand
cagcaacuaaacaaucaaa

SEQ ID NO: 906142 - RNA, 19 nt, Homo sapiens
  misc_RNA (1)...(19): siRNA sense strand
gcucacagaaggaauaugc

SEQ ID NO: 906143 - RNA, 19 nt, Homo sapiens
  misc_RNA (1)...(19): siRNA sense strand
aggaagauaccgaccauga

SEQ ID NO: 906144 - RNA, 19 nt, Homo sapiens
  misc_RNA (1)...(19): siRNA sense strand
agaaagagaaaggcagaaa

SEQ ID NO: 906145 - RNA, 19 nt, Homo sapiens
  misc_RNA (1)...(19): siRNA sense strand
gaccaaaggauauauuucc

SEQ ID NO: 906146 - RNA, 19 nt, Homo sapiens
  misc_RNA (1)...(19): siRNA sense strand
gaagaaggagaugaucaag

SEQ ID NO: 906147 - RNA, 19 nt, Homo sapiens
  misc_RNA (1)...(19): siRNA sense strand
ggaggcaggaguagugaca

SEQ ID NO: 906148 - RNA, 19 nt, Homo sapiens
  misc_RNA (1)...(19): siRNA sense strand
guauggcaaaccaaauaaa

SEQ ID NO: 906149 - RNA, 19 nt, Homo sapiens
  misc_RNA (1)...(19): siRNA sense strand
ccagaaggaagaagauaag

SEQ ID NO: 906150 - RNA, 19 nt, Homo sapiens
  misc_RNA (1)...(19): siRNA sense strand
ggaugaagagggccagaag

SEQ ID NO: 906151 - RNA, 19 nt, Homo sapiens
  misc_RNA (1)...(19): siRNA sense strand
gacaacagcaacagcaucu

SEQ ID NO: 906152 - RNA, 19 nt, Homo sapiens
  misc_RNA (1)...(19): siRNA sense strand
ggaguagugacaacagcaa

SEQ ID NO: 906153 - RNA, 19 nt, Homo sapiens
  misc_RNA (1)...(19): siRNA sense strand
gauaacaauccaaaaguga

SEQ ID NO: 906154 - RNA, 19 nt, Homo sapiens
  misc_RNA (1)...(19): siRNA sense strand
gaagaaaaggaaacuagug

SEQ ID NO: 906155 - RNA, 19 nt, Homo sapiens
  misc_RNA (1)...(19): siRNA sense strand
gauguugaaguugaagaaa

SEQ ID NO: 906156 - RNA, 19 nt, Homo sapiens
  misc_RNA (1)...(19): siRNA sense strand
gaaagguuauccccauugg

SEQ ID NO: 906157 - RNA, 19 nt, Homo sapiens
  misc_RNA (1)...(19): siRNA sense strand
cugaaaggccaacaugaga

SEQ ID NO: 906158 - RNA, 19 nt, Homo sapiens
  misc_RNA (1)...(19): siRNA sense strand
caaccuccgauucugaaga

SEQ ID NO: 906159 - RNA, 19 nt, Homo sapiens
  misc_RNA (1)...(19): siRNA sense strand
ggccagaaggaagaagaua

SEQ ID NO: 906160 - RNA, 19 nt, Homo sapiens
  misc_RNA (1)...(19): siRNA sense strand
gugacaucauuacugaaga

SEQ ID NO: 906161 - RNA, 19 nt, Homo sapiens
  misc_RNA (1)...(19): siRNA sense strand
gcuguaaagccacccacaa

SEQ ID NO: 906162 - RNA, 19 nt, Homo sapiens
  misc_RNA (1)...(19): siRNA sense strand
ugaggaggcaggaguagug

SEQ ID NO: 906163 - RNA, 19 nt, Homo sapiens
  misc_RNA (1)...(19): siRNA sense strand
ccauuggccagcucgagua

SEQ ID NO: 906164 - RNA, 19 nt, Homo sapiens
  misc_RNA (1)...(19): siRNA sense strand
aaaagcagccuaagaagga

SEQ ID NO: 906165 - RNA, 19 nt, Homo sapiens
  misc_RNA (1)...(19): siRNA sense strand
gcccuguccuucagagagu

SEQ ID NO: 906166 - RNA, 19 nt, Homo sapiens
  misc_RNA (1)...(19): siRNA sense strand
gacccaaaaugguaaaaca

SEQ ID NO: 906167 - RNA, 19 nt, Homo sapiens
  misc_RNA (1)...(19): siRNA sense strand
cuguaaagccacccacaaa

SEQ ID NO: 906168 - RNA, 19 nt, Homo sapiens
  misc_RNA (1)...(19): siRNA sense strand
aaagccacccacaaacaaa

SEQ ID NO: 906169 - RNA, 19 nt, Homo sapiens
  misc_RNA (1)...(19): siRNA sense strand
aaacagggguuacuucaac

SEQ ID NO: 906170 - RNA, 19 nt, Homo sapiens
  misc_RNA (1)...(19): siRNA sense strand
acagaaggaauaugcugaa

SEQ ID NO: 906171 - RNA, 19 nt, Homo sapiens
  misc_RNA (1)...(19): siRNA sense strand
ggugggaggaacuuucaga

SEQ ID NO: 906172 - RNA, 19 nt, Homo sapiens
  misc_RNA (1)...(19): siRNA sense strand
ugaagagggccagaaggaa

SEQ ID NO: 906173 - RNA, 19 nt, Homo sapiens
  misc_RNA (1)...(19): siRNA sense strand
guagacgaaguuccugaug

SEQ ID NO: 906174 - RNA, 19 nt, Homo sapiens
  misc_RNA (1)...(19): siRNA sense strand
gaugaucaagaaggugaaa

SEQ ID NO: 906175 - RNA, 19 nt, Homo sapiens
  misc_RNA (1)...(19): siRNA sense strand
gaauaucacuguucaaugg

SEQ ID NO: 906176 - RNA, 19 nt, Homo sapiens
  misc_RNA (1)...(19): siRNA sense strand
ggcaagagaccaccuauaa

SEQ ID NO: 906177 - RNA, 19 nt, Homo sapiens
  misc_RNA (1)...(19): siRNA sense strand
gcaccaagaacuuaguaua

SEQ ID NO: 906178 - RNA, 19 nt, Homo sapiens
  misc_RNA (1)...(19): siRNA sense strand
ggagauucaugccuuuaga

SEQ ID NO: 906179 - RNA, 19 nt, Homo sapiens
  misc_RNA (1)...(19): siRNA sense strand
ggacacugauguuccugaa

SEQ ID NO: 906180 - RNA, 19 nt, Homo sapiens
  misc_RNA (1)...(19): siRNA sense strand
gaugccaccuggaauauca

SEQ ID NO: 906181 - RNA, 19 nt, Homo sapiens
  misc_RNA (1)...(19): siRNA sense strand
ccuauaaccucuucaccuu

SEQ ID NO: 906182 - RNA, 19 nt, Homo sapiens
  misc_RNA (1)...(19): siRNA sense strand
ugaaacuaauggccacgua

SEQ ID NO: 906183 - RNA, 19 nt, Homo sapiens
  misc_RNA (1)...(19): siRNA sense strand
gaagagggcaccaagaacu

SEQ ID NO: 906184 - RNA, 19 nt, Homo sapiens
  misc_RNA (1)...(19): siRNA sense strand
aaagaagggucugggagaa

SEQ ID NO: 906185 - RNA, 19 nt, Homo sapiens
  misc_RNA (1)...(19): siRNA sense strand
ggaauaucacuguucaaug

SEQ ID NO: 906186 - RNA, 19 nt, Homo sapiens
  misc_RNA (1)...(19): siRNA sense strand
uuagacagcuggaaguaca

SEQ ID NO: 906187 - RNA, 19 nt, Homo sapiens
  misc_RNA (1)...(19): siRNA sense strand
gcccagacccuuucacuca

SEQ ID NO: 906188 - RNA, 19 nt, Homo sapiens
  misc_RNA (1)...(19): siRNA sense strand
ccacguauucugcagcuuu

SEQ ID NO: 906189 - RNA, 19 nt, Homo sapiens
  misc_RNA (1)...(19): siRNA sense strand
cuggacaccuuauuaccua

SEQ ID NO: 906190 - RNA, 19 nt, Homo sapiens
  misc_RNA (1)...(19): siRNA sense strand
ccucaaugcuccuuuggau

SEQ ID NO: 906191 - RNA, 19 nt, Homo sapiens
  misc_RNA (1)...(19): siRNA sense strand
gaaacuaauggccacguau

SEQ ID NO: 906192 - RNA, 19 nt, Homo sapiens
  misc_RNA (1)...(19): siRNA sense strand
gaacuuaguauagacucuu

SEQ ID NO: 906193 - RNA, 19 nt, Homo sapiens
  misc_RNA (1)...(19): siRNA sense strand
gaagggcaggagaaacaaa

SEQ ID NO: 906194 - RNA, 19 nt, Homo sapiens
  misc_RNA (1)...(19): siRNA sense strand
aaacuaauggccacguauu

SEQ ID NO: 906195 - RNA, 19 nt, Homo sapiens
  misc_RNA (1)...(19): siRNA sense strand
gaggagauucaugccuuua

SEQ ID NO: 906196 - RNA, 19 nt, Homo sapiens
  misc_RNA (1)...(19): siRNA sense strand
accaagaacuuaguauaga

SEQ ID NO: 906197 - RNA, 19 nt, Homo sapiens
  misc_RNA (1)...(19): siRNA sense strand
ccgaagagggcaccaagaa

SEQ ID NO: 906198 - RNA, 19 nt, Homo sapiens
  misc_RNA (1)...(19): siRNA sense strand
acacugauguuccugaaac

SEQ ID NO: 906199 - RNA, 19 nt, Homo sapiens
  misc_RNA (1)...(19): siRNA sense strand
gaccaccuauaaccucuuc

SEQ ID NO: 906200 - RNA, 19 nt, Homo sapiens
  misc_RNA (1)...(19): siRNA sense strand
guacucaacccgcuuggau

SEQ ID NO: 906201 - RNA, 19 nt, Homo sapiens
  misc_RNA (1)...(19): siRNA sense strand
agaagggucugggagaaug

SEQ ID NO: 906202 - RNA, 19 nt, Homo sapiens
  misc_RNA (1)...(19): siRNA sense strand
caucugcuauagccgcauu

SEQ ID NO: 906203 - RNA, 19 nt, Homo sapiens
  misc_RNA (1)...(19): siRNA sense strand
agaggagauucaugccuuu

SEQ ID NO: 906204 - RNA, 19 nt, Homo sapiens
  misc_RNA (1)...(19): siRNA sense strand
ccaagaacuuaguauagac

SEQ ID NO: 906205 - RNA, 19 nt, Homo sapiens
  misc_RNA (1)...(19): siRNA sense strand
ccuggaauaucacuguuca

SEQ ID NO: 906206 - RNA, 19 nt, Homo sapiens
  misc_RNA (1)...(19): siRNA sense strand
uauaaccucuucaccuucu

SEQ ID NO: 906207 - RNA, 19 nt, Homo sapiens
  misc_RNA (1)...(19): siRNA sense strand
gcaagagaccaccuauaac

SEQ ID NO: 906208 - RNA, 19 nt, Homo sapiens
  misc_RNA (1)...(19): siRNA sense strand
ccaccaugcuaacugaagu

SEQ ID NO: 906209 - RNA, 19 nt, Homo sapiens
  misc_RNA (1)...(19): siRNA sense strand
ucaagaagggcaggagaaa

SEQ ID NO: 906210 - RNA, 19 nt, Homo sapiens
  misc_RNA (1)...(19): siRNA sense strand
caccaagaacuuaguauag

SEQ ID NO: 906211 - RNA, 19 nt, Homo sapiens
  misc_RNA (1)...(19): siRNA sense strand
gccauggccaucugcuaua

SEQ ID NO: 906212 - RNA, 19 nt, Homo sapiens
  misc_RNA (1)...(19): siRNA sense strand
caaaaggcauuucuauaac

SEQ ID NO: 906213 - RNA, 19 nt, Homo sapiens
  misc_RNA (1)...(19): siRNA sense strand
gacuggcccugcuuaucuu

SEQ ID NO: 906214 - RNA, 19 nt, Homo sapiens
  misc_RNA (1)...(19): siRNA sense strand
ccacauccuuuuccucuug

SEQ ID NO: 906215 - RNA, 19 nt, Homo sapiens
  misc_RNA (1)...(19): siRNA sense strand
caagagaccaccuauaacc

SEQ ID NO: 906216 - RNA, 19 nt, Homo sapiens
  misc_RNA (1)...(19): siRNA sense strand
aagaagggcaggagaaaca

SEQ ID NO: 906217 - RNA, 19 nt, Homo sapiens
  misc_RNA (1)...(19): siRNA sense strand
gggcaccaagaacuuagua

SEQ ID NO: 906218 - RNA, 19 nt, Homo sapiens
  misc_RNA (1)...(19): siRNA sense strand
ggaucccguucagguguaa

SEQ ID NO: 906219 - RNA, 19 nt, Homo sapiens
  misc_RNA (1)...(19): siRNA sense strand
ccguucagguguaaggaaa

SEQ ID NO: 906220 - RNA, 19 nt, Homo sapiens
  misc_RNA (1)...(19): siRNA sense strand
ugacugccauggccaucug

SEQ ID NO: 906221 - RNA, 19 nt, Homo sapiens
  misc_RNA (1)...(19): siRNA sense strand
ugauguuccugaaacuaau

SEQ ID NO: 906222 - RNA, 19 nt, Homo sapiens
  misc_RNA (1)...(19): siRNA sense strand
ugggaugccaccuggaaua

SEQ ID NO: 906223 - RNA, 19 nt, Homo sapiens
  misc_RNA (1)...(19): siRNA sense strand
cugauguuccugaaacuaa

SEQ ID NO: 906224 - RNA, 19 nt, Homo sapiens
  misc_RNA (1)...(19): siRNA sense strand
agagggcaccaagaacuua

SEQ ID NO: 906225 - RNA, 19 nt, Homo sapiens
  misc_RNA (1)...(19): siRNA sense strand
caccuucugcugccucuuu

SEQ ID NO: 906226 - RNA, 19 nt, Homo sapiens
  misc_RNA (1)...(19): siRNA sense strand
agacuggcccugcuuaucu

SEQ ID NO: 906227 - RNA, 19 nt, Homo sapiens
  misc_RNA (1)...(19): siRNA sense strand
gggaugccaccuggaauau

SEQ ID NO: 906228 - RNA, 19 nt, Homo sapiens
  misc_RNA (1)...(19): siRNA sense strand
uggauccucuccucuaugg

SEQ ID NO: 906229 - RNA, 19 nt, Homo sapiens
  misc_RNA (1)...(19): siRNA sense strand
ucugcuggacaccuuauua

SEQ ID NO: 906230 - RNA, 19 nt, Homo sapiens
  misc_RNA (1)...(19): siRNA sense strand
ccuccucaaugcuccuuug

SEQ ID NO: 906231 - RNA, 19 nt, Homo sapiens
  misc_RNA (1)...(19): siRNA sense strand
gggacuuaguuuccugcuu

SEQ ID NO: 906232 - RNA, 19 nt, Homo sapiens
  misc_RNA (1)...(19): siRNA sense strand
ccaccuggaauaucacugu

SEQ ID NO: 906233 - RNA, 19 nt, Homo sapiens
  misc_RNA (1)...(19): siRNA sense strand
gagacuggcccugcuuauc

SEQ ID NO: 906234 - RNA, 19 nt, Homo sapiens
  misc_RNA (1)...(19): siRNA sense strand
ccauggccaucugcuauag

SEQ ID NO: 906235 - RNA, 19 nt, Homo sapiens
  misc_RNA (1)...(19): siRNA sense strand
ccagacccuuucacucagu

SEQ ID NO: 906236 - RNA, 19 nt, Homo sapiens
  misc_RNA (1)...(19): siRNA sense strand
uggaauaucacuguucaau

SEQ ID NO: 906237 - RNA, 19 nt, Homo sapiens
  misc_RNA (1)...(19): siRNA sense strand
uggaucccguucaggugua

SEQ ID NO: 906238 - RNA, 19 nt, Homo sapiens
  misc_RNA (1)...(19): siRNA sense strand
caccuggaauaucacuguu

SEQ ID NO: 906239 - RNA, 19 nt, Homo sapiens
  misc_RNA (1)...(19): siRNA sense strand
caccaaaggcagcuucaag

SEQ ID NO: 906240 - RNA, 19 nt, Homo sapiens
  misc_RNA (1)...(19): siRNA sense strand
gguaugugguacugguucu

SEQ ID NO: 906241 - RNA, 19 nt, Homo sapiens
  misc_RNA (1)...(19): siRNA sense strand
uggcaagagaccaccuaua

SEQ ID NO: 906242 - RNA, 19 nt, Homo sapiens
  misc_RNA (1)...(19): siRNA sense strand
agccugagccacauccuuu

SEQ ID NO: 906243 - RNA, 19 nt, Homo sapiens
  misc_RNA (1)...(19): siRNA sense strand
cacguauucugcagcuuuc

SEQ ID NO: 906244 - RNA, 19 nt, Homo sapiens
  misc_RNA (1)...(19): siRNA sense strand
gcaaauaucugcuagaaga

SEQ ID NO: 906245 - RNA, 19 nt, Homo sapiens
  misc_RNA (1)...(19): siRNA sense strand
gaagggacaugaauauaua

SEQ ID NO: 906246 - RNA, 19 nt, Homo sapiens
  misc_RNA (1)...(19): siRNA sense strand
ggaaagaauucaaacaucu

SEQ ID NO: 906247 - RNA, 19 nt, Homo sapiens
  misc_RNA (1)...(19): siRNA sense strand
gcagcgcgguuauugauuu

SEQ ID NO: 906248 - RNA, 19 nt, Homo sapiens
  misc_RNA (1)...(19): siRNA sense strand
acaagaagcuauacgaaug

SEQ ID NO: 906249 - RNA, 19 nt, Homo sapiens
  misc_RNA (1)...(19): siRNA sense strand
gauaccaucuucccuaauc

SEQ ID NO: 906250 - RNA, 19 nt, Homo sapiens
  misc_RNA (1)...(19): siRNA sense strand
ggacaucuggucacuugua

SEQ ID NO: 906251 - RNA, 19 nt, Homo sapiens
  misc_RNA (1)...(19): siRNA sense strand
gaagagaagggacaugaau

SEQ ID NO: 906252 - RNA, 19 nt, Homo sapiens
  misc_RNA (1)...(19): siRNA sense strand
gaaagacacuacagaaaau

SEQ ID NO: 906253 - RNA, 19 nt, Homo sapiens
  misc_RNA (1)...(19): siRNA sense strand
gggaacagcaugcuaaaug

SEQ ID NO: 906254 - RNA, 19 nt, Homo sapiens
  misc_RNA (1)...(19): siRNA sense strand
ggaacagcaugcuaaaugg

SEQ ID NO: 906255 - RNA, 19 nt, Homo sapiens
  misc_RNA (1)...(19): siRNA sense strand
gagaagggacaugaauaua

SEQ ID NO: 906256 - RNA, 19 nt, Homo sapiens
  misc_RNA (1)...(19): siRNA sense strand
guggacaucuggucacuug

SEQ ID NO: 906257 - RNA, 19 nt, Homo sapiens
  misc_RNA (1)...(19): siRNA sense strand
guauccagguugcaaauau

SEQ ID NO: 906258 - RNA, 19 nt, Homo sapiens
  misc_RNA (1)...(19): siRNA sense strand
gaggagggcuagccaacug

SEQ ID NO: 906259 - RNA, 19 nt, Homo sapiens
  misc_RNA (1)...(19): siRNA sense strand
gacaucuggucacuuguaa

SEQ ID NO: 906260 - RNA, 19 nt, Homo sapiens
  misc_RNA (1)...(19): siRNA sense strand
cgaaugggauuugauuuca

SEQ ID NO: 906261 - RNA, 19 nt, Homo sapiens
  misc_RNA (1)...(19): siRNA sense strand
gauguacuccgucaacaaa

SEQ ID NO: 906262 - RNA, 19 nt, Homo sapiens
  misc_RNA (1)...(19): siRNA sense strand
ugagggagcucugguacaa

SEQ ID NO: 906263 - RNA, 19 nt, Homo sapiens
  misc_RNA (1)...(19): siRNA sense strand
gugauaccaucuucccuaa

SEQ ID NO: 906264 - RNA, 19 nt, Homo sapiens
  misc_RNA (1)...(19): siRNA sense strand
gcuaaaugguauccagguu

SEQ ID NO: 906265 - RNA, 19 nt, Homo sapiens
  misc_RNA (1)...(19): siRNA sense strand
caucugggagcaacuauaa

SEQ ID NO: 906266 - RNA, 19 nt, Homo sapiens
  misc_RNA (1)...(19): siRNA sense strand
gaggaaagaauucaaacau

SEQ ID NO: 906267 - RNA, 19 nt, Homo sapiens
  misc_RNA (1)...(19): siRNA sense strand
cagaaagacacuacagaaa

SEQ ID NO: 906268 - RNA, 19 nt, Homo sapiens
  misc_RNA (1)...(19): siRNA sense strand
ugaagcaguugacagaugu

SEQ ID NO: 906269 - RNA, 19 nt, Homo sapiens
  misc_RNA (1)...(19): siRNA sense strand
gaaagaauucaaacaucug

SEQ ID NO: 906270 - RNA, 19 nt, Homo sapiens
  misc_RNA (1)...(19): siRNA sense strand
ucagaaagacacuacagaa

SEQ ID NO: 906271 - RNA, 19 nt, Homo sapiens
  misc_RNA (1)...(19): siRNA sense strand
agaagggacaugaauauau

SEQ ID NO: 906272 - RNA, 19 nt, Homo sapiens
  misc_RNA (1)...(19): siRNA sense strand
aagaggagaagcuuuguaa

SEQ ID NO: 906273 - RNA, 19 nt, Homo sapiens
  misc_RNA (1)...(19): siRNA sense strand
caucuucccuaauccuaug

SEQ ID NO: 906274 - RNA, 19 nt, Homo sapiens
  misc_RNA (1)...(19): siRNA sense strand
cuaauccuaugcuacaaga

SEQ ID NO: 906275 - RNA, 19 nt, Homo sapiens
  misc_RNA (1)...(19): siRNA sense strand
gaggagaagcuuuguaaaa

SEQ ID NO: 906276 - RNA, 19 nt, Homo sapiens
  misc_RNA (1)...(19): siRNA sense strand
uugcaaauaucugcuagaa

SEQ ID NO: 906277 - RNA, 19 nt, Homo sapiens
  misc_RNA (1)...(19): siRNA sense strand
ucaaggacguuaagaaaau

SEQ ID NO: 906278 - RNA, 19 nt, Homo sapiens
  misc_RNA (1)...(19): siRNA sense strand
cauuuaacccguucacuug

SEQ ID NO: 906279 - RNA, 19 nt, Homo sapiens
  misc_RNA (1)...(19): siRNA sense strand
agagaagggacaugaauau

SEQ ID NO: 906280 - RNA, 19 nt, Homo sapiens
  misc_RNA (1)...(19): siRNA sense strand
caagaggagaagcuuugua

SEQ ID NO: 906281 - RNA, 19 nt, Homo sapiens
  misc_RNA (1)...(19): siRNA sense strand
ggaggaaagaauucaaaca

SEQ ID NO: 906282 - RNA, 19 nt, Homo sapiens
  misc_RNA (1)...(19): siRNA sense strand
caaagagcagcuugcaaga

SEQ ID NO: 906283 - RNA, 19 nt, Homo sapiens
  misc_RNA (1)...(19): siRNA sense strand
agacuucauugcagagaga

SEQ ID NO: 906284 - RNA, 19 nt, Homo sapiens
  misc_RNA (1)...(19): siRNA sense strand
aagagaagggacaugaaua

SEQ ID NO: 906285 - RNA, 19 nt, Homo sapiens
  misc_RNA (1)...(19): siRNA sense strand
gaacagcaugcuaaauggu

SEQ ID NO: 906286 - RNA, 19 nt, Homo sapiens
  misc_RNA (1)...(19): siRNA sense strand
ggagaagcuuuguaaaauc

SEQ ID NO: 906287 - RNA, 19 nt, Homo sapiens
  misc_RNA (1)...(19): siRNA sense strand
caagaaaacaccaucacua

SEQ ID NO: 906288 - RNA, 19 nt, Homo sapiens
  misc_RNA (1)...(19): siRNA sense strand
ugcaagagcuggauuuuau

SEQ ID NO: 906289 - RNA, 19 nt, Homo sapiens
  misc_RNA (1)...(19): siRNA sense strand
ucaagaggauaaaguacag

SEQ ID NO: 906290 - RNA, 19 nt, Homo sapiens
  misc_RNA (1)...(19): siRNA sense strand
ggaagauccuugggaacag

SEQ ID NO: 906291 - RNA, 19 nt, Homo sapiens
  misc_RNA (1)...(19): siRNA sense strand
gauuucaagcaaagaguuu

SEQ ID NO: 906292 - RNA, 19 nt, Homo sapiens
  misc_RNA (1)...(19): siRNA sense strand
ggagcucugguacaaacua

SEQ ID NO: 906293 - RNA, 19 nt, Homo sapiens
  misc_RNA (1)...(19): siRNA sense strand
uagaagagaagggacauga

SEQ ID NO: 906294 - RNA, 19 nt, Homo sapiens
  misc_RNA (1)...(19): siRNA sense strand
cugaagcaguugacagaug

SEQ ID NO: 906295 - RNA, 19 nt, Homo sapiens
  misc_RNA (1)...(19): siRNA sense strand
caacaaagagcagcuugca

SEQ ID NO: 906296 - RNA, 19 nt, Homo sapiens
  misc_RNA (1)...(19): siRNA sense strand
caacuggaagcccaaggaa

SEQ ID NO: 906297 - RNA, 19 nt, Homo sapiens
  misc_RNA (1)...(19): siRNA sense strand
agauauaucgcuguuguuu

SEQ ID NO: 906298 - RNA, 19 nt, Homo sapiens
  misc_RNA (1)...(19): siRNA sense strand
aggaaagaauucaaacauc

SEQ ID NO: 906299 - RNA, 19 nt, Homo sapiens
  misc_RNA (1)...(19): siRNA sense strand
ggauguacuccgucaacaa

SEQ ID NO: 906300 - RNA, 19 nt, Homo sapiens
  misc_RNA (1)...(19): siRNA sense strand
aaacaccaucacuaacuaa

SEQ ID NO: 906301 - RNA, 19 nt, Homo sapiens
  misc_RNA (1)...(19): siRNA sense strand
caaggacguuaagaaaaua

SEQ ID NO: 906302 - RNA, 19 nt, Homo sapiens
  misc_RNA (1)...(19): siRNA sense strand
gaaaacaccaucacuaacu

SEQ ID NO: 906303 - RNA, 19 nt, Homo sapiens
  misc_RNA (1)...(19): siRNA sense strand
gagaagcuuuguaaaaucu

SEQ ID NO: 906304 - RNA, 19 nt, Homo sapiens
  misc_RNA (1)...(19): siRNA sense strand
gaaaauaauggaggaaaga

SEQ ID NO: 906305 - RNA, 19 nt, Homo sapiens
  misc_RNA (1)...(19): siRNA sense strand
cuacaagaagcuauacgaa

SEQ ID NO: 906306 - RNA, 19 nt, Homo sapiens
  misc_RNA (1)...(19): siRNA sense strand
ucauuuaacccguucacuu

SEQ ID NO: 906307 - RNA, 19 nt, Homo sapiens
  misc_RNA (1)...(19): siRNA sense strand
aauaucugcuagaagagaa

SEQ ID NO: 906308 - RNA, 19 nt, Homo sapiens
  misc_RNA (1)...(19): siRNA sense strand
uguacuccgucaacaaaga

SEQ ID NO: 906309 - RNA, 19 nt, Homo sapiens
  misc_RNA (1)...(19): siRNA sense strand
gcuaaggcgucugcaagag

SEQ ID NO: 906310 - RNA, 19 nt, Homo sapiens
  misc_RNA (1)...(19): siRNA sense strand
aaacaucugggagcaacua

SEQ ID NO: 906311 - RNA, 19 nt, Homo sapiens
  misc_RNA (1)...(19): siRNA sense strand
gcuacaagaagcuauacga

SEQ ID NO: 906312 - RNA, 19 nt, Homo sapiens
  misc_RNA (1)...(19): siRNA sense strand
aaaacaccaucacuaacua

SEQ ID NO: 906313 - RNA, 19 nt, Homo sapiens
  misc_RNA (1)...(19): siRNA sense strand
auacgaaugggauuugauu

SEQ ID NO: 906314 - RNA, 19 nt, Homo sapiens
  misc_RNA (1)...(19): siRNA sense strand
gcuauacgaaugggauuug

SEQ ID NO: 906315 - RNA, 19 nt, Homo sapiens
  misc_RNA (1)...(19): siRNA sense strand
gugcagcgcgguuauugau

SEQ ID NO: 906316 - RNA, 19 nt, Homo sapiens
  misc_RNA (1)...(19): siRNA sense strand
gguauccagguugcaaaua

SEQ ID NO: 906317 - RNA, 19 nt, Homo sapiens
  misc_RNA (1)...(19): siRNA sense strand
agaaagacacuacagaaaa

SEQ ID NO: 906318 - RNA, 19 nt, Homo sapiens
  misc_RNA (1)...(19): siRNA sense strand
cuauaggucaagaggauaa

SEQ ID NO: 906319 - RNA, 19 nt, Homo sapiens
  misc_RNA (1)...(19): siRNA sense strand
gagcucugguacaaacuac

SEQ ID NO: 906320 - RNA, 19 nt, Homo sapiens
  misc_RNA (1)...(19): siRNA sense strand
guacaaacuaccaagaaaa

SEQ ID NO: 906321 - RNA, 19 nt, Homo sapiens
  misc_RNA (1)...(19): siRNA sense strand
caagaagcuauacgaaugg

SEQ ID NO: 906322 - RNA, 19 nt, Homo sapiens
  misc_RNA (1)...(19): siRNA sense strand
uauccagguugcaaauauc

SEQ ID NO: 906323 - RNA, 19 nt, Homo sapiens
  misc_RNA (1)...(19): siRNA sense strand
uacaagaagcuauacgaau

SEQ ID NO: 906324 - RNA, 19 nt, Homo sapiens
  misc_RNA (1)...(19): siRNA sense strand
acagcaugcuaaaugguau

SEQ ID NO: 906325 - RNA, 19 nt, Homo sapiens
  misc_RNA (1)...(19): siRNA sense strand
acuggaagcccaaggaaga

SEQ ID NO: 906326 - RNA, 19 nt, Homo sapiens
  misc_RNA (1)...(19): siRNA sense strand
aagaaaacaccaucacuaa

SEQ ID NO: 906327 - RNA, 19 nt, Homo sapiens
  misc_RNA (1)...(19): siRNA sense strand
cagcgcgguuauugauuuc

SEQ ID NO: 906328 - RNA, 19 nt, Homo sapiens
  misc_RNA (1)...(19): siRNA sense strand
gcaagaggagaagcuuugu

SEQ ID NO: 906329 - RNA, 19 nt, Homo sapiens
  misc_RNA (1)...(19): siRNA sense strand
gagcuggauuuuaugcuau

SEQ ID NO: 906330 - RNA, 19 nt, Homo sapiens
  misc_RNA (1)...(19): siRNA sense strand
cuauacgaaugggauuuga

SEQ ID NO: 906331 - RNA, 19 nt, Homo sapiens
  misc_RNA (1)...(19): siRNA sense strand
aggauaaaguacagugcuu

SEQ ID NO: 906332 - RNA, 19 nt, Homo sapiens
  misc_RNA (1)...(19): siRNA sense strand
gcuauaggucaagaggaua

SEQ ID NO: 906333 - RNA, 19 nt, Homo sapiens
  misc_RNA (1)...(19): siRNA sense strand
ugcuauaggucaagaggau

SEQ ID NO: 906334 - RNA, 19 nt, Homo sapiens
  misc_RNA (1)...(19): siRNA sense strand
gucaagaggauaaaguaca

SEQ ID NO: 906335 - RNA, 19 nt, Homo sapiens
  misc_RNA (1)...(19): siRNA sense strand
ccaacuggaagcccaagga

SEQ ID NO: 906336 - RNA, 19 nt, Homo sapiens
  misc_RNA (1)...(19): siRNA sense strand
aggagaagcuuuguaaaau

SEQ ID NO: 906337 - RNA, 19 nt, Homo sapiens
  misc_RNA (1)...(19): siRNA sense strand
uaugcuacaagaagcuaua

SEQ ID NO: 906338 - RNA, 19 nt, Homo sapiens
  misc_RNA (1)...(19): siRNA sense strand
aacagcaugcuaaauggua

SEQ ID NO: 906339 - RNA, 19 nt, Homo sapiens
  misc_RNA (1)...(19): siRNA sense strand
uguaaacaaugugcugaag

SEQ ID NO: 906340 - RNA, 19 nt, Homo sapiens
  misc_RNA (1)...(19): siRNA sense strand
caucuggucacuuguaaac

SEQ ID NO: 906341 - RNA, 19 nt, Homo sapiens
  misc_RNA (1)...(19): siRNA sense strand
gcuugagguucuuguugca

SEQ ID NO: 906342 - RNA, 19 nt, Homo sapiens
  misc_RNA (1)...(19): siRNA sense strand
cuugggaacagcaugcuaa

SEQ ID NO: 906343 - RNA, 19 nt, Homo sapiens
  misc_RNA (1)...(19): siRNA sense strand
ugcaagaggagaagcuuug

SEQ ID NO: 906344 - RNA, 19 nt, Homo sapiens
  misc_RNA (1)...(19): siRNA sense strand
gaaccaagccaugcucuuu

SEQ ID NO: 906345 - RNA, 19 nt, Homo sapiens
  misc_RNA (1)...(19): siRNA sense strand
ggagggaggucaccaugga

SEQ ID NO: 906346 - RNA, 19 nt, Homo sapiens
  misc_RNA (1)...(19): siRNA sense strand
gaacuacccagaagaugaa

SEQ ID NO: 906347 - RNA, 19 nt, Homo sapiens
  misc_RNA (1)...(19): siRNA sense strand
ggaacuacccagaagauga

SEQ ID NO: 906348 - RNA, 19 nt, Homo sapiens
  misc_RNA (1)...(19): siRNA sense strand
gcacuacgggaaucaguuu

SEQ ID NO: 906349 - RNA, 19 nt, Homo sapiens
  misc_RNA (1)...(19): siRNA sense strand
gaaucaguuuccagccuaa

SEQ ID NO: 906350 - RNA, 19 nt, Homo sapiens
  misc_RNA (1)...(19): siRNA sense strand
gaaacagagacuacgauga

SEQ ID NO: 906351 - RNA, 19 nt, Homo sapiens
  misc_RNA (1)...(19): siRNA sense strand
gggcguaccagcugaugua

SEQ ID NO: 906352 - RNA, 19 nt, Homo sapiens
  misc_RNA (1)...(19): siRNA sense strand
gcaguggccugggaaguca

SEQ ID NO: 906353 - RNA, 19 nt, Homo sapiens
  misc_RNA (1)...(19): siRNA sense strand
acgaugacauugaugauga

SEQ ID NO: 906354 - RNA, 19 nt, Homo sapiens
  misc_RNA (1)...(19): siRNA sense strand
agacuacgaugacauugau

SEQ ID NO: 906355 - RNA, 19 nt, Homo sapiens
  misc_RNA (1)...(19): siRNA sense strand
ggugggcguugguuucuau

SEQ ID NO: 906356 - RNA, 19 nt, Homo sapiens
  misc_RNA (1)...(19): siRNA sense strand
gaggaagaccugcuugcaa

SEQ ID NO: 906357 - RNA, 19 nt, Homo sapiens
  misc_RNA (1)...(19): siRNA sense strand
gagggcugcacaaggauua

SEQ ID NO: 906358 - RNA, 19 nt, Homo sapiens
  misc_RNA (1)...(19): siRNA sense strand
aggaagaccugcuugcaau

SEQ ID NO: 906359 - RNA, 19 nt, Homo sapiens
  misc_RNA (1)...(19): siRNA sense strand
gagacuacgaugacauuga

SEQ ID NO: 906360 - RNA, 19 nt, Homo sapiens
  misc_RNA (1)...(19): siRNA sense strand
ucaucuuccuuguggcuua

SEQ ID NO: 906361 - RNA, 19 nt, Homo sapiens
  misc_RNA (1)...(19): siRNA sense strand
gggcguugguuucuaugga

SEQ ID NO: 906362 - RNA, 19 nt, Homo sapiens
  misc_RNA (1)...(19): siRNA sense strand
aaacagagacuacgaugac

SEQ ID NO: 906363 - RNA, 19 nt, Homo sapiens
  misc_RNA (1)...(19): siRNA sense strand
gccaugcucuuugguagga

SEQ ID NO: 906364 - RNA, 19 nt, Homo sapiens
  misc_RNA (1)...(19): siRNA sense strand
caagccaugcucuuuggua

SEQ ID NO: 906365 - RNA, 19 nt, Homo sapiens
  misc_RNA (1)...(19): siRNA sense strand
ugggaucgaugcucugguu

SEQ ID NO: 906366 - RNA, 19 nt, Homo sapiens
  misc_RNA (1)...(19): siRNA sense strand
uacgagaacgugccacuaa

SEQ ID NO: 906367 - RNA, 19 nt, Homo sapiens
  misc_RNA (1)...(19): siRNA sense strand
gcucugguuuccggaacua

SEQ ID NO: 906368 - RNA, 19 nt, Homo sapiens
  misc_RNA (1)...(19): siRNA sense strand
ggcguugguuucuauggaa

SEQ ID NO: 906369 - RNA, 19 nt, Homo sapiens
  misc_RNA (1)...(19): siRNA sense strand
ugacauugaugaugaugac

SEQ ID NO: 906370 - RNA, 19 nt, Homo sapiens
  misc_RNA (1)...(19): siRNA sense strand
cagagacuacgaugacauu

SEQ ID NO: 906371 - RNA, 19 nt, Homo sapiens
  misc_RNA (1)...(19): siRNA sense strand
cuggucaucugccucauug

SEQ ID NO: 906372 - RNA, 19 nt, Homo sapiens
  misc_RNA (1)...(19): siRNA sense strand
gaaccucaucuuccuugug

SEQ ID NO: 906373 - RNA, 19 nt, Homo sapiens
  misc_RNA (1)...(19): siRNA sense strand
agaggugacucgcuacuac

SEQ ID NO: 906374 - RNA, 19 nt, Homo sapiens
  misc_RNA (1)...(19): siRNA sense strand
gcacuucaccaccagaaac

SEQ ID NO: 906375 - RNA, 19 nt, Homo sapiens
  misc_RNA (1)...(19): siRNA sense strand
gaaacagcgagaccaacga

SEQ ID NO: 906376 - RNA, 19 nt, Homo sapiens
  misc_RNA (1)...(19): siRNA sense strand
ggccaccagugacuucugu

SEQ ID NO: 906377 - RNA, 19 nt, Homo sapiens
  misc_RNA (1)...(19): siRNA sense strand
gcuguaccuuggccucuuc

SEQ ID NO: 906378 - RNA, 19 nt, Homo sapiens
  misc_RNA (1)...(19): siRNA sense strand
ggaacccacgcuacgagaa

SEQ ID NO: 906379 - RNA, 19 nt, Homo sapiens
  misc_RNA (1)...(19): siRNA sense strand
gaacccacgcuacgagaac

SEQ ID NO: 906380 - RNA, 19 nt, Homo sapiens
  misc_RNA (1)...(19): siRNA sense strand
gaucgaugcucugguuucc

SEQ ID NO: 906381 - RNA, 19 nt, Homo sapiens
  misc_RNA (1)...(19): siRNA sense strand
caccacuccugcugcauca

SEQ ID NO: 906382 - RNA, 19 nt, Homo sapiens
  misc_RNA (1)...(19): siRNA sense strand
cuucuccacugcagaggaa

SEQ ID NO: 906383 - RNA, 19 nt, Homo sapiens
  misc_RNA (1)...(19): siRNA sense strand
cuggcuacguggaguacua

SEQ ID NO: 906384 - RNA, 19 nt, Homo sapiens
  misc_RNA (1)...(19): siRNA sense strand
caagcuauccgaccagacu

SEQ ID NO: 906385 - RNA, 19 nt, Homo sapiens
  misc_RNA (1)...(19): siRNA sense strand
gggcagcauuguuguucag

SEQ ID NO: 906386 - RNA, 19 nt, Homo sapiens
  misc_RNA (1)...(19): siRNA sense strand
gagagccaccuaccugucu

SEQ ID NO: 906387 - RNA, 19 nt, Homo sapiens
  misc_RNA (1)...(19): siRNA sense strand
gagaacgugccacuaaucg

SEQ ID NO: 906388 - RNA, 19 nt, Homo sapiens
  misc_RNA (1)...(19): siRNA sense strand
cgagaacgugccacuaauc

SEQ ID NO: 906389 - RNA, 19 nt, Homo sapiens
  misc_RNA (1)...(19): siRNA sense strand
ggaagaccugcuugcaauc

SEQ ID NO: 906390 - RNA, 19 nt, Homo sapiens
  misc_RNA (1)...(19): siRNA sense strand
ucuccuaccuccugcucuu

SEQ ID NO: 906391 - RNA, 19 nt, Homo sapiens
  misc_RNA (1)...(19): siRNA sense strand
ggaucgaugcucugguuuc

SEQ ID NO: 906392 - RNA, 19 nt, Homo sapiens
  misc_RNA (1)...(19): siRNA sense strand
acgagaacgugccacuaau

SEQ ID NO: 906393 - RNA, 19 nt, Homo sapiens
  misc_RNA (1)...(19): siRNA sense strand
cgaugacauugaugaugau

SEQ ID NO: 906394 - RNA, 19 nt, Homo sapiens
  misc_RNA (1)...(19): siRNA sense strand
gaaguucauacagcagaug

SEQ ID NO: 906395 - RNA, 19 nt, Homo sapiens
  misc_RNA (1)...(19): siRNA sense strand
ccagaaacagagacuacga

SEQ ID NO: 906396 - RNA, 19 nt, Homo sapiens
  misc_RNA (1)...(19): siRNA sense strand
acgaugcggugcagaccaa

SEQ ID NO: 906397 - RNA, 19 nt, Homo sapiens
  misc_RNA (1)...(19): siRNA sense strand
gauguacuccuuggacgau

SEQ ID NO: 906398 - RNA, 19 nt, Homo sapiens
  misc_RNA (1)...(19): siRNA sense strand
aaacagcgagaccaacgau

SEQ ID NO: 906399 - RNA, 19 nt, Homo sapiens
  misc_RNA (1)...(19): siRNA sense strand
caccuucucugggaucgau

SEQ ID NO: 906400 - RNA, 19 nt, Homo sapiens
  misc_RNA (1)...(19): siRNA sense strand
ggccaagcgcuccaagugu

SEQ ID NO: 906401 - RNA, 19 nt, Homo sapiens
  misc_RNA (1)...(19): siRNA sense strand
ggaagaggauauaguggaa

SEQ ID NO: 906402 - RNA, 19 nt, Homo sapiens
  misc_RNA (1)...(19): siRNA sense strand
gcagaucgcuguggagaau

SEQ ID NO: 906403 - RNA, 19 nt, Homo sapiens
  misc_RNA (1)...(19): siRNA sense strand
caacgaguuugauacaguu

SEQ ID NO: 906404 - RNA, 19 nt, Homo sapiens
  misc_RNA (1)...(19): siRNA sense strand
ggagcuagaugagguggaa

SEQ ID NO: 906405 - RNA, 19 nt, Homo sapiens
  misc_RNA (1)...(19): siRNA sense strand
uagaugagguggaagacuu

SEQ ID NO: 906406 - RNA, 19 nt, Homo sapiens
  misc_RNA (1)...(19): siRNA sense strand
uaagacagcuagagagacu

SEQ ID NO: 906407 - RNA, 19 nt, Homo sapiens
  misc_RNA (1)...(19): siRNA sense strand
ccaacgaguuugauacagu

SEQ ID NO: 906408 - RNA, 19 nt, Homo sapiens
  misc_RNA (1)...(19): siRNA sense strand
uaaggaagaggauauagug

SEQ ID NO: 906409 - RNA, 19 nt, Homo sapiens
  misc_RNA (1)...(19): siRNA sense strand
ggucacagcuacgaaugau

SEQ ID NO: 906410 - RNA, 19 nt, Homo sapiens
  misc_RNA (1)...(19): siRNA sense strand
ucacagccacugcacuuaa

SEQ ID NO: 906411 - RNA, 19 nt, Homo sapiens
  misc_RNA (1)...(19): siRNA sense strand
uagagagacugaugaggau

SEQ ID NO: 906412 - RNA, 19 nt, Homo sapiens
  misc_RNA (1)...(19): siRNA sense strand
aagaugauguggacagugu

SEQ ID NO: 906413 - RNA, 19 nt, Homo sapiens
  misc_RNA (1)...(19): siRNA sense strand
gagagacugaugaggauga

SEQ ID NO: 906414 - RNA, 19 nt, Homo sapiens
  misc_RNA (1)...(19): siRNA sense strand
aagaggauauaguggaaga

SEQ ID NO: 906415 - RNA, 19 nt, Homo sapiens
  misc_RNA (1)...(19): siRNA sense strand
ggucacagccacugcacuu

SEQ ID NO: 906416 - RNA, 19 nt, Homo sapiens
  misc_RNA (1)...(19): siRNA sense strand
ccagacgcucagacuauua

SEQ ID NO: 906417 - RNA, 19 nt, Homo sapiens
  misc_RNA (1)...(19): siRNA sense strand
ggacaguguggaagagaug

SEQ ID NO: 906418 - RNA, 19 nt, Homo sapiens
  misc_RNA (1)...(19): siRNA sense strand
gauccagacgcucagacua

SEQ ID NO: 906419 - RNA, 19 nt, Homo sapiens
  misc_RNA (1)...(19): siRNA sense strand
gaccaacgaguuugauaca

SEQ ID NO: 906420 - RNA, 19 nt, Homo sapiens
  misc_RNA (1)...(19): siRNA sense strand
cagacgcucagacuauuaa

SEQ ID NO: 906421 - RNA, 19 nt, Homo sapiens
  misc_RNA (1)...(19): siRNA sense strand
gagauggaggucacagcua

SEQ ID NO: 906422 - RNA, 19 nt, Homo sapiens
  misc_RNA (1)...(19): siRNA sense strand
ugaugaggaugaagaugau

SEQ ID NO: 906423 - RNA, 19 nt, Homo sapiens
  misc_RNA (1)...(19): siRNA sense strand
ggggugcaguggaggauua

SEQ ID NO: 906424 - RNA, 19 nt, Homo sapiens
  misc_RNA (1)...(19): siRNA sense strand
gaggauauaguggaagaug

SEQ ID NO: 906425 - RNA, 19 nt, Homo sapiens
  misc_RNA (1)...(19): siRNA sense strand
ggaggucacagcuacgaau

SEQ ID NO: 906426 - RNA, 19 nt, Homo sapiens
  misc_RNA (1)...(19): siRNA sense strand
caugcgcaaugcugacuug

SEQ ID NO: 906427 - RNA, 19 nt, Homo sapiens
  misc_RNA (1)...(19): siRNA sense strand
cgaguuugauacaguugug

SEQ ID NO: 906428 - RNA, 19 nt, Homo sapiens
  misc_RNA (1)...(19): siRNA sense strand
gggcugcucugagggagau

SEQ ID NO: 906429 - RNA, 19 nt, Homo sapiens
  misc_RNA (1)...(19): siRNA sense strand
gccagcaacugcagaccau

SEQ ID NO: 906430 - RNA, 19 nt, Homo sapiens
  misc_RNA (1)...(19): siRNA sense strand
gcacuuaagacagcuagag

SEQ ID NO: 906431 - RNA, 19 nt, Homo sapiens
  misc_RNA (1)...(19): siRNA sense strand
aguggaggauuacuucaug

SEQ ID NO: 906432 - RNA, 19 nt, Homo sapiens
  misc_RNA (1)...(19): siRNA sense strand
cugaugaggaugaagauga

SEQ ID NO: 906433 - RNA, 19 nt, Homo sapiens
  misc_RNA (1)...(19): siRNA sense strand
agacugaugaggaugaaga

SEQ ID NO: 906434 - RNA, 19 nt, Homo sapiens
  misc_RNA (1)...(19): siRNA sense strand
gaccauguuccaccacuuc

SEQ ID NO: 906435 - RNA, 19 nt, Homo sapiens
  misc_RNA (1)...(19): siRNA sense strand
uugauacaguuguggaaga

SEQ ID NO: 906436 - RNA, 19 nt, Homo sapiens
  misc_RNA (1)...(19): siRNA sense strand
cagcuagagagacugauga

SEQ ID NO: 906437 - RNA, 19 nt, Homo sapiens
  misc_RNA (1)...(19): siRNA sense strand
uccagacgcucagacuauu

SEQ ID NO: 906438 - RNA, 19 nt, Homo sapiens
  misc_RNA (1)...(19): siRNA sense strand
gccaggagaaggccaagug

SEQ ID NO: 906439 - RNA, 19 nt, Homo sapiens
  misc_RNA (1)...(19): siRNA sense strand
ugaagaugauguggacagu

SEQ ID NO: 906440 - RNA, 19 nt, Homo sapiens
  misc_RNA (1)...(19): siRNA sense strand
cucagacuauuaaggaaga

SEQ ID NO: 906441 - RNA, 19 nt, Homo sapiens
  misc_RNA (1)...(19): siRNA sense strand
cacagccacugcacuuaag

SEQ ID NO: 906442 - RNA, 19 nt, Homo sapiens
  misc_RNA (1)...(19): siRNA sense strand
gaggucacagcuacgaaug

SEQ ID NO: 906443 - RNA, 19 nt, Homo sapiens
  misc_RNA (1)...(19): siRNA sense strand
cuuaagacagcuagagaga

SEQ ID NO: 906444 - RNA, 19 nt, Homo sapiens
  misc_RNA (1)...(19): siRNA sense strand
agacagcuagagagacuga

SEQ ID NO: 906445 - RNA, 19 nt, Homo sapiens
  misc_RNA (1)...(19): siRNA sense strand
gcaacugcagaccauguuc

SEQ ID NO: 906446 - RNA, 19 nt, Homo sapiens
  misc_RNA (1)...(19): siRNA sense strand
cuauuaaggaagaggauau

SEQ ID NO: 906447 - RNA, 19 nt, Homo sapiens
  misc_RNA (1)...(19): siRNA sense strand
gcaacgugguggucaaaua

SEQ ID NO: 906448 - RNA, 19 nt, Homo sapiens
  misc_RNA (1)...(19): siRNA sense strand
guacauggauggcuauuac

SEQ ID NO: 906449 - RNA, 19 nt, Homo sapiens
  misc_RNA (1)...(19): siRNA sense strand
gacagacucucuuccagaa

SEQ ID NO: 906450 - RNA, 19 nt, Homo sapiens
  misc_RNA (1)...(19): siRNA sense strand
ccauggagguccuugaguu

SEQ ID NO: 906451 - RNA, 19 nt, Homo sapiens
  misc_RNA (1)...(19): siRNA sense strand
guacaacggcucccuguuc

SEQ ID NO: 906452 - RNA, 19 nt, Homo sapiens
  misc_RNA (1)...(19): siRNA sense strand
gcagacacgcggaccauug

SEQ ID NO: 906453 - RNA, 19 nt, Homo sapiens
  misc_RNA (1)...(19): siRNA sense strand
caaccaguauucccacauc

SEQ ID NO: 906454 - RNA, 19 nt, Homo sapiens
  misc_RNA (1)...(19): siRNA sense strand
gggaggaggugaggaaucu

SEQ ID NO: 906455 - RNA, 19 nt, Homo sapiens
  misc_RNA (1)...(19): siRNA sense strand
uuaccaacacguccaguua

SEQ ID NO: 906456 - RNA, 19 nt, Homo sapiens
  misc_RNA (1)...(19): siRNA sense strand
caacggcucccuguucuau

SEQ ID NO: 906457 - RNA, 19 nt, Homo sapiens
  misc_RNA (1)...(19): siRNA sense strand
ucucgaugcuggauuacaa

SEQ ID NO: 906458 - RNA, 19 nt, Homo sapiens
  misc_RNA (1)...(19): siRNA sense strand
gaucugcggugugcucuac

SEQ ID NO: 906459 - RNA, 19 nt, Homo sapiens
  misc_RNA (1)...(19): siRNA sense strand
gagcugaaggacaggauga

SEQ ID NO: 906460 - RNA, 19 nt, Homo sapiens
  misc_RNA (1)...(19): siRNA sense strand
acggcucccuguucuauaa

SEQ ID NO: 906461 - RNA, 19 nt, Homo sapiens
  misc_RNA (1)...(19): siRNA sense strand
caggugcucuacaauguca

SEQ ID NO: 906462 - RNA, 19 nt, Homo sapiens
  misc_RNA (1)...(19): siRNA sense strand
ccugggagacuucaucaaa

SEQ ID NO: 906463 - RNA, 19 nt, Homo sapiens
  misc_RNA (1)...(19): siRNA sense strand
ggacgugcccuuccacaac

SEQ ID NO: 906464 - RNA, 19 nt, Homo sapiens
  misc_RNA (1)...(19): siRNA sense strand
ggcgaggccuucaugaucu

SEQ ID NO: 906465 - RNA, 19 nt, Homo sapiens
  misc_RNA (1)...(19): siRNA sense strand
caggaugacggaacuguug

SEQ ID NO: 906466 - RNA, 19 nt, Homo sapiens
  misc_RNA (1)...(19): siRNA sense strand
caaggucuacuucgccuau

SEQ ID NO: 906467 - RNA, 19 nt, Homo sapiens
  misc_RNA (1)...(19): siRNA sense strand
gaugggugccuacggguau

SEQ ID NO: 906468 - RNA, 19 nt, Homo sapiens
  misc_RNA (1)...(19): siRNA sense strand
caacgugguggucaaauac

SEQ ID NO: 906469 - RNA, 19 nt, Homo sapiens
  misc_RNA (1)...(19): siRNA sense strand
gagcaacgugguggucaaa

SEQ ID NO: 906470 - RNA, 19 nt, Homo sapiens
  misc_RNA (1)...(19): siRNA sense strand
gguacauggauggcuauua

SEQ ID NO: 906471 - RNA, 19 nt, Homo sapiens
  misc_RNA (1)...(19): siRNA sense strand
cauggauggcuauuacaaa

SEQ ID NO: 906472 - RNA, 19 nt, Homo sapiens
  misc_RNA (1)...(19): siRNA sense strand
cuacaaugucacccuguuu

SEQ ID NO: 906473 - RNA, 19 nt, Homo sapiens
  misc_RNA (1)...(19): siRNA sense strand
acacguccaguuacgagua

SEQ ID NO: 906474 - RNA, 19 nt, Homo sapiens
  misc_RNA (1)...(19): siRNA sense strand
ucuacaaugucacccuguu

SEQ ID NO: 906475 - RNA, 19 nt, Homo sapiens
  misc_RNA (1)...(19): siRNA sense strand
accaggugcucuacaaugu

SEQ ID NO: 906476 - RNA, 19 nt, Homo sapiens
  misc_RNA (1)...(19): siRNA sense strand
ggcaacugauggagaaggu

SEQ ID NO: 906477 - RNA, 19 nt, Homo sapiens
  misc_RNA (1)...(19): siRNA sense strand
uacaacggcucccuguucu

SEQ ID NO: 906478 - RNA, 19 nt, Homo sapiens
  misc_RNA (1)...(19): siRNA sense strand
cggauagccgggucuggua

SEQ ID NO: 906479 - RNA, 19 nt, Homo sapiens
  misc_RNA (1)...(19): siRNA sense strand
gcgaggccuucaugaucug

SEQ ID NO: 906480 - RNA, 19 nt, Homo sapiens
  misc_RNA (1)...(19): siRNA sense strand
cauggagguccuugaguug

SEQ ID NO: 906481 - RNA, 19 nt, Homo sapiens
  misc_RNA (1)...(19): siRNA sense strand
guaucgcgaccuccaguau

SEQ ID NO: 906482 - RNA, 19 nt, Homo sapiens
  misc_RNA (1)...(19): siRNA sense strand
ugggagacuucaucaaagg

SEQ ID NO: 906483 - RNA, 19 nt, Homo sapiens
  misc_RNA (1)...(19): siRNA sense strand
ugcggcaacugauggagaa

SEQ ID NO: 906484 - RNA, 19 nt, Homo sapiens
  misc_RNA (1)...(19): siRNA sense strand
auggauggcuauuacaaag

SEQ ID NO: 906485 - RNA, 19 nt, Homo sapiens
  misc_RNA (1)...(19): siRNA sense strand
aggucuacuucgccuauuu

SEQ ID NO: 906486 - RNA, 19 nt, Homo sapiens
  misc_RNA (1)...(19): siRNA sense strand
guacaccaccaaccagaac

SEQ ID NO: 906487 - RNA, 19 nt, Homo sapiens
  misc_RNA (1)...(19): siRNA sense strand
cugggagacuucaucaaag

SEQ ID NO: 906488 - RNA, 19 nt, Homo sapiens
  misc_RNA (1)...(19): siRNA sense strand
ggaaacaucucugucauug

SEQ ID NO: 906489 - RNA, 19 nt, Homo sapiens
  misc_RNA (1)...(19): siRNA sense strand
gagaauaugugaugagugu

SEQ ID NO: 906490 - RNA, 19 nt, Homo sapiens
  misc_RNA (1)...(19): siRNA sense strand
ggaaacacuuuaaggacua

SEQ ID NO: 906491 - RNA, 19 nt, Homo sapiens
  misc_RNA (1)...(19): siRNA sense strand
gcacgagacucuuguuuua

SEQ ID NO: 906492 - RNA, 19 nt, Homo sapiens
  misc_RNA (1)...(19): siRNA sense strand
ccugaaggaucauggauua

SEQ ID NO: 906493 - RNA, 19 nt, Homo sapiens
  misc_RNA (1)...(19): siRNA sense strand
ggaaagccauccacacugu

SEQ ID NO: 906494 - RNA, 19 nt, Homo sapiens
  misc_RNA (1)...(19): siRNA sense strand
gaaggaucauggauuagaa

SEQ ID NO: 906495 - RNA, 19 nt, Homo sapiens
  misc_RNA (1)...(19): siRNA sense strand
ggagggagguggaaacauc

SEQ ID NO: 906496 - RNA, 19 nt, Homo sapiens
  misc_RNA (1)...(19): siRNA sense strand
gaacuuaggaaauuguuug

SEQ ID NO: 906497 - RNA, 19 nt, Homo sapiens
  misc_RNA (1)...(19): siRNA sense strand
agaauaaacugcagaagau

SEQ ID NO: 906498 - RNA, 19 nt, Homo sapiens
  misc_RNA (1)...(19): siRNA sense strand
ugacaacccugaaggauca

SEQ ID NO: 906499 - RNA, 19 nt, Homo sapiens
  misc_RNA (1)...(19): siRNA sense strand
gaucauggauuagaacugu

SEQ ID NO: 906500 - RNA, 19 nt, Homo sapiens
  misc_RNA (1)...(19): siRNA sense strand
gaucauacacaacuauuug

SEQ ID NO: 906501 - RNA, 19 nt, Homo sapiens
  misc_RNA (1)...(19): siRNA sense strand
ugauguggcuuuacuuuga

SEQ ID NO: 906502 - RNA, 19 nt, Homo sapiens
  misc_RNA (1)...(19): siRNA sense strand
aaacaucucugucauuguc

SEQ ID NO: 906503 - RNA, 19 nt, Homo sapiens
  misc_RNA (1)...(19): siRNA sense strand
ggaguuacaucagaccuau

SEQ ID NO: 906504 - RNA, 19 nt, Homo sapiens
  misc_RNA (1)...(19): siRNA sense strand
gaacacaaaggaaaguaug

SEQ ID NO: 906505 - RNA, 19 nt, Homo sapiens
  misc_RNA (1)...(19): siRNA sense strand
ggaccuguuuccuggcuuu

SEQ ID NO: 906506 - RNA, 19 nt, Homo sapiens
  misc_RNA (1)...(19): siRNA sense strand
ggaggaacuuaggaaauug

SEQ ID NO: 906507 - RNA, 19 nt, Homo sapiens
  misc_RNA (1)...(19): siRNA sense strand
uggaggaacuuaggaaauu

SEQ ID NO: 906508 - RNA, 19 nt, Homo sapiens
  misc_RNA (1)...(19): siRNA sense strand
gcggaaaggauuuguuaaa

SEQ ID NO: 906509 - RNA, 19 nt, Homo sapiens
  misc_RNA (1)...(19): siRNA sense strand
cagcggaaaggauuuguua

SEQ ID NO: 906510 - RNA, 19 nt, Homo sapiens
  misc_RNA (1)...(19): siRNA sense strand
guucugguguccugucuuu

SEQ ID NO: 906511 - RNA, 19 nt, Homo sapiens
  misc_RNA (1)...(19): siRNA sense strand
aaauuggacucuuuggaaa

SEQ ID NO: 906512 - RNA, 19 nt, Homo sapiens
  misc_RNA (1)...(19): siRNA sense strand
ggagcagauugaggaguua

SEQ ID NO: 906513 - RNA, 19 nt, Homo sapiens
  misc_RNA (1)...(19): siRNA sense strand
gaauaugugaugaguguug

SEQ ID NO: 906514 - RNA, 19 nt, Homo sapiens
  misc_RNA (1)...(19): siRNA sense strand
caaaggaaaguauggcauu

SEQ ID NO: 906515 - RNA, 19 nt, Homo sapiens
  misc_RNA (1)...(19): siRNA sense strand
cagaauaaacugcagaaga

SEQ ID NO: 906516 - RNA, 19 nt, Homo sapiens
  misc_RNA (1)...(19): siRNA sense strand
cuaaugaccuauaggaaag

SEQ ID NO: 906517 - RNA, 19 nt, Homo sapiens
  misc_RNA (1)...(19): siRNA sense strand
ggauccaagucacaacuau

SEQ ID NO: 906518 - RNA, 19 nt, Homo sapiens
  misc_RNA (1)...(19): siRNA sense strand
gaaacacuuuaaggacuau

SEQ ID NO: 906519 - RNA, 19 nt, Homo sapiens
  misc_RNA (1)...(19): siRNA sense strand
gauccaagucacaacuaua

SEQ ID NO: 906520 - RNA, 19 nt, Homo sapiens
  misc_RNA (1)...(19): siRNA sense strand
ccaagucacaacuauauau

SEQ ID NO: 906521 - RNA, 19 nt, Homo sapiens
  misc_RNA (1)...(19): siRNA sense strand
ggaaaguucacucuguuca

SEQ ID NO: 906522 - RNA, 19 nt, Homo sapiens
  misc_RNA (1)...(19): siRNA sense strand
gagcacgagacucuuguuu

SEQ ID NO: 906523 - RNA, 19 nt, Homo sapiens
  misc_RNA (1)...(19): siRNA sense strand
ugcaguggguccuuucuuu

SEQ ID NO: 906524 - RNA, 19 nt, Homo sapiens
  misc_RNA (1)...(19): siRNA sense strand
ggaacacaaaggaaaguau

SEQ ID NO: 906525 - RNA, 19 nt, Homo sapiens
  misc_RNA (1)...(19): siRNA sense strand
uccuuuacaucccuuauuu

SEQ ID NO: 906526 - RNA, 19 nt, Homo sapiens
  misc_RNA (1)...(19): siRNA sense strand
aaaguucacucuguucauc

SEQ ID NO: 906527 - RNA, 19 nt, Homo sapiens
  misc_RNA (1)...(19): siRNA sense strand
ugacuucaaggaccuguuu

SEQ ID NO: 906528 - RNA, 19 nt, Homo sapiens
  misc_RNA (1)...(19): siRNA sense strand
guuggagccuuugggaauu

SEQ ID NO: 906529 - RNA, 19 nt, Homo sapiens
  misc_RNA (1)...(19): siRNA sense strand
ccuggaaaguucacucugu

SEQ ID NO: 906530 - RNA, 19 nt, Homo sapiens
  misc_RNA (1)...(19): siRNA sense strand
gguggaaacaucucuguca

SEQ ID NO: 906531 - RNA, 19 nt, Homo sapiens
  misc_RNA (1)...(19): siRNA sense strand
cuuauuugauguggcuuua

SEQ ID NO: 906532 - RNA, 19 nt, Homo sapiens
  misc_RNA (1)...(19): siRNA sense strand
gaaaguucacucuguucau

SEQ ID NO: 906533 - RNA, 19 nt, Homo sapiens
  misc_RNA (1)...(19): siRNA sense strand
aaaggaaaguauggcauuc

SEQ ID NO: 906534 - RNA, 19 nt, Homo sapiens
  misc_RNA (1)...(19): siRNA sense strand
gcaaggagggagguggaaa

SEQ ID NO: 906535 - RNA, 19 nt, Homo sapiens
  misc_RNA (1)...(19): siRNA sense strand
ggaacuuaggaaauuguuu

SEQ ID NO: 906536 - RNA, 19 nt, Homo sapiens
  misc_RNA (1)...(19): siRNA sense strand
aggagcagauugaggaguu

SEQ ID NO: 906537 - RNA, 19 nt, Homo sapiens
  misc_RNA (1)...(19): siRNA sense strand
gaaagccauccacacuguu

SEQ ID NO: 906538 - RNA, 19 nt, Homo sapiens
  misc_RNA (1)...(19): siRNA sense strand
ugaaggaucauggauuaga

SEQ ID NO: 906539 - RNA, 19 nt, Homo sapiens
  misc_RNA (1)...(19): siRNA sense strand
cuggaaaguucacucuguu

SEQ ID NO: 906540 - RNA, 19 nt, Homo sapiens
  misc_RNA (1)...(19): siRNA sense strand
cggaaaggauuuguuaaaa

SEQ ID NO: 906541 - RNA, 19 nt, Homo sapiens
  misc_RNA (1)...(19): siRNA sense strand
aauggcaguuggagccuuu

SEQ ID NO: 906542 - RNA, 19 nt, Homo sapiens
  misc_RNA (1)...(19): siRNA sense strand
gaugaguguugggcugguu

SEQ ID NO: 906543 - RNA, 19 nt, Homo sapiens
  misc_RNA (1)...(19): siRNA sense strand
ggcuuuacuucauaucuuc

SEQ ID NO: 906544 - RNA, 19 nt, Homo sapiens
  misc_RNA (1)...(19): siRNA sense strand
uggcuuuacuucauaucuu

SEQ ID NO: 906545 - RNA, 19 nt, Homo sapiens
  misc_RNA (1)...(19): siRNA sense strand
gaaacaucucugucauugu

SEQ ID NO: 906546 - RNA, 19 nt, Homo sapiens
  misc_RNA (1)...(19): siRNA sense strand
guggaaacaucucugucau

SEQ ID NO: 906547 - RNA, 19 nt, Homo sapiens
  misc_RNA (1)...(19): siRNA sense strand
guguugggcugguuucagu

SEQ ID NO: 906548 - RNA, 19 nt, Homo sapiens
  misc_RNA (1)...(19): siRNA sense strand
uguccugucuuucgagaau

SEQ ID NO: 906549 - RNA, 19 nt, Homo sapiens
  misc_RNA (1)...(19): siRNA sense strand
guacaauuuuggccuaaug

SEQ ID NO: 906550 - RNA, 19 nt, Homo sapiens
  misc_RNA (1)...(19): siRNA sense strand
gugcugcaguggguccuuu

SEQ ID NO: 906551 - RNA, 19 nt, Homo sapiens
  misc_RNA (1)...(19): siRNA sense strand
uguccuacaugguaagcaa

SEQ ID NO: 906552 - RNA, 19 nt, Homo sapiens
  misc_RNA (1)...(19): siRNA sense strand
cgacccaggagcagauuga

SEQ ID NO: 906553 - RNA, 19 nt, Homo sapiens
  misc_RNA (1)...(19): siRNA sense strand
gaauaaacugcagaagauc

SEQ ID NO: 906554 - RNA, 19 nt, Homo sapiens
  misc_RNA (1)...(19): siRNA sense strand
uuacagggccgauguccau

SEQ ID NO: 906555 - RNA, 19 nt, Homo sapiens
  misc_RNA (1)...(19): siRNA sense strand
agaccuauauggaggaacu

SEQ ID NO: 906556 - RNA, 19 nt, Homo sapiens
  misc_RNA (1)...(19): siRNA sense strand
ugguuucaguuuccaagaa

SEQ ID NO: 906557 - RNA, 19 nt, Homo sapiens
  misc_RNA (1)...(19): siRNA sense strand
gaggaacuuaggaaauugu

SEQ ID NO: 906558 - RNA, 19 nt, Homo sapiens
  misc_RNA (1)...(19): siRNA sense strand
gcugaucauacacaacuau

SEQ ID NO: 906559 - RNA, 19 nt, Homo sapiens
  misc_RNA (1)...(19): siRNA sense strand
cuuuacaucccuuauuuga

SEQ ID NO: 906560 - RNA, 19 nt, Homo sapiens
  misc_RNA (1)...(19): siRNA sense strand
uuccuggcuuuacuucaua

SEQ ID NO: 906561 - RNA, 19 nt, Homo sapiens
  misc_RNA (1)...(19): siRNA sense strand
gagcgaggaggcaggagau

SEQ ID NO: 906562 - RNA, 19 nt, Homo sapiens
  misc_RNA (1)...(19): siRNA sense strand
ucgagaauaugugaugagu

SEQ ID NO: 906563 - RNA, 19 nt, Homo sapiens
  misc_RNA (1)...(19): siRNA sense strand
uaggaaauuguuugaggaa

SEQ ID NO: 906564 - RNA, 19 nt, Homo sapiens
  misc_RNA (1)...(19): siRNA sense strand
gauguggcuuuacuuugac

SEQ ID NO: 906565 - RNA, 19 nt, Homo sapiens
  misc_RNA (1)...(19): siRNA sense strand
uggaaacaucucugucauu

SEQ ID NO: 906566 - RNA, 19 nt, Homo sapiens
  misc_RNA (1)...(19): siRNA sense strand
gagguggaaacaucucugu

SEQ ID NO: 906567 - RNA, 19 nt, Homo sapiens
  misc_RNA (1)...(19): siRNA sense strand
aaagccauccacacuguug

SEQ ID NO: 906568 - RNA, 19 nt, Homo sapiens
  misc_RNA (1)...(19): siRNA sense strand
gaaaaguguguccuacaug

SEQ ID NO: 906569 - RNA, 19 nt, Homo sapiens
  misc_RNA (1)...(19): siRNA sense strand
acgagacucuuguuuuaaa

SEQ ID NO: 906570 - RNA, 19 nt, Homo sapiens
  misc_RNA (1)...(19): siRNA sense strand
uuacaucagaccuauaugg

SEQ ID NO: 906571 - RNA, 19 nt, Homo sapiens
  misc_RNA (1)...(19): siRNA sense strand
gaguuacaucagaccuaua

SEQ ID NO: 906572 - RNA, 19 nt, Homo sapiens
  misc_RNA (1)...(19): siRNA sense strand
auugaggaguuacaucaga

SEQ ID NO: 906573 - RNA, 19 nt, Homo sapiens
  misc_RNA (1)...(19): siRNA sense strand
agauugaggaguuacauca

SEQ ID NO: 906574 - RNA, 19 nt, Homo sapiens
  misc_RNA (1)...(19): siRNA sense strand
uaggaaagccauccacacu

SEQ ID NO: 906575 - RNA, 19 nt, Homo sapiens
  misc_RNA (1)...(19): siRNA sense strand
gaucaugggguuugcuuug

SEQ ID NO: 906576 - RNA, 19 nt, Homo sapiens
  misc_RNA (1)...(19): siRNA sense strand
aaaauuggacucuuuggaa

SEQ ID NO: 906577 - RNA, 19 nt, Homo sapiens
  misc_RNA (1)...(19): siRNA sense strand
aaguguguccuacauggua

SEQ ID NO: 906578 - RNA, 19 nt, Homo sapiens
  misc_RNA (1)...(19): siRNA sense strand
gcaguggguccuuucuuuu

SEQ ID NO: 906579 - RNA, 19 nt, Homo sapiens
  misc_RNA (1)...(19): siRNA sense strand
uugaggaacacaaaggaaa

SEQ ID NO: 906580 - RNA, 19 nt, Homo sapiens
  misc_RNA (1)...(19): siRNA sense strand
aauaaacugcagaagauca

SEQ ID NO: 906581 - RNA, 19 nt, Homo sapiens
  misc_RNA (1)...(19): siRNA sense strand
uauuugauguggcuuuacu

SEQ ID NO: 906582 - RNA, 19 nt, Homo sapiens
  misc_RNA (1)...(19): siRNA sense strand
guugggcugguuucaguuu

SEQ ID NO: 906583 - RNA, 19 nt, Homo sapiens
  misc_RNA (1)...(19): siRNA sense strand
ugaaaucuacuaccguuug

SEQ ID NO: 906584 - RNA, 19 nt, Homo sapiens
  misc_RNA (1)...(19): siRNA sense strand
gaaaucuacuaccguuugc

SEQ ID NO: 906585 - RNA, 19 nt, Homo sapiens
  misc_RNA (1)...(19): siRNA sense strand
gugaggaacugagaaacau

SEQ ID NO: 906586 - RNA, 19 nt, Homo sapiens
  misc_RNA (1)...(19): siRNA sense strand
cuacuaccguuugcugguu

SEQ ID NO: 906587 - RNA, 19 nt, Homo sapiens
  misc_RNA (1)...(19): siRNA sense strand
agagugaggaacugagaaa

SEQ ID NO: 906588 - RNA, 19 nt, Homo sapiens
  misc_RNA (1)...(19): siRNA sense strand
aaagagugaggaacugaga

SEQ ID NO: 906589 - RNA, 19 nt, Homo sapiens
  misc_RNA (1)...(19): siRNA sense strand
ggaaagaacgaugggcaaa

SEQ ID NO: 906590 - RNA, 19 nt, Homo sapiens
  misc_RNA (1)...(19): siRNA sense strand
gaaagaacgaugggcaaag

SEQ ID NO: 906591 - RNA, 19 nt, Homo sapiens
  misc_RNA (1)...(19): siRNA sense strand
aaagaacgaugggcaaagc

SEQ ID NO: 906592 - RNA, 19 nt, Homo sapiens
  misc_RNA (1)...(19): siRNA sense strand
gauccgcugcgacaacgaa

SEQ ID NO: 906593 - RNA, 19 nt, Homo sapiens
  misc_RNA (1)...(19): siRNA sense strand
aagcgcaagugguacuguu

SEQ ID NO: 906594 - RNA, 19 nt, Homo sapiens
  misc_RNA (1)...(19): siRNA sense strand
ucucaaccauaaaccaaag

SEQ ID NO: 906595 - RNA, 19 nt, Homo sapiens
  misc_RNA (1)...(19): siRNA sense strand
guacugaaauccuagaauu

SEQ ID NO: 906596 - RNA, 19 nt, Homo sapiens
  misc_RNA (1)...(19): siRNA sense strand
gacuaaagcuagcgaauga

SEQ ID NO: 906597 - RNA, 19 nt, Homo sapiens
  misc_RNA (1)...(19): siRNA sense strand
guaaaggcuuggaggauuu

SEQ ID NO: 906598 - RNA, 19 nt, Homo sapiens
  misc_RNA (1)...(19): siRNA sense strand
gccauuaacuggagacaga

SEQ ID NO: 906599 - RNA, 19 nt, Homo sapiens
  misc_RNA (1)...(19): siRNA sense strand
cagauugucuuaaguggaa

SEQ ID NO: 906600 - RNA, 19 nt, Homo sapiens
  misc_RNA (1)...(19): siRNA sense strand
guguacagcuuaauucuau

SEQ ID NO: 906601 - RNA, 19 nt, Homo sapiens
  misc_RNA (1)...(19): siRNA sense strand
cagcuuaauucuaugcuuu

SEQ ID NO: 906602 - RNA, 19 nt, Homo sapiens
  misc_RNA (1)...(19): siRNA sense strand
ggagugaaguggcaugauc

SEQ ID NO: 906603 - RNA, 19 nt, Homo sapiens
  misc_RNA (1)...(19): siRNA sense strand
gcaccuauccugaauaaag

SEQ ID NO: 906604 - RNA, 19 nt, Homo sapiens
  misc_RNA (1)...(19): siRNA sense strand
gcuagcgaaugaacaaauu

SEQ ID NO: 906605 - RNA, 19 nt, Homo sapiens
  misc_RNA (1)...(19): siRNA sense strand
agagaaagaggcaaagaua

SEQ ID NO: 906606 - RNA, 19 nt, Homo sapiens
  misc_RNA (1)...(19): siRNA sense strand
ggaauuucagauugucuua

SEQ ID NO: 906607 - RNA, 19 nt, Homo sapiens
  misc_RNA (1)...(19): siRNA sense strand
gccaucauaugcagagaaa

SEQ ID NO: 906608 - RNA, 19 nt, Homo sapiens
  misc_RNA (1)...(19): siRNA sense strand
gggaggaauuucagauugu

SEQ ID NO: 906609 - RNA, 19 nt, Homo sapiens
  misc_RNA (1)...(19): siRNA sense strand
gggcuaguguuuauugugu

SEQ ID NO: 906610 - RNA, 19 nt, Homo sapiens
  misc_RNA (1)...(19): siRNA sense strand
gaaaaccuccaguaucaua

SEQ ID NO: 906611 - RNA, 19 nt, Homo sapiens
  misc_RNA (1)...(19): siRNA sense strand
gaaguggcaugaucugacu

SEQ ID NO: 906612 - RNA, 19 nt, Homo sapiens
  misc_RNA (1)...(19): siRNA sense strand
gagaaagaggcaaagauau

SEQ ID NO: 906613 - RNA, 19 nt, Homo sapiens
  misc_RNA (1)...(19): siRNA sense strand
uaucauaauugcucugaca

SEQ ID NO: 906614 - RNA, 19 nt, Homo sapiens
  misc_RNA (1)...(19): siRNA sense strand
gcacagcuugaaagaauug

SEQ ID NO: 906615 - RNA, 19 nt, Homo sapiens
  misc_RNA (1)...(19): siRNA sense strand
ggacuaaagcuagcgaaug

SEQ ID NO: 906616 - RNA, 19 nt, Homo sapiens
  misc_RNA (1)...(19): siRNA sense strand
cugcaccuauccugaauaa

SEQ ID NO: 906617 - RNA, 19 nt, Homo sapiens
  misc_RNA (1)...(19): siRNA sense strand
uauacuagcucagucaugu

SEQ ID NO: 906618 - RNA, 19 nt, Homo sapiens
  misc_RNA (1)...(19): siRNA sense strand
caucauaugcagagaaaga

SEQ ID NO: 906619 - RNA, 19 nt, Homo sapiens
  misc_RNA (1)...(19): siRNA sense strand
gcuaguguuuauuguguug

SEQ ID NO: 906620 - RNA, 19 nt, Homo sapiens
  misc_RNA (1)...(19): siRNA sense strand
aaacauauacaacgagugu

SEQ ID NO: 906621 - RNA, 19 nt, Homo sapiens
  misc_RNA (1)...(19): siRNA sense strand
aguaaaggcuuggaggauu

SEQ ID NO: 906622 - RNA, 19 nt, Homo sapiens
  misc_RNA (1)...(19): siRNA sense strand
agagacauauauccaugaa

SEQ ID NO: 906623 - RNA, 19 nt, Homo sapiens
  misc_RNA (1)...(19): siRNA sense strand
gucauguacugaaauccua

SEQ ID NO: 906624 - RNA, 19 nt, Homo sapiens
  misc_RNA (1)...(19): siRNA sense strand
guguugguguccuugauuu

SEQ ID NO: 906625 - RNA, 19 nt, Homo sapiens
  misc_RNA (1)...(19): siRNA sense strand
ccaguaggagagacauaua

SEQ ID NO: 906626 - RNA, 19 nt, Homo sapiens
  misc_RNA (1)...(19): siRNA sense strand
ggaggaauuucagauuguc

SEQ ID NO: 906627 - RNA, 19 nt, Homo sapiens
  misc_RNA (1)...(19): siRNA sense strand
gaauugcagcccucaagug

SEQ ID NO: 906628 - RNA, 19 nt, Homo sapiens
  misc_RNA (1)...(19): siRNA sense strand
agaaagaggcaaagauauc

SEQ ID NO: 906629 - RNA, 19 nt, Homo sapiens
  misc_RNA (1)...(19): siRNA sense strand
gagagacauauauccauga

SEQ ID NO: 906630 - RNA, 19 nt, Homo sapiens
  misc_RNA (1)...(19): siRNA sense strand
gcagagaaagaggcaaaga

SEQ ID NO: 906631 - RNA, 19 nt, Homo sapiens
  misc_RNA (1)...(19): siRNA sense strand
caggugauccuccuacuuc

SEQ ID NO: 906632 - RNA, 19 nt, Homo sapiens
  misc_RNA (1)...(19): siRNA sense strand
ugucaaagguggauuucag

SEQ ID NO: 906633 - RNA, 19 nt, Homo sapiens
  misc_RNA (1)...(19): siRNA sense strand
ccaugaaggacuaaagcua

SEQ ID NO: 906634 - RNA, 19 nt, Homo sapiens
  misc_RNA (1)...(19): siRNA sense strand
auauauccaugaaggacua

SEQ ID NO: 906635 - RNA, 19 nt, Homo sapiens
  misc_RNA (1)...(19): siRNA sense strand
gaucugacucacuguacuu

SEQ ID NO: 906636 - RNA, 19 nt, Homo sapiens
  misc_RNA (1)...(19): siRNA sense strand
ugacagauggcaaguugga

SEQ ID NO: 906637 - RNA, 19 nt, Homo sapiens
  misc_RNA (1)...(19): siRNA sense strand
aaagcuagcgaaugaacaa

SEQ ID NO: 906638 - RNA, 19 nt, Homo sapiens
  misc_RNA (1)...(19): siRNA sense strand
gaaagaggcaaagauaucc

SEQ ID NO: 906639 - RNA, 19 nt, Homo sapiens
  misc_RNA (1)...(19): siRNA sense strand
uugaaaaccuccaguauca

SEQ ID NO: 906640 - RNA, 19 nt, Homo sapiens
  misc_RNA (1)...(19): siRNA sense strand
ggggaggaauuucagauug

SEQ ID NO: 906641 - RNA, 19 nt, Homo sapiens
  misc_RNA (1)...(19): siRNA sense strand
ggucuggugccaucauaug

SEQ ID NO: 906642 - RNA, 19 nt, Homo sapiens
  misc_RNA (1)...(19): siRNA sense strand
gagcaaguuuucccuguca

SEQ ID NO: 906643 - RNA, 19 nt, Homo sapiens
  misc_RNA (1)...(19): siRNA sense strand
ggagacagaggcaaaauca

SEQ ID NO: 906644 - RNA, 19 nt, Homo sapiens
  misc_RNA (1)...(19): siRNA sense strand
aaagauauccaggucacuu

SEQ ID NO: 906645 - RNA, 19 nt, Homo sapiens
  misc_RNA (1)...(19): siRNA sense strand
cagagaaagaggcaaagau

SEQ ID NO: 906646 - RNA, 19 nt, Homo sapiens
  misc_RNA (1)...(19): siRNA sense strand
gauuucaggcucuuaaagg

SEQ ID NO: 906647 - RNA, 19 nt, Homo sapiens
  misc_RNA (1)...(19): siRNA sense strand
ggauuucaggcucuuaaag

SEQ ID NO: 906648 - RNA, 19 nt, Homo sapiens
  misc_RNA (1)...(19): siRNA sense strand
caugaucugacucacugua

SEQ ID NO: 906649 - RNA, 19 nt, Homo sapiens
  misc_RNA (1)...(19): siRNA sense strand
gcaggaggcuugaaaaccu

SEQ ID NO: 906650 - RNA, 19 nt, Homo sapiens
  misc_RNA (1)...(19): siRNA sense strand
uugcagcccucaagugucu

SEQ ID NO: 906651 - RNA, 19 nt, Homo sapiens
  misc_RNA (1)...(19): siRNA sense strand
aaccuccaguaucauaauu

SEQ ID NO: 906652 - RNA, 19 nt, Homo sapiens
  misc_RNA (1)...(19): siRNA sense strand
guggauuucaggcucuuaa

SEQ ID NO: 906653 - RNA, 19 nt, Homo sapiens
  misc_RNA (1)...(19): siRNA sense strand
gcuuaauucuaugcuuugu

SEQ ID NO: 906654 - RNA, 19 nt, Homo sapiens
  misc_RNA (1)...(19): siRNA sense strand
ucaggcucuuaaaggaaua

SEQ ID NO: 906655 - RNA, 19 nt, Homo sapiens
  misc_RNA (1)...(19): siRNA sense strand
caguaggagagacauauau

SEQ ID NO: 906656 - RNA, 19 nt, Homo sapiens
  misc_RNA (1)...(19): siRNA sense strand
accaguaaguguacagcuu

SEQ ID NO: 906657 - RNA, 19 nt, Homo sapiens
  misc_RNA (1)...(19): siRNA sense strand
caccuauccugaauaaagc

SEQ ID NO: 906658 - RNA, 19 nt, Homo sapiens
  misc_RNA (1)...(19): siRNA sense strand
ggcuaguguuuauuguguu

SEQ ID NO: 906659 - RNA, 19 nt, Homo sapiens
  misc_RNA (1)...(19): siRNA sense strand
guaaagacauuccaguuuu

SEQ ID NO: 906660 - RNA, 19 nt, Homo sapiens
  misc_RNA (1)...(19): siRNA sense strand
guucuuagcaguccuggua

SEQ ID NO: 906661 - RNA, 19 nt, Homo sapiens
  misc_RNA (1)...(19): siRNA sense strand
cguaaagacauuccaguuu

SEQ ID NO: 906662 - RNA, 19 nt, Homo sapiens
  misc_RNA (1)...(19): siRNA sense strand
cuugggaguuuccaucuuu

SEQ ID NO: 906663 - RNA, 19 nt, Homo sapiens
  misc_RNA (1)...(19): siRNA sense strand
cuacugguccugcugauga

SEQ ID NO: 906664 - RNA, 19 nt, Homo sapiens
  misc_RNA (1)...(19): siRNA sense strand
uagcaguccugguacucuu

SEQ ID NO: 906665 - RNA, 19 nt, Homo sapiens
  misc_RNA (1)...(19): siRNA sense strand
gcaaccaccgcugcuucua

SEQ ID NO: 906666 - RNA, 19 nt, Homo sapiens
  misc_RNA (1)...(19): siRNA sense strand
ccacugcucguaaagacau

SEQ ID NO: 906667 - RNA, 19 nt, Homo sapiens
  misc_RNA (1)...(19): siRNA sense strand
ugacacguauccagcuacu

SEQ ID NO: 906668 - RNA, 19 nt, Homo sapiens
  misc_RNA (1)...(19): siRNA sense strand
ggaaaucgccacccauaug

SEQ ID NO: 906669 - RNA, 19 nt, Homo sapiens
  misc_RNA (1)...(19): siRNA sense strand
gaaauagagguuccaagaa

SEQ ID NO: 906670 - RNA, 19 nt, Homo sapiens
  misc_RNA (1)...(19): siRNA sense strand
gugcuucuccuguagauua

SEQ ID NO: 906671 - RNA, 19 nt, Homo sapiens
  misc_RNA (1)...(19): siRNA sense strand
gaauucagcuggaaaaugu

SEQ ID NO: 906672 - RNA, 19 nt, Homo sapiens
  misc_RNA (1)...(19): siRNA sense strand
gaagcggccugaggucauu

SEQ ID NO: 906673 - RNA, 19 nt, Homo sapiens
  misc_RNA (1)...(19): siRNA sense strand
gagcagacccagcuggaaa

SEQ ID NO: 906674 - RNA, 19 nt, Homo sapiens
  misc_RNA (1)...(19): siRNA sense strand
gcaguuuacucuggaaugu

SEQ ID NO: 906675 - RNA, 19 nt, Homo sapiens
  misc_RNA (1)...(19): siRNA sense strand
ggagcgagccacccaagaa

SEQ ID NO: 906676 - RNA, 19 nt, Homo sapiens
  misc_RNA (1)...(19): siRNA sense strand
caauggcacugucuuugug

SEQ ID NO: 906677 - RNA, 19 nt, Homo sapiens
  misc_RNA (1)...(19): siRNA sense strand
gcaauggcacugucuuugu

SEQ ID NO: 906678 - RNA, 19 nt, Homo sapiens
  misc_RNA (1)...(19): siRNA sense strand
gcugagggcuaccuugaag

SEQ ID NO: 906679 - RNA, 19 nt, Homo sapiens
  misc_RNA (1)...(19): siRNA sense strand
caagagcagagaagaguga

SEQ ID NO: 906680 - RNA, 19 nt, Homo sapiens
  misc_RNA (1)...(19): siRNA sense strand
gcccaaggcuggugcuucu

SEQ ID NO: 906681 - RNA, 19 nt, Homo sapiens
  misc_RNA (1)...(19): siRNA sense strand
cgaagggaccuacaugugu

SEQ ID NO: 906682 - RNA, 19 nt, Homo sapiens
  misc_RNA (1)...(19): siRNA sense strand
gacuacgaguucaaaguga

SEQ ID NO: 906683 - RNA, 19 nt, Homo sapiens
  misc_RNA (1)...(19): siRNA sense strand
caacagcgcaggacauagg

SEQ ID NO: 906684 - RNA, 19 nt, Homo sapiens
  misc_RNA (1)...(19): siRNA sense strand
cuccucagcuccucaaaug

SEQ ID NO: 906685 - RNA, 19 nt, Homo sapiens
  misc_RNA (1)...(19): siRNA sense strand
gauccagccucgggacaug

SEQ ID NO: 906686 - RNA, 19 nt, Homo sapiens
  misc_RNA (1)...(19): siRNA sense strand
guggauagcuuugguuucg

SEQ ID NO: 906687 - RNA, 19 nt, Homo sapiens
  misc_RNA (1)...(19): siRNA sense strand
gaaaucgccacccauaugc

SEQ ID NO: 906688 - RNA, 19 nt, Homo sapiens
  misc_RNA (1)...(19): siRNA sense strand
guacaucagcgucccaaca

SEQ ID NO: 906689 - RNA, 19 nt, Homo sapiens
  misc_RNA (1)...(19): siRNA sense strand
gggccaagacuacgaguuc

SEQ ID NO: 906690 - RNA, 19 nt, Homo sapiens
  misc_RNA (1)...(19): siRNA sense strand
gccugugaguuaggaaaua

SEQ ID NO: 906691 - RNA, 19 nt, Homo sapiens
  misc_RNA (1)...(19): siRNA sense strand
aaaccacaauggcaucauc

SEQ ID NO: 906692 - RNA, 19 nt, Homo sapiens
  misc_RNA (1)...(19): siRNA sense strand
gcugagcugcccuccagua

SEQ ID NO: 906693 - RNA, 19 nt, Homo sapiens
  misc_RNA (1)...(19): siRNA sense strand
uagcuuugguuucggucua

SEQ ID NO: 906694 - RNA, 19 nt, Homo sapiens
  misc_RNA (1)...(19): siRNA sense strand
ccucagaguucacggacau

SEQ ID NO: 906695 - RNA, 19 nt, Homo sapiens
  misc_RNA (1)...(19): siRNA sense strand
uccaagaaccuuucccaaa

SEQ ID NO: 906696 - RNA, 19 nt, Homo sapiens
  misc_RNA (1)...(19): siRNA sense strand
ccucgcugaugcucacuuu

SEQ ID NO: 906697 - RNA, 19 nt, Homo sapiens
  misc_RNA (1)...(19): siRNA sense strand
gcuucuggcugugcgaauu

SEQ ID NO: 906698 - RNA, 19 nt, Homo sapiens
  misc_RNA (1)...(19): siRNA sense strand
gacugcgucuucauagaug

SEQ ID NO: 906699 - RNA, 19 nt, Homo sapiens
  misc_RNA (1)...(19): siRNA sense strand
gcagacacuuggcguucca

SEQ ID NO: 906700 - RNA, 19 nt, Homo sapiens
  misc_RNA (1)...(19): siRNA sense strand
gcagagcgcagagcuugga

SEQ ID NO: 906701 - RNA, 19 nt, Homo sapiens
  misc_RNA (1)...(19): siRNA sense strand
ccaagacuacgaguucaaa

SEQ ID NO: 906702 - RNA, 19 nt, Homo sapiens
  misc_RNA (1)...(19): siRNA sense strand
cagcugagggcuaccuuga

SEQ ID NO: 906703 - RNA, 19 nt, Homo sapiens
  misc_RNA (1)...(19): siRNA sense strand
ccucaggaagugacucuaa

SEQ ID NO: 906704 - RNA, 19 nt, Homo sapiens
  misc_RNA (1)...(19): siRNA sense strand
ccaacagccucagaguuca

SEQ ID NO: 906705 - RNA, 19 nt, Homo sapiens
  misc_RNA (1)...(19): siRNA sense strand
cccaacagccucagaguuc

SEQ ID NO: 906706 - RNA, 19 nt, Homo sapiens
  misc_RNA (1)...(19): siRNA sense strand
ggcuggugcuucuccugua

SEQ ID NO: 906707 - RNA, 19 nt, Homo sapiens
  misc_RNA (1)...(19): siRNA sense strand
cagcuccacugucguaugc

SEQ ID NO: 906708 - RNA, 19 nt, Homo sapiens
  misc_RNA (1)...(19): siRNA sense strand
cucaggaagugacucuaaa

SEQ ID NO: 906709 - RNA, 19 nt, Homo sapiens
  misc_RNA (1)...(19): siRNA sense strand
gcccugugcuuggaacuca

SEQ ID NO: 906710 - RNA, 19 nt, Homo sapiens
  misc_RNA (1)...(19): siRNA sense strand
ggacccuucugcugcuaca

SEQ ID NO: 906711 - RNA, 19 nt, Homo sapiens
  misc_RNA (1)...(19): siRNA sense strand
cuggaaaucgccacccaua

SEQ ID NO: 906712 - RNA, 19 nt, Homo sapiens
  misc_RNA (1)...(19): siRNA sense strand
ugacgaagggaccuacaug

SEQ ID NO: 906713 - RNA, 19 nt, Homo sapiens
  misc_RNA (1)...(19): siRNA sense strand
uguggugggugagcaguuu

SEQ ID NO: 906714 - RNA, 19 nt, Homo sapiens
  misc_RNA (1)...(19): siRNA sense strand
ccaggccucuucccucucu

SEQ ID NO: 906715 - RNA, 19 nt, Homo sapiens
  misc_RNA (1)...(19): siRNA sense strand
ccaagaacccagugagcau

SEQ ID NO: 906716 - RNA, 19 nt, Homo sapiens
  misc_RNA (1)...(19): siRNA sense strand
agacuacgaguucaaagug

SEQ ID NO: 906717 - RNA, 19 nt, Homo sapiens
  misc_RNA (1)...(19): siRNA sense strand
ggccaagacuacgaguuca

SEQ ID NO: 906718 - RNA, 19 nt, Homo sapiens
  misc_RNA (1)...(19): siRNA sense strand
gcuggugcuucuccuguag

SEQ ID NO: 906719 - RNA, 19 nt, Homo sapiens
  misc_RNA (1)...(19): siRNA sense strand
ggcaagagcagagaagagu

SEQ ID NO: 906720 - RNA, 19 nt, Homo sapiens
  misc_RNA (1)...(19): siRNA sense strand
gcaccccucuuuccucaug

SEQ ID NO: 906721 - RNA, 19 nt, Homo sapiens
  misc_RNA (1)...(19): siRNA sense strand
ccgggaggauuuccagauc

SEQ ID NO: 906722 - RNA, 19 nt, Homo sapiens
  misc_RNA (1)...(19): siRNA sense strand
ggcaauggcacugucuuug

SEQ ID NO: 906723 - RNA, 19 nt, Homo sapiens
  misc_RNA (1)...(19): siRNA sense strand
aaucuuacacggccuuguu

SEQ ID NO: 906724 - RNA, 19 nt, Homo sapiens
  misc_RNA (1)...(19): siRNA sense strand
gacgaagggaccuacaugu

SEQ ID NO: 906725 - RNA, 19 nt, Homo sapiens
  misc_RNA (1)...(19): siRNA sense strand
guccagcuccucacuguca

SEQ ID NO: 906726 - RNA, 19 nt, Homo sapiens
  misc_RNA (1)...(19): siRNA sense strand
gagccugggcaacacauca

SEQ ID NO: 906727 - RNA, 19 nt, Homo sapiens
  misc_RNA (1)...(19): siRNA sense strand
gagaagucagcuccacugu

SEQ ID NO: 906728 - RNA, 19 nt, Homo sapiens
  misc_RNA (1)...(19): siRNA sense strand
agucagcuccacugucgua

SEQ ID NO: 906729 - RNA, 19 nt, Homo sapiens
  misc_RNA (1)...(19): siRNA sense strand
ccugugaguuaggaaauag

SEQ ID NO: 906730 - RNA, 19 nt, Homo sapiens
  misc_RNA (1)...(19): siRNA sense strand
aaacacaggauggaucaca

SEQ ID NO: 906731 - RNA, 19 nt, Homo sapiens
  misc_RNA (1)...(19): siRNA sense strand
uggcaauggcacugucuuu

SEQ ID NO: 906732 - RNA, 19 nt, Homo sapiens
  misc_RNA (1)...(19): siRNA sense strand
gcugguuacucgucaucuc

SEQ ID NO: 906733 - RNA, 19 nt, Homo sapiens
  misc_RNA (1)...(19): siRNA sense strand
gaguuaggaaauagagguu

SEQ ID NO: 906734 - RNA, 19 nt, Homo sapiens
  misc_RNA (1)...(19): siRNA sense strand
gacagaagcuggagcaaga

SEQ ID NO: 906735 - RNA, 19 nt, Homo sapiens
  misc_RNA (1)...(19): siRNA sense strand
caacggucaggaaguauua

SEQ ID NO: 906736 - RNA, 19 nt, Homo sapiens
  misc_RNA (1)...(19): siRNA sense strand
caggaaguauuaaggaaga

SEQ ID NO: 906737 - RNA, 19 nt, Homo sapiens
  misc_RNA (1)...(19): siRNA sense strand
gaagcucgaccgccagaaa

SEQ ID NO: 906738 - RNA, 19 nt, Homo sapiens
  misc_RNA (1)...(19): siRNA sense strand
acucaacggucaggaagua

SEQ ID NO: 906739 - RNA, 19 nt, Homo sapiens
  misc_RNA (1)...(19): siRNA sense strand
gagcaagugacccgacuga

SEQ ID NO: 906740 - RNA, 19 nt, Homo sapiens
  misc_RNA (1)...(19): siRNA sense strand
ccaccaugcuggacucauc

SEQ ID NO: 906741 - RNA, 19 nt, Homo sapiens
  misc_RNA (1)...(19): siRNA sense strand
gucaggaaguauuaaggaa

SEQ ID NO: 906742 - RNA, 19 nt, Homo sapiens
  misc_RNA (1)...(19): siRNA sense strand
ggucaggaaguauuaagga

SEQ ID NO: 906743 - RNA, 19 nt, Homo sapiens
  misc_RNA (1)...(19): siRNA sense strand
gacugacgcugaagcucuu

SEQ ID NO: 906744 - RNA, 19 nt, Homo sapiens
  misc_RNA (1)...(19): siRNA sense strand
gcagagacuccgggaacaa

SEQ ID NO: 906745 - RNA, 19 nt, Homo sapiens
  misc_RNA (1)...(19): siRNA sense strand
cugaagcucuugggacaga

SEQ ID NO: 906746 - RNA, 19 nt, Homo sapiens
  misc_RNA (1)...(19): siRNA sense strand
ccacucauagcacagauuc

SEQ ID NO: 906747 - RNA, 19 nt, Homo sapiens
  misc_RNA (1)...(19): siRNA sense strand
ugacccgacugacgcugaa

SEQ ID NO: 906748 - RNA, 19 nt, Homo sapiens
  misc_RNA (1)...(19): siRNA sense strand
aaacuuccuucuccugacu

SEQ ID NO: 906749 - RNA, 19 nt, Homo sapiens
  misc_RNA (1)...(19): siRNA sense strand
gagggaccuucugcagaga

SEQ ID NO: 906750 - RNA, 19 nt, Homo sapiens
  misc_RNA (1)...(19): siRNA sense strand
ucaacggucaggaaguauu

SEQ ID NO: 906751 - RNA, 19 nt, Homo sapiens
  misc_RNA (1)...(19): siRNA sense strand
gaaguauuaaggaagacau

SEQ ID NO: 906752 - RNA, 19 nt, Homo sapiens
  misc_RNA (1)...(19): siRNA sense strand
gagcacagaucacaucaag

SEQ ID NO: 906753 - RNA, 19 nt, Homo sapiens
  misc_RNA (1)...(19): siRNA sense strand
gagaacagauaucuucauc

SEQ ID NO: 906754 - RNA, 19 nt, Homo sapiens
  misc_RNA (1)...(19): siRNA sense strand
gcacagaucacaucaagag

SEQ ID NO: 906755 - RNA, 19 nt, Homo sapiens
  misc_RNA (1)...(19): siRNA sense strand
gaucacaucaagagucuaa

SEQ ID NO: 906756 - RNA, 19 nt, Homo sapiens
  misc_RNA (1)...(19): siRNA sense strand
ggaacuuuaccaaggauua

SEQ ID NO: 906757 - RNA, 19 nt, Homo sapiens
  misc_RNA (1)...(19): siRNA sense strand
uaccaaggauuaaggauga

SEQ ID NO: 906758 - RNA, 19 nt, Homo sapiens
  misc_RNA (1)...(19): siRNA sense strand
uaacagaugucaguaggau

SEQ ID NO: 906759 - RNA, 19 nt, Homo sapiens
  misc_RNA (1)...(19): siRNA sense strand
gaacuuuaccaaggauuaa

SEQ ID NO: 906760 - RNA, 19 nt, Homo sapiens
  misc_RNA (1)...(19): siRNA sense strand
caucaagagucuaaauauc

SEQ ID NO: 906761 - RNA, 19 nt, Homo sapiens
  misc_RNA (1)...(19): siRNA sense strand
gauuaaggaugagcacaga

SEQ ID NO: 906762 - RNA, 19 nt, Homo sapiens
  misc_RNA (1)...(19): siRNA sense strand
gugcagaucagauuuggaa

SEQ ID NO: 906763 - RNA, 19 nt, Homo sapiens
  misc_RNA (1)...(19): siRNA sense strand
cagaucagauuuggaagug

SEQ ID NO: 906764 - RNA, 19 nt, Homo sapiens
  misc_RNA (1)...(19): siRNA sense strand
gagucuaaauaucacuuug

SEQ ID NO: 906765 - RNA, 19 nt, Homo sapiens
  misc_RNA (1)...(19): siRNA sense strand
ucaucuccuucaugcauua

SEQ ID NO: 906766 - RNA, 19 nt, Homo sapiens
  misc_RNA (1)...(19): siRNA sense strand
cacaucaagagucuaaaua

SEQ ID NO: 906767 - RNA, 19 nt, Homo sapiens
  misc_RNA (1)...(19): siRNA sense strand
caugcauuauccuuaguaa

SEQ ID NO: 906768 - RNA, 19 nt, Homo sapiens
  misc_RNA (1)...(19): siRNA sense strand
cagaucacaucaagagucu

SEQ ID NO: 906769 - RNA, 19 nt, Homo sapiens
  misc_RNA (1)...(19): siRNA sense strand
gcagaucagauuuggaagu

SEQ ID NO: 906770 - RNA, 19 nt, Homo sapiens
  misc_RNA (1)...(19): siRNA sense strand
gucuaaauaucacuuugga

SEQ ID NO: 906771 - RNA, 19 nt, Homo sapiens
  misc_RNA (1)...(19): siRNA sense strand
ggcagggacaccagaguuu

SEQ ID NO: 906772 - RNA, 19 nt, Homo sapiens
  misc_RNA (1)...(19): siRNA sense strand
ucacaucaagagucuaaau

SEQ ID NO: 906773 - RNA, 19 nt, Homo sapiens
  misc_RNA (1)...(19): siRNA sense strand
cuucaugcauuauccuuag

SEQ ID NO: 906774 - RNA, 19 nt, Homo sapiens
  misc_RNA (1)...(19): siRNA sense strand
ugcauuauccuuaguaaca

SEQ ID NO: 906775 - RNA, 19 nt, Homo sapiens
  misc_RNA (1)...(19): siRNA sense strand
gccaugugcagaucagauu

SEQ ID NO: 906776 - RNA, 19 nt, Homo sapiens
  misc_RNA (1)...(19): siRNA sense strand
aaacugguccaugcaagaa

SEQ ID NO: 906777 - RNA, 19 nt, Homo sapiens
  misc_RNA (1)...(19): siRNA sense strand
ucaagagucuaaauaucac

SEQ ID NO: 906778 - RNA, 19 nt, Homo sapiens
  misc_RNA (1)...(19): siRNA sense strand
cauuauccuuaguaacaga

SEQ ID NO: 906779 - RNA, 19 nt, Homo sapiens
  misc_RNA (1)...(19): siRNA sense strand
gcauuauccuuaguaacag

SEQ ID NO: 906780 - RNA, 19 nt, Homo sapiens
  misc_RNA (1)...(19): siRNA sense strand
gagccauuuuggaacuuua

SEQ ID NO: 906781 - RNA, 19 nt, Homo sapiens
  misc_RNA (1)...(19): siRNA sense strand
guaggauccagagccauuu

SEQ ID NO: 906782 - RNA, 19 nt, Homo sapiens
  misc_RNA (1)...(19): siRNA sense strand
uaaggaugagcacagauca

SEQ ID NO: 906783 - RNA, 19 nt, Homo sapiens
  misc_RNA (1)...(19): siRNA sense strand
gauaucuucaucuccuuca

SEQ ID NO: 906784 - RNA, 19 nt, Homo sapiens
  misc_RNA (1)...(19): siRNA sense strand
ucaugcauuauccuuagua

SEQ ID NO: 906785 - RNA, 19 nt, Homo sapiens
  misc_RNA (1)...(19): siRNA sense strand
gagaaucccucaccaauaa

SEQ ID NO: 906786 - RNA, 19 nt, Homo sapiens
  misc_RNA (1)...(19): siRNA sense strand
gccaguagcugcuuuaaag

SEQ ID NO: 906787 - RNA, 19 nt, Homo sapiens
  misc_RNA (1)...(19): siRNA sense strand
ccaauaaggaacuguguua

SEQ ID NO: 906788 - RNA, 19 nt, Homo sapiens
  misc_RNA (1)...(19): siRNA sense strand
caagagacaacagcgauua

SEQ ID NO: 906789 - RNA, 19 nt, Homo sapiens
  misc_RNA (1)...(19): siRNA sense strand
gcagaaggaccacaguaga

SEQ ID NO: 906790 - RNA, 19 nt, Homo sapiens
  misc_RNA (1)...(19): siRNA sense strand
auaaggaacuguguuaauc

SEQ ID NO: 906791 - RNA, 19 nt, Homo sapiens
  misc_RNA (1)...(19): siRNA sense strand
agacaacagcgauuacaaa

SEQ ID NO: 906792 - RNA, 19 nt, Homo sapiens
  misc_RNA (1)...(19): siRNA sense strand
agagaaucccucaccaaua

SEQ ID NO: 906793 - RNA, 19 nt, Homo sapiens
  misc_RNA (1)...(19): siRNA sense strand
gaaggaccacaguagagaa

SEQ ID NO: 906794 - RNA, 19 nt, Homo sapiens
  misc_RNA (1)...(19): siRNA sense strand
gggugggacugcagaagga

SEQ ID NO: 906795 - RNA, 19 nt, Homo sapiens
  misc_RNA (1)...(19): siRNA sense strand
uaaaggagggagggaguuu

SEQ ID NO: 906796 - RNA, 19 nt, Homo sapiens
  misc_RNA (1)...(19): siRNA sense strand
caauaaggaacuguguuaa

SEQ ID NO: 906797 - RNA, 19 nt, Homo sapiens
  misc_RNA (1)...(19): siRNA sense strand
gagacaacagcgauuacaa

SEQ ID NO: 906798 - RNA, 19 nt, Homo sapiens
  misc_RNA (1)...(19): siRNA sense strand
uaaggaacuguguuaauca

SEQ ID NO: 906799 - RNA, 19 nt, Homo sapiens
  misc_RNA (1)...(19): siRNA sense strand
guagagaaucccucaccaa

SEQ ID NO: 906800 - RNA, 19 nt, Homo sapiens
  misc_RNA (1)...(19): siRNA sense strand
uagagaaucccucaccaau

SEQ ID NO: 906801 - RNA, 19 nt, Homo sapiens
  misc_RNA (1)...(19): siRNA sense strand
ccaagagacaacagcgauu

SEQ ID NO: 906802 - RNA, 19 nt, Homo sapiens
  misc_RNA (1)...(19): siRNA sense strand
ggaccacaguagagaaucc

SEQ ID NO: 906803 - RNA, 19 nt, Homo sapiens
  misc_RNA (1)...(19): siRNA sense strand
aaucaggaguggccagaag

SEQ ID NO: 906804 - RNA, 19 nt, Homo sapiens
  misc_RNA (1)...(19): siRNA sense strand
caucagaggaagaucaaag

SEQ ID NO: 906805 - RNA, 19 nt, Homo sapiens
  misc_RNA (1)...(19): siRNA sense strand
gacaacagcgauuacaaac

SEQ ID NO: 906806 - RNA, 19 nt, Homo sapiens
  misc_RNA (1)...(19): siRNA sense strand
gagggaaacacuggucuag

SEQ ID NO: 906807 - RNA, 19 nt, Homo sapiens
  misc_RNA (1)...(19): siRNA sense strand
ccacggacucugccaguag

SEQ ID NO: 906808 - RNA, 19 nt, Homo sapiens
  misc_RNA (1)...(19): siRNA sense strand
agaaggaccacaguagaga

SEQ ID NO: 906809 - RNA, 19 nt, Homo sapiens
  misc_RNA (1)...(19): siRNA sense strand
cagaaggaccacaguagag

SEQ ID NO: 906810 - RNA, 19 nt, Homo sapiens
  misc_RNA (1)...(19): siRNA sense strand
caguagcugcuuuaaagga

SEQ ID NO: 906811 - RNA, 19 nt, Homo sapiens
  misc_RNA (1)...(19): siRNA sense strand
gcaugaagaccaccgguua

SEQ ID NO: 906812 - RNA, 19 nt, Homo sapiens
  misc_RNA (1)...(19): siRNA sense strand
caucaccucuuaaggcauu

SEQ ID NO: 906813 - RNA, 19 nt, Homo sapiens
  misc_RNA (1)...(19): siRNA sense strand
aggcagucaucaccucuua

SEQ ID NO: 906814 - RNA, 19 nt, Homo sapiens
  misc_RNA (1)...(19): siRNA sense strand
caggagccaugcaaagugu

SEQ ID NO: 906815 - RNA, 19 nt, Homo sapiens
  misc_RNA (1)...(19): siRNA sense strand
acccagaccugcugaagga

SEQ ID NO: 906816 - RNA, 19 nt, Homo sapiens
  misc_RNA (1)...(19): siRNA sense strand
ucagccaccugcaguuuca

SEQ ID NO: 906817 - RNA, 19 nt, Homo sapiens
  misc_RNA (1)...(19): siRNA sense strand
gcagucaucaccucuuaag

SEQ ID NO: 906818 - RNA, 19 nt, Homo sapiens
  misc_RNA (1)...(19): siRNA sense strand
ccaggagccaugcaaagug

SEQ ID NO: 906819 - RNA, 19 nt, Homo sapiens
  misc_RNA (1)...(19): siRNA sense strand
ggagccaugcaaaguguca

SEQ ID NO: 906820 - RNA, 19 nt, Homo sapiens
  misc_RNA (1)...(19): siRNA sense strand
gaugagggcuuuccacuug

SEQ ID NO: 906821 - RNA, 19 nt, Homo sapiens
  misc_RNA (1)...(19): siRNA sense strand
ggacaaggaugagggcuuu

SEQ ID NO: 906822 - RNA, 19 nt, Homo sapiens
  misc_RNA (1)...(19): siRNA sense strand
ggaggaauguggauaacaa

SEQ ID NO: 906823 - RNA, 19 nt, Homo sapiens
  misc_RNA (1)...(19): siRNA sense strand
ggaggaggaauguggauaa

SEQ ID NO: 906824 - RNA, 19 nt, Homo sapiens
  misc_RNA (1)...(19): siRNA sense strand
ggaugagggcuuuccacuu

SEQ ID NO: 906825 - RNA, 19 nt, Homo sapiens
  misc_RNA (1)...(19): siRNA sense strand
gaagaacauggaggaggaa

SEQ ID NO: 906826 - RNA, 19 nt, Homo sapiens
  misc_RNA (1)...(19): siRNA sense strand
gaggaggaauguggauaac

SEQ ID NO: 906827 - RNA, 19 nt, Homo sapiens
  misc_RNA (1)...(19): siRNA sense strand
gccuguguguuccaagcua

SEQ ID NO: 906828 - RNA, 19 nt, Homo sapiens
  misc_RNA (1)...(19): siRNA sense strand
gaaaaucgaagccauaaaa

SEQ ID NO: 906829 - RNA, 19 nt, Homo sapiens
  misc_RNA (1)...(19): siRNA sense strand
caucaacaccaacaucuuu

SEQ ID NO: 906830 - RNA, 19 nt, Homo sapiens
  misc_RNA (1)...(19): siRNA sense strand
ggaagaaaggacccgguuu

SEQ ID NO: 906831 - RNA, 19 nt, Homo sapiens
  misc_RNA (1)...(19): siRNA sense strand
gcagaggccaagaccguuu

SEQ ID NO: 906832 - RNA, 19 nt, Homo sapiens
  misc_RNA (1)...(19): siRNA sense strand
gaugagcgcagcccagaga

SEQ ID NO: 906833 - RNA, 19 nt, Homo sapiens
  misc_RNA (1)...(19): siRNA sense strand
ggacugggcguucaucaac

SEQ ID NO: 906834 - RNA, 19 nt, Homo sapiens
  misc_RNA (1)...(19): siRNA sense strand
gggaaggacugggcguuca

SEQ ID NO: 906835 - RNA, 19 nt, Homo sapiens
  misc_RNA (1)...(19): siRNA sense strand
gcagaaaaucgaagccaua

SEQ ID NO: 906836 - RNA, 19 nt, Homo sapiens
  misc_RNA (1)...(19): siRNA sense strand
ucagagcucagccggauga

SEQ ID NO: 906837 - RNA, 19 nt, Homo sapiens
  misc_RNA (1)...(19): siRNA sense strand
gggcguucaucaacaccaa

SEQ ID NO: 906838 - RNA, 19 nt, Homo sapiens
  misc_RNA (1)...(19): siRNA sense strand
gcugaggcgugagcaaugg

SEQ ID NO: 906839 - RNA, 19 nt, Homo sapiens
  misc_RNA (1)...(19): siRNA sense strand
ccaagaaggagaaaaugaa

SEQ ID NO: 906840 - RNA, 19 nt, Homo sapiens
  misc_RNA (1)...(19): siRNA sense strand
gcagaugcagcuggaagau

SEQ ID NO: 906841 - RNA, 19 nt, Homo sapiens
  misc_RNA (1)...(19): siRNA sense strand
gaagcugaggcgugagcaa

SEQ ID NO: 906842 - RNA, 19 nt, Homo sapiens
  misc_RNA (1)...(19): siRNA sense strand
gacugggcguucaucaaca

SEQ ID NO: 906843 - RNA, 19 nt, Homo sapiens
  misc_RNA (1)...(19): siRNA sense strand
ccagcgccuuggugcagaa

SEQ ID NO: 906844 - RNA, 19 nt, Homo sapiens
  misc_RNA (1)...(19): siRNA sense strand
ggaaggacugggcguucau

SEQ ID NO: 906845 - RNA, 19 nt, Homo sapiens
  misc_RNA (1)...(19): siRNA sense strand
gaaugaugcugcacgcuuu

SEQ ID NO: 906846 - RNA, 19 nt, Homo sapiens
  misc_RNA (1)...(19): siRNA sense strand
ucacagaucucgugguucu

SEQ ID NO: 906847 - RNA, 19 nt, Homo sapiens
  misc_RNA (1)...(19): siRNA sense strand
gcacugggacguucgcauu

SEQ ID NO: 906848 - RNA, 19 nt, Homo sapiens
  misc_RNA (1)...(19): siRNA sense strand
ccucacagaucucgugguu

SEQ ID NO: 906849 - RNA, 19 nt, Homo sapiens
  misc_RNA (1)...(19): siRNA sense strand
gaaccuguccaucguguac

SEQ ID NO: 906850 - RNA, 19 nt, Homo sapiens
  misc_RNA (1)...(19): siRNA sense strand
caacaagcacugggacguu

SEQ ID NO: 906851 - RNA, 19 nt, Homo sapiens
  misc_RNA (1)...(19): siRNA sense strand
gcgauccugucuccaaagu

SEQ ID NO: 906852 - RNA, 19 nt, Homo sapiens
  misc_RNA (1)...(19): siRNA sense strand
cgaccugaccuacggagaa

SEQ ID NO: 906853 - RNA, 19 nt, Homo sapiens
  misc_RNA (1)...(19): siRNA sense strand
gaccugaccuacggagaag

SEQ ID NO: 906854 - RNA, 19 nt, Homo sapiens
  misc_RNA (1)...(19): siRNA sense strand
gugcguggcccuaaacaag

SEQ ID NO: 906855 - RNA, 19 nt, Homo sapiens
  misc_RNA (1)...(19): siRNA sense strand
gccaccagcuggauuucuc

SEQ ID NO: 906856 - RNA, 19 nt, Homo sapiens
  misc_RNA (1)...(19): siRNA sense strand
gagagccggguaaccauca

SEQ ID NO: 906857 - RNA, 19 nt, Homo sapiens
  misc_RNA (1)...(19): siRNA sense strand
caaagccaagccucacaga

SEQ ID NO: 906858 - RNA, 19 nt, Homo sapiens
  misc_RNA (1)...(19): siRNA sense strand
ucuccaaagugcugcugaa

SEQ ID NO: 906859 - RNA, 19 nt, Homo sapiens
  misc_RNA (1)...(19): siRNA sense strand
aagccaagccucacagauc

SEQ ID NO: 906860 - RNA, 19 nt, Homo sapiens
  misc_RNA (1)...(19): siRNA sense strand
gcgacuuccugguggucaa

SEQ ID NO: 906861 - RNA, 19 nt, Homo sapiens
  misc_RNA (1)...(19): siRNA sense strand
aggcgauccugucuccaaa

SEQ ID NO: 906862 - RNA, 19 nt, Homo sapiens
  misc_RNA (1)...(19): siRNA sense strand
gccaaaggguuaagcauua

SEQ ID NO: 906863 - RNA, 19 nt, Homo sapiens
  misc_RNA (1)...(19): siRNA sense strand
cgaaggagguuacuaccaa

SEQ ID NO: 906864 - RNA, 19 nt, Homo sapiens
  misc_RNA (1)...(19): siRNA sense strand
uaaagcagaugucauucuu

SEQ ID NO: 906865 - RNA, 19 nt, Homo sapiens
  misc_RNA (1)...(19): siRNA sense strand
ggagguuacuaccaauuug

SEQ ID NO: 906866 - RNA, 19 nt, Homo sapiens
  misc_RNA (1)...(19): siRNA sense strand
ggagggcuguguuacaaug

SEQ ID NO: 906867 - RNA, 19 nt, Homo sapiens
  misc_RNA (1)...(19): siRNA sense strand
ggguuaagcauuagguuua

SEQ ID NO: 906868 - RNA, 19 nt, Homo sapiens
  misc_RNA (1)...(19): siRNA sense strand
gaaggccuuugucuuguug

SEQ ID NO: 906869 - RNA, 19 nt, Homo sapiens
  misc_RNA (1)...(19): siRNA sense strand
cgaaaucgguucagaucug

SEQ ID NO: 906870 - RNA, 19 nt, Homo sapiens
  misc_RNA (1)...(19): siRNA sense strand
guacaagccaccuaucuau

SEQ ID NO: 906871 - RNA, 19 nt, Homo sapiens
  misc_RNA (1)...(19): siRNA sense strand
ccaacugucucucaacuuc

SEQ ID NO: 906872 - RNA, 19 nt, Homo sapiens
  misc_RNA (1)...(19): siRNA sense strand
gacgaaggccuuugucuug

SEQ ID NO: 906873 - RNA, 19 nt, Homo sapiens
  misc_RNA (1)...(19): siRNA sense strand
gaaaucgguucagaucugu

SEQ ID NO: 906874 - RNA, 19 nt, Homo sapiens
  misc_RNA (1)...(19): siRNA sense strand
gcagaugucauucuugugu

SEQ ID NO: 906875 - RNA, 19 nt, Homo sapiens
  misc_RNA (1)...(19): siRNA sense strand
gaaggagguuacuaccaau

SEQ ID NO: 906876 - RNA, 19 nt, Homo sapiens
  misc_RNA (1)...(19): siRNA sense strand
ggauuugugccguguuaua

SEQ ID NO: 906877 - RNA, 19 nt, Homo sapiens
  misc_RNA (1)...(19): siRNA sense strand
gcaccuaccacuccaccua

SEQ ID NO: 906878 - RNA, 19 nt, Homo sapiens
  misc_RNA (1)...(19): siRNA sense strand
ucucucaacuucuacacua

SEQ ID NO: 906879 - RNA, 19 nt, Homo sapiens
  misc_RNA (1)...(19): siRNA sense strand
gccaaguucuccaucaaga

SEQ ID NO: 906880 - RNA, 19 nt, Homo sapiens
  misc_RNA (1)...(19): siRNA sense strand
gguuuaaaguggucuugaa

SEQ ID NO: 906881 - RNA, 19 nt, Homo sapiens
  misc_RNA (1)...(19): siRNA sense strand
gaacccagucugaguacaa

SEQ ID NO: 906882 - RNA, 19 nt, Homo sapiens
  misc_RNA (1)...(19): siRNA sense strand
aagcagaugucauucuugu

SEQ ID NO: 906883 - RNA, 19 nt, Homo sapiens
  misc_RNA (1)...(19): siRNA sense strand
cgaaggccuuugucuuguu

SEQ ID NO: 906884 - RNA, 19 nt, Homo sapiens
  misc_RNA (1)...(19): siRNA sense strand
aaaccguccucgugcauga

SEQ ID NO: 906885 - RNA, 19 nt, Homo sapiens
  misc_RNA (1)...(19): siRNA sense strand
aaacucuccugcccaguga

SEQ ID NO: 906886 - RNA, 19 nt, Homo sapiens
  misc_RNA (1)...(19): siRNA sense strand
gggcaaccuuccaauucaa

SEQ ID NO: 906887 - RNA, 19 nt, Homo sapiens
  misc_RNA (1)...(19): siRNA sense strand
aaaccagccugucaacuac

SEQ ID NO: 906888 - RNA, 19 nt, Homo sapiens
  misc_RNA (1)...(19): siRNA sense strand
ccaccuaucuaucacuucu

SEQ ID NO: 906889 - RNA, 19 nt, Homo sapiens
  misc_RNA (1)...(19): siRNA sense strand
ccagugaccugcgauaaac

SEQ ID NO: 906890 - RNA, 19 nt, Homo sapiens
  misc_RNA (1)...(19): siRNA sense strand
aaucgugugcuccaaauaa

SEQ ID NO: 906891 - RNA, 19 nt, Homo sapiens
  misc_RNA (1)...(19): siRNA sense strand
cucuauagcuucucagaug

SEQ ID NO: 906892 - RNA, 19 nt, Homo sapiens
  misc_RNA (1)...(19): siRNA sense strand
acaccacagugauuguaaa

SEQ ID NO: 906893 - RNA, 19 nt, Homo sapiens
  misc_RNA (1)...(19): siRNA sense strand
ccaaaggguuaagcauuag

SEQ ID NO: 906894 - RNA, 19 nt, Homo sapiens
  misc_RNA (1)...(19): siRNA sense strand
agaugucauucuuguguuu

SEQ ID NO: 906895 - RNA, 19 nt, Homo sapiens
  misc_RNA (1)...(19): siRNA sense strand
ccaaauaaagcagauguca

SEQ ID NO: 906896 - RNA, 19 nt, Homo sapiens
  misc_RNA (1)...(19): siRNA sense strand
caaugacaccacagugauu

SEQ ID NO: 906897 - RNA, 19 nt, Homo sapiens
  misc_RNA (1)...(19): siRNA sense strand
aguggcagcugaucaacaa

SEQ ID NO: 906898 - RNA, 19 nt, Homo sapiens
  misc_RNA (1)...(19): siRNA sense strand
ucacaucguuuccaaugac

SEQ ID NO: 906899 - RNA, 19 nt, Homo sapiens
  misc_RNA (1)...(19): siRNA sense strand
aguggaagccaaaggguua

SEQ ID NO: 906900 - RNA, 19 nt, Homo sapiens
  misc_RNA (1)...(19): siRNA sense strand
ugacgaaggccuuugucuu

SEQ ID NO: 906901 - RNA, 19 nt, Homo sapiens
  misc_RNA (1)...(19): siRNA sense strand
ucggagggcuguguuacaa

SEQ ID NO: 906902 - RNA, 19 nt, Homo sapiens
  misc_RNA (1)...(19): siRNA sense strand
cuacacuaaugccaaguuc

SEQ ID NO: 906903 - RNA, 19 nt, Homo sapiens
  misc_RNA (1)...(19): siRNA sense strand
ucccagauuuaucaccuaa

SEQ ID NO: 906904 - RNA, 19 nt, Homo sapiens
  misc_RNA (1)...(19): siRNA sense strand
aauuugugaucccagauuu

SEQ ID NO: 906905 - RNA, 19 nt, Homo sapiens
  misc_RNA (1)...(19): siRNA sense strand
ccacgaaggagguuacuac

SEQ ID NO: 906906 - RNA, 19 nt, Homo sapiens
  misc_RNA (1)...(19): siRNA sense strand
guggaacccagucugagua

SEQ ID NO: 906907 - RNA, 19 nt, Homo sapiens
  misc_RNA (1)...(19): siRNA sense strand
caucugcgacagugagaaa

SEQ ID NO: 906908 - RNA, 19 nt, Homo sapiens
  misc_RNA (1)...(19): siRNA sense strand
cagggcaaccuuccaauuc

SEQ ID NO: 906909 - RNA, 19 nt, Homo sapiens
  misc_RNA (1)...(19): siRNA sense strand
cagaugucauucuuguguu

SEQ ID NO: 906910 - RNA, 19 nt, Homo sapiens
  misc_RNA (1)...(19): siRNA sense strand
acaagccaccuaucuauca

SEQ ID NO: 906911 - RNA, 19 nt, Homo sapiens
  misc_RNA (1)...(19): siRNA sense strand
acagucacaucguuuccaa

SEQ ID NO: 906912 - RNA, 19 nt, Homo sapiens
  misc_RNA (1)...(19): siRNA sense strand
ggggauuugugccguguua

SEQ ID NO: 906913 - RNA, 19 nt, Homo sapiens
  misc_RNA (1)...(19): siRNA sense strand
uuaaaguggucuugaacag

SEQ ID NO: 906914 - RNA, 19 nt, Homo sapiens
  misc_RNA (1)...(19): siRNA sense strand
ccaaaaccaucaucaccaa

SEQ ID NO: 906915 - RNA, 19 nt, Homo sapiens
  misc_RNA (1)...(19): siRNA sense strand
gacaccacagugauuguaa

SEQ ID NO: 906916 - RNA, 19 nt, Homo sapiens
  misc_RNA (1)...(19): siRNA sense strand
caaauaaagcagaugucau

SEQ ID NO: 906917 - RNA, 19 nt, Homo sapiens
  misc_RNA (1)...(19): siRNA sense strand
ucacagggcaaccuuccaa

SEQ ID NO: 906918 - RNA, 19 nt, Homo sapiens
  misc_RNA (1)...(19): siRNA sense strand
ccaaugacaccacagugau

SEQ ID NO: 906919 - RNA, 19 nt, Homo sapiens
  misc_RNA (1)...(19): siRNA sense strand
cuucuacagucacaucguu

SEQ ID NO: 906920 - RNA, 19 nt, Homo sapiens
  misc_RNA (1)...(19): siRNA sense strand
caauuugugaucccagauu

SEQ ID NO: 906921 - RNA, 19 nt, Homo sapiens
  misc_RNA (1)...(19): siRNA sense strand
ugacaccacagugauugua

SEQ ID NO: 906922 - RNA, 19 nt, Homo sapiens
  misc_RNA (1)...(19): siRNA sense strand
gcaugagaaugggagagau

SEQ ID NO: 906923 - RNA, 19 nt, Homo sapiens
  misc_RNA (1)...(19): siRNA sense strand
gagcaugggcacauuugag

SEQ ID NO: 906924 - RNA, 19 nt, Homo sapiens
  misc_RNA (1)...(19): siRNA sense strand
gagguuacuaccaauuugu

SEQ ID NO: 906925 - RNA, 19 nt, Homo sapiens
  misc_RNA (1)...(19): siRNA sense strand
gagaaugggagagaucaca

SEQ ID NO: 906926 - RNA, 19 nt, Homo sapiens
  misc_RNA (1)...(19): siRNA sense strand
ucuaucacuucuacaguca

SEQ ID NO: 906927 - RNA, 19 nt, Homo sapiens
  misc_RNA (1)...(19): siRNA sense strand
ggagcaugggcacauuuga

SEQ ID NO: 906928 - RNA, 19 nt, Homo sapiens
  misc_RNA (1)...(19): siRNA sense strand
gucacaucguuuccaauga

SEQ ID NO: 906929 - RNA, 19 nt, Homo sapiens
  misc_RNA (1)...(19): siRNA sense strand
gaguacaagccaccuaucu

SEQ ID NO: 906930 - RNA, 19 nt, Homo sapiens
  misc_RNA (1)...(19): siRNA sense strand
agggcaaccuuccaauuca

SEQ ID NO: 906931 - RNA, 19 nt, Homo sapiens
  misc_RNA (1)...(19): siRNA sense strand
gaagccaaaggguuaagca

SEQ ID NO: 906932 - RNA, 19 nt, Homo sapiens
  misc_RNA (1)...(19): siRNA sense strand
gggagcaugggcacauuug

SEQ ID NO: 906933 - RNA, 19 nt, Homo sapiens
  misc_RNA (1)...(19): siRNA sense strand
aaaaccagccugucaacua

SEQ ID NO: 906934 - RNA, 19 nt, Homo sapiens
  misc_RNA (1)...(19): siRNA sense strand
ucuauagcuucucagaugu

SEQ ID NO: 906935 - RNA, 19 nt, Homo sapiens
  misc_RNA (1)...(19): siRNA sense strand
aacugucucucaacuucua

SEQ ID NO: 906936 - RNA, 19 nt, Homo sapiens
  misc_RNA (1)...(19): siRNA sense strand
uaucacuucuacagucaca

SEQ ID NO: 906937 - RNA, 19 nt, Homo sapiens
  misc_RNA (1)...(19): siRNA sense strand
gauuugugccguguuauag

SEQ ID NO: 906938 - RNA, 19 nt, Homo sapiens
  misc_RNA (1)...(19): siRNA sense strand
gcaaccuuccaauucaaug

SEQ ID NO: 906939 - RNA, 19 nt, Homo sapiens
  misc_RNA (1)...(19): siRNA sense strand
gagaucacagggcaaccuu

SEQ ID NO: 906940 - RNA, 19 nt, Homo sapiens
  misc_RNA (1)...(19): siRNA sense strand
aaucgguucagaucuguuu

SEQ ID NO: 906941 - RNA, 19 nt, Homo sapiens
  misc_RNA (1)...(19): siRNA sense strand
cccagugaccugcgauaaa

SEQ ID NO: 906942 - RNA, 19 nt, Homo sapiens
  misc_RNA (1)...(19): siRNA sense strand
gcccagugaccugcgauaa

SEQ ID NO: 906943 - RNA, 19 nt, Homo sapiens
  misc_RNA (1)...(19): siRNA sense strand
aguacaagccaccuaucua

SEQ ID NO: 906944 - RNA, 19 nt, Homo sapiens
  misc_RNA (1)...(19): siRNA sense strand
acagggcaaccuuccaauu

SEQ ID NO: 906945 - RNA, 19 nt, Homo sapiens
  misc_RNA (1)...(19): siRNA sense strand
cuaccacuccaccuacuug

SEQ ID NO: 906946 - RNA, 19 nt, Homo sapiens
  misc_RNA (1)...(19): siRNA sense strand
agucacaucguuuccaaug

SEQ ID NO: 906947 - RNA, 19 nt, Homo sapiens
  misc_RNA (1)...(19): siRNA sense strand
uauagcuucucagauguuc

SEQ ID NO: 906948 - RNA, 19 nt, Homo sapiens
  misc_RNA (1)...(19): siRNA sense strand
uuuccagucucuauagcuu

SEQ ID NO: 906949 - RNA, 19 nt, Homo sapiens
  misc_RNA (1)...(19): siRNA sense strand
acgaaggccuuugucuugu

SEQ ID NO: 906950 - RNA, 19 nt, Homo sapiens
  misc_RNA (1)...(19): siRNA sense strand
uccaaugacaccacaguga

SEQ ID NO: 906951 - RNA, 19 nt, Homo sapiens
  misc_RNA (1)...(19): siRNA sense strand
agacaaagcucaucacuua

SEQ ID NO: 906952 - RNA, 19 nt, Homo sapiens
  misc_RNA (1)...(19): siRNA sense strand
gaaagacccuauaagugua

SEQ ID NO: 906953 - RNA, 19 nt, Homo sapiens
  misc_RNA (1)...(19): siRNA sense strand
gagaaacccuauauaugua

SEQ ID NO: 906954 - RNA, 19 nt, Homo sapiens
  misc_RNA (1)...(19): siRNA sense strand
gaaagauccugcauauaug

SEQ ID NO: 906955 - RNA, 19 nt, Homo sapiens
  misc_RNA (1)...(19): siRNA sense strand
gggaaagccuucagccaua

SEQ ID NO: 906956 - RNA, 19 nt, Homo sapiens
  misc_RNA (1)...(19): siRNA sense strand
ggucaucccuuacuaauca

SEQ ID NO: 906957 - RNA, 19 nt, Homo sapiens
  misc_RNA (1)...(19): siRNA sense strand
caacagagauuugcuaaag

SEQ ID NO: 906958 - RNA, 19 nt, Homo sapiens
  misc_RNA (1)...(19): siRNA sense strand
ucagaaagauccugcauau

SEQ ID NO: 906959 - RNA, 19 nt, Homo sapiens
  misc_RNA (1)...(19): siRNA sense strand
gcacaucaaagaauucaua

SEQ ID NO: 906960 - RNA, 19 nt, Homo sapiens
  misc_RNA (1)...(19): siRNA sense strand
gagaaaugcuauaggugua

SEQ ID NO: 906961 - RNA, 19 nt, Homo sapiens
  misc_RNA (1)...(19): siRNA sense strand
ggagagaaacccuauauau

SEQ ID NO: 906962 - RNA, 19 nt, Homo sapiens
  misc_RNA (1)...(19): siRNA sense strand
ccaaaguucugcucuuauu

SEQ ID NO: 906963 - RNA, 19 nt, Homo sapiens
  misc_RNA (1)...(19): siRNA sense strand
gagaaacccuaugaaugua

SEQ ID NO: 906964 - RNA, 19 nt, Homo sapiens
  misc_RNA (1)...(19): siRNA sense strand
agaaagauccugcauauau

SEQ ID NO: 906965 - RNA, 19 nt, Homo sapiens
  misc_RNA (1)...(19): siRNA sense strand
gcagagaaacgcuauaaau

SEQ ID NO: 906966 - RNA, 19 nt, Homo sapiens
  misc_RNA (1)...(19): siRNA sense strand
ggagaaagacccuauaagu

SEQ ID NO: 906967 - RNA, 19 nt, Homo sapiens
  misc_RNA (1)...(19): siRNA sense strand
caacaucaaagaacucaua

SEQ ID NO: 906968 - RNA, 19 nt, Homo sapiens
  misc_RNA (1)...(19): siRNA sense strand
gagaaacgcuauaaaugca

SEQ ID NO: 906969 - RNA, 19 nt, Homo sapiens
  misc_RNA (1)...(19): siRNA sense strand
gagagaaacccuauauaug

SEQ ID NO: 906970 - RNA, 19 nt, Homo sapiens
  misc_RNA (1)...(19): siRNA sense strand
caacaucagaggauucaua

SEQ ID NO: 906971 - RNA, 19 nt, Homo sapiens
  misc_RNA (1)...(19): siRNA sense strand
gagagaaacccuaugaaug

SEQ ID NO: 906972 - RNA, 19 nt, Homo sapiens
  misc_RNA (1)...(19): siRNA sense strand
gaaaugcuauagguguaaa

SEQ ID NO: 906973 - RNA, 19 nt, Homo sapiens
  misc_RNA (1)...(19): siRNA sense strand
gagaaaccauaucgauguu

SEQ ID NO: 906974 - RNA, 19 nt, Homo sapiens
  misc_RNA (1)...(19): siRNA sense strand
gagaaagacccuauaagug

SEQ ID NO: 906975 - RNA, 19 nt, Homo sapiens
  misc_RNA (1)...(19): siRNA sense strand
gguaaauccuucagucgaa

SEQ ID NO: 906976 - RNA, 19 nt, Homo sapiens
  misc_RNA (1)...(19): siRNA sense strand
gaauguggcaacaccuuua

SEQ ID NO: 906977 - RNA, 19 nt, Homo sapiens
  misc_RNA (1)...(19): siRNA sense strand
ccaaagugcagcucuuaua

SEQ ID NO: 906978 - RNA, 19 nt, Homo sapiens
  misc_RNA (1)...(19): siRNA sense strand
gagaaugcauacuggagaa

SEQ ID NO: 906979 - RNA, 19 nt, Homo sapiens
  misc_RNA (1)...(19): siRNA sense strand
gcucaucccuucguuauca

SEQ ID NO: 906980 - RNA, 19 nt, Homo sapiens
  misc_RNA (1)...(19): siRNA sense strand
ggcaacaccuuuaagucua

SEQ ID NO: 906981 - RNA, 19 nt, Homo sapiens
  misc_RNA (1)...(19): siRNA sense strand
cugcauauaugaagagaaa

SEQ ID NO: 906982 - RNA, 19 nt, Homo sapiens
  misc_RNA (1)...(19): siRNA sense strand
ggagagaaacccuaugaau

SEQ ID NO: 906983 - RNA, 19 nt, Homo sapiens
  misc_RNA (1)...(19): siRNA sense strand
caaagcucaucacuuauug

SEQ ID NO: 906984 - RNA, 19 nt, Homo sapiens
  misc_RNA (1)...(19): siRNA sense strand
caacaucagagaaugcaua

SEQ ID NO: 906985 - RNA, 19 nt, Homo sapiens
  misc_RNA (1)...(19): siRNA sense strand
ggaaaagccuucagacaga

SEQ ID NO: 906986 - RNA, 19 nt, Homo sapiens
  misc_RNA (1)...(19): siRNA sense strand
acagagauuugcuaaagaa

SEQ ID NO: 906987 - RNA, 19 nt, Homo sapiens
  misc_RNA (1)...(19): siRNA sense strand
ccauaucgauguuuagaau

SEQ ID NO: 906988 - RNA, 19 nt, Homo sapiens
  misc_RNA (1)...(19): siRNA sense strand
ugaaugugguaaagccuua

SEQ ID NO: 906989 - RNA, 19 nt, Homo sapiens
  misc_RNA (1)...(19): siRNA sense strand
cauagugcaucccuuugua

SEQ ID NO: 906990 - RNA, 19 nt, Homo sapiens
  misc_RNA (1)...(19): siRNA sense strand
gaacuucauaucagaaaga

SEQ ID NO: 906991 - RNA, 19 nt, Homo sapiens
  misc_RNA (1)...(19): siRNA sense strand
gaaaucagucuucauuaag

SEQ ID NO: 906992 - RNA, 19 nt, Homo sapiens
  misc_RNA (1)...(19): siRNA sense strand
agagaaacccuauauaugu

SEQ ID NO: 906993 - RNA, 19 nt, Homo sapiens
  misc_RNA (1)...(19): siRNA sense strand
agccagaggucaucccuua

SEQ ID NO: 906994 - RNA, 19 nt, Homo sapiens
  misc_RNA (1)...(19): siRNA sense strand
gaaacccuaugaauguaau

SEQ ID NO: 906995 - RNA, 19 nt, Homo sapiens
  misc_RNA (1)...(19): siRNA sense strand
uaaagaaugugguaaaucc

SEQ ID NO: 906996 - RNA, 19 nt, Homo sapiens
  misc_RNA (1)...(19): siRNA sense strand
gauguaagagcacaccuaa

SEQ ID NO: 906997 - RNA, 19 nt, Homo sapiens
  misc_RNA (1)...(19): siRNA sense strand
gugcagcucuuauacaaca

SEQ ID NO: 906998 - RNA, 19 nt, Homo sapiens
  misc_RNA (1)...(19): siRNA sense strand
agaaagacccuauaagugu

SEQ ID NO: 906999 - RNA, 19 nt, Homo sapiens
  misc_RNA (1)...(19): siRNA sense strand
ggagagaaaccauaucgau

SEQ ID NO: 907000 - RNA, 19 nt, Homo sapiens
  misc_RNA (1)...(19): siRNA sense strand
gagagaagccuuuuaaaug

SEQ ID NO: 907001 - RNA, 19 nt, Homo sapiens
  misc_RNA (1)...(19): siRNA sense strand
agagaaacccuaugaaugu

SEQ ID NO: 907002 - RNA, 19 nt, Homo sapiens
  misc_RNA (1)...(19): siRNA sense strand
cuuaauagacaccgaauaa

SEQ ID NO: 907003 - RNA, 19 nt, Homo sapiens
  misc_RNA (1)...(19): siRNA sense strand
gagaaaagcccuauagaug

SEQ ID NO: 907004 - RNA, 19 nt, Homo sapiens
  misc_RNA (1)...(19): siRNA sense strand
ccacucaacacuuauuauu

SEQ ID NO: 907005 - RNA, 19 nt, Homo sapiens
  misc_RNA (1)...(19): siRNA sense strand
cagagaaacgcuauaaaug

SEQ ID NO: 907006 - RNA, 19 nt, Homo sapiens
  misc_RNA (1)...(19): siRNA sense strand
gcaacaccuuuaagucuag

SEQ ID NO: 907007 - RNA, 19 nt, Homo sapiens
  misc_RNA (1)...(19): siRNA sense strand
guucugcucuuauucaaca

SEQ ID NO: 907008 - RNA, 19 nt, Homo sapiens
  misc_RNA (1)...(19): siRNA sense strand
uaaagaaacagcaggacaa

SEQ ID NO: 907009 - RNA, 19 nt, Homo sapiens
  misc_RNA (1)...(19): siRNA sense strand
acucaucgcuuaguaauca

SEQ ID NO: 907010 - RNA, 19 nt, Homo sapiens
  misc_RNA (1)...(19): siRNA sense strand
caaagucaacucaaacuca

SEQ ID NO: 907011 - RNA, 19 nt, Homo sapiens
  misc_RNA (1)...(19): siRNA sense strand
ccugggagguggagaaaga

SEQ ID NO: 907012 - RNA, 19 nt, Homo sapiens
  misc_RNA (1)...(19): siRNA sense strand
ggaaagccuucagccauag

SEQ ID NO: 907013 - RNA, 19 nt, Homo sapiens
  misc_RNA (1)...(19): siRNA sense strand
uaaaugcaguacaugugaa

SEQ ID NO: 907014 - RNA, 19 nt, Homo sapiens
  misc_RNA (1)...(19): siRNA sense strand
gagaagccuuuuaaaugua

SEQ ID NO: 907015 - RNA, 19 nt, Homo sapiens
  misc_RNA (1)...(19): siRNA sense strand
agguguaacucaucgcuua

SEQ ID NO: 907016 - RNA, 19 nt, Homo sapiens
  misc_RNA (1)...(19): siRNA sense strand
gacaaaacauucaggugua

SEQ ID NO: 907017 - RNA, 19 nt, Homo sapiens
  misc_RNA (1)...(19): siRNA sense strand
gauccugcauauaugaaga

SEQ ID NO: 907018 - RNA, 19 nt, Homo sapiens
  misc_RNA (1)...(19): siRNA sense strand
acaaagcucaucacuuauu

SEQ ID NO: 907019 - RNA, 19 nt, Homo sapiens
  misc_RNA (1)...(19): siRNA sense strand
caacucaaacucaggauuc

SEQ ID NO: 907020 - RNA, 19 nt, Homo sapiens
  misc_RNA (1)...(19): siRNA sense strand
gggaugugaugcuggagaa

SEQ ID NO: 907021 - RNA, 19 nt, Homo sapiens
  misc_RNA (1)...(19): siRNA sense strand
uuacagcacuucccuuucu

SEQ ID NO: 907022 - RNA, 19 nt, Homo sapiens
  misc_RNA (1)...(19): siRNA sense strand
caucaaagaauucauacug

SEQ ID NO: 907023 - RNA, 19 nt, Homo sapiens
  misc_RNA (1)...(19): siRNA sense strand
cacaauucaucccuucgua

SEQ ID NO: 907024 - RNA, 19 nt, Homo sapiens
  misc_RNA (1)...(19): siRNA sense strand
gaaaagcccuauagaugca

SEQ ID NO: 907025 - RNA, 19 nt, Homo sapiens
  misc_RNA (1)...(19): siRNA sense strand
agccaaaguucugcucuua

SEQ ID NO: 907026 - RNA, 19 nt, Homo sapiens
  misc_RNA (1)...(19): siRNA sense strand
guggagaaaugcuauaggu

SEQ ID NO: 907027 - RNA, 19 nt, Homo sapiens
  misc_RNA (1)...(19): siRNA sense strand
cagcagagaaacgcuauaa

SEQ ID NO: 907028 - RNA, 19 nt, Homo sapiens
  misc_RNA (1)...(19): siRNA sense strand
cagaggucaucccuuacua

SEQ ID NO: 907029 - RNA, 19 nt, Homo sapiens
  misc_RNA (1)...(19): siRNA sense strand
gcaugugggaaacucuuua

SEQ ID NO: 907030 - RNA, 19 nt, Homo sapiens
  misc_RNA (1)...(19): siRNA sense strand
uaacgaaugugacaaaaca

SEQ ID NO: 907031 - RNA, 19 nt, Homo sapiens
  misc_RNA (1)...(19): siRNA sense strand
gaaaauucaucucagaaag

SEQ ID NO: 907032 - RNA, 19 nt, Homo sapiens
  misc_RNA (1)...(19): siRNA sense strand
ucaagaaaauccccauaaa

SEQ ID NO: 907033 - RNA, 19 nt, Homo sapiens
  misc_RNA (1)...(19): siRNA sense strand
caauucaucccuucguaaa

SEQ ID NO: 907034 - RNA, 19 nt, Homo sapiens
  misc_RNA (1)...(19): siRNA sense strand
guagauagaagccauaaaa

SEQ ID NO: 907035 - RNA, 19 nt, Homo sapiens
  misc_RNA (1)...(19): siRNA sense strand
gaggauucauacaggagaa

SEQ ID NO: 907036 - RNA, 19 nt, Homo sapiens
  misc_RNA (1)...(19): siRNA sense strand
gcgaauucauacuggagaa

SEQ ID NO: 907037 - RNA, 19 nt, Homo sapiens
  misc_RNA (1)...(19): siRNA sense strand
gaaagcuggcuccuucuca

SEQ ID NO: 907038 - RNA, 19 nt, Homo sapiens
  misc_RNA (1)...(19): siRNA sense strand
guaacucaucgcuuaguaa

SEQ ID NO: 907039 - RNA, 19 nt, Homo sapiens
  misc_RNA (1)...(19): siRNA sense strand
gcucuuauucaacaucaaa

SEQ ID NO: 907040 - RNA, 19 nt, Homo sapiens
  misc_RNA (1)...(19): siRNA sense strand
gcucuuauacaacaucaga

SEQ ID NO: 907041 - RNA, 19 nt, Homo sapiens
  misc_RNA (1)...(19): siRNA sense strand
aagugcagcucuuauacaa

SEQ ID NO: 907042 - RNA, 19 nt, Homo sapiens
  misc_RNA (1)...(19): siRNA sense strand
ggccaaagugcagcucuua

SEQ ID NO: 907043 - RNA, 19 nt, Homo sapiens
  misc_RNA (1)...(19): siRNA sense strand
caucagagaaugcauacug

SEQ ID NO: 907044 - RNA, 19 nt, Homo sapiens
  misc_RNA (1)...(19): siRNA sense strand
gaacucauacaggagagaa

SEQ ID NO: 907045 - RNA, 19 nt, Homo sapiens
  misc_RNA (1)...(19): siRNA sense strand
uguaacucaucgcuuagua

SEQ ID NO: 907046 - RNA, 19 nt, Homo sapiens
  misc_RNA (1)...(19): siRNA sense strand
gagugccucucuuauucaa

SEQ ID NO: 907047 - RNA, 19 nt, Homo sapiens
  misc_RNA (1)...(19): siRNA sense strand
ggagagaagccuuuuaaau

SEQ ID NO: 907048 - RNA, 19 nt, Homo sapiens
  misc_RNA (1)...(19): siRNA sense strand
ggacccauacuguggagaa

SEQ ID NO: 907049 - RNA, 19 nt, Homo sapiens
  misc_RNA (1)...(19): siRNA sense strand
uagaaugugggaugucuuu

SEQ ID NO: 907050 - RNA, 19 nt, Homo sapiens
  misc_RNA (1)...(19): siRNA sense strand
ucacuuauugcacaucaaa

SEQ ID NO: 907051 - RNA, 19 nt, Homo sapiens
  misc_RNA (1)...(19): siRNA sense strand
gaagcaggcugacaagaaa

SEQ ID NO: 907052 - RNA, 19 nt, Homo sapiens
  misc_RNA (1)...(19): siRNA sense strand
ucaauuugcugcucagaua

SEQ ID NO: 907053 - RNA, 19 nt, Homo sapiens
  misc_RNA (1)...(19): siRNA sense strand
ggagacagcuuucauugca

SEQ ID NO: 907054 - RNA, 19 nt, Homo sapiens
  misc_RNA (1)...(19): siRNA sense strand
gauuaaagcugaguaugaa

SEQ ID NO: 907055 - RNA, 19 nt, Homo sapiens
  misc_RNA (1)...(19): siRNA sense strand
gaugaaacucugaggauua

SEQ ID NO: 907056 - RNA, 19 nt, Homo sapiens
  misc_RNA (1)...(19): siRNA sense strand
gcucagauauuuggguuaa

SEQ ID NO: 907057 - RNA, 19 nt, Homo sapiens
  misc_RNA (1)...(19): siRNA sense strand
caaggaaggauauaaguuu

SEQ ID NO: 907058 - RNA, 19 nt, Homo sapiens
  misc_RNA (1)...(19): siRNA sense strand
caaaagaagucuacgaauu

SEQ ID NO: 907059 - RNA, 19 nt, Homo sapiens
  misc_RNA (1)...(19): siRNA sense strand
acacauggauuuccuugaa

SEQ ID NO: 907060 - RNA, 19 nt, Homo sapiens
  misc_RNA (1)...(19): siRNA sense strand
ugaauuugguguugaugua

SEQ ID NO: 907061 - RNA, 19 nt, Homo sapiens
  misc_RNA (1)...(19): siRNA sense strand
ggauuaaagcugaguauga

SEQ ID NO: 907062 - RNA, 19 nt, Homo sapiens
  misc_RNA (1)...(19): siRNA sense strand
gugaaaugauuccaauuga

SEQ ID NO: 907063 - RNA, 19 nt, Homo sapiens
  misc_RNA (1)...(19): siRNA sense strand
aagcugcaaucucaaauaa

SEQ ID NO: 907064 - RNA, 19 nt, Homo sapiens
  misc_RNA (1)...(19): siRNA sense strand
gaauggguuugcagaagaa

SEQ ID NO: 907065 - RNA, 19 nt, Homo sapiens
  misc_RNA (1)...(19): siRNA sense strand
guacacugguugauaugaa

SEQ ID NO: 907066 - RNA, 19 nt, Homo sapiens
  misc_RNA (1)...(19): siRNA sense strand
agaaggaucagcucaauuu

SEQ ID NO: 907067 - RNA, 19 nt, Homo sapiens
  misc_RNA (1)...(19): siRNA sense strand
caagaaggccuguggaaau

SEQ ID NO: 907068 - RNA, 19 nt, Homo sapiens
  misc_RNA (1)...(19): siRNA sense strand
gaagggcuccaaaugguaa

SEQ ID NO: 907069 - RNA, 19 nt, Homo sapiens
  misc_RNA (1)...(19): siRNA sense strand
caaauaaaaucaccaguug

SEQ ID NO: 907070 - RNA, 19 nt, Homo sapiens
  misc_RNA (1)...(19): siRNA sense strand
gauguaaccaccaaagaaa

SEQ ID NO: 907071 - RNA, 19 nt, Homo sapiens
  misc_RNA (1)...(19): siRNA sense strand
gcaccgcagugugaaauga

SEQ ID NO: 907072 - RNA, 19 nt, Homo sapiens
  misc_RNA (1)...(19): siRNA sense strand
agaagucuacgaauuguua

SEQ ID NO: 907073 - RNA, 19 nt, Homo sapiens
  misc_RNA (1)...(19): siRNA sense strand
ucaaggaugaugccaauaa

SEQ ID NO: 907074 - RNA, 19 nt, Homo sapiens
  misc_RNA (1)...(19): siRNA sense strand
cuacacaggcuauauuuga

SEQ ID NO: 907075 - RNA, 19 nt, Homo sapiens
  misc_RNA (1)...(19): siRNA sense strand
gaauagcaacugguucuuu

SEQ ID NO: 907076 - RNA, 19 nt, Homo sapiens
  misc_RNA (1)...(19): siRNA sense strand
gcauaaaggaccagaugaa

SEQ ID NO: 907077 - RNA, 19 nt, Homo sapiens
  misc_RNA (1)...(19): siRNA sense strand
cgaguaacaucugcgcaua

SEQ ID NO: 907078 - RNA, 19 nt, Homo sapiens
  misc_RNA (1)...(19): siRNA sense strand
caaggaugaugccaauaau

SEQ ID NO: 907079 - RNA, 19 nt, Homo sapiens
  misc_RNA (1)...(19): siRNA sense strand
gugcaggguuguaguguug

SEQ ID NO: 907080 - RNA, 19 nt, Homo sapiens
  misc_RNA (1)...(19): siRNA sense strand
ugaauggguuugcagaaga

SEQ ID NO: 907081 - RNA, 19 nt, Homo sapiens
  misc_RNA (1)...(19): siRNA sense strand
aagaaggccuguggaaauu

SEQ ID NO: 907082 - RNA, 19 nt, Homo sapiens
  misc_RNA (1)...(19): siRNA sense strand
aaacugccuucaccagaaa

SEQ ID NO: 907083 - RNA, 19 nt, Homo sapiens
  misc_RNA (1)...(19): siRNA sense strand
gaucgaagccaacagaaag

SEQ ID NO: 907084 - RNA, 19 nt, Homo sapiens
  misc_RNA (1)...(19): siRNA sense strand
gaagauugaauuugguguu

SEQ ID NO: 907085 - RNA, 19 nt, Homo sapiens
  misc_RNA (1)...(19): siRNA sense strand
gauguguggucuucucuuc

SEQ ID NO: 907086 - RNA, 19 nt, Homo sapiens
  misc_RNA (1)...(19): siRNA sense strand
gaacuucgaguaacaucug

SEQ ID NO: 907087 - RNA, 19 nt, Homo sapiens
  misc_RNA (1)...(19): siRNA sense strand
ggagaucgaagccaacaga

SEQ ID NO: 907088 - RNA, 19 nt, Homo sapiens
  misc_RNA (1)...(19): siRNA sense strand
acaggaagcagguauuaaa

SEQ ID NO: 907089 - RNA, 19 nt, Homo sapiens
  misc_RNA (1)...(19): siRNA sense strand
aaacugcgagcaagcauuu

SEQ ID NO: 907090 - RNA, 19 nt, Homo sapiens
  misc_RNA (1)...(19): siRNA sense strand
gcugcaaucucaaauaaaa

SEQ ID NO: 907091 - RNA, 19 nt, Homo sapiens
  misc_RNA (1)...(19): siRNA sense strand
caccuaaaguggaguuguu

SEQ ID NO: 907092 - RNA, 19 nt, Homo sapiens
  misc_RNA (1)...(19): siRNA sense strand
gggauggcauuccuacugu

SEQ ID NO: 907093 - RNA, 19 nt, Homo sapiens
  misc_RNA (1)...(19): siRNA sense strand
ccagaaggaucagcucaau

SEQ ID NO: 907094 - RNA, 19 nt, Homo sapiens
  misc_RNA (1)...(19): siRNA sense strand
gcaguggcaggcagaagua

SEQ ID NO: 907095 - RNA, 19 nt, Homo sapiens
  misc_RNA (1)...(19): siRNA sense strand
gaaggccuguggaaauuuu

SEQ ID NO: 907096 - RNA, 19 nt, Homo sapiens
  misc_RNA (1)...(19): siRNA sense strand
ugaagcaggcugacaagaa

SEQ ID NO: 907097 - RNA, 19 nt, Homo sapiens
  misc_RNA (1)...(19): siRNA sense strand
ugaaguggauaucaugagu

SEQ ID NO: 907098 - RNA, 19 nt, Homo sapiens
  misc_RNA (1)...(19): siRNA sense strand
cagcugagguacugaacau

SEQ ID NO: 907099 - RNA, 19 nt, Homo sapiens
  misc_RNA (1)...(19): siRNA sense strand
gcaggcagaaguaaugguu

SEQ ID NO: 907100 - RNA, 19 nt, Homo sapiens
  misc_RNA (1)...(19): siRNA sense strand
aaagaagucuacgaauugu

SEQ ID NO: 907101 - RNA, 19 nt, Homo sapiens
  misc_RNA (1)...(19): siRNA sense strand
gaaacucugaggauuaaag

SEQ ID NO: 907102 - RNA, 19 nt, Homo sapiens
  misc_RNA (1)...(19): siRNA sense strand
uaaaggaccagaugaaacu

SEQ ID NO: 907103 - RNA, 19 nt, Homo sapiens
  misc_RNA (1)...(19): siRNA sense strand
cauaaaggaccagaugaaa

SEQ ID NO: 907104 - RNA, 19 nt, Homo sapiens
  misc_RNA (1)...(19): siRNA sense strand
gaaauuguucuugcugaug

SEQ ID NO: 907105 - RNA, 19 nt, Homo sapiens
  misc_RNA (1)...(19): siRNA sense strand
gaauuugguguugauguaa

SEQ ID NO: 907106 - RNA, 19 nt, Homo sapiens
  misc_RNA (1)...(19): siRNA sense strand
gauugaauuugguguugau

SEQ ID NO: 907107 - RNA, 19 nt, Homo sapiens
  misc_RNA (1)...(19): siRNA sense strand
aguaacaucugcgcauaaa

SEQ ID NO: 907108 - RNA, 19 nt, Homo sapiens
  misc_RNA (1)...(19): siRNA sense strand
uuacaggaagcagguauua

SEQ ID NO: 907109 - RNA, 19 nt, Homo sapiens
  misc_RNA (1)...(19): siRNA sense strand
gaaggaucagcucaauuug

SEQ ID NO: 907110 - RNA, 19 nt, Homo sapiens
  misc_RNA (1)...(19): siRNA sense strand
augaaacucugaggauuaa

SEQ ID NO: 907111 - RNA, 19 nt, Homo sapiens
  misc_RNA (1)...(19): siRNA sense strand
gcugagguacugaacauug

SEQ ID NO: 907112 - RNA, 19 nt, Homo sapiens
  misc_RNA (1)...(19): siRNA sense strand
gcgcauaaaggaccagaug

SEQ ID NO: 907113 - RNA, 19 nt, Homo sapiens
  misc_RNA (1)...(19): siRNA sense strand
caacagaaagacaaacagu

SEQ ID NO: 907114 - RNA, 19 nt, Homo sapiens
  misc_RNA (1)...(19): siRNA sense strand
gaagccaacagaaagacaa

SEQ ID NO: 907115 - RNA, 19 nt, Homo sapiens
  misc_RNA (1)...(19): siRNA sense strand
gaaaagcugcaaucucaaa

SEQ ID NO: 907116 - RNA, 19 nt, Homo sapiens
  misc_RNA (1)...(19): siRNA sense strand
agacugaaguggauaucau

SEQ ID NO: 907117 - RNA, 19 nt, Homo sapiens
  misc_RNA (1)...(19): siRNA sense strand
gaguaacaucugcgcauaa

SEQ ID NO: 907118 - RNA, 19 nt, Homo sapiens
  misc_RNA (1)...(19): siRNA sense strand
ugguugauaugaagauuga

SEQ ID NO: 907119 - RNA, 19 nt, Homo sapiens
  misc_RNA (1)...(19): siRNA sense strand
ccaguggucuuggcuguuc

SEQ ID NO: 907120 - RNA, 19 nt, Homo sapiens
  misc_RNA (1)...(19): siRNA sense strand
uaacaucugcgcauaaagg

SEQ ID NO: 907121 - RNA, 19 nt, Homo sapiens
  misc_RNA (1)...(19): siRNA sense strand
ugaguggguugcagagaga

SEQ ID NO: 907122 - RNA, 19 nt, Homo sapiens
  misc_RNA (1)...(19): siRNA sense strand
uacacaggcuauauuugaa

SEQ ID NO: 907123 - RNA, 19 nt, Homo sapiens
  misc_RNA (1)...(19): siRNA sense strand
agaugaaacucugaggauu

SEQ ID NO: 907124 - RNA, 19 nt, Homo sapiens
  misc_RNA (1)...(19): siRNA sense strand
aaauuguucuugcugaugu

SEQ ID NO: 907125 - RNA, 19 nt, Homo sapiens
  misc_RNA (1)...(19): siRNA sense strand
ucaaggaaggauauaaguu

SEQ ID NO: 907126 - RNA, 19 nt, Homo sapiens
  misc_RNA (1)...(19): siRNA sense strand
gaugggcucuacuucugau

SEQ ID NO: 907127 - RNA, 19 nt, Homo sapiens
  misc_RNA (1)...(19): siRNA sense strand
gaguagaguugcuuuugaa

SEQ ID NO: 907128 - RNA, 19 nt, Homo sapiens
  misc_RNA (1)...(19): siRNA sense strand
caggaaaugcagcuagaaa

SEQ ID NO: 907129 - RNA, 19 nt, Homo sapiens
  misc_RNA (1)...(19): siRNA sense strand
aaagcugcaaucucaaaua

SEQ ID NO: 907130 - RNA, 19 nt, Homo sapiens
  misc_RNA (1)...(19): siRNA sense strand
aggaugaugccaauaauga

SEQ ID NO: 907131 - RNA, 19 nt, Homo sapiens
  misc_RNA (1)...(19): siRNA sense strand
aggcagaaguaaugguuug

SEQ ID NO: 907132 - RNA, 19 nt, Homo sapiens
  misc_RNA (1)...(19): siRNA sense strand
ccaugugaacuucgaguaa

SEQ ID NO: 907133 - RNA, 19 nt, Homo sapiens
  misc_RNA (1)...(19): siRNA sense strand
ucaagaaggccuguggaaa

SEQ ID NO: 907134 - RNA, 19 nt, Homo sapiens
  misc_RNA (1)...(19): siRNA sense strand
caaagaaguaacuccugaa

SEQ ID NO: 907135 - RNA, 19 nt, Homo sapiens
  misc_RNA (1)...(19): siRNA sense strand
ugauguaaccaccaaagaa

SEQ ID NO: 907136 - RNA, 19 nt, Homo sapiens
  misc_RNA (1)...(19): siRNA sense strand
ugugaaaugauuccaauug

SEQ ID NO: 907137 - RNA, 19 nt, Homo sapiens
  misc_RNA (1)...(19): siRNA sense strand
aggaaaagcugcaaucuca

SEQ ID NO: 907138 - RNA, 19 nt, Homo sapiens
  misc_RNA (1)...(19): siRNA sense strand
cugaagggcuccaaauggu

SEQ ID NO: 907139 - RNA, 19 nt, Homo sapiens
  misc_RNA (1)...(19): siRNA sense strand
aagauugaauuugguguug

SEQ ID NO: 907140 - RNA, 19 nt, Homo sapiens
  misc_RNA (1)...(19): siRNA sense strand
uugaaauacuggagaaauc

SEQ ID NO: 907141 - RNA, 19 nt, Homo sapiens
  misc_RNA (1)...(19): siRNA sense strand
gagagaguagaguugcuuu

SEQ ID NO: 907142 - RNA, 19 nt, Homo sapiens
  misc_RNA (1)...(19): siRNA sense strand
aaaagaagucuacgaauug

SEQ ID NO: 907143 - RNA, 19 nt, Homo sapiens
  misc_RNA (1)...(19): siRNA sense strand
gggcucuacuucugaucuu

SEQ ID NO: 907144 - RNA, 19 nt, Homo sapiens
  misc_RNA (1)...(19): siRNA sense strand
gcaacugguucuuuucuca

SEQ ID NO: 907145 - RNA, 19 nt, Homo sapiens
  misc_RNA (1)...(19): siRNA sense strand
ggcgacagcugagguacug

SEQ ID NO: 907146 - RNA, 19 nt, Homo sapiens
  misc_RNA (1)...(19): siRNA sense strand
uugcugauguuauugacaa

SEQ ID NO: 907147 - RNA, 19 nt, Homo sapiens
  misc_RNA (1)...(19): siRNA sense strand
uuucaaggaugaugccaau

SEQ ID NO: 907148 - RNA, 19 nt, Homo sapiens
  misc_RNA (1)...(19): siRNA sense strand
ggaagcagguauuaaaacu

SEQ ID NO: 907149 - RNA, 19 nt, Homo sapiens
  misc_RNA (1)...(19): siRNA sense strand
aagaaauccuggugucaag

SEQ ID NO: 907150 - RNA, 19 nt, Homo sapiens
  misc_RNA (1)...(19): siRNA sense strand
ugaagggcuccaaauggua

SEQ ID NO: 907151 - RNA, 19 nt, Homo sapiens
  misc_RNA (1)...(19): siRNA sense strand
gaaaugugcucaccacuuc

SEQ ID NO: 907152 - RNA, 19 nt, Homo sapiens
  misc_RNA (1)...(19): siRNA sense strand
gaccuacccucucuucuuu

SEQ ID NO: 907153 - RNA, 19 nt, Homo sapiens
  misc_RNA (1)...(19): siRNA sense strand
ccaaugggaccaccaauaa

SEQ ID NO: 907154 - RNA, 19 nt, Homo sapiens
  misc_RNA (1)...(19): siRNA sense strand
caacaugguuccagaccuu

SEQ ID NO: 907155 - RNA, 19 nt, Homo sapiens
  misc_RNA (1)...(19): siRNA sense strand
gcucccaucuucaucaauu

SEQ ID NO: 907156 - RNA, 19 nt, Homo sapiens
  misc_RNA (1)...(19): siRNA sense strand
gaagacguguuguggacuu

SEQ ID NO: 907157 - RNA, 19 nt, Homo sapiens
  misc_RNA (1)...(19): siRNA sense strand
gcagagacuucggaaugaa

SEQ ID NO: 907158 - RNA, 19 nt, Homo sapiens
  misc_RNA (1)...(19): siRNA sense strand
gaaggauccucggaaguuc

SEQ ID NO: 907159 - RNA, 19 nt, Homo sapiens
  misc_RNA (1)...(19): siRNA sense strand
ccuaugaggcucucuauga

SEQ ID NO: 907160 - RNA, 19 nt, Homo sapiens
  misc_RNA (1)...(19): siRNA sense strand
ggucaaagcaauagcacaa

SEQ ID NO: 907161 - RNA, 19 nt, Homo sapiens
  misc_RNA (1)...(19): siRNA sense strand
guuucuggcugacaacuuu

SEQ ID NO: 907162 - RNA, 19 nt, Homo sapiens
  misc_RNA (1)...(19): siRNA sense strand
gaccuugauccaccuguua

SEQ ID NO: 907163 - RNA, 19 nt, Homo sapiens
  misc_RNA (1)...(19): siRNA sense strand
gccaaugggaccaccaaua

SEQ ID NO: 907164 - RNA, 19 nt, Homo sapiens
  misc_RNA (1)...(19): siRNA sense strand
gagcugauccggccaagca

SEQ ID NO: 907165 - RNA, 19 nt, Homo sapiens
  misc_RNA (1)...(19): siRNA sense strand
ucaaagcaauagcacaaca

SEQ ID NO: 907166 - RNA, 19 nt, Homo sapiens
  misc_RNA (1)...(19): siRNA sense strand
gcaaugcucccaucuucau

SEQ ID NO: 907167 - RNA, 19 nt, Homo sapiens
  misc_RNA (1)...(19): siRNA sense strand
gcaauagcacaacaugguu

SEQ ID NO: 907168 - RNA, 19 nt, Homo sapiens
  misc_RNA (1)...(19): siRNA sense strand
gcauggguauccuggugaa

SEQ ID NO: 907169 - RNA, 19 nt, Homo sapiens
  misc_RNA (1)...(19): siRNA sense strand
caguuaagcugcuguacuc

SEQ ID NO: 907170 - RNA, 19 nt, Homo sapiens
  misc_RNA (1)...(19): siRNA sense strand
ugugauguauggacuagaa

SEQ ID NO: 907171 - RNA, 19 nt, Homo sapiens
  misc_RNA (1)...(19): siRNA sense strand
ugaaggauccucggaaguu

SEQ ID NO: 907172 - RNA, 19 nt, Homo sapiens
  misc_RNA (1)...(19): siRNA sense strand
ccaccugugccuucauaua

SEQ ID NO: 907173 - RNA, 19 nt, Homo sapiens
  misc_RNA (1)...(19): siRNA sense strand
gccgcaggcugaauaaauc

SEQ ID NO: 907174 - RNA, 19 nt, Homo sapiens
  misc_RNA (1)...(19): siRNA sense strand
ggauucugcugugucuauu

SEQ ID NO: 907175 - RNA, 19 nt, Homo sapiens
  misc_RNA (1)...(19): siRNA sense strand
ggucaccaccuucuacuca

SEQ ID NO: 907176 - RNA, 19 nt, Homo sapiens
  misc_RNA (1)...(19): siRNA sense strand
ccuacgcacuccaguucua

SEQ ID NO: 907177 - RNA, 19 nt, Homo sapiens
  misc_RNA (1)...(19): siRNA sense strand
gaucuaccaguucauuguu

SEQ ID NO: 907178 - RNA, 19 nt, Homo sapiens
  misc_RNA (1)...(19): siRNA sense strand
accaauaacugccacaaca

SEQ ID NO: 907179 - RNA, 19 nt, Homo sapiens
  misc_RNA (1)...(19): siRNA sense strand
guggacuucuuccugauug

SEQ ID NO: 907180 - RNA, 19 nt, Homo sapiens
  misc_RNA (1)...(19): siRNA sense strand
gguuguaccagucaguuaa

SEQ ID NO: 907181 - RNA, 19 nt, Homo sapiens
  misc_RNA (1)...(19): siRNA sense strand
gcaauuuggagcuaauauc

SEQ ID NO: 907182 - RNA, 19 nt, Homo sapiens
  misc_RNA (1)...(19): siRNA sense strand
gucaugaucuaccaguuca

SEQ ID NO: 907183 - RNA, 19 nt, Homo sapiens
  misc_RNA (1)...(19): siRNA sense strand
gggauucugcugugucuau

SEQ ID NO: 907184 - RNA, 19 nt, Homo sapiens
  misc_RNA (1)...(19): siRNA sense strand
ggaccuaugaggcucucua

SEQ ID NO: 907185 - RNA, 19 nt, Homo sapiens
  misc_RNA (1)...(19): siRNA sense strand
caauaacugccacaacaau

SEQ ID NO: 907186 - RNA, 19 nt, Homo sapiens
  misc_RNA (1)...(19): siRNA sense strand
caacuuuaaacaggugaua

SEQ ID NO: 907187 - RNA, 19 nt, Homo sapiens
  misc_RNA (1)...(19): siRNA sense strand
uaauauccaaggcagcaua

SEQ ID NO: 907188 - RNA, 19 nt, Homo sapiens
  misc_RNA (1)...(19): siRNA sense strand
cgcagagacuucggaauga

SEQ ID NO: 907189 - RNA, 19 nt, Homo sapiens
  misc_RNA (1)...(19): siRNA sense strand
uggaagaccuacccucucu

SEQ ID NO: 907190 - RNA, 19 nt, Homo sapiens
  misc_RNA (1)...(19): siRNA sense strand
ugaaaugugcucaccacuu

SEQ ID NO: 907191 - RNA, 19 nt, Homo sapiens
  misc_RNA (1)...(19): siRNA sense strand
ucagcuuggucaugaucua

SEQ ID NO: 907192 - RNA, 19 nt, Homo sapiens
  misc_RNA (1)...(19): siRNA sense strand
ccaauaacugccacaacaa

SEQ ID NO: 907193 - RNA, 19 nt, Homo sapiens
  misc_RNA (1)...(19): siRNA sense strand
ggucaugaucuaccaguuc

SEQ ID NO: 907194 - RNA, 19 nt, Homo sapiens
  misc_RNA (1)...(19): siRNA sense strand
acaaugagacggugauucu

SEQ ID NO: 907195 - RNA, 19 nt, Homo sapiens
  misc_RNA (1)...(19): siRNA sense strand
caggcugaauaaauccuuu

SEQ ID NO: 907196 - RNA, 19 nt, Homo sapiens
  misc_RNA (1)...(19): siRNA sense strand
ucaccaccuucuacucaga

SEQ ID NO: 907197 - RNA, 19 nt, Homo sapiens
  misc_RNA (1)...(19): siRNA sense strand
cuggucagcuuggucauga

SEQ ID NO: 907198 - RNA, 19 nt, Homo sapiens
  misc_RNA (1)...(19): siRNA sense strand
cuaugaggcucucuaugag

SEQ ID NO: 907199 - RNA, 19 nt, Homo sapiens
  misc_RNA (1)...(19): siRNA sense strand
acgcagagacuucggaaug

SEQ ID NO: 907200 - RNA, 19 nt, Homo sapiens
  misc_RNA (1)...(19): siRNA sense strand
gauuauggugauacuguga

SEQ ID NO: 907201 - RNA, 19 nt, Homo sapiens
  misc_RNA (1)...(19): siRNA sense strand
caccugugccuucauauag

SEQ ID NO: 907202 - RNA, 19 nt, Homo sapiens
  misc_RNA (1)...(19): siRNA sense strand
uggguauccuggugaaaug

SEQ ID NO: 907203 - RNA, 19 nt, Homo sapiens
  misc_RNA (1)...(19): siRNA sense strand
caacaaugagacggugauu

SEQ ID NO: 907204 - RNA, 19 nt, Homo sapiens
  misc_RNA (1)...(19): siRNA sense strand
agaccuacccucucuucuu

SEQ ID NO: 907205 - RNA, 19 nt, Homo sapiens
  misc_RNA (1)...(19): siRNA sense strand
ggacucgcgacucuacaug

SEQ ID NO: 907206 - RNA, 19 nt, Homo sapiens
  misc_RNA (1)...(19): siRNA sense strand
aaugagacggugauucuga

SEQ ID NO: 907207 - RNA, 19 nt, Homo sapiens
  misc_RNA (1)...(19): siRNA sense strand
gacucuacaugcucuccuu

SEQ ID NO: 907208 - RNA, 19 nt, Homo sapiens
  misc_RNA (1)...(19): siRNA sense strand
auaacugccacaacaauga

SEQ ID NO: 907209 - RNA, 19 nt, Homo sapiens
  misc_RNA (1)...(19): siRNA sense strand
uuccaccugugccuucaua

SEQ ID NO: 907210 - RNA, 19 nt, Homo sapiens
  misc_RNA (1)...(19): siRNA sense strand
cggaaggccucaacaaccu

SEQ ID NO: 907211 - RNA, 19 nt, Homo sapiens
  misc_RNA (1)...(19): siRNA sense strand
ugauagaagcggccaaugg

SEQ ID NO: 907212 - RNA, 19 nt, Homo sapiens
  misc_RNA (1)...(19): siRNA sense strand
gaccuaugaggcucucuau

SEQ ID NO: 907213 - RNA, 19 nt, Homo sapiens
  misc_RNA (1)...(19): siRNA sense strand
gacguguuguggacuucuu

SEQ ID NO: 907214 - RNA, 19 nt, Homo sapiens
  misc_RNA (1)...(19): siRNA sense strand
agaccuugauccaccuguu

SEQ ID NO: 907215 - RNA, 19 nt, Homo sapiens
  misc_RNA (1)...(19): siRNA sense strand
gauucugcugugucuauuu

SEQ ID NO: 907216 - RNA, 19 nt, Homo sapiens
  misc_RNA (1)...(19): siRNA sense strand
aaagcaauagcacaacaug

SEQ ID NO: 907217 - RNA, 19 nt, Homo sapiens
  misc_RNA (1)...(19): siRNA sense strand
caccuacgcacuccaguuc

SEQ ID NO: 907218 - RNA, 19 nt, Homo sapiens
  misc_RNA (1)...(19): siRNA sense strand
uuaagcugcuguacuccau

SEQ ID NO: 907219 - RNA, 19 nt, Homo sapiens
  misc_RNA (1)...(19): siRNA sense strand
uaccugcaauuuggagcua

SEQ ID NO: 907220 - RNA, 19 nt, Homo sapiens
  misc_RNA (1)...(19): siRNA sense strand
caaagcaauagcacaacau

SEQ ID NO: 907221 - RNA, 19 nt, Homo sapiens
  misc_RNA (1)...(19): siRNA sense strand
guacuccaucgggaucuuu

SEQ ID NO: 907222 - RNA, 19 nt, Homo sapiens
  misc_RNA (1)...(19): siRNA sense strand
ugaagacuaccacgacuac

SEQ ID NO: 907223 - RNA, 19 nt, Homo sapiens
  misc_RNA (1)...(19): siRNA sense strand
caucaaaccuaaugaaauc

SEQ ID NO: 907224 - RNA, 19 nt, Homo sapiens
  misc_RNA (1)...(19): siRNA sense strand
gaacgagcgugaccucaug

SEQ ID NO: 907225 - RNA, 19 nt, Homo sapiens
  misc_RNA (1)...(19): siRNA sense strand
ggaaggagcgugagaagga

SEQ ID NO: 907226 - RNA, 19 nt, Homo sapiens
  misc_RNA (1)...(19): siRNA sense strand
ugacauggauuaugaaagg

SEQ ID NO: 907227 - RNA, 19 nt, Homo sapiens
  misc_RNA (1)...(19): siRNA sense strand
ccaauucccuccaccaugu

SEQ ID NO: 907228 - RNA, 19 nt, Homo sapiens
  misc_RNA (1)...(19): siRNA sense strand
cagaagauccucucaccua

SEQ ID NO: 907229 - RNA, 19 nt, Homo sapiens
  misc_RNA (1)...(19): siRNA sense strand
ugaaggaggaagaucauua

SEQ ID NO: 907230 - RNA, 19 nt, Homo sapiens
  misc_RNA (1)...(19): siRNA sense strand
caaguucuaugaccuguuc

SEQ ID NO: 907231 - RNA, 19 nt, Homo sapiens
  misc_RNA (1)...(19): siRNA sense strand
guucugugcuucuccauug

SEQ ID NO: 907232 - RNA, 19 nt, Homo sapiens
  misc_RNA (1)...(19): siRNA sense strand
gaccgucgcuuugcuuaug

SEQ ID NO: 907233 - RNA, 19 nt, Homo sapiens
  misc_RNA (1)...(19): siRNA sense strand
aggaagagauggcagaaga

SEQ ID NO: 907234 - RNA, 19 nt, Homo sapiens
  misc_RNA (1)...(19): siRNA sense strand
cauccgagcugcacucauc

SEQ ID NO: 907235 - RNA, 19 nt, Homo sapiens
  misc_RNA (1)...(19): siRNA sense strand
gaucugauguggugguucu

SEQ ID NO: 907236 - RNA, 19 nt, Homo sapiens
  misc_RNA (1)...(19): siRNA sense strand
ccgagcaccugucaucuug

SEQ ID NO: 907237 - RNA, 19 nt, Homo sapiens
  misc_RNA (1)...(19): siRNA sense strand
ggcguuggcucuucuggaa

SEQ ID NO: 907238 - RNA, 19 nt, Homo sapiens
  misc_RNA (1)...(19): siRNA sense strand
ucacagagcaguacacagu

SEQ ID NO: 907239 - RNA, 19 nt, Homo sapiens
  misc_RNA (1)...(19): siRNA sense strand
auucugacauggauuauga

SEQ ID NO: 907240 - RNA, 19 nt, Homo sapiens
  misc_RNA (1)...(19): siRNA sense strand
caacggaacaggguaccua

SEQ ID NO: 907241 - RNA, 19 nt, Homo sapiens
  misc_RNA (1)...(19): siRNA sense strand
gaaggaggaagaucauuac

SEQ ID NO: 907242 - RNA, 19 nt, Homo sapiens
  misc_RNA (1)...(19): siRNA sense strand
cgaccuggaugacaugaag

SEQ ID NO: 907243 - RNA, 19 nt, Homo sapiens
  misc_RNA (1)...(19): siRNA sense strand
cagaaaaccaggaguauuu

SEQ ID NO: 907244 - RNA, 19 nt, Homo sapiens
  misc_RNA (1)...(19): siRNA sense strand
gaagagauggcagaagauc

SEQ ID NO: 907245 - RNA, 19 nt, Homo sapiens
  misc_RNA (1)...(19): siRNA sense strand
acagagcaguacacaguga

SEQ ID NO: 907246 - RNA, 19 nt, Homo sapiens
  misc_RNA (1)...(19): siRNA sense strand
ggccaacauucucaacaau

SEQ ID NO: 907247 - RNA, 19 nt, Homo sapiens
  misc_RNA (1)...(19): siRNA sense strand
cccgagacgugguagauga

SEQ ID NO: 907248 - RNA, 19 nt, Homo sapiens
  misc_RNA (1)...(19): siRNA sense strand
gauggaagcgacccagaug

SEQ ID NO: 907249 - RNA, 19 nt, Homo sapiens
  misc_RNA (1)...(19): siRNA sense strand
ggacaacgccguggguaag

SEQ ID NO: 907250 - RNA, 19 nt, Homo sapiens
  misc_RNA (1)...(19): siRNA sense strand
gguaagaccaggcucaucu

SEQ ID NO: 907251 - RNA, 19 nt, Homo sapiens
  misc_RNA (1)...(19): siRNA sense strand
caacgugugccgcaaguuc

SEQ ID NO: 907252 - RNA, 19 nt, Homo sapiens
  misc_RNA (1)...(19): siRNA sense strand
gcacauugcccacauugcu

SEQ ID NO: 907253 - RNA, 19 nt, Homo sapiens
  misc_RNA (1)...(19): siRNA sense strand
gagcaccugucaucuuggu

SEQ ID NO: 907254 - RNA, 19 nt, Homo sapiens
  misc_RNA (1)...(19): siRNA sense strand
caccagcgacgggaucuua

SEQ ID NO: 907255 - RNA, 19 nt, Homo sapiens
  misc_RNA (1)...(19): siRNA sense strand
ccaggaguauuucgagaag

SEQ ID NO: 907256 - RNA, 19 nt, Homo sapiens
  misc_RNA (1)...(19): siRNA sense strand
cuacaaaucccggcugaug

SEQ ID NO: 907257 - RNA, 19 nt, Homo sapiens
  misc_RNA (1)...(19): siRNA sense strand
aagauccucucaccuacaa

SEQ ID NO: 907258 - RNA, 19 nt, Homo sapiens
  misc_RNA (1)...(19): siRNA sense strand
gcgcaucuuugcccacaag

SEQ ID NO: 907259 - RNA, 19 nt, Homo sapiens
  misc_RNA (1)...(19): siRNA sense strand
gcaugaugguggccaacau

SEQ ID NO: 907260 - RNA, 19 nt, Homo sapiens
  misc_RNA (1)...(19): siRNA sense strand
gaagauccucucaccuaca

SEQ ID NO: 907261 - RNA, 19 nt, Homo sapiens
  misc_RNA (1)...(19): siRNA sense strand
gagacgugguagaugaugu

SEQ ID NO: 907262 - RNA, 19 nt, Homo sapiens
  misc_RNA (1)...(19): siRNA sense strand
gaggugguguuucccuaca

SEQ ID NO: 907263 - RNA, 19 nt, Homo sapiens
  misc_RNA (1)...(19): siRNA sense strand
ccaucaaaccuaaugaaau

SEQ ID NO: 907264 - RNA, 19 nt, Homo sapiens
  misc_RNA (1)...(19): siRNA sense strand
gagaucugauguggugguu

SEQ ID NO: 907265 - RNA, 19 nt, Homo sapiens
  misc_RNA (1)...(19): siRNA sense strand
ucucagaugugaccuucau

SEQ ID NO: 907266 - RNA, 19 nt, Homo sapiens
  misc_RNA (1)...(19): siRNA sense strand
uggccaacauucucaacaa

SEQ ID NO: 907267 - RNA, 19 nt, Homo sapiens
  misc_RNA (1)...(19): siRNA sense strand
gagcgggugcgcaucuuug

SEQ ID NO: 907268 - RNA, 19 nt, Homo sapiens
  misc_RNA (1)...(19): siRNA sense strand
caccacaucugcaccaacu

SEQ ID NO: 907269 - RNA, 19 nt, Homo sapiens
  misc_RNA (1)...(19): siRNA sense strand
ggaagcgacccagaugaug

SEQ ID NO: 907270 - RNA, 19 nt, Homo sapiens
  misc_RNA (1)...(19): siRNA sense strand
gauccucucaccuacaaau

SEQ ID NO: 907271 - RNA, 19 nt, Homo sapiens
  misc_RNA (1)...(19): siRNA sense strand
gggacaacgccguggguaa

SEQ ID NO: 907272 - RNA, 19 nt, Homo sapiens
  misc_RNA (1)...(19): siRNA sense strand
uggugaagauggacaguuc

SEQ ID NO: 907273 - RNA, 19 nt, Homo sapiens
  misc_RNA (1)...(19): siRNA sense strand
ggaagagauggcagaagau

SEQ ID NO: 907274 - RNA, 19 nt, Homo sapiens
  misc_RNA (1)...(19): siRNA sense strand
ggccaaacguagagaccau

SEQ ID NO: 907275 - RNA, 19 nt, Homo sapiens
  misc_RNA (1)...(19): siRNA sense strand
ggagcgggugcgcaucuuu

SEQ ID NO: 907276 - RNA, 19 nt, Homo sapiens
  misc_RNA (1)...(19): siRNA sense strand
acccagaaaucaagcacuu

SEQ ID NO: 907277 - RNA, 19 nt, Homo sapiens
  misc_RNA (1)...(19): siRNA sense strand
cggcaucaaggacgucuuu

SEQ ID NO: 907278 - RNA, 19 nt, Homo sapiens
  misc_RNA (1)...(19): siRNA sense strand
gaaaggccaaacguagaga

SEQ ID NO: 907279 - RNA, 19 nt, Homo sapiens
  misc_RNA (1)...(19): siRNA sense strand
ggacuaccuccaccucaag

SEQ ID NO: 907280 - RNA, 19 nt, Homo sapiens
  misc_RNA (1)...(19): siRNA sense strand
gcccaucaaaccuaaugaa

SEQ ID NO: 907281 - RNA, 19 nt, Homo sapiens
  misc_RNA (1)...(19): siRNA sense strand
aaacguagagaccaucaag

SEQ ID NO: 907282 - RNA, 19 nt, Homo sapiens
  misc_RNA (1)...(19): siRNA sense strand
gaagucccaccuccgcaau

SEQ ID NO: 907283 - RNA, 19 nt, Homo sapiens
  misc_RNA (1)...(19): siRNA sense strand
caugcacauugcccacauu

SEQ ID NO: 907284 - RNA, 19 nt, Homo sapiens
  misc_RNA (1)...(19): siRNA sense strand
uuaaggagugcuuggcaaa

SEQ ID NO: 907285 - RNA, 19 nt, Homo sapiens
  misc_RNA (1)...(19): siRNA sense strand
caugaugguggccaacauu

SEQ ID NO: 907286 - RNA, 19 nt, Homo sapiens
  misc_RNA (1)...(19): siRNA sense strand
gcuuaugggagaucugaug

SEQ ID NO: 907287 - RNA, 19 nt, Homo sapiens
  misc_RNA (1)...(19): siRNA sense strand
ccucuacaccggcauguuc

SEQ ID NO: 907288 - RNA, 19 nt, Homo sapiens
  misc_RNA (1)...(19): siRNA sense strand
uccgggcuguccucaagua

SEQ ID NO: 907289 - RNA, 19 nt, Homo sapiens
  misc_RNA (1)...(19): siRNA sense strand
ugauggugguggugaagau

SEQ ID NO: 907290 - RNA, 19 nt, Homo sapiens
  misc_RNA (1)...(19): siRNA sense strand
gggccacucugaucaacac

SEQ ID NO: 907291 - RNA, 19 nt, Homo sapiens
  misc_RNA (1)...(19): siRNA sense strand
caccugcaguucuggaagu

SEQ ID NO: 907292 - RNA, 19 nt, Homo sapiens
  misc_RNA (1)...(19): siRNA sense strand
cccaucaaaccuaaugaaa

SEQ ID NO: 907293 - RNA, 19 nt, Homo sapiens
  misc_RNA (1)...(19): siRNA sense strand
ccacaucugcaccaacuac

SEQ ID NO: 907294 - RNA, 19 nt, Homo sapiens
  misc_RNA (1)...(19): siRNA sense strand
gaccaucaagugcguugug

SEQ ID NO: 907295 - RNA, 19 nt, Homo sapiens
  misc_RNA (1)...(19): siRNA sense strand
gcugcaggcacccuuccua

SEQ ID NO: 907296 - RNA, 19 nt, Homo sapiens
  misc_RNA (1)...(19): siRNA sense strand
aggaguauuucgagaagca

SEQ ID NO: 907297 - RNA, 19 nt, Homo sapiens
  misc_RNA (1)...(19): siRNA sense strand
caaggacgucuuugacaac

SEQ ID NO: 907298 - RNA, 19 nt, Homo sapiens
  misc_RNA (1)...(19): siRNA sense strand
cguuggcucuucuggaaca

SEQ ID NO: 907299 - RNA, 19 nt, Homo sapiens
  misc_RNA (1)...(19): siRNA sense strand
ugaaaggccaaacguagag

SEQ ID NO: 907300 - RNA, 19 nt, Homo sapiens
  misc_RNA (1)...(19): siRNA sense strand
aggacuaccuccaccucaa

SEQ ID NO: 907301 - RNA, 19 nt, Homo sapiens
  misc_RNA (1)...(19): siRNA sense strand
gacaacgccguggguaaga

SEQ ID NO: 907302 - RNA, 19 nt, Homo sapiens
  misc_RNA (1)...(19): siRNA sense strand
gaugguggccaacauucuc

SEQ ID NO: 907303 - RNA, 19 nt, Homo sapiens
  misc_RNA (1)...(19): siRNA sense strand
uuaugaaaggccaaacgua

SEQ ID NO: 907304 - RNA, 19 nt, Homo sapiens
  misc_RNA (1)...(19): siRNA sense strand
gggcuguccucaaguaccu

SEQ ID NO: 907305 - RNA, 19 nt, Homo sapiens
  misc_RNA (1)...(19): siRNA sense strand
augccacccucacccagua

SEQ ID NO: 907306 - RNA, 19 nt, Homo sapiens
  misc_RNA (1)...(19): siRNA sense strand
uuggagaccaccacaaaga

SEQ ID NO: 907307 - RNA, 19 nt, Homo sapiens
  misc_RNA (1)...(19): siRNA sense strand
gaacugcucuguugcaaga

SEQ ID NO: 907308 - RNA, 19 nt, Homo sapiens
  misc_RNA (1)...(19): siRNA sense strand
ggacacagcuggauucauc

SEQ ID NO: 907309 - RNA, 19 nt, Homo sapiens
  misc_RNA (1)...(19): siRNA sense strand
gcucaaaccuuaucaaaca

SEQ ID NO: 907310 - RNA, 19 nt, Homo sapiens
  misc_RNA (1)...(19): siRNA sense strand
cagagaagaugcaauggua

SEQ ID NO: 907311 - RNA, 19 nt, Homo sapiens
  misc_RNA (1)...(19): siRNA sense strand
ggcaagaacugcucuguug

SEQ ID NO: 907312 - RNA, 19 nt, Homo sapiens
  misc_RNA (1)...(19): siRNA sense strand
agucacagcucaaaccuua

SEQ ID NO: 907313 - RNA, 19 nt, Homo sapiens
  misc_RNA (1)...(19): siRNA sense strand
gagaagccauguagggaaa

SEQ ID NO: 907314 - RNA, 19 nt, Homo sapiens
  misc_RNA (1)...(19): siRNA sense strand
gagggcagguuacaaagaa

SEQ ID NO: 907315 - RNA, 19 nt, Homo sapiens
  misc_RNA (1)...(19): siRNA sense strand
ggaagacauugcccagauu

SEQ ID NO: 907316 - RNA, 19 nt, Homo sapiens
  misc_RNA (1)...(19): siRNA sense strand
gguaaggucuucagucaca

SEQ ID NO: 907317 - RNA, 19 nt, Homo sapiens
  misc_RNA (1)...(19): siRNA sense strand
acucaagggucucaaagua

SEQ ID NO: 907318 - RNA, 19 nt, Homo sapiens
  misc_RNA (1)...(19): siRNA sense strand
ucaagaagcuuccagaaaa

SEQ ID NO: 907319 - RNA, 19 nt, Homo sapiens
  misc_RNA (1)...(19): siRNA sense strand
gaggauucauggugauaaa

SEQ ID NO: 907320 - RNA, 19 nt, Homo sapiens
  misc_RNA (1)...(19): siRNA sense strand
ugagaaacccuaugaaugu

SEQ ID NO: 907321 - RNA, 19 nt, Homo sapiens
  misc_RNA (1)...(19): siRNA sense strand
ggaguaggcgacauuauug

SEQ ID NO: 907322 - RNA, 19 nt, Homo sapiens
  misc_RNA (1)...(19): siRNA sense strand
gcucugcccuugucauuca

SEQ ID NO: 907323 - RNA, 19 nt, Homo sapiens
  misc_RNA (1)...(19): siRNA sense strand
gaaacccuaugaaugugaa

SEQ ID NO: 907324 - RNA, 19 nt, Homo sapiens
  misc_RNA (1)...(19): siRNA sense strand
gggaagacauugcccagau

SEQ ID NO: 907325 - RNA, 19 nt, Homo sapiens
  misc_RNA (1)...(19): siRNA sense strand
gggaguaggcgacauuauu

SEQ ID NO: 907326 - RNA, 19 nt, Homo sapiens
  misc_RNA (1)...(19): siRNA sense strand
ggagaagcccuaugagugu

SEQ ID NO: 907327 - RNA, 19 nt, Homo sapiens
  misc_RNA (1)...(19): siRNA sense strand
gaagucuuauugaacauca

SEQ ID NO: 907328 - RNA, 19 nt, Homo sapiens
  misc_RNA (1)...(19): siRNA sense strand
cgauagaguucuccagguu

SEQ ID NO: 907329 - RNA, 19 nt, Homo sapiens
  misc_RNA (1)...(19): siRNA sense strand
guggugaaauacagacuaa

SEQ ID NO: 907330 - RNA, 19 nt, Homo sapiens
  misc_RNA (1)...(19): siRNA sense strand
ggagggugcugcagagaag

SEQ ID NO: 907331 - RNA, 19 nt, Homo sapiens
  misc_RNA (1)...(19): siRNA sense strand
gugguaaggucuucaguca

SEQ ID NO: 907332 - RNA, 19 nt, Homo sapiens
  misc_RNA (1)...(19): siRNA sense strand
gagaaacccuaugaaugug

SEQ ID NO: 907333 - RNA, 19 nt, Homo sapiens
  misc_RNA (1)...(19): siRNA sense strand
caagauggcacuauugaca

SEQ ID NO: 907334 - RNA, 19 nt, Homo sapiens
  misc_RNA (1)...(19): siRNA sense strand
ugagaaacccuaucagugu

SEQ ID NO: 907335 - RNA, 19 nt, Homo sapiens
  misc_RNA (1)...(19): siRNA sense strand
gaaagccagugggaaaaua

SEQ ID NO: 907336 - RNA, 19 nt, Homo sapiens
  misc_RNA (1)...(19): siRNA sense strand
aaaggagcaugggaagaua

SEQ ID NO: 907337 - RNA, 19 nt, Homo sapiens
  misc_RNA (1)...(19): siRNA sense strand
ucccagcccuuacacgaua

SEQ ID NO: 907338 - RNA, 19 nt, Homo sapiens
  misc_RNA (1)...(19): siRNA sense strand
ggugaaauacagacuaaga

SEQ ID NO: 907339 - RNA, 19 nt, Homo sapiens
  misc_RNA (1)...(19): siRNA sense strand
gugagaaacccuaugaaug

SEQ ID NO: 907340 - RNA, 19 nt, Homo sapiens
  misc_RNA (1)...(19): siRNA sense strand
cgagaacucugcggacaau

SEQ ID NO: 907341 - RNA, 19 nt, Homo sapiens
  misc_RNA (1)...(19): siRNA sense strand
acacggaauagaagucuua

SEQ ID NO: 907342 - RNA, 19 nt, Homo sapiens
  misc_RNA (1)...(19): siRNA sense strand
guugcaagauggcacuauu

SEQ ID NO: 907343 - RNA, 19 nt, Homo sapiens
  misc_RNA (1)...(19): siRNA sense strand
cgacauuauugccaugaau

SEQ ID NO: 907344 - RNA, 19 nt, Homo sapiens
  misc_RNA (1)...(19): siRNA sense strand
aauccacacuggugagaaa

SEQ ID NO: 907345 - RNA, 19 nt, Homo sapiens
  misc_RNA (1)...(19): siRNA sense strand
aauccacacuggugagaaa

SEQ ID NO: 907346 - RNA, 19 nt, Homo sapiens
  misc_RNA (1)...(19): siRNA sense strand
gaagccauaugagugugaa

SEQ ID NO: 907347 - RNA, 19 nt, Homo sapiens
  misc_RNA (1)...(19): siRNA sense strand
gaagacauugcccagauuc

SEQ ID NO: 907348 - RNA, 19 nt, Homo sapiens
  misc_RNA (1)...(19): siRNA sense strand
gagcucugcccuugucauu

SEQ ID NO: 907349 - RNA, 19 nt, Homo sapiens
  misc_RNA (1)...(19): siRNA sense strand
ggugagaaacccuaugaau

SEQ ID NO: 907350 - RNA, 19 nt, Homo sapiens
  misc_RNA (1)...(19): siRNA sense strand
caggagggcagguuacaaa

SEQ ID NO: 907351 - RNA, 19 nt, Homo sapiens
  misc_RNA (1)...(19): siRNA sense strand
caucagagaagccauguag

SEQ ID NO: 907352 - RNA, 19 nt, Homo sapiens
  misc_RNA (1)...(19): siRNA sense strand
gucaagaagcuuccagaaa

SEQ ID NO: 907353 - RNA, 19 nt, Homo sapiens
  misc_RNA (1)...(19): siRNA sense strand
ucccgugucuuauaaaugu

SEQ ID NO: 907354 - RNA, 19 nt, Homo sapiens
  misc_RNA (1)...(19): siRNA sense strand
ccaugaauguggaaagagu

SEQ ID NO: 907355 - RNA, 19 nt, Homo sapiens
  misc_RNA (1)...(19): siRNA sense strand
ggagggcagguuacaaaga

SEQ ID NO: 907356 - RNA, 19 nt, Homo sapiens
  misc_RNA (1)...(19): siRNA sense strand
gaggcucccgugucuuaua

SEQ ID NO: 907357 - RNA, 19 nt, Homo sapiens
  misc_RNA (1)...(19): siRNA sense strand
cagcucaaaccuuaucaaa

SEQ ID NO: 907358 - RNA, 19 nt, Homo sapiens
  misc_RNA (1)...(19): siRNA sense strand
cuaugaaugugaagacugu

SEQ ID NO: 907359 - RNA, 19 nt, Homo sapiens
  misc_RNA (1)...(19): siRNA sense strand
ugugaagacuguggaaaga

SEQ ID NO: 907360 - RNA, 19 nt, Homo sapiens
  misc_RNA (1)...(19): siRNA sense strand
gcucccgugucuuauaaau

SEQ ID NO: 907361 - RNA, 19 nt, Homo sapiens
  misc_RNA (1)...(19): siRNA sense strand
gcagccuccuugaacauca

SEQ ID NO: 907362 - RNA, 19 nt, Homo sapiens
  misc_RNA (1)...(19): siRNA sense strand
caaacucaagggucucaaa

SEQ ID NO: 907363 - RNA, 19 nt, Homo sapiens
  misc_RNA (1)...(19): siRNA sense strand
agaaguuucacacggaaua

SEQ ID NO: 907364 - RNA, 19 nt, Homo sapiens
  misc_RNA (1)...(19): siRNA sense strand
cugaggcucccgugucuua

SEQ ID NO: 907365 - RNA, 19 nt, Homo sapiens
  misc_RNA (1)...(19): siRNA sense strand
gaacaggagggcagguuac

SEQ ID NO: 907366 - RNA, 19 nt, Homo sapiens
  misc_RNA (1)...(19): siRNA sense strand
gacauugcccagauuccua

SEQ ID NO: 907367 - RNA, 19 nt, Homo sapiens
  misc_RNA (1)...(19): siRNA sense strand
gcagagaagaugcaauggu

SEQ ID NO: 907368 - RNA, 19 nt, Homo sapiens
  misc_RNA (1)...(19): siRNA sense strand
guaaugagugugagagaag

SEQ ID NO: 907369 - RNA, 19 nt, Homo sapiens
  misc_RNA (1)...(19): siRNA sense strand
gagcugcagccuccuugaa

SEQ ID NO: 907370 - RNA, 19 nt, Homo sapiens
  misc_RNA (1)...(19): siRNA sense strand
ugaacaggagggcagguua

SEQ ID NO: 907371 - RNA, 19 nt, Homo sapiens
  misc_RNA (1)...(19): siRNA sense strand
cauaugagugugaagaaug

SEQ ID NO: 907372 - RNA, 19 nt, Homo sapiens
  misc_RNA (1)...(19): siRNA sense strand
aggcucccgugucuuauaa

SEQ ID NO: 907373 - RNA, 19 nt, Homo sapiens
  misc_RNA (1)...(19): siRNA sense strand
gcccuuacacgauagaguu

SEQ ID NO: 907374 - RNA, 19 nt, Homo sapiens
  misc_RNA (1)...(19): siRNA sense strand
ggugagaaacccuaucagu

SEQ ID NO: 907375 - RNA, 19 nt, Homo sapiens
  misc_RNA (1)...(19): siRNA sense strand
ccauaugagugugaagaau

SEQ ID NO: 907376 - RNA, 19 nt, Homo sapiens
  misc_RNA (1)...(19): siRNA sense strand
ggugagaagccauaugagu

SEQ ID NO: 907377 - RNA, 19 nt, Homo sapiens
  misc_RNA (1)...(19): siRNA sense strand
gcgacauuauugccaugaa

SEQ ID NO: 907378 - RNA, 19 nt, Homo sapiens
  misc_RNA (1)...(19): siRNA sense strand
ccgugaagguggagaagga

SEQ ID NO: 907379 - RNA, 19 nt, Homo sapiens
  misc_RNA (1)...(19): siRNA sense strand
gaaaagcaggagaaccaua

SEQ ID NO: 907380 - RNA, 19 nt, Homo sapiens
  misc_RNA (1)...(19): siRNA sense strand
gaagaugcaaugguagcuu

SEQ ID NO: 907381 - RNA, 19 nt, Homo sapiens
  misc_RNA (1)...(19): siRNA sense strand
guggaaagaccuucauugg

SEQ ID NO: 907382 - RNA, 19 nt, Homo sapiens
  misc_RNA (1)...(19): siRNA sense strand
gggcaagaacugcucuguu

SEQ ID NO: 907383 - RNA, 19 nt, Homo sapiens
  misc_RNA (1)...(19): siRNA sense strand
uguaaugagugugagagaa

SEQ ID NO: 907384 - RNA, 19 nt, Homo sapiens
  misc_RNA (1)...(19): siRNA sense strand
gcugcagccuccuugaaca

SEQ ID NO: 907385 - RNA, 19 nt, Homo sapiens
  misc_RNA (1)...(19): siRNA sense strand
ugagaagccauaugagugu

SEQ ID NO: 907386 - RNA, 19 nt, Homo sapiens
  misc_RNA (1)...(19): siRNA sense strand
ugcagaagcuggugaacag

SEQ ID NO: 907387 - RNA, 19 nt, Homo sapiens
  misc_RNA (1)...(19): siRNA sense strand
gcccagauuccuacacaug

SEQ ID NO: 907388 - RNA, 19 nt, Homo sapiens
  misc_RNA (1)...(19): siRNA sense strand
caagaacugcucuguugca

SEQ ID NO: 907389 - RNA, 19 nt, Homo sapiens
  misc_RNA (1)...(19): siRNA sense strand
ugacuaaacacaggagaau

SEQ ID NO: 907390 - RNA, 19 nt, Homo sapiens
  misc_RNA (1)...(19): siRNA sense strand
ccagauuccuacacaugca

SEQ ID NO: 907391 - RNA, 19 nt, Homo sapiens
  misc_RNA (1)...(19): siRNA sense strand
ugugaugacugugggaaga

SEQ ID NO: 907392 - RNA, 19 nt, Homo sapiens
  misc_RNA (1)...(19): siRNA sense strand
ggaggugguggugcuauug

SEQ ID NO: 907393 - RNA, 19 nt, Homo sapiens
  misc_RNA (1)...(19): siRNA sense strand
gaaugugaagacuguggaa

SEQ ID NO: 907394 - RNA, 19 nt, Homo sapiens
  misc_RNA (1)...(19): siRNA sense strand
cucccuugguggugaaaua

SEQ ID NO: 907395 - RNA, 19 nt, Homo sapiens
  misc_RNA (1)...(19): siRNA sense strand
cuaugagugugaugacugu

SEQ ID NO: 907396 - RNA, 19 nt, Homo sapiens
  misc_RNA (1)...(19): siRNA sense strand
gcccuugucauucaucaga

SEQ ID NO: 907397 - RNA, 19 nt, Homo sapiens
  misc_RNA (1)...(19): siRNA sense strand
gaagguggagaaggaggaa

SEQ ID NO: 907398 - RNA, 19 nt, Homo sapiens
  misc_RNA (1)...(19): siRNA sense strand
ggacgcccagucugcagaa

SEQ ID NO: 907399 - RNA, 19 nt, Homo sapiens
  misc_RNA (1)...(19): siRNA sense strand
ucagaggauucauggugau

SEQ ID NO: 907400 - RNA, 19 nt, Homo sapiens
  misc_RNA (1)...(19): siRNA sense strand
agacaucagaggauucaug

SEQ ID NO: 907401 - RNA, 19 nt, Homo sapiens
  misc_RNA (1)...(19): siRNA sense strand
auaugagugugaagaaugu

SEQ ID NO: 907402 - RNA, 19 nt, Homo sapiens
  misc_RNA (1)...(19): siRNA sense strand
gggagggugcugcagagaa

SEQ ID NO: 907403 - RNA, 19 nt, Homo sapiens
  misc_RNA (1)...(19): siRNA sense strand
acacuggugagaagccaua

SEQ ID NO: 907404 - RNA, 19 nt, Homo sapiens
  misc_RNA (1)...(19): siRNA sense strand
gcacagcaaggagcagauc

SEQ ID NO: 907405 - RNA, 19 nt, Homo sapiens
  misc_RNA (1)...(19): siRNA sense strand
cacucgaacuucauaccuu

SEQ ID NO: 907406 - RNA, 19 nt, Homo sapiens
  misc_RNA (1)...(19): siRNA sense strand
uggagaggcagcuggauga

SEQ ID NO: 907407 - RNA, 19 nt, Homo sapiens
  misc_RNA (1)...(19): siRNA sense strand
gccgacagcuccuuuaauu

SEQ ID NO: 907408 - RNA, 19 nt, Homo sapiens
  misc_RNA (1)...(19): siRNA sense strand
gcaacagccugcccgagua

SEQ ID NO: 907409 - RNA, 19 nt, Homo sapiens
  misc_RNA (1)...(19): siRNA sense strand
cgacagcuccuuuaauuuc

SEQ ID NO: 907410 - RNA, 19 nt, Homo sapiens
  misc_RNA (1)...(19): siRNA sense strand
gacagcuccuuuaauuuca

SEQ ID NO: 907411 - RNA, 19 nt, Homo sapiens
  misc_RNA (1)...(19): siRNA sense strand
ucaugaaggugcacaggau

SEQ ID NO: 907412 - RNA, 19 nt, Homo sapiens
  misc_RNA (1)...(19): siRNA sense strand
cgagggaggcccaguacaa

SEQ ID NO: 907413 - RNA, 19 nt, Homo sapiens
  misc_RNA (1)...(19): siRNA sense strand
gcacagacggaguggaaca

SEQ ID NO: 907414 - RNA, 19 nt, Homo sapiens
  misc_RNA (1)...(19): siRNA sense strand
caucuucggagcccaguuu

SEQ ID NO: 907415 - RNA, 19 nt, Homo sapiens
  misc_RNA (1)...(19): siRNA sense strand
cgugucggcugccaugaug

SEQ ID NO: 907416 - RNA, 19 nt, Homo sapiens
  misc_RNA (1)...(19): siRNA sense strand
gggaggcccaguacaacaa

SEQ ID NO: 907417 - RNA, 19 nt, Homo sapiens
  misc_RNA (1)...(19): siRNA sense strand
guuccggccugucuacaag

SEQ ID NO: 907418 - RNA, 19 nt, Homo sapiens
  misc_RNA (1)...(19): siRNA sense strand
ccaucgcgaucaugaaggu

SEQ ID NO: 907419 - RNA, 19 nt, Homo sapiens
  misc_RNA (1)...(19): siRNA sense strand
cagcuccuuuaauuucaug

SEQ ID NO: 907420 - RNA, 19 nt, Homo sapiens
  misc_RNA (1)...(19): siRNA sense strand
gcggcuacgugugcugguu

SEQ ID NO: 907421 - RNA, 19 nt, Homo sapiens
  misc_RNA (1)...(19): siRNA sense strand
ccgacagcuccuuuaauuu

SEQ ID NO: 907422 - RNA, 19 nt, Homo sapiens
  misc_RNA (1)...(19): siRNA sense strand
ggaucuaccggcuguggau

SEQ ID NO: 907423 - RNA, 19 nt, Homo sapiens
  misc_RNA (1)...(19): siRNA sense strand
ccaguacaacaacuucuca

SEQ ID NO: 907424 - RNA, 19 nt, Homo sapiens
  misc_RNA (1)...(19): siRNA sense strand
ucguguggcugcuccuguu

SEQ ID NO: 907425 - RNA, 19 nt, Homo sapiens
  misc_RNA (1)...(19): siRNA sense strand
cagaaaaggagaacaacuu

SEQ ID NO: 907426 - RNA, 19 nt, Homo sapiens
  misc_RNA (1)...(19): siRNA sense strand
gcacagcuaugauuccuua

SEQ ID NO: 907427 - RNA, 19 nt, Homo sapiens
  misc_RNA (1)...(19): siRNA sense strand
ugacaaauaugcucaguuu

SEQ ID NO: 907428 - RNA, 19 nt, Homo sapiens
  misc_RNA (1)...(19): siRNA sense strand
gaacaagaaaggagaacua

SEQ ID NO: 907429 - RNA, 19 nt, Homo sapiens
  misc_RNA (1)...(19): siRNA sense strand
guucaaagcuauccaacuu

SEQ ID NO: 907430 - RNA, 19 nt, Homo sapiens
  misc_RNA (1)...(19): siRNA sense strand
gaaaggagaacuagguauu

SEQ ID NO: 907431 - RNA, 19 nt, Homo sapiens
  misc_RNA (1)...(19): siRNA sense strand
caucgaggcuuccagaauu

SEQ ID NO: 907432 - RNA, 19 nt, Homo sapiens
  misc_RNA (1)...(19): siRNA sense strand
cagcuaugauuccuuauuu

SEQ ID NO: 907433 - RNA, 19 nt, Homo sapiens
  misc_RNA (1)...(19): siRNA sense strand
ucaggcagcucauaauuug

SEQ ID NO: 907434 - RNA, 19 nt, Homo sapiens
  misc_RNA (1)...(19): siRNA sense strand
cauggucucuucuggauaa

SEQ ID NO: 907435 - RNA, 19 nt, Homo sapiens
  misc_RNA (1)...(19): siRNA sense strand
cagcuuggauugacucauu

SEQ ID NO: 907436 - RNA, 19 nt, Homo sapiens
  misc_RNA (1)...(19): siRNA sense strand
cauuaccgcuucucucuuu

SEQ ID NO: 907437 - RNA, 19 nt, Homo sapiens
  misc_RNA (1)...(19): siRNA sense strand
caaaggcacugcugauuuu

SEQ ID NO: 907438 - RNA, 19 nt, Homo sapiens
  misc_RNA (1)...(19): siRNA sense strand
cacugcagcuuaucaagua

SEQ ID NO: 907439 - RNA, 19 nt, Homo sapiens
  misc_RNA (1)...(19): siRNA sense strand
caacucgcuuaaucaagua

SEQ ID NO: 907440 - RNA, 19 nt, Homo sapiens
  misc_RNA (1)...(19): siRNA sense strand
ccaggaagcugcuaaaaga

SEQ ID NO: 907441 - RNA, 19 nt, Homo sapiens
  misc_RNA (1)...(19): siRNA sense strand
gcagaaagguauggugucu

SEQ ID NO: 907442 - RNA, 19 nt, Homo sapiens
  misc_RNA (1)...(19): siRNA sense strand
ucaaaggcacugcugauuu

SEQ ID NO: 907443 - RNA, 19 nt, Homo sapiens
  misc_RNA (1)...(19): siRNA sense strand
caccauaaaugaagcuaau

SEQ ID NO: 907444 - RNA, 19 nt, Homo sapiens
  misc_RNA (1)...(19): siRNA sense strand
ugauuugccucagacuuua

SEQ ID NO: 907445 - RNA, 19 nt, Homo sapiens
  misc_RNA (1)...(19): siRNA sense strand
caucuggauuuauuugcua

SEQ ID NO: 907446 - RNA, 19 nt, Homo sapiens
  misc_RNA (1)...(19): siRNA sense strand
ucacgucuguuaccugaug

SEQ ID NO: 907447 - RNA, 19 nt, Homo sapiens
  misc_RNA (1)...(19): siRNA sense strand
acaacucgcuuaaucaagu

SEQ ID NO: 907448 - RNA, 19 nt, Homo sapiens
  misc_RNA (1)...(19): siRNA sense strand
aagcuaauguucuuucugu

SEQ ID NO: 907449 - RNA, 19 nt, Homo sapiens
  misc_RNA (1)...(19): siRNA sense strand
ccagaaaggaauugauuau

SEQ ID NO: 907450 - RNA, 19 nt, Homo sapiens
  misc_RNA (1)...(19): siRNA sense strand
caagaaaggagaacuaggu

SEQ ID NO: 907451 - RNA, 19 nt, Homo sapiens
  misc_RNA (1)...(19): siRNA sense strand
gaaguugucaagucucaga

SEQ ID NO: 907452 - RNA, 19 nt, Homo sapiens
  misc_RNA (1)...(19): siRNA sense strand
gcuaauguucuuucuguga

SEQ ID NO: 907453 - RNA, 19 nt, Homo sapiens
  misc_RNA (1)...(19): siRNA sense strand
ggauacagcagccgguuug

SEQ ID NO: 907454 - RNA, 19 nt, Homo sapiens
  misc_RNA (1)...(19): siRNA sense strand
uuauacaacucgcuuaauc

SEQ ID NO: 907455 - RNA, 19 nt, Homo sapiens
  misc_RNA (1)...(19): siRNA sense strand
ggcuuucccugcaggauuu

SEQ ID NO: 907456 - RNA, 19 nt, Homo sapiens
  misc_RNA (1)...(19): siRNA sense strand
ccgaaacaauggccuugaa

SEQ ID NO: 907457 - RNA, 19 nt, Homo sapiens
  misc_RNA (1)...(19): siRNA sense strand
ucaaguaccaggagaacaa

SEQ ID NO: 907458 - RNA, 19 nt, Homo sapiens
  misc_RNA (1)...(19): siRNA sense strand
gagagagaguuuucaagaa

SEQ ID NO: 907459 - RNA, 19 nt, Homo sapiens
  misc_RNA (1)...(19): siRNA sense strand
ggucucuucuggauaacuu

SEQ ID NO: 907460 - RNA, 19 nt, Homo sapiens
  misc_RNA (1)...(19): siRNA sense strand
gcugugcaauauuauacaa

SEQ ID NO: 907461 - RNA, 19 nt, Homo sapiens
  misc_RNA (1)...(19): siRNA sense strand
guugucaagucucagauug

SEQ ID NO: 907462 - RNA, 19 nt, Homo sapiens
  misc_RNA (1)...(19): siRNA sense strand
uaucaaacagcuuggauug

SEQ ID NO: 907463 - RNA, 19 nt, Homo sapiens
  misc_RNA (1)...(19): siRNA sense strand
cagcagaucccaacucagu

SEQ ID NO: 907464 - RNA, 19 nt, Homo sapiens
  misc_RNA (1)...(19): siRNA sense strand
gacgacagguuucaucaac

SEQ ID NO: 907465 - RNA, 19 nt, Homo sapiens
  misc_RNA (1)...(19): siRNA sense strand
agaaagguauggugucucu

SEQ ID NO: 907466 - RNA, 19 nt, Homo sapiens
  misc_RNA (1)...(19): siRNA sense strand
gccaagaucauccgaaaca

SEQ ID NO: 907467 - RNA, 19 nt, Homo sapiens
  misc_RNA (1)...(19): siRNA sense strand
auucaucgauggugauuau

SEQ ID NO: 907468 - RNA, 19 nt, Homo sapiens
  misc_RNA (1)...(19): siRNA sense strand
uauggugucucuaucacuu

SEQ ID NO: 907469 - RNA, 19 nt, Homo sapiens
  misc_RNA (1)...(19): siRNA sense strand
gauaaagucaaucuucaag

SEQ ID NO: 907470 - RNA, 19 nt, Homo sapiens
  misc_RNA (1)...(19): siRNA sense strand
uuucugugaugucauauga

SEQ ID NO: 907471 - RNA, 19 nt, Homo sapiens
  misc_RNA (1)...(19): siRNA sense strand
gugauuauccugaaguugu

SEQ ID NO: 907472 - RNA, 19 nt, Homo sapiens
  misc_RNA (1)...(19): siRNA sense strand
gauccuggcacagcuauga

SEQ ID NO: 907473 - RNA, 19 nt, Homo sapiens
  misc_RNA (1)...(19): siRNA sense strand
uggauaacuuugaguggaa

SEQ ID NO: 907474 - RNA, 19 nt, Homo sapiens
  misc_RNA (1)...(19): siRNA sense strand
ggacacauuuacucaucag

SEQ ID NO: 907475 - RNA, 19 nt, Homo sapiens
  misc_RNA (1)...(19): siRNA sense strand
uaucaggcagcucauaauu

SEQ ID NO: 907476 - RNA, 19 nt, Homo sapiens
  misc_RNA (1)...(19): siRNA sense strand
caagaucauccgaaacaau

SEQ ID NO: 907477 - RNA, 19 nt, Homo sapiens
  misc_RNA (1)...(19): siRNA sense strand
ggagaacaagaaaggagaa

SEQ ID NO: 907478 - RNA, 19 nt, Homo sapiens
  misc_RNA (1)...(19): siRNA sense strand
gcagaucccaacucagugu

SEQ ID NO: 907479 - RNA, 19 nt, Homo sapiens
  misc_RNA (1)...(19): siRNA sense strand
ggacgacagguuucaucaa

SEQ ID NO: 907480 - RNA, 19 nt, Homo sapiens
  misc_RNA (1)...(19): siRNA sense strand
gacaaacauuucaggaacu

SEQ ID NO: 907481 - RNA, 19 nt, Homo sapiens
  misc_RNA (1)...(19): siRNA sense strand
ggagagagaguuuucaaga

SEQ ID NO: 907482 - RNA, 19 nt, Homo sapiens
  misc_RNA (1)...(19): siRNA sense strand
gggacacauuuacucauca

SEQ ID NO: 907483 - RNA, 19 nt, Homo sapiens
  misc_RNA (1)...(19): siRNA sense strand
cagacaaacauuucaggaa

SEQ ID NO: 907484 - RNA, 19 nt, Homo sapiens
  misc_RNA (1)...(19): siRNA sense strand
ggauuggaucuacguggua

SEQ ID NO: 907485 - RNA, 19 nt, Homo sapiens
  misc_RNA (1)...(19): siRNA sense strand
aagcaaggcuauccaucau

SEQ ID NO: 907486 - RNA, 19 nt, Homo sapiens
  misc_RNA (1)...(19): siRNA sense strand
cuaauguucuuucugugau

SEQ ID NO: 907487 - RNA, 19 nt, Homo sapiens
  misc_RNA (1)...(19): siRNA sense strand
aaagguauggugucucuau

SEQ ID NO: 907488 - RNA, 19 nt, Homo sapiens
  misc_RNA (1)...(19): siRNA sense strand
aaagcaaggcuauccauca

SEQ ID NO: 907489 - RNA, 19 nt, Homo sapiens
  misc_RNA (1)...(19): siRNA sense strand
ucacugaagaagagaagaa

SEQ ID NO: 907490 - RNA, 19 nt, Homo sapiens
  misc_RNA (1)...(19): siRNA sense strand
gaagaagagaagaaaauga

SEQ ID NO: 907491 - RNA, 19 nt, Homo sapiens
  misc_RNA (1)...(19): siRNA sense strand
agcaguggaucaccauaaa

SEQ ID NO: 907492 - RNA, 19 nt, Homo sapiens
  misc_RNA (1)...(19): siRNA sense strand
ccaagaucauccgaaacaa

SEQ ID NO: 907493 - RNA, 19 nt, Homo sapiens
  misc_RNA (1)...(19): siRNA sense strand
cgauggugauuauccugaa

SEQ ID NO: 907494 - RNA, 19 nt, Homo sapiens
  misc_RNA (1)...(19): siRNA sense strand
aaacaauggccuugaagca

SEQ ID NO: 907495 - RNA, 19 nt, Homo sapiens
  misc_RNA (1)...(19): siRNA sense strand
guaccaggagaacaagaaa

SEQ ID NO: 907496 - RNA, 19 nt, Homo sapiens
  misc_RNA (1)...(19): siRNA sense strand
gaaauguaucaaacagcuu

SEQ ID NO: 907497 - RNA, 19 nt, Homo sapiens
  misc_RNA (1)...(19): siRNA sense strand
aagaucauccgaaacaaug

SEQ ID NO: 907498 - RNA, 19 nt, Homo sapiens
  misc_RNA (1)...(19): siRNA sense strand
guaucaaacagcuuggauu

SEQ ID NO: 907499 - RNA, 19 nt, Homo sapiens
  misc_RNA (1)...(19): siRNA sense strand
gcaguggaucaccauaaau

SEQ ID NO: 907500 - RNA, 19 nt, Homo sapiens
  misc_RNA (1)...(19): siRNA sense strand
aagaaaggagaacuaggua

SEQ ID NO: 907501 - RNA, 19 nt, Homo sapiens
  misc_RNA (1)...(19): siRNA sense strand
ccauaaaugaagcuaaugu

SEQ ID NO: 907502 - RNA, 19 nt, Homo sapiens
  misc_RNA (1)...(19): siRNA sense strand
guggaucaccauaaaugaa

SEQ ID NO: 907503 - RNA, 19 nt, Homo sapiens
  misc_RNA (1)...(19): siRNA sense strand
caguggaucaccauaaaug

SEQ ID NO: 907504 - RNA, 19 nt, Homo sapiens
  misc_RNA (1)...(19): siRNA sense strand
caucaaccagaaaggaauu

SEQ ID NO: 907505 - RNA, 19 nt, Homo sapiens
  misc_RNA (1)...(19): siRNA sense strand
ccaggaugcggaaauugaa

SEQ ID NO: 907506 - RNA, 19 nt, Homo sapiens
  misc_RNA (1)...(19): siRNA sense strand
gaagagaagaaaaugauca

SEQ ID NO: 907507 - RNA, 19 nt, Homo sapiens
  misc_RNA (1)...(19): siRNA sense strand
caaacagcuuggauugacu

SEQ ID NO: 907508 - RNA, 19 nt, Homo sapiens
  misc_RNA (1)...(19): siRNA sense strand
gacuggcgauguagcuugu

SEQ ID NO: 907509 - RNA, 19 nt, Homo sapiens
  misc_RNA (1)...(19): siRNA sense strand
aaccagaaaggaauugauu

SEQ ID NO: 907510 - RNA, 19 nt, Homo sapiens
  misc_RNA (1)...(19): siRNA sense strand
ccucuaccacuuugauuug

SEQ ID NO: 907511 - RNA, 19 nt, Homo sapiens
  misc_RNA (1)...(19): siRNA sense strand
ucuccaggaugcggaaauu

SEQ ID NO: 907512 - RNA, 19 nt, Homo sapiens
  misc_RNA (1)...(19): siRNA sense strand
ucagauugccuccaugagu

SEQ ID NO: 907513 - RNA, 19 nt, Homo sapiens
  misc_RNA (1)...(19): siRNA sense strand
gacuuuagaagaccaagga

SEQ ID NO: 907514 - RNA, 19 nt, Homo sapiens
  misc_RNA (1)...(19): siRNA sense strand
uugauuugccucagacuuu

SEQ ID NO: 907515 - RNA, 19 nt, Homo sapiens
  misc_RNA (1)...(19): siRNA sense strand
aagcaguggaucaccauaa

SEQ ID NO: 907516 - RNA, 19 nt, Homo sapiens
  misc_RNA (1)...(19): siRNA sense strand
uguggcagcuacacucugu

SEQ ID NO: 907517 - RNA, 19 nt, Homo sapiens
  misc_RNA (1)...(19): siRNA sense strand
augccaagaucauccgaaa

SEQ ID NO: 907518 - RNA, 19 nt, Homo sapiens
  misc_RNA (1)...(19): siRNA sense strand
ccacugcagcuuaucaagu

SEQ ID NO: 907519 - RNA, 19 nt, Homo sapiens
  misc_RNA (1)...(19): siRNA sense strand
acaaacauuucaggaacug

SEQ ID NO: 907520 - RNA, 19 nt, Homo sapiens
  misc_RNA (1)...(19): siRNA sense strand
ugggacacauuuacucauc

SEQ ID NO: 907521 - RNA, 19 nt, Homo sapiens
  misc_RNA (1)...(19): siRNA sense strand
gauggugauuauccugaag

SEQ ID NO: 907522 - RNA, 19 nt, Homo sapiens
  misc_RNA (1)...(19): siRNA sense strand
uaauguucuuucugugaug

SEQ ID NO: 907523 - RNA, 19 nt, Homo sapiens
  misc_RNA (1)...(19): siRNA sense strand
gaagcuaauguucuuucug

SEQ ID NO: 907524 - RNA, 19 nt, Homo sapiens
  misc_RNA (1)...(19): siRNA sense strand
acccagcgccucuugauga

SEQ ID NO: 907525 - RNA, 19 nt, Homo sapiens
  misc_RNA (1)...(19): siRNA sense strand
gggaguauuucagacaaac

SEQ ID NO: 907526 - RNA, 19 nt, Homo sapiens
  misc_RNA (1)...(19): siRNA sense strand
agaaagagcugaaccacau

SEQ ID NO: 907527 - RNA, 19 nt, Homo sapiens
  misc_RNA (1)...(19): siRNA sense strand
gcgagaugcuccagaaaga

SEQ ID NO: 907528 - RNA, 19 nt, Homo sapiens
  misc_RNA (1)...(19): siRNA sense strand
gaugaguacuggaccuuga

SEQ ID NO: 907529 - RNA, 19 nt, Homo sapiens
  misc_RNA (1)...(19): siRNA sense strand
gaaccuggaugccaaucau

SEQ ID NO: 907530 - RNA, 19 nt, Homo sapiens
  misc_RNA (1)...(19): siRNA sense strand
ggagaaggcagucauuguc

SEQ ID NO: 907531 - RNA, 19 nt, Homo sapiens
  misc_RNA (1)...(19): siRNA sense strand
cuacaaauaugugucuaag

SEQ ID NO: 907532 - RNA, 19 nt, Homo sapiens
  misc_RNA (1)...(19): siRNA sense strand
guggaaaacuucuacaaau

SEQ ID NO: 907533 - RNA, 19 nt, Homo sapiens
  misc_RNA (1)...(19): siRNA sense strand
aguacagccuggucaagaa

SEQ ID NO: 907534 - RNA, 19 nt, Homo sapiens
  misc_RNA (1)...(19): siRNA sense strand
gaaagagcugaaccacaug

SEQ ID NO: 907535 - RNA, 19 nt, Homo sapiens
  misc_RNA (1)...(19): siRNA sense strand
gagcagcuuccgcgagaug

SEQ ID NO: 907536 - RNA, 19 nt, Homo sapiens
  misc_RNA (1)...(19): siRNA sense strand
ucaagaacaagaucagcaa

SEQ ID NO: 907537 - RNA, 19 nt, Homo sapiens
  misc_RNA (1)...(19): siRNA sense strand
agaacaagaucagcaagag

SEQ ID NO: 907538 - RNA, 19 nt, Homo sapiens
  misc_RNA (1)...(19): siRNA sense strand
ggaaggcugcggauaagcu

SEQ ID NO: 907539 - RNA, 19 nt, Homo sapiens
  misc_RNA (1)...(19): siRNA sense strand
caaauaugugucuaaguac

SEQ ID NO: 907540 - RNA, 19 nt, Homo sapiens
  misc_RNA (1)...(19): siRNA sense strand
ugaguacuggaccuugaua

SEQ ID NO: 907541 - RNA, 19 nt, Homo sapiens
  misc_RNA (1)...(19): siRNA sense strand
ccggaaggcugcggauaag

SEQ ID NO: 907542 - RNA, 19 nt, Homo sapiens
  misc_RNA (1)...(19): siRNA sense strand
gcuggagaaggcagucauu

SEQ ID NO: 907543 - RNA, 19 nt, Homo sapiens
  misc_RNA (1)...(19): siRNA sense strand
aagaacaagaucagcaaga

SEQ ID NO: 907544 - RNA, 19 nt, Homo sapiens
  misc_RNA (1)...(19): siRNA sense strand
gaugagagcuuacugaauc

SEQ ID NO: 907545 - RNA, 19 nt, Homo sapiens
  misc_RNA (1)...(19): siRNA sense strand
gaagaugucccaacaccua

SEQ ID NO: 907546 - RNA, 19 nt, Homo sapiens
  misc_RNA (1)...(19): siRNA sense strand
ggacagaauaugugguuau

SEQ ID NO: 907547 - RNA, 19 nt, Homo sapiens
  misc_RNA (1)...(19): siRNA sense strand
gacagaauaugugguuaug

SEQ ID NO: 907548 - RNA, 19 nt, Homo sapiens
  misc_RNA (1)...(19): siRNA sense strand
auacagaauuggaagaugu

SEQ ID NO: 907549 - RNA, 19 nt, Homo sapiens
  misc_RNA (1)...(19): siRNA sense strand
gaaaugucgcagccaagaa

SEQ ID NO: 907550 - RNA, 19 nt, Homo sapiens
  misc_RNA (1)...(19): siRNA sense strand
caagaauacagaauuggaa

SEQ ID NO: 907551 - RNA, 19 nt, Homo sapiens
  misc_RNA (1)...(19): siRNA sense strand
gaauuggacagaauaugug

SEQ ID NO: 907552 - RNA, 19 nt, Homo sapiens
  misc_RNA (1)...(19): siRNA sense strand
ugaauuggacagaauaugu

SEQ ID NO: 907553 - RNA, 19 nt, Homo sapiens
  misc_RNA (1)...(19): siRNA sense strand
gaauacagaauuggaagau

SEQ ID NO: 907554 - RNA, 19 nt, Homo sapiens
  misc_RNA (1)...(19): siRNA sense strand
aaaaugggaugagagcuua

SEQ ID NO: 907555 - RNA, 19 nt, Homo sapiens
  misc_RNA (1)...(19): siRNA sense strand
cagccaagaauacagaauu

SEQ ID NO: 907556 - RNA, 19 nt, Homo sapiens
  misc_RNA (1)...(19): siRNA sense strand
gggaugagagcuuacugaa

SEQ ID NO: 907557 - RNA, 19 nt, Homo sapiens
  misc_RNA (1)...(19): siRNA sense strand
gugagaagcgaauuugaau

SEQ ID NO: 907558 - RNA, 19 nt, Homo sapiens
  misc_RNA (1)...(19): siRNA sense strand
uaugcaugcuguuugagaa

SEQ ID NO: 907559 - RNA, 19 nt, Homo sapiens
  misc_RNA (1)...(19): siRNA sense strand
gaaaaugggaugagagcuu

SEQ ID NO: 907560 - RNA, 19 nt, Homo sapiens
  misc_RNA (1)...(19): siRNA sense strand
gagagcuuacugaaucgua

SEQ ID NO: 907561 - RNA, 19 nt, Homo sapiens
  misc_RNA (1)...(19): siRNA sense strand
uaucaagaucuuccaguga

SEQ ID NO: 907562 - RNA, 19 nt, Homo sapiens
  misc_RNA (1)...(19): siRNA sense strand
ggaugagagcuuacugaau

SEQ ID NO: 907563 - RNA, 19 nt, Homo sapiens
  misc_RNA (1)...(19): siRNA sense strand
ucaagaucuuccagugaga

SEQ ID NO: 907564 - RNA, 19 nt, Homo sapiens
  misc_RNA (1)...(19): siRNA sense strand
agccaagaauacagaauug

SEQ ID NO: 907565 - RNA, 19 nt, Homo sapiens
  misc_RNA (1)...(19): siRNA sense strand
ccagugagaagcgaauuug

SEQ ID NO: 907566 - RNA, 19 nt, Homo sapiens
  misc_RNA (1)...(19): siRNA sense strand
ccguuucucuucuacucua

SEQ ID NO: 907567 - RNA, 19 nt, Homo sapiens
  misc_RNA (1)...(19): siRNA sense strand
gagacuugugcugcuauua

SEQ ID NO: 907568 - RNA, 19 nt, Homo sapiens
  misc_RNA (1)...(19): siRNA sense strand
cuucuacucuaucaagauc

SEQ ID NO: 907569 - RNA, 19 nt, Homo sapiens
  misc_RNA (1)...(19): siRNA sense strand
caagaucuuccagugagaa

SEQ ID NO: 907570 - RNA, 19 nt, Homo sapiens
  misc_RNA (1)...(19): siRNA sense strand
aaaugucgcagccaagaau

SEQ ID NO: 907571 - RNA, 19 nt, Homo sapiens
  misc_RNA (1)...(19): siRNA sense strand
agacuugugcugcuauuag

SEQ ID NO: 907572 - RNA, 19 nt, Homo sapiens
  misc_RNA (1)...(19): siRNA sense strand
agagacuugugcugcuauu

SEQ ID NO: 907573 - RNA, 19 nt, Homo sapiens
  misc_RNA (1)...(19): siRNA sense strand
gcccguugccggaagaaau

SEQ ID NO: 907574 - RNA, 19 nt, Homo sapiens
  misc_RNA (1)...(19): siRNA sense strand
ucuacucuaucaagaucuu

SEQ ID NO: 907575 - RNA, 19 nt, Homo sapiens
  misc_RNA (1)...(19): siRNA sense strand
agugagaagcgaauuugaa

SEQ ID NO: 907576 - RNA, 19 nt, Homo sapiens
  misc_RNA (1)...(19): siRNA sense strand
agaaaugucgcagccaaga

SEQ ID NO: 907577 - RNA, 19 nt, Homo sapiens
  misc_RNA (1)...(19): siRNA sense strand
uggacagaauaugugguua

SEQ ID NO: 907578 - RNA, 19 nt, Homo sapiens
  misc_RNA (1)...(19): siRNA sense strand
gcagcucccuugucucuua

SEQ ID NO: 907579 - RNA, 19 nt, Homo sapiens
  misc_RNA (1)...(19): siRNA sense strand
caaaggaggugcucugaug

SEQ ID NO: 907580 - RNA, 19 nt, Homo sapiens
  misc_RNA (1)...(19): siRNA sense strand
gcuguacucuaccuauuua

SEQ ID NO: 907581 - RNA, 19 nt, Homo sapiens
  misc_RNA (1)...(19): siRNA sense strand
agaaggagcucaugauugu

SEQ ID NO: 907582 - RNA, 19 nt, Homo sapiens
  misc_RNA (1)...(19): siRNA sense strand
ggccagcucuucaucuaua

SEQ ID NO: 907583 - RNA, 19 nt, Homo sapiens
  misc_RNA (1)...(19): siRNA sense strand
ggacaucgcguaucccaaa

SEQ ID NO: 907584 - RNA, 19 nt, Homo sapiens
  misc_RNA (1)...(19): siRNA sense strand
gcagaagccaucauaguuu

SEQ ID NO: 907585 - RNA, 19 nt, Homo sapiens
  misc_RNA (1)...(19): siRNA sense strand
gcauuucuguaucagcuua

SEQ ID NO: 907586 - RNA, 19 nt, Homo sapiens
  misc_RNA (1)...(19): siRNA sense strand
ucaccacgaugccagaaua

SEQ ID NO: 907587 - RNA, 19 nt, Homo sapiens
  misc_RNA (1)...(19): siRNA sense strand
ggaaguggacauuucauug

SEQ ID NO: 907588 - RNA, 19 nt, Homo sapiens
  misc_RNA (1)...(19): siRNA sense strand
uguaucagcuuaugaacuu

SEQ ID NO: 907589 - RNA, 19 nt, Homo sapiens
  misc_RNA (1)...(19): siRNA sense strand
gaaccugucccaugccaaa

SEQ ID NO: 907590 - RNA, 19 nt, Homo sapiens
  misc_RNA (1)...(19): siRNA sense strand
ggacaucgcggugcuaguu

SEQ ID NO: 907591 - RNA, 19 nt, Homo sapiens
  misc_RNA (1)...(19): siRNA sense strand
gagaaggagcucaugauug

SEQ ID NO: 907592 - RNA, 19 nt, Homo sapiens
  misc_RNA (1)...(19): siRNA sense strand
ggccaucacugcuguauac

SEQ ID NO: 907593 - RNA, 19 nt, Homo sapiens
  misc_RNA (1)...(19): siRNA sense strand
gcgcuucgguggcaucaga

SEQ ID NO: 907594 - RNA, 19 nt, Homo sapiens
  misc_RNA (1)...(19): siRNA sense strand
ucaccaagaucucgguaga

SEQ ID NO: 907595 - RNA, 19 nt, Homo sapiens
  misc_RNA (1)...(19): siRNA sense strand
gcggccagcucuucaucua

SEQ ID NO: 907596 - RNA, 19 nt, Homo sapiens
  misc_RNA (1)...(19): siRNA sense strand
uggaaggacugaaggagaa

SEQ ID NO: 907597 - RNA, 19 nt, Homo sapiens
  misc_RNA (1)...(19): siRNA sense strand
cagaagccaucauaguuuc

SEQ ID NO: 907598 - RNA, 19 nt, Homo sapiens
  misc_RNA (1)...(19): siRNA sense strand
ugaacuuaauggcuuguuu

SEQ ID NO: 907599 - RNA, 19 nt, Homo sapiens
  misc_RNA (1)...(19): siRNA sense strand
gagcagaagccaucauagu

SEQ ID NO: 907600 - RNA, 19 nt, Homo sapiens
  misc_RNA (1)...(19): siRNA sense strand
caagaaaacacgucuaaaa

SEQ ID NO: 907601 - RNA, 19 nt, Homo sapiens
  misc_RNA (1)...(19): siRNA sense strand
ucccucaccuccaucuuua

SEQ ID NO: 907602 - RNA, 19 nt, Homo sapiens
  misc_RNA (1)...(19): siRNA sense strand
caagaucucgguagacaug

SEQ ID NO: 907603 - RNA, 19 nt, Homo sapiens
  misc_RNA (1)...(19): siRNA sense strand
guaugcaggugccaucuuc

SEQ ID NO: 907604 - RNA, 19 nt, Homo sapiens
  misc_RNA (1)...(19): siRNA sense strand
gaaguggacauuucauugg

SEQ ID NO: 907605 - RNA, 19 nt, Homo sapiens
  misc_RNA (1)...(19): siRNA sense strand
ccauggaccucuggaauca

SEQ ID NO: 907606 - RNA, 19 nt, Homo sapiens
  misc_RNA (1)...(19): siRNA sense strand
ucacagagccacccuccaa

SEQ ID NO: 907607 - RNA, 19 nt, Homo sapiens
  misc_RNA (1)...(19): siRNA sense strand
caaaagagacacagugaaa

SEQ ID NO: 907608 - RNA, 19 nt, Homo sapiens
  misc_RNA (1)...(19): siRNA sense strand
gaaaaccccuuggugaaga

SEQ ID NO: 907609 - RNA, 19 nt, Homo sapiens
  misc_RNA (1)...(19): siRNA sense strand
uaggagcgcucaccuugau

SEQ ID NO: 907610 - RNA, 19 nt, Homo sapiens
  misc_RNA (1)...(19): siRNA sense strand
guucuguacuuccucuuug

SEQ ID NO: 907611 - RNA, 19 nt, Homo sapiens
  misc_RNA (1)...(19): siRNA sense strand
cagagcagaagccaucaua

SEQ ID NO: 907612 - RNA, 19 nt, Homo sapiens
  misc_RNA (1)...(19): siRNA sense strand
cauccuggcuguacucuac

SEQ ID NO: 907613 - RNA, 19 nt, Homo sapiens
  misc_RNA (1)...(19): siRNA sense strand
ggaagaggaccaaugaaaa

SEQ ID NO: 907614 - RNA, 19 nt, Homo sapiens
  misc_RNA (1)...(19): siRNA sense strand
gagcugcgccaucuuuauc

SEQ ID NO: 907615 - RNA, 19 nt, Homo sapiens
  misc_RNA (1)...(19): siRNA sense strand
gcuagcaaccggagugaga

SEQ ID NO: 907616 - RNA, 19 nt, Homo sapiens
  misc_RNA (1)...(19): siRNA sense strand
caccugaccugguuuacuc

SEQ ID NO: 907617 - RNA, 19 nt, Homo sapiens
  misc_RNA (1)...(19): siRNA sense strand
uggaagaggaccaaugaaa

SEQ ID NO: 907618 - RNA, 19 nt, Homo sapiens
  misc_RNA (1)...(19): siRNA sense strand
caaguggccugugcagauc

SEQ ID NO: 907619 - RNA, 19 nt, Homo sapiens
  misc_RNA (1)...(19): siRNA sense strand
gcuacgggcauuucuguau

SEQ ID NO: 907620 - RNA, 19 nt, Homo sapiens
  misc_RNA (1)...(19): siRNA sense strand
gaugcgaccagccagauga

SEQ ID NO: 907621 - RNA, 19 nt, Homo sapiens
  misc_RNA (1)...(19): siRNA sense strand
gaacuuaauggcuuguuuu

SEQ ID NO: 907622 - RNA, 19 nt, Homo sapiens
  misc_RNA (1)...(19): siRNA sense strand
gauguuggccuggaucuuc

SEQ ID NO: 907623 - RNA, 19 nt, Homo sapiens
  misc_RNA (1)...(19): siRNA sense strand
gaugguggcggcucucaug

SEQ ID NO: 907624 - RNA, 19 nt, Homo sapiens
  misc_RNA (1)...(19): siRNA sense strand
ucaaguggccugugcagau

SEQ ID NO: 907625 - RNA, 19 nt, Homo sapiens
  misc_RNA (1)...(19): siRNA sense strand
gugcucugauggcugcaua

SEQ ID NO: 907626 - RNA, 19 nt, Homo sapiens
  misc_RNA (1)...(19): siRNA sense strand
ggaucuuccuacccaucua

SEQ ID NO: 907627 - RNA, 19 nt, Homo sapiens
  misc_RNA (1)...(19): siRNA sense strand
gcccucagccuccacaguu

SEQ ID NO: 907628 - RNA, 19 nt, Homo sapiens
  misc_RNA (1)...(19): siRNA sense strand
ggccauaguugggcuacug

SEQ ID NO: 907629 - RNA, 19 nt, Homo sapiens
  misc_RNA (1)...(19): siRNA sense strand
ucucuuacccucucucaga

SEQ ID NO: 907630 - RNA, 19 nt, Homo sapiens
  misc_RNA (1)...(19): siRNA sense strand
guacucuaccuauuuaucu

SEQ ID NO: 907631 - RNA, 19 nt, Homo sapiens
  misc_RNA (1)...(19): siRNA sense strand
guaucagcuuaugaacuua

SEQ ID NO: 907632 - RNA, 19 nt, Homo sapiens
  misc_RNA (1)...(19): siRNA sense strand
uggcuguacucuaccuauu

SEQ ID NO: 907633 - RNA, 19 nt, Homo sapiens
  misc_RNA (1)...(19): siRNA sense strand
gugggugcauccuuguuug

SEQ ID NO: 907634 - RNA, 19 nt, Homo sapiens
  misc_RNA (1)...(19): siRNA sense strand
gcagcagcguccaguucga

SEQ ID NO: 907635 - RNA, 19 nt, Homo sapiens
  misc_RNA (1)...(19): siRNA sense strand
ggugcuaguucuguacuuc

SEQ ID NO: 907636 - RNA, 19 nt, Homo sapiens
  misc_RNA (1)...(19): siRNA sense strand
cuacgggcauuucuguauc

SEQ ID NO: 907637 - RNA, 19 nt, Homo sapiens
  misc_RNA (1)...(19): siRNA sense strand
gaagaggaccaaugaaaag

SEQ ID NO: 907638 - RNA, 19 nt, Homo sapiens
  misc_RNA (1)...(19): siRNA sense strand
ucgcggugcuaguucugua

SEQ ID NO: 907639 - RNA, 19 nt, Homo sapiens
  misc_RNA (1)...(19): siRNA sense strand
ggcuguacucuaccuauuu

SEQ ID NO: 907640 - RNA, 19 nt, Homo sapiens
  misc_RNA (1)...(19): siRNA sense strand
uaccucuacuucuccauga

SEQ ID NO: 907641 - RNA, 19 nt, Homo sapiens
  misc_RNA (1)...(19): siRNA sense strand
ucuggaagaggaccaauga

SEQ ID NO: 907642 - RNA, 19 nt, Homo sapiens
  misc_RNA (1)...(19): siRNA sense strand
agacgcugaucaugcuuau

SEQ ID NO: 907643 - RNA, 19 nt, Homo sapiens
  misc_RNA (1)...(19): siRNA sense strand
gaucucgguagacauguau

SEQ ID NO: 907644 - RNA, 19 nt, Homo sapiens
  misc_RNA (1)...(19): siRNA sense strand
cccucagccuccacaguua

SEQ ID NO: 907645 - RNA, 19 nt, Homo sapiens
  misc_RNA (1)...(19): siRNA sense strand
cuaccuauuuaucuacauc

SEQ ID NO: 907646 - RNA, 19 nt, Homo sapiens
  misc_RNA (1)...(19): siRNA sense strand
cagcagcucccuugucucu

SEQ ID NO: 907647 - RNA, 19 nt, Homo sapiens
  misc_RNA (1)...(19): siRNA sense strand
gagcauucacuaccucuac

SEQ ID NO: 907648 - RNA, 19 nt, Homo sapiens
  misc_RNA (1)...(19): siRNA sense strand
agaucucgguagacaugua

SEQ ID NO: 907649 - RNA, 19 nt, Homo sapiens
  misc_RNA (1)...(19): siRNA sense strand
gugagcugcgccaucuuua

SEQ ID NO: 907650 - RNA, 19 nt, Homo sapiens
  misc_RNA (1)...(19): siRNA sense strand
guucggacaucgcguaucc

SEQ ID NO: 907651 - RNA, 19 nt, Homo sapiens
  misc_RNA (1)...(19): siRNA sense strand
cagacgcugaucaugcuua

SEQ ID NO: 907652 - RNA, 19 nt, Homo sapiens
  misc_RNA (1)...(19): siRNA sense strand
cgugagcugcgccaucuuu

SEQ ID NO: 907653 - RNA, 19 nt, Homo sapiens
  misc_RNA (1)...(19): siRNA sense strand
cagcagcagcguccaguuc

SEQ ID NO: 907654 - RNA, 19 nt, Homo sapiens
  misc_RNA (1)...(19): siRNA sense strand
gacugaaggagaaguacuu

SEQ ID NO: 907655 - RNA, 19 nt, Homo sapiens
  misc_RNA (1)...(19): siRNA sense strand
aaagagacacagugaaagg

SEQ ID NO: 907656 - RNA, 19 nt, Homo sapiens
  misc_RNA (1)...(19): siRNA sense strand
uguuggaaguggacauuuc

SEQ ID NO: 907657 - RNA, 19 nt, Homo sapiens
  misc_RNA (1)...(19): siRNA sense strand
agcagaagccaucauaguu

SEQ ID NO: 907658 - RNA, 19 nt, Homo sapiens
  misc_RNA (1)...(19): siRNA sense strand
ucaccuccaucuuuaacag

SEQ ID NO: 907659 - RNA, 19 nt, Homo sapiens
  misc_RNA (1)...(19): siRNA sense strand
uggccuggcugcugugauc

SEQ ID NO: 907660 - RNA, 19 nt, Homo sapiens
  misc_RNA (1)...(19): siRNA sense strand
cuuugcaccuggaucugua

SEQ ID NO: 907661 - RNA, 19 nt, Homo sapiens
  misc_RNA (1)...(19): siRNA sense strand
gccagcucuucaucuauau

SEQ ID NO: 907662 - RNA, 19 nt, Homo sapiens
  misc_RNA (1)...(19): siRNA sense strand
ggauggaaggacugaagga

SEQ ID NO: 907663 - RNA, 19 nt, Homo sapiens
  misc_RNA (1)...(19): siRNA sense strand
acgcugaucaugcuuauag

SEQ ID NO: 907664 - RNA, 19 nt, Homo sapiens
  misc_RNA (1)...(19): siRNA sense strand
cacgaugccagaauaccua

SEQ ID NO: 907665 - RNA, 19 nt, Homo sapiens
  misc_RNA (1)...(19): siRNA sense strand
gcugugacaugaccccaaa

SEQ ID NO: 907666 - RNA, 19 nt, Homo sapiens
  misc_RNA (1)...(19): siRNA sense strand
gggcugaugauggcuguga

SEQ ID NO: 907667 - RNA, 19 nt, Homo sapiens
  misc_RNA (1)...(19): siRNA sense strand
ggucagccgcauccucuuc

SEQ ID NO: 907668 - RNA, 19 nt, Homo sapiens
  misc_RNA (1)...(19): siRNA sense strand
uuaucuacaucuucaccaa

SEQ ID NO: 907669 - RNA, 19 nt, Homo sapiens
  misc_RNA (1)...(19): siRNA sense strand
accaagaucucgguagaca

SEQ ID NO: 907670 - RNA, 19 nt, Homo sapiens
  misc_RNA (1)...(19): siRNA sense strand
cagcuuaugaacuuaaugg

SEQ ID NO: 907671 - RNA, 19 nt, Homo sapiens
  misc_RNA (1)...(19): siRNA sense strand
ggacgucaaccucauuuuc

SEQ ID NO: 907672 - RNA, 19 nt, Homo sapiens
  misc_RNA (1)...(19): siRNA sense strand
ggagaagggcaaggaagag

SEQ ID NO: 907673 - RNA, 19 nt, Homo sapiens
  misc_RNA (1)...(19): siRNA sense strand
caccauggaccucuggaau

SEQ ID NO: 907674 - RNA, 19 nt, Homo sapiens
  misc_RNA (1)...(19): siRNA sense strand
gccaaaggaggugcucuga

SEQ ID NO: 907675 - RNA, 19 nt, Homo sapiens
  misc_RNA (1)...(19): siRNA sense strand
gcugaucaugcuuauagga

SEQ ID NO: 907676 - RNA, 19 nt, Homo sapiens
  misc_RNA (1)...(19): siRNA sense strand
gaucuguaccuggccauag

SEQ ID NO: 907677 - RNA, 19 nt, Homo sapiens
  misc_RNA (1)...(19): siRNA sense strand
uggaaguggacauuucauu

SEQ ID NO: 907678 - RNA, 19 nt, Homo sapiens
  misc_RNA (1)...(19): siRNA sense strand
ggaccacgcugaccuguag

SEQ ID NO: 907679 - RNA, 19 nt, Homo sapiens
  misc_RNA (1)...(19): siRNA sense strand
gaaaugacccgcgaagaga

SEQ ID NO: 907680 - RNA, 19 nt, Homo sapiens
  misc_RNA (1)...(19): siRNA sense strand
gcaggacauuccauucuau

SEQ ID NO: 907681 - RNA, 19 nt, Homo sapiens
  misc_RNA (1)...(19): siRNA sense strand
gacauuccauucuaucaca

SEQ ID NO: 907682 - RNA, 19 nt, Homo sapiens
  misc_RNA (1)...(19): siRNA sense strand
cgcaggacauuccauucua

SEQ ID NO: 907683 - RNA, 19 nt, Homo sapiens
  misc_RNA (1)...(19): siRNA sense strand
ugaaaugacccgcgaagag

SEQ ID NO: 907684 - RNA, 19 nt, Homo sapiens
  misc_RNA (1)...(19): siRNA sense strand
ugcaggagcucggcuucua

SEQ ID NO: 907685 - RNA, 19 nt, Homo sapiens
  misc_RNA (1)...(19): siRNA sense strand
cagcugaaccgccuaaagg

SEQ ID NO: 907686 - RNA, 19 nt, Homo sapiens
  misc_RNA (1)...(19): siRNA sense strand
ucacgcaggacauuccauu

SEQ ID NO: 907687 - RNA, 19 nt, Homo sapiens
  misc_RNA (1)...(19): siRNA sense strand
cuagagcgcaucccacuca

SEQ ID NO: 907688 - RNA, 19 nt, Homo sapiens
  misc_RNA (1)...(19): siRNA sense strand
agagaucaaugcgcuagug

SEQ ID NO: 907689 - RNA, 19 nt, Homo sapiens
  misc_RNA (1)...(19): siRNA sense strand
ugacagcugaaccgccuaa

SEQ ID NO: 907690 - RNA, 19 nt, Homo sapiens
  misc_RNA (1)...(19): siRNA sense strand
ggacauuccauucuaucac

SEQ ID NO: 907691 - RNA, 19 nt, Homo sapiens
  misc_RNA (1)...(19): siRNA sense strand
acaaccuggugaugaaaca

SEQ ID NO: 907692 - RNA, 19 nt, Homo sapiens
  misc_RNA (1)...(19): siRNA sense strand
gaucuuggguggaguuuaa

SEQ ID NO: 907693 - RNA, 19 nt, Homo sapiens
  misc_RNA (1)...(19): siRNA sense strand
gcacagauccuggaaauga

SEQ ID NO: 907694 - RNA, 19 nt, Homo sapiens
  misc_RNA (1)...(19): siRNA sense strand
aaacauacuuugaccauga

SEQ ID NO: 907695 - RNA, 19 nt, Homo sapiens
  misc_RNA (1)...(19): siRNA sense strand
gaagacagcuaugaucuca

SEQ ID NO: 907696 - RNA, 19 nt, Homo sapiens
  misc_RNA (1)...(19): siRNA sense strand
cuacagaauuggcuucaua

SEQ ID NO: 907697 - RNA, 19 nt, Homo sapiens
  misc_RNA (1)...(19): siRNA sense strand
caaagaaccugacccuugu

SEQ ID NO: 907698 - RNA, 19 nt, Homo sapiens
  misc_RNA (1)...(19): siRNA sense strand
gaaugucaaucccaaggua

SEQ ID NO: 907699 - RNA, 19 nt, Homo sapiens
  misc_RNA (1)...(19): siRNA sense strand
uggaagagcuugaaaggaa

SEQ ID NO: 907700 - RNA, 19 nt, Homo sapiens
  misc_RNA (1)...(19): siRNA sense strand
gaaacgagggcugaucuua

SEQ ID NO: 907701 - RNA, 19 nt, Homo sapiens
  misc_RNA (1)...(19): siRNA sense strand
gacaagagauuaacuucug

SEQ ID NO: 907702 - RNA, 19 nt, Homo sapiens
  misc_RNA (1)...(19): siRNA sense strand
gcaccuuucugucuaaaug

SEQ ID NO: 907703 - RNA, 19 nt, Homo sapiens
  misc_RNA (1)...(19): siRNA sense strand
guacuacacuucaacgaau

SEQ ID NO: 907704 - RNA, 19 nt, Homo sapiens
  misc_RNA (1)...(19): siRNA sense strand
ucaaggaacucuucagcaa

SEQ ID NO: 907705 - RNA, 19 nt, Homo sapiens
  misc_RNA (1)...(19): siRNA sense strand
gaaccugacccuugucuga

SEQ ID NO: 907706 - RNA, 19 nt, Homo sapiens
  misc_RNA (1)...(19): siRNA sense strand
ggaagagcuugaaaggaaa

SEQ ID NO: 907707 - RNA, 19 nt, Homo sapiens
  misc_RNA (1)...(19): siRNA sense strand
auacuuagauggugugauu

SEQ ID NO: 907708 - RNA, 19 nt, Homo sapiens
  misc_RNA (1)...(19): siRNA sense strand
uuacggauaucuuugauga

SEQ ID NO: 907709 - RNA, 19 nt, Homo sapiens
  misc_RNA (1)...(19): siRNA sense strand
ggugaaugcuguuuacuuc

SEQ ID NO: 907710 - RNA, 19 nt, Homo sapiens
  misc_RNA (1)...(19): siRNA sense strand
gggcugaucuuacuggaau

SEQ ID NO: 907711 - RNA, 19 nt, Homo sapiens
  misc_RNA (1)...(19): siRNA sense strand
gagcaggaauucccaaucu

SEQ ID NO: 907712 - RNA, 19 nt, Homo sapiens
  misc_RNA (1)...(19): siRNA sense strand
gcuaugaucucaauuccau

SEQ ID NO: 907713 - RNA, 19 nt, Homo sapiens
  misc_RNA (1)...(19): siRNA sense strand
ggaugcaccuuucugucua

SEQ ID NO: 907714 - RNA, 19 nt, Homo sapiens
  misc_RNA (1)...(19): siRNA sense strand
caaaugggaaacauacuuu

SEQ ID NO: 907715 - RNA, 19 nt, Homo sapiens
  misc_RNA (1)...(19): siRNA sense strand
cagcuucucuccaaauuag

SEQ ID NO: 907716 - RNA, 19 nt, Homo sapiens
  misc_RNA (1)...(19): siRNA sense strand
uagauggugugauucaauu

SEQ ID NO: 907717 - RNA, 19 nt, Homo sapiens
  misc_RNA (1)...(19): siRNA sense strand
gacaugggcauuacggaua

SEQ ID NO: 907718 - RNA, 19 nt, Homo sapiens
  misc_RNA (1)...(19): siRNA sense strand
gaagugacagugcacauca

SEQ ID NO: 907719 - RNA, 19 nt, Homo sapiens
  misc_RNA (1)...(19): siRNA sense strand
agacagcuaugaucucaau

SEQ ID NO: 907720 - RNA, 19 nt, Homo sapiens
  misc_RNA (1)...(19): siRNA sense strand
gcaaggacgcuauuaaugc

SEQ ID NO: 907721 - RNA, 19 nt, Homo sapiens
  misc_RNA (1)...(19): siRNA sense strand
gauuacacacugaguauug

SEQ ID NO: 907722 - RNA, 19 nt, Homo sapiens
  misc_RNA (1)...(19): siRNA sense strand
caaccacccuuuucucuuu

SEQ ID NO: 907723 - RNA, 19 nt, Homo sapiens
  misc_RNA (1)...(19): siRNA sense strand
aaacaagagugugaagaug

SEQ ID NO: 907724 - RNA, 19 nt, Homo sapiens
  misc_RNA (1)...(19): siRNA sense strand
gaugcaccuuucugucuaa

SEQ ID NO: 907725 - RNA, 19 nt, Homo sapiens
  misc_RNA (1)...(19): siRNA sense strand
caagagauaggcaaagaug

SEQ ID NO: 907726 - RNA, 19 nt, Homo sapiens
  misc_RNA (1)...(19): siRNA sense strand
caacaaaacccaaaccauu

SEQ ID NO: 907727 - RNA, 19 nt, Homo sapiens
  misc_RNA (1)...(19): siRNA sense strand
ggaaaggucacuacgaucu

SEQ ID NO: 907728 - RNA, 19 nt, Homo sapiens
  misc_RNA (1)...(19): siRNA sense strand
aaaggccucuacagaauug

SEQ ID NO: 907729 - RNA, 19 nt, Homo sapiens
  misc_RNA (1)...(19): siRNA sense strand
uagacaggaucaagacuga

SEQ ID NO: 907730 - RNA, 19 nt, Homo sapiens
  misc_RNA (1)...(19): siRNA sense strand
gggcauuacggauaucuuu

SEQ ID NO: 907731 - RNA, 19 nt, Homo sapiens
  misc_RNA (1)...(19): siRNA sense strand
ggaaacauacuuugaccau

SEQ ID NO: 907732 - RNA, 19 nt, Homo sapiens
  misc_RNA (1)...(19): siRNA sense strand
ucagauugaugagguacua

SEQ ID NO: 907733 - RNA, 19 nt, Homo sapiens
  misc_RNA (1)...(19): siRNA sense strand
acggauaucuuugaugaaa

SEQ ID NO: 907734 - RNA, 19 nt, Homo sapiens
  misc_RNA (1)...(19): siRNA sense strand
gaaaacaugucagaagaau

SEQ ID NO: 907735 - RNA, 19 nt, Homo sapiens
  misc_RNA (1)...(19): siRNA sense strand
gcauuacggauaucuuuga

SEQ ID NO: 907736 - RNA, 19 nt, Homo sapiens
  misc_RNA (1)...(19): siRNA sense strand
gcagcuucucuccaaauua

SEQ ID NO: 907737 - RNA, 19 nt, Homo sapiens
  misc_RNA (1)...(19): siRNA sense strand
aaaggaaaaucaccuauga

SEQ ID NO: 907738 - RNA, 19 nt, Homo sapiens
  misc_RNA (1)...(19): siRNA sense strand
gcugccaucucacucuaaa

SEQ ID NO: 907739 - RNA, 19 nt, Homo sapiens
  misc_RNA (1)...(19): siRNA sense strand
ugacagugcacaucagauu

SEQ ID NO: 907740 - RNA, 19 nt, Homo sapiens
  misc_RNA (1)...(19): siRNA sense strand
uuacaagacaugggcauua

SEQ ID NO: 907741 - RNA, 19 nt, Homo sapiens
  misc_RNA (1)...(19): siRNA sense strand
gcuggguccuuaaacaaug

SEQ ID NO: 907742 - RNA, 19 nt, Homo sapiens
  misc_RNA (1)...(19): siRNA sense strand
ggcagcuucucuccaaauu

SEQ ID NO: 907743 - RNA, 19 nt, Homo sapiens
  misc_RNA (1)...(19): siRNA sense strand
aaagcuggguccuuaaaca

SEQ ID NO: 907744 - RNA, 19 nt, Homo sapiens
  misc_RNA (1)...(19): siRNA sense strand
gaaaggucacuacgaucuu

SEQ ID NO: 907745 - RNA, 19 nt, Homo sapiens
  misc_RNA (1)...(19): siRNA sense strand
caaggacgcuauuaaugcu

SEQ ID NO: 907746 - RNA, 19 nt, Homo sapiens
  misc_RNA (1)...(19): siRNA sense strand
cgauugaaaguguugauuu

SEQ ID NO: 907747 - RNA, 19 nt, Homo sapiens
  misc_RNA (1)...(19): siRNA sense strand
gcaggaauucccaaucugu

SEQ ID NO: 907748 - RNA, 19 nt, Homo sapiens
  misc_RNA (1)...(19): siRNA sense strand
cagcaaggacgcuauuaau

SEQ ID NO: 907749 - RNA, 19 nt, Homo sapiens
  misc_RNA (1)...(19): siRNA sense strand
cagaaaacaugucagaaga

SEQ ID NO: 907750 - RNA, 19 nt, Homo sapiens
  misc_RNA (1)...(19): siRNA sense strand
ccaaaugggaaacauacuu

SEQ ID NO: 907751 - RNA, 19 nt, Homo sapiens
  misc_RNA (1)...(19): siRNA sense strand
aaaggucacuacgaucuug

SEQ ID NO: 907752 - RNA, 19 nt, Homo sapiens
  misc_RNA (1)...(19): siRNA sense strand
ucggaaaggucacuacgau

SEQ ID NO: 907753 - RNA, 19 nt, Homo sapiens
  misc_RNA (1)...(19): siRNA sense strand
uaacuucuggguugaaugu

SEQ ID NO: 907754 - RNA, 19 nt, Homo sapiens
  misc_RNA (1)...(19): siRNA sense strand
ggauaucuuugaugaaacg

SEQ ID NO: 907755 - RNA, 19 nt, Homo sapiens
  misc_RNA (1)...(19): siRNA sense strand
uuacagcaaacaccaaauu

SEQ ID NO: 907756 - RNA, 19 nt, Homo sapiens
  misc_RNA (1)...(19): siRNA sense strand
ucagcaaggacgcuauuaa

SEQ ID NO: 907757 - RNA, 19 nt, Homo sapiens
  misc_RNA (1)...(19): siRNA sense strand
aggcacagauccuggaaau

SEQ ID NO: 907758 - RNA, 19 nt, Homo sapiens
  misc_RNA (1)...(19): siRNA sense strand
acaagagugugaagaugau

SEQ ID NO: 907759 - RNA, 19 nt, Homo sapiens
  misc_RNA (1)...(19): siRNA sense strand
gguacuacacuucaacgaa

SEQ ID NO: 907760 - RNA, 19 nt, Homo sapiens
  misc_RNA (1)...(19): siRNA sense strand
caacgaauuuucccagaau

SEQ ID NO: 907761 - RNA, 19 nt, Homo sapiens
  misc_RNA (1)...(19): siRNA sense strand
gaugagguacuacacuuca

SEQ ID NO: 907762 - RNA, 19 nt, Homo sapiens
  misc_RNA (1)...(19): siRNA sense strand
cuggucagcugcuacuuug

SEQ ID NO: 907763 - RNA, 19 nt, Homo sapiens
  misc_RNA (1)...(19): siRNA sense strand
aaacaugucagaagaaucg

SEQ ID NO: 907764 - RNA, 19 nt, Homo sapiens
  misc_RNA (1)...(19): siRNA sense strand
gugaagaugaugacgcaaa

SEQ ID NO: 907765 - RNA, 19 nt, Homo sapiens
  misc_RNA (1)...(19): siRNA sense strand
caaauuagacaggaucaag

SEQ ID NO: 907766 - RNA, 19 nt, Homo sapiens
  misc_RNA (1)...(19): siRNA sense strand
ugucaggaauacuuagaug

SEQ ID NO: 907767 - RNA, 19 nt, Homo sapiens
  misc_RNA (1)...(19): siRNA sense strand
cccaaaccauucucuuuua

SEQ ID NO: 907768 - RNA, 19 nt, Homo sapiens
  misc_RNA (1)...(19): siRNA sense strand
gaaugcuguuuacuucaag

SEQ ID NO: 907769 - RNA, 19 nt, Homo sapiens
  misc_RNA (1)...(19): siRNA sense strand
ggaaaaucaccuaugaaaa

SEQ ID NO: 907770 - RNA, 19 nt, Homo sapiens
  misc_RNA (1)...(19): siRNA sense strand
ccagacaagagauuaacuu

SEQ ID NO: 907771 - RNA, 19 nt, Homo sapiens
  misc_RNA (1)...(19): siRNA sense strand
gaaggcacagauccuggaa

SEQ ID NO: 907772 - RNA, 19 nt, Homo sapiens
  misc_RNA (1)...(19): siRNA sense strand
ccucucagcugcccuuggu

SEQ ID NO: 907773 - RNA, 19 nt, Homo sapiens
  misc_RNA (1)...(19): siRNA sense strand
ggaagacagcuaugaucuc

SEQ ID NO: 907774 - RNA, 19 nt, Homo sapiens
  misc_RNA (1)...(19): siRNA sense strand
acaugggcauuacggauau

SEQ ID NO: 907775 - RNA, 19 nt, Homo sapiens
  misc_RNA (1)...(19): siRNA sense strand
gaaaggaaaaucaccuaug

SEQ ID NO: 907776 - RNA, 19 nt, Homo sapiens
  misc_RNA (1)...(19): siRNA sense strand
cuccaagucccaauuugua

SEQ ID NO: 907777 - RNA, 19 nt, Homo sapiens
  misc_RNA (1)...(19): siRNA sense strand
gacagugcacaucagauug

SEQ ID NO: 907778 - RNA, 19 nt, Homo sapiens
  misc_RNA (1)...(19): siRNA sense strand
gcuguugucucggaaaggu

SEQ ID NO: 907779 - RNA, 19 nt, Homo sapiens
  misc_RNA (1)...(19): siRNA sense strand
ugaagaugaugacgcaaaa

SEQ ID NO: 907780 - RNA, 19 nt, Homo sapiens
  misc_RNA (1)...(19): siRNA sense strand
uacagcaaacaccaaauuu

SEQ ID NO: 907781 - RNA, 19 nt, Homo sapiens
  misc_RNA (1)...(19): siRNA sense strand
acagugcacaucagauuga

SEQ ID NO: 907782 - RNA, 19 nt, Homo sapiens
  misc_RNA (1)...(19): siRNA sense strand
agagauaggcaaagaugau

SEQ ID NO: 907783 - RNA, 19 nt, Homo sapiens
  misc_RNA (1)...(19): siRNA sense strand
aacaagagugugaagauga

SEQ ID NO: 907784 - RNA, 19 nt, Homo sapiens
  misc_RNA (1)...(19): siRNA sense strand
uugaugagguacuacacuu

SEQ ID NO: 907785 - RNA, 19 nt, Homo sapiens
  misc_RNA (1)...(19): siRNA sense strand
ccagaaugaaagcaaagaa

SEQ ID NO: 907786 - RNA, 19 nt, Homo sapiens
  misc_RNA (1)...(19): siRNA sense strand
aaucugucaggaauacuua

SEQ ID NO: 907787 - RNA, 19 nt, Homo sapiens
  misc_RNA (1)...(19): siRNA sense strand
gggcagcuucucuccaaau

SEQ ID NO: 907788 - RNA, 19 nt, Homo sapiens
  misc_RNA (1)...(19): siRNA sense strand
ccaaaccauucucuuuuau

SEQ ID NO: 907789 - RNA, 19 nt, Homo sapiens
  misc_RNA (1)...(19): siRNA sense strand
uucaagagauaggcaaaga

SEQ ID NO: 907790 - RNA, 19 nt, Homo sapiens
  misc_RNA (1)...(19): siRNA sense strand
aaauuagacaggaucaaga

SEQ ID NO: 907791 - RNA, 19 nt, Homo sapiens
  misc_RNA (1)...(19): siRNA sense strand
gggcuguugucucggaaag

SEQ ID NO: 907792 - RNA, 19 nt, Homo sapiens
  misc_RNA (1)...(19): siRNA sense strand
ucaaagagcugaacaguaa

SEQ ID NO: 907793 - RNA, 19 nt, Homo sapiens
  misc_RNA (1)...(19): siRNA sense strand
ggaaagagaaguugaagua

SEQ ID NO: 907794 - RNA, 19 nt, Homo sapiens
  misc_RNA (1)...(19): siRNA sense strand
ggacaaagacgauggcauu

SEQ ID NO: 907795 - RNA, 19 nt, Homo sapiens
  misc_RNA (1)...(19): siRNA sense strand
gagcuaaauucccuguuaa

SEQ ID NO: 907796 - RNA, 19 nt, Homo sapiens
  misc_RNA (1)...(19): siRNA sense strand
caaagacgauggcauuuca

SEQ ID NO: 907797 - RNA, 19 nt, Homo sapiens
  misc_RNA (1)...(19): siRNA sense strand
gacaagcucuucuaacaug

SEQ ID NO: 907798 - RNA, 19 nt, Homo sapiens
  misc_RNA (1)...(19): siRNA sense strand
ugagcuaaauucccuguua

SEQ ID NO: 907799 - RNA, 19 nt, Homo sapiens
  misc_RNA (1)...(19): siRNA sense strand
caaguaagagagacaguua

SEQ ID NO: 907800 - RNA, 19 nt, Homo sapiens
  misc_RNA (1)...(19): siRNA sense strand
caaccaagggccuauauuu

SEQ ID NO: 907801 - RNA, 19 nt, Homo sapiens
  misc_RNA (1)...(19): siRNA sense strand
gcugaacaguaacaacaua

SEQ ID NO: 907802 - RNA, 19 nt, Homo sapiens
  misc_RNA (1)...(19): siRNA sense strand
ugacagaucucuucaacca

SEQ ID NO: 907803 - RNA, 19 nt, Homo sapiens
  misc_RNA (1)...(19): siRNA sense strand
aggcauagcuaaucugaaa

SEQ ID NO: 907804 - RNA, 19 nt, Homo sapiens
  misc_RNA (1)...(19): siRNA sense strand
cagcacagcuaacguugaa

SEQ ID NO: 907805 - RNA, 19 nt, Homo sapiens
  misc_RNA (1)...(19): siRNA sense strand
caacauaggagauaacauc

SEQ ID NO: 907806 - RNA, 19 nt, Homo sapiens
  misc_RNA (1)...(19): siRNA sense strand
uauuuaagcuguucugaga

SEQ ID NO: 907807 - RNA, 19 nt, Homo sapiens
  misc_RNA (1)...(19): siRNA sense strand
gcacagcuaacguugaauu

SEQ ID NO: 907808 - RNA, 19 nt, Homo sapiens
  misc_RNA (1)...(19): siRNA sense strand
guaacaacauaggagauaa

SEQ ID NO: 907809 - RNA, 19 nt, Homo sapiens
  misc_RNA (1)...(19): siRNA sense strand
guaaugguccuggugaaua

SEQ ID NO: 907810 - RNA, 19 nt, Homo sapiens
  misc_RNA (1)...(19): siRNA sense strand
cgaauucucucaaaucaac

SEQ ID NO: 907811 - RNA, 19 nt, Homo sapiens
  misc_RNA (1)...(19): siRNA sense strand
aaauguaacuguggaaaug

SEQ ID NO: 907812 - RNA, 19 nt, Homo sapiens
  misc_RNA (1)...(19): siRNA sense strand
aaagagaaguugaaguaca

SEQ ID NO: 907813 - RNA, 19 nt, Homo sapiens
  misc_RNA (1)...(19): siRNA sense strand
gaacaguaacaacauagga

SEQ ID NO: 907814 - RNA, 19 nt, Homo sapiens
  misc_RNA (1)...(19): siRNA sense strand
gaaacgaggaaaaugauua

SEQ ID NO: 907815 - RNA, 19 nt, Homo sapiens
  misc_RNA (1)...(19): siRNA sense strand
ugaacagucuacagaagaa

SEQ ID NO: 907816 - RNA, 19 nt, Homo sapiens
  misc_RNA (1)...(19): siRNA sense strand
gggagagacugcagagcaa

SEQ ID NO: 907817 - RNA, 19 nt, Homo sapiens
  misc_RNA (1)...(19): siRNA sense strand
ccaagggccuauauuuauc

SEQ ID NO: 907818 - RNA, 19 nt, Homo sapiens
  misc_RNA (1)...(19): siRNA sense strand
uggacaagcucuucuaaca

SEQ ID NO: 907819 - RNA, 19 nt, Homo sapiens
  misc_RNA (1)...(19): siRNA sense strand
gagcacaauugacccuuca

SEQ ID NO: 907820 - RNA, 19 nt, Homo sapiens
  misc_RNA (1)...(19): siRNA sense strand
cgaguuuggugucgaauuc

SEQ ID NO: 907821 - RNA, 19 nt, Homo sapiens
  misc_RNA (1)...(19): siRNA sense strand
cauuuaaacuggccuuugu

SEQ ID NO: 907822 - RNA, 19 nt, Homo sapiens
  misc_RNA (1)...(19): siRNA sense strand
gauuaaugcuuggguugaa

SEQ ID NO: 907823 - RNA, 19 nt, Homo sapiens
  misc_RNA (1)...(19): siRNA sense strand
gaagaaacgaggaaaauga

SEQ ID NO: 907824 - RNA, 19 nt, Homo sapiens
  misc_RNA (1)...(19): siRNA sense strand
cagccagacucuaacugua

SEQ ID NO: 907825 - RNA, 19 nt, Homo sapiens
  misc_RNA (1)...(19): siRNA sense strand
ggacaaaggcaaaauaaau

SEQ ID NO: 907826 - RNA, 19 nt, Homo sapiens
  misc_RNA (1)...(19): siRNA sense strand
aaccaagggccuauauuua

SEQ ID NO: 907827 - RNA, 19 nt, Homo sapiens
  misc_RNA (1)...(19): siRNA sense strand
aagcugaucuuucuggaau

SEQ ID NO: 907828 - RNA, 19 nt, Homo sapiens
  misc_RNA (1)...(19): siRNA sense strand
uaaaggagccgcagaugca

SEQ ID NO: 907829 - RNA, 19 nt, Homo sapiens
  misc_RNA (1)...(19): siRNA sense strand
gagcugaacaguaacaaca

SEQ ID NO: 907830 - RNA, 19 nt, Homo sapiens
  misc_RNA (1)...(19): siRNA sense strand
caauugacccuucaucugu

SEQ ID NO: 907831 - RNA, 19 nt, Homo sapiens
  misc_RNA (1)...(19): siRNA sense strand
ucagcuaagugaagguaaa

SEQ ID NO: 907832 - RNA, 19 nt, Homo sapiens
  misc_RNA (1)...(19): siRNA sense strand
ggugucgaauucucucaaa

SEQ ID NO: 907833 - RNA, 19 nt, Homo sapiens
  misc_RNA (1)...(19): siRNA sense strand
ggugacagaucucuucaac

SEQ ID NO: 907834 - RNA, 19 nt, Homo sapiens
  misc_RNA (1)...(19): siRNA sense strand
caagccagguugcaaacug

SEQ ID NO: 907835 - RNA, 19 nt, Homo sapiens
  misc_RNA (1)...(19): siRNA sense strand
ucaaccagccagacucuaa

SEQ ID NO: 907836 - RNA, 19 nt, Homo sapiens
  misc_RNA (1)...(19): siRNA sense strand
gagcugcccuacguuaaca

SEQ ID NO: 907837 - RNA, 19 nt, Homo sapiens
  misc_RNA (1)...(19): siRNA sense strand
ggacaagcucuucuaacau

SEQ ID NO: 907838 - RNA, 19 nt, Homo sapiens
  misc_RNA (1)...(19): siRNA sense strand
gcccuacguuaacaacaaa

SEQ ID NO: 907839 - RNA, 19 nt, Homo sapiens
  misc_RNA (1)...(19): siRNA sense strand
gucgaauucucucaaauca

SEQ ID NO: 907840 - RNA, 19 nt, Homo sapiens
  misc_RNA (1)...(19): siRNA sense strand
gauggaaagagaaguugaa

SEQ ID NO: 907841 - RNA, 19 nt, Homo sapiens
  misc_RNA (1)...(19): siRNA sense strand
ccaacacgauccuauucug

SEQ ID NO: 907842 - RNA, 19 nt, Homo sapiens
  misc_RNA (1)...(19): siRNA sense strand
uaacuguacccucagcauu

SEQ ID NO: 907843 - RNA, 19 nt, Homo sapiens
  misc_RNA (1)...(19): siRNA sense strand
caagcuugccucucccuaa

SEQ ID NO: 907844 - RNA, 19 nt, Homo sapiens
  misc_RNA (1)...(19): siRNA sense strand
caagcuggaagaauucauu

SEQ ID NO: 907845 - RNA, 19 nt, Homo sapiens
  misc_RNA (1)...(19): siRNA sense strand
gggccuauauuuaucaaaa

SEQ ID NO: 907846 - RNA, 19 nt, Homo sapiens
  misc_RNA (1)...(19): siRNA sense strand
uaacaugauggaaagagaa

SEQ ID NO: 907847 - RNA, 19 nt, Homo sapiens
  misc_RNA (1)...(19): siRNA sense strand
cuaacaugauggaaagaga

SEQ ID NO: 907848 - RNA, 19 nt, Homo sapiens
  misc_RNA (1)...(19): siRNA sense strand
gagagacugcagagcaauu

SEQ ID NO: 907849 - RNA, 19 nt, Homo sapiens
  misc_RNA (1)...(19): siRNA sense strand
cagcuaacguugaauuuug

SEQ ID NO: 907850 - RNA, 19 nt, Homo sapiens
  misc_RNA (1)...(19): siRNA sense strand
ucugagaaaugguaucaag

SEQ ID NO: 907851 - RNA, 19 nt, Homo sapiens
  misc_RNA (1)...(19): siRNA sense strand
ccacaagucauaccuggau

SEQ ID NO: 907852 - RNA, 19 nt, Homo sapiens
  misc_RNA (1)...(19): siRNA sense strand
gcauagcuaaucugaaaca

SEQ ID NO: 907853 - RNA, 19 nt, Homo sapiens
  misc_RNA (1)...(19): siRNA sense strand
uaaugguccuggugaauac

SEQ ID NO: 907854 - RNA, 19 nt, Homo sapiens
  misc_RNA (1)...(19): siRNA sense strand
gaacagucuacagaagaaa

SEQ ID NO: 907855 - RNA, 19 nt, Homo sapiens
  misc_RNA (1)...(19): siRNA sense strand
aauugacccuucaucugua

SEQ ID NO: 907856 - RNA, 19 nt, Homo sapiens
  misc_RNA (1)...(19): siRNA sense strand
uuuauaaggcacacucaua

SEQ ID NO: 907857 - RNA, 19 nt, Homo sapiens
  misc_RNA (1)...(19): siRNA sense strand
gcugaucuuucuggaaugu

SEQ ID NO: 907858 - RNA, 19 nt, Homo sapiens
  misc_RNA (1)...(19): siRNA sense strand
guaggcauagcuaaucuga

SEQ ID NO: 907859 - RNA, 19 nt, Homo sapiens
  misc_RNA (1)...(19): siRNA sense strand
gacaaagacgauggcauuu

SEQ ID NO: 907860 - RNA, 19 nt, Homo sapiens
  misc_RNA (1)...(19): siRNA sense strand
caaaagccauccacaaguc

SEQ ID NO: 907861 - RNA, 19 nt, Homo sapiens
  misc_RNA (1)...(19): siRNA sense strand
uaacuguggaaaugaugua

SEQ ID NO: 907862 - RNA, 19 nt, Homo sapiens
  misc_RNA (1)...(19): siRNA sense strand
gucauacuguagacucauu

SEQ ID NO: 907863 - RNA, 19 nt, Homo sapiens
  misc_RNA (1)...(19): siRNA sense strand
caacacgauccuauucugu

SEQ ID NO: 907864 - RNA, 19 nt, Homo sapiens
  misc_RNA (1)...(19): siRNA sense strand
gaaagagaaguugaaguac

SEQ ID NO: 907865 - RNA, 19 nt, Homo sapiens
  misc_RNA (1)...(19): siRNA sense strand
uaucaagccagguugcaaa

SEQ ID NO: 907866 - RNA, 19 nt, Homo sapiens
  misc_RNA (1)...(19): siRNA sense strand
caucagcaauauuuaagcu

SEQ ID NO: 907867 - RNA, 19 nt, Homo sapiens
  misc_RNA (1)...(19): siRNA sense strand
uggcauuucaucagcaaua

SEQ ID NO: 907868 - RNA, 19 nt, Homo sapiens
  misc_RNA (1)...(19): siRNA sense strand
cuucuaacaugauggaaag

SEQ ID NO: 907869 - RNA, 19 nt, Homo sapiens
  misc_RNA (1)...(19): siRNA sense strand
ggcauuucaucagcaauau

SEQ ID NO: 907870 - RNA, 19 nt, Homo sapiens
  misc_RNA (1)...(19): siRNA sense strand
accaagggccuauauuuau

SEQ ID NO: 907871 - RNA, 19 nt, Homo sapiens
  misc_RNA (1)...(19): siRNA sense strand
gcacaauugacccuucauc

SEQ ID NO: 907872 - RNA, 19 nt, Homo sapiens
  misc_RNA (1)...(19): siRNA sense strand
gguugcaaacuguggauuu

SEQ ID NO: 907873 - RNA, 19 nt, Homo sapiens
  misc_RNA (1)...(19): siRNA sense strand
uagaaaagcagcugaauuc

SEQ ID NO: 907874 - RNA, 19 nt, Homo sapiens
  misc_RNA (1)...(19): siRNA sense strand
ccuauucuguggcaagcuu

SEQ ID NO: 907875 - RNA, 19 nt, Homo sapiens
  misc_RNA (1)...(19): siRNA sense strand
aguaagagagacaguuaaa

SEQ ID NO: 907876 - RNA, 19 nt, Homo sapiens
  misc_RNA (1)...(19): siRNA sense strand
caagggccuauauuuauca

SEQ ID NO: 907877 - RNA, 19 nt, Homo sapiens
  misc_RNA (1)...(19): siRNA sense strand
gcauuucaucagcaauauu

SEQ ID NO: 907878 - RNA, 19 nt, Homo sapiens
  misc_RNA (1)...(19): siRNA sense strand
gugcuucauuuuagucaua

SEQ ID NO: 907879 - RNA, 19 nt, Homo sapiens
  misc_RNA (1)...(19): siRNA sense strand
caugauggaaagagaaguu

SEQ ID NO: 907880 - RNA, 19 nt, Homo sapiens
  misc_RNA (1)...(19): siRNA sense strand
cuacagaagaaacgaggaa

SEQ ID NO: 907881 - RNA, 19 nt, Homo sapiens
  misc_RNA (1)...(19): siRNA sense strand
aguaacaacauaggagaua

SEQ ID NO: 907882 - RNA, 19 nt, Homo sapiens
  misc_RNA (1)...(19): siRNA sense strand
cugcagagcaauuggagaa

SEQ ID NO: 907883 - RNA, 19 nt, Homo sapiens
  misc_RNA (1)...(19): siRNA sense strand
uucaaggacucaccuaagu

SEQ ID NO: 907884 - RNA, 19 nt, Homo sapiens
  misc_RNA (1)...(19): siRNA sense strand
gaguggacaagcucuucua

SEQ ID NO: 907885 - RNA, 19 nt, Homo sapiens
  misc_RNA (1)...(19): siRNA sense strand
caaaucaaccagccagacu

SEQ ID NO: 907886 - RNA, 19 nt, Homo sapiens
  misc_RNA (1)...(19): siRNA sense strand
uaaggcacacucauaccaa

SEQ ID NO: 907887 - RNA, 19 nt, Homo sapiens
  misc_RNA (1)...(19): siRNA sense strand
ugaaacagauagaaaagca

SEQ ID NO: 907888 - RNA, 19 nt, Homo sapiens
  misc_RNA (1)...(19): siRNA sense strand
cagagcaauuggagaaggu

SEQ ID NO: 907889 - RNA, 19 nt, Homo sapiens
  misc_RNA (1)...(19): siRNA sense strand
acaagcucuucuaacauga

SEQ ID NO: 907890 - RNA, 19 nt, Homo sapiens
  misc_RNA (1)...(19): siRNA sense strand
aagagaaguugaaguacac

SEQ ID NO: 907891 - RNA, 19 nt, Homo sapiens
  misc_RNA (1)...(19): siRNA sense strand
ugaucuuucuggaauguca

SEQ ID NO: 907892 - RNA, 19 nt, Homo sapiens
  misc_RNA (1)...(19): siRNA sense strand
gcaacgggcuccucaccaa

SEQ ID NO: 907893 - RNA, 19 nt, Homo sapiens
  misc_RNA (1)...(19): siRNA sense strand
gaccagcuccugcagauug

SEQ ID NO: 907894 - RNA, 19 nt, Homo sapiens
  misc_RNA (1)...(19): siRNA sense strand
gauugucucucuggucaaa

SEQ ID NO: 907895 - RNA, 19 nt, Homo sapiens
  misc_RNA (1)...(19): siRNA sense strand
ggguggagcucgcacaaag

SEQ ID NO: 907896 - RNA, 19 nt, Homo sapiens
  misc_RNA (1)...(19): siRNA sense strand
gggaccagcuccugcagau

SEQ ID NO: 907897 - RNA, 19 nt, Homo sapiens
  misc_RNA (1)...(19): siRNA sense strand
cccaucagguggugaagaa

SEQ ID NO: 907898 - RNA, 19 nt, Homo sapiens
  misc_RNA (1)...(19): siRNA sense strand
gaaggcaucaggcgauaag

SEQ ID NO: 907899 - RNA, 19 nt, Homo sapiens
  misc_RNA (1)...(19): siRNA sense strand
ggcaucaggcgauaagauu

SEQ ID NO: 907900 - RNA, 19 nt, Homo sapiens
  misc_RNA (1)...(19): siRNA sense strand
aagaaggcaucaggcgaua

SEQ ID NO: 907901 - RNA, 19 nt, Homo sapiens
  misc_RNA (1)...(19): siRNA sense strand
gcaucaggcgauaagauug

SEQ ID NO: 907902 - RNA, 19 nt, Homo sapiens
  misc_RNA (1)...(19): siRNA sense strand
guggacgggcagaauguua

SEQ ID NO: 907903 - RNA, 19 nt, Homo sapiens
  misc_RNA (1)...(19): siRNA sense strand
gcggcgagcugagaucaag

SEQ ID NO: 907904 - RNA, 19 nt, Homo sapiens
  misc_RNA (1)...(19): siRNA sense strand
ggacugucaccaugcacaa

SEQ ID NO: 907905 - RNA, 19 nt, Homo sapiens
  misc_RNA (1)...(19): siRNA sense strand
gagguggacgggcagaaug

SEQ ID NO: 907906 - RNA, 19 nt, Homo sapiens
  misc_RNA (1)...(19): siRNA sense strand
ggaccacuccaucccagau

SEQ ID NO: 907907 - RNA, 19 nt, Homo sapiens
  misc_RNA (1)...(19): siRNA sense strand
caucaggcgauaagauugu

SEQ ID NO: 907908 - RNA, 19 nt, Homo sapiens
  misc_RNA (1)...(19): siRNA sense strand
uuaucgggcugaaggacaa

SEQ ID NO: 907909 - RNA, 19 nt, Homo sapiens
  misc_RNA (1)...(19): siRNA sense strand
ggacgggcagaauguuauc

SEQ ID NO: 907910 - RNA, 19 nt, Homo sapiens
  misc_RNA (1)...(19): siRNA sense strand
gcaacgggcuccucaccaa

SEQ ID NO: 907911 - RNA, 19 nt, Homo sapiens
  misc_RNA (1)...(19): siRNA sense strand
gaccagcuccugcagauug

SEQ ID NO: 907912 - RNA, 19 nt, Homo sapiens
  misc_RNA (1)...(19): siRNA sense strand
gauugucucucuggucaaa

SEQ ID NO: 907913 - RNA, 19 nt, Homo sapiens
  misc_RNA (1)...(19): siRNA sense strand
ggguggagcucgcacaaag

SEQ ID NO: 907914 - RNA, 19 nt, Homo sapiens
  misc_RNA (1)...(19): siRNA sense strand
gggaccagcuccugcagau

SEQ ID NO: 907915 - RNA, 19 nt, Homo sapiens
  misc_RNA (1)...(19): siRNA sense strand
cccaucagguggugaagaa

SEQ ID NO: 907916 - RNA, 19 nt, Homo sapiens
  misc_RNA (1)...(19): siRNA sense strand
gaaggcaucaggcgauaag

SEQ ID NO: 907917 - RNA, 19 nt, Homo sapiens
  misc_RNA (1)...(19): siRNA sense strand
ggcaucaggcgauaagauu

SEQ ID NO: 907918 - RNA, 19 nt, Homo sapiens
  misc_RNA (1)...(19): siRNA sense strand
aagaaggcaucaggcgaua

SEQ ID NO: 907919 - RNA, 19 nt, Homo sapiens
  misc_RNA (1)...(19): siRNA sense strand
gcaucaggcgauaagauug

SEQ ID NO: 907920 - RNA, 19 nt, Homo sapiens
  misc_RNA (1)...(19): siRNA sense strand
guggacgggcagaauguua

SEQ ID NO: 907921 - RNA, 19 nt, Homo sapiens
  misc_RNA (1)...(19): siRNA sense strand
gcggcgagcugagaucaag

SEQ ID NO: 907922 - RNA, 19 nt, Homo sapiens
  misc_RNA (1)...(19): siRNA sense strand
ggacugucaccaugcacaa

SEQ ID NO: 907923 - RNA, 19 nt, Homo sapiens
  misc_RNA (1)...(19): siRNA sense strand
gagguggacgggcagaaug

SEQ ID NO: 907924 - RNA, 19 nt, Homo sapiens
  misc_RNA (1)...(19): siRNA sense strand
ggaccacuccaucccagau

SEQ ID NO: 907925 - RNA, 19 nt, Homo sapiens
  misc_RNA (1)...(19): siRNA sense strand
caucaggcgauaagauugu

SEQ ID NO: 907926 - RNA, 19 nt, Homo sapiens
  misc_RNA (1)...(19): siRNA sense strand
uuaucgggcugaaggacaa

SEQ ID NO: 907927 - RNA, 19 nt, Homo sapiens
  misc_RNA (1)...(19): siRNA sense strand
ggacgggcagaauguuauc

SEQ ID NO: 907928 - RNA, 19 nt, Homo sapiens
  misc_RNA (1)...(19): siRNA sense strand
cagaaguccugguccauua

SEQ ID NO: 907929 - RNA, 19 nt, Homo sapiens
  misc_RNA (1)...(19): siRNA sense strand
ccaaggcgcuguuguccua

SEQ ID NO: 907930 - RNA, 19 nt, Homo sapiens
  misc_RNA (1)...(19): siRNA sense strand
ggucauagccuacugucua

SEQ ID NO: 907931 - RNA, 19 nt, Homo sapiens
  misc_RNA (1)...(19): siRNA sense strand
gcgacgaccucgacuuuga

SEQ ID NO: 907932 - RNA, 19 nt, Homo sapiens
  misc_RNA (1)...(19): siRNA sense strand
gaacguagcgcagaucauc

SEQ ID NO: 907933 - RNA, 19 nt, Homo sapiens
  misc_RNA (1)...(19): siRNA sense strand
gaaccaacgcggaggacua

SEQ ID NO: 907934 - RNA, 19 nt, Homo sapiens
  misc_RNA (1)...(19): siRNA sense strand
ucaaggccguguccaaguu

SEQ ID NO: 907935 - RNA, 19 nt, Homo sapiens
  misc_RNA (1)...(19): siRNA sense strand
gaguuccacugcaugauga

SEQ ID NO: 907936 - RNA, 19 nt, Homo sapiens
  misc_RNA (1)...(19): siRNA sense strand
gggaggugguggcgaauuc

SEQ ID NO: 907937 - RNA, 19 nt, Homo sapiens
  misc_RNA (1)...(19): siRNA sense strand
gcagaaguccugguccauu

SEQ ID NO: 907938 - RNA, 19 nt, Homo sapiens
  misc_RNA (1)...(19): siRNA sense strand
guggcaaccucauguacaa

SEQ ID NO: 907939 - RNA, 19 nt, Homo sapiens
  misc_RNA (1)...(19): siRNA sense strand
gcucauggccauuuaugug

SEQ ID NO: 907940 - RNA, 19 nt, Homo sapiens
  misc_RNA (1)...(19): siRNA sense strand
agggagacauccauuauca

SEQ ID NO: 907941 - RNA, 19 nt, Homo sapiens
  misc_RNA (1)...(19): siRNA sense strand
caagaugagcggcauguuc

SEQ ID NO: 907942 - RNA, 19 nt, Homo sapiens
  misc_RNA (1)...(19): siRNA sense strand
gcacuucgcgcugcucaug

SEQ ID NO: 907943 - RNA, 19 nt, Homo sapiens
  misc_RNA (1)...(19): siRNA sense strand
cgagggagacauccauuau

SEQ ID NO: 907944 - RNA, 19 nt, Homo sapiens
  misc_RNA (1)...(19): siRNA sense strand
cuacacgucucagaucuuc

SEQ ID NO: 907945 - RNA, 19 nt, Homo sapiens
  misc_RNA (1)...(19): siRNA sense strand
gaaggucaaguucuacauc

SEQ ID NO: 907946 - RNA, 19 nt, Homo sapiens
  misc_RNA (1)...(19): siRNA sense strand
gcaucaucguguucagcua

SEQ ID NO: 907947 - RNA, 19 nt, Homo sapiens
  misc_RNA (1)...(19): siRNA sense strand
acaucgacgucaagaaguu

SEQ ID NO: 907948 - RNA, 19 nt, Homo sapiens
  misc_RNA (1)...(19): siRNA sense strand
ggacucguacguggccaua

SEQ ID NO: 907949 - RNA, 19 nt, Homo sapiens
  misc_RNA (1)...(19): siRNA sense strand
cuacaucgacgucaagaag

SEQ ID NO: 907950 - RNA, 19 nt, Homo sapiens
  misc_RNA (1)...(19): siRNA sense strand
gguuguuucucaucaucuu

SEQ ID NO: 907951 - RNA, 19 nt, Homo sapiens
  misc_RNA (1)...(19): siRNA sense strand
ccauuggcaucaucguguu

SEQ ID NO: 907952 - RNA, 19 nt, Homo sapiens
  misc_RNA (1)...(19): siRNA sense strand
ccuauccucugccauucuu

SEQ ID NO: 907953 - RNA, 19 nt, Homo sapiens
  misc_RNA (1)...(19): siRNA sense strand
gcccacuucgucaucaaua

SEQ ID NO: 907954 - RNA, 19 nt, Homo sapiens
  misc_RNA (1)...(19): siRNA sense strand
gagggagacauccauuauc

SEQ ID NO: 907955 - RNA, 19 nt, Homo sapiens
  misc_RNA (1)...(19): siRNA sense strand
ucgagggagacauccauua

SEQ ID NO: 907956 - RNA, 19 nt, Homo sapiens
  misc_RNA (1)...(19): siRNA sense strand
aggaggucaucacggauaa

SEQ ID NO: 907957 - RNA, 19 nt, Homo sapiens
  misc_RNA (1)...(19): siRNA sense strand
aaggaggucaucacggaua

SEQ ID NO: 907958 - RNA, 19 nt, Homo sapiens
  misc_RNA (1)...(19): siRNA sense strand
ucaauauccuggucauagc

SEQ ID NO: 907959 - RNA, 19 nt, Homo sapiens
  misc_RNA (1)...(19): siRNA sense strand
gaaguccugguccauuauc

SEQ ID NO: 907960 - RNA, 19 nt, Homo sapiens
  misc_RNA (1)...(19): siRNA sense strand
gcgccguggucaacaucuu

SEQ ID NO: 907961 - RNA, 19 nt, Homo sapiens
  misc_RNA (1)...(19): siRNA sense strand
cgaguuccacugcaugaug

SEQ ID NO: 907962 - RNA, 19 nt, Homo sapiens
  misc_RNA (1)...(19): siRNA sense strand
ccuugcgccuuccuuaaga

SEQ ID NO: 907963 - RNA, 19 nt, Homo sapiens
  misc_RNA (1)...(19): siRNA sense strand
ccagcgaguuccacugcau

SEQ ID NO: 907964 - RNA, 19 nt, Homo sapiens
  misc_RNA (1)...(19): siRNA sense strand
ccugggagaaggucaaguu

SEQ ID NO: 907965 - RNA, 19 nt, Homo sapiens
  misc_RNA (1)...(19): siRNA sense strand
caucaauauccuggucaua

SEQ ID NO: 907966 - RNA, 19 nt, Homo sapiens
  misc_RNA (1)...(19): siRNA sense strand
uguccuauccucugccauu

SEQ ID NO: 907967 - RNA, 19 nt, Homo sapiens
  misc_RNA (1)...(19): siRNA sense strand
gaaguuccccaucuccauu

SEQ ID NO: 907968 - RNA, 19 nt, Homo sapiens
  misc_RNA (1)...(19): siRNA sense strand
gcaaccucauguacaacag

SEQ ID NO: 907969 - RNA, 19 nt, Homo sapiens
  misc_RNA (1)...(19): siRNA sense strand
ccacuucgucaucaauauc

SEQ ID NO: 907970 - RNA, 19 nt, Homo sapiens
  misc_RNA (1)...(19): siRNA sense strand
ccucaucgcgugccuguac

SEQ ID NO: 907971 - RNA, 19 nt, Homo sapiens
  misc_RNA (1)...(19): siRNA sense strand
gcuguggcaccaagucuuc

SEQ ID NO: 907972 - RNA, 19 nt, Homo sapiens
  misc_RNA (1)...(19): siRNA sense strand
uugcgacgaccucgacuuu

SEQ ID NO: 907973 - RNA, 19 nt, Homo sapiens
  misc_RNA (1)...(19): siRNA sense strand
cagcuacacgucucagauc

SEQ ID NO: 907974 - RNA, 19 nt, Homo sapiens
  misc_RNA (1)...(19): siRNA sense strand
caucuccauuggcaucauc

SEQ ID NO: 907975 - RNA, 19 nt, Homo sapiens
  misc_RNA (1)...(19): siRNA sense strand
gaacagaguuugggauuga

SEQ ID NO: 907976 - RNA, 19 nt, Homo sapiens
  misc_RNA (1)...(19): siRNA sense strand
gcagauggauccugagcua

SEQ ID NO: 907977 - RNA, 19 nt, Homo sapiens
  misc_RNA (1)...(19): siRNA sense strand
gaaguaggcccucguaugg

SEQ ID NO: 907978 - RNA, 19 nt, Homo sapiens
  misc_RNA (1)...(19): siRNA sense strand
ccaagcgccucuucuuuga

SEQ ID NO: 907979 - RNA, 19 nt, Homo sapiens
  misc_RNA (1)...(19): siRNA sense strand
aaagaaagcugaaaaguuc

SEQ ID NO: 907980 - RNA, 19 nt, Homo sapiens
  misc_RNA (1)...(19): siRNA sense strand
cguauggguuucuuccuua

SEQ ID NO: 907981 - RNA, 19 nt, Homo sapiens
  misc_RNA (1)...(19): siRNA sense strand
ggaaguaggcccucguaug

SEQ ID NO: 907982 - RNA, 19 nt, Homo sapiens
  misc_RNA (1)...(19): siRNA sense strand
gcuaugcccuggagacugu

SEQ ID NO: 907983 - RNA, 19 nt, Homo sapiens
  misc_RNA (1)...(19): siRNA sense strand
gaaagaaagcugaaaaguu

SEQ ID NO: 907984 - RNA, 19 nt, Homo sapiens
  misc_RNA (1)...(19): siRNA sense strand
ggaacagaguuugggauug

SEQ ID NO: 907985 - RNA, 19 nt, Homo sapiens
  misc_RNA (1)...(19): siRNA sense strand
ggaucucacucaccaacuu

SEQ ID NO: 907986 - RNA, 19 nt, Homo sapiens
  misc_RNA (1)...(19): siRNA sense strand
aagcucaccugaccaagaa

SEQ ID NO: 907987 - RNA, 19 nt, Homo sapiens
  misc_RNA (1)...(19): siRNA sense strand
cagcugagauaaccaagca

SEQ ID NO: 907988 - RNA, 19 nt, Homo sapiens
  misc_RNA (1)...(19): siRNA sense strand
ggaagcggcuccugaaccu

SEQ ID NO: 907989 - RNA, 19 nt, Homo sapiens
  misc_RNA (1)...(19): siRNA sense strand
gccaagcgccucuucuuug

SEQ ID NO: 907990 - RNA, 19 nt, Homo sapiens
  misc_RNA (1)...(19): siRNA sense strand
aguuugggauugacuauaa

SEQ ID NO: 907991 - RNA, 19 nt, Homo sapiens
  misc_RNA (1)...(19): siRNA sense strand
ggagcacacucagggaaga

SEQ ID NO: 907992 - RNA, 19 nt, Homo sapiens
  misc_RNA (1)...(19): siRNA sense strand
gaacaugcccaagggaaca

SEQ ID NO: 907993 - RNA, 19 nt, Homo sapiens
  misc_RNA (1)...(19): siRNA sense strand
gggaacagaguuugggauu

SEQ ID NO: 907994 - RNA, 19 nt, Homo sapiens
  misc_RNA (1)...(19): siRNA sense strand
gcaccacacccucuacauc

SEQ ID NO: 907995 - RNA, 19 nt, Homo sapiens
  misc_RNA (1)...(19): siRNA sense strand
gaugccacccugagaaaga

SEQ ID NO: 907996 - RNA, 19 nt, Homo sapiens
  misc_RNA (1)...(19): siRNA sense strand
ccaugaagcacaccaagga

SEQ ID NO: 907997 - RNA, 19 nt, Homo sapiens
  misc_RNA (1)...(19): siRNA sense strand
gaagcuacagcccgagaau

SEQ ID NO: 907998 - RNA, 19 nt, Homo sapiens
  misc_RNA (1)...(19): siRNA sense strand
uaccugugcucuccaugaa

SEQ ID NO: 907999 - RNA, 19 nt, Homo sapiens
  misc_RNA (1)...(19): siRNA sense strand
gcuguggcauugagugcaa

SEQ ID NO: 908000 - RNA, 19 nt, Homo sapiens
  misc_RNA (1)...(19): siRNA sense strand
caagcucaccugaccaaga

SEQ ID NO: 908001 - RNA, 19 nt, Homo sapiens
  misc_RNA (1)...(19): siRNA sense strand
gcauccacuuccuccacua

SEQ ID NO: 908002 - RNA, 19 nt, Homo sapiens
  misc_RNA (1)...(19): siRNA sense strand
cagaagcagccaugaugaa

SEQ ID NO: 908003 - RNA, 19 nt, Homo sapiens
  misc_RNA (1)...(19): siRNA sense strand
guacgaggcauuugagcau

SEQ ID NO: 908004 - RNA, 19 nt, Homo sapiens
  misc_RNA (1)...(19): siRNA sense strand
cauaugccacccugaagaa

SEQ ID NO: 908005 - RNA, 19 nt, Homo sapiens
  misc_RNA (1)...(19): siRNA sense strand
aagcagccaugaugaagca

SEQ ID NO: 908006 - RNA, 19 nt, Homo sapiens
  misc_RNA (1)...(19): siRNA sense strand
ggacuuugcugcggaaccu

SEQ ID NO: 908007 - RNA, 19 nt, Homo sapiens
  misc_RNA (1)...(19): siRNA sense strand
ugacuucuucguagacauu

SEQ ID NO: 908008 - RNA, 19 nt, Homo sapiens
  misc_RNA (1)...(19): siRNA sense strand
caccacacccucuacauca

SEQ ID NO: 908009 - RNA, 19 nt, Homo sapiens
  misc_RNA (1)...(19): siRNA sense strand
gcccaagggaacagaguuu

SEQ ID NO: 908010 - RNA, 19 nt, Homo sapiens
  misc_RNA (1)...(19): siRNA sense strand
uggagacugugcucaacaa

SEQ ID NO: 908011 - RNA, 19 nt, Homo sapiens
  misc_RNA (1)...(19): siRNA sense strand
gucagaagcagccaugaug

SEQ ID NO: 908012 - RNA, 19 nt, Homo sapiens
  misc_RNA (1)...(19): siRNA sense strand
gcccgagaaucgacagauc

SEQ ID NO: 908013 - RNA, 19 nt, Homo sapiens
  misc_RNA (1)...(19): siRNA sense strand
ccgcugacuucuucguaga

SEQ ID NO: 908014 - RNA, 19 nt, Homo sapiens
  misc_RNA (1)...(19): siRNA sense strand
ucagaagcagccaugauga

SEQ ID NO: 908015 - RNA, 19 nt, Homo sapiens
  misc_RNA (1)...(19): siRNA sense strand
uaaccaagcacagcaugga

SEQ ID NO: 908016 - RNA, 19 nt, Homo sapiens
  misc_RNA (1)...(19): siRNA sense strand
ggucagaagcagccaugau

SEQ ID NO: 908017 - RNA, 19 nt, Homo sapiens
  misc_RNA (1)...(19): siRNA sense strand
ccauaugccacccugaaga

SEQ ID NO: 908018 - RNA, 19 nt, Homo sapiens
  misc_RNA (1)...(19): siRNA sense strand
ggaugugcuuggugaacuc

SEQ ID NO: 908019 - RNA, 19 nt, Homo sapiens
  misc_RNA (1)...(19): siRNA sense strand
gcucuguggacaaggcuaa

SEQ ID NO: 908020 - RNA, 19 nt, Homo sapiens
  misc_RNA (1)...(19): siRNA sense strand
ucguauggguuucuuccuu

SEQ ID NO: 908021 - RNA, 19 nt, Homo sapiens
  misc_RNA (1)...(19): siRNA sense strand
ugaagcaccacacccucua

SEQ ID NO: 908022 - RNA, 19 nt, Homo sapiens
  misc_RNA (1)...(19): siRNA sense strand
gaguuugggauugacuaua

SEQ ID NO: 908023 - RNA, 19 nt, Homo sapiens
  misc_RNA (1)...(19): siRNA sense strand
guauggguuucuuccuuag

SEQ ID NO: 908024 - RNA, 19 nt, Homo sapiens
  misc_RNA (1)...(19): siRNA sense strand
gauccccgcugacuucuuc

SEQ ID NO: 908025 - RNA, 19 nt, Homo sapiens
  misc_RNA (1)...(19): siRNA sense strand
ucacucaccaacuucauca

SEQ ID NO: 908026 - RNA, 19 nt, Homo sapiens
  misc_RNA (1)...(19): siRNA sense strand
cagcauggaccugagcuau

SEQ ID NO: 908027 - RNA, 19 nt, Homo sapiens
  misc_RNA (1)...(19): siRNA sense strand
gaucucacucaccaacuuc

SEQ ID NO: 908028 - RNA, 19 nt, Homo sapiens
  misc_RNA (1)...(19): siRNA sense strand
acgaggcauuugagcauug

SEQ ID NO: 908029 - RNA, 19 nt, Homo sapiens
  misc_RNA (1)...(19): siRNA sense strand
acaucaaccucaucuccau

SEQ ID NO: 908030 - RNA, 19 nt, Homo sapiens
  misc_RNA (1)...(19): siRNA sense strand
uagccaagcgccucuucuu

SEQ ID NO: 908031 - RNA, 19 nt, Homo sapiens
  misc_RNA (1)...(19): siRNA sense strand
cuaccugugcucuccauga

SEQ ID NO: 908032 - RNA, 19 nt, Homo sapiens
  misc_RNA (1)...(19): siRNA sense strand
caaggcuaauccgaaggaa

SEQ ID NO: 908033 - RNA, 19 nt, Homo sapiens
  misc_RNA (1)...(19): siRNA sense strand
gcugacuucuucguagaca

SEQ ID NO: 908034 - RNA, 19 nt, Homo sapiens
  misc_RNA (1)...(19): siRNA sense strand
uaaaucgccuuauucguua

SEQ ID NO: 908035 - RNA, 19 nt, Homo sapiens
  misc_RNA (1)...(19): siRNA sense strand
cgaaugauccuuauguaua

SEQ ID NO: 908036 - RNA, 19 nt, Homo sapiens
  misc_RNA (1)...(19): siRNA sense strand
guaaaucgccuuauucguu

SEQ ID NO: 908037 - RNA, 19 nt, Homo sapiens
  misc_RNA (1)...(19): siRNA sense strand
ggauuaugcugcucaacua

SEQ ID NO: 908038 - RNA, 19 nt, Homo sapiens
  misc_RNA (1)...(19): siRNA sense strand
gguaguggauguauuauuc

SEQ ID NO: 908039 - RNA, 19 nt, Homo sapiens
  misc_RNA (1)...(19): siRNA sense strand
guacuuguguggaucuuaa

SEQ ID NO: 908040 - RNA, 19 nt, Homo sapiens
  misc_RNA (1)...(19): siRNA sense strand
caaagaaggucucccaaag

SEQ ID NO: 908041 - RNA, 19 nt, Homo sapiens
  misc_RNA (1)...(19): siRNA sense strand
gcggaaguauguauucuuu

SEQ ID NO: 908042 - RNA, 19 nt, Homo sapiens
  misc_RNA (1)...(19): siRNA sense strand
gcagagaauucuauaugga

SEQ ID NO: 908043 - RNA, 19 nt, Homo sapiens
  misc_RNA (1)...(19): siRNA sense strand
gaugugugcugaaaucuug

SEQ ID NO: 908044 - RNA, 19 nt, Homo sapiens
  misc_RNA (1)...(19): siRNA sense strand
gcaguccuguucagaauga

SEQ ID NO: 908045 - RNA, 19 nt, Homo sapiens
  misc_RNA (1)...(19): siRNA sense strand
gaccguagcugcacagaca

SEQ ID NO: 908046 - RNA, 19 nt, Homo sapiens
  misc_RNA (1)...(19): siRNA sense strand
guaaugaccagcaaagaaa

SEQ ID NO: 908047 - RNA, 19 nt, Homo sapiens
  misc_RNA (1)...(19): siRNA sense strand
gcucauugcuuccugucua

SEQ ID NO: 908048 - RNA, 19 nt, Homo sapiens
  misc_RNA (1)...(19): siRNA sense strand
ugagugauguucagaaguu

SEQ ID NO: 908049 - RNA, 19 nt, Homo sapiens
  misc_RNA (1)...(19): siRNA sense strand
gaucaucgucugccucuuu

SEQ ID NO: 908050 - RNA, 19 nt, Homo sapiens
  misc_RNA (1)...(19): siRNA sense strand
caggagcugugguaacaua

SEQ ID NO: 908051 - RNA, 19 nt, Homo sapiens
  misc_RNA (1)...(19): siRNA sense strand
gcaaagaaggucucccaaa

SEQ ID NO: 908052 - RNA, 19 nt, Homo sapiens
  misc_RNA (1)...(19): siRNA sense strand
ucagaaguuugcagagaua

SEQ ID NO: 908053 - RNA, 19 nt, Homo sapiens
  misc_RNA (1)...(19): siRNA sense strand
aagaaggucucccaaagaa

SEQ ID NO: 908054 - RNA, 19 nt, Homo sapiens
  misc_RNA (1)...(19): siRNA sense strand
gagcugugguaacauacua

SEQ ID NO: 908055 - RNA, 19 nt, Homo sapiens
  misc_RNA (1)...(19): siRNA sense strand
cgacagcuauggaaauauc

SEQ ID NO: 908056 - RNA, 19 nt, Homo sapiens
  misc_RNA (1)...(19): siRNA sense strand
acagucagcucaaaggaaa

SEQ ID NO: 908057 - RNA, 19 nt, Homo sapiens
  misc_RNA (1)...(19): siRNA sense strand
cuaguucuauccaugauuu

SEQ ID NO: 908058 - RNA, 19 nt, Homo sapiens
  misc_RNA (1)...(19): siRNA sense strand
gggaugggauuuauuugug

SEQ ID NO: 908059 - RNA, 19 nt, Homo sapiens
  misc_RNA (1)...(19): siRNA sense strand
cagcaggacuacacaguau

SEQ ID NO: 908060 - RNA, 19 nt, Homo sapiens
  misc_RNA (1)...(19): siRNA sense strand
caagacuagugucaggaua

SEQ ID NO: 908061 - RNA, 19 nt, Homo sapiens
  misc_RNA (1)...(19): siRNA sense strand
gaccagcaaagaaauuaua

SEQ ID NO: 908062 - RNA, 19 nt, Homo sapiens
  misc_RNA (1)...(19): siRNA sense strand
ccuaaagccuucugaauac

SEQ ID NO: 908063 - RNA, 19 nt, Homo sapiens
  misc_RNA (1)...(19): siRNA sense strand
uugauaaaccggaagauua

SEQ ID NO: 908064 - RNA, 19 nt, Homo sapiens
  misc_RNA (1)...(19): siRNA sense strand
uaugguggcuguaugcaaa

SEQ ID NO: 908065 - RNA, 19 nt, Homo sapiens
  misc_RNA (1)...(19): siRNA sense strand
ugauaaaccggaagauuaa

SEQ ID NO: 908066 - RNA, 19 nt, Homo sapiens
  misc_RNA (1)...(19): siRNA sense strand
uacgacagcuauggaaaua

SEQ ID NO: 908067 - RNA, 19 nt, Homo sapiens
  misc_RNA (1)...(19): siRNA sense strand
auaaagugcugauggaguu

SEQ ID NO: 908068 - RNA, 19 nt, Homo sapiens
  misc_RNA (1)...(19): siRNA sense strand
gcauugggaugggauuuau

SEQ ID NO: 908069 - RNA, 19 nt, Homo sapiens
  misc_RNA (1)...(19): siRNA sense strand
ggacuuugcuuguuaucac

SEQ ID NO: 908070 - RNA, 19 nt, Homo sapiens
  misc_RNA (1)...(19): siRNA sense strand
gcagagcuccaaacgagaa

SEQ ID NO: 908071 - RNA, 19 nt, Homo sapiens
  misc_RNA (1)...(19): siRNA sense strand
ggcaggagcugugguaaca

SEQ ID NO: 908072 - RNA, 19 nt, Homo sapiens
  misc_RNA (1)...(19): siRNA sense strand
guucagaaguuugcagaga

SEQ ID NO: 908073 - RNA, 19 nt, Homo sapiens
  misc_RNA (1)...(19): siRNA sense strand
guacuaugguggcuguaug

SEQ ID NO: 908074 - RNA, 19 nt, Homo sapiens
  misc_RNA (1)...(19): siRNA sense strand
auacaaaguuggaagcaau

SEQ ID NO: 908075 - RNA, 19 nt, Homo sapiens
  misc_RNA (1)...(19): siRNA sense strand
gaaguuugcagagauaaau

SEQ ID NO: 908076 - RNA, 19 nt, Homo sapiens
  misc_RNA (1)...(19): siRNA sense strand
guguggaucuuaacgauuc

SEQ ID NO: 908077 - RNA, 19 nt, Homo sapiens
  misc_RNA (1)...(19): siRNA sense strand
gaaaugguaguggauguau

SEQ ID NO: 908078 - RNA, 19 nt, Homo sapiens
  misc_RNA (1)...(19): siRNA sense strand
aaugguaguggauguauua

SEQ ID NO: 908079 - RNA, 19 nt, Homo sapiens
  misc_RNA (1)...(19): siRNA sense strand
gaaggucucccaaagaaac

SEQ ID NO: 908080 - RNA, 19 nt, Homo sapiens
  misc_RNA (1)...(19): siRNA sense strand
guaggaaagcaaugaaaga

SEQ ID NO: 908081 - RNA, 19 nt, Homo sapiens
  misc_RNA (1)...(19): siRNA sense strand
gcaaggucuucauucacuu

SEQ ID NO: 908082 - RNA, 19 nt, Homo sapiens
  misc_RNA (1)...(19): siRNA sense strand
gggauuuauuuguggcuuu

SEQ ID NO: 908083 - RNA, 19 nt, Homo sapiens
  misc_RNA (1)...(19): siRNA sense strand
gcaaggcuuuguggaguuc

SEQ ID NO: 908084 - RNA, 19 nt, Homo sapiens
  misc_RNA (1)...(19): siRNA sense strand
gagugcaccuauuccauuc

SEQ ID NO: 908085 - RNA, 19 nt, Homo sapiens
  misc_RNA (1)...(19): siRNA sense strand
gcaaugaaagaagcuggua

SEQ ID NO: 908086 - RNA, 19 nt, Homo sapiens
  misc_RNA (1)...(19): siRNA sense strand
cagaggcccugaucaccuu

SEQ ID NO: 908087 - RNA, 19 nt, Homo sapiens
  misc_RNA (1)...(19): siRNA sense strand
ggcaaggucuucauucacu

SEQ ID NO: 908088 - RNA, 19 nt, Homo sapiens
  misc_RNA (1)...(19): siRNA sense strand
ggcagagaauucuauaugg

SEQ ID NO: 908089 - RNA, 19 nt, Homo sapiens
  misc_RNA (1)...(19): siRNA sense strand
ggacuuucuuugcucuugu

SEQ ID NO: 908090 - RNA, 19 nt, Homo sapiens
  misc_RNA (1)...(19): siRNA sense strand
uaacgauucuggucauacu

SEQ ID NO: 908091 - RNA, 19 nt, Homo sapiens
  misc_RNA (1)...(19): siRNA sense strand
gcgaaugauccuuauguau

SEQ ID NO: 908092 - RNA, 19 nt, Homo sapiens
  misc_RNA (1)...(19): siRNA sense strand
aaaggaauuugccauuuac

SEQ ID NO: 908093 - RNA, 19 nt, Homo sapiens
  misc_RNA (1)...(19): siRNA sense strand
aaagaaggucucccaaaga

SEQ ID NO: 908094 - RNA, 19 nt, Homo sapiens
  misc_RNA (1)...(19): siRNA sense strand
guucagcccuauguagcua

SEQ ID NO: 908095 - RNA, 19 nt, Homo sapiens
  misc_RNA (1)...(19): siRNA sense strand
guggauguauuauucuugu

SEQ ID NO: 908096 - RNA, 19 nt, Homo sapiens
  misc_RNA (1)...(19): siRNA sense strand
uuucuuugcucuugucuug

SEQ ID NO: 908097 - RNA, 19 nt, Homo sapiens
  misc_RNA (1)...(19): siRNA sense strand
cauuucagcuacaguguuc

SEQ ID NO: 908098 - RNA, 19 nt, Homo sapiens
  misc_RNA (1)...(19): siRNA sense strand
cgagugcaccuauuccauu

SEQ ID NO: 908099 - RNA, 19 nt, Homo sapiens
  misc_RNA (1)...(19): siRNA sense strand
uaccauggcugcugcucuu

SEQ ID NO: 908100 - RNA, 19 nt, Homo sapiens
  misc_RNA (1)...(19): siRNA sense strand
gcgaguggcuaccaucaac

SEQ ID NO: 908101 - RNA, 19 nt, Homo sapiens
  misc_RNA (1)...(19): siRNA sense strand
ucagguauauaucaagagu

SEQ ID NO: 908102 - RNA, 19 nt, Homo sapiens
  misc_RNA (1)...(19): siRNA sense strand
accuaaagccuucugaaua

SEQ ID NO: 908103 - RNA, 19 nt, Homo sapiens
  misc_RNA (1)...(19): siRNA sense strand
ccucuuugcuuuccuaguc

SEQ ID NO: 908104 - RNA, 19 nt, Homo sapiens
  misc_RNA (1)...(19): siRNA sense strand
cauacucgguucacuugga

SEQ ID NO: 908105 - RNA, 19 nt, Homo sapiens
  misc_RNA (1)...(19): siRNA sense strand
uuacacaggcugauuagug

SEQ ID NO: 908106 - RNA, 19 nt, Homo sapiens
  misc_RNA (1)...(19): siRNA sense strand
caugcaaccuggacuugau

SEQ ID NO: 908107 - RNA, 19 nt, Homo sapiens
  misc_RNA (1)...(19): siRNA sense strand
uggauaaagugcugaugga

SEQ ID NO: 908108 - RNA, 19 nt, Homo sapiens
  misc_RNA (1)...(19): siRNA sense strand
cgcgaaugauccuuaugua

SEQ ID NO: 908109 - RNA, 19 nt, Homo sapiens
  misc_RNA (1)...(19): siRNA sense strand
cggcaguccuguucagaau

SEQ ID NO: 908110 - RNA, 19 nt, Homo sapiens
  misc_RNA (1)...(19): siRNA sense strand
ccucauuuaugccauuuca

SEQ ID NO: 908111 - RNA, 19 nt, Homo sapiens
  misc_RNA (1)...(19): siRNA sense strand
gauacgacagcuauggaaa

SEQ ID NO: 908112 - RNA, 19 nt, Homo sapiens
  misc_RNA (1)...(19): siRNA sense strand
gaagauuaagucuguagca

SEQ ID NO: 908113 - RNA, 19 nt, Homo sapiens
  misc_RNA (1)...(19): siRNA sense strand
gugaacauuuccugcuaug

SEQ ID NO: 908114 - RNA, 19 nt, Homo sapiens
  misc_RNA (1)...(19): siRNA sense strand
auugggacuuugcuuguua

SEQ ID NO: 908115 - RNA, 19 nt, Homo sapiens
  misc_RNA (1)...(19): siRNA sense strand
gagugauguucagaaguuu

SEQ ID NO: 908116 - RNA, 19 nt, Homo sapiens
  misc_RNA (1)...(19): siRNA sense strand
gcugauggaguuuguggaa

SEQ ID NO: 908117 - RNA, 19 nt, Homo sapiens
  misc_RNA (1)...(19): siRNA sense strand
ccagcaggacuacacagua

SEQ ID NO: 908118 - RNA, 19 nt, Homo sapiens
  misc_RNA (1)...(19): siRNA sense strand
ucaacuaccagcaggacua

SEQ ID NO: 908119 - RNA, 19 nt, Homo sapiens
  misc_RNA (1)...(19): siRNA sense strand
cagcuacaguguucacagu

SEQ ID NO: 908120 - RNA, 19 nt, Homo sapiens
  misc_RNA (1)...(19): siRNA sense strand
aggcacagguguacuaugg

SEQ ID NO: 908121 - RNA, 19 nt, Homo sapiens
  misc_RNA (1)...(19): siRNA sense strand
ggucauacucgguucacuu

SEQ ID NO: 908122 - RNA, 19 nt, Homo sapiens
  misc_RNA (1)...(19): siRNA sense strand
gugcaccuauuccauucuu

SEQ ID NO: 908123 - RNA, 19 nt, Homo sapiens
  misc_RNA (1)...(19): siRNA sense strand
uggcagagaauucuauaug

SEQ ID NO: 908124 - RNA, 19 nt, Homo sapiens
  misc_RNA (1)...(19): siRNA sense strand
ggauacgacagcuauggaa

SEQ ID NO: 908125 - RNA, 19 nt, Homo sapiens
  misc_RNA (1)...(19): siRNA sense strand
gcauacacagccacagcua

SEQ ID NO: 908126 - RNA, 19 nt, Homo sapiens
  misc_RNA (1)...(19): siRNA sense strand
cacgaugugugcugaaauc

SEQ ID NO: 908127 - RNA, 19 nt, Homo sapiens
  misc_RNA (1)...(19): siRNA sense strand
ucaguaaaucgccuuauuc

SEQ ID NO: 908128 - RNA, 19 nt, Homo sapiens
  misc_RNA (1)...(19): siRNA sense strand
ucacuaguucuauccauga

SEQ ID NO: 908129 - RNA, 19 nt, Homo sapiens
  misc_RNA (1)...(19): siRNA sense strand
ggaguaaugaccagcaaag

SEQ ID NO: 908130 - RNA, 19 nt, Homo sapiens
  misc_RNA (1)...(19): siRNA sense strand
caaccuaaagccuucugaa

SEQ ID NO: 908131 - RNA, 19 nt, Homo sapiens
  misc_RNA (1)...(19): siRNA sense strand
ugggagcccuggcagagaa

SEQ ID NO: 908132 - RNA, 19 nt, Homo sapiens
  misc_RNA (1)...(19): siRNA sense strand
ucaacacaguaggagauuu

SEQ ID NO: 908133 - RNA, 19 nt, Homo sapiens
  misc_RNA (1)...(19): siRNA sense strand
gcaagacuagugucaggau

SEQ ID NO: 908134 - RNA, 19 nt, Homo sapiens
  misc_RNA (1)...(19): siRNA sense strand
uaaaucgccuuauucguua

SEQ ID NO: 908135 - RNA, 19 nt, Homo sapiens
  misc_RNA (1)...(19): siRNA sense strand
cgaaugauccuuauguaua

SEQ ID NO: 908136 - RNA, 19 nt, Homo sapiens
  misc_RNA (1)...(19): siRNA sense strand
guaaaucgccuuauucguu

SEQ ID NO: 908137 - RNA, 19 nt, Homo sapiens
  misc_RNA (1)...(19): siRNA sense strand
ggauuaugcugcucaacua

SEQ ID NO: 908138 - RNA, 19 nt, Homo sapiens
  misc_RNA (1)...(19): siRNA sense strand
gguaguggauguauuauuc

SEQ ID NO: 908139 - RNA, 19 nt, Homo sapiens
  misc_RNA (1)...(19): siRNA sense strand
guacuuguguggaucuuaa

SEQ ID NO: 908140 - RNA, 19 nt, Homo sapiens
  misc_RNA (1)...(19): siRNA sense strand
caaagaaggucucccaaag

SEQ ID NO: 908141 - RNA, 19 nt, Homo sapiens
  misc_RNA (1)...(19): siRNA sense strand
gcggaaguauguauucuuu

SEQ ID NO: 908142 - RNA, 19 nt, Homo sapiens
  misc_RNA (1)...(19): siRNA sense strand
gcagagaauucuauaugga

SEQ ID NO: 908143 - RNA, 19 nt, Homo sapiens
  misc_RNA (1)...(19): siRNA sense strand
gaugugugcugaaaucuug

SEQ ID NO: 908144 - RNA, 19 nt, Homo sapiens
  misc_RNA (1)...(19): siRNA sense strand
gcaguccuguucagaauga

SEQ ID NO: 908145 - RNA, 19 nt, Homo sapiens
  misc_RNA (1)...(19): siRNA sense strand
gaccguagcugcacagaca

SEQ ID NO: 908146 - RNA, 19 nt, Homo sapiens
  misc_RNA (1)...(19): siRNA sense strand
guaaugaccagcaaagaaa

SEQ ID NO: 908147 - RNA, 19 nt, Homo sapiens
  misc_RNA (1)...(19): siRNA sense strand
gcucauugcuuccugucua

SEQ ID NO: 908148 - RNA, 19 nt, Homo sapiens
  misc_RNA (1)...(19): siRNA sense strand
ugagugauguucagaaguu

SEQ ID NO: 908149 - RNA, 19 nt, Homo sapiens
  misc_RNA (1)...(19): siRNA sense strand
gaucaucgucugccucuuu

SEQ ID NO: 908150 - RNA, 19 nt, Homo sapiens
  misc_RNA (1)...(19): siRNA sense strand
caggagcugugguaacaua

SEQ ID NO: 908151 - RNA, 19 nt, Homo sapiens
  misc_RNA (1)...(19): siRNA sense strand
gcaaagaaggucucccaaa

SEQ ID NO: 908152 - RNA, 19 nt, Homo sapiens
  misc_RNA (1)...(19): siRNA sense strand
ucagaaguuugcagagaua

SEQ ID NO: 908153 - RNA, 19 nt, Homo sapiens
  misc_RNA (1)...(19): siRNA sense strand
aagaaggucucccaaagaa

SEQ ID NO: 908154 - RNA, 19 nt, Homo sapiens
  misc_RNA (1)...(19): siRNA sense strand
gagcugugguaacauacua

SEQ ID NO: 908155 - RNA, 19 nt, Homo sapiens
  misc_RNA (1)...(19): siRNA sense strand
cgacagcuauggaaauauc

SEQ ID NO: 908156 - RNA, 19 nt, Homo sapiens
  misc_RNA (1)...(19): siRNA sense strand
acagucagcucaaaggaaa

SEQ ID NO: 908157 - RNA, 19 nt, Homo sapiens
  misc_RNA (1)...(19): siRNA sense strand
cuaguucuauccaugauuu

SEQ ID NO: 908158 - RNA, 19 nt, Homo sapiens
  misc_RNA (1)...(19): siRNA sense strand
gggaugggauuuauuugug

SEQ ID NO: 908159 - RNA, 19 nt, Homo sapiens
  misc_RNA (1)...(19): siRNA sense strand
cagcaggacuacacaguau

SEQ ID NO: 908160 - RNA, 19 nt, Homo sapiens
  misc_RNA (1)...(19): siRNA sense strand
caagacuagugucaggaua

SEQ ID NO: 908161 - RNA, 19 nt, Homo sapiens
  misc_RNA (1)...(19): siRNA sense strand
gaccagcaaagaaauuaua

SEQ ID NO: 908162 - RNA, 19 nt, Homo sapiens
  misc_RNA (1)...(19): siRNA sense strand
ccuaaagccuucugaauac

SEQ ID NO: 908163 - RNA, 19 nt, Homo sapiens
  misc_RNA (1)...(19): siRNA sense strand
uugauaaaccggaagauua

SEQ ID NO: 908164 - RNA, 19 nt, Homo sapiens
  misc_RNA (1)...(19): siRNA sense strand
uaugguggcuguaugcaaa

SEQ ID NO: 908165 - RNA, 19 nt, Homo sapiens
  misc_RNA (1)...(19): siRNA sense strand
ugauaaaccggaagauuaa

SEQ ID NO: 908166 - RNA, 19 nt, Homo sapiens
  misc_RNA (1)...(19): siRNA sense strand
uacgacagcuauggaaaua

SEQ ID NO: 908167 - RNA, 19 nt, Homo sapiens
  misc_RNA (1)...(19): siRNA sense strand
auaaagugcugauggaguu

SEQ ID NO: 908168 - RNA, 19 nt, Homo sapiens
  misc_RNA (1)...(19): siRNA sense strand
gcauugggaugggauuuau

SEQ ID NO: 908169 - RNA, 19 nt, Homo sapiens
  misc_RNA (1)...(19): siRNA sense strand
ggacuuugcuuguuaucac

SEQ ID NO: 908170 - RNA, 19 nt, Homo sapiens
  misc_RNA (1)...(19): siRNA sense strand
gcagagcuccaaacgagaa

SEQ ID NO: 908171 - RNA, 19 nt, Homo sapiens
  misc_RNA (1)...(19): siRNA sense strand
ggcaggagcugugguaaca

SEQ ID NO: 908172 - RNA, 19 nt, Homo sapiens
  misc_RNA (1)...(19): siRNA sense strand
guucagaaguuugcagaga

SEQ ID NO: 908173 - RNA, 19 nt, Homo sapiens
  misc_RNA (1)...(19): siRNA sense strand
guacuaugguggcuguaug

SEQ ID NO: 908174 - RNA, 19 nt, Homo sapiens
  misc_RNA (1)...(19): siRNA sense strand
auacaaaguuggaagcaau

SEQ ID NO: 908175 - RNA, 19 nt, Homo sapiens
  misc_RNA (1)...(19): siRNA sense strand
gaaguuugcagagauaaau

SEQ ID NO: 908176 - RNA, 19 nt, Homo sapiens
  misc_RNA (1)...(19): siRNA sense strand
guguggaucuuaacgauuc

SEQ ID NO: 908177 - RNA, 19 nt, Homo sapiens
  misc_RNA (1)...(19): siRNA sense strand
gaaaugguaguggauguau

SEQ ID NO: 908178 - RNA, 19 nt, Homo sapiens
  misc_RNA (1)...(19): siRNA sense strand
aaugguaguggauguauua

SEQ ID NO: 908179 - RNA, 19 nt, Homo sapiens
  misc_RNA (1)...(19): siRNA sense strand
gaaggucucccaaagaaac

SEQ ID NO: 908180 - RNA, 19 nt, Homo sapiens
  misc_RNA (1)...(19): siRNA sense strand
guaggaaagcaaugaaaga

SEQ ID NO: 908181 - RNA, 19 nt, Homo sapiens
  misc_RNA (1)...(19): siRNA sense strand
gcaaggucuucauucacuu

SEQ ID NO: 908182 - RNA, 19 nt, Homo sapiens
  misc_RNA (1)...(19): siRNA sense strand
gggauuuauuuguggcuuu

SEQ ID NO: 908183 - RNA, 19 nt, Homo sapiens
  misc_RNA (1)...(19): siRNA sense strand
gcaaggcuuuguggaguuc

SEQ ID NO: 908184 - RNA, 19 nt, Homo sapiens
  misc_RNA (1)...(19): siRNA sense strand
gagugcaccuauuccauuc

SEQ ID NO: 908185 - RNA, 19 nt, Homo sapiens
  misc_RNA (1)...(19): siRNA sense strand
gcaaugaaagaagcuggua

SEQ ID NO: 908186 - RNA, 19 nt, Homo sapiens
  misc_RNA (1)...(19): siRNA sense strand
cagaggcccugaucaccuu

SEQ ID NO: 908187 - RNA, 19 nt, Homo sapiens
  misc_RNA (1)...(19): siRNA sense strand
ggcaaggucuucauucacu

SEQ ID NO: 908188 - RNA, 19 nt, Homo sapiens
  misc_RNA (1)...(19): siRNA sense strand
ggcagagaauucuauaugg

SEQ ID NO: 908189 - RNA, 19 nt, Homo sapiens
  misc_RNA (1)...(19): siRNA sense strand
ggacuuucuuugcucuugu

SEQ ID NO: 908190 - RNA, 19 nt, Homo sapiens
  misc_RNA (1)...(19): siRNA sense strand
uaacgauucuggucauacu

SEQ ID NO: 908191 - RNA, 19 nt, Homo sapiens
  misc_RNA (1)...(19): siRNA sense strand
gcgaaugauccuuauguau

SEQ ID NO: 908192 - RNA, 19 nt, Homo sapiens
  misc_RNA (1)...(19): siRNA sense strand
aaaggaauuugccauuuac

SEQ ID NO: 908193 - RNA, 19 nt, Homo sapiens
  misc_RNA (1)...(19): siRNA sense strand
aaagaaggucucccaaaga

SEQ ID NO: 908194 - RNA, 19 nt, Homo sapiens
  misc_RNA (1)...(19): siRNA sense strand
guucagcccuauguagcua

SEQ ID NO: 908195 - RNA, 19 nt, Homo sapiens
  misc_RNA (1)...(19): siRNA sense strand
guggauguauuauucuugu

SEQ ID NO: 908196 - RNA, 19 nt, Homo sapiens
  misc_RNA (1)...(19): siRNA sense strand
uuucuuugcucuugucuug

SEQ ID NO: 908197 - RNA, 19 nt, Homo sapiens
  misc_RNA (1)...(19): siRNA sense strand
cauuucagcuacaguguuc

SEQ ID NO: 908198 - RNA, 19 nt, Homo sapiens
  misc_RNA (1)...(19): siRNA sense strand
cgagugcaccuauuccauu

SEQ ID NO: 908199 - RNA, 19 nt, Homo sapiens
  misc_RNA (1)...(19): siRNA sense strand
uaccauggcugcugcucuu

SEQ ID NO: 908200 - RNA, 19 nt, Homo sapiens
  misc_RNA (1)...(19): siRNA sense strand
gcgaguggcuaccaucaac

SEQ ID NO: 908201 - RNA, 19 nt, Homo sapiens
  misc_RNA (1)...(19): siRNA sense strand
ucagguauauaucaagagu

SEQ ID NO: 908202 - RNA, 19 nt, Homo sapiens
  misc_RNA (1)...(19): siRNA sense strand
accuaaagccuucugaaua

SEQ ID NO: 908203 - RNA, 19 nt, Homo sapiens
  misc_RNA (1)...(19): siRNA sense strand
ccucuuugcuuuccuaguc

SEQ ID NO: 908204 - RNA, 19 nt, Homo sapiens
  misc_RNA (1)...(19): siRNA sense strand
cauacucgguucacuugga

SEQ ID NO: 908205 - RNA, 19 nt, Homo sapiens
  misc_RNA (1)...(19): siRNA sense strand
uuacacaggcugauuagug

SEQ ID NO: 908206 - RNA, 19 nt, Homo sapiens
  misc_RNA (1)...(19): siRNA sense strand
caugcaaccuggacuugau

SEQ ID NO: 908207 - RNA, 19 nt, Homo sapiens
  misc_RNA (1)...(19): siRNA sense strand
uggauaaagugcugaugga

SEQ ID NO: 908208 - RNA, 19 nt, Homo sapiens
  misc_RNA (1)...(19): siRNA sense strand
cgcgaaugauccuuaugua

SEQ ID NO: 908209 - RNA, 19 nt, Homo sapiens
  misc_RNA (1)...(19): siRNA sense strand
cggcaguccuguucagaau

SEQ ID NO: 908210 - RNA, 19 nt, Homo sapiens
  misc_RNA (1)...(19): siRNA sense strand
ccucauuuaugccauuuca

SEQ ID NO: 908211 - RNA, 19 nt, Homo sapiens
  misc_RNA (1)...(19): siRNA sense strand
gauacgacagcuauggaaa

SEQ ID NO: 908212 - RNA, 19 nt, Homo sapiens
  misc_RNA (1)...(19): siRNA sense strand
gaagauuaagucuguagca

SEQ ID NO: 908213 - RNA, 19 nt, Homo sapiens
  misc_RNA (1)...(19): siRNA sense strand
gugaacauuuccugcuaug

SEQ ID NO: 908214 - RNA, 19 nt, Homo sapiens
  misc_RNA (1)...(19): siRNA sense strand
auugggacuuugcuuguua

SEQ ID NO: 908215 - RNA, 19 nt, Homo sapiens
  misc_RNA (1)...(19): siRNA sense strand
gagugauguucagaaguuu

SEQ ID NO: 908216 - RNA, 19 nt, Homo sapiens
  misc_RNA (1)...(19): siRNA sense strand
gcugauggaguuuguggaa

SEQ ID NO: 908217 - RNA, 19 nt, Homo sapiens
  misc_RNA (1)...(19): siRNA sense strand
ccagcaggacuacacagua

SEQ ID NO: 908218 - RNA, 19 nt, Homo sapiens
  misc_RNA (1)...(19): siRNA sense strand
ucaacuaccagcaggacua

SEQ ID NO: 908219 - RNA, 19 nt, Homo sapiens
  misc_RNA (1)...(19): siRNA sense strand
cagcuacaguguucacagu

SEQ ID NO: 908220 - RNA, 19 nt, Homo sapiens
  misc_RNA (1)...(19): siRNA sense strand
aggcacagguguacuaugg

SEQ ID NO: 908221 - RNA, 19 nt, Homo sapiens
  misc_RNA (1)...(19): siRNA sense strand
ggucauacucgguucacuu

SEQ ID NO: 908222 - RNA, 19 nt, Homo sapiens
  misc_RNA (1)...(19): siRNA sense strand
gugcaccuauuccauucuu

SEQ ID NO: 908223 - RNA, 19 nt, Homo sapiens
  misc_RNA (1)...(19): siRNA sense strand
uggcagagaauucuauaug

SEQ ID NO: 908224 - RNA, 19 nt, Homo sapiens
  misc_RNA (1)...(19): siRNA sense strand
ggauacgacagcuauggaa

SEQ ID NO: 908225 - RNA, 19 nt, Homo sapiens
  misc_RNA (1)...(19): siRNA sense strand
gcauacacagccacagcua

SEQ ID NO: 908226 - RNA, 19 nt, Homo sapiens
  misc_RNA (1)...(19): siRNA sense strand
cacgaugugugcugaaauc

SEQ ID NO: 908227 - RNA, 19 nt, Homo sapiens
  misc_RNA (1)...(19): siRNA sense strand
ucaguaaaucgccuuauuc

SEQ ID NO: 908228 - RNA, 19 nt, Homo sapiens
  misc_RNA (1)...(19): siRNA sense strand
ucacuaguucuauccauga

SEQ ID NO: 908229 - RNA, 19 nt, Homo sapiens
  misc_RNA (1)...(19): siRNA sense strand
ggaguaaugaccagcaaag

SEQ ID NO: 908230 - RNA, 19 nt, Homo sapiens
  misc_RNA (1)...(19): siRNA sense strand
caaccuaaagccuucugaa

SEQ ID NO: 908231 - RNA, 19 nt, Homo sapiens
  misc_RNA (1)...(19): siRNA sense strand
ugggagcccuggcagagaa

SEQ ID NO: 908232 - RNA, 19 nt, Homo sapiens
  misc_RNA (1)...(19): siRNA sense strand
ucaacacaguaggagauuu

SEQ ID NO: 908233 - RNA, 19 nt, Homo sapiens
  misc_RNA (1)...(19): siRNA sense strand
gcaagacuagugucaggau

SEQ ID NO: 908234 - RNA, 19 nt, Homo sapiens
  misc_RNA (1)...(19): siRNA sense strand
caaagaagauaaacccuua

SEQ ID NO: 908235 - RNA, 19 nt, Homo sapiens
  misc_RNA (1)...(19): siRNA sense strand
ggauggaucuucugaauuu

SEQ ID NO: 908236 - RNA, 19 nt, Homo sapiens
  misc_RNA (1)...(19): siRNA sense strand
gaaggaauaugucuccaaa

SEQ ID NO: 908237 - RNA, 19 nt, Homo sapiens
  misc_RNA (1)...(19): siRNA sense strand
gaagauaaacccuuaaaga

SEQ ID NO: 908238 - RNA, 19 nt, Homo sapiens
  misc_RNA (1)...(19): siRNA sense strand
gaaggaaaguuaaucuguu

SEQ ID NO: 908239 - RNA, 19 nt, Homo sapiens
  misc_RNA (1)...(19): siRNA sense strand
gcaaaguuguggacuguuu

SEQ ID NO: 908240 - RNA, 19 nt, Homo sapiens
  misc_RNA (1)...(19): siRNA sense strand
gaaauacaccuguuauguu

SEQ ID NO: 908241 - RNA, 19 nt, Homo sapiens
  misc_RNA (1)...(19): siRNA sense strand
gaaaaguacucauccauuu

SEQ ID NO: 908242 - RNA, 19 nt, Homo sapiens
  misc_RNA (1)...(19): siRNA sense strand
ggaaagagggcuugcauga

SEQ ID NO: 908243 - RNA, 19 nt, Homo sapiens
  misc_RNA (1)...(19): siRNA sense strand
gaugugaagucccauuaaa

SEQ ID NO: 908244 - RNA, 19 nt, Homo sapiens
  misc_RNA (1)...(19): siRNA sense strand
gaagaaagacaaagaagau

SEQ ID NO: 908245 - RNA, 19 nt, Homo sapiens
  misc_RNA (1)...(19): siRNA sense strand
guacuuacacugugaaauu

SEQ ID NO: 908246 - RNA, 19 nt, Homo sapiens
  misc_RNA (1)...(19): siRNA sense strand
gagagaaguuuaaagaaca

SEQ ID NO: 908247 - RNA, 19 nt, Homo sapiens
  misc_RNA (1)...(19): siRNA sense strand
gaaaguuaaucuguucuga

SEQ ID NO: 908248 - RNA, 19 nt, Homo sapiens
  misc_RNA (1)...(19): siRNA sense strand
gaacuacucccaucagaau

SEQ ID NO: 908249 - RNA, 19 nt, Homo sapiens
  misc_RNA (1)...(19): siRNA sense strand
caaggaaucugaagaaggu

SEQ ID NO: 908250 - RNA, 19 nt, Homo sapiens
  misc_RNA (1)...(19): siRNA sense strand
gaggauggaucuucugaau

SEQ ID NO: 908251 - RNA, 19 nt, Homo sapiens
  misc_RNA (1)...(19): siRNA sense strand
caagcagccugauaaagaa

SEQ ID NO: 908252 - RNA, 19 nt, Homo sapiens
  misc_RNA (1)...(19): siRNA sense strand
gcuccaagcuauagaacuu

SEQ ID NO: 908253 - RNA, 19 nt, Homo sapiens
  misc_RNA (1)...(19): siRNA sense strand
ccaagcagccugauaaaga

SEQ ID NO: 908254 - RNA, 19 nt, Homo sapiens
  misc_RNA (1)...(19): siRNA sense strand
uaacaaggaugguacuuac

SEQ ID NO: 908255 - RNA, 19 nt, Homo sapiens
  misc_RNA (1)...(19): siRNA sense strand
ccaaagaucagaauauugu

SEQ ID NO: 908256 - RNA, 19 nt, Homo sapiens
  misc_RNA (1)...(19): siRNA sense strand
cgaccuagaccauaaguuu

SEQ ID NO: 908257 - RNA, 19 nt, Homo sapiens
  misc_RNA (1)...(19): siRNA sense strand
gauucaaacucucaaacuu

SEQ ID NO: 908258 - RNA, 19 nt, Homo sapiens
  misc_RNA (1)...(19): siRNA sense strand
guauccagcucacauagaa

SEQ ID NO: 908259 - RNA, 19 nt, Homo sapiens
  misc_RNA (1)...(19): siRNA sense strand
aaagagggcuugcaugaag

SEQ ID NO: 908260 - RNA, 19 nt, Homo sapiens
  misc_RNA (1)...(19): siRNA sense strand
uggaaucucuucaggauga

SEQ ID NO: 908261 - RNA, 19 nt, Homo sapiens
  misc_RNA (1)...(19): siRNA sense strand
aaauacagcugaggaaaga

SEQ ID NO: 908262 - RNA, 19 nt, Homo sapiens
  misc_RNA (1)...(19): siRNA sense strand
gaccauaaguuuagaugca

SEQ ID NO: 908263 - RNA, 19 nt, Homo sapiens
  misc_RNA (1)...(19): siRNA sense strand
caaagucacugcuguuaac

SEQ ID NO: 908264 - RNA, 19 nt, Homo sapiens
  misc_RNA (1)...(19): siRNA sense strand
uacaagagauuucgacugu

SEQ ID NO: 908265 - RNA, 19 nt, Homo sapiens
  misc_RNA (1)...(19): siRNA sense strand
gagaacuacucccaucaga

SEQ ID NO: 908266 - RNA, 19 nt, Homo sapiens
  misc_RNA (1)...(19): siRNA sense strand
gcagugaggagaucaguga

SEQ ID NO: 908267 - RNA, 19 nt, Homo sapiens
  misc_RNA (1)...(19): siRNA sense strand
gaagaaauucaaggaguuu

SEQ ID NO: 908268 - RNA, 19 nt, Homo sapiens
  misc_RNA (1)...(19): siRNA sense strand
gaggauaauuugagugagu

SEQ ID NO: 908269 - RNA, 19 nt, Homo sapiens
  misc_RNA (1)...(19): siRNA sense strand
cagcaccaguggcaguuua

SEQ ID NO: 908270 - RNA, 19 nt, Homo sapiens
  misc_RNA (1)...(19): siRNA sense strand
guugaagucugcuuuggaa

SEQ ID NO: 908271 - RNA, 19 nt, Homo sapiens
  misc_RNA (1)...(19): siRNA sense strand
gaaacaucccugucacuga

SEQ ID NO: 908272 - RNA, 19 nt, Homo sapiens
  misc_RNA (1)...(19): siRNA sense strand
uagaagacauugacuacga

SEQ ID NO: 908273 - RNA, 19 nt, Homo sapiens
  misc_RNA (1)...(19): siRNA sense strand
ccuccaggcuguccacuaa

SEQ ID NO: 908274 - RNA, 19 nt, Homo sapiens
  misc_RNA (1)...(19): siRNA sense strand
ccacaaagggaaagugaaa

SEQ ID NO: 908275 - RNA, 19 nt, Homo sapiens
  misc_RNA (1)...(19): siRNA sense strand
ggaaagaggcauguccaaa

SEQ ID NO: 908276 - RNA, 19 nt, Homo sapiens
  misc_RNA (1)...(19): siRNA sense strand
gaccuagaccauaaguuua

SEQ ID NO: 908277 - RNA, 19 nt, Homo sapiens
  misc_RNA (1)...(19): siRNA sense strand
gaaagagggcuugcaugaa

SEQ ID NO: 908278 - RNA, 19 nt, Homo sapiens
  misc_RNA (1)...(19): siRNA sense strand
ggaggaggauaauuugagu

SEQ ID NO: 908279 - RNA, 19 nt, Homo sapiens
  misc_RNA (1)...(19): siRNA sense strand
cuacugcuguggauucaaa

SEQ ID NO: 908280 - RNA, 19 nt, Homo sapiens
  misc_RNA (1)...(19): siRNA sense strand
cgagagaaguuuaaagaac

SEQ ID NO: 908281 - RNA, 19 nt, Homo sapiens
  misc_RNA (1)...(19): siRNA sense strand
gaugguacuuacacuguga

SEQ ID NO: 908282 - RNA, 19 nt, Homo sapiens
  misc_RNA (1)...(19): siRNA sense strand
caacagugaaugugaagaa

SEQ ID NO: 908283 - RNA, 19 nt, Homo sapiens
  misc_RNA (1)...(19): siRNA sense strand
gcucaagcauuguaucaag

SEQ ID NO: 908284 - RNA, 19 nt, Homo sapiens
  misc_RNA (1)...(19): siRNA sense strand
gagugaagccaaagaagaa

SEQ ID NO: 908285 - RNA, 19 nt, Homo sapiens
  misc_RNA (1)...(19): siRNA sense strand
gaaagaggcauguccaaac

SEQ ID NO: 908286 - RNA, 19 nt, Homo sapiens
  misc_RNA (1)...(19): siRNA sense strand
gauccugacuugguuguau

SEQ ID NO: 908287 - RNA, 19 nt, Homo sapiens
  misc_RNA (1)...(19): siRNA sense strand
gacccaagcagccugauaa

SEQ ID NO: 908288 - RNA, 19 nt, Homo sapiens
  misc_RNA (1)...(19): siRNA sense strand
ucacugcuguuaacaagga

SEQ ID NO: 908289 - RNA, 19 nt, Homo sapiens
  misc_RNA (1)...(19): siRNA sense strand
agaagaaauucaaggaguu

SEQ ID NO: 908290 - RNA, 19 nt, Homo sapiens
  misc_RNA (1)...(19): siRNA sense strand
gaacugagaagaaggaaaa

SEQ ID NO: 908291 - RNA, 19 nt, Homo sapiens
  misc_RNA (1)...(19): siRNA sense strand
ucaaggaguuugugagagu

SEQ ID NO: 908292 - RNA, 19 nt, Homo sapiens
  misc_RNA (1)...(19): siRNA sense strand
gagaaggaguuggaugugu

SEQ ID NO: 908293 - RNA, 19 nt, Homo sapiens
  misc_RNA (1)...(19): siRNA sense strand
cagugaaugugaagaaaga

SEQ ID NO: 908294 - RNA, 19 nt, Homo sapiens
  misc_RNA (1)...(19): siRNA sense strand
aagccaaacuguugcacua

SEQ ID NO: 908295 - RNA, 19 nt, Homo sapiens
  misc_RNA (1)...(19): siRNA sense strand
ccgcaaagccaaacuguug

SEQ ID NO: 908296 - RNA, 19 nt, Homo sapiens
  misc_RNA (1)...(19): siRNA sense strand
gugaagaguccacaagaaa

SEQ ID NO: 908297 - RNA, 19 nt, Homo sapiens
  misc_RNA (1)...(19): siRNA sense strand
aaacacugacaaagacuua

SEQ ID NO: 908298 - RNA, 19 nt, Homo sapiens
  misc_RNA (1)...(19): siRNA sense strand
ccaaacuguugcacuauca

SEQ ID NO: 908299 - RNA, 19 nt, Homo sapiens
  misc_RNA (1)...(19): siRNA sense strand
aaguuuagaugcaaaguug

SEQ ID NO: 908300 - RNA, 19 nt, Homo sapiens
  misc_RNA (1)...(19): siRNA sense strand
gauuucgacuguggaagua

SEQ ID NO: 908301 - RNA, 19 nt, Homo sapiens
  misc_RNA (1)...(19): siRNA sense strand
gggcuggccucuagaccaa

SEQ ID NO: 908302 - RNA, 19 nt, Homo sapiens
  misc_RNA (1)...(19): siRNA sense strand
agaaggaguuggauguguu

SEQ ID NO: 908303 - RNA, 19 nt, Homo sapiens
  misc_RNA (1)...(19): siRNA sense strand
gagaugcccaaguggauaa

SEQ ID NO: 908304 - RNA, 19 nt, Homo sapiens
  misc_RNA (1)...(19): siRNA sense strand
caacccagaugaggaacuu

SEQ ID NO: 908305 - RNA, 19 nt, Homo sapiens
  misc_RNA (1)...(19): siRNA sense strand
caaaguuguggacuguuua

SEQ ID NO: 908306 - RNA, 19 nt, Homo sapiens
  misc_RNA (1)...(19): siRNA sense strand
guucagacugucaaacaua

SEQ ID NO: 908307 - RNA, 19 nt, Homo sapiens
  misc_RNA (1)...(19): siRNA sense strand
ggagaaaacacgaugaaaa

SEQ ID NO: 908308 - RNA, 19 nt, Homo sapiens
  misc_RNA (1)...(19): siRNA sense strand
ugaagaaggucaguugaag

SEQ ID NO: 908309 - RNA, 19 nt, Homo sapiens
  misc_RNA (1)...(19): siRNA sense strand
ggagaugcccaaguggaua

SEQ ID NO: 908310 - RNA, 19 nt, Homo sapiens
  misc_RNA (1)...(19): siRNA sense strand
ggaaaacacugacaaagac

SEQ ID NO: 908311 - RNA, 19 nt, Homo sapiens
  misc_RNA (1)...(19): siRNA sense strand
cccaaggcauuugcuguua

SEQ ID NO: 908312 - RNA, 19 nt, Homo sapiens
  misc_RNA (1)...(19): siRNA sense strand
ugacuugguuguaucagau

SEQ ID NO: 908313 - RNA, 19 nt, Homo sapiens
  misc_RNA (1)...(19): siRNA sense strand
ggggagaucucauuucaga

SEQ ID NO: 908314 - RNA, 19 nt, Homo sapiens
  misc_RNA (1)...(19): siRNA sense strand
gagaaauacaccuguuaug

SEQ ID NO: 908315 - RNA, 19 nt, Homo sapiens
  misc_RNA (1)...(19): siRNA sense strand
gccaaagucacugcuguua

SEQ ID NO: 908316 - RNA, 19 nt, Homo sapiens
  misc_RNA (1)...(19): siRNA sense strand
gcagagagugauugagguu

SEQ ID NO: 908317 - RNA, 19 nt, Homo sapiens
  misc_RNA (1)...(19): siRNA sense strand
ucagaggccuggcuucaag

SEQ ID NO: 908318 - RNA, 19 nt, Homo sapiens
  misc_RNA (1)...(19): siRNA sense strand
cauuggaggaggauaauuu

SEQ ID NO: 908319 - RNA, 19 nt, Homo sapiens
  misc_RNA (1)...(19): siRNA sense strand
gacgaggaaucagcuuuga

SEQ ID NO: 908320 - RNA, 19 nt, Homo sapiens
  misc_RNA (1)...(19): siRNA sense strand
ccaaagucacugcuguuaa

SEQ ID NO: 908321 - RNA, 19 nt, Homo sapiens
  misc_RNA (1)...(19): siRNA sense strand
gaagaaggucaguugaagu

SEQ ID NO: 908322 - RNA, 19 nt, Homo sapiens
  misc_RNA (1)...(19): siRNA sense strand
guaaugcuaggccuaaaga

SEQ ID NO: 908323 - RNA, 19 nt, Homo sapiens
  misc_RNA (1)...(19): siRNA sense strand
aaggaaaguuaaucuguuc

SEQ ID NO: 908324 - RNA, 19 nt, Homo sapiens
  misc_RNA (1)...(19): siRNA sense strand
gaaggaguuggauguguug

SEQ ID NO: 908325 - RNA, 19 nt, Homo sapiens
  misc_RNA (1)...(19): siRNA sense strand
caaaggugaaggaauaugu

SEQ ID NO: 908326 - RNA, 19 nt, Homo sapiens
  misc_RNA (1)...(19): siRNA sense strand
ccccaaaggugaaggaaua

SEQ ID NO: 908327 - RNA, 19 nt, Homo sapiens
  misc_RNA (1)...(19): siRNA sense strand
ggagugaugaugaguaugg

SEQ ID NO: 908328 - RNA, 19 nt, Homo sapiens
  misc_RNA (1)...(19): siRNA sense strand
ggucucaucugcacugacu

SEQ ID NO: 908329 - RNA, 19 nt, Homo sapiens
  misc_RNA (1)...(19): siRNA sense strand
ggaugugaagucccauuaa

SEQ ID NO: 908330 - RNA, 19 nt, Homo sapiens
  misc_RNA (1)...(19): siRNA sense strand
gaacgagaaggaagacaag

SEQ ID NO: 908331 - RNA, 19 nt, Homo sapiens
  misc_RNA (1)...(19): siRNA sense strand
aagcaacagugaaugugaa

SEQ ID NO: 908332 - RNA, 19 nt, Homo sapiens
  misc_RNA (1)...(19): siRNA sense strand
aagggaaagugaaagcauu

SEQ ID NO: 908333 - RNA, 19 nt, Homo sapiens
  misc_RNA (1)...(19): siRNA sense strand
ugaagaaagacaaagaaga

SEQ ID NO: 908334 - RNA, 19 nt, Homo sapiens
  misc_RNA (1)...(19): siRNA sense strand
caaaggagguguaauauuu

SEQ ID NO: 908335 - RNA, 19 nt, Homo sapiens
  misc_RNA (1)...(19): siRNA sense strand
gaagaaggauagcaaagaa

SEQ ID NO: 908336 - RNA, 19 nt, Homo sapiens
  misc_RNA (1)...(19): siRNA sense strand
gaaauggcuuugcuuauga

SEQ ID NO: 908337 - RNA, 19 nt, Homo sapiens
  misc_RNA (1)...(19): siRNA sense strand
gaagagaaaugcaaucagu

SEQ ID NO: 908338 - RNA, 19 nt, Homo sapiens
  misc_RNA (1)...(19): siRNA sense strand
caagauauauccuucagaa

SEQ ID NO: 908339 - RNA, 19 nt, Homo sapiens
  misc_RNA (1)...(19): siRNA sense strand
gaacuucccucugauguug

SEQ ID NO: 908340 - RNA, 19 nt, Homo sapiens
  misc_RNA (1)...(19): siRNA sense strand
ggaaacagcuaguaaaauu

SEQ ID NO: 908341 - RNA, 19 nt, Homo sapiens
  misc_RNA (1)...(19): siRNA sense strand
ggagagaauuagauaaaga

SEQ ID NO: 908342 - RNA, 19 nt, Homo sapiens
  misc_RNA (1)...(19): siRNA sense strand
guagagcuauuaaguauuc

SEQ ID NO: 908343 - RNA, 19 nt, Homo sapiens
  misc_RNA (1)...(19): siRNA sense strand
ucaaacgacugaaguacua

SEQ ID NO: 908344 - RNA, 19 nt, Homo sapiens
  misc_RNA (1)...(19): siRNA sense strand
gaaggaugaugaagaacaa

SEQ ID NO: 908345 - RNA, 19 nt, Homo sapiens
  misc_RNA (1)...(19): siRNA sense strand
agaaagcguuagugaaaua

SEQ ID NO: 908346 - RNA, 19 nt, Homo sapiens
  misc_RNA (1)...(19): siRNA sense strand
gaaaggagaggaugaagga

SEQ ID NO: 908347 - RNA, 19 nt, Homo sapiens
  misc_RNA (1)...(19): siRNA sense strand
gaaacuaguucugaagaug

SEQ ID NO: 908348 - RNA, 19 nt, Homo sapiens
  misc_RNA (1)...(19): siRNA sense strand
ucagaaggaugaugaagaa

SEQ ID NO: 908349 - RNA, 19 nt, Homo sapiens
  misc_RNA (1)...(19): siRNA sense strand
gaagauagcaaagcauuga

SEQ ID NO: 908350 - RNA, 19 nt, Homo sapiens
  misc_RNA (1)...(19): siRNA sense strand
caaaggaaguccauugauc

SEQ ID NO: 908351 - RNA, 19 nt, Homo sapiens
  misc_RNA (1)...(19): siRNA sense strand
ggacugggauagauuaaag

SEQ ID NO: 908352 - RNA, 19 nt, Homo sapiens
  misc_RNA (1)...(19): siRNA sense strand
gaggaugacuuugagguaa

SEQ ID NO: 908353 - RNA, 19 nt, Homo sapiens
  misc_RNA (1)...(19): siRNA sense strand
caagagacagugaugguua

SEQ ID NO: 908354 - RNA, 19 nt, Homo sapiens
  misc_RNA (1)...(19): siRNA sense strand
ugaaauggcuuugcuuaug

SEQ ID NO: 908355 - RNA, 19 nt, Homo sapiens
  misc_RNA (1)...(19): siRNA sense strand
caguagagcuauuaaguau

SEQ ID NO: 908356 - RNA, 19 nt, Homo sapiens
  misc_RNA (1)...(19): siRNA sense strand
caagaaggcuaaucacaag

SEQ ID NO: 908357 - RNA, 19 nt, Homo sapiens
  misc_RNA (1)...(19): siRNA sense strand
gaacaucaacgguggaaau

SEQ ID NO: 908358 - RNA, 19 nt, Homo sapiens
  misc_RNA (1)...(19): siRNA sense strand
gaaauuacaaguguuggua

SEQ ID NO: 908359 - RNA, 19 nt, Homo sapiens
  misc_RNA (1)...(19): siRNA sense strand
gcaaagagaacggaaagaa

SEQ ID NO: 908360 - RNA, 19 nt, Homo sapiens
  misc_RNA (1)...(19): siRNA sense strand
ggaggaagauucagaaagc

SEQ ID NO: 908361 - RNA, 19 nt, Homo sapiens
  misc_RNA (1)...(19): siRNA sense strand
ucagaaagcguuagugaaa

SEQ ID NO: 908362 - RNA, 19 nt, Homo sapiens
  misc_RNA (1)...(19): siRNA sense strand
gaagugaugaggaaucuga

SEQ ID NO: 908363 - RNA, 19 nt, Homo sapiens
  misc_RNA (1)...(19): siRNA sense strand
gaaaaggaaucacaaagga

SEQ ID NO: 908364 - RNA, 19 nt, Homo sapiens
  misc_RNA (1)...(19): siRNA sense strand
gaagugaauuuaacagcau

SEQ ID NO: 908365 - RNA, 19 nt, Homo sapiens
  misc_RNA (1)...(19): siRNA sense strand
gaacuaugccguggauaaa

SEQ ID NO: 908366 - RNA, 19 nt, Homo sapiens
  misc_RNA (1)...(19): siRNA sense strand
gaacuuacucaggcaauaa

SEQ ID NO: 908367 - RNA, 19 nt, Homo sapiens
  misc_RNA (1)...(19): siRNA sense strand
uaaagaaagugcagaagag

SEQ ID NO: 908368 - RNA, 19 nt, Homo sapiens
  misc_RNA (1)...(19): siRNA sense strand
ugaaaugugugacaaagau

SEQ ID NO: 908369 - RNA, 19 nt, Homo sapiens
  misc_RNA (1)...(19): siRNA sense strand
gcacaucuccagaagaaga

SEQ ID NO: 908370 - RNA, 19 nt, Homo sapiens
  misc_RNA (1)...(19): siRNA sense strand
cgacugaaguacuauuaug

SEQ ID NO: 908371 - RNA, 19 nt, Homo sapiens
  misc_RNA (1)...(19): siRNA sense strand
cuacuuagcuuccucuagu

SEQ ID NO: 908372 - RNA, 19 nt, Homo sapiens
  misc_RNA (1)...(19): siRNA sense strand
uuacaaugcucaacaggaa

SEQ ID NO: 908373 - RNA, 19 nt, Homo sapiens
  misc_RNA (1)...(19): siRNA sense strand
ggauguagccucagaagug

SEQ ID NO: 908374 - RNA, 19 nt, Homo sapiens
  misc_RNA (1)...(19): siRNA sense strand
gaagugaagaugaugaaga

SEQ ID NO: 908375 - RNA, 19 nt, Homo sapiens
  misc_RNA (1)...(19): siRNA sense strand
gaaaucacuugggaugaga

SEQ ID NO: 908376 - RNA, 19 nt, Homo sapiens
  misc_RNA (1)...(19): siRNA sense strand
gugauggccuggaauuuga

SEQ ID NO: 908377 - RNA, 19 nt, Homo sapiens
  misc_RNA (1)...(19): siRNA sense strand
caaagaugcucuggaggaa

SEQ ID NO: 908378 - RNA, 19 nt, Homo sapiens
  misc_RNA (1)...(19): siRNA sense strand
aggcagcucuugcagguua

SEQ ID NO: 908379 - RNA, 19 nt, Homo sapiens
  misc_RNA (1)...(19): siRNA sense strand
ggaaaucacuugggaugag

SEQ ID NO: 908380 - RNA, 19 nt, Homo sapiens
  misc_RNA (1)...(19): siRNA sense strand
gaaggaagagcaaguucaa

SEQ ID NO: 908381 - RNA, 19 nt, Homo sapiens
  misc_RNA (1)...(19): siRNA sense strand
gaaggauagcaaagaauuu

SEQ ID NO: 908382 - RNA, 19 nt, Homo sapiens
  misc_RNA (1)...(19): siRNA sense strand
ggacgaggacaguaagaaa

SEQ ID NO: 908383 - RNA, 19 nt, Homo sapiens
  misc_RNA (1)...(19): siRNA sense strand
gaaggaaaggauaaacuga

SEQ ID NO: 908384 - RNA, 19 nt, Homo sapiens
  misc_RNA (1)...(19): siRNA sense strand
gauguagccucagaaguga

SEQ ID NO: 908385 - RNA, 19 nt, Homo sapiens
  misc_RNA (1)...(19): siRNA sense strand
cagaggauuugaagcguuu

SEQ ID NO: 908386 - RNA, 19 nt, Homo sapiens
  misc_RNA (1)...(19): siRNA sense strand
gcugaaauggcuuugcuua

SEQ ID NO: 908387 - RNA, 19 nt, Homo sapiens
  misc_RNA (1)...(19): siRNA sense strand
uggcacaucuccagaagaa

SEQ ID NO: 908388 - RNA, 19 nt, Homo sapiens
  misc_RNA (1)...(19): siRNA sense strand
acagaaggcucuugcugaa

SEQ ID NO: 908389 - RNA, 19 nt, Homo sapiens
  misc_RNA (1)...(19): siRNA sense strand
gagcaugcuuggagagaau

SEQ ID NO: 908390 - RNA, 19 nt, Homo sapiens
  misc_RNA (1)...(19): siRNA sense strand
ggaaauggaaauuaaaugg

SEQ ID NO: 908391 - RNA, 19 nt, Homo sapiens
  misc_RNA (1)...(19): siRNA sense strand
gaaaagaaaggcaaagaaa

SEQ ID NO: 908392 - RNA, 19 nt, Homo sapiens
  misc_RNA (1)...(19): siRNA sense strand
gcuacaaggugaugaugga

SEQ ID NO: 908393 - RNA, 19 nt, Homo sapiens
  misc_RNA (1)...(19): siRNA sense strand
gcuauuaaguauuccugaa

SEQ ID NO: 908394 - RNA, 19 nt, Homo sapiens
  misc_RNA (1)...(19): siRNA sense strand
agacagugaugguuaugaa

SEQ ID NO: 908395 - RNA, 19 nt, Homo sapiens
  misc_RNA (1)...(19): siRNA sense strand
uaauagaggaugacuuuga

SEQ ID NO: 908396 - RNA, 19 nt, Homo sapiens
  misc_RNA (1)...(19): siRNA sense strand
ccucugauguugauuugaa

SEQ ID NO: 908397 - RNA, 19 nt, Homo sapiens
  misc_RNA (1)...(19): siRNA sense strand
acacgucgauuagcaguuu

SEQ ID NO: 908398 - RNA, 19 nt, Homo sapiens
  misc_RNA (1)...(19): siRNA sense strand
gaagauucagaaagcguua

SEQ ID NO: 908399 - RNA, 19 nt, Homo sapiens
  misc_RNA (1)...(19): siRNA sense strand
gcaaaggacccgagauuuu

SEQ ID NO: 908400 - RNA, 19 nt, Homo sapiens
  misc_RNA (1)...(19): siRNA sense strand
ccucugaaauugugaaauc

SEQ ID NO: 908401 - RNA, 19 nt, Homo sapiens
  misc_RNA (1)...(19): siRNA sense strand
ccaagaaggcuaaucacaa

SEQ ID NO: 908402 - RNA, 19 nt, Homo sapiens
  misc_RNA (1)...(19): siRNA sense strand
gcagauuuguuuccagaag

SEQ ID NO: 908403 - RNA, 19 nt, Homo sapiens
  misc_RNA (1)...(19): siRNA sense strand
ccaguagagcuauuaagua

SEQ ID NO: 908404 - RNA, 19 nt, Homo sapiens
  misc_RNA (1)...(19): siRNA sense strand
aaacauaaguccgaagaag

SEQ ID NO: 908405 - RNA, 19 nt, Homo sapiens
  misc_RNA (1)...(19): siRNA sense strand
ggaaagaacaagaacuuac

SEQ ID NO: 908406 - RNA, 19 nt, Homo sapiens
  misc_RNA (1)...(19): siRNA sense strand
gagauuacacgucgauuag

SEQ ID NO: 908407 - RNA, 19 nt, Homo sapiens
  misc_RNA (1)...(19): siRNA sense strand
caacagauggugaaaugug

SEQ ID NO: 908408 - RNA, 19 nt, Homo sapiens
  misc_RNA (1)...(19): siRNA sense strand
aauaggaagugaugaggaa

SEQ ID NO: 908409 - RNA, 19 nt, Homo sapiens
  misc_RNA (1)...(19): siRNA sense strand
gaaagaacaagaacuuacu

SEQ ID NO: 908410 - RNA, 19 nt, Homo sapiens
  misc_RNA (1)...(19): siRNA sense strand
ugagguaaauguuaacgau

SEQ ID NO: 908411 - RNA, 19 nt, Homo sapiens
  misc_RNA (1)...(19): siRNA sense strand
ggaaggaaaggauaaacug

SEQ ID NO: 908412 - RNA, 19 nt, Homo sapiens
  misc_RNA (1)...(19): siRNA sense strand
gaauuacaaugcucaacag

SEQ ID NO: 908413 - RNA, 19 nt, Homo sapiens
  misc_RNA (1)...(19): siRNA sense strand
gacuggacgucuagagaaa

SEQ ID NO: 908414 - RNA, 19 nt, Homo sapiens
  misc_RNA (1)...(19): siRNA sense strand
ugagauuacacgucgauua

SEQ ID NO: 908415 - RNA, 19 nt, Homo sapiens
  misc_RNA (1)...(19): siRNA sense strand
ggaugaagaugaggauagu

SEQ ID NO: 908416 - RNA, 19 nt, Homo sapiens
  misc_RNA (1)...(19): siRNA sense strand
ggccuggaauuugaaagua

SEQ ID NO: 908417 - RNA, 19 nt, Homo sapiens
  misc_RNA (1)...(19): siRNA sense strand
ugagacugaucaugaaaga

SEQ ID NO: 908418 - RNA, 19 nt, Homo sapiens
  misc_RNA (1)...(19): siRNA sense strand
ugugaaaucucccagaauc

SEQ ID NO: 908419 - RNA, 19 nt, Homo sapiens
  misc_RNA (1)...(19): siRNA sense strand
gauccugcuuugucaaugu

SEQ ID NO: 908420 - RNA, 19 nt, Homo sapiens
  misc_RNA (1)...(19): siRNA sense strand
ucacaaaggaaguccauug

SEQ ID NO: 908421 - RNA, 19 nt, Homo sapiens
  misc_RNA (1)...(19): siRNA sense strand
ggauugugauggccuggaa

SEQ ID NO: 908422 - RNA, 19 nt, Homo sapiens
  misc_RNA (1)...(19): siRNA sense strand
ccaaaggagguguaauauu

SEQ ID NO: 908423 - RNA, 19 nt, Homo sapiens
  misc_RNA (1)...(19): siRNA sense strand
agaggaggaugaagaugaa

SEQ ID NO: 908424 - RNA, 19 nt, Homo sapiens
  misc_RNA (1)...(19): siRNA sense strand
ugaacuaugccguggauaa

SEQ ID NO: 908425 - RNA, 19 nt, Homo sapiens
  misc_RNA (1)...(19): siRNA sense strand
gauuacacgucgauuagca

SEQ ID NO: 908426 - RNA, 19 nt, Homo sapiens
  misc_RNA (1)...(19): siRNA sense strand
gcacuacagaggauuugaa

SEQ ID NO: 908427 - RNA, 19 nt, Homo sapiens
  misc_RNA (1)...(19): siRNA sense strand
aauguacacuucccacuug

SEQ ID NO: 908428 - RNA, 19 nt, Homo sapiens
  misc_RNA (1)...(19): siRNA sense strand
uaaauggguuccaggucuu

SEQ ID NO: 908429 - RNA, 19 nt, Homo sapiens
  misc_RNA (1)...(19): siRNA sense strand
gaugaugaagaacaaauug

SEQ ID NO: 908430 - RNA, 19 nt, Homo sapiens
  misc_RNA (1)...(19): siRNA sense strand
cuaaggauguagccucaga

SEQ ID NO: 908431 - RNA, 19 nt, Homo sapiens
  misc_RNA (1)...(19): siRNA sense strand
ucaaggaccaguagagcua

SEQ ID NO: 908432 - RNA, 19 nt, Homo sapiens
  misc_RNA (1)...(19): siRNA sense strand
gcucuguucaauucauuua

SEQ ID NO: 908433 - RNA, 19 nt, Homo sapiens
  misc_RNA (1)...(19): siRNA sense strand
gaugaagaacaaauugcua

SEQ ID NO: 908434 - RNA, 19 nt, Homo sapiens
  misc_RNA (1)...(19): siRNA sense strand
gcgaggagcuggacaaauu

SEQ ID NO: 908435 - RNA, 19 nt, Homo sapiens
  misc_RNA (1)...(19): siRNA sense strand
gagcugaaccugccuauca

SEQ ID NO: 908436 - RNA, 19 nt, Homo sapiens
  misc_RNA (1)...(19): siRNA sense strand
caagaaggcugagauggau

SEQ ID NO: 908437 - RNA, 19 nt, Homo sapiens
  misc_RNA (1)...(19): siRNA sense strand
gaacgugagcuggaaauug

SEQ ID NO: 908438 - RNA, 19 nt, Homo sapiens
  misc_RNA (1)...(19): siRNA sense strand
cuaagaaacccuaccguaa

SEQ ID NO: 908439 - RNA, 19 nt, Homo sapiens
  misc_RNA (1)...(19): siRNA sense strand
ggaggagaaugaagagcuu

SEQ ID NO: 908440 - RNA, 19 nt, Homo sapiens
  misc_RNA (1)...(19): siRNA sense strand
gaaccugacucuggcuuuc

SEQ ID NO: 908441 - RNA, 19 nt, Homo sapiens
  misc_RNA (1)...(19): siRNA sense strand
ggacaaauuuaaggauaag

SEQ ID NO: 908442 - RNA, 19 nt, Homo sapiens
  misc_RNA (1)...(19): siRNA sense strand
ggacaugguucggaaacau

SEQ ID NO: 908443 - RNA, 19 nt, Homo sapiens
  misc_RNA (1)...(19): siRNA sense strand
gagcugcguuuggaaauuc

SEQ ID NO: 908444 - RNA, 19 nt, Homo sapiens
  misc_RNA (1)...(19): siRNA sense strand
cagaaaggaugaagcucuu

SEQ ID NO: 908445 - RNA, 19 nt, Homo sapiens
  misc_RNA (1)...(19): siRNA sense strand
ggagcugcguuuggaaauu

SEQ ID NO: 908446 - RNA, 19 nt, Homo sapiens
  misc_RNA (1)...(19): siRNA sense strand
gaggagcuggacaaauuua

SEQ ID NO: 908447 - RNA, 19 nt, Homo sapiens
  misc_RNA (1)...(19): siRNA sense strand
ccaagaacaccaucaacaa

SEQ ID NO: 908448 - RNA, 19 nt, Homo sapiens
  misc_RNA (1)...(19): siRNA sense strand
cuggacaaauuuaaggaua

SEQ ID NO: 908449 - RNA, 19 nt, Homo sapiens
  misc_RNA (1)...(19): siRNA sense strand
agucauugcccgaguguua

SEQ ID NO: 908450 - RNA, 19 nt, Homo sapiens
  misc_RNA (1)...(19): siRNA sense strand
aggcugagauggauaggaa

SEQ ID NO: 908451 - RNA, 19 nt, Homo sapiens
  misc_RNA (1)...(19): siRNA sense strand
uaagaaacccuaccguaag

SEQ ID NO: 908452 - RNA, 19 nt, Homo sapiens
  misc_RNA (1)...(19): siRNA sense strand
ucaagaaggcugagaugga

SEQ ID NO: 908453 - RNA, 19 nt, Homo sapiens
  misc_RNA (1)...(19): siRNA sense strand
gugccuaccucagucauug

SEQ ID NO: 908454 - RNA, 19 nt, Homo sapiens
  misc_RNA (1)...(19): siRNA sense strand
gaucaagaaggcugagaug

SEQ ID NO: 908455 - RNA, 19 nt, Homo sapiens
  misc_RNA (1)...(19): siRNA sense strand
caagaacaccaucaacaag

SEQ ID NO: 908456 - RNA, 19 nt, Homo sapiens
  misc_RNA (1)...(19): siRNA sense strand
gguaccggcuggacugcaa

SEQ ID NO: 908457 - RNA, 19 nt, Homo sapiens
  misc_RNA (1)...(19): siRNA sense strand
ccacaaguuugccgaucug

SEQ ID NO: 908458 - RNA, 19 nt, Homo sapiens
  misc_RNA (1)...(19): siRNA sense strand
gaaaggaugaagcucuuac

SEQ ID NO: 908459 - RNA, 19 nt, Homo sapiens
  misc_RNA (1)...(19): siRNA sense strand
gccaagaacaccaucaaca

SEQ ID NO: 908460 - RNA, 19 nt, Homo sapiens
  misc_RNA (1)...(19): siRNA sense strand
aacgugagcuggaaauugg

SEQ ID NO: 908461 - RNA, 19 nt, Homo sapiens
  misc_RNA (1)...(19): siRNA sense strand
agggcaaccugcucaacua

SEQ ID NO: 908462 - RNA, 19 nt, Homo sapiens
  misc_RNA (1)...(19): siRNA sense strand
cagagccugcugcccauua

SEQ ID NO: 908463 - RNA, 19 nt, Homo sapiens
  misc_RNA (1)...(19): siRNA sense strand
gacaagcugcacacacuga

SEQ ID NO: 908464 - RNA, 19 nt, Homo sapiens
  misc_RNA (1)...(19): siRNA sense strand
cuguacagcuccucaagug

SEQ ID NO: 908465 - RNA, 19 nt, Homo sapiens
  misc_RNA (1)...(19): siRNA sense strand
ggacugcaacccggcugua

SEQ ID NO: 908466 - RNA, 19 nt, Homo sapiens
  misc_RNA (1)...(19): siRNA sense strand
agagccugcugcccauuaa

SEQ ID NO: 908467 - RNA, 19 nt, Homo sapiens
  misc_RNA (1)...(19): siRNA sense strand
uugccgaucugcccuguga

SEQ ID NO: 908468 - RNA, 19 nt, Homo sapiens
  misc_RNA (1)...(19): siRNA sense strand
ugcacacacugaucaagaa

SEQ ID NO: 908469 - RNA, 19 nt, Homo sapiens
  misc_RNA (1)...(19): siRNA sense strand
gacaugguucggaaacauu

SEQ ID NO: 908470 - RNA, 19 nt, Homo sapiens
  misc_RNA (1)...(19): siRNA sense strand
aagaaacccuaccguaagg

SEQ ID NO: 908471 - RNA, 19 nt, Homo sapiens
  misc_RNA (1)...(19): siRNA sense strand
cgaggagcuggacaaauuu

SEQ ID NO: 908472 - RNA, 19 nt, Homo sapiens
  misc_RNA (1)...(19): siRNA sense strand
ggaacgugagcuggaaauu

SEQ ID NO: 908473 - RNA, 19 nt, Homo sapiens
  misc_RNA (1)...(19): siRNA sense strand
gcucaauucagcccaguca

SEQ ID NO: 908474 - RNA, 19 nt, Homo sapiens
  misc_RNA (1)...(19): siRNA sense strand
gagcuggacaaauuuaagg

SEQ ID NO: 908475 - RNA, 19 nt, Homo sapiens
  misc_RNA (1)...(19): siRNA sense strand
gcugagauggauaggaaga

SEQ ID NO: 908476 - RNA, 19 nt, Homo sapiens
  misc_RNA (1)...(19): siRNA sense strand
ggagcuggacaaauuuaag

SEQ ID NO: 908477 - RNA, 19 nt, Homo sapiens
  misc_RNA (1)...(19): siRNA sense strand
uacaggaggagaaugaaga

SEQ ID NO: 908478 - RNA, 19 nt, Homo sapiens
  misc_RNA (1)...(19): siRNA sense strand
ggcugaggaugucuuugug

SEQ ID NO: 908479 - RNA, 19 nt, Homo sapiens
  misc_RNA (1)...(19): siRNA sense strand
aggacaagcugcacacacu

SEQ ID NO: 908480 - RNA, 19 nt, Homo sapiens
  misc_RNA (1)...(19): siRNA sense strand
agucucuacugcucaauuc

SEQ ID NO: 908481 - RNA, 19 nt, Homo sapiens
  misc_RNA (1)...(19): siRNA sense strand
gagucucuacugcucaauu

SEQ ID NO: 908482 - RNA, 19 nt, Homo sapiens
  misc_RNA (1)...(19): siRNA sense strand
cggagucucuacugcucaa

SEQ ID NO: 908483 - RNA, 19 nt, Homo sapiens
  misc_RNA (1)...(19): siRNA sense strand
ugacugaugcagaaaggau

SEQ ID NO: 908484 - RNA, 19 nt, Homo sapiens
  misc_RNA (1)...(19): siRNA sense strand
acgcuggacugggagauug

SEQ ID NO: 908485 - RNA, 19 nt, Homo sapiens
  misc_RNA (1)...(19): siRNA sense strand
gcacacacugaucaagaag

SEQ ID NO: 908486 - RNA, 19 nt, Homo sapiens
  misc_RNA (1)...(19): siRNA sense strand
gcugcuggaugccaagaac

SEQ ID NO: 908487 - RNA, 19 nt, Homo sapiens
  misc_RNA (1)...(19): siRNA sense strand
agaaaggaugaagcucuua

SEQ ID NO: 908488 - RNA, 19 nt, Homo sapiens
  misc_RNA (1)...(19): siRNA sense strand
gcucugccagcucugaaga

SEQ ID NO: 908489 - RNA, 19 nt, Homo sapiens
  misc_RNA (1)...(19): siRNA sense strand
gccgcaggguaauagaguu

SEQ ID NO: 908490 - RNA, 19 nt, Homo sapiens
  misc_RNA (1)...(19): siRNA sense strand
ccuggaacgugagcuggaa

SEQ ID NO: 908491 - RNA, 19 nt, Homo sapiens
  misc_RNA (1)...(19): siRNA sense strand
ucggaaacauuugcacagu

SEQ ID NO: 908492 - RNA, 19 nt, Homo sapiens
  misc_RNA (1)...(19): siRNA sense strand
ggaggaagaagagcugaac

SEQ ID NO: 908493 - RNA, 19 nt, Homo sapiens
  misc_RNA (1)...(19): siRNA sense strand
gcaggguaauagaguucuc

SEQ ID NO: 908494 - RNA, 19 nt, Homo sapiens
  misc_RNA (1)...(19): siRNA sense strand
gaagccggagucucuacug

SEQ ID NO: 908495 - RNA, 19 nt, Homo sapiens
  misc_RNA (1)...(19): siRNA sense strand
gcagcaacaucucccacaa

SEQ ID NO: 908496 - RNA, 19 nt, Homo sapiens
  misc_RNA (1)...(19): siRNA sense strand
gaaggaggcaaccaaaaua

SEQ ID NO: 908497 - RNA, 19 nt, Homo sapiens
  misc_RNA (1)...(19): siRNA sense strand
gagauccaguggugguaug

SEQ ID NO: 908498 - RNA, 19 nt, Homo sapiens
  misc_RNA (1)...(19): siRNA sense strand
aaauaaguguggucaaggu

SEQ ID NO: 908499 - RNA, 19 nt, Homo sapiens
  misc_RNA (1)...(19): siRNA sense strand
caaaauaaguguggucaag

SEQ ID NO: 908500 - RNA, 19 nt, Homo sapiens
  misc_RNA (1)...(19): siRNA sense strand
ggaaggaggcaaccaaaau

SEQ ID NO: 908501 - RNA, 19 nt, Homo sapiens
  misc_RNA (1)...(19): siRNA sense strand
aagcaucucagcaggaaga

SEQ ID NO: 908502 - RNA, 19 nt, Homo sapiens
  misc_RNA (1)...(19): siRNA sense strand
ggagauccaguggugguau

SEQ ID NO: 908503 - RNA, 19 nt, Homo sapiens
  misc_RNA (1)...(19): siRNA sense strand
ucacagagacaccccauga

SEQ ID NO: 908504 - RNA, 19 nt, Homo sapiens
  misc_RNA (1)...(19): siRNA sense strand
aaaagcaucucagcaggaa

SEQ ID NO: 908505 - RNA, 19 nt, Homo sapiens
  misc_RNA (1)...(19): siRNA sense strand
gauccaguggugguaugua

SEQ ID NO: 908506 - RNA, 19 nt, Homo sapiens
  misc_RNA (1)...(19): siRNA sense strand
ucaagguggugggcagcaa

SEQ ID NO: 908507 - RNA, 19 nt, Homo sapiens
  misc_RNA (1)...(19): siRNA sense strand
gacaauggcuacuccagaa

SEQ ID NO: 908508 - RNA, 19 nt, Homo sapiens
  misc_RNA (1)...(19): siRNA sense strand
gaagaugccccuagugaga

SEQ ID NO: 908509 - RNA, 19 nt, Homo sapiens
  misc_RNA (1)...(19): siRNA sense strand
gggagacacuacggaagga

SEQ ID NO: 908510 - RNA, 19 nt, Homo sapiens
  misc_RNA (1)...(19): siRNA sense strand
gaaggaauacagccgaaac

SEQ ID NO: 908511 - RNA, 19 nt, Homo sapiens
  misc_RNA (1)...(19): siRNA sense strand
cuucaggacuccacaaacu

SEQ ID NO: 908512 - RNA, 19 nt, Homo sapiens
  misc_RNA (1)...(19): siRNA sense strand
ccgaaacugccacaaauuc

SEQ ID NO: 908513 - RNA, 19 nt, Homo sapiens
  misc_RNA (1)...(19): siRNA sense strand
agacacuacggaaggaaua

SEQ ID NO: 908514 - RNA, 19 nt, Homo sapiens
  misc_RNA (1)...(19): siRNA sense strand
agccgaaacugccacaaau

SEQ ID NO: 908515 - RNA, 19 nt, Homo sapiens
  misc_RNA (1)...(19): siRNA sense strand
gggaagaggaccugaucug

SEQ ID NO: 908516 - RNA, 19 nt, Homo sapiens
  misc_RNA (1)...(19): siRNA sense strand
ggaaggaauacagccgaaa

SEQ ID NO: 908517 - RNA, 19 nt, Homo sapiens
  misc_RNA (1)...(19): siRNA sense strand
cagccgaaacugccacaaa

SEQ ID NO: 908518 - RNA, 19 nt, Homo sapiens
  misc_RNA (1)...(19): siRNA sense strand
cgcucaagcuuucaugaug

SEQ ID NO: 908519 - RNA, 19 nt, Homo sapiens
  misc_RNA (1)...(19): siRNA sense strand
gguggccucugguggaaca

SEQ ID NO: 908520 - RNA, 19 nt, Homo sapiens
  misc_RNA (1)...(19): siRNA sense strand
ccuccuggcuccugcuugu

SEQ ID NO: 908521 - RNA, 19 nt, Homo sapiens
  misc_RNA (1)...(19): siRNA sense strand
gccgaaacugccacaaauu

SEQ ID NO: 908522 - RNA, 19 nt, Homo sapiens
  misc_RNA (1)...(19): siRNA sense strand
gccacaaauucccgcaugu

SEQ ID NO: 908523 - RNA, 19 nt, Homo sapiens
  misc_RNA (1)...(19): siRNA sense strand
gagcuugggcugggacaau

SEQ ID NO: 908524 - RNA, 19 nt, Homo sapiens
  misc_RNA (1)...(19): siRNA sense strand
gcucccagccugauaucug

SEQ ID NO: 908525 - RNA, 19 nt, Homo sapiens
  misc_RNA (1)...(19): siRNA sense strand
gggaagaugccccuaguga

SEQ ID NO: 908526 - RNA, 19 nt, Homo sapiens
  misc_RNA (1)...(19): siRNA sense strand
gugguggccucugguggaa

SEQ ID NO: 908527 - RNA, 19 nt, Homo sapiens
  misc_RNA (1)...(19): siRNA sense strand
gagacacuacggaaggaau

SEQ ID NO: 908528 - RNA, 19 nt, Homo sapiens
  misc_RNA (1)...(19): siRNA sense strand
gaugcugugugggcuguca

SEQ ID NO: 908529 - RNA, 19 nt, Homo sapiens
  misc_RNA (1)...(19): siRNA sense strand
ucaggacuccacaaacuca

SEQ ID NO: 908530 - RNA, 19 nt, Homo sapiens
  misc_RNA (1)...(19): siRNA sense strand
gaagaaagcuacaucgaaa

SEQ ID NO: 908531 - RNA, 19 nt, Homo sapiens
  misc_RNA (1)...(19): siRNA sense strand
ggaaggaauuucagaauaa

SEQ ID NO: 908532 - RNA, 19 nt, Homo sapiens
  misc_RNA (1)...(19): siRNA sense strand
gaaaggcaauccaaaguau

SEQ ID NO: 908533 - RNA, 19 nt, Homo sapiens
  misc_RNA (1)...(19): siRNA sense strand
gaacaggcuucauuugaug

SEQ ID NO: 908534 - RNA, 19 nt, Homo sapiens
  misc_RNA (1)...(19): siRNA sense strand
gaacaugcaucucuuacca

SEQ ID NO: 908535 - RNA, 19 nt, Homo sapiens
  misc_RNA (1)...(19): siRNA sense strand
ggaacaggcuucauuugau

SEQ ID NO: 908536 - RNA, 19 nt, Homo sapiens
  misc_RNA (1)...(19): siRNA sense strand
ggacuucaauucagcauca

SEQ ID NO: 908537 - RNA, 19 nt, Homo sapiens
  misc_RNA (1)...(19): siRNA sense strand
gaaauucagccuagauuau

SEQ ID NO: 908538 - RNA, 19 nt, Homo sapiens
  misc_RNA (1)...(19): siRNA sense strand
gagaugacccaaacacuaa

SEQ ID NO: 908539 - RNA, 19 nt, Homo sapiens
  misc_RNA (1)...(19): siRNA sense strand
cggaaggaauuucagaaua

SEQ ID NO: 908540 - RNA, 19 nt, Homo sapiens
  misc_RNA (1)...(19): siRNA sense strand
gaaucucccucucugguuu

SEQ ID NO: 908541 - RNA, 19 nt, Homo sapiens
  misc_RNA (1)...(19): siRNA sense strand
cuggaaagcugauguagaa

SEQ ID NO: 908542 - RNA, 19 nt, Homo sapiens
  misc_RNA (1)...(19): siRNA sense strand
gaacaaagaguagacuaug

SEQ ID NO: 908543 - RNA, 19 nt, Homo sapiens
  misc_RNA (1)...(19): siRNA sense strand
gaaaguuccuuaaguucca

SEQ ID NO: 908544 - RNA, 19 nt, Homo sapiens
  misc_RNA (1)...(19): siRNA sense strand
ccagaaagaaaugguauua

SEQ ID NO: 908545 - RNA, 19 nt, Homo sapiens
  misc_RNA (1)...(19): siRNA sense strand
gcccuuacguggacaaaga

SEQ ID NO: 908546 - RNA, 19 nt, Homo sapiens
  misc_RNA (1)...(19): siRNA sense strand
ccaaugaacucaggaagca

SEQ ID NO: 908547 - RNA, 19 nt, Homo sapiens
  misc_RNA (1)...(19): siRNA sense strand
ggaacaagcacuccagcaa

SEQ ID NO: 908548 - RNA, 19 nt, Homo sapiens
  misc_RNA (1)...(19): siRNA sense strand
ucugccagcucccuucuua

SEQ ID NO: 908549 - RNA, 19 nt, Homo sapiens
  misc_RNA (1)...(19): siRNA sense strand
gaucuggaguagagaaauc

SEQ ID NO: 908550 - RNA, 19 nt, Homo sapiens
  misc_RNA (1)...(19): siRNA sense strand
caccauugcuggaaaguuc

SEQ ID NO: 908551 - RNA, 19 nt, Homo sapiens
  misc_RNA (1)...(19): siRNA sense strand
ugaaaggcaauccaaagua

SEQ ID NO: 908552 - RNA, 19 nt, Homo sapiens
  misc_RNA (1)...(19): siRNA sense strand
ugugauagcuggucaaacu

SEQ ID NO: 908553 - RNA, 19 nt, Homo sapiens
  misc_RNA (1)...(19): siRNA sense strand
caaagaaauucagccuaga

SEQ ID NO: 908554 - RNA, 19 nt, Homo sapiens
  misc_RNA (1)...(19): siRNA sense strand
cgaagaaagcuacaucgaa

SEQ ID NO: 908555 - RNA, 19 nt, Homo sapiens
  misc_RNA (1)...(19): siRNA sense strand
aaacucagaccguucauug

SEQ ID NO: 908556 - RNA, 19 nt, Homo sapiens
  misc_RNA (1)...(19): siRNA sense strand
gccaagagaugacccaaac

SEQ ID NO: 908557 - RNA, 19 nt, Homo sapiens
  misc_RNA (1)...(19): siRNA sense strand
gcaaaagaacuagacauua

SEQ ID NO: 908558 - RNA, 19 nt, Homo sapiens
  misc_RNA (1)...(19): siRNA sense strand
gaacucaggaagcaucuca

SEQ ID NO: 908559 - RNA, 19 nt, Homo sapiens
  misc_RNA (1)...(19): siRNA sense strand
gcccugaucuggaguagag

SEQ ID NO: 908560 - RNA, 19 nt, Homo sapiens
  misc_RNA (1)...(19): siRNA sense strand
gagaagacgaagaaagcua

SEQ ID NO: 908561 - RNA, 19 nt, Homo sapiens
  misc_RNA (1)...(19): siRNA sense strand
ucagaauaauuucguguuc

SEQ ID NO: 908562 - RNA, 19 nt, Homo sapiens
  misc_RNA (1)...(19): siRNA sense strand
ugccugagcugccugcaaa

SEQ ID NO: 908563 - RNA, 19 nt, Homo sapiens
  misc_RNA (1)...(19): siRNA sense strand
gcacucugguuccaagaag

SEQ ID NO: 908564 - RNA, 19 nt, Homo sapiens
  misc_RNA (1)...(19): siRNA sense strand
agaaauucagccuagauua

SEQ ID NO: 908565 - RNA, 19 nt, Homo sapiens
  misc_RNA (1)...(19): siRNA sense strand
gguauuaauucugcaagau

SEQ ID NO: 908566 - RNA, 19 nt, Homo sapiens
  misc_RNA (1)...(19): siRNA sense strand
gaggaaaccagaagugagu

SEQ ID NO: 908567 - RNA, 19 nt, Homo sapiens
  misc_RNA (1)...(19): siRNA sense strand
gaugaaaggcaauccaaag

SEQ ID NO: 908568 - RNA, 19 nt, Homo sapiens
  misc_RNA (1)...(19): siRNA sense strand
aaagcuacaucgaaaugga

SEQ ID NO: 908569 - RNA, 19 nt, Homo sapiens
  misc_RNA (1)...(19): siRNA sense strand
cagaauaauuucguguuca

SEQ ID NO: 908570 - RNA, 19 nt, Homo sapiens
  misc_RNA (1)...(19): siRNA sense strand
agagaugacccaaacacua

SEQ ID NO: 908571 - RNA, 19 nt, Homo sapiens
  misc_RNA (1)...(19): siRNA sense strand
cuaaugccguagccacuga

SEQ ID NO: 908572 - RNA, 19 nt, Homo sapiens
  misc_RNA (1)...(19): siRNA sense strand
gcuggugccucuggucuug

SEQ ID NO: 908573 - RNA, 19 nt, Homo sapiens
  misc_RNA (1)...(19): siRNA sense strand
ggaguggaguacacacagu

SEQ ID NO: 908574 - RNA, 19 nt, Homo sapiens
  misc_RNA (1)...(19): siRNA sense strand
uggaacaggcuucauuuga

SEQ ID NO: 908575 - RNA, 19 nt, Homo sapiens
  misc_RNA (1)...(19): siRNA sense strand
uuacguggacaaagaaauu

SEQ ID NO: 908576 - RNA, 19 nt, Homo sapiens
  misc_RNA (1)...(19): siRNA sense strand
cuaauccuguuuccagaga

SEQ ID NO: 908577 - RNA, 19 nt, Homo sapiens
  misc_RNA (1)...(19): siRNA sense strand
caagacuacuucccguaca

SEQ ID NO: 908578 - RNA, 19 nt, Homo sapiens
  misc_RNA (1)...(19): siRNA sense strand
ccaaguggaugagcagaag

SEQ ID NO: 908579 - RNA, 19 nt, Homo sapiens
  misc_RNA (1)...(19): siRNA sense strand
caacaugagaaccuggaaa

SEQ ID NO: 908580 - RNA, 19 nt, Homo sapiens
  misc_RNA (1)...(19): siRNA sense strand
caagaggaguggaguacac

SEQ ID NO: 908581 - RNA, 19 nt, Homo sapiens
  misc_RNA (1)...(19): siRNA sense strand
gaaccuggaaagcugaugu

SEQ ID NO: 908582 - RNA, 19 nt, Homo sapiens
  misc_RNA (1)...(19): siRNA sense strand
ccugaugacuacauuccaa

SEQ ID NO: 908583 - RNA, 19 nt, Homo sapiens
  misc_RNA (1)...(19): siRNA sense strand
cuacuucccguacauucua

SEQ ID NO: 908584 - RNA, 19 nt, Homo sapiens
  misc_RNA (1)...(19): siRNA sense strand
ccagggaccacuugucuuc

SEQ ID NO: 908585 - RNA, 19 nt, Homo sapiens
  misc_RNA (1)...(19): siRNA sense strand
cuacccaccagaugugaua

SEQ ID NO: 908586 - RNA, 19 nt, Homo sapiens
  misc_RNA (1)...(19): siRNA sense strand
ggccaaaacugagcaagaa

SEQ ID NO: 908587 - RNA, 19 nt, Homo sapiens
  misc_RNA (1)...(19): siRNA sense strand
aaacugagcaagaaaugca

SEQ ID NO: 908588 - RNA, 19 nt, Homo sapiens
  misc_RNA (1)...(19): siRNA sense strand
agaaagcuacaucgaaaug

SEQ ID NO: 908589 - RNA, 19 nt, Homo sapiens
  misc_RNA (1)...(19): siRNA sense strand
cggcuuaguuugaauuugc

SEQ ID NO: 908590 - RNA, 19 nt, Homo sapiens
  misc_RNA (1)...(19): siRNA sense strand
ccaccauucagguagauaa

SEQ ID NO: 908591 - RNA, 19 nt, Homo sapiens
  misc_RNA (1)...(19): siRNA sense strand
caacugcgagacuggaaga

SEQ ID NO: 908592 - RNA, 19 nt, Homo sapiens
  misc_RNA (1)...(19): siRNA sense strand
guagcaagaagccagaaug

SEQ ID NO: 908593 - RNA, 19 nt, Homo sapiens
  misc_RNA (1)...(19): siRNA sense strand
aagaguagacuauguccaa

SEQ ID NO: 908594 - RNA, 19 nt, Homo sapiens
  misc_RNA (1)...(19): siRNA sense strand
aacaaagaguagacuaugu

SEQ ID NO: 908595 - RNA, 19 nt, Homo sapiens
  misc_RNA (1)...(19): siRNA sense strand
gaugugauagcuggucaaa

SEQ ID NO: 908596 - RNA, 19 nt, Homo sapiens
  misc_RNA (1)...(19): siRNA sense strand
gggaccacuugucuucuuc

SEQ ID NO: 908597 - RNA, 19 nt, Homo sapiens
  misc_RNA (1)...(19): siRNA sense strand
ggaguggacggaugaaagg

SEQ ID NO: 908598 - RNA, 19 nt, Homo sapiens
  misc_RNA (1)...(19): siRNA sense strand
gagcaguggugcccuuacg

SEQ ID NO: 908599 - RNA, 19 nt, Homo sapiens
  misc_RNA (1)...(19): siRNA sense strand
ggaaaccagaagugaguca

SEQ ID NO: 908600 - RNA, 19 nt, Homo sapiens
  misc_RNA (1)...(19): siRNA sense strand
ugcaccggcuggcucguua

SEQ ID NO: 908601 - RNA, 19 nt, Homo sapiens
  misc_RNA (1)...(19): siRNA sense strand
cugcagcccugaugacuac

SEQ ID NO: 908602 - RNA, 19 nt, Homo sapiens
  misc_RNA (1)...(19): siRNA sense strand
cauuggaacaggcuucauu

SEQ ID NO: 908603 - RNA, 19 nt, Homo sapiens
  misc_RNA (1)...(19): siRNA sense strand
ucucuuccuuccagauuau

SEQ ID NO: 908604 - RNA, 19 nt, Homo sapiens
  misc_RNA (1)...(19): siRNA sense strand
cagcccugaugacuacauu

SEQ ID NO: 908605 - RNA, 19 nt, Homo sapiens
  misc_RNA (1)...(19): siRNA sense strand
cagagaagacgaagaaagc

SEQ ID NO: 908606 - RNA, 19 nt, Homo sapiens
  misc_RNA (1)...(19): siRNA sense strand
ggaggauggugcagauucc

SEQ ID NO: 908607 - RNA, 19 nt, Homo sapiens
  misc_RNA (1)...(19): siRNA sense strand
aguagacuauguccaagug

SEQ ID NO: 908608 - RNA, 19 nt, Homo sapiens
  misc_RNA (1)...(19): siRNA sense strand
aaagaaauucagccuagau

SEQ ID NO: 908609 - RNA, 19 nt, Homo sapiens
  misc_RNA (1)...(19): siRNA sense strand
ccagagaagacgaagaaag

SEQ ID NO: 908610 - RNA, 19 nt, Homo sapiens
  misc_RNA (1)...(19): siRNA sense strand
acacagugguagcaagaag

SEQ ID NO: 908611 - RNA, 19 nt, Homo sapiens
  misc_RNA (1)...(19): siRNA sense strand
gccaagccaucugucugaa

SEQ ID NO: 908612 - RNA, 19 nt, Homo sapiens
  misc_RNA (1)...(19): siRNA sense strand
acuggaagacugcaccaua

SEQ ID NO: 908613 - RNA, 19 nt, Homo sapiens
  misc_RNA (1)...(19): siRNA sense strand
ccgaugucuuggaguacua

SEQ ID NO: 908614 - RNA, 19 nt, Homo sapiens
  misc_RNA (1)...(19): siRNA sense strand
aaggcaauccaaaguauga

SEQ ID NO: 908615 - RNA, 19 nt, Homo sapiens
  misc_RNA (1)...(19): siRNA sense strand
agaacaaagaguagacuau

SEQ ID NO: 908616 - RNA, 19 nt, Homo sapiens
  misc_RNA (1)...(19): siRNA sense strand
gcccuggacuucaauucag

SEQ ID NO: 908617 - RNA, 19 nt, Homo sapiens
  misc_RNA (1)...(19): siRNA sense strand
aagaaauucagccuagauu

SEQ ID NO: 908618 - RNA, 19 nt, Homo sapiens
  misc_RNA (1)...(19): siRNA sense strand
uuccuuaaguuccaccauu

SEQ ID NO: 908619 - RNA, 19 nt, Homo sapiens
  misc_RNA (1)...(19): siRNA sense strand
gaaagcuacaucgaaaugg

SEQ ID NO: 908620 - RNA, 19 nt, Homo sapiens
  misc_RNA (1)...(19): siRNA sense strand
cgggaacaugcaucucuua

SEQ ID NO: 908621 - RNA, 19 nt, Homo sapiens
  misc_RNA (1)...(19): siRNA sense strand
ccacagcuucagccaguau

SEQ ID NO: 908622 - RNA, 19 nt, Homo sapiens
  misc_RNA (1)...(19): siRNA sense strand
guuccaccauucagguaga

SEQ ID NO: 908623 - RNA, 19 nt, Homo sapiens
  misc_RNA (1)...(19): siRNA sense strand
cuggaagacugcaccauac

SEQ ID NO: 908624 - RNA, 19 nt, Homo sapiens
  misc_RNA (1)...(19): siRNA sense strand
uggaugagcagaagacaca

SEQ ID NO: 908625 - RNA, 19 nt, Homo sapiens
  misc_RNA (1)...(19): siRNA sense strand
acaaagaguagacuauguc

SEQ ID NO: 908626 - RNA, 19 nt, Homo sapiens
  misc_RNA (1)...(19): siRNA sense strand
uaucgaagacagcuaugug

SEQ ID NO: 908627 - RNA, 19 nt, Homo sapiens
  misc_RNA (1)...(19): siRNA sense strand
acacacagugguagcaaga

SEQ ID NO: 908628 - RNA, 19 nt, Homo sapiens
  misc_RNA (1)...(19): siRNA sense strand
ggaguagagaaaucaaugg

SEQ ID NO: 908629 - RNA, 19 nt, Homo sapiens
  misc_RNA (1)...(19): siRNA sense strand
gaagaacaaagaguagacu

SEQ ID NO: 908630 - RNA, 19 nt, Homo sapiens
  misc_RNA (1)...(19): siRNA sense strand
gagcuacgauuccaucaag

SEQ ID NO: 908631 - RNA, 19 nt, Homo sapiens
  misc_RNA (1)...(19): siRNA sense strand
ccacggaccucagcaugaa

SEQ ID NO: 908632 - RNA, 19 nt, Homo sapiens
  misc_RNA (1)...(19): siRNA sense strand
aaacaggaaaccacaguaa

SEQ ID NO: 908633 - RNA, 19 nt, Homo sapiens
  misc_RNA (1)...(19): siRNA sense strand
gcaagcgcauccgcacgua

SEQ ID NO: 908634 - RNA, 19 nt, Homo sapiens
  misc_RNA (1)...(19): siRNA sense strand
gaugacuccuccucugaga

SEQ ID NO: 908635 - RNA, 19 nt, Homo sapiens
  misc_RNA (1)...(19): siRNA sense strand
cuuaaggccuucaacaugu

SEQ ID NO: 908636 - RNA, 19 nt, Homo sapiens
  misc_RNA (1)...(19): siRNA sense strand
ugacgacgaugaccacgau

SEQ ID NO: 908637 - RNA, 19 nt, Homo sapiens
  misc_RNA (1)...(19): siRNA sense strand
ugaggacaaugacaagaug

SEQ ID NO: 908638 - RNA, 19 nt, Homo sapiens
  misc_RNA (1)...(19): siRNA sense strand
ccauagcccuggacaagca

SEQ ID NO: 908639 - RNA, 19 nt, Homo sapiens
  misc_RNA (1)...(19): siRNA sense strand
caagaugaacgacucugaa

SEQ ID NO: 908640 - RNA, 19 nt, Homo sapiens
  misc_RNA (1)...(19): siRNA sense strand
cgcagaaccuccacaguca

SEQ ID NO: 908641 - RNA, 19 nt, Homo sapiens
  misc_RNA (1)...(19): siRNA sense strand
gaagaacggcauggagaug

SEQ ID NO: 908642 - RNA, 19 nt, Homo sapiens
  misc_RNA (1)...(19): siRNA sense strand
gcggaugcgucuagagauc

SEQ ID NO: 908643 - RNA, 19 nt, Homo sapiens
  misc_RNA (1)...(19): siRNA sense strand
caaacaggaaaccacagua

SEQ ID NO: 908644 - RNA, 19 nt, Homo sapiens
  misc_RNA (1)...(19): siRNA sense strand
cagaugaugacgacgauga

SEQ ID NO: 908645 - RNA, 19 nt, Homo sapiens
  misc_RNA (1)...(19): siRNA sense strand
acaggaaaccacaguaaug

SEQ ID NO: 908646 - RNA, 19 nt, Homo sapiens
  misc_RNA (1)...(19): siRNA sense strand
uuaaggccuucaacauguu

SEQ ID NO: 908647 - RNA, 19 nt, Homo sapiens
  misc_RNA (1)...(19): siRNA sense strand
gaggagauccaggccauca

SEQ ID NO: 908648 - RNA, 19 nt, Homo sapiens
  misc_RNA (1)...(19): siRNA sense strand
ggagauccaggccaucauc

SEQ ID NO: 908649 - RNA, 19 nt, Homo sapiens
  misc_RNA (1)...(19): siRNA sense strand
ugugagagcgagacaagaa

SEQ ID NO: 908650 - RNA, 19 nt, Homo sapiens
  misc_RNA (1)...(19): siRNA sense strand
gagaguggcagcggcaaug

SEQ ID NO: 908651 - RNA, 19 nt, Homo sapiens
  misc_RNA (1)...(19): siRNA sense strand
ccaucaaccugugugacaa

SEQ ID NO: 908652 - RNA, 19 nt, Homo sapiens
  misc_RNA (1)...(19): siRNA sense strand
gcccauagcccuggacaag

SEQ ID NO: 908653 - RNA, 19 nt, Homo sapiens
  misc_RNA (1)...(19): siRNA sense strand
ccaagcggaugcgucuaga

SEQ ID NO: 908654 - RNA, 19 nt, Homo sapiens
  misc_RNA (1)...(19): siRNA sense strand
gccgucgcaugaagaagaa

SEQ ID NO: 908655 - RNA, 19 nt, Homo sapiens
  misc_RNA (1)...(19): siRNA sense strand
ggagcuacgauuccaucaa

SEQ ID NO: 908656 - RNA, 19 nt, Homo sapiens
  misc_RNA (1)...(19): siRNA sense strand
ugaccacgaugaccaugag

SEQ ID NO: 908657 - RNA, 19 nt, Homo sapiens
  misc_RNA (1)...(19): siRNA sense strand
ggcagaugaugacgacgau

SEQ ID NO: 908658 - RNA, 19 nt, Homo sapiens
  misc_RNA (1)...(19): siRNA sense strand
gcagaaccuccacagucaa

SEQ ID NO: 908659 - RNA, 19 nt, Homo sapiens
  misc_RNA (1)...(19): siRNA sense strand
gaaccuccacagucaagag

SEQ ID NO: 908660 - RNA, 19 nt, Homo sapiens
  misc_RNA (1)...(19): siRNA sense strand
gaggacaaugacaagauga

SEQ ID NO: 908661 - RNA, 19 nt, Homo sapiens
  misc_RNA (1)...(19): siRNA sense strand
gccggcaguucccugaguu

SEQ ID NO: 908662 - RNA, 19 nt, Homo sapiens
  misc_RNA (1)...(19): siRNA sense strand
acaaugacaagaugaacga

SEQ ID NO: 908663 - RNA, 19 nt, Homo sapiens
  misc_RNA (1)...(19): siRNA sense strand
ccaaacaggaaaccacagu

SEQ ID NO: 908664 - RNA, 19 nt, Homo sapiens
  misc_RNA (1)...(19): siRNA sense strand
ucuuaaggccuucaacaug

SEQ ID NO: 908665 - RNA, 19 nt, Homo sapiens
  misc_RNA (1)...(19): siRNA sense strand
acaagaugaacgacucuga

SEQ ID NO: 908666 - RNA, 19 nt, Homo sapiens
  misc_RNA (1)...(19): siRNA sense strand
aagcggaugcgucuagaga

SEQ ID NO: 908667 - RNA, 19 nt, Homo sapiens
  misc_RNA (1)...(19): siRNA sense strand
caggaaaccacaguaaugg

SEQ ID NO: 908668 - RNA, 19 nt, Homo sapiens
  misc_RNA (1)...(19): siRNA sense strand
gugagagcgagacaagaaa

SEQ ID NO: 908669 - RNA, 19 nt, Homo sapiens
  misc_RNA (1)...(19): siRNA sense strand
cgaugaccaugaggacaau

SEQ ID NO: 908670 - RNA, 19 nt, Homo sapiens
  misc_RNA (1)...(19): siRNA sense strand
gccaagcggaugcgucuag

SEQ ID NO: 908671 - RNA, 19 nt, Homo sapiens
  misc_RNA (1)...(19): siRNA sense strand
ugaagaagaacggcaugga

SEQ ID NO: 908672 - RNA, 19 nt, Homo sapiens
  misc_RNA (1)...(19): siRNA sense strand
uaaggccuucaacauguuu

SEQ ID NO: 908673 - RNA, 19 nt, Homo sapiens
  misc_RNA (1)...(19): siRNA sense strand
gcaaguggcucaagaagca

SEQ ID NO: 908674 - RNA, 19 nt, Homo sapiens
  misc_RNA (1)...(19): siRNA sense strand
gcuguacucugaccacuau

SEQ ID NO: 908675 - RNA, 19 nt, Homo sapiens
  misc_RNA (1)...(19): siRNA sense strand
ucaccgagcugagguccaa

SEQ ID NO: 908676 - RNA, 19 nt, Homo sapiens
  misc_RNA (1)...(19): siRNA sense strand
gcacugcugcggcugaaug

SEQ ID NO: 908677 - RNA, 19 nt, Homo sapiens
  misc_RNA (1)...(19): siRNA sense strand
acaacuaccucgucuacgu

SEQ ID NO: 908678 - RNA, 19 nt, Homo sapiens
  misc_RNA (1)...(19): siRNA sense strand
ccacaacuaccucgucuac

SEQ ID NO: 908679 - RNA, 19 nt, Homo sapiens
  misc_RNA (1)...(19): siRNA sense strand
gccagcagcaggccaauca

SEQ ID NO: 908680 - RNA, 19 nt, Homo sapiens
  misc_RNA (1)...(19): siRNA sense strand
gagcauccccugccacuug

SEQ ID NO: 908681 - RNA, 19 nt, Homo sapiens
  misc_RNA (1)...(19): siRNA sense strand
ugaccacuauggccuguac

SEQ ID NO: 908682 - RNA, 19 nt, Homo sapiens
  misc_RNA (1)...(19): siRNA sense strand
ccacugcccacuucagcuu

SEQ ID NO: 908683 - RNA, 19 nt, Homo sapiens
  misc_RNA (1)...(19): siRNA sense strand
gcaacgagaucgacacuau

SEQ ID NO: 908684 - RNA, 19 nt, Homo sapiens
  misc_RNA (1)...(19): siRNA sense strand
ggaagcaccucaagaacgu

SEQ ID NO: 908685 - RNA, 19 nt, Homo sapiens
  misc_RNA (1)...(19): siRNA sense strand
gaucgacacuauguucaug

SEQ ID NO: 908686 - RNA, 19 nt, Homo sapiens
  misc_RNA (1)...(19): siRNA sense strand
ccaagcugguggccuguga

SEQ ID NO: 908687 - RNA, 19 nt, Homo sapiens
  misc_RNA (1)...(19): siRNA sense strand
cgagaucgacacuauguuc

SEQ ID NO: 908688 - RNA, 19 nt, Homo sapiens
  misc_RNA (1)...(19): siRNA sense strand
cagcuacaccuacccauuc

SEQ ID NO: 908689 - RNA, 19 nt, Homo sapiens
  misc_RNA (1)...(19): siRNA sense strand
gucuacggcuggucuguug

SEQ ID NO: 908690 - RNA, 19 nt, Homo sapiens
  misc_RNA (1)...(19): siRNA sense strand
ucuggagccugaggaguuu

SEQ ID NO: 908691 - RNA, 19 nt, Homo sapiens
  misc_RNA (1)...(19): siRNA sense strand
caacgagaucgacacuaug

SEQ ID NO: 908692 - RNA, 19 nt, Homo sapiens
  misc_RNA (1)...(19): siRNA sense strand
gcucggaagcaccucaaga

SEQ ID NO: 908693 - RNA, 19 nt, Homo sapiens
  misc_RNA (1)...(19): siRNA sense strand
gagaucgacacuauguuca

SEQ ID NO: 908694 - RNA, 19 nt, Homo sapiens
  misc_RNA (1)...(19): siRNA sense strand
cgagaugggcugucugucu

SEQ ID NO: 908695 - RNA, 19 nt, Homo sapiens
  misc_RNA (1)...(19): siRNA sense strand
gcgagcacuucaaccucaa

SEQ ID NO: 908696 - RNA, 19 nt, Homo sapiens
  misc_RNA (1)...(19): siRNA sense strand
ccagcuacaccuacccauu

SEQ ID NO: 908697 - RNA, 19 nt, Homo sapiens
  misc_RNA (1)...(19): siRNA sense strand
ggacgugguggucgaguac

SEQ ID NO: 908698 - RNA, 19 nt, Homo sapiens
  misc_RNA (1)...(19): siRNA sense strand
uggacgugguggucgagua

SEQ ID NO: 908699 - RNA, 19 nt, Homo sapiens
  misc_RNA (1)...(19): siRNA sense strand
gggagaagcugaugcauuu

SEQ ID NO: 908700 - RNA, 19 nt, Homo sapiens
  misc_RNA (1)...(19): siRNA sense strand
agaaauggcuugagaagaa

SEQ ID NO: 908701 - RNA, 19 nt, Homo sapiens
  misc_RNA (1)...(19): siRNA sense strand
gaaagaacagccuaaagaa

SEQ ID NO: 908702 - RNA, 19 nt, Homo sapiens
  misc_RNA (1)...(19): siRNA sense strand
cuaaagaaauggcuugaga

SEQ ID NO: 908703 - RNA, 19 nt, Homo sapiens
  misc_RNA (1)...(19): siRNA sense strand
cagcagcucuaaugagauu

SEQ ID NO: 908704 - RNA, 19 nt, Homo sapiens
  misc_RNA (1)...(19): siRNA sense strand
gugagaagaaugaguauaa

SEQ ID NO: 908705 - RNA, 19 nt, Homo sapiens
  misc_RNA (1)...(19): siRNA sense strand
gaagaaugaguauaaagga

SEQ ID NO: 908706 - RNA, 19 nt, Homo sapiens
  misc_RNA (1)...(19): siRNA sense strand
ucuuacagcuucccaauga

SEQ ID NO: 908707 - RNA, 19 nt, Homo sapiens
  misc_RNA (1)...(19): siRNA sense strand
agaaagaacagccuaaaga

SEQ ID NO: 908708 - RNA, 19 nt, Homo sapiens
  misc_RNA (1)...(19): siRNA sense strand
ccagugagaagaaugagua

SEQ ID NO: 908709 - RNA, 19 nt, Homo sapiens
  misc_RNA (1)...(19): siRNA sense strand
gacccagucucugccaaua

SEQ ID NO: 908710 - RNA, 19 nt, Homo sapiens
  misc_RNA (1)...(19): siRNA sense strand
gugaauggaugaagaaagg

SEQ ID NO: 908711 - RNA, 19 nt, Homo sapiens
  misc_RNA (1)...(19): siRNA sense strand
gauggcagcaugucuguga

SEQ ID NO: 908712 - RNA, 19 nt, Homo sapiens
  misc_RNA (1)...(19): siRNA sense strand
aaagaacagccuaaagaaa

SEQ ID NO: 908713 - RNA, 19 nt, Homo sapiens
  misc_RNA (1)...(19): siRNA sense strand
gaguauaaaggauggguuu

SEQ ID NO: 908714 - RNA, 19 nt, Homo sapiens
  misc_RNA (1)...(19): siRNA sense strand
gacuauagacccaccauau

SEQ ID NO: 908715 - RNA, 19 nt, Homo sapiens
  misc_RNA (1)...(19): siRNA sense strand
aagaacagccuaaagaaau

SEQ ID NO: 908716 - RNA, 19 nt, Homo sapiens
  misc_RNA (1)...(19): siRNA sense strand
agaacagccuaaagaaaug

SEQ ID NO: 908717 - RNA, 19 nt, Homo sapiens
  misc_RNA (1)...(19): siRNA sense strand
gacaugcugugcagacugu

SEQ ID NO: 908718 - RNA, 19 nt, Homo sapiens
  misc_RNA (1)...(19): siRNA sense strand
gcagacuguugaaacuaug

SEQ ID NO: 908719 - RNA, 19 nt, Homo sapiens
  misc_RNA (1)...(19): siRNA sense strand
cccagucucugccaauauu

SEQ ID NO: 908720 - RNA, 19 nt, Homo sapiens
  misc_RNA (1)...(19): siRNA sense strand
gagagaaagaacagccuaa

SEQ ID NO: 908721 - RNA, 19 nt, Homo sapiens
  misc_RNA (1)...(19): siRNA sense strand
ccaauauuguccuugugaa

SEQ ID NO: 908722 - RNA, 19 nt, Homo sapiens
  misc_RNA (1)...(19): siRNA sense strand
gaaauggcuugagaagaac

SEQ ID NO: 908723 - RNA, 19 nt, Homo sapiens
  misc_RNA (1)...(19): siRNA sense strand
ugcagcagcucuaaugaga

SEQ ID NO: 908724 - RNA, 19 nt, Homo sapiens
  misc_RNA (1)...(19): siRNA sense strand
uaaagaaauggcuugagaa

SEQ ID NO: 908725 - RNA, 19 nt, Homo sapiens
  misc_RNA (1)...(19): siRNA sense strand
gcaugucugugaccggaau

SEQ ID NO: 908726 - RNA, 19 nt, Homo sapiens
  misc_RNA (1)...(19): siRNA sense strand
gagaagcugaugcauuugu

SEQ ID NO: 908727 - RNA, 19 nt, Homo sapiens
  misc_RNA (1)...(19): siRNA sense strand
gagaaagaacagccuaaag

SEQ ID NO: 908728 - RNA, 19 nt, Homo sapiens
  misc_RNA (1)...(19): siRNA sense strand
gaaggacaucuuacagcuu

SEQ ID NO: 908729 - RNA, 19 nt, Homo sapiens
  misc_RNA (1)...(19): siRNA sense strand
gagaagaaugaguauaaag

SEQ ID NO: 908730 - RNA, 19 nt, Homo sapiens
  misc_RNA (1)...(19): siRNA sense strand
ugacagccagugagaagaa

SEQ ID NO: 908731 - RNA, 19 nt, Homo sapiens
  misc_RNA (1)...(19): siRNA sense strand
gaaaauugcagcagcucua

SEQ ID NO: 908732 - RNA, 19 nt, Homo sapiens
  misc_RNA (1)...(19): siRNA sense strand
gccaauauuguccuuguga

SEQ ID NO: 908733 - RNA, 19 nt, Homo sapiens
  misc_RNA (1)...(19): siRNA sense strand
agaagcugaugcauuuguu

SEQ ID NO: 908734 - RNA, 19 nt, Homo sapiens
  misc_RNA (1)...(19): siRNA sense strand
gaucuggaagagagaaaga

SEQ ID NO: 908735 - RNA, 19 nt, Homo sapiens
  misc_RNA (1)...(19): siRNA sense strand
caaagagguccgagugaca

SEQ ID NO: 908736 - RNA, 19 nt, Homo sapiens
  misc_RNA (1)...(19): siRNA sense strand
ggcaagauuacauuuacaa

SEQ ID NO: 908737 - RNA, 19 nt, Homo sapiens
  misc_RNA (1)...(19): siRNA sense strand
cuuauugaaggacaucuua

SEQ ID NO: 908738 - RNA, 19 nt, Homo sapiens
  misc_RNA (1)...(19): siRNA sense strand
ccuuagaauggcaagauua

SEQ ID NO: 908739 - RNA, 19 nt, Homo sapiens
  misc_RNA (1)...(19): siRNA sense strand
ugcagacuguugaaacuau

SEQ ID NO: 908740 - RNA, 19 nt, Homo sapiens
  misc_RNA (1)...(19): siRNA sense strand
aaagaaauggcuugagaag

SEQ ID NO: 908741 - RNA, 19 nt, Homo sapiens
  misc_RNA (1)...(19): siRNA sense strand
gaaggggaccauagaguga

SEQ ID NO: 908742 - RNA, 19 nt, Homo sapiens
  misc_RNA (1)...(19): siRNA sense strand
gaagcugaugcauuuguuc

SEQ ID NO: 908743 - RNA, 19 nt, Homo sapiens
  misc_RNA (1)...(19): siRNA sense strand
uagaauggcaagauuacau

SEQ ID NO: 908744 - RNA, 19 nt, Homo sapiens
  misc_RNA (1)...(19): siRNA sense strand
cgagugacagccagugaga

SEQ ID NO: 908745 - RNA, 19 nt, Homo sapiens
  misc_RNA (1)...(19): siRNA sense strand
gaacagccuaaagaaaugg

SEQ ID NO: 908746 - RNA, 19 nt, Homo sapiens
  misc_RNA (1)...(19): siRNA sense strand
agagaaagaacagccuaaa

SEQ ID NO: 908747 - RNA, 19 nt, Homo sapiens
  misc_RNA (1)...(19): siRNA sense strand
agaagaaugaguauaaagg

SEQ ID NO: 908748 - RNA, 19 nt, Homo sapiens
  misc_RNA (1)...(19): siRNA sense strand
gugcagacuguugaaacua

SEQ ID NO: 908749 - RNA, 19 nt, Homo sapiens
  misc_RNA (1)...(19): siRNA sense strand
ugacuauagacccaccaua

SEQ ID NO: 908750 - RNA, 19 nt, Homo sapiens
  misc_RNA (1)...(19): siRNA sense strand
gaaugaaggggaccauaga

SEQ ID NO: 908751 - RNA, 19 nt, Homo sapiens
  misc_RNA (1)...(19): siRNA sense strand
gacagccagugagaagaau

SEQ ID NO: 908752 - RNA, 19 nt, Homo sapiens
  misc_RNA (1)...(19): siRNA sense strand
cuguugaaacuaugaauga

SEQ ID NO: 908753 - RNA, 19 nt, Homo sapiens
  misc_RNA (1)...(19): siRNA sense strand
cagccagugagaagaauga

SEQ ID NO: 908754 - RNA, 19 nt, Homo sapiens
  misc_RNA (1)...(19): siRNA sense strand
caucuuacagcuucccaau

SEQ ID NO: 908755 - RNA, 19 nt, Homo sapiens
  misc_RNA (1)...(19): siRNA sense strand
auauuguccuugugaacuu

SEQ ID NO: 908756 - RNA, 19 nt, Homo sapiens
  misc_RNA (1)...(19): siRNA sense strand
uggcaagauuacauuuaca

SEQ ID NO: 908757 - RNA, 19 nt, Homo sapiens
  misc_RNA (1)...(19): siRNA sense strand
cugccaauauuguccuugu

SEQ ID NO: 908758 - RNA, 19 nt, Homo sapiens
  misc_RNA (1)...(19): siRNA sense strand
uaacaaagcuacaggauaa

SEQ ID NO: 908759 - RNA, 19 nt, Homo sapiens
  misc_RNA (1)...(19): siRNA sense strand
gaagauggcucaaagaaug

SEQ ID NO: 908760 - RNA, 19 nt, Homo sapiens
  misc_RNA (1)...(19): siRNA sense strand
ggauauaaaugccauguug

SEQ ID NO: 908761 - RNA, 19 nt, Homo sapiens
  misc_RNA (1)...(19): siRNA sense strand
ggaagaagauggcucaaag

SEQ ID NO: 908762 - RNA, 19 nt, Homo sapiens
  misc_RNA (1)...(19): siRNA sense strand
gaagagaggcgagaaauug

SEQ ID NO: 908763 - RNA, 19 nt, Homo sapiens
  misc_RNA (1)...(19): siRNA sense strand
gcgagaaauugcugaagua

SEQ ID NO: 908764 - RNA, 19 nt, Homo sapiens
  misc_RNA (1)...(19): siRNA sense strand
caacagcugaaacaaauua

SEQ ID NO: 908765 - RNA, 19 nt, Homo sapiens
  misc_RNA (1)...(19): siRNA sense strand
cgaaaucucaucugggaua

SEQ ID NO: 908766 - RNA, 19 nt, Homo sapiens
  misc_RNA (1)...(19): siRNA sense strand
gauaaucuucgccaacuuu

SEQ ID NO: 908767 - RNA, 19 nt, Homo sapiens
  misc_RNA (1)...(19): siRNA sense strand
ucgagcaacuuauuccaua

SEQ ID NO: 908768 - RNA, 19 nt, Homo sapiens
  misc_RNA (1)...(19): siRNA sense strand
aaucucaucugggauauaa

SEQ ID NO: 908769 - RNA, 19 nt, Homo sapiens
  misc_RNA (1)...(19): siRNA sense strand
gaagaagauggcucaaaga

SEQ ID NO: 908770 - RNA, 19 nt, Homo sapiens
  misc_RNA (1)...(19): siRNA sense strand
gaaaucucaucugggauau

SEQ ID NO: 908771 - RNA, 19 nt, Homo sapiens
  misc_RNA (1)...(19): siRNA sense strand
gagauugguauaugacaaa

SEQ ID NO: 908772 - RNA, 19 nt, Homo sapiens
  misc_RNA (1)...(19): siRNA sense strand
uuaccacacuggaacauau

SEQ ID NO: 908773 - RNA, 19 nt, Homo sapiens
  misc_RNA (1)...(19): siRNA sense strand
gagaaauugcugaaguaaa

SEQ ID NO: 908774 - RNA, 19 nt, Homo sapiens
  misc_RNA (1)...(19): siRNA sense strand
caagaccgguuaacaaagc

SEQ ID NO: 908775 - RNA, 19 nt, Homo sapiens
  misc_RNA (1)...(19): siRNA sense strand
gaucaauuacgaaaucuca

SEQ ID NO: 908776 - RNA, 19 nt, Homo sapiens
  misc_RNA (1)...(19): siRNA sense strand
uaucaagaccgguuaacaa

SEQ ID NO: 908777 - RNA, 19 nt, Homo sapiens
  misc_RNA (1)...(19): siRNA sense strand
aagcugagauugguauaug

SEQ ID NO: 908778 - RNA, 19 nt, Homo sapiens
  misc_RNA (1)...(19): siRNA sense strand
ggcgagaaauugcugaagu

SEQ ID NO: 908779 - RNA, 19 nt, Homo sapiens
  misc_RNA (1)...(19): siRNA sense strand
gaacaugcagcugccaaau

SEQ ID NO: 908780 - RNA, 19 nt, Homo sapiens
  misc_RNA (1)...(19): siRNA sense strand
ggauaaucuucgccaacuu

SEQ ID NO: 908781 - RNA, 19 nt, Homo sapiens
  misc_RNA (1)...(19): siRNA sense strand
caaaugcaaugaaaacugu

SEQ ID NO: 908782 - RNA, 19 nt, Homo sapiens
  misc_RNA (1)...(19): siRNA sense strand
uuaacaaagcuacaggaua

SEQ ID NO: 908783 - RNA, 19 nt, Homo sapiens
  misc_RNA (1)...(19): siRNA sense strand
acaugcagcugccaaaugg

SEQ ID NO: 908784 - RNA, 19 nt, Homo sapiens
  misc_RNA (1)...(19): siRNA sense strand
ucaaacagaagaaucaaca

SEQ ID NO: 908785 - RNA, 19 nt, Homo sapiens
  misc_RNA (1)...(19): siRNA sense strand
gcaacuuauuccauaugug

SEQ ID NO: 908786 - RNA, 19 nt, Homo sapiens
  misc_RNA (1)...(19): siRNA sense strand
ggaacaugcagcugccaaa

SEQ ID NO: 908787 - RNA, 19 nt, Homo sapiens
  misc_RNA (1)...(19): siRNA sense strand
ugagauugguauaugacaa

SEQ ID NO: 908788 - RNA, 19 nt, Homo sapiens
  misc_RNA (1)...(19): siRNA sense strand
ugccaaauggugucacuua

SEQ ID NO: 908789 - RNA, 19 nt, Homo sapiens
  misc_RNA (1)...(19): siRNA sense strand
cgagcaacuuauuccauau

SEQ ID NO: 908790 - RNA, 19 nt, Homo sapiens
  misc_RNA (1)...(19): siRNA sense strand
aaucaacagcugaaacaaa

SEQ ID NO: 908791 - RNA, 19 nt, Homo sapiens
  misc_RNA (1)...(19): siRNA sense strand
gaagaaucaacagcugaaa

SEQ ID NO: 908792 - RNA, 19 nt, Homo sapiens
  misc_RNA (1)...(19): siRNA sense strand
gagcaacuuauuccauaug

SEQ ID NO: 908793 - RNA, 19 nt, Homo sapiens
  misc_RNA (1)...(19): siRNA sense strand
aucaacagcugaaacaaau

SEQ ID NO: 908794 - RNA, 19 nt, Homo sapiens
  misc_RNA (1)...(19): siRNA sense strand
ugaagagaggcgagaaauu

SEQ ID NO: 908795 - RNA, 19 nt, Homo sapiens
  misc_RNA (1)...(19): siRNA sense strand
aagaagauggcucaaagaa

SEQ ID NO: 908796 - RNA, 19 nt, Homo sapiens
  misc_RNA (1)...(19): siRNA sense strand
cgagaaauugcugaaguaa

SEQ ID NO: 908797 - RNA, 19 nt, Homo sapiens
  misc_RNA (1)...(19): siRNA sense strand
uuucaguucucuucaggaa

SEQ ID NO: 908798 - RNA, 19 nt, Homo sapiens
  misc_RNA (1)...(19): siRNA sense strand
gaagcugagauugguauau

SEQ ID NO: 908799 - RNA, 19 nt, Homo sapiens
  misc_RNA (1)...(19): siRNA sense strand
ggaagcugagauugguaua

SEQ ID NO: 908800 - RNA, 19 nt, Homo sapiens
  misc_RNA (1)...(19): siRNA sense strand
guauaugacaaaugcaaug

SEQ ID NO: 908801 - RNA, 19 nt, Homo sapiens
  misc_RNA (1)...(19): siRNA sense strand
gccaaauggugucacuuac

SEQ ID NO: 908802 - RNA, 19 nt, Homo sapiens
  misc_RNA (1)...(19): siRNA sense strand
agaaucaacagcugaaaca

SEQ ID NO: 908803 - RNA, 19 nt, Homo sapiens
  misc_RNA (1)...(19): siRNA sense strand
cagcugaaacaaauuaugg

SEQ ID NO: 908804 - RNA, 19 nt, Homo sapiens
  misc_RNA (1)...(19): siRNA sense strand
agaagaaucaacagcugaa

SEQ ID NO: 908805 - RNA, 19 nt, Homo sapiens
  misc_RNA (1)...(19): siRNA sense strand
gaaucaacagcugaaacaa

SEQ ID NO: 908806 - RNA, 19 nt, Homo sapiens
  misc_RNA (1)...(19): siRNA sense strand
caaagcuacaggauaaucu

SEQ ID NO: 908807 - RNA, 19 nt, Homo sapiens
  misc_RNA (1)...(19): siRNA sense strand
aaacuguggugggauggau

SEQ ID NO: 908808 - RNA, 19 nt, Homo sapiens
  misc_RNA (1)...(19): siRNA sense strand
gcugaaacaaauuauggau

SEQ ID NO: 908809 - RNA, 19 nt, Homo sapiens
  misc_RNA (1)...(19): siRNA sense strand
aaacucaaacagaagaauc

SEQ ID NO: 908810 - RNA, 19 nt, Homo sapiens
  misc_RNA (1)...(19): siRNA sense strand
gugaagagaggcgagaaau

SEQ ID NO: 908811 - RNA, 19 nt, Homo sapiens
  misc_RNA (1)...(19): siRNA sense strand
agaagauggcucaaagaau

SEQ ID NO: 908812 - RNA, 19 nt, Homo sapiens
  misc_RNA (1)...(19): siRNA sense strand
ucucaucugggauauaaau

SEQ ID NO: 908813 - RNA, 19 nt, Homo sapiens
  misc_RNA (1)...(19): siRNA sense strand
ucaauuacgaaaucucauc

SEQ ID NO: 908814 - RNA, 19 nt, Homo sapiens
  misc_RNA (1)...(19): siRNA sense strand
auggaucaauuacgaaauc

SEQ ID NO: 908815 - RNA, 19 nt, Homo sapiens
  misc_RNA (1)...(19): siRNA sense strand
acacuggaacauaucaaga

SEQ ID NO: 908816 - RNA, 19 nt, Homo sapiens
  misc_RNA (1)...(19): siRNA sense strand
gguauaugacaaaugcaau

SEQ ID NO: 908817 - RNA, 19 nt, Homo sapiens
  misc_RNA (1)...(19): siRNA sense strand
agaaacaucugcaauugaa

SEQ ID NO: 908818 - RNA, 19 nt, Homo sapiens
  misc_RNA (1)...(19): siRNA sense strand
gcaauugaaugaaacaagu

SEQ ID NO: 908819 - RNA, 19 nt, Homo sapiens
  misc_RNA (1)...(19): siRNA sense strand
agagaaagguggaggagaa

SEQ ID NO: 908820 - RNA, 19 nt, Homo sapiens
  misc_RNA (1)...(19): siRNA sense strand
uaccugcucuccaguauuu

SEQ ID NO: 908821 - RNA, 19 nt, Homo sapiens
  misc_RNA (1)...(19): siRNA sense strand
caucugcaauugaaugaaa

SEQ ID NO: 908822 - RNA, 19 nt, Homo sapiens
  misc_RNA (1)...(19): siRNA sense strand
gcgccuaccucuacaaaca

SEQ ID NO: 908823 - RNA, 19 nt, Homo sapiens
  misc_RNA (1)...(19): siRNA sense strand
gguuugaucccauauaauu

SEQ ID NO: 908824 - RNA, 19 nt, Homo sapiens
  misc_RNA (1)...(19): siRNA sense strand
aaacaaguacugcuaauca

SEQ ID NO: 908825 - RNA, 19 nt, Homo sapiens
  misc_RNA (1)...(19): siRNA sense strand
gcaccaggccuacguguuc

SEQ ID NO: 908826 - RNA, 19 nt, Homo sapiens
  misc_RNA (1)...(19): siRNA sense strand
ucucaguucuuaucgguuu

SEQ ID NO: 908827 - RNA, 19 nt, Homo sapiens
  misc_RNA (1)...(19): siRNA sense strand
caaguacugcuaaucauau

SEQ ID NO: 908828 - RNA, 19 nt, Homo sapiens
  misc_RNA (1)...(19): siRNA sense strand
ucgguuugaucccauauaa

SEQ ID NO: 908829 - RNA, 19 nt, Homo sapiens
  misc_RNA (1)...(19): siRNA sense strand
ugaaacaaguacugcuaau

SEQ ID NO: 908830 - RNA, 19 nt, Homo sapiens
  misc_RNA (1)...(19): siRNA sense strand
gcuaaucauauacacagua

SEQ ID NO: 908831 - RNA, 19 nt, Homo sapiens
  misc_RNA (1)...(19): siRNA sense strand
gaucccauauaauuucauc

SEQ ID NO: 908832 - RNA, 19 nt, Homo sapiens
  misc_RNA (1)...(19): siRNA sense strand
acaaguacugcuaaucaua

SEQ ID NO: 908833 - RNA, 19 nt, Homo sapiens
  misc_RNA (1)...(19): siRNA sense strand
uguccuacuuuccugauaa

SEQ ID NO: 908834 - RNA, 19 nt, Homo sapiens
  misc_RNA (1)...(19): siRNA sense strand
gaaacaaguacugcuaauc

SEQ ID NO: 908835 - RNA, 19 nt, Homo sapiens
  misc_RNA (1)...(19): siRNA sense strand
gcuaccugcucuccaguau

SEQ ID NO: 908836 - RNA, 19 nt, Homo sapiens
  misc_RNA (1)...(19): siRNA sense strand
cuaaucauauacacaguag

SEQ ID NO: 908837 - RNA, 19 nt, Homo sapiens
  misc_RNA (1)...(19): siRNA sense strand
aaacaucugcaauugaaug

SEQ ID NO: 908838 - RNA, 19 nt, Homo sapiens
  misc_RNA (1)...(19): siRNA sense strand
gcaguucuucuucucaguu

SEQ ID NO: 908839 - RNA, 19 nt, Homo sapiens
  misc_RNA (1)...(19): siRNA sense strand
ggagcucucugagguccuu

SEQ ID NO: 908840 - RNA, 19 nt, Homo sapiens
  misc_RNA (1)...(19): siRNA sense strand
guccuacuuuccugauaaa

SEQ ID NO: 908841 - RNA, 19 nt, Homo sapiens
  misc_RNA (1)...(19): siRNA sense strand
gcuccagcuuccugaaugu

SEQ ID NO: 908842 - RNA, 19 nt, Homo sapiens
  misc_RNA (1)...(19): siRNA sense strand
gagaacagaaacagcuugu

SEQ ID NO: 908843 - RNA, 19 nt, Homo sapiens
  misc_RNA (1)...(19): siRNA sense strand
guacugcuaaucauauaca

SEQ ID NO: 908844 - RNA, 19 nt, Homo sapiens
  misc_RNA (1)...(19): siRNA sense strand
gcugcaccuucgccuugua

SEQ ID NO: 908845 - RNA, 19 nt, Homo sapiens
  misc_RNA (1)...(19): siRNA sense strand
ggcuccagcuuccugaaug

SEQ ID NO: 908846 - RNA, 19 nt, Homo sapiens
  misc_RNA (1)...(19): siRNA sense strand
gaaagguggaggagaacag

SEQ ID NO: 908847 - RNA, 19 nt, Homo sapiens
  misc_RNA (1)...(19): siRNA sense strand
aaugaaacaaguacugcua

SEQ ID NO: 908848 - RNA, 19 nt, Homo sapiens
  misc_RNA (1)...(19): siRNA sense strand
ugucaacccuaaccucucu

SEQ ID NO: 908849 - RNA, 19 nt, Homo sapiens
  misc_RNA (1)...(19): siRNA sense strand
caccuucgccuuguacuug

SEQ ID NO: 908850 - RNA, 19 nt, Homo sapiens
  misc_RNA (1)...(19): siRNA sense strand
gaaacaucugcaauugaau

SEQ ID NO: 908851 - RNA, 19 nt, Homo sapiens
  misc_RNA (1)...(19): siRNA sense strand
gcaccuucgccuuguacuu

SEQ ID NO: 908852 - RNA, 19 nt, Homo sapiens
  misc_RNA (1)...(19): siRNA sense strand
aacaguuggugguguccua

SEQ ID NO: 908853 - RNA, 19 nt, Homo sapiens
  misc_RNA (1)...(19): siRNA sense strand
uuuaagcuguuggccauug

SEQ ID NO: 908854 - RNA, 19 nt, Homo sapiens
  misc_RNA (1)...(19): siRNA sense strand
uuuagcuggugccuuguuu

SEQ ID NO: 908855 - RNA, 19 nt, Homo sapiens
  misc_RNA (1)...(19): siRNA sense strand
guguccuacuuuccugaua

SEQ ID NO: 908856 - RNA, 19 nt, Homo sapiens
  misc_RNA (1)...(19): siRNA sense strand
cccauauaauuucaucugu

SEQ ID NO: 908857 - RNA, 19 nt, Homo sapiens
  misc_RNA (1)...(19): siRNA sense strand
cuucugcugugcugugugu

SEQ ID NO: 908858 - RNA, 19 nt, Homo sapiens
  misc_RNA (1)...(19): siRNA sense strand
aacaaguacugcuaaucau

SEQ ID NO: 908859 - RNA, 19 nt, Homo sapiens
  misc_RNA (1)...(19): siRNA sense strand
acacugucuuuaagcuguu

SEQ ID NO: 908860 - RNA, 19 nt, Homo sapiens
  misc_RNA (1)...(19): siRNA sense strand
guuggugguguccuacuuu

SEQ ID NO: 908861 - RNA, 19 nt, Homo sapiens
  misc_RNA (1)...(19): siRNA sense strand
cugagguccuucgagagua

SEQ ID NO: 908862 - RNA, 19 nt, Homo sapiens
  misc_RNA (1)...(19): siRNA sense strand
caguucuucuucucaguuc

SEQ ID NO: 908863 - RNA, 19 nt, Homo sapiens
  misc_RNA (1)...(19): siRNA sense strand
gcacucagguugaaucaga

SEQ ID NO: 908864 - RNA, 19 nt, Homo sapiens
  misc_RNA (1)...(19): siRNA sense strand
gaaagauaauugcugaaga

SEQ ID NO: 908865 - RNA, 19 nt, Homo sapiens
  misc_RNA (1)...(19): siRNA sense strand
caccagagcuuccaguuug

SEQ ID NO: 908866 - RNA, 19 nt, Homo sapiens
  misc_RNA (1)...(19): siRNA sense strand
ugaaagcucuagaggaauu

SEQ ID NO: 908867 - RNA, 19 nt, Homo sapiens
  misc_RNA (1)...(19): siRNA sense strand
caggugcgcuuaccagaaa

SEQ ID NO: 908868 - RNA, 19 nt, Homo sapiens
  misc_RNA (1)...(19): siRNA sense strand
acugaaagcucuagaggaa

SEQ ID NO: 908869 - RNA, 19 nt, Homo sapiens
  misc_RNA (1)...(19): siRNA sense strand
gaaauggaagaacgugaaa

SEQ ID NO: 908870 - RNA, 19 nt, Homo sapiens
  misc_RNA (1)...(19): siRNA sense strand
uaaccaagaagaacagaaa

SEQ ID NO: 908871 - RNA, 19 nt, Homo sapiens
  misc_RNA (1)...(19): siRNA sense strand
agacguggaugaugaggaa

SEQ ID NO: 908872 - RNA, 19 nt, Homo sapiens
  misc_RNA (1)...(19): siRNA sense strand
gauaauugcugaagaaaag

SEQ ID NO: 908873 - RNA, 19 nt, Homo sapiens
  misc_RNA (1)...(19): siRNA sense strand
aggaagacguggaugauga

SEQ ID NO: 908874 - RNA, 19 nt, Homo sapiens
  misc_RNA (1)...(19): siRNA sense strand
caaggaauggguucagaaa

SEQ ID NO: 908875 - RNA, 19 nt, Homo sapiens
  misc_RNA (1)...(19): siRNA sense strand
gaaagccgccugacaccau

SEQ ID NO: 908876 - RNA, 19 nt, Homo sapiens
  misc_RNA (1)...(19): siRNA sense strand
caugggaggugugguuuau

SEQ ID NO: 908877 - RNA, 19 nt, Homo sapiens
  misc_RNA (1)...(19): siRNA sense strand
ugggaggugugguuuauug

SEQ ID NO: 908878 - RNA, 19 nt, Homo sapiens
  misc_RNA (1)...(19): siRNA sense strand
ugagaggaauggaguuaca

SEQ ID NO: 908879 - RNA, 19 nt, Homo sapiens
  misc_RNA (1)...(19): siRNA sense strand
caaaguggcgagccugaga

SEQ ID NO: 908880 - RNA, 19 nt, Homo sapiens
  misc_RNA (1)...(19): siRNA sense strand
gaaagcucuagaggaauua

SEQ ID NO: 908881 - RNA, 19 nt, Homo sapiens
  misc_RNA (1)...(19): siRNA sense strand
ccaccagagcuuccaguuu

SEQ ID NO: 908882 - RNA, 19 nt, Homo sapiens
  misc_RNA (1)...(19): siRNA sense strand
cuagaggaauuaaaucaac

SEQ ID NO: 908883 - RNA, 19 nt, Homo sapiens
  misc_RNA (1)...(19): siRNA sense strand
agaaauggaagaacgugaa

SEQ ID NO: 908884 - RNA, 19 nt, Homo sapiens
  misc_RNA (1)...(19): siRNA sense strand
cacaaggaauggguucaga

SEQ ID NO: 908885 - RNA, 19 nt, Homo sapiens
  misc_RNA (1)...(19): siRNA sense strand
acagaaacaggugcgcuua

SEQ ID NO: 908886 - RNA, 19 nt, Homo sapiens
  misc_RNA (1)...(19): siRNA sense strand
gugaccggcugcaacugaa

SEQ ID NO: 908887 - RNA, 19 nt, Homo sapiens
  misc_RNA (1)...(19): siRNA sense strand
ggugugguuuauuggcaaa

SEQ ID NO: 908888 - RNA, 19 nt, Homo sapiens
  misc_RNA (1)...(19): siRNA sense strand
ccugagaggaauggaguua

SEQ ID NO: 908889 - RNA, 19 nt, Homo sapiens
  misc_RNA (1)...(19): siRNA sense strand
gaggaagacguggaugaug

SEQ ID NO: 908890 - RNA, 19 nt, Homo sapiens
  misc_RNA (1)...(19): siRNA sense strand
ggauacacacauugacauc

SEQ ID NO: 908891 - RNA, 19 nt, Homo sapiens
  misc_RNA (1)...(19): siRNA sense strand
guggcgagccugagaggaa

SEQ ID NO: 908892 - RNA, 19 nt, Homo sapiens
  misc_RNA (1)...(19): siRNA sense strand
gaaaauaaccaagaagaac

SEQ ID NO: 908893 - RNA, 19 nt, Homo sapiens
  misc_RNA (1)...(19): siRNA sense strand
cgccagcacucagguugaa

SEQ ID NO: 908894 - RNA, 19 nt, Homo sapiens
  misc_RNA (1)...(19): siRNA sense strand
cagguugaaucagaaaaua

SEQ ID NO: 908895 - RNA, 19 nt, Homo sapiens
  misc_RNA (1)...(19): siRNA sense strand
gaagaaaagcacaaggaau

SEQ ID NO: 908896 - RNA, 19 nt, Homo sapiens
  misc_RNA (1)...(19): siRNA sense strand
gugguuuauuggcaaagaa

SEQ ID NO: 908897 - RNA, 19 nt, Homo sapiens
  misc_RNA (1)...(19): siRNA sense strand
ccaugggaggugugguuua

SEQ ID NO: 908898 - RNA, 19 nt, Homo sapiens
  misc_RNA (1)...(19): siRNA sense strand
auacacacauugacaucuc

SEQ ID NO: 908899 - RNA, 19 nt, Homo sapiens
  misc_RNA (1)...(19): siRNA sense strand
ggaagacguggaugaugag

SEQ ID NO: 908900 - RNA, 19 nt, Homo sapiens
  misc_RNA (1)...(19): siRNA sense strand
gaaacaggugcgcuuacca

SEQ ID NO: 908901 - RNA, 19 nt, Homo sapiens
  misc_RNA (1)...(19): siRNA sense strand
gaagaugcccaugauucag

SEQ ID NO: 908902 - RNA, 19 nt, Homo sapiens
  misc_RNA (1)...(19): siRNA sense strand
gcaacugaaagcucuagag

SEQ ID NO: 908903 - RNA, 19 nt, Homo sapiens
  misc_RNA (1)...(19): siRNA sense strand
auacuucauuaccuagguu

SEQ ID NO: 908904 - RNA, 19 nt, Homo sapiens
  misc_RNA (1)...(19): siRNA sense strand
ggaugaggaagacguggau

SEQ ID NO: 908905 - RNA, 19 nt, Homo sapiens
  misc_RNA (1)...(19): siRNA sense strand
acaaggaauggguucagaa

SEQ ID NO: 908906 - RNA, 19 nt, Homo sapiens
  misc_RNA (1)...(19): siRNA sense strand
gcucuagaggaauuaaauc

SEQ ID NO: 908907 - RNA, 19 nt, Homo sapiens
  misc_RNA (1)...(19): siRNA sense strand
aagaugcccaugauucaga

SEQ ID NO: 908908 - RNA, 19 nt, Homo sapiens
  misc_RNA (1)...(19): siRNA sense strand
gagaaagaguucauacauu

SEQ ID NO: 908909 - RNA, 19 nt, Homo sapiens
  misc_RNA (1)...(19): siRNA sense strand
ucaaacagcugaagaagug

SEQ ID NO: 908910 - RNA, 19 nt, Homo sapiens
  misc_RNA (1)...(19): siRNA sense strand
gaagauguauugggaaaga

SEQ ID NO: 908911 - RNA, 19 nt, Homo sapiens
  misc_RNA (1)...(19): siRNA sense strand
gaagaacaccaucaacaaa

SEQ ID NO: 908912 - RNA, 19 nt, Homo sapiens
  misc_RNA (1)...(19): siRNA sense strand
gaaaggagagagaaaguga

SEQ ID NO: 908913 - RNA, 19 nt, Homo sapiens
  misc_RNA (1)...(19): siRNA sense strand
caacaaauguccaucuuac

SEQ ID NO: 908914 - RNA, 19 nt, Homo sapiens
  misc_RNA (1)...(19): siRNA sense strand
uuauaaagccugccaaaua

SEQ ID NO: 908915 - RNA, 19 nt, Homo sapiens
  misc_RNA (1)...(19): siRNA sense strand
ggaagaacaccaucaacaa

SEQ ID NO: 908916 - RNA, 19 nt, Homo sapiens
  misc_RNA (1)...(19): siRNA sense strand
aauaugugcuggaauguaa

SEQ ID NO: 908917 - RNA, 19 nt, Homo sapiens
  misc_RNA (1)...(19): siRNA sense strand
guguucagcugucagaaua

SEQ ID NO: 908918 - RNA, 19 nt, Homo sapiens
  misc_RNA (1)...(19): siRNA sense strand
cagaauaacagccaauaaa

SEQ ID NO: 908919 - RNA, 19 nt, Homo sapiens
  misc_RNA (1)...(19): siRNA sense strand
caagaaucauuugcuguuu

SEQ ID NO: 908920 - RNA, 19 nt, Homo sapiens
  misc_RNA (1)...(19): siRNA sense strand
uauaaagccugccaaauac

SEQ ID NO: 908921 - RNA, 19 nt, Homo sapiens
  misc_RNA (1)...(19): siRNA sense strand
auaaauaugugcuggaaug

SEQ ID NO: 908922 - RNA, 19 nt, Homo sapiens
  misc_RNA (1)...(19): siRNA sense strand
caucaaggcucggaccaaa

SEQ ID NO: 908923 - RNA, 19 nt, Homo sapiens
  misc_RNA (1)...(19): siRNA sense strand
caacugcaacugauacaaa

SEQ ID NO: 908924 - RNA, 19 nt, Homo sapiens
  misc_RNA (1)...(19): siRNA sense strand
gcagauagagcgagagugu

SEQ ID NO: 908925 - RNA, 19 nt, Homo sapiens
  misc_RNA (1)...(19): siRNA sense strand
guauaaauaugugcuggaa

SEQ ID NO: 908926 - RNA, 19 nt, Homo sapiens
  misc_RNA (1)...(19): siRNA sense strand
caacugauacaaaugaaug

SEQ ID NO: 908927 - RNA, 19 nt, Homo sapiens
  misc_RNA (1)...(19): siRNA sense strand
aagaagauguauugggaaa

SEQ ID NO: 908928 - RNA, 19 nt, Homo sapiens
  misc_RNA (1)...(19): siRNA sense strand
auagagaacugugcgauga

SEQ ID NO: 908929 - RNA, 19 nt, Homo sapiens
  misc_RNA (1)...(19): siRNA sense strand
aaagaugcaugaggaagaa

SEQ ID NO: 908930 - RNA, 19 nt, Homo sapiens
  misc_RNA (1)...(19): siRNA sense strand
guucauacauuuuccagua

SEQ ID NO: 908931 - RNA, 19 nt, Homo sapiens
  misc_RNA (1)...(19): siRNA sense strand
ucaggaaggugcuuuaaaa

SEQ ID NO: 908932 - RNA, 19 nt, Homo sapiens
  misc_RNA (1)...(19): siRNA sense strand
ccaagaaucauuugcuguu

SEQ ID NO: 908933 - RNA, 19 nt, Homo sapiens
  misc_RNA (1)...(19): siRNA sense strand
gaacaccaucaacaaaugu

SEQ ID NO: 908934 - RNA, 19 nt, Homo sapiens
  misc_RNA (1)...(19): siRNA sense strand
ccugcuggcuuuaguagaa

SEQ ID NO: 908935 - RNA, 19 nt, Homo sapiens
  misc_RNA (1)...(19): siRNA sense strand
ucaacaaauguccaucuua

SEQ ID NO: 908936 - RNA, 19 nt, Homo sapiens
  misc_RNA (1)...(19): siRNA sense strand
gaggaggaacacaggauaa

SEQ ID NO: 908937 - RNA, 19 nt, Homo sapiens
  misc_RNA (1)...(19): siRNA sense strand
agaacaccaucaacaaaug

SEQ ID NO: 908938 - RNA, 19 nt, Homo sapiens
  misc_RNA (1)...(19): siRNA sense strand
gaacuauugcccuuaagca

SEQ ID NO: 908939 - RNA, 19 nt, Homo sapiens
  misc_RNA (1)...(19): siRNA sense strand
gagcaaaaccucucaggaa

SEQ ID NO: 908940 - RNA, 19 nt, Homo sapiens
  misc_RNA (1)...(19): siRNA sense strand
acaaauguccaucuuacaa

SEQ ID NO: 908941 - RNA, 19 nt, Homo sapiens
  misc_RNA (1)...(19): siRNA sense strand
agaaucauuugcuguuuca

SEQ ID NO: 908942 - RNA, 19 nt, Homo sapiens
  misc_RNA (1)...(19): siRNA sense strand
ugagaaagaguucauacau

SEQ ID NO: 908943 - RNA, 19 nt, Homo sapiens
  misc_RNA (1)...(19): siRNA sense strand
gcgaugaugagaaagaguu

SEQ ID NO: 908944 - RNA, 19 nt, Homo sapiens
  misc_RNA (1)...(19): siRNA sense strand
uggccuguuuccucauuua

SEQ ID NO: 908945 - RNA, 19 nt, Homo sapiens
  misc_RNA (1)...(19): siRNA sense strand
cggaggaggagcccgaaua

SEQ ID NO: 908946 - RNA, 19 nt, Homo sapiens
  misc_RNA (1)...(19): siRNA sense strand
ucagaauaacagccaauaa

SEQ ID NO: 908947 - RNA, 19 nt, Homo sapiens
  misc_RNA (1)...(19): siRNA sense strand
gaacugugcgaugaugaga

SEQ ID NO: 908948 - RNA, 19 nt, Homo sapiens
  misc_RNA (1)...(19): siRNA sense strand
acugugcgaugaugagaaa

SEQ ID NO: 908949 - RNA, 19 nt, Homo sapiens
  misc_RNA (1)...(19): siRNA sense strand
accaaggaauggccuguuu

SEQ ID NO: 908950 - RNA, 19 nt, Homo sapiens
  misc_RNA (1)...(19): siRNA sense strand
cgcgaacuauugcccuuaa

SEQ ID NO: 908951 - RNA, 19 nt, Homo sapiens
  misc_RNA (1)...(19): siRNA sense strand
aagaaucauuugcuguuuc

SEQ ID NO: 908952 - RNA, 19 nt, Homo sapiens
  misc_RNA (1)...(19): siRNA sense strand
agauagagcgagaguguga

SEQ ID NO: 908953 - RNA, 19 nt, Homo sapiens
  misc_RNA (1)...(19): siRNA sense strand
ggagagagaaagugaaacg

SEQ ID NO: 908954 - RNA, 19 nt, Homo sapiens
  misc_RNA (1)...(19): siRNA sense strand
uaaagccugccaaauacuu

SEQ ID NO: 908955 - RNA, 19 nt, Homo sapiens
  misc_RNA (1)...(19): siRNA sense strand
ggaggaggagcccgaauac

SEQ ID NO: 908956 - RNA, 19 nt, Homo sapiens
  misc_RNA (1)...(19): siRNA sense strand
agagaacugugcgaugaug

SEQ ID NO: 908957 - RNA, 19 nt, Homo sapiens
  misc_RNA (1)...(19): siRNA sense strand
gcaacugauacaaaugaau

SEQ ID NO: 908958 - RNA, 19 nt, Homo sapiens
  misc_RNA (1)...(19): siRNA sense strand
aagaacaccaucaacaaau

SEQ ID NO: 908959 - RNA, 19 nt, Homo sapiens
  misc_RNA (1)...(19): siRNA sense strand
aaggagagagaaagugaaa

SEQ ID NO: 908960 - RNA, 19 nt, Homo sapiens
  misc_RNA (1)...(19): siRNA sense strand
ugaggaagaacaccaucaa

SEQ ID NO: 908961 - RNA, 19 nt, Homo sapiens
  misc_RNA (1)...(19): siRNA sense strand
gagaacugugcgaugauga

SEQ ID NO: 908962 - RNA, 19 nt, Homo sapiens
  misc_RNA (1)...(19): siRNA sense strand
cgccucagcccaagaauca

SEQ ID NO: 908963 - RNA, 19 nt, Homo sapiens
  misc_RNA (1)...(19): siRNA sense strand
aagaagugcugggagaaca

SEQ ID NO: 908964 - RNA, 19 nt, Homo sapiens
  misc_RNA (1)...(19): siRNA sense strand
ggaaagaaaacuacaaacu

SEQ ID NO: 908965 - RNA, 19 nt, Homo sapiens
  misc_RNA (1)...(19): siRNA sense strand
agaggaggaacacaggaua

SEQ ID NO: 908966 - RNA, 19 nt, Homo sapiens
  misc_RNA (1)...(19): siRNA sense strand
gcgcgaacuauugcccuua

SEQ ID NO: 908967 - RNA, 19 nt, Homo sapiens
  misc_RNA (1)...(19): siRNA sense strand
cugcaacugauacaaauga

SEQ ID NO: 908968 - RNA, 19 nt, Homo sapiens
  misc_RNA (1)...(19): siRNA sense strand
gcauccugcuggcuuuagu

SEQ ID NO: 908969 - RNA, 19 nt, Homo sapiens
  misc_RNA (1)...(19): siRNA sense strand
aaauaugugcuggaaugua

SEQ ID NO: 908970 - RNA, 19 nt, Homo sapiens
  misc_RNA (1)...(19): siRNA sense strand
cgacgccucagcccaagaa

SEQ ID NO: 908971 - RNA, 19 nt, Homo sapiens
  misc_RNA (1)...(19): siRNA sense strand
aaagugaugcgcgaacuau

SEQ ID NO: 908972 - RNA, 19 nt, Homo sapiens
  misc_RNA (1)...(19): siRNA sense strand
acaaaugaaugaggugcau

SEQ ID NO: 908973 - RNA, 19 nt, Homo sapiens
  misc_RNA (1)...(19): siRNA sense strand
gaagaagugcugggagaac

SEQ ID NO: 908974 - RNA, 19 nt, Homo sapiens
  misc_RNA (1)...(19): siRNA sense strand
gugcuggaauguaagaaaa

SEQ ID NO: 908975 - RNA, 19 nt, Homo sapiens
  misc_RNA (1)...(19): siRNA sense strand
ugagauggcagaggaggaa

SEQ ID NO: 908976 - RNA, 19 nt, Homo sapiens
  misc_RNA (1)...(19): siRNA sense strand
ugaggugcauguggccaaa

SEQ ID NO: 908977 - RNA, 19 nt, Homo sapiens
  misc_RNA (1)...(19): siRNA sense strand
caaccugaacccucguguu

SEQ ID NO: 908978 - RNA, 19 nt, Homo sapiens
  misc_RNA (1)...(19): siRNA sense strand
ccucagcccaagaaucauu

SEQ ID NO: 908979 - RNA, 19 nt, Homo sapiens
  misc_RNA (1)...(19): siRNA sense strand
aggagaagaucgccagcau

SEQ ID NO: 908980 - RNA, 19 nt, Homo sapiens
  misc_RNA (1)...(19): siRNA sense strand
caaauguccaucuuacaac

SEQ ID NO: 908981 - RNA, 19 nt, Homo sapiens
  misc_RNA (1)...(19): siRNA sense strand
gucagaauaacagccaaua

SEQ ID NO: 908982 - RNA, 19 nt, Homo sapiens
  misc_RNA (1)...(19): siRNA sense strand
aaauguccaucuuacaacu

SEQ ID NO: 908983 - RNA, 19 nt, Homo sapiens
  misc_RNA (1)...(19): siRNA sense strand
gcccaugaaaggagagaga

SEQ ID NO: 908984 - RNA, 19 nt, Homo sapiens
  misc_RNA (1)...(19): siRNA sense strand
aacugcaacugauacaaau

SEQ ID NO: 908985 - RNA, 19 nt, Homo sapiens
  misc_RNA (1)...(19): siRNA sense strand
ucuuacaacugcaacugau

SEQ ID NO: 908986 - RNA, 19 nt, Homo sapiens
  misc_RNA (1)...(19): siRNA sense strand
aggaagaacaccaucaaca

SEQ ID NO: 908987 - RNA, 19 nt, Homo sapiens
  misc_RNA (1)...(19): siRNA sense strand
gaaaagugaugcgcgaacu

SEQ ID NO: 908988 - RNA, 19 nt, Homo sapiens
  misc_RNA (1)...(19): siRNA sense strand
ccaugaaaggagagagaaa

SEQ ID NO: 908989 - RNA, 19 nt, Homo sapiens
  misc_RNA (1)...(19): siRNA sense strand
guucagcugucagaauaac

SEQ ID NO: 908990 - RNA, 19 nt, Homo sapiens
  misc_RNA (1)...(19): siRNA sense strand
gaagugcugggagaacauc

SEQ ID NO: 908991 - RNA, 19 nt, Homo sapiens
  misc_RNA (1)...(19): siRNA sense strand
ccaaggaauggccuguuuc

SEQ ID NO: 908992 - RNA, 19 nt, Homo sapiens
  misc_RNA (1)...(19): siRNA sense strand
caucaacaaauguccaucu

SEQ ID NO: 908993 - RNA, 19 nt, Homo sapiens
  misc_RNA (1)...(19): siRNA sense strand
ggaaauggccgaugggauu

SEQ ID NO: 908994 - RNA, 19 nt, Homo sapiens
  misc_RNA (1)...(19): siRNA sense strand
gaagaccugccacaauuua

SEQ ID NO: 908995 - RNA, 19 nt, Homo sapiens
  misc_RNA (1)...(19): siRNA sense strand
uggaagaccugccacaauu

SEQ ID NO: 908996 - RNA, 19 nt, Homo sapiens
  misc_RNA (1)...(19): siRNA sense strand
uaccagaagugaauuaaug

SEQ ID NO: 908997 - RNA, 19 nt, Homo sapiens
  misc_RNA (1)...(19): siRNA sense strand
ggaagaccugccacaauuu

SEQ ID NO: 908998 - RNA, 19 nt, Homo sapiens
  misc_RNA (1)...(19): siRNA sense strand
ggccaaccaucucuuccua

SEQ ID NO: 908999 - RNA, 19 nt, Homo sapiens
  misc_RNA (1)...(19): siRNA sense strand
uagacaaggugauggaaau

SEQ ID NO: 909000 - RNA, 19 nt, Homo sapiens
  misc_RNA (1)...(19): siRNA sense strand
gaaauggccgaugggauug

SEQ ID NO: 909001 - RNA, 19 nt, Homo sapiens
  misc_RNA (1)...(19): siRNA sense strand
aggcugcaguuacaauaaa

SEQ ID NO: 909002 - RNA, 19 nt, Homo sapiens
  misc_RNA (1)...(19): siRNA sense strand
gcaguuccgcuccuacuca

SEQ ID NO: 909003 - RNA, 19 nt, Homo sapiens
  misc_RNA (1)...(19): siRNA sense strand
gaccugccacaauuuacua

SEQ ID NO: 909004 - RNA, 19 nt, Homo sapiens
  misc_RNA (1)...(19): siRNA sense strand
ucagagagcgagaagcaau

SEQ ID NO: 909005 - RNA, 19 nt, Homo sapiens
  misc_RNA (1)...(19): siRNA sense strand
acaauuuacuaccagaagu

SEQ ID NO: 909006 - RNA, 19 nt, Homo sapiens
  misc_RNA (1)...(19): siRNA sense strand
cgaugggauugaaguggaa

SEQ ID NO: 909007 - RNA, 19 nt, Homo sapiens
  misc_RNA (1)...(19): siRNA sense strand
cuaggcugcaguuacaaua

SEQ ID NO: 909008 - RNA, 19 nt, Homo sapiens
  misc_RNA (1)...(19): siRNA sense strand
ccagaagugaauuaaugaa

SEQ ID NO: 909009 - RNA, 19 nt, Homo sapiens
  misc_RNA (1)...(19): siRNA sense strand
gcaguggaggagcugguuu

SEQ ID NO: 909010 - RNA, 19 nt, Homo sapiens
  misc_RNA (1)...(19): siRNA sense strand
cgacuucgcggagcaguuc

SEQ ID NO: 909011 - RNA, 19 nt, Homo sapiens
  misc_RNA (1)...(19): siRNA sense strand
caauuuacuaccagaagug

SEQ ID NO: 909012 - RNA, 19 nt, Homo sapiens
  misc_RNA (1)...(19): siRNA sense strand
ccacaauuuacuaccagaa

SEQ ID NO: 909013 - RNA, 19 nt, Homo sapiens
  misc_RNA (1)...(19): siRNA sense strand
uuccuaggcugcaguuaca

SEQ ID NO: 909014 - RNA, 19 nt, Homo sapiens
  misc_RNA (1)...(19): siRNA sense strand
uaggcugcaguuacaauaa

SEQ ID NO: 909015 - RNA, 19 nt, Homo sapiens
  misc_RNA (1)...(19): siRNA sense strand
caguuacaauaaagaccuu

SEQ ID NO: 909016 - RNA, 19 nt, Homo sapiens
  misc_RNA (1)...(19): siRNA sense strand
gggaggaccugcucuauga

SEQ ID NO: 909017 - RNA, 19 nt, Homo sapiens
  misc_RNA (1)...(19): siRNA sense strand
caacaugggcaccugcuua

SEQ ID NO: 909018 - RNA, 19 nt, Homo sapiens
  misc_RNA (1)...(19): siRNA sense strand
gcuacaaccuggacucugu

SEQ ID NO: 909019 - RNA, 19 nt, Homo sapiens
  misc_RNA (1)...(19): siRNA sense strand
agacugagaaguucacauu

SEQ ID NO: 909020 - RNA, 19 nt, Homo sapiens
  misc_RNA (1)...(19): siRNA sense strand
ccacaguucuggacuucau

SEQ ID NO: 909021 - RNA, 19 nt, Homo sapiens
  misc_RNA (1)...(19): siRNA sense strand
ggacuucaucgaacucuuc

SEQ ID NO: 909022 - RNA, 19 nt, Homo sapiens
  misc_RNA (1)...(19): siRNA sense strand
accagcagcuuccucaauu

SEQ ID NO: 909023 - RNA, 19 nt, Homo sapiens
  misc_RNA (1)...(19): siRNA sense strand
caacaccacggccaacaug

SEQ ID NO: 909024 - RNA, 19 nt, Homo sapiens
  misc_RNA (1)...(19): siRNA sense strand
caaccaggguacggccuuu

SEQ ID NO: 909025 - RNA, 19 nt, Homo sapiens
  misc_RNA (1)...(19): siRNA sense strand
gaaguccucccacgaaguc

SEQ ID NO: 909026 - RNA, 19 nt, Homo sapiens
  misc_RNA (1)...(19): siRNA sense strand
acugagaaguucacauuca

SEQ ID NO: 909027 - RNA, 19 nt, Homo sapiens
  misc_RNA (1)...(19): siRNA sense strand
gccgcuacguggaccauga

SEQ ID NO: 909028 - RNA, 19 nt, Homo sapiens
  misc_RNA (1)...(19): siRNA sense strand
gacauuuucucaaggauga

SEQ ID NO: 909029 - RNA, 19 nt, Homo sapiens
  misc_RNA (1)...(19): siRNA sense strand
ugagauggaagccuauaga

SEQ ID NO: 909030 - RNA, 19 nt, Homo sapiens
  misc_RNA (1)...(19): siRNA sense strand
ccagcagcuuccucaauuc

SEQ ID NO: 909031 - RNA, 19 nt, Homo sapiens
  misc_RNA (1)...(19): siRNA sense strand
ggccacaguucuggacuuc

SEQ ID NO: 909032 - RNA, 19 nt, Homo sapiens
  misc_RNA (1)...(19): siRNA sense strand
ucaucgaacucuucaacca

SEQ ID NO: 909033 - RNA, 19 nt, Homo sapiens
  misc_RNA (1)...(19): siRNA sense strand
gaccucaaccgcaccuuca

SEQ ID NO: 909034 - RNA, 19 nt, Homo sapiens
  misc_RNA (1)...(19): siRNA sense strand
gcacgcauggcaacgagau

SEQ ID NO: 909035 - RNA, 19 nt, Homo sapiens
  misc_RNA (1)...(19): siRNA sense strand
gccaggccuuugacuuugu

SEQ ID NO: 909036 - RNA, 19 nt, Homo sapiens
  misc_RNA (1)...(19): siRNA sense strand
caagagcccgagagcugaa

SEQ ID NO: 909037 - RNA, 19 nt, Homo sapiens
  misc_RNA (1)...(19): siRNA sense strand
caugggcaccugcuuaauc

SEQ ID NO: 909038 - RNA, 19 nt, Homo sapiens
  misc_RNA (1)...(19): siRNA sense strand
ccuuugacuuuguccuuga

SEQ ID NO: 909039 - RNA, 19 nt, Homo sapiens
  misc_RNA (1)...(19): siRNA sense strand
gccuggugcucccaucuuc

SEQ ID NO: 909040 - RNA, 19 nt, Homo sapiens
  misc_RNA (1)...(19): siRNA sense strand
gggcugacauuuucucaag

SEQ ID NO: 909041 - RNA, 19 nt, Homo sapiens
  misc_RNA (1)...(19): siRNA sense strand
aacaugggcaccugcuuaa

SEQ ID NO: 909042 - RNA, 19 nt, Homo sapiens
  misc_RNA (1)...(19): siRNA sense strand
ccuggacucuguggccaaa

SEQ ID NO: 909043 - RNA, 19 nt, Homo sapiens
  misc_RNA (1)...(19): siRNA sense strand
cgacccauaugaggugaca

SEQ ID NO: 909044 - RNA, 19 nt, Homo sapiens
  misc_RNA (1)...(19): siRNA sense strand
cgagaugucgggcgucuac

SEQ ID NO: 909045 - RNA, 19 nt, Homo sapiens
  misc_RNA (1)...(19): siRNA sense strand
gaagacagcaacuuacauu

SEQ ID NO: 909046 - RNA, 19 nt, Homo sapiens
  misc_RNA (1)...(19): siRNA sense strand
gacagcaacuuacauuaug

SEQ ID NO: 909047 - RNA, 19 nt, Homo sapiens
  misc_RNA (1)...(19): siRNA sense strand
ugaaacacgugcauuuaga

SEQ ID NO: 909048 - RNA, 19 nt, Homo sapiens
  misc_RNA (1)...(19): siRNA sense strand
caaacaagacggacacuga

SEQ ID NO: 909049 - RNA, 19 nt, Homo sapiens
  misc_RNA (1)...(19): siRNA sense strand
caucaacuuuccagaagaa

SEQ ID NO: 909050 - RNA, 19 nt, Homo sapiens
  misc_RNA (1)...(19): siRNA sense strand
gaacgggacccugguguga

SEQ ID NO: 909051 - RNA, 19 nt, Homo sapiens
  misc_RNA (1)...(19): siRNA sense strand
gaaacacgugcauuuagaa

SEQ ID NO: 909052 - RNA, 19 nt, Homo sapiens
  misc_RNA (1)...(19): siRNA sense strand
ggagcugcccaucaacuuu

SEQ ID NO: 909053 - RNA, 19 nt, Homo sapiens
  misc_RNA (1)...(19): siRNA sense strand
agacagcaacuuacauuau

SEQ ID NO: 909054 - RNA, 19 nt, Homo sapiens
  misc_RNA (1)...(19): siRNA sense strand
ccaaagggccaugaaacaa

SEQ ID NO: 909055 - RNA, 19 nt, Homo sapiens
  misc_RNA (1)...(19): siRNA sense strand
gaagugaaacacgugcauu

SEQ ID NO: 909056 - RNA, 19 nt, Homo sapiens
  misc_RNA (1)...(19): siRNA sense strand
aaacaagacggacacugaa

SEQ ID NO: 909057 - RNA, 19 nt, Homo sapiens
  misc_RNA (1)...(19): siRNA sense strand
agaaaacgcuacagaguau

SEQ ID NO: 909058 - RNA, 19 nt, Homo sapiens
  misc_RNA (1)...(19): siRNA sense strand
gcagcagaaucucccaaag

SEQ ID NO: 909059 - RNA, 19 nt, Homo sapiens
  misc_RNA (1)...(19): siRNA sense strand
gaaaagaggaagccaaaca

SEQ ID NO: 909060 - RNA, 19 nt, Homo sapiens
  misc_RNA (1)...(19): siRNA sense strand
aaacaacaggacauacgua

SEQ ID NO: 909061 - RNA, 19 nt, Homo sapiens
  misc_RNA (1)...(19): siRNA sense strand
aaagggccaugaaacaaca

SEQ ID NO: 909062 - RNA, 19 nt, Homo sapiens
  misc_RNA (1)...(19): siRNA sense strand
gucggaagacagcaacuua

SEQ ID NO: 909063 - RNA, 19 nt, Homo sapiens
  misc_RNA (1)...(19): siRNA sense strand
gaaacaacaggacauacgu

SEQ ID NO: 909064 - RNA, 19 nt, Homo sapiens
  misc_RNA (1)...(19): siRNA sense strand
caugaaacaacaggacaua

SEQ ID NO: 909065 - RNA, 19 nt, Homo sapiens
  misc_RNA (1)...(19): siRNA sense strand
aaacacgugcauuuagaaa

SEQ ID NO: 909066 - RNA, 19 nt, Homo sapiens
  misc_RNA (1)...(19): siRNA sense strand
acauuaugcugacauucaa

SEQ ID NO: 909067 - RNA, 19 nt, Homo sapiens
  misc_RNA (1)...(19): siRNA sense strand
ggaagacagcaacuuacau

SEQ ID NO: 909068 - RNA, 19 nt, Homo sapiens
  misc_RNA (1)...(19): siRNA sense strand
gagcugcccaucaacuuuc

SEQ ID NO: 909069 - RNA, 19 nt, Homo sapiens
  misc_RNA (1)...(19): siRNA sense strand
ccaucaacuuuccagaaga

SEQ ID NO: 909070 - RNA, 19 nt, Homo sapiens
  misc_RNA (1)...(19): siRNA sense strand
gugaaacacgugcauuuag

SEQ ID NO: 909071 - RNA, 19 nt, Homo sapiens
  misc_RNA (1)...(19): siRNA sense strand
gcccaucaacuuuccagaa

SEQ ID NO: 909072 - RNA, 19 nt, Homo sapiens
  misc_RNA (1)...(19): siRNA sense strand
agugaaacacgugcauuua

SEQ ID NO: 909073 - RNA, 19 nt, Homo sapiens
  misc_RNA (1)...(19): siRNA sense strand
caaagggccaugaaacaac

SEQ ID NO: 909074 - RNA, 19 nt, Homo sapiens
  misc_RNA (1)...(19): siRNA sense strand
gcagcaagggucucaagag

SEQ ID NO: 909075 - RNA, 19 nt, Homo sapiens
  misc_RNA (1)...(19): siRNA sense strand
ggccacaccucgcuaugac

SEQ ID NO: 909076 - RNA, 19 nt, Homo sapiens
  misc_RNA (1)...(19): siRNA sense strand
cccaucaacuuuccagaag

SEQ ID NO: 909077 - RNA, 19 nt, Homo sapiens
  misc_RNA (1)...(19): siRNA sense strand
aagaggaagccaaacaaga

SEQ ID NO: 909078 - RNA, 19 nt, Homo sapiens
  misc_RNA (1)...(19): siRNA sense strand
aagacagcaacuuacauua

SEQ ID NO: 909079 - RNA, 19 nt, Homo sapiens
  misc_RNA (1)...(19): siRNA sense strand
uacauuaugcugacauuca

SEQ ID NO: 909080 - RNA, 19 nt, Homo sapiens
  misc_RNA (1)...(19): siRNA sense strand
aagugaaacacgugcauuu

SEQ ID NO: 909081 - RNA, 19 nt, Homo sapiens
  misc_RNA (1)...(19): siRNA sense strand
ggaagugaaacacgugcau

SEQ ID NO: 909082 - RNA, 19 nt, Homo sapiens
  misc_RNA (1)...(19): siRNA sense strand
uagaaaacgcuacagagua

SEQ ID NO: 909083 - RNA, 19 nt, Homo sapiens
  misc_RNA (1)...(19): siRNA sense strand
cguaugaacggguguuaca

SEQ ID NO: 909084 - RNA, 19 nt, Homo sapiens
  misc_RNA (1)...(19): siRNA sense strand
cagcagaaucucccaaagg

SEQ ID NO: 909085 - RNA, 19 nt, Homo sapiens
  misc_RNA (1)...(19): siRNA sense strand
cccaaagggccaugaaaca

SEQ ID NO: 909086 - RNA, 19 nt, Homo sapiens
  misc_RNA (1)...(19): siRNA sense strand
cggaagacagcaacuuaca

SEQ ID NO: 909087 - RNA, 19 nt, Homo sapiens
  misc_RNA (1)...(19): siRNA sense strand
cuuacauuaugcugacauu

SEQ ID NO: 909088 - RNA, 19 nt, Homo sapiens
  misc_RNA (1)...(19): siRNA sense strand
gaaaggagaaugcaaacuu

SEQ ID NO: 909089 - RNA, 19 nt, Homo sapiens
  misc_RNA (1)...(19): siRNA sense strand
ccacacaccugucaacaug

SEQ ID NO: 909090 - RNA, 19 nt, Homo sapiens
  misc_RNA (1)...(19): siRNA sense strand
ggauaaaugcaacaaguuu

SEQ ID NO: 909091 - RNA, 19 nt, Homo sapiens
  misc_RNA (1)...(19): siRNA sense strand
gaccaaggacugaauauuc

SEQ ID NO: 909092 - RNA, 19 nt, Homo sapiens
  misc_RNA (1)...(19): siRNA sense strand
auauaaagcugcacaagau

SEQ ID NO: 909093 - RNA, 19 nt, Homo sapiens
  misc_RNA (1)...(19): siRNA sense strand
gauaauucaucaccuucga

SEQ ID NO: 909094 - RNA, 19 nt, Homo sapiens
  misc_RNA (1)...(19): siRNA sense strand
gaaugaccccugucuuuua

SEQ ID NO: 909095 - RNA, 19 nt, Homo sapiens
  misc_RNA (1)...(19): siRNA sense strand
aaaggagaaugcaaacuuc

SEQ ID NO: 909096 - RNA, 19 nt, Homo sapiens
  misc_RNA (1)...(19): siRNA sense strand
ggacugaauauuccaagug

SEQ ID NO: 909097 - RNA, 19 nt, Homo sapiens
  misc_RNA (1)...(19): siRNA sense strand
ccuguacccuuucccauga

SEQ ID NO: 909098 - RNA, 19 nt, Homo sapiens
  misc_RNA (1)...(19): siRNA sense strand
acagauaauucaucaccuu

SEQ ID NO: 909099 - RNA, 19 nt, Homo sapiens
  misc_RNA (1)...(19): siRNA sense strand
gacugaauauuccaagugu

SEQ ID NO: 909100 - RNA, 19 nt, Homo sapiens
  misc_RNA (1)...(19): siRNA sense strand
ggaccaaggacugaauauu

SEQ ID NO: 909101 - RNA, 19 nt, Homo sapiens
  misc_RNA (1)...(19): siRNA sense strand
acugcaaccucaaggauaa

SEQ ID NO: 909102 - RNA, 19 nt, Homo sapiens
  misc_RNA (1)...(19): siRNA sense strand
ggagaaugcaaacuucaga

SEQ ID NO: 909103 - RNA, 19 nt, Homo sapiens
  misc_RNA (1)...(19): siRNA sense strand
gauaaucuccaccuacaag

SEQ ID NO: 909104 - RNA, 19 nt, Homo sapiens
  misc_RNA (1)...(19): siRNA sense strand
cauauaaagcugcacaaga

SEQ ID NO: 909105 - RNA, 19 nt, Homo sapiens
  misc_RNA (1)...(19): siRNA sense strand
aagaagcccugcccagugu

SEQ ID NO: 909106 - RNA, 19 nt, Homo sapiens
  misc_RNA (1)...(19): siRNA sense strand
aaggauaaaugcaacaagu

SEQ ID NO: 909107 - RNA, 19 nt, Homo sapiens
  misc_RNA (1)...(19): siRNA sense strand
gauaaaugcaacaaguuuc

SEQ ID NO: 909108 - RNA, 19 nt, Homo sapiens
  misc_RNA (1)...(19): siRNA sense strand
ccaccuacaagcauauaaa

SEQ ID NO: 909109 - RNA, 19 nt, Homo sapiens
  misc_RNA (1)...(19): siRNA sense strand
gcgaccagcugcacuucug

SEQ ID NO: 909110 - RNA, 19 nt, Homo sapiens
  misc_RNA (1)...(19): siRNA sense strand
aaacggucccaucagcuua

SEQ ID NO: 909111 - RNA, 19 nt, Homo sapiens
  misc_RNA (1)...(19): siRNA sense strand
gaauauuccaaguguuguu

SEQ ID NO: 909112 - RNA, 19 nt, Homo sapiens
  misc_RNA (1)...(19): siRNA sense strand
caaguuucaugugugcaaa

SEQ ID NO: 909113 - RNA, 19 nt, Homo sapiens
  misc_RNA (1)...(19): siRNA sense strand
caaacggucccaucagcuu

SEQ ID NO: 909114 - RNA, 19 nt, Homo sapiens
  misc_RNA (1)...(19): siRNA sense strand
gcaaacuucagaccugcaa

SEQ ID NO: 909115 - RNA, 19 nt, Homo sapiens
  misc_RNA (1)...(19): siRNA sense strand
gauauccacacaccuguca

SEQ ID NO: 909116 - RNA, 19 nt, Homo sapiens
  misc_RNA (1)...(19): siRNA sense strand
ugcaacaaguuucaugugu

SEQ ID NO: 909117 - RNA, 19 nt, Homo sapiens
  misc_RNA (1)...(19): siRNA sense strand
cagcuucggauccugcuuu

SEQ ID NO: 909118 - RNA, 19 nt, Homo sapiens
  misc_RNA (1)...(19): siRNA sense strand
uggucuaccuguacccuuu

SEQ ID NO: 909119 - RNA, 19 nt, Homo sapiens
  misc_RNA (1)...(19): siRNA sense strand
cugaauauuccaaguguug

SEQ ID NO: 909120 - RNA, 19 nt, Homo sapiens
  misc_RNA (1)...(19): siRNA sense strand
cagaaugaccccugucuuu

SEQ ID NO: 909121 - RNA, 19 nt, Homo sapiens
  misc_RNA (1)...(19): siRNA sense strand
ugugaaaggagaaugcaaa

SEQ ID NO: 909122 - RNA, 19 nt, Homo sapiens
  misc_RNA (1)...(19): siRNA sense strand
acacaccugucaacaugca

SEQ ID NO: 909123 - RNA, 19 nt, Homo sapiens
  misc_RNA (1)...(19): siRNA sense strand
caggaccaaggacugaaua

SEQ ID NO: 909124 - RNA, 19 nt, Homo sapiens
  misc_RNA (1)...(19): siRNA sense strand
cuacaggaccaaggacuga

SEQ ID NO: 909125 - RNA, 19 nt, Homo sapiens
  misc_RNA (1)...(19): siRNA sense strand
aaccgggacugcuggucua

SEQ ID NO: 909126 - RNA, 19 nt, Homo sapiens
  misc_RNA (1)...(19): siRNA sense strand
auucaucaccuucgacuga

SEQ ID NO: 909127 - RNA, 19 nt, Homo sapiens
  misc_RNA (1)...(19): siRNA sense strand
gcauauaaagcugcacaag

SEQ ID NO: 909128 - RNA, 19 nt, Homo sapiens
  misc_RNA (1)...(19): siRNA sense strand
cccagugucuugcgagaag

SEQ ID NO: 909129 - RNA, 19 nt, Homo sapiens
  misc_RNA (1)...(19): siRNA sense strand
caccuucgacugagcauuc

SEQ ID NO: 909130 - RNA, 19 nt, Homo sapiens
  misc_RNA (1)...(19): siRNA sense strand
uguacccuuucccaugaua

SEQ ID NO: 909131 - RNA, 19 nt, Homo sapiens
  misc_RNA (1)...(19): siRNA sense strand
gacugcuggucuaccugua

SEQ ID NO: 909132 - RNA, 19 nt, Homo sapiens
  misc_RNA (1)...(19): siRNA sense strand
gcaaccucaaggauaaaug

SEQ ID NO: 909133 - RNA, 19 nt, Homo sapiens
  misc_RNA (1)...(19): siRNA sense strand
caaccucaaggauaaaugc

SEQ ID NO: 909134 - RNA, 19 nt, Homo sapiens
  misc_RNA (1)...(19): siRNA sense strand
ccauguuugucuacacuaa

SEQ ID NO: 909135 - RNA, 19 nt, Homo sapiens
  misc_RNA (1)...(19): siRNA sense strand
ccucaauccucagcaugua

SEQ ID NO: 909136 - RNA, 19 nt, Homo sapiens
  misc_RNA (1)...(19): siRNA sense strand
uugaugaccuggccauguu

SEQ ID NO: 909137 - RNA, 19 nt, Homo sapiens
  misc_RNA (1)...(19): siRNA sense strand
gaccaucuugcgacucuuu

SEQ ID NO: 909138 - RNA, 19 nt, Homo sapiens
  misc_RNA (1)...(19): siRNA sense strand
gaggcgcugucacuucuca

SEQ ID NO: 909139 - RNA, 19 nt, Homo sapiens
  misc_RNA (1)...(19): siRNA sense strand
ugucuacacuaagcaauau

SEQ ID NO: 909140 - RNA, 19 nt, Homo sapiens
  misc_RNA (1)...(19): siRNA sense strand
ccagcugguugguggaguu

SEQ ID NO: 909141 - RNA, 19 nt, Homo sapiens
  misc_RNA (1)...(19): siRNA sense strand
ggaggaggacgccuuuguc

SEQ ID NO: 909142 - RNA, 19 nt, Homo sapiens
  misc_RNA (1)...(19): siRNA sense strand
cggaggcgcugucacuucu

SEQ ID NO: 909143 - RNA, 19 nt, Homo sapiens
  misc_RNA (1)...(19): siRNA sense strand
gguggacgcugaguacaac

SEQ ID NO: 909144 - RNA, 19 nt, Homo sapiens
  misc_RNA (1)...(19): siRNA sense strand
ucuugcgacucuuugauga

SEQ ID NO: 909145 - RNA, 19 nt, Homo sapiens
  misc_RNA (1)...(19): siRNA sense strand
ggccauguuugucuacacu

SEQ ID NO: 909146 - RNA, 19 nt, Homo sapiens
  misc_RNA (1)...(19): siRNA sense strand
gcugguugguggaguucug

SEQ ID NO: 909147 - RNA, 19 nt, Homo sapiens
  misc_RNA (1)...(19): siRNA sense strand
gaugaccuggccauguuug

SEQ ID NO: 909148 - RNA, 19 nt, Homo sapiens
  misc_RNA (1)...(19): siRNA sense strand
ccacugcaggaccaucuug

SEQ ID NO: 909149 - RNA, 19 nt, Homo sapiens
  misc_RNA (1)...(19): siRNA sense strand
uggaugcugcugaaacuga

SEQ ID NO: 909150 - RNA, 19 nt, Homo sapiens
  misc_RNA (1)...(19): siRNA sense strand
gaucagagaugguugugua

SEQ ID NO: 909151 - RNA, 19 nt, Homo sapiens
  misc_RNA (1)...(19): siRNA sense strand
gcaguuguuugacuacuua

SEQ ID NO: 909152 - RNA, 19 nt, Homo sapiens
  misc_RNA (1)...(19): siRNA sense strand
uacaaugacugcauguuaa

SEQ ID NO: 909153 - RNA, 19 nt, Homo sapiens
  misc_RNA (1)...(19): siRNA sense strand
ccaagcaguuguuugacua

SEQ ID NO: 909154 - RNA, 19 nt, Homo sapiens
  misc_RNA (1)...(19): siRNA sense strand
cagcuuggauuaauuagga

SEQ ID NO: 909155 - RNA, 19 nt, Homo sapiens
  misc_RNA (1)...(19): siRNA sense strand
gaaucgacaugcuggaaug

SEQ ID NO: 909156 - RNA, 19 nt, Homo sapiens
  misc_RNA (1)...(19): siRNA sense strand
cuacaaugacugcauguua

SEQ ID NO: 909157 - RNA, 19 nt, Homo sapiens
  misc_RNA (1)...(19): siRNA sense strand
gaaggagucccucugaaga

SEQ ID NO: 909158 - RNA, 19 nt, Homo sapiens
  misc_RNA (1)...(19): siRNA sense strand
ggguuugccuggaguauga

SEQ ID NO: 909159 - RNA, 19 nt, Homo sapiens
  misc_RNA (1)...(19): siRNA sense strand
uacagaaccuuacuucaga

SEQ ID NO: 909160 - RNA, 19 nt, Homo sapiens
  misc_RNA (1)...(19): siRNA sense strand
cacaucaacuggacagauu

SEQ ID NO: 909161 - RNA, 19 nt, Homo sapiens
  misc_RNA (1)...(19): siRNA sense strand
ggaaaucucggaagaagca

SEQ ID NO: 909162 - RNA, 19 nt, Homo sapiens
  misc_RNA (1)...(19): siRNA sense strand
gcaggaaguaggaauagaa

SEQ ID NO: 909163 - RNA, 19 nt, Homo sapiens
  misc_RNA (1)...(19): siRNA sense strand
caccauagccaggaaauaa

SEQ ID NO: 909164 - RNA, 19 nt, Homo sapiens
  misc_RNA (1)...(19): siRNA sense strand
caauaugaguaaacaggaa

SEQ ID NO: 909165 - RNA, 19 nt, Homo sapiens
  misc_RNA (1)...(19): siRNA sense strand
gcaaauccaagcaguuguu

SEQ ID NO: 909166 - RNA, 19 nt, Homo sapiens
  misc_RNA (1)...(19): siRNA sense strand
cagagcaacuuacaagcuu

SEQ ID NO: 909167 - RNA, 19 nt, Homo sapiens
  misc_RNA (1)...(19): siRNA sense strand
gcauaaagcaggcucaagu

SEQ ID NO: 909168 - RNA, 19 nt, Homo sapiens
  misc_RNA (1)...(19): siRNA sense strand
ggaauugacaggcauaaag

SEQ ID NO: 909169 - RNA, 19 nt, Homo sapiens
  misc_RNA (1)...(19): siRNA sense strand
cagagaugguuguguaaug

SEQ ID NO: 909170 - RNA, 19 nt, Homo sapiens
  misc_RNA (1)...(19): siRNA sense strand
uggcaugucugcaaaggaa

SEQ ID NO: 909171 - RNA, 19 nt, Homo sapiens
  misc_RNA (1)...(19): siRNA sense strand
aaauggaaaucucggaaga

SEQ ID NO: 909172 - RNA, 19 nt, Homo sapiens
  misc_RNA (1)...(19): siRNA sense strand
ucacuggcaugucugcaaa

SEQ ID NO: 909173 - RNA, 19 nt, Homo sapiens
  misc_RNA (1)...(19): siRNA sense strand
gccaggaaauaauugaguu

SEQ ID NO: 909174 - RNA, 19 nt, Homo sapiens
  misc_RNA (1)...(19): siRNA sense strand
agagaugguuguguaauga

SEQ ID NO: 909175 - RNA, 19 nt, Homo sapiens
  misc_RNA (1)...(19): siRNA sense strand
ucaggaacauccaauucuu

SEQ ID NO: 909176 - RNA, 19 nt, Homo sapiens
  misc_RNA (1)...(19): siRNA sense strand
guuccaggcuuauguucaa

SEQ ID NO: 909177 - RNA, 19 nt, Homo sapiens
  misc_RNA (1)...(19): siRNA sense strand
gaugaaggagucccucuga

SEQ ID NO: 909178 - RNA, 19 nt, Homo sapiens
  misc_RNA (1)...(19): siRNA sense strand
gggaauauucucugguuga

SEQ ID NO: 909179 - RNA, 19 nt, Homo sapiens
  misc_RNA (1)...(19): siRNA sense strand
aauauucucugguugacaa

SEQ ID NO: 909180 - RNA, 19 nt, Homo sapiens
  misc_RNA (1)...(19): siRNA sense strand
gcaccaccauagccaggaa

SEQ ID NO: 909181 - RNA, 19 nt, Homo sapiens
  misc_RNA (1)...(19): siRNA sense strand
gaagcaaauccaagcaguu

SEQ ID NO: 909182 - RNA, 19 nt, Homo sapiens
  misc_RNA (1)...(19): siRNA sense strand
cagcaacagaagaacauua

SEQ ID NO: 909183 - RNA, 19 nt, Homo sapiens
  misc_RNA (1)...(19): siRNA sense strand
gcuuaucucaguucuguaa

SEQ ID NO: 909184 - RNA, 19 nt, Homo sapiens
  misc_RNA (1)...(19): siRNA sense strand
cggcagcuuggauuaauua

SEQ ID NO: 909185 - RNA, 19 nt, Homo sapiens
  misc_RNA (1)...(19): siRNA sense strand
gaacauccaauucuuucag

SEQ ID NO: 909186 - RNA, 19 nt, Homo sapiens
  misc_RNA (1)...(19): siRNA sense strand
cagaagcccaauaugagua

SEQ ID NO: 909187 - RNA, 19 nt, Homo sapiens
  misc_RNA (1)...(19): siRNA sense strand
gaauuuggcuguggaaccu

SEQ ID NO: 909188 - RNA, 19 nt, Homo sapiens
  misc_RNA (1)...(19): siRNA sense strand
gagucccucugaagauuug

SEQ ID NO: 909189 - RNA, 19 nt, Homo sapiens
  misc_RNA (1)...(19): siRNA sense strand
ucaguucuguaaauggauu

SEQ ID NO: 909190 - RNA, 19 nt, Homo sapiens
  misc_RNA (1)...(19): siRNA sense strand
uaucucaguucuguaaaug

SEQ ID NO: 909191 - RNA, 19 nt, Homo sapiens
  misc_RNA (1)...(19): siRNA sense strand
ggagucccucugaagauuu

SEQ ID NO: 909192 - RNA, 19 nt, Homo sapiens
  misc_RNA (1)...(19): siRNA sense strand
aauccaagcaguuguuuga

SEQ ID NO: 909193 - RNA, 19 nt, Homo sapiens
  misc_RNA (1)...(19): siRNA sense strand
gcggcagcuuggauuaauu

SEQ ID NO: 909194 - RNA, 19 nt, Homo sapiens
  misc_RNA (1)...(19): siRNA sense strand
uaugugcauuuguuacuug

SEQ ID NO: 909195 - RNA, 19 nt, Homo sapiens
  misc_RNA (1)...(19): siRNA sense strand
gcaacagaagaacauuauu

SEQ ID NO: 909196 - RNA, 19 nt, Homo sapiens
  misc_RNA (1)...(19): siRNA sense strand
ucucaguucuguaaaugga

SEQ ID NO: 909197 - RNA, 19 nt, Homo sapiens
  misc_RNA (1)...(19): siRNA sense strand
ccauagccaggaaauaauu

SEQ ID NO: 909198 - RNA, 19 nt, Homo sapiens
  misc_RNA (1)...(19): siRNA sense strand
gaucucagagcaacuuaca

SEQ ID NO: 909199 - RNA, 19 nt, Homo sapiens
  misc_RNA (1)...(19): siRNA sense strand
gaguaugaguguaaaagaa

SEQ ID NO: 909200 - RNA, 19 nt, Homo sapiens
  misc_RNA (1)...(19): siRNA sense strand
caggaacauccaauucuuu

SEQ ID NO: 909201 - RNA, 19 nt, Homo sapiens
  misc_RNA (1)...(19): siRNA sense strand
gaagaagcaaauccaagca

SEQ ID NO: 909202 - RNA, 19 nt, Homo sapiens
  misc_RNA (1)...(19): siRNA sense strand
cauaaagcaggcucaaguu

SEQ ID NO: 909203 - RNA, 19 nt, Homo sapiens
  misc_RNA (1)...(19): siRNA sense strand
ggaauauucucugguugac

SEQ ID NO: 909204 - RNA, 19 nt, Homo sapiens
  misc_RNA (1)...(19): siRNA sense strand
aaacacagcaucacagacu

SEQ ID NO: 909205 - RNA, 19 nt, Homo sapiens
  misc_RNA (1)...(19): siRNA sense strand
cuacagaaccuuacuucag

SEQ ID NO: 909206 - RNA, 19 nt, Homo sapiens
  misc_RNA (1)...(19): siRNA sense strand
ccaggaaauaauugaguuu

SEQ ID NO: 909207 - RNA, 19 nt, Homo sapiens
  misc_RNA (1)...(19): siRNA sense strand
gaagcccaauaugaguaaa

SEQ ID NO: 909208 - RNA, 19 nt, Homo sapiens
  misc_RNA (1)...(19): siRNA sense strand
uuacaaggucguugaacaa

SEQ ID NO: 909209 - RNA, 19 nt, Homo sapiens
  misc_RNA (1)...(19): siRNA sense strand
cauaagauucagcaacaga

SEQ ID NO: 909210 - RNA, 19 nt, Homo sapiens
  misc_RNA (1)...(19): siRNA sense strand
caaauccaagcaguuguuu

SEQ ID NO: 909211 - RNA, 19 nt, Homo sapiens
  misc_RNA (1)...(19): siRNA sense strand
acaaugacugcauguuaaa

SEQ ID NO: 909212 - RNA, 19 nt, Homo sapiens
  misc_RNA (1)...(19): siRNA sense strand
gagaaaaccaaaaggacua

SEQ ID NO: 909213 - RNA, 19 nt, Homo sapiens
  misc_RNA (1)...(19): siRNA sense strand
gagaugguuguguaaugaa

SEQ ID NO: 909214 - RNA, 19 nt, Homo sapiens
  misc_RNA (1)...(19): siRNA sense strand
acagaaccuuacuucagaa

SEQ ID NO: 909215 - RNA, 19 nt, Homo sapiens
  misc_RNA (1)...(19): siRNA sense strand
ggauuaauuaggagaaagu

SEQ ID NO: 909216 - RNA, 19 nt, Homo sapiens
  misc_RNA (1)...(19): siRNA sense strand
gaauugacaggcauaaagc

SEQ ID NO: 909217 - RNA, 19 nt, Homo sapiens
  misc_RNA (1)...(19): siRNA sense strand
uucauaagauucagcaaca

SEQ ID NO: 909218 - RNA, 19 nt, Homo sapiens
  misc_RNA (1)...(19): siRNA sense strand
uugcuuaucucaguucugu

SEQ ID NO: 909219 - RNA, 19 nt, Homo sapiens
  misc_RNA (1)...(19): siRNA sense strand
agagcaacuuacaagcuuu

SEQ ID NO: 909220 - RNA, 19 nt, Homo sapiens
  misc_RNA (1)...(19): siRNA sense strand
aagcaaauccaagcaguug

SEQ ID NO: 909221 - RNA, 19 nt, Homo sapiens
  misc_RNA (1)...(19): siRNA sense strand
agaugguuguguaaugaaa

SEQ ID NO: 909222 - RNA, 19 nt, Homo sapiens
  misc_RNA (1)...(19): siRNA sense strand
ucgacaugcuggaaugaug

SEQ ID NO: 909223 - RNA, 19 nt, Homo sapiens
  misc_RNA (1)...(19): siRNA sense strand
cuuacaagcuuuucuauag

SEQ ID NO: 909224 - RNA, 19 nt, Homo sapiens
  misc_RNA (1)...(19): siRNA sense strand
aggagucccucugaagauu

SEQ ID NO: 909225 - RNA, 19 nt, Homo sapiens
  misc_RNA (1)...(19): siRNA sense strand
caacuuacaagcuuuucua

SEQ ID NO: 909226 - RNA, 19 nt, Homo sapiens
  misc_RNA (1)...(19): siRNA sense strand
ugaaggagucccucugaag

SEQ ID NO: 909227 - RNA, 19 nt, Homo sapiens
  misc_RNA (1)...(19): siRNA sense strand
ggaacauccaauucuuuca

SEQ ID NO: 909228 - RNA, 19 nt, Homo sapiens
  misc_RNA (1)...(19): siRNA sense strand
uuaaacacagcaucacaga

SEQ ID NO: 909229 - RNA, 19 nt, Homo sapiens
  misc_RNA (1)...(19): siRNA sense strand
gaaccuacagaaccuuacu

SEQ ID NO: 909230 - RNA, 19 nt, Homo sapiens
  misc_RNA (1)...(19): siRNA sense strand
agaagcccaauaugaguaa

SEQ ID NO: 909231 - RNA, 19 nt, Homo sapiens
  misc_RNA (1)...(19): siRNA sense strand
ucucagagcaacuuacaag

SEQ ID NO: 909232 - RNA, 19 nt, Homo sapiens
  misc_RNA (1)...(19): siRNA sense strand
ccaccauagccaggaaaua

SEQ ID NO: 909233 - RNA, 19 nt, Homo sapiens
  misc_RNA (1)...(19): siRNA sense strand
ucagaagcccaauaugagu

SEQ ID NO: 909234 - RNA, 19 nt, Homo sapiens
  misc_RNA (1)...(19): siRNA sense strand
cggaauacugcccuucuug

SEQ ID NO: 909235 - RNA, 19 nt, Homo sapiens
  misc_RNA (1)...(19): siRNA sense strand
ccucaggaacauccaauuc

SEQ ID NO: 909236 - RNA, 19 nt, Homo sapiens
  misc_RNA (1)...(19): siRNA sense strand
ggaccagcaugcuuuucuu

SEQ ID NO: 909237 - RNA, 19 nt, Homo sapiens
  misc_RNA (1)...(19): siRNA sense strand
auaaagcaggcucaaguug

SEQ ID NO: 909238 - RNA, 19 nt, Homo sapiens
  misc_RNA (1)...(19): siRNA sense strand
aacauccaauucuuucaga

SEQ ID NO: 909239 - RNA, 19 nt, Homo sapiens
  misc_RNA (1)...(19): siRNA sense strand
ccucugaagauuugcuuau

SEQ ID NO: 909240 - RNA, 19 nt, Homo sapiens
  misc_RNA (1)...(19): siRNA sense strand
gaaaaggggaauauucucu

SEQ ID NO: 909241 - RNA, 19 nt, Homo sapiens
  misc_RNA (1)...(19): siRNA sense strand
gaauacugcccuucuugcu

SEQ ID NO: 909242 - RNA, 19 nt, Homo sapiens
  misc_RNA (1)...(19): siRNA sense strand
ucggaauacugcccuucuu

SEQ ID NO: 909243 - RNA, 19 nt, Homo sapiens
  misc_RNA (1)...(19): siRNA sense strand
gccagcaaauggaaaucuc

SEQ ID NO: 909244 - RNA, 19 nt, Homo sapiens
  misc_RNA (1)...(19): siRNA sense strand
gccuggaguaugaguguaa

SEQ ID NO: 909245 - RNA, 19 nt, Homo sapiens
  misc_RNA (1)...(19): siRNA sense strand
uggaaccuacagaaccuua

SEQ ID NO: 909246 - RNA, 19 nt, Homo sapiens
  misc_RNA (1)...(19): siRNA sense strand
auuacaaggucguugaaca

SEQ ID NO: 909247 - RNA, 19 nt, Homo sapiens
  misc_RNA (1)...(19): siRNA sense strand
caggaaguaggaauagaau

SEQ ID NO: 909248 - RNA, 19 nt, Homo sapiens
  misc_RNA (1)...(19): siRNA sense strand
gaccagcaugcuuuucuua

SEQ ID NO: 909249 - RNA, 19 nt, Homo sapiens
  misc_RNA (1)...(19): siRNA sense strand
caagaauuuggcuguggaa

SEQ ID NO: 909250 - RNA, 19 nt, Homo sapiens
  misc_RNA (1)...(19): siRNA sense strand
cuacguggauggccauguc

SEQ ID NO: 909251 - RNA, 19 nt, Homo sapiens
  misc_RNA (1)...(19): siRNA sense strand
caagaucaccaggaacuuc

SEQ ID NO: 909252 - RNA, 19 nt, Homo sapiens
  misc_RNA (1)...(19): siRNA sense strand
gcuggaaggagcggaauuc

SEQ ID NO: 909253 - RNA, 19 nt, Homo sapiens
  misc_RNA (1)...(19): siRNA sense strand
ucaguaagcuguauugguu

SEQ ID NO: 909254 - RNA, 19 nt, Homo sapiens
  misc_RNA (1)...(19): siRNA sense strand
gaaccaaagagcccacuua

SEQ ID NO: 909255 - RNA, 19 nt, Homo sapiens
  misc_RNA (1)...(19): siRNA sense strand
aaacagauuuacugcauga

SEQ ID NO: 909256 - RNA, 19 nt, Homo sapiens
  misc_RNA (1)...(19): siRNA sense strand
gagaaguaguuaacaugaa

SEQ ID NO: 909257 - RNA, 19 nt, Homo sapiens
  misc_RNA (1)...(19): siRNA sense strand
gcacaguuguuacuuugga

SEQ ID NO: 909258 - RNA, 19 nt, Homo sapiens
  misc_RNA (1)...(19): siRNA sense strand
uuaaucaucuggacacuga

SEQ ID NO: 909259 - RNA, 19 nt, Homo sapiens
  misc_RNA (1)...(19): siRNA sense strand
gcuaaucugcacauuguua

SEQ ID NO: 909260 - RNA, 19 nt, Homo sapiens
  misc_RNA (1)...(19): siRNA sense strand
gaugcacaguuguuacuuu

SEQ ID NO: 909261 - RNA, 19 nt, Homo sapiens
  misc_RNA (1)...(19): siRNA sense strand
gaagaugcuuuggacuauu

SEQ ID NO: 909262 - RNA, 19 nt, Homo sapiens
  misc_RNA (1)...(19): siRNA sense strand
gaguacgaguucauaguaa

SEQ ID NO: 909263 - RNA, 19 nt, Homo sapiens
  misc_RNA (1)...(19): siRNA sense strand
ucuaauggaucaaucagaa

SEQ ID NO: 909264 - RNA, 19 nt, Homo sapiens
  misc_RNA (1)...(19): siRNA sense strand
gggaaagguuauaaacaga

SEQ ID NO: 909265 - RNA, 19 nt, Homo sapiens
  misc_RNA (1)...(19): siRNA sense strand
gacacaugaugaaggauuu

SEQ ID NO: 909266 - RNA, 19 nt, Homo sapiens
  misc_RNA (1)...(19): siRNA sense strand
ggugggaucuuaaucaucu

SEQ ID NO: 909267 - RNA, 19 nt, Homo sapiens
  misc_RNA (1)...(19): siRNA sense strand
guuggaaugugcaagauga

SEQ ID NO: 909268 - RNA, 19 nt, Homo sapiens
  misc_RNA (1)...(19): siRNA sense strand
uagagaagaccuuuacaaa

SEQ ID NO: 909269 - RNA, 19 nt, Homo sapiens
  misc_RNA (1)...(19): siRNA sense strand
ggaacaauuugcuaaucug

SEQ ID NO: 909270 - RNA, 19 nt, Homo sapiens
  misc_RNA (1)...(19): siRNA sense strand
uuggaaaccuggagcuaua

SEQ ID NO: 909271 - RNA, 19 nt, Homo sapiens
  misc_RNA (1)...(19): siRNA sense strand
cauauuauuugugcuggua

SEQ ID NO: 909272 - RNA, 19 nt, Homo sapiens
  misc_RNA (1)...(19): siRNA sense strand
ggauauccuggacuucuua

SEQ ID NO: 909273 - RNA, 19 nt, Homo sapiens
  misc_RNA (1)...(19): siRNA sense strand
gagaagaugcacaguuguu

SEQ ID NO: 909274 - RNA, 19 nt, Homo sapiens
  misc_RNA (1)...(19): siRNA sense strand
aagaugcuuuggacuauuu

SEQ ID NO: 909275 - RNA, 19 nt, Homo sapiens
  misc_RNA (1)...(19): siRNA sense strand
gaggaacaauuugcuaauc

SEQ ID NO: 909276 - RNA, 19 nt, Homo sapiens
  misc_RNA (1)...(19): siRNA sense strand
aggagaagaugcacaguug

SEQ ID NO: 909277 - RNA, 19 nt, Homo sapiens
  misc_RNA (1)...(19): siRNA sense strand
caacgaguacgaguucaua

SEQ ID NO: 909278 - RNA, 19 nt, Homo sapiens
  misc_RNA (1)...(19): siRNA sense strand
aaaggaaggauucauuuga

SEQ ID NO: 909279 - RNA, 19 nt, Homo sapiens
  misc_RNA (1)...(19): siRNA sense strand
cgaguacgaguucauagua

SEQ ID NO: 909280 - RNA, 19 nt, Homo sapiens
  misc_RNA (1)...(19): siRNA sense strand
ggacugacccaugugacua

SEQ ID NO: 909281 - RNA, 19 nt, Homo sapiens
  misc_RNA (1)...(19): siRNA sense strand
gguauagacacaucaaaga

SEQ ID NO: 909282 - RNA, 19 nt, Homo sapiens
  misc_RNA (1)...(19): siRNA sense strand
gcuuuggacuauuugauug

SEQ ID NO: 909283 - RNA, 19 nt, Homo sapiens
  misc_RNA (1)...(19): siRNA sense strand
guaacucaauuucaucagu

SEQ ID NO: 909284 - RNA, 19 nt, Homo sapiens
  misc_RNA (1)...(19): siRNA sense strand
gguuacccuuccaauauuu

SEQ ID NO: 909285 - RNA, 19 nt, Homo sapiens
  misc_RNA (1)...(19): siRNA sense strand
gcaaggaugaauucucaga

SEQ ID NO: 909286 - RNA, 19 nt, Homo sapiens
  misc_RNA (1)...(19): siRNA sense strand
acaaagaaagagaguauga

SEQ ID NO: 909287 - RNA, 19 nt, Homo sapiens
  misc_RNA (1)...(19): siRNA sense strand
ucagagaaguaguuaacau

SEQ ID NO: 909288 - RNA, 19 nt, Homo sapiens
  misc_RNA (1)...(19): siRNA sense strand
ugaggaggaugcacugguu

SEQ ID NO: 909289 - RNA, 19 nt, Homo sapiens
  misc_RNA (1)...(19): siRNA sense strand
ccaaagagcccacuuaccu

SEQ ID NO: 909290 - RNA, 19 nt, Homo sapiens
  misc_RNA (1)...(19): siRNA sense strand
acaaaggaaggauucauuu

SEQ ID NO: 909291 - RNA, 19 nt, Homo sapiens
  misc_RNA (1)...(19): siRNA sense strand
agaagaugcuuuggacuau

SEQ ID NO: 909292 - RNA, 19 nt, Homo sapiens
  misc_RNA (1)...(19): siRNA sense strand
ggaucaaucagaauauaug

SEQ ID NO: 909293 - RNA, 19 nt, Homo sapiens
  misc_RNA (1)...(19): siRNA sense strand
guaguuaacaugaaagaag

SEQ ID NO: 909294 - RNA, 19 nt, Homo sapiens
  misc_RNA (1)...(19): siRNA sense strand
uugcuaaucugcacauugu

SEQ ID NO: 909295 - RNA, 19 nt, Homo sapiens
  misc_RNA (1)...(19): siRNA sense strand
gaggagaagaugcacaguu

SEQ ID NO: 909296 - RNA, 19 nt, Homo sapiens
  misc_RNA (1)...(19): siRNA sense strand
gaaccaguuacacguuuga

SEQ ID NO: 909297 - RNA, 19 nt, Homo sapiens
  misc_RNA (1)...(19): siRNA sense strand
aagaagaugcuuuggacua

SEQ ID NO: 909298 - RNA, 19 nt, Homo sapiens
  misc_RNA (1)...(19): siRNA sense strand
cuacgagaauuuaguggau

SEQ ID NO: 909299 - RNA, 19 nt, Homo sapiens
  misc_RNA (1)...(19): siRNA sense strand
caaagaaagagaguaugaa

SEQ ID NO: 909300 - RNA, 19 nt, Homo sapiens
  misc_RNA (1)...(19): siRNA sense strand
uugaugaacugcagcaugu

SEQ ID NO: 909301 - RNA, 19 nt, Homo sapiens
  misc_RNA (1)...(19): siRNA sense strand
gaacaaacaaaggaaggau

SEQ ID NO: 909302 - RNA, 19 nt, Homo sapiens
  misc_RNA (1)...(19): siRNA sense strand
gaugucagagaaguaguua

SEQ ID NO: 909303 - RNA, 19 nt, Homo sapiens
  misc_RNA (1)...(19): siRNA sense strand
ggaaagguuauaaacagau

SEQ ID NO: 909304 - RNA, 19 nt, Homo sapiens
  misc_RNA (1)...(19): siRNA sense strand
cugauggccugguaaaugu

SEQ ID NO: 909305 - RNA, 19 nt, Homo sapiens
  misc_RNA (1)...(19): siRNA sense strand
ugaugaugaugcauuguug

SEQ ID NO: 909306 - RNA, 19 nt, Homo sapiens
  misc_RNA (1)...(19): siRNA sense strand
caguguauauucagcaugu

SEQ ID NO: 909307 - RNA, 19 nt, Homo sapiens
  misc_RNA (1)...(19): siRNA sense strand
agacucacuuggugcauau

SEQ ID NO: 909308 - RNA, 19 nt, Homo sapiens
  misc_RNA (1)...(19): siRNA sense strand
gcaccaacgaguacgaguu

SEQ ID NO: 909309 - RNA, 19 nt, Homo sapiens
  misc_RNA (1)...(19): siRNA sense strand
aaggaaggauucauuugau

SEQ ID NO: 909310 - RNA, 19 nt, Homo sapiens
  misc_RNA (1)...(19): siRNA sense strand
gaggaggaugcacugguua

SEQ ID NO: 909311 - RNA, 19 nt, Homo sapiens
  misc_RNA (1)...(19): siRNA sense strand
ugggaaagguuauaaacag

SEQ ID NO: 909312 - RNA, 19 nt, Homo sapiens
  misc_RNA (1)...(19): siRNA sense strand
agaagaugcacaguuguua

SEQ ID NO: 909313 - RNA, 19 nt, Homo sapiens
  misc_RNA (1)...(19): siRNA sense strand
caaagagcccacuuaccuu

SEQ ID NO: 909314 - RNA, 19 nt, Homo sapiens
  misc_RNA (1)...(19): siRNA sense strand
ggaggaacaaacaaaggaa

SEQ ID NO: 909315 - RNA, 19 nt, Homo sapiens
  misc_RNA (1)...(19): siRNA sense strand
aagguuaaauguacuacga

SEQ ID NO: 909316 - RNA, 19 nt, Homo sapiens
  misc_RNA (1)...(19): siRNA sense strand
gcuauagagaagaccuuua

SEQ ID NO: 909317 - RNA, 19 nt, Homo sapiens
  misc_RNA (1)...(19): siRNA sense strand
guacugauggcacugugaa

SEQ ID NO: 909318 - RNA, 19 nt, Homo sapiens
  misc_RNA (1)...(19): siRNA sense strand
gaugaaccaguuacacguu

SEQ ID NO: 909319 - RNA, 19 nt, Homo sapiens
  misc_RNA (1)...(19): siRNA sense strand
gaugaugucacucaaguac

SEQ ID NO: 909320 - RNA, 19 nt, Homo sapiens
  misc_RNA (1)...(19): siRNA sense strand
uacgagaauuuaguggaua

SEQ ID NO: 909321 - RNA, 19 nt, Homo sapiens
  misc_RNA (1)...(19): siRNA sense strand
gaagaugcacaguuguuac

SEQ ID NO: 909322 - RNA, 19 nt, Homo sapiens
  misc_RNA (1)...(19): siRNA sense strand
augcaaggaugaauucuca

SEQ ID NO: 909323 - RNA, 19 nt, Homo sapiens
  misc_RNA (1)...(19): siRNA sense strand
uauuugugcugguacagaa

SEQ ID NO: 909324 - RNA, 19 nt, Homo sapiens
  misc_RNA (1)...(19): siRNA sense strand
gagcccacuuaccuucuug

SEQ ID NO: 909325 - RNA, 19 nt, Homo sapiens
  misc_RNA (1)...(19): siRNA sense strand
gcauauucagagacacaua

SEQ ID NO: 909326 - RNA, 19 nt, Homo sapiens
  misc_RNA (1)...(19): siRNA sense strand
gguggccuauaucaugaaa

SEQ ID NO: 909327 - RNA, 19 nt, Homo sapiens
  misc_RNA (1)...(19): siRNA sense strand
ugacacaugaugaaggauu

SEQ ID NO: 909328 - RNA, 19 nt, Homo sapiens
  misc_RNA (1)...(19): siRNA sense strand
cagcaaucccaacauggua

SEQ ID NO: 909329 - RNA, 19 nt, Homo sapiens
  misc_RNA (1)...(19): siRNA sense strand
aagacucacuuggugcaua

SEQ ID NO: 909330 - RNA, 19 nt, Homo sapiens
  misc_RNA (1)...(19): siRNA sense strand
guacgaguucauaguaaug

SEQ ID NO: 909331 - RNA, 19 nt, Homo sapiens
  misc_RNA (1)...(19): siRNA sense strand
ggaacaaacaaaggaagga

SEQ ID NO: 909332 - RNA, 19 nt, Homo sapiens
  misc_RNA (1)...(19): siRNA sense strand
cagagaaguaguuaacaug

SEQ ID NO: 909333 - RNA, 19 nt, Homo sapiens
  misc_RNA (1)...(19): siRNA sense strand
ggaugucagagaaguaguu

SEQ ID NO: 909334 - RNA, 19 nt, Homo sapiens
  misc_RNA (1)...(19): siRNA sense strand
ccaguuacacguuugaaca

SEQ ID NO: 909335 - RNA, 19 nt, Homo sapiens
  misc_RNA (1)...(19): siRNA sense strand
ucagagacacauagugaug

SEQ ID NO: 909336 - RNA, 19 nt, Homo sapiens
  misc_RNA (1)...(19): siRNA sense strand
agagaaguaguuaacauga

SEQ ID NO: 909337 - RNA, 19 nt, Homo sapiens
  misc_RNA (1)...(19): siRNA sense strand
ggucugggaaagguuauaa

SEQ ID NO: 909338 - RNA, 19 nt, Homo sapiens
  misc_RNA (1)...(19): siRNA sense strand
gggaugcaaggaugaauuc

SEQ ID NO: 909339 - RNA, 19 nt, Homo sapiens
  misc_RNA (1)...(19): siRNA sense strand
ggaaaccuggagcuauaga

SEQ ID NO: 909340 - RNA, 19 nt, Homo sapiens
  misc_RNA (1)...(19): siRNA sense strand
uuugauugguggccuauau

SEQ ID NO: 909341 - RNA, 19 nt, Homo sapiens
  misc_RNA (1)...(19): siRNA sense strand
ugaaccaguuacacguuug

SEQ ID NO: 909342 - RNA, 19 nt, Homo sapiens
  misc_RNA (1)...(19): siRNA sense strand
gaugaaggauuuuauuggu

SEQ ID NO: 909343 - RNA, 19 nt, Homo sapiens
  misc_RNA (1)...(19): siRNA sense strand
ggaaaagauugaggaacaa

SEQ ID NO: 909344 - RNA, 19 nt, Homo sapiens
  misc_RNA (1)...(19): siRNA sense strand
augcugggaugcucgagua

SEQ ID NO: 909345 - RNA, 19 nt, Homo sapiens
  misc_RNA (1)...(19): siRNA sense strand
gaugaacugcagcauguca

SEQ ID NO: 909346 - RNA, 19 nt, Homo sapiens
  misc_RNA (1)...(19): siRNA sense strand
uauccuggacuucuuaaug

SEQ ID NO: 909347 - RNA, 19 nt, Homo sapiens
  misc_RNA (1)...(19): siRNA sense strand
cuaaucugcacauuguuaa

SEQ ID NO: 909348 - RNA, 19 nt, Homo sapiens
  misc_RNA (1)...(19): siRNA sense strand
caaccuguaacucaauuuc

SEQ ID NO: 909349 - RNA, 19 nt, Homo sapiens
  misc_RNA (1)...(19): siRNA sense strand
gacaguguauauucagcau

SEQ ID NO: 909350 - RNA, 19 nt, Homo sapiens
  misc_RNA (1)...(19): siRNA sense strand
aggaaggauucauuugaug

SEQ ID NO: 909351 - RNA, 19 nt, Homo sapiens
  misc_RNA (1)...(19): siRNA sense strand
acaaacaaaggaaggauuc

SEQ ID NO: 909352 - RNA, 19 nt, Homo sapiens
  misc_RNA (1)...(19): siRNA sense strand
gcucgaguagccagagaaa

SEQ ID NO: 909353 - RNA, 19 nt, Homo sapiens
  misc_RNA (1)...(19): siRNA sense strand
gaacagaaaugugaaguuu

SEQ ID NO: 909354 - RNA, 19 nt, Homo sapiens
  misc_RNA (1)...(19): siRNA sense strand
gaaagcaaauugaccuaua

SEQ ID NO: 909355 - RNA, 19 nt, Homo sapiens
  misc_RNA (1)...(19): siRNA sense strand
gaaaggauaugaggacuaa

SEQ ID NO: 909356 - RNA, 19 nt, Homo sapiens
  misc_RNA (1)...(19): siRNA sense strand
agagagaaaugguguauua

SEQ ID NO: 909357 - RNA, 19 nt, Homo sapiens
  misc_RNA (1)...(19): siRNA sense strand
gaagagagauaaguugaug

SEQ ID NO: 909358 - RNA, 19 nt, Homo sapiens
  misc_RNA (1)...(19): siRNA sense strand
ggagauugcuugcagagaa

SEQ ID NO: 909359 - RNA, 19 nt, Homo sapiens
  misc_RNA (1)...(19): siRNA sense strand
gaagaucaauuucaagaag

SEQ ID NO: 909360 - RNA, 19 nt, Homo sapiens
  misc_RNA (1)...(19): siRNA sense strand
uguauuaccugacugcuua

SEQ ID NO: 909361 - RNA, 19 nt, Homo sapiens
  misc_RNA (1)...(19): siRNA sense strand
cagagaaacucaaagaaga

SEQ ID NO: 909362 - RNA, 19 nt, Homo sapiens
  misc_RNA (1)...(19): siRNA sense strand
gcaagccauucgaauaauu

SEQ ID NO: 909363 - RNA, 19 nt, Homo sapiens
  misc_RNA (1)...(19): siRNA sense strand
gaagaagaaagcaaauuga

SEQ ID NO: 909364 - RNA, 19 nt, Homo sapiens
  misc_RNA (1)...(19): siRNA sense strand
cagugaagcugcaauaaug

SEQ ID NO: 909365 - RNA, 19 nt, Homo sapiens
  misc_RNA (1)...(19): siRNA sense strand
uaugaggacuaaacagaua

SEQ ID NO: 909366 - RNA, 19 nt, Homo sapiens
  misc_RNA (1)...(19): siRNA sense strand
gcaaauugaccuauacaga

SEQ ID NO: 909367 - RNA, 19 nt, Homo sapiens
  misc_RNA (1)...(19): siRNA sense strand
gagaagcaaacauuacuaa

SEQ ID NO: 909368 - RNA, 19 nt, Homo sapiens
  misc_RNA (1)...(19): siRNA sense strand
gcacuucuccucuugcaaa

SEQ ID NO: 909369 - RNA, 19 nt, Homo sapiens
  misc_RNA (1)...(19): siRNA sense strand
gagauugcuugcagagaaa

SEQ ID NO: 909370 - RNA, 19 nt, Homo sapiens
  misc_RNA (1)...(19): siRNA sense strand
gagauaaguugauguccau

SEQ ID NO: 909371 - RNA, 19 nt, Homo sapiens
  misc_RNA (1)...(19): siRNA sense strand
gaagcugcaauaaugaaua

SEQ ID NO: 909372 - RNA, 19 nt, Homo sapiens
  misc_RNA (1)...(19): siRNA sense strand
gaagcaaacauuacuaaag

SEQ ID NO: 909373 - RNA, 19 nt, Homo sapiens
  misc_RNA (1)...(19): siRNA sense strand
gauaugaggacuaaacaga

SEQ ID NO: 909374 - RNA, 19 nt, Homo sapiens
  misc_RNA (1)...(19): siRNA sense strand
ggaauacaaagaacuaguu

SEQ ID NO: 909375 - RNA, 19 nt, Homo sapiens
  misc_RNA (1)...(19): siRNA sense strand
gcaaacuuaucaguacuug

SEQ ID NO: 909376 - RNA, 19 nt, Homo sapiens
  misc_RNA (1)...(19): siRNA sense strand
uagaggaaaugacagagaa

SEQ ID NO: 909377 - RNA, 19 nt, Homo sapiens
  misc_RNA (1)...(19): siRNA sense strand
gcagagaaacucaaagaag

SEQ ID NO: 909378 - RNA, 19 nt, Homo sapiens
  misc_RNA (1)...(19): siRNA sense strand
aaauugaccuauacagaga

SEQ ID NO: 909379 - RNA, 19 nt, Homo sapiens
  misc_RNA (1)...(19): siRNA sense strand
gcugcaagccauucgaaua

SEQ ID NO: 909380 - RNA, 19 nt, Homo sapiens
  misc_RNA (1)...(19): siRNA sense strand
gcagaagagagauaaguug

SEQ ID NO: 909381 - RNA, 19 nt, Homo sapiens
  misc_RNA (1)...(19): siRNA sense strand
ugaagaagaaagcaaauug

SEQ ID NO: 909382 - RNA, 19 nt, Homo sapiens
  misc_RNA (1)...(19): siRNA sense strand
gcuaaucagucaauagaac

SEQ ID NO: 909383 - RNA, 19 nt, Homo sapiens
  misc_RNA (1)...(19): siRNA sense strand
ggacuaaacagauacaaaa

SEQ ID NO: 909384 - RNA, 19 nt, Homo sapiens
  misc_RNA (1)...(19): siRNA sense strand
gaaaagcuguuagaagguu

SEQ ID NO: 909385 - RNA, 19 nt, Homo sapiens
  misc_RNA (1)...(19): siRNA sense strand
ggagaagcaaacauuacua

SEQ ID NO: 909386 - RNA, 19 nt, Homo sapiens
  misc_RNA (1)...(19): siRNA sense strand
guggaaaggucugaaacuu

SEQ ID NO: 909387 - RNA, 19 nt, Homo sapiens
  misc_RNA (1)...(19): siRNA sense strand
ccacagugcauuccaguga

SEQ ID NO: 909388 - RNA, 19 nt, Homo sapiens
  misc_RNA (1)...(19): siRNA sense strand
agaggaauaugaccaggaa

SEQ ID NO: 909389 - RNA, 19 nt, Homo sapiens
  misc_RNA (1)...(19): siRNA sense strand
gaauacaaagaacuaguug

SEQ ID NO: 909390 - RNA, 19 nt, Homo sapiens
  misc_RNA (1)...(19): siRNA sense strand
gcaugcacuucuccucuug

SEQ ID NO: 909391 - RNA, 19 nt, Homo sapiens
  misc_RNA (1)...(19): siRNA sense strand
aauagaaccuuugggaaga

SEQ ID NO: 909392 - RNA, 19 nt, Homo sapiens
  misc_RNA (1)...(19): siRNA sense strand
ggagguagaggaaaugaca

SEQ ID NO: 909393 - RNA, 19 nt, Homo sapiens
  misc_RNA (1)...(19): siRNA sense strand
aaacuuaucaguacuugga

SEQ ID NO: 909394 - RNA, 19 nt, Homo sapiens
  misc_RNA (1)...(19): siRNA sense strand
gagaaaugguguauuaccu

SEQ ID NO: 909395 - RNA, 19 nt, Homo sapiens
  misc_RNA (1)...(19): siRNA sense strand
cagaggagaagcaaacauu

SEQ ID NO: 909396 - RNA, 19 nt, Homo sapiens
  misc_RNA (1)...(19): siRNA sense strand
ggaccaauagcaaacuuau

SEQ ID NO: 909397 - RNA, 19 nt, Homo sapiens
  misc_RNA (1)...(19): siRNA sense strand
ggaacagaaaugugaaguu

SEQ ID NO: 909398 - RNA, 19 nt, Homo sapiens
  misc_RNA (1)...(19): siRNA sense strand
gaagagcccacagugcauu

SEQ ID NO: 909399 - RNA, 19 nt, Homo sapiens
  misc_RNA (1)...(19): siRNA sense strand
ggaauaugaccaggaagaa

SEQ ID NO: 909400 - RNA, 19 nt, Homo sapiens
  misc_RNA (1)...(19): siRNA sense strand
cacccacccucagaaguua

SEQ ID NO: 909401 - RNA, 19 nt, Homo sapiens
  misc_RNA (1)...(19): siRNA sense strand
gaagaaaggaagaggaaaa

SEQ ID NO: 909402 - RNA, 19 nt, Homo sapiens
  misc_RNA (1)...(19): siRNA sense strand
gauaaguugauguccauga

SEQ ID NO: 909403 - RNA, 19 nt, Homo sapiens
  misc_RNA (1)...(19): siRNA sense strand
cagaagagagauaaguuga

SEQ ID NO: 909404 - RNA, 19 nt, Homo sapiens
  misc_RNA (1)...(19): siRNA sense strand
caaagacccauacaucaca

SEQ ID NO: 909405 - RNA, 19 nt, Homo sapiens
  misc_RNA (1)...(19): siRNA sense strand
ggacuuuguggaacagaaa

SEQ ID NO: 909406 - RNA, 19 nt, Homo sapiens
  misc_RNA (1)...(19): siRNA sense strand
aagcaaugaugguccagaa

SEQ ID NO: 909407 - RNA, 19 nt, Homo sapiens
  misc_RNA (1)...(19): siRNA sense strand
ucaggaauacaaagaacua

SEQ ID NO: 909408 - RNA, 19 nt, Homo sapiens
  misc_RNA (1)...(19): siRNA sense strand
aacacuaucucaagcagaa

SEQ ID NO: 909409 - RNA, 19 nt, Homo sapiens
  misc_RNA (1)...(19): siRNA sense strand
cugcaagccauucgaauaa

SEQ ID NO: 909410 - RNA, 19 nt, Homo sapiens
  misc_RNA (1)...(19): siRNA sense strand
gcaaagacccauacaucac

SEQ ID NO: 909411 - RNA, 19 nt, Homo sapiens
  misc_RNA (1)...(19): siRNA sense strand
caucuuggacuuuguggaa

SEQ ID NO: 909412 - RNA, 19 nt, Homo sapiens
  misc_RNA (1)...(19): siRNA sense strand
acagagaaaccagaaauga

SEQ ID NO: 909413 - RNA, 19 nt, Homo sapiens
  misc_RNA (1)...(19): siRNA sense strand
ugacagagaaaccagaaau

SEQ ID NO: 909414 - RNA, 19 nt, Homo sapiens
  misc_RNA (1)...(19): siRNA sense strand
caagagagaaaugguguau

SEQ ID NO: 909415 - RNA, 19 nt, Homo sapiens
  misc_RNA (1)...(19): siRNA sense strand
uaucaguacuuggaacaga

SEQ ID NO: 909416 - RNA, 19 nt, Homo sapiens
  misc_RNA (1)...(19): siRNA sense strand
aaagcaaauugaccuauac

SEQ ID NO: 909417 - RNA, 19 nt, Homo sapiens
  misc_RNA (1)...(19): siRNA sense strand
gaacuucggcaacgagaac

SEQ ID NO: 909418 - RNA, 19 nt, Homo sapiens
  misc_RNA (1)...(19): siRNA sense strand
agaggagaagcaaacauua

SEQ ID NO: 909419 - RNA, 19 nt, Homo sapiens
  misc_RNA (1)...(19): siRNA sense strand
ccagugaagcugcaauaau

SEQ ID NO: 909420 - RNA, 19 nt, Homo sapiens
  misc_RNA (1)...(19): siRNA sense strand
ucaagcagaagagagauaa

SEQ ID NO: 909421 - RNA, 19 nt, Homo sapiens
  misc_RNA (1)...(19): siRNA sense strand
ggaaaugacagagaaacca

SEQ ID NO: 909422 - RNA, 19 nt, Homo sapiens
  misc_RNA (1)...(19): siRNA sense strand
guagaggaaaugacagaga

SEQ ID NO: 909423 - RNA, 19 nt, Homo sapiens
  misc_RNA (1)...(19): siRNA sense strand
gcaaugaugguccagaaaa

SEQ ID NO: 909424 - RNA, 19 nt, Homo sapiens
  misc_RNA (1)...(19): siRNA sense strand
gaggagaagcaaacauuac

SEQ ID NO: 909425 - RNA, 19 nt, Homo sapiens
  misc_RNA (1)...(19): siRNA sense strand
agagaaaccagaaaugaca

SEQ ID NO: 909426 - RNA, 19 nt, Homo sapiens
  misc_RNA (1)...(19): siRNA sense strand
auagcaaacuuaucaguac

SEQ ID NO: 909427 - RNA, 19 nt, Homo sapiens
  misc_RNA (1)...(19): siRNA sense strand
aauaugaccaggaagaaga

SEQ ID NO: 909428 - RNA, 19 nt, Homo sapiens
  misc_RNA (1)...(19): siRNA sense strand
caucaggaauacaaagaac

SEQ ID NO: 909429 - RNA, 19 nt, Homo sapiens
  misc_RNA (1)...(19): siRNA sense strand
ugaugaagaagaaagcaaa

SEQ ID NO: 909430 - RNA, 19 nt, Homo sapiens
  misc_RNA (1)...(19): siRNA sense strand
gacagagaaaccagaaaug

SEQ ID NO: 909431 - RNA, 19 nt, Homo sapiens
  misc_RNA (1)...(19): siRNA sense strand
aaguugauguccaugagaa

SEQ ID NO: 909432 - RNA, 19 nt, Homo sapiens
  misc_RNA (1)...(19): siRNA sense strand
aagaagaaaggaagaggaa

SEQ ID NO: 909433 - RNA, 19 nt, Homo sapiens
  misc_RNA (1)...(19): siRNA sense strand
agagaaacucaaagaagaa

SEQ ID NO: 909434 - RNA, 19 nt, Homo sapiens
  misc_RNA (1)...(19): siRNA sense strand
gcacacccacccucagaag

SEQ ID NO: 909435 - RNA, 19 nt, Homo sapiens
  misc_RNA (1)...(19): siRNA sense strand
aaacagaagagcccacagu

SEQ ID NO: 909436 - RNA, 19 nt, Homo sapiens
  misc_RNA (1)...(19): siRNA sense strand
gaauaugaccaggaagaag

SEQ ID NO: 909437 - RNA, 19 nt, Homo sapiens
  misc_RNA (1)...(19): siRNA sense strand
cacagugcauuccagugaa

SEQ ID NO: 909438 - RNA, 19 nt, Homo sapiens
  misc_RNA (1)...(19): siRNA sense strand
gaugaagaagaaagcaaau

SEQ ID NO: 909439 - RNA, 19 nt, Homo sapiens
  misc_RNA (1)...(19): siRNA sense strand
accaauagcaaacuuauca

SEQ ID NO: 909440 - RNA, 19 nt, Homo sapiens
  misc_RNA (1)...(19): siRNA sense strand
acacccacccucagaaguu

SEQ ID NO: 909441 - RNA, 19 nt, Homo sapiens
  misc_RNA (1)...(19): siRNA sense strand
aaaguggaaaggucugaaa

SEQ ID NO: 909442 - RNA, 19 nt, Homo sapiens
  misc_RNA (1)...(19): siRNA sense strand
uaaccgauggcucugaugu

SEQ ID NO: 909443 - RNA, 19 nt, Homo sapiens
  misc_RNA (1)...(19): siRNA sense strand
uacaaaauauggagcagaa

SEQ ID NO: 909444 - RNA, 19 nt, Homo sapiens
  misc_RNA (1)...(19): siRNA sense strand
uacagagauucaucaggaa

SEQ ID NO: 909445 - RNA, 19 nt, Homo sapiens
  misc_RNA (1)...(19): siRNA sense strand
uagaaccuuugggaagaaa

SEQ ID NO: 909446 - RNA, 19 nt, Homo sapiens
  misc_RNA (1)...(19): siRNA sense strand
gugaagcugcaauaaugaa

SEQ ID NO: 909447 - RNA, 19 nt, Homo sapiens
  misc_RNA (1)...(19): siRNA sense strand
gcauuuugcuaaucaguca

SEQ ID NO: 909448 - RNA, 19 nt, Homo sapiens
  misc_RNA (1)...(19): siRNA sense strand
caauagcaaacuuaucagu

SEQ ID NO: 909449 - RNA, 19 nt, Homo sapiens
  misc_RNA (1)...(19): siRNA sense strand
cagcagaggagaagcaaac

SEQ ID NO: 909450 - RNA, 19 nt, Homo sapiens
  misc_RNA (1)...(19): siRNA sense strand
ugaccuauacagagauuca

SEQ ID NO: 909451 - RNA, 19 nt, Homo sapiens
  misc_RNA (1)...(19): siRNA sense strand
gagaaacucaaagaagaag

SEQ ID NO: 909452 - RNA, 19 nt, Homo sapiens
  misc_RNA (1)...(19): siRNA sense strand
agaaaggauaugaggacua

SEQ ID NO: 909453 - RNA, 19 nt, Homo sapiens
  misc_RNA (1)...(19): siRNA sense strand
gaaagcccaucgucuuaaa

SEQ ID NO: 909454 - RNA, 19 nt, Homo sapiens
  misc_RNA (1)...(19): siRNA sense strand
ggaaaugucuaagaaaguc

SEQ ID NO: 909455 - RNA, 19 nt, Homo sapiens
  misc_RNA (1)...(19): siRNA sense strand
ggucccagcuguccaauca

SEQ ID NO: 909456 - RNA, 19 nt, Homo sapiens
  misc_RNA (1)...(19): siRNA sense strand
ggccaugaaugccgaguuu

SEQ ID NO: 909457 - RNA, 19 nt, Homo sapiens
  misc_RNA (1)...(19): siRNA sense strand
cagaaagcccaucgucuua

SEQ ID NO: 909458 - RNA, 19 nt, Homo sapiens
  misc_RNA (1)...(19): siRNA sense strand
gcaguuugaucuccugguu

SEQ ID NO: 909459 - RNA, 19 nt, Homo sapiens
  misc_RNA (1)...(19): siRNA sense strand
aaacagaaacguaagaaga

SEQ ID NO: 909460 - RNA, 19 nt, Homo sapiens
  misc_RNA (1)...(19): siRNA sense strand
gaucguggcccaugcugua

SEQ ID NO: 909461 - RNA, 19 nt, Homo sapiens
  misc_RNA (1)...(19): siRNA sense strand
ccugaaaucuggccgaaga

SEQ ID NO: 909462 - RNA, 19 nt, Homo sapiens
  misc_RNA (1)...(19): siRNA sense strand
ucagaaagcccaucgucuu

SEQ ID NO: 909463 - RNA, 19 nt, Homo sapiens
  misc_RNA (1)...(19): siRNA sense strand
cgcaggagcccuaggauuu

SEQ ID NO: 909464 - RNA, 19 nt, Homo sapiens
  misc_RNA (1)...(19): siRNA sense strand
gagaaacagaaacguaaga

SEQ ID NO: 909465 - RNA, 19 nt, Homo sapiens
  misc_RNA (1)...(19): siRNA sense strand
gccagagacuuggaaaugu

SEQ ID NO: 909466 - RNA, 19 nt, Homo sapiens
  misc_RNA (1)...(19): siRNA sense strand
ccagagacuuggaaauguc

SEQ ID NO: 909467 - RNA, 19 nt, Homo sapiens
  misc_RNA (1)...(19): siRNA sense strand
ccgagaaacagaaacguaa

SEQ ID NO: 909468 - RNA, 19 nt, Homo sapiens
  misc_RNA (1)...(19): siRNA sense strand
guggugugcuccaaacuca

SEQ ID NO: 909469 - RNA, 19 nt, Homo sapiens
  misc_RNA (1)...(19): siRNA sense strand
gagcauccucccugaaauc

SEQ ID NO: 909470 - RNA, 19 nt, Homo sapiens
  misc_RNA (1)...(19): siRNA sense strand
gaaacagaaacguaagaag

SEQ ID NO: 909471 - RNA, 19 nt, Homo sapiens
  misc_RNA (1)...(19): siRNA sense strand
gaaaaugccagagaucuug

SEQ ID NO: 909472 - RNA, 19 nt, Homo sapiens
  misc_RNA (1)...(19): siRNA sense strand
ccaugaaugccgaguuuga

SEQ ID NO: 909473 - RNA, 19 nt, Homo sapiens
  misc_RNA (1)...(19): siRNA sense strand
gcaggagcccuaggauuuc

SEQ ID NO: 909474 - RNA, 19 nt, Homo sapiens
  misc_RNA (1)...(19): siRNA sense strand
acuuggaaaugucuaagaa

SEQ ID NO: 909475 - RNA, 19 nt, Homo sapiens
  misc_RNA (1)...(19): siRNA sense strand
aacagaaacguaagaagaa

SEQ ID NO: 909476 - RNA, 19 nt, Homo sapiens
  misc_RNA (1)...(19): siRNA sense strand
aguuugaucuccugguuga

SEQ ID NO: 909477 - RNA, 19 nt, Homo sapiens
  misc_RNA (1)...(19): siRNA sense strand
ccgagcauccucccugaaa

SEQ ID NO: 909478 - RNA, 19 nt, Homo sapiens
  misc_RNA (1)...(19): siRNA sense strand
gacaugacucucccuggaa

SEQ ID NO: 909479 - RNA, 19 nt, Homo sapiens
  misc_RNA (1)...(19): siRNA sense strand
cgagcauccucccugaaau

SEQ ID NO: 909480 - RNA, 19 nt, Homo sapiens
  misc_RNA (1)...(19): siRNA sense strand
cagugcggcugcagucaga

SEQ ID NO: 909481 - RNA, 19 nt, Homo sapiens
  misc_RNA (1)...(19): siRNA sense strand
agaaagcccaucgucuuaa

SEQ ID NO: 909482 - RNA, 19 nt, Homo sapiens
  misc_RNA (1)...(19): siRNA sense strand
uuggaaaugucuaagaaag

SEQ ID NO: 909483 - RNA, 19 nt, Homo sapiens
  misc_RNA (1)...(19): siRNA sense strand
agaaacguaagaagaagaa

SEQ ID NO: 909484 - RNA, 19 nt, Homo sapiens
  misc_RNA (1)...(19): siRNA sense strand
ggacgccagagacuuggaa

SEQ ID NO: 909485 - RNA, 19 nt, Homo sapiens
  misc_RNA (1)...(19): siRNA sense strand
gaaaugucuaagaaaguca

SEQ ID NO: 909486 - RNA, 19 nt, Homo sapiens
  misc_RNA (1)...(19): siRNA sense strand
acaugacucucccuggaau

SEQ ID NO: 909487 - RNA, 19 nt, Homo sapiens
  misc_RNA (1)...(19): siRNA sense strand
cgccagagacuuggaaaug

SEQ ID NO: 909488 - RNA, 19 nt, Homo sapiens
  misc_RNA (1)...(19): siRNA sense strand
acagaaacguaagaagaag

SEQ ID NO: 909489 - RNA, 19 nt, Homo sapiens
  misc_RNA (1)...(19): siRNA sense strand
ccaguggugugcuccaaac

SEQ ID NO: 909490 - RNA, 19 nt, Homo sapiens
  misc_RNA (1)...(19): siRNA sense strand
agaaacagaaacguaagaa

SEQ ID NO: 909491 - RNA, 19 nt, Homo sapiens
  misc_RNA (1)...(19): siRNA sense strand
caugaaugccgaguuugaa

SEQ ID NO: 909492 - RNA, 19 nt, Homo sapiens
  misc_RNA (1)...(19): siRNA sense strand
cagaaacguaagaagaaga

SEQ ID NO: 909493 - RNA, 19 nt, Homo sapiens
  misc_RNA (1)...(19): siRNA sense strand
gaaacguaagaagaagaaa

SEQ ID NO: 909494 - RNA, 19 nt, Homo sapiens
  misc_RNA (1)...(19): siRNA sense strand
ggaggucccagcggaaauc

SEQ ID NO: 909495 - RNA, 19 nt, Homo sapiens
  misc_RNA (1)...(19): siRNA sense strand
cccgagaaacagaaacgua

SEQ ID NO: 909496 - RNA, 19 nt, Homo sapiens
  misc_RNA (1)...(19): siRNA sense strand
ugaucuaucuucagcguua

SEQ ID NO: 909497 - RNA, 19 nt, Homo sapiens
  misc_RNA (1)...(19): siRNA sense strand
ugaccaagcuacuguuaug

SEQ ID NO: 909498 - RNA, 19 nt, Homo sapiens
  misc_RNA (1)...(19): siRNA sense strand
acaacaaccuggugaucua

SEQ ID NO: 909499 - RNA, 19 nt, Homo sapiens
  misc_RNA (1)...(19): siRNA sense strand
uaaauggacugcucauguc

SEQ ID NO: 909500 - RNA, 19 nt, Homo sapiens
  misc_RNA (1)...(19): siRNA sense strand
gcucacagccgccuucuuc

SEQ ID NO: 909501 - RNA, 19 nt, Homo sapiens
  misc_RNA (1)...(19): siRNA sense strand
uaucagcccugcucuaugg

SEQ ID NO: 909502 - RNA, 19 nt, Homo sapiens
  misc_RNA (1)...(19): siRNA sense strand
ccuaccaggugcugaguaa

SEQ ID NO: 909503 - RNA, 19 nt, Homo sapiens
  misc_RNA (1)...(19): siRNA sense strand
cagcaucacacgccucuuu

SEQ ID NO: 909504 - RNA, 19 nt, Homo sapiens
  misc_RNA (1)...(19): siRNA sense strand
cuaaauggacugcucaugu

SEQ ID NO: 909505 - RNA, 19 nt, Homo sapiens
  misc_RNA (1)...(19): siRNA sense strand
gcugaccaagcuacuguua

SEQ ID NO: 909506 - RNA, 19 nt, Homo sapiens
  misc_RNA (1)...(19): siRNA sense strand
cagaaccucuuccucuaca

SEQ ID NO: 909507 - RNA, 19 nt, Homo sapiens
  misc_RNA (1)...(19): siRNA sense strand
ggucaacgccgugcucuca

SEQ ID NO: 909508 - RNA, 19 nt, Homo sapiens
  misc_RNA (1)...(19): siRNA sense strand
gagccaggcacuaaaugga

SEQ ID NO: 909509 - RNA, 19 nt, Homo sapiens
  misc_RNA (1)...(19): siRNA sense strand
ugucgucaguguacacaga

SEQ ID NO: 909510 - RNA, 19 nt, Homo sapiens
  misc_RNA (1)...(19): siRNA sense strand
uucagaaccucuuccucua

SEQ ID NO: 909511 - RNA, 19 nt, Homo sapiens
  misc_RNA (1)...(19): siRNA sense strand
gccaugcgccuguacuaug

SEQ ID NO: 909512 - RNA, 19 nt, Homo sapiens
  misc_RNA (1)...(19): siRNA sense strand
gaaucuaggucugcaugcu

SEQ ID NO: 909513 - RNA, 19 nt, Homo sapiens
  misc_RNA (1)...(19): siRNA sense strand
gcugcucccuucgcacuau

SEQ ID NO: 909514 - RNA, 19 nt, Homo sapiens
  misc_RNA (1)...(19): siRNA sense strand
aagcauggcagcagcauca

SEQ ID NO: 909515 - RNA, 19 nt, Homo sapiens
  misc_RNA (1)...(19): siRNA sense strand
uaacaacaaccuggugauc

SEQ ID NO: 909516 - RNA, 19 nt, Homo sapiens
  misc_RNA (1)...(19): siRNA sense strand
caacaaccuggugaucuau

SEQ ID NO: 909517 - RNA, 19 nt, Homo sapiens
  misc_RNA (1)...(19): siRNA sense strand
ccuauccacugccauguac

SEQ ID NO: 909518 - RNA, 19 nt, Homo sapiens
  misc_RNA (1)...(19): siRNA sense strand
cgccuucucccuucuggua

SEQ ID NO: 909519 - RNA, 19 nt, Homo sapiens
  misc_RNA (1)...(19): siRNA sense strand
gcugagccaggcacuaaau

SEQ ID NO: 909520 - RNA, 19 nt, Homo sapiens
  misc_RNA (1)...(19): siRNA sense strand
gcuggacccugaugcuacu

SEQ ID NO: 909521 - RNA, 19 nt, Homo sapiens
  misc_RNA (1)...(19): siRNA sense strand
gaaccucuuccucuacacu

SEQ ID NO: 909522 - RNA, 19 nt, Homo sapiens
  misc_RNA (1)...(19): siRNA sense strand
cuauggcgcuaacaacaac

SEQ ID NO: 909523 - RNA, 19 nt, Homo sapiens
  misc_RNA (1)...(19): siRNA sense strand
gcaucacacgccucuuugu

SEQ ID NO: 909524 - RNA, 19 nt, Homo sapiens
  misc_RNA (1)...(19): siRNA sense strand
gaaguuccaugauguuguu

SEQ ID NO: 909525 - RNA, 19 nt, Homo sapiens
  misc_RNA (1)...(19): siRNA sense strand
uaagggaucugaaugacuu

SEQ ID NO: 909526 - RNA, 19 nt, Homo sapiens
  misc_RNA (1)...(19): siRNA sense strand
gcauguggcugcagcuaug

SEQ ID NO: 909527 - RNA, 19 nt, Homo sapiens
  misc_RNA (1)...(19): siRNA sense strand
ggauaagggaucugaauga

SEQ ID NO: 909528 - RNA, 19 nt, Homo sapiens
  misc_RNA (1)...(19): siRNA sense strand
gagggauuauuucauuaug

SEQ ID NO: 909529 - RNA, 19 nt, Homo sapiens
  misc_RNA (1)...(19): siRNA sense strand
cuggagggauuauuucauu

SEQ ID NO: 909530 - RNA, 19 nt, Homo sapiens
  misc_RNA (1)...(19): siRNA sense strand
ggagggauuauuucauuau

SEQ ID NO: 909531 - RNA, 19 nt, Homo sapiens
  misc_RNA (1)...(19): siRNA sense strand
uuauguaucuggcaucaug

SEQ ID NO: 909532 - RNA, 19 nt, Homo sapiens
  misc_RNA (1)...(19): siRNA sense strand
uggagggauuauuucauua

SEQ ID NO: 909533 - RNA, 19 nt, Homo sapiens
  misc_RNA (1)...(19): siRNA sense strand
gggcguuuguggcguugua

SEQ ID NO: 909534 - RNA, 19 nt, Homo sapiens
  misc_RNA (1)...(19): siRNA sense strand
aagaggagcuggaccugau

SEQ ID NO: 909535 - RNA, 19 nt, Homo sapiens
  misc_RNA (1)...(19): siRNA sense strand
gauaagggaucugaaugac

SEQ ID NO: 909536 - RNA, 19 nt, Homo sapiens
  misc_RNA (1)...(19): siRNA sense strand
ggauggacagaacuuguuu

SEQ ID NO: 909537 - RNA, 19 nt, Homo sapiens
  misc_RNA (1)...(19): siRNA sense strand
ggaugacacuacccugaag

SEQ ID NO: 909538 - RNA, 19 nt, Homo sapiens
  misc_RNA (1)...(19): siRNA sense strand
ggguuuaggucugagaaga

SEQ ID NO: 909539 - RNA, 19 nt, Homo sapiens
  misc_RNA (1)...(19): siRNA sense strand
acacagaggccacuuugau

SEQ ID NO: 909540 - RNA, 19 nt, Homo sapiens
  misc_RNA (1)...(19): siRNA sense strand
ggucaagucuggguuuagg

SEQ ID NO: 909541 - RNA, 19 nt, Homo sapiens
  misc_RNA (1)...(19): siRNA sense strand
guaccucgacgaaggaguu

SEQ ID NO: 909542 - RNA, 19 nt, Homo sapiens
  misc_RNA (1)...(19): siRNA sense strand
ugcaguaccuucuagaaca

SEQ ID NO: 909543 - RNA, 19 nt, Homo sapiens
  misc_RNA (1)...(19): siRNA sense strand
guuccuggagggauuauuu

SEQ ID NO: 909544 - RNA, 19 nt, Homo sapiens
  misc_RNA (1)...(19): siRNA sense strand
ucacacagaggccacuuug

SEQ ID NO: 909545 - RNA, 19 nt, Homo sapiens
  misc_RNA (1)...(19): siRNA sense strand
gaaccgcaaauucagaaca

SEQ ID NO: 909546 - RNA, 19 nt, Homo sapiens
  misc_RNA (1)...(19): siRNA sense strand
cuaccgaaccgcaaauuca

SEQ ID NO: 909547 - RNA, 19 nt, Homo sapiens
  misc_RNA (1)...(19): siRNA sense strand
gggauaagggaucugaaug

SEQ ID NO: 909548 - RNA, 19 nt, Homo sapiens
  misc_RNA (1)...(19): siRNA sense strand
ggucugagaagaugacgau

SEQ ID NO: 909549 - RNA, 19 nt, Homo sapiens
  misc_RNA (1)...(19): siRNA sense strand
acacuacccugaaguucca

SEQ ID NO: 909550 - RNA, 19 nt, Homo sapiens
  misc_RNA (1)...(19): siRNA sense strand
guuuaggucugagaagaug

SEQ ID NO: 909551 - RNA, 19 nt, Homo sapiens
  misc_RNA (1)...(19): siRNA sense strand
gcaguaccuucuagaacac

SEQ ID NO: 909552 - RNA, 19 nt, Homo sapiens
  misc_RNA (1)...(19): siRNA sense strand
gagggucaagucuggguuu

SEQ ID NO: 909553 - RNA, 19 nt, Homo sapiens
  misc_RNA (1)...(19): siRNA sense strand
gcugugcaguaccuucuag

SEQ ID NO: 909554 - RNA, 19 nt, Homo sapiens
  misc_RNA (1)...(19): siRNA sense strand
ggaagcacuggacgucuca

SEQ ID NO: 909555 - RNA, 19 nt, Homo sapiens
  misc_RNA (1)...(19): siRNA sense strand
cauuauguaucuggcauca

SEQ ID NO: 909556 - RNA, 19 nt, Homo sapiens
  misc_RNA (1)...(19): siRNA sense strand
ggucaugaagaaugcuuug

SEQ ID NO: 909557 - RNA, 19 nt, Homo sapiens
  misc_RNA (1)...(19): siRNA sense strand
acccugaaguuccaugaug

SEQ ID NO: 909558 - RNA, 19 nt, Homo sapiens
  misc_RNA (1)...(19): siRNA sense strand
gaucccagcaagcuaucuu

SEQ ID NO: 909559 - RNA, 19 nt, Homo sapiens
  misc_RNA (1)...(19): siRNA sense strand
caugacggauggacagaac

SEQ ID NO: 909560 - RNA, 19 nt, Homo sapiens
  misc_RNA (1)...(19): siRNA sense strand
cacagaggccacuuugaug

SEQ ID NO: 909561 - RNA, 19 nt, Homo sapiens
  misc_RNA (1)...(19): siRNA sense strand
ucugagaagaugacgauga

SEQ ID NO: 909562 - RNA, 19 nt, Homo sapiens
  misc_RNA (1)...(19): siRNA sense strand
cgagugccuugcccgacuu

SEQ ID NO: 909563 - RNA, 19 nt, Homo sapiens
  misc_RNA (1)...(19): siRNA sense strand
gucucgggcuuacugaaga

SEQ ID NO: 909564 - RNA, 19 nt, Homo sapiens
  misc_RNA (1)...(19): siRNA sense strand
cugagaagaugacgaugac

SEQ ID NO: 909565 - RNA, 19 nt, Homo sapiens
  misc_RNA (1)...(19): siRNA sense strand
cgccugaaccacacacuga

SEQ ID NO: 909566 - RNA, 19 nt, Homo sapiens
  misc_RNA (1)...(19): siRNA sense strand
ugacggauggacagaacuu

SEQ ID NO: 909567 - RNA, 19 nt, Homo sapiens
  misc_RNA (1)...(19): siRNA sense strand
cggauggacagaacuuguu

SEQ ID NO: 909568 - RNA, 19 nt, Homo sapiens
  misc_RNA (1)...(19): siRNA sense strand
agggucaagucuggguuua

SEQ ID NO: 909569 - RNA, 19 nt, Homo sapiens
  misc_RNA (1)...(19): siRNA sense strand
gaaagaacguuuauugaag

SEQ ID NO: 909570 - RNA, 19 nt, Homo sapiens
  misc_RNA (1)...(19): siRNA sense strand
gaacguuuauugaagauga

SEQ ID NO: 909571 - RNA, 19 nt, Homo sapiens
  misc_RNA (1)...(19): siRNA sense strand
ggagaaagaacguuuauug

SEQ ID NO: 909572 - RNA, 19 nt, Homo sapiens
  misc_RNA (1)...(19): siRNA sense strand
gaagagagacgcaaagaau

SEQ ID NO: 909573 - RNA, 19 nt, Homo sapiens
  misc_RNA (1)...(19): siRNA sense strand
gagaaagaacguuuauuga

SEQ ID NO: 909574 - RNA, 19 nt, Homo sapiens
  misc_RNA (1)...(19): siRNA sense strand
gaagaugaccuuagaagag

SEQ ID NO: 909575 - RNA, 19 nt, Homo sapiens
  misc_RNA (1)...(19): siRNA sense strand
ggaugcaucucucaugguu

SEQ ID NO: 909576 - RNA, 19 nt, Homo sapiens
  misc_RNA (1)...(19): siRNA sense strand
gcaaagaauaccuaagaga

SEQ ID NO: 909577 - RNA, 19 nt, Homo sapiens
  misc_RNA (1)...(19): siRNA sense strand
gagaggagaaagaacguuu

SEQ ID NO: 909578 - RNA, 19 nt, Homo sapiens
  misc_RNA (1)...(19): siRNA sense strand
aagaauaccuaagagacua

SEQ ID NO: 909579 - RNA, 19 nt, Homo sapiens
  misc_RNA (1)...(19): siRNA sense strand
uauugaagaugaccuuaga

SEQ ID NO: 909580 - RNA, 19 nt, Homo sapiens
  misc_RNA (1)...(19): siRNA sense strand
aagaugaccuuagaagaga

SEQ ID NO: 909581 - RNA, 19 nt, Homo sapiens
  misc_RNA (1)...(19): siRNA sense strand
ugaacagcauucuaucaug

SEQ ID NO: 909582 - RNA, 19 nt, Homo sapiens
  misc_RNA (1)...(19): siRNA sense strand
gaggagaaagaacguuuau

SEQ ID NO: 909583 - RNA, 19 nt, Homo sapiens
  misc_RNA (1)...(19): siRNA sense strand
aagagagacgcaaagaaua

SEQ ID NO: 909584 - RNA, 19 nt, Homo sapiens
  misc_RNA (1)...(19): siRNA sense strand
acgcaaagaauaccuaaga

SEQ ID NO: 909585 - RNA, 19 nt, Homo sapiens
  misc_RNA (1)...(19): siRNA sense strand
augcaucucucaugguuga

SEQ ID NO: 909586 - RNA, 19 nt, Homo sapiens
  misc_RNA (1)...(19): siRNA sense strand
gaauaccuaagagacuaua

SEQ ID NO: 909587 - RNA, 19 nt, Homo sapiens
  misc_RNA (1)...(19): siRNA sense strand
ugaagaugaccuuagaaga

SEQ ID NO: 909588 - RNA, 19 nt, Homo sapiens
  misc_RNA (1)...(19): siRNA sense strand
agaggagaaagaacguuua

SEQ ID NO: 909589 - RNA, 19 nt, Homo sapiens
  misc_RNA (1)...(19): siRNA sense strand
gagacgcaaagaauaccua

SEQ ID NO: 909590 - RNA, 19 nt, Homo sapiens
  misc_RNA (1)...(19): siRNA sense strand
cauggaaggaggagaugaa

SEQ ID NO: 909591 - RNA, 19 nt, Homo sapiens
  misc_RNA (1)...(19): siRNA sense strand
gagacuauauuccccugaa

SEQ ID NO: 909592 - RNA, 19 nt, Homo sapiens
  misc_RNA (1)...(19): siRNA sense strand
guggagagaggagaaagaa

SEQ ID NO: 909593 - RNA, 19 nt, Homo sapiens
  misc_RNA (1)...(19): siRNA sense strand
uaccuaagagacuauauuc

SEQ ID NO: 909594 - RNA, 19 nt, Homo sapiens
  misc_RNA (1)...(19): siRNA sense strand
uagaagagagacgcaaaga

SEQ ID NO: 909595 - RNA, 19 nt, Homo sapiens
  misc_RNA (1)...(19): siRNA sense strand
agaagagagacgcaaagaa

SEQ ID NO: 909596 - RNA, 19 nt, Homo sapiens
  misc_RNA (1)...(19): siRNA sense strand
agagagacgcaaagaauac

SEQ ID NO: 909597 - RNA, 19 nt, Homo sapiens
  misc_RNA (1)...(19): siRNA sense strand
aaagaauaccuaagagacu

SEQ ID NO: 909598 - RNA, 19 nt, Homo sapiens
  misc_RNA (1)...(19): siRNA sense strand
uaucauggaaggaggagau

SEQ ID NO: 909599 - RNA, 19 nt, Homo sapiens
  misc_RNA (1)...(19): siRNA sense strand
acagcauucuaucauggaa

SEQ ID NO: 909600 - RNA, 19 nt, Homo sapiens
  misc_RNA (1)...(19): siRNA sense strand
agacgcaaagaauaccuaa

SEQ ID NO: 909601 - RNA, 19 nt, Homo sapiens
  misc_RNA (1)...(19): siRNA sense strand
gaaggaauuugacaagaaa

SEQ ID NO: 909602 - RNA, 19 nt, Homo sapiens
  misc_RNA (1)...(19): siRNA sense strand
caaagcacuucaucuauuu

SEQ ID NO: 909603 - RNA, 19 nt, Homo sapiens
  misc_RNA (1)...(19): siRNA sense strand
ggacauugcugccuauauc

SEQ ID NO: 909604 - RNA, 19 nt, Homo sapiens
  misc_RNA (1)...(19): siRNA sense strand
ggaaggcagugaucaagaa

SEQ ID NO: 909605 - RNA, 19 nt, Homo sapiens
  misc_RNA (1)...(19): siRNA sense strand
acaaagcacuucaucuauu

SEQ ID NO: 909606 - RNA, 19 nt, Homo sapiens
  misc_RNA (1)...(19): siRNA sense strand
agacaaagcacuucaucua

SEQ ID NO: 909607 - RNA, 19 nt, Homo sapiens
  misc_RNA (1)...(19): siRNA sense strand
gaaguacaauauagagaag

SEQ ID NO: 909608 - RNA, 19 nt, Homo sapiens
  misc_RNA (1)...(19): siRNA sense strand
agaaggaauuugacaagaa

SEQ ID NO: 909609 - RNA, 19 nt, Homo sapiens
  misc_RNA (1)...(19): siRNA sense strand
gaaggacauugcugccuau

SEQ ID NO: 909610 - RNA, 19 nt, Homo sapiens
  misc_RNA (1)...(19): siRNA sense strand
gaucaagaacgcagacaug

SEQ ID NO: 909611 - RNA, 19 nt, Homo sapiens
  misc_RNA (1)...(19): siRNA sense strand
gacaaagcacuucaucuau

SEQ ID NO: 909612 - RNA, 19 nt, Homo sapiens
  misc_RNA (1)...(19): siRNA sense strand
ccauggagaaguacaauau

SEQ ID NO: 909613 - RNA, 19 nt, Homo sapiens
  misc_RNA (1)...(19): siRNA sense strand
aacccuaccuggcauugua

SEQ ID NO: 909614 - RNA, 19 nt, Homo sapiens
  misc_RNA (1)...(19): siRNA sense strand
gcaauccuccucuucaagu

SEQ ID NO: 909615 - RNA, 19 nt, Homo sapiens
  misc_RNA (1)...(19): siRNA sense strand
caagaaggaauuugacaag

SEQ ID NO: 909616 - RNA, 19 nt, Homo sapiens
  misc_RNA (1)...(19): siRNA sense strand
gagaaguacaauauagaga

SEQ ID NO: 909617 - RNA, 19 nt, Homo sapiens
  misc_RNA (1)...(19): siRNA sense strand
cgcaggccauggagaagua

SEQ ID NO: 909618 - RNA, 19 nt, Homo sapiens
  misc_RNA (1)...(19): siRNA sense strand
ccacgcaggccauggagaa

SEQ ID NO: 909619 - RNA, 19 nt, Homo sapiens
  misc_RNA (1)...(19): siRNA sense strand
ggagaaguacaauauagag

SEQ ID NO: 909620 - RNA, 19 nt, Homo sapiens
  misc_RNA (1)...(19): siRNA sense strand
caauauagagaaggacauu

SEQ ID NO: 909621 - RNA, 19 nt, Homo sapiens
  misc_RNA (1)...(19): siRNA sense strand
aagaaggaauuugacaaga

SEQ ID NO: 909622 - RNA, 19 nt, Homo sapiens
  misc_RNA (1)...(19): siRNA sense strand
cauggagaaguacaauaua

SEQ ID NO: 909623 - RNA, 19 nt, Homo sapiens
  misc_RNA (1)...(19): siRNA sense strand
cugccuauaucaagaagga

SEQ ID NO: 909624 - RNA, 19 nt, Homo sapiens
  misc_RNA (1)...(19): siRNA sense strand
auggagaaguacaauauag

SEQ ID NO: 909625 - RNA, 19 nt, Homo sapiens
  misc_RNA (1)...(19): siRNA sense strand
gccauggagaaguacaaua

SEQ ID NO: 909626 - RNA, 19 nt, Homo sapiens
  misc_RNA (1)...(19): siRNA sense strand
aguacaauauagagaagga

SEQ ID NO: 909627 - RNA, 19 nt, Homo sapiens
  misc_RNA (1)...(19): siRNA sense strand
gacauugcugccuauauca

SEQ ID NO: 909628 - RNA, 19 nt, Homo sapiens
  misc_RNA (1)...(19): siRNA sense strand
uugcaauccuccucuucaa

SEQ ID NO: 909629 - RNA, 19 nt, Homo sapiens
  misc_RNA (1)...(19): siRNA sense strand
gagacaaagcacuucaucu

SEQ ID NO: 909630 - RNA, 19 nt, Homo sapiens
  misc_RNA (1)...(19): siRNA sense strand
uggagaaguacaauauaga

SEQ ID NO: 909631 - RNA, 19 nt, Homo sapiens
  misc_RNA (1)...(19): siRNA sense strand
cgagacaaagcacuucauc

SEQ ID NO: 909632 - RNA, 19 nt, Homo sapiens
  misc_RNA (1)...(19): siRNA sense strand
ucacacacgagacaaagca

SEQ ID NO: 909633 - RNA, 19 nt, Homo sapiens
  misc_RNA (1)...(19): siRNA sense strand
ggaaauaugucugaguuua

SEQ ID NO: 909634 - RNA, 19 nt, Homo sapiens
  misc_RNA (1)...(19): siRNA sense strand
ggaauaaaguggaugacua

SEQ ID NO: 909635 - RNA, 19 nt, Homo sapiens
  misc_RNA (1)...(19): siRNA sense strand
gaagcuaauuuaccuugua

SEQ ID NO: 909636 - RNA, 19 nt, Homo sapiens
  misc_RNA (1)...(19): siRNA sense strand
gagagaacauucaauugau

SEQ ID NO: 909637 - RNA, 19 nt, Homo sapiens
  misc_RNA (1)...(19): siRNA sense strand
ugaaaugccugaccaagau

SEQ ID NO: 909638 - RNA, 19 nt, Homo sapiens
  misc_RNA (1)...(19): siRNA sense strand
uugcagaacuugaagcuaa

SEQ ID NO: 909639 - RNA, 19 nt, Homo sapiens
  misc_RNA (1)...(19): siRNA sense strand
uaaagagguugcagaacuu

SEQ ID NO: 909640 - RNA, 19 nt, Homo sapiens
  misc_RNA (1)...(19): siRNA sense strand
gaugauccacugaauauug

SEQ ID NO: 909641 - RNA, 19 nt, Homo sapiens
  misc_RNA (1)...(19): siRNA sense strand
aaggaggacuuccggaaua

SEQ ID NO: 909642 - RNA, 19 nt, Homo sapiens
  misc_RNA (1)...(19): siRNA sense strand
ugagagaacauucaauuga

SEQ ID NO: 909643 - RNA, 19 nt, Homo sapiens
  misc_RNA (1)...(19): siRNA sense strand
caaauugcuuguuaaagag

SEQ ID NO: 909644 - RNA, 19 nt, Homo sapiens
  misc_RNA (1)...(19): siRNA sense strand
caaacguuaugccagauga

SEQ ID NO: 909645 - RNA, 19 nt, Homo sapiens
  misc_RNA (1)...(19): siRNA sense strand
uuaaagagguugcagaacu

SEQ ID NO: 909646 - RNA, 19 nt, Homo sapiens
  misc_RNA (1)...(19): siRNA sense strand
guacauguaaagugcauuu

SEQ ID NO: 909647 - RNA, 19 nt, Homo sapiens
  misc_RNA (1)...(19): siRNA sense strand
gaacuugaagcuaauuuac

SEQ ID NO: 909648 - RNA, 19 nt, Homo sapiens
  misc_RNA (1)...(19): siRNA sense strand
gcgugacgauggucucaaa

SEQ ID NO: 909649 - RNA, 19 nt, Homo sapiens
  misc_RNA (1)...(19): siRNA sense strand
gaauaaaguggaugacuac

SEQ ID NO: 909650 - RNA, 19 nt, Homo sapiens
  misc_RNA (1)...(19): siRNA sense strand
gauccaaacaagcuucauu

SEQ ID NO: 909651 - RNA, 19 nt, Homo sapiens
  misc_RNA (1)...(19): siRNA sense strand
uauugaagcugcagaacau

SEQ ID NO: 909652 - RNA, 19 nt, Homo sapiens
  misc_RNA (1)...(19): siRNA sense strand
gaauauugaagcugcagaa

SEQ ID NO: 909653 - RNA, 19 nt, Homo sapiens
  misc_RNA (1)...(19): siRNA sense strand
caacauggugccucccaaa

SEQ ID NO: 909654 - RNA, 19 nt, Homo sapiens
  misc_RNA (1)...(19): siRNA sense strand
agagaacauucaauugaug

SEQ ID NO: 909655 - RNA, 19 nt, Homo sapiens
  misc_RNA (1)...(19): siRNA sense strand
cauggugccucccaaagug

SEQ ID NO: 909656 - RNA, 19 nt, Homo sapiens
  misc_RNA (1)...(19): siRNA sense strand
ccacaagaacauuaaagga

SEQ ID NO: 909657 - RNA, 19 nt, Homo sapiens
  misc_RNA (1)...(19): siRNA sense strand
augacuacaucaaacguua

SEQ ID NO: 909658 - RNA, 19 nt, Homo sapiens
  misc_RNA (1)...(19): siRNA sense strand
gugaaaugccugaccaaga

SEQ ID NO: 909659 - RNA, 19 nt, Homo sapiens
  misc_RNA (1)...(19): siRNA sense strand
gcuagcaaguaaacugaag

SEQ ID NO: 909660 - RNA, 19 nt, Homo sapiens
  misc_RNA (1)...(19): siRNA sense strand
cacaagaacauuaaaggau

SEQ ID NO: 909661 - RNA, 19 nt, Homo sapiens
  misc_RNA (1)...(19): siRNA sense strand
ggggaaauaugucugaguu

SEQ ID NO: 909662 - RNA, 19 nt, Homo sapiens
  misc_RNA (1)...(19): siRNA sense strand
cuaccaggguggaaaauuu

SEQ ID NO: 909663 - RNA, 19 nt, Homo sapiens
  misc_RNA (1)...(19): siRNA sense strand
cauuaaaggaugucguuug

SEQ ID NO: 909664 - RNA, 19 nt, Homo sapiens
  misc_RNA (1)...(19): siRNA sense strand
caaggaggacuuccggaau

SEQ ID NO: 909665 - RNA, 19 nt, Homo sapiens
  misc_RNA (1)...(19): siRNA sense strand
gaagcugcagaacaucauu

SEQ ID NO: 909666 - RNA, 19 nt, Homo sapiens
  misc_RNA (1)...(19): siRNA sense strand
ggaugucguuuggggauua

SEQ ID NO: 909667 - RNA, 19 nt, Homo sapiens
  misc_RNA (1)...(19): siRNA sense strand
gggaaauaugucugaguuu

SEQ ID NO: 909668 - RNA, 19 nt, Homo sapiens
  misc_RNA (1)...(19): siRNA sense strand
aggaggacuuccggaauaa

SEQ ID NO: 909669 - RNA, 19 nt, Homo sapiens
  misc_RNA (1)...(19): siRNA sense strand
gcucccacaagaacauuaa

SEQ ID NO: 909670 - RNA, 19 nt, Homo sapiens
  misc_RNA (1)...(19): siRNA sense strand
augauccacugaauauuga

SEQ ID NO: 909671 - RNA, 19 nt, Homo sapiens
  misc_RNA (1)...(19): siRNA sense strand
uugaugauccacugaauau

SEQ ID NO: 909672 - RNA, 19 nt, Homo sapiens
  misc_RNA (1)...(19): siRNA sense strand
gcagaacuugaagcuaauu

SEQ ID NO: 909673 - RNA, 19 nt, Homo sapiens
  misc_RNA (1)...(19): siRNA sense strand
ucggaggguuucugugaga

SEQ ID NO: 909674 - RNA, 19 nt, Homo sapiens
  misc_RNA (1)...(19): siRNA sense strand
gcuaauuuaccuuguacau

SEQ ID NO: 909675 - RNA, 19 nt, Homo sapiens
  misc_RNA (1)...(19): siRNA sense strand
auuaaaggaugucguuugg

SEQ ID NO: 909676 - RNA, 19 nt, Homo sapiens
  misc_RNA (1)...(19): siRNA sense strand
gaggacuuccggaauaaag

SEQ ID NO: 909677 - RNA, 19 nt, Homo sapiens
  misc_RNA (1)...(19): siRNA sense strand
ggaggacuuccggaauaaa

SEQ ID NO: 909678 - RNA, 19 nt, Homo sapiens
  misc_RNA (1)...(19): siRNA sense strand
ugaagcuaauuuaccuugu

SEQ ID NO: 909679 - RNA, 19 nt, Homo sapiens
  misc_RNA (1)...(19): siRNA sense strand
gaaaugccugaccaagauc

SEQ ID NO: 909680 - RNA, 19 nt, Homo sapiens
  misc_RNA (1)...(19): siRNA sense strand
aagcuaauuuaccuuguac

SEQ ID NO: 909681 - RNA, 19 nt, Homo sapiens
  misc_RNA (1)...(19): siRNA sense strand
cagaugaggguuacuacca

SEQ ID NO: 909682 - RNA, 19 nt, Homo sapiens
  misc_RNA (1)...(19): siRNA sense strand
cagaacuugaagcuaauuu

SEQ ID NO: 909683 - RNA, 19 nt, Homo sapiens
  misc_RNA (1)...(19): siRNA sense strand
acucggaggguuucuguga

SEQ ID NO: 909684 - RNA, 19 nt, Homo sapiens
  misc_RNA (1)...(19): siRNA sense strand
ggaggguuucugugagaga

SEQ ID NO: 909685 - RNA, 19 nt, Homo sapiens
  misc_RNA (1)...(19): siRNA sense strand
cuaauuuaccuuguacaug

SEQ ID NO: 909686 - RNA, 19 nt, Homo sapiens
  misc_RNA (1)...(19): siRNA sense strand
ugugagagacaaauugcuu

SEQ ID NO: 909687 - RNA, 19 nt, Homo sapiens
  misc_RNA (1)...(19): siRNA sense strand
uguuaaagagguugcagaa

SEQ ID NO: 909688 - RNA, 19 nt, Homo sapiens
  misc_RNA (1)...(19): siRNA sense strand
gaagagaugggcacagaau

SEQ ID NO: 909689 - RNA, 19 nt, Homo sapiens
  misc_RNA (1)...(19): siRNA sense strand
cgaaagggcccaacucuac

SEQ ID NO: 909690 - RNA, 19 nt, Homo sapiens
  misc_RNA (1)...(19): siRNA sense strand
aagaagagaugggcacaga

SEQ ID NO: 909691 - RNA, 19 nt, Homo sapiens
  misc_RNA (1)...(19): siRNA sense strand
gcgaaagggcccaacucua

SEQ ID NO: 909692 - RNA, 19 nt, Homo sapiens
  misc_RNA (1)...(19): siRNA sense strand
agagaugggcacagaauga

SEQ ID NO: 909693 - RNA, 19 nt, Homo sapiens
  misc_RNA (1)...(19): siRNA sense strand
guugugggcuaagaagaga

SEQ ID NO: 909694 - RNA, 19 nt, Homo sapiens
  misc_RNA (1)...(19): siRNA sense strand
gagaugggcacagaaugau

SEQ ID NO: 909695 - RNA, 19 nt, Homo sapiens
  misc_RNA (1)...(19): siRNA sense strand
ccaguguguugugggcuaa

SEQ ID NO: 909696 - RNA, 19 nt, Homo sapiens
  misc_RNA (1)...(19): siRNA sense strand
ggaccaagugaccguucuu

SEQ ID NO: 909697 - RNA, 19 nt, Homo sapiens
  misc_RNA (1)...(19): siRNA sense strand
gagcgaaagggcccaacuc

SEQ ID NO: 909698 - RNA, 19 nt, Homo sapiens
  misc_RNA (1)...(19): siRNA sense strand
gcaaaugccuucccaauua

SEQ ID NO: 909699 - RNA, 19 nt, Homo sapiens
  misc_RNA (1)...(19): siRNA sense strand
gaaaugggauugacuguga

SEQ ID NO: 909700 - RNA, 19 nt, Homo sapiens
  misc_RNA (1)...(19): siRNA sense strand
ggacaucggugaccucuuu

SEQ ID NO: 909701 - RNA, 19 nt, Homo sapiens
  misc_RNA (1)...(19): siRNA sense strand
ggaacuaaaucucuaggua

SEQ ID NO: 909702 - RNA, 19 nt, Homo sapiens
  misc_RNA (1)...(19): siRNA sense strand
ggaaaggucugcacacuca

SEQ ID NO: 909703 - RNA, 19 nt, Homo sapiens
  misc_RNA (1)...(19): siRNA sense strand
gagaugggcugaacuguga

SEQ ID NO: 909704 - RNA, 19 nt, Homo sapiens
  misc_RNA (1)...(19): siRNA sense strand
gcucugaucccaauaaaua

SEQ ID NO: 909705 - RNA, 19 nt, Homo sapiens
  misc_RNA (1)...(19): siRNA sense strand
uaauaaagcugcucaauac

SEQ ID NO: 909706 - RNA, 19 nt, Homo sapiens
  misc_RNA (1)...(19): siRNA sense strand
ggccaaaccugcagaauug

SEQ ID NO: 909707 - RNA, 19 nt, Homo sapiens
  misc_RNA (1)...(19): siRNA sense strand
ggacaaauacgguuuaaug

SEQ ID NO: 909708 - RNA, 19 nt, Homo sapiens
  misc_RNA (1)...(19): siRNA sense strand
gcaagaagaugugauagga

SEQ ID NO: 909709 - RNA, 19 nt, Homo sapiens
  misc_RNA (1)...(19): siRNA sense strand
acaaugccaucgagaauua

SEQ ID NO: 909710 - RNA, 19 nt, Homo sapiens
  misc_RNA (1)...(19): siRNA sense strand
gaaggaguauuugaaguuu

SEQ ID NO: 909711 - RNA, 19 nt, Homo sapiens
  misc_RNA (1)...(19): siRNA sense strand
gaacuaaaucucuagguaa

SEQ ID NO: 909712 - RNA, 19 nt, Homo sapiens
  misc_RNA (1)...(19): siRNA sense strand
ggaaucacaugcacaguug

SEQ ID NO: 909713 - RNA, 19 nt, Homo sapiens
  misc_RNA (1)...(19): siRNA sense strand
agacaacucuggaagaauu

SEQ ID NO: 909714 - RNA, 19 nt, Homo sapiens
  misc_RNA (1)...(19): siRNA sense strand
ccaauaaacuacaccaaug

SEQ ID NO: 909715 - RNA, 19 nt, Homo sapiens
  misc_RNA (1)...(19): siRNA sense strand
gggcacagcugcacagaga

SEQ ID NO: 909716 - RNA, 19 nt, Homo sapiens
  misc_RNA (1)...(19): siRNA sense strand
uaaaugaggcuccaauaaa

SEQ ID NO: 909717 - RNA, 19 nt, Homo sapiens
  misc_RNA (1)...(19): siRNA sense strand
ucagauaacccgugucaua

SEQ ID NO: 909718 - RNA, 19 nt, Homo sapiens
  misc_RNA (1)...(19): siRNA sense strand
caaaugauguggcaaugga

SEQ ID NO: 909719 - RNA, 19 nt, Homo sapiens
  misc_RNA (1)...(19): siRNA sense strand
cagaagaacagaugugaua

SEQ ID NO: 909720 - RNA, 19 nt, Homo sapiens
  misc_RNA (1)...(19): siRNA sense strand
gauacgagaugccaagguu

SEQ ID NO: 909721 - RNA, 19 nt, Homo sapiens
  misc_RNA (1)...(19): siRNA sense strand
caaguuagaacacacauuu

SEQ ID NO: 909722 - RNA, 19 nt, Homo sapiens
  misc_RNA (1)...(19): siRNA sense strand
ggaagacgaacccuguuua

SEQ ID NO: 909723 - RNA, 19 nt, Homo sapiens
  misc_RNA (1)...(19): siRNA sense strand
gaaaggacuuguacuugca

SEQ ID NO: 909724 - RNA, 19 nt, Homo sapiens
  misc_RNA (1)...(19): siRNA sense strand
aguauaagcugaccuuuga

SEQ ID NO: 909725 - RNA, 19 nt, Homo sapiens
  misc_RNA (1)...(19): siRNA sense strand
gaacaaaccgggaaauguc

SEQ ID NO: 909726 - RNA, 19 nt, Homo sapiens
  misc_RNA (1)...(19): siRNA sense strand
guaaaugaggcuccaauaa

SEQ ID NO: 909727 - RNA, 19 nt, Homo sapiens
  misc_RNA (1)...(19): siRNA sense strand
ggugauggcuuaacguguu

SEQ ID NO: 909728 - RNA, 19 nt, Homo sapiens
  misc_RNA (1)...(19): siRNA sense strand
cuaaugggauuguucauau

SEQ ID NO: 909729 - RNA, 19 nt, Homo sapiens
  misc_RNA (1)...(19): siRNA sense strand
ccaaccagcucauacaguu

SEQ ID NO: 909730 - RNA, 19 nt, Homo sapiens
  misc_RNA (1)...(19): siRNA sense strand
aaggaaggcugaccucuuu

SEQ ID NO: 909731 - RNA, 19 nt, Homo sapiens
  misc_RNA (1)...(19): siRNA sense strand
guacguaccugggaccaaa

SEQ ID NO: 909732 - RNA, 19 nt, Homo sapiens
  misc_RNA (1)...(19): siRNA sense strand
caaagggugugaagcagaa

SEQ ID NO: 909733 - RNA, 19 nt, Homo sapiens
  misc_RNA (1)...(19): siRNA sense strand
caaccacacugggcaagua

SEQ ID NO: 909734 - RNA, 19 nt, Homo sapiens
  misc_RNA (1)...(19): siRNA sense strand
gcaguggaauugucauuuc

SEQ ID NO: 909735 - RNA, 19 nt, Homo sapiens
  misc_RNA (1)...(19): siRNA sense strand
ggacggcacucucgauuac

SEQ ID NO: 909736 - RNA, 19 nt, Homo sapiens
  misc_RNA (1)...(19): siRNA sense strand
cauaauugcuggucagaug

SEQ ID NO: 909737 - RNA, 19 nt, Homo sapiens
  misc_RNA (1)...(19): siRNA sense strand
uuacgugggugauggcuua

SEQ ID NO: 909738 - RNA, 19 nt, Homo sapiens
  misc_RNA (1)...(19): siRNA sense strand
ccacagcacucuucacaca

SEQ ID NO: 909739 - RNA, 19 nt, Homo sapiens
  misc_RNA (1)...(19): siRNA sense strand
gcacagcugcacagagaua

SEQ ID NO: 909740 - RNA, 19 nt, Homo sapiens
  misc_RNA (1)...(19): siRNA sense strand
gagaaacuccugaagaaug

SEQ ID NO: 909741 - RNA, 19 nt, Homo sapiens
  misc_RNA (1)...(19): siRNA sense strand
ccaggaggcuucucaaauc

SEQ ID NO: 909742 - RNA, 19 nt, Homo sapiens
  misc_RNA (1)...(19): siRNA sense strand
gaaaaguucuggaaauuca

SEQ ID NO: 909743 - RNA, 19 nt, Homo sapiens
  misc_RNA (1)...(19): siRNA sense strand
gugcaaagguggccagaug

SEQ ID NO: 909744 - RNA, 19 nt, Homo sapiens
  misc_RNA (1)...(19): siRNA sense strand
ugaggaagcucggguuaaa

SEQ ID NO: 909745 - RNA, 19 nt, Homo sapiens
  misc_RNA (1)...(19): siRNA sense strand
cuaaaucucuagguaauga

SEQ ID NO: 909746 - RNA, 19 nt, Homo sapiens
  misc_RNA (1)...(19): siRNA sense strand
gagcaaaccauaaugacaa

SEQ ID NO: 909747 - RNA, 19 nt, Homo sapiens
  misc_RNA (1)...(19): siRNA sense strand
gauaauaaugccacuacua

SEQ ID NO: 909748 - RNA, 19 nt, Homo sapiens
  misc_RNA (1)...(19): siRNA sense strand
caacgcauccuguuuguau

SEQ ID NO: 909749 - RNA, 19 nt, Homo sapiens
  misc_RNA (1)...(19): siRNA sense strand
gcucggagaucaacaacug

SEQ ID NO: 909750 - RNA, 19 nt, Homo sapiens
  misc_RNA (1)...(19): siRNA sense strand
caaguucagaucuuuguua

SEQ ID NO: 909751 - RNA, 19 nt, Homo sapiens
  misc_RNA (1)...(19): siRNA sense strand
aaagacaacucuggaagaa

SEQ ID NO: 909752 - RNA, 19 nt, Homo sapiens
  misc_RNA (1)...(19): siRNA sense strand
gaaaucaacccguguuugg

SEQ ID NO: 909753 - RNA, 19 nt, Homo sapiens
  misc_RNA (1)...(19): siRNA sense strand
agacgaacccuguuuauug

SEQ ID NO: 909754 - RNA, 19 nt, Homo sapiens
  misc_RNA (1)...(19): siRNA sense strand
agaaugaccugcacaaugg

SEQ ID NO: 909755 - RNA, 19 nt, Homo sapiens
  misc_RNA (1)...(19): siRNA sense strand
ucaaauccaugcucaggaa

SEQ ID NO: 909756 - RNA, 19 nt, Homo sapiens
  misc_RNA (1)...(19): siRNA sense strand
gaacauacucucugucucu

SEQ ID NO: 909757 - RNA, 19 nt, Homo sapiens
  misc_RNA (1)...(19): siRNA sense strand
ggacaucuuugccuccaau

SEQ ID NO: 909758 - RNA, 19 nt, Homo sapiens
  misc_RNA (1)...(19): siRNA sense strand
gaccuccacuuccaggaua

SEQ ID NO: 909759 - RNA, 19 nt, Homo sapiens
  misc_RNA (1)...(19): siRNA sense strand
gcacgguguauauaaauaa

SEQ ID NO: 909760 - RNA, 19 nt, Homo sapiens
  misc_RNA (1)...(19): siRNA sense strand
agaaacuccugaagaauga

SEQ ID NO: 909761 - RNA, 19 nt, Homo sapiens
  misc_RNA (1)...(19): siRNA sense strand
cgacucagagaauuaaaua

SEQ ID NO: 909762 - RNA, 19 nt, Homo sapiens
  misc_RNA (1)...(19): siRNA sense strand
gauaacccgugucauagga

SEQ ID NO: 909763 - RNA, 19 nt, Homo sapiens
  misc_RNA (1)...(19): siRNA sense strand
caagaaggguuugguggaa

SEQ ID NO: 909764 - RNA, 19 nt, Homo sapiens
  misc_RNA (1)...(19): siRNA sense strand
gauguucgccuuccacuga

SEQ ID NO: 909765 - RNA, 19 nt, Homo sapiens
  misc_RNA (1)...(19): siRNA sense strand
ggaccuagacccaacaaga

SEQ ID NO: 909766 - RNA, 19 nt, Homo sapiens
  misc_RNA (1)...(19): siRNA sense strand
gauaucaucaguacuaaug

SEQ ID NO: 909767 - RNA, 19 nt, Homo sapiens
  misc_RNA (1)...(19): siRNA sense strand
gcaucuauaccuccuauuu

SEQ ID NO: 909768 - RNA, 19 nt, Homo sapiens
  misc_RNA (1)...(19): siRNA sense strand
caacaaugagcaaaccaua

SEQ ID NO: 909769 - RNA, 19 nt, Homo sapiens
  misc_RNA (1)...(19): siRNA sense strand
cgauaaggacaaucaaaua

SEQ ID NO: 909770 - RNA, 19 nt, Homo sapiens
  misc_RNA (1)...(19): siRNA sense strand
gcaagcagcagccugagaa

SEQ ID NO: 909771 - RNA, 19 nt, Homo sapiens
  misc_RNA (1)...(19): siRNA sense strand
gagcagggaucuucuuugc

SEQ ID NO: 909772 - RNA, 19 nt, Homo sapiens
  misc_RNA (1)...(19): siRNA sense strand
aguguaaccuggauuauga

SEQ ID NO: 909773 - RNA, 19 nt, Homo sapiens
  misc_RNA (1)...(19): siRNA sense strand
gaaccgucauuacgagaga

SEQ ID NO: 909774 - RNA, 19 nt, Homo sapiens
  misc_RNA (1)...(19): siRNA sense strand
gaccaaaucggcacaguug

SEQ ID NO: 909775 - RNA, 19 nt, Homo sapiens
  misc_RNA (1)...(19): siRNA sense strand
acucaucaaugucugcuua

SEQ ID NO: 909776 - RNA, 19 nt, Homo sapiens
  misc_RNA (1)...(19): siRNA sense strand
ccacaaagacgucuaacug

SEQ ID NO: 909777 - RNA, 19 nt, Homo sapiens
  misc_RNA (1)...(19): siRNA sense strand
acaagggacugaaaggauu

SEQ ID NO: 909778 - RNA, 19 nt, Homo sapiens
  misc_RNA (1)...(19): siRNA sense strand
gcauuugccagaaagguua

SEQ ID NO: 909779 - RNA, 19 nt, Homo sapiens
  misc_RNA (1)...(19): siRNA sense strand
gcuuaugccuggccacuga

SEQ ID NO: 909780 - RNA, 19 nt, Homo sapiens
  misc_RNA (1)...(19): siRNA sense strand
cggagcagcugcccauuga

SEQ ID NO: 909781 - RNA, 19 nt, Homo sapiens
  misc_RNA (1)...(19): siRNA sense strand
ugugggagcugugucaaua

SEQ ID NO: 909782 - RNA, 19 nt, Homo sapiens
  misc_RNA (1)...(19): siRNA sense strand
aggacaagcugaaggagua

SEQ ID NO: 909783 - RNA, 19 nt, Homo sapiens
  misc_RNA (1)...(19): siRNA sense strand
guagaaaggacuuguacuu

SEQ ID NO: 909784 - RNA, 19 nt, Homo sapiens
  misc_RNA (1)...(19): siRNA sense strand
gagauggcuuucugugcua

SEQ ID NO: 909785 - RNA, 19 nt, Homo sapiens
  misc_RNA (1)...(19): siRNA sense strand
ucaagugcccggaugguua

SEQ ID NO: 909786 - RNA, 19 nt, Homo sapiens
  misc_RNA (1)...(19): siRNA sense strand
ccaaugggcuucugcacau

SEQ ID NO: 909787 - RNA, 19 nt, Homo sapiens
  misc_RNA (1)...(19): siRNA sense strand
caacagcgauaaggacaau

SEQ ID NO: 909788 - RNA, 19 nt, Homo sapiens
  misc_RNA (1)...(19): siRNA sense strand
ggagcgacucagagaauua

SEQ ID NO: 909789 - RNA, 19 nt, Homo sapiens
  misc_RNA (1)...(19): siRNA sense strand
guaacuguuugccagcaua

SEQ ID NO: 909790 - RNA, 19 nt, Homo sapiens
  misc_RNA (1)...(19): siRNA sense strand
gaagacgaacccuguuuau

SEQ ID NO: 909791 - RNA, 19 nt, Homo sapiens
  misc_RNA (1)...(19): siRNA sense strand
gaagaacagaugugauaau

SEQ ID NO: 909792 - RNA, 19 nt, Homo sapiens
  misc_RNA (1)...(19): siRNA sense strand
gaccagcucuauguaaaug

SEQ ID NO: 909793 - RNA, 19 nt, Homo sapiens
  misc_RNA (1)...(19): siRNA sense strand
ggacaaugcagccacaaau

SEQ ID NO: 909794 - RNA, 19 nt, Homo sapiens
  misc_RNA (1)...(19): siRNA sense strand
ggaugggaauaucacaauu

SEQ ID NO: 909795 - RNA, 19 nt, Homo sapiens
  misc_RNA (1)...(19): siRNA sense strand
gaacaugcaauaacaggau

SEQ ID NO: 909796 - RNA, 19 nt, Homo sapiens
  misc_RNA (1)...(19): siRNA sense strand
gcagaagugucucuacaac

SEQ ID NO: 909797 - RNA, 19 nt, Homo sapiens
  misc_RNA (1)...(19): siRNA sense strand
cggaagugcuggccuauuc

SEQ ID NO: 909798 - RNA, 19 nt, Homo sapiens
  misc_RNA (1)...(19): siRNA sense strand
ggaagagauucaaguauua

SEQ ID NO: 909799 - RNA, 19 nt, Homo sapiens
  misc_RNA (1)...(19): siRNA sense strand
ggaagucuuugguccauua

SEQ ID NO: 909800 - RNA, 19 nt, Homo sapiens
  misc_RNA (1)...(19): siRNA sense strand
gggcauaacuguagugaug

SEQ ID NO: 909801 - RNA, 19 nt, Homo sapiens
  misc_RNA (1)...(19): siRNA sense strand
ggaguuaugcagcuaauua

SEQ ID NO: 909802 - RNA, 19 nt, Homo sapiens
  misc_RNA (1)...(19): siRNA sense strand
gggaacaacuauaaagaaa

SEQ ID NO: 909803 - RNA, 19 nt, Homo sapiens
  misc_RNA (1)...(19): siRNA sense strand
gaauugggaacaacuauaa

SEQ ID NO: 909804 - RNA, 19 nt, Homo sapiens
  misc_RNA (1)...(19): siRNA sense strand
ugacaaauguggccuacuu

SEQ ID NO: 909805 - RNA, 19 nt, Homo sapiens
  misc_RNA (1)...(19): siRNA sense strand
caugaacggugguguguuu

SEQ ID NO: 909806 - RNA, 19 nt, Homo sapiens
  misc_RNA (1)...(19): siRNA sense strand
gcuaugugcugacaaaugu

SEQ ID NO: 909807 - RNA, 19 nt, Homo sapiens
  misc_RNA (1)...(19): siRNA sense strand
ggaggucauuacacauaua

SEQ ID NO: 909808 - RNA, 19 nt, Homo sapiens
  misc_RNA (1)...(19): siRNA sense strand
cgauacaaaugcccagaua

SEQ ID NO: 909809 - RNA, 19 nt, Homo sapiens
  misc_RNA (1)...(19): siRNA sense strand
ccagaaauccucuccauga

SEQ ID NO: 909810 - RNA, 19 nt, Homo sapiens
  misc_RNA (1)...(19): siRNA sense strand
guagugaugguccuaaaua

SEQ ID NO: 909811 - RNA, 19 nt, Homo sapiens
  misc_RNA (1)...(19): siRNA sense strand
gcucacagcaauucugaua

SEQ ID NO: 909812 - RNA, 19 nt, Homo sapiens
  misc_RNA (1)...(19): siRNA sense strand
ggucaaacgcagaacuuua

SEQ ID NO: 909813 - RNA, 19 nt, Homo sapiens
  misc_RNA (1)...(19): siRNA sense strand
ucacagcaauucugauaau

SEQ ID NO: 909814 - RNA, 19 nt, Homo sapiens
  misc_RNA (1)...(19): siRNA sense strand
cuaaauagcaugaguguca

SEQ ID NO: 909815 - RNA, 19 nt, Homo sapiens
  misc_RNA (1)...(19): siRNA sense strand
acugggaaauuucucauua

SEQ ID NO: 909816 - RNA, 19 nt, Homo sapiens
  misc_RNA (1)...(19): siRNA sense strand
aggaagagauucaaguauu

SEQ ID NO: 909817 - RNA, 19 nt, Homo sapiens
  misc_RNA (1)...(19): siRNA sense strand
caacuuuguuacugaagaa

SEQ ID NO: 909818 - RNA, 19 nt, Homo sapiens
  misc_RNA (1)...(19): siRNA sense strand
caaauaauacuggaaguug

SEQ ID NO: 909819 - RNA, 19 nt, Homo sapiens
  misc_RNA (1)...(19): siRNA sense strand
gggauuggcuucgucauca

SEQ ID NO: 909820 - RNA, 19 nt, Homo sapiens
  misc_RNA (1)...(19): siRNA sense strand
aaagaaaucuggaggucau

SEQ ID NO: 909821 - RNA, 19 nt, Homo sapiens
  misc_RNA (1)...(19): siRNA sense strand
gaaucuucaucucuccuaa

SEQ ID NO: 909822 - RNA, 19 nt, Homo sapiens
  misc_RNA (1)...(19): siRNA sense strand
cauuacagcugugggcaua

SEQ ID NO: 909823 - RNA, 19 nt, Homo sapiens
  misc_RNA (1)...(19): siRNA sense strand
gguggaacuccucauaaua

SEQ ID NO: 909824 - RNA, 19 nt, Homo sapiens
  misc_RNA (1)...(19): siRNA sense strand
uauagucccuggaguuaug

SEQ ID NO: 909825 - RNA, 19 nt, Homo sapiens
  misc_RNA (1)...(19): siRNA sense strand
gaacuuuaaagacgcguuu

SEQ ID NO: 909826 - RNA, 19 nt, Homo sapiens
  misc_RNA (1)...(19): siRNA sense strand
ggguggaacuccucauaau

SEQ ID NO: 909827 - RNA, 19 nt, Homo sapiens
  misc_RNA (1)...(19): siRNA sense strand
gucaaacgcagaacuuuaa

SEQ ID NO: 909828 - RNA, 19 nt, Homo sapiens
  misc_RNA (1)...(19): siRNA sense strand
guauauccauggccauugu

SEQ ID NO: 909829 - RNA, 19 nt, Homo sapiens
  misc_RNA (1)...(19): siRNA sense strand
guucaucccagcuuuguuu

SEQ ID NO: 909830 - RNA, 19 nt, Homo sapiens
  misc_RNA (1)...(19): siRNA sense strand
gagggucaccuuccagaaa

SEQ ID NO: 909831 - RNA, 19 nt, Homo sapiens
  misc_RNA (1)...(19): siRNA sense strand
gagcaggaaucuucaucuc

SEQ ID NO: 909832 - RNA, 19 nt, Homo sapiens
  misc_RNA (1)...(19): siRNA sense strand
cccaggugguuuagaauaa

SEQ ID NO: 909833 - RNA, 19 nt, Homo sapiens
  misc_RNA (1)...(19): siRNA sense strand
gagcugcugcuuucaaaug

SEQ ID NO: 909834 - RNA, 19 nt, Homo sapiens
  misc_RNA (1)...(19): siRNA sense strand
aaacgcagaacuuuaaaga

SEQ ID NO: 909835 - RNA, 19 nt, Homo sapiens
  misc_RNA (1)...(19): siRNA sense strand
gcaugucucugaccaucug

SEQ ID NO: 909836 - RNA, 19 nt, Homo sapiens
  misc_RNA (1)...(19): siRNA sense strand
acaaauguggccuacuuua

SEQ ID NO: 909837 - RNA, 19 nt, Homo sapiens
  misc_RNA (1)...(19): siRNA sense strand
ucaggaagagauucaagua

SEQ ID NO: 909838 - RNA, 19 nt, Homo sapiens
  misc_RNA (1)...(19): siRNA sense strand
ucuaccagcuguuauuguu

SEQ ID NO: 909839 - RNA, 19 nt, Homo sapiens
  misc_RNA (1)...(19): siRNA sense strand
gcuacauucuggaaccauu

SEQ ID NO: 909840 - RNA, 19 nt, Homo sapiens
  misc_RNA (1)...(19): siRNA sense strand
cagaaauccucuccaugau

SEQ ID NO: 909841 - RNA, 19 nt, Homo sapiens
  misc_RNA (1)...(19): siRNA sense strand
gaguuaugcagcuaauuaa

SEQ ID NO: 909842 - RNA, 19 nt, Homo sapiens
  misc_RNA (1)...(19): siRNA sense strand
cugaggagcugcugcuuuc

SEQ ID NO: 909843 - RNA, 19 nt, Homo sapiens
  misc_RNA (1)...(19): siRNA sense strand
gcauuuggacgcuacauuc

SEQ ID NO: 909844 - RNA, 19 nt, Homo sapiens
  misc_RNA (1)...(19): siRNA sense strand
gcaguuccgaucuuuguug

SEQ ID NO: 909845 - RNA, 19 nt, Homo sapiens
  misc_RNA (1)...(19): siRNA sense strand
gagaaagugcagcugaaga

SEQ ID NO: 909846 - RNA, 19 nt, Homo sapiens
  misc_RNA (1)...(19): siRNA sense strand
ggaaguuguaccagaagaa

SEQ ID NO: 909847 - RNA, 19 nt, Homo sapiens
  misc_RNA (1)...(19): siRNA sense strand
cuaagggcgugcuccagaa

SEQ ID NO: 909848 - RNA, 19 nt, Homo sapiens
  misc_RNA (1)...(19): siRNA sense strand
ugauaucccuggcauuugg

SEQ ID NO: 909849 - RNA, 19 nt, Homo sapiens
  misc_RNA (1)...(19): siRNA sense strand
ugaauugggaacaacuaua

SEQ ID NO: 909850 - RNA, 19 nt, Homo sapiens
  misc_RNA (1)...(19): siRNA sense strand
accagaagaagauaaguua

SEQ ID NO: 909851 - RNA, 19 nt, Homo sapiens
  misc_RNA (1)...(19): siRNA sense strand
ggaaucuucaucucuccua

SEQ ID NO: 909852 - RNA, 19 nt, Homo sapiens
  misc_RNA (1)...(19): siRNA sense strand
ugacaaugauaaugcucuu

SEQ ID NO: 909853 - RNA, 19 nt, Homo sapiens
  misc_RNA (1)...(19): siRNA sense strand
caagcacacuccucuacca

SEQ ID NO: 909854 - RNA, 19 nt, Homo sapiens
  misc_RNA (1)...(19): siRNA sense strand
gcauaacuguagugauggu

SEQ ID NO: 909855 - RNA, 19 nt, Homo sapiens
  misc_RNA (1)...(19): siRNA sense strand
gggcugauuuaucuucgau

SEQ ID NO: 909856 - RNA, 19 nt, Homo sapiens
  misc_RNA (1)...(19): siRNA sense strand
uugcugggcugauuuaucu

SEQ ID NO: 909857 - RNA, 19 nt, Homo sapiens
  misc_RNA (1)...(19): siRNA sense strand
gcaguugcugggcugauuu

SEQ ID NO: 909858 - RNA, 19 nt, Homo sapiens
  misc_RNA (1)...(19): siRNA sense strand
ggcaguugcugggcugauu

SEQ ID NO: 909859 - RNA, 19 nt, Homo sapiens
  misc_RNA (1)...(19): siRNA sense strand
gagcggcuacugggaaauu

SEQ ID NO: 909860 - RNA, 19 nt, Homo sapiens
  misc_RNA (1)...(19): siRNA sense strand
ucaacuuuguuacugaaga

SEQ ID NO: 909861 - RNA, 19 nt, Homo sapiens
  misc_RNA (1)...(19): siRNA sense strand
ccucaacuuuguuacugaa

SEQ ID NO: 909862 - RNA, 19 nt, Homo sapiens
  misc_RNA (1)...(19): siRNA sense strand
gcagcuaauuaaaggucaa

SEQ ID NO: 909863 - RNA, 19 nt, Homo sapiens
  misc_RNA (1)...(19): siRNA sense strand
aagugcagcugaagaggaa

SEQ ID NO: 909864 - RNA, 19 nt, Homo sapiens
  misc_RNA (1)...(19): siRNA sense strand
guacagggauuggcuucgu

SEQ ID NO: 909865 - RNA, 19 nt, Homo sapiens
  misc_RNA (1)...(19): siRNA sense strand
auacaaaugcccagauaug

SEQ ID NO: 909866 - RNA, 19 nt, Homo sapiens
  misc_RNA (1)...(19): siRNA sense strand
gacaaauguggccuacuuu

SEQ ID NO: 909867 - RNA, 19 nt, Homo sapiens
  misc_RNA (1)...(19): siRNA sense strand
ugcauaugcuggcugguuu

SEQ ID NO: 909868 - RNA, 19 nt, Homo sapiens
  misc_RNA (1)...(19): siRNA sense strand
gguccuaaauagcaugagu

SEQ ID NO: 909869 - RNA, 19 nt, Homo sapiens
  misc_RNA (1)...(19): siRNA sense strand
uauuuggagcuuugucuua

SEQ ID NO: 909870 - RNA, 19 nt, Homo sapiens
  misc_RNA (1)...(19): siRNA sense strand
gguuuagaauaaugucaga

SEQ ID NO: 909871 - RNA, 19 nt, Homo sapiens
  misc_RNA (1)...(19): siRNA sense strand
ccaggugguuuagaauaau

SEQ ID NO: 909872 - RNA, 19 nt, Homo sapiens
  misc_RNA (1)...(19): siRNA sense strand
gcugaggagcugcugcuuu

SEQ ID NO: 909873 - RNA, 19 nt, Homo sapiens
  misc_RNA (1)...(19): siRNA sense strand
gaagagauucaaguauuac

SEQ ID NO: 909874 - RNA, 19 nt, Homo sapiens
  misc_RNA (1)...(19): siRNA sense strand
ucccugaacuugcgaucaa

SEQ ID NO: 909875 - RNA, 19 nt, Homo sapiens
  misc_RNA (1)...(19): siRNA sense strand
ugugauaucccuggcauuu

SEQ ID NO: 909876 - RNA, 19 nt, Homo sapiens
  misc_RNA (1)...(19): siRNA sense strand
gaggucauuacacauauau

SEQ ID NO: 909877 - RNA, 19 nt, Homo sapiens
  misc_RNA (1)...(19): siRNA sense strand
cuggagucccugcguauua

SEQ ID NO: 909878 - RNA, 19 nt, Homo sapiens
  misc_RNA (1)...(19): siRNA sense strand
gauaugcaucguccuuuca

SEQ ID NO: 909879 - RNA, 19 nt, Homo sapiens
  misc_RNA (1)...(19): siRNA sense strand
gauacaaaugcccagauau

SEQ ID NO: 909880 - RNA, 19 nt, Homo sapiens
  misc_RNA (1)...(19): siRNA sense strand
caaauguggccuacuuuac

SEQ ID NO: 909881 - RNA, 19 nt, Homo sapiens
  misc_RNA (1)...(19): siRNA sense strand
ggucagaaagccuguugug

SEQ ID NO: 909882 - RNA, 19 nt, Homo sapiens
  misc_RNA (1)...(19): siRNA sense strand
guggaacuccucauaauac

SEQ ID NO: 909883 - RNA, 19 nt, Homo sapiens
  misc_RNA (1)...(19): siRNA sense strand
gaacggugguguguuugcu

SEQ ID NO: 909884 - RNA, 19 nt, Homo sapiens
  misc_RNA (1)...(19): siRNA sense strand
gaggagcugcugcuuucaa

SEQ ID NO: 909885 - RNA, 19 nt, Homo sapiens
  misc_RNA (1)...(19): siRNA sense strand
gcugugggcauaacuguag

SEQ ID NO: 909886 - RNA, 19 nt, Homo sapiens
  misc_RNA (1)...(19): siRNA sense strand
gaaguuguaccagaagaag

SEQ ID NO: 909887 - RNA, 19 nt, Homo sapiens
  misc_RNA (1)...(19): siRNA sense strand
caggugguuuagaauaaug

SEQ ID NO: 909888 - RNA, 19 nt, Homo sapiens
  misc_RNA (1)...(19): siRNA sense strand
cauuagcaguuccgaucuu

SEQ ID NO: 909889 - RNA, 19 nt, Homo sapiens
  misc_RNA (1)...(19): siRNA sense strand
agaaaucuggaggucauua

SEQ ID NO: 909890 - RNA, 19 nt, Homo sapiens
  misc_RNA (1)...(19): siRNA sense strand
uggagucccugcguauuau

SEQ ID NO: 909891 - RNA, 19 nt, Homo sapiens
  misc_RNA (1)...(19): siRNA sense strand
ccagauaugcaucguccuu

SEQ ID NO: 909892 - RNA, 19 nt, Homo sapiens
  misc_RNA (1)...(19): siRNA sense strand
ucgacagucuuuugaauuu

SEQ ID NO: 909893 - RNA, 19 nt, Homo sapiens
  misc_RNA (1)...(19): siRNA sense strand
aggagcugcugcuuucaaa

SEQ ID NO: 909894 - RNA, 19 nt, Homo sapiens
  misc_RNA (1)...(19): siRNA sense strand
cauuggagcaggaaucuuc

SEQ ID NO: 909895 - RNA, 19 nt, Homo sapiens
  misc_RNA (1)...(19): siRNA sense strand
cuggaggucauuacacaua

SEQ ID NO: 909896 - RNA, 19 nt, Homo sapiens
  misc_RNA (1)...(19): siRNA sense strand
gaaaucuggaggucauuac

SEQ ID NO: 909897 - RNA, 19 nt, Homo sapiens
  misc_RNA (1)...(19): siRNA sense strand
agauaugcaucguccuuuc

SEQ ID NO: 909898 - RNA, 19 nt, Homo sapiens
  misc_RNA (1)...(19): siRNA sense strand
gaagaacuaugaacacuua

SEQ ID NO: 909899 - RNA, 19 nt, Homo sapiens
  misc_RNA (1)...(19): siRNA sense strand
caaaggagcgccuggauga

SEQ ID NO: 909900 - RNA, 19 nt, Homo sapiens
  misc_RNA (1)...(19): siRNA sense strand
cugaggagguccagaagaa

SEQ ID NO: 909901 - RNA, 19 nt, Homo sapiens
  misc_RNA (1)...(19): siRNA sense strand
caaaggugguccgcgcaaa

SEQ ID NO: 909902 - RNA, 19 nt, Homo sapiens
  misc_RNA (1)...(19): siRNA sense strand
uaaggugaaugauaaaucc

SEQ ID NO: 909903 - RNA, 19 nt, Homo sapiens
  misc_RNA (1)...(19): siRNA sense strand
cagaagaacuaugaacacu

SEQ ID NO: 909904 - RNA, 19 nt, Homo sapiens
  misc_RNA (1)...(19): siRNA sense strand
ccuucuaccugcagucaaa

SEQ ID NO: 909905 - RNA, 19 nt, Homo sapiens
  misc_RNA (1)...(19): siRNA sense strand
cacagcagauucucaacgu

SEQ ID NO: 909906 - RNA, 19 nt, Homo sapiens
  misc_RNA (1)...(19): siRNA sense strand
ccaggaggcacagcagauu

SEQ ID NO: 909907 - RNA, 19 nt, Homo sapiens
  misc_RNA (1)...(19): siRNA sense strand
gcccugaggagguccagaa

SEQ ID NO: 909908 - RNA, 19 nt, Homo sapiens
  misc_RNA (1)...(19): siRNA sense strand
gaggagguccagaagaacu

SEQ ID NO: 909909 - RNA, 19 nt, Homo sapiens
  misc_RNA (1)...(19): siRNA sense strand
gaaucuagccguguuguug

SEQ ID NO: 909910 - RNA, 19 nt, Homo sapiens
  misc_RNA (1)...(19): siRNA sense strand
gcgcaucuacugccaggua

SEQ ID NO: 909911 - RNA, 19 nt, Homo sapiens
  misc_RNA (1)...(19): siRNA sense strand
agaaccggcugcagacuga

SEQ ID NO: 909912 - RNA, 19 nt, Homo sapiens
  misc_RNA (1)...(19): siRNA sense strand
gaggucaucguccugcauu

SEQ ID NO: 909913 - RNA, 19 nt, Homo sapiens
  misc_RNA (1)...(19): siRNA sense strand
cuuccacgcucccauguuc

SEQ ID NO: 909914 - RNA, 19 nt, Homo sapiens
  misc_RNA (1)...(19): siRNA sense strand
gcgcaccuguccuguacuc

SEQ ID NO: 909915 - RNA, 19 nt, Homo sapiens
  misc_RNA (1)...(19): siRNA sense strand
ccacugucuugccgcucua

SEQ ID NO: 909916 - RNA, 19 nt, Homo sapiens
  misc_RNA (1)...(19): siRNA sense strand
gacgcuugcuccacugucu

SEQ ID NO: 909917 - RNA, 19 nt, Homo sapiens
  misc_RNA (1)...(19): siRNA sense strand
ucaucguccugcauuacaa

SEQ ID NO: 909918 - RNA, 19 nt, Homo sapiens
  misc_RNA (1)...(19): siRNA sense strand
gaucaagacuguggacaug

SEQ ID NO: 909919 - RNA, 19 nt, Homo sapiens
  misc_RNA (1)...(19): siRNA sense strand
ggacgacaagcucaucuuu

SEQ ID NO: 909920 - RNA, 19 nt, Homo sapiens
  misc_RNA (1)...(19): siRNA sense strand
ggaaccagaugagacauuc

SEQ ID NO: 909921 - RNA, 19 nt, Homo sapiens
  misc_RNA (1)...(19): siRNA sense strand
gcaagaaccagccaagcaa

SEQ ID NO: 909922 - RNA, 19 nt, Homo sapiens
  misc_RNA (1)...(19): siRNA sense strand
acgacaagcucaucuuuca

SEQ ID NO: 909923 - RNA, 19 nt, Homo sapiens
  misc_RNA (1)...(19): siRNA sense strand
aaacauacccagccuuucu

SEQ ID NO: 909924 - RNA, 19 nt, Homo sapiens
  misc_RNA (1)...(19): siRNA sense strand
caagaaccagccaagcaaa

SEQ ID NO: 909925 - RNA, 19 nt, Homo sapiens
  misc_RNA (1)...(19): siRNA sense strand
ucaaugucuuugugaagga

SEQ ID NO: 909926 - RNA, 19 nt, Homo sapiens
  misc_RNA (1)...(19): siRNA sense strand
cagaucacgugggccauga

SEQ ID NO: 909927 - RNA, 19 nt, Homo sapiens
  misc_RNA (1)...(19): siRNA sense strand
caaaacauacccagccuuu

SEQ ID NO: 909928 - RNA, 19 nt, Homo sapiens
  misc_RNA (1)...(19): siRNA sense strand
ucaagacuguggacaugag

SEQ ID NO: 909929 - RNA, 19 nt, Homo sapiens
  misc_RNA (1)...(19): siRNA sense strand
gagcuucauuguggaugga

SEQ ID NO: 909930 - RNA, 19 nt, Homo sapiens
  misc_RNA (1)...(19): siRNA sense strand
cuggagggaucaagacugu

SEQ ID NO: 909931 - RNA, 19 nt, Homo sapiens
  misc_RNA (1)...(19): siRNA sense strand
ggcaagaaccagccaagca

SEQ ID NO: 909932 - RNA, 19 nt, Homo sapiens
  misc_RNA (1)...(19): siRNA sense strand
gauccgaaugcgcuacuug

SEQ ID NO: 909933 - RNA, 19 nt, Homo sapiens
  misc_RNA (1)...(19): siRNA sense strand
gaucacgugggccaugaga

SEQ ID NO: 909934 - RNA, 19 nt, Homo sapiens
  misc_RNA (1)...(19): siRNA sense strand
cgcugccgcucauggauuu

SEQ ID NO: 909935 - RNA, 19 nt, Homo sapiens
  misc_RNA (1)...(19): siRNA sense strand
cauuguggauggacaguac

SEQ ID NO: 909936 - RNA, 19 nt, Homo sapiens
  misc_RNA (1)...(19): siRNA sense strand
ggacucugagcuucauugu

SEQ ID NO: 909937 - RNA, 19 nt, Homo sapiens
  misc_RNA (1)...(19): siRNA sense strand
ggaucaagacuguggacau

SEQ ID NO: 909938 - RNA, 19 nt, Homo sapiens
  misc_RNA (1)...(19): siRNA sense strand
gacgacaagcucaucuuuc

SEQ ID NO: 909939 - RNA, 19 nt, Homo sapiens
  misc_RNA (1)...(19): siRNA sense strand
ucacgugggccaugagaca

SEQ ID NO: 909940 - RNA, 19 nt, Homo sapiens
  misc_RNA (1)...(19): siRNA sense strand
cuaccacgauggcaagaac

SEQ ID NO: 909941 - RNA, 19 nt, Homo sapiens
  misc_RNA (1)...(19): siRNA sense strand
gaaccagaugagacauuca

SEQ ID NO: 909942 - RNA, 19 nt, Homo sapiens
  misc_RNA (1)...(19): siRNA sense strand
gcucaaugucuuugugaag

SEQ ID NO: 909943 - RNA, 19 nt, Homo sapiens
  misc_RNA (1)...(19): siRNA sense strand
accgaucgcucaaugucuu

SEQ ID NO: 909944 - RNA, 19 nt, Homo sapiens
  misc_RNA (1)...(19): siRNA sense strand
cgaccgaucgcucaauguc

SEQ ID NO: 909945 - RNA, 19 nt, Homo sapiens
  misc_RNA (1)...(19): siRNA sense strand
ugguagcccuggacaugga

SEQ ID NO: 909946 - RNA, 19 nt, Homo sapiens
  misc_RNA (1)...(19): siRNA sense strand
ccagggaggugacuacuuc

SEQ ID NO: 909947 - RNA, 19 nt, Homo sapiens
  misc_RNA (1)...(19): siRNA sense strand
gauguccucuggaucaaag

SEQ ID NO: 909948 - RNA, 19 nt, Homo sapiens
  misc_RNA (1)...(19): siRNA sense strand
ucucagaccuaagggugua

SEQ ID NO: 909949 - RNA, 19 nt, Homo sapiens
  misc_RNA (1)...(19): siRNA sense strand
ggaggugacuacuucuacu

SEQ ID NO: 909950 - RNA, 19 nt, Homo sapiens
  misc_RNA (1)...(19): siRNA sense strand
ugacuacuucuacuccuuu

SEQ ID NO: 909951 - RNA, 19 nt, Homo sapiens
  misc_RNA (1)...(19): siRNA sense strand
ccacaccagacuugcagua

SEQ ID NO: 909952 - RNA, 19 nt, Homo sapiens
  misc_RNA (1)...(19): siRNA sense strand
gagcauccacaccagacuu

SEQ ID NO: 909953 - RNA, 19 nt, Homo sapiens
  misc_RNA (1)...(19): siRNA sense strand
gugacuacuucuacuccuu

SEQ ID NO: 909954 - RNA, 19 nt, Homo sapiens
  misc_RNA (1)...(19): siRNA sense strand
ccaucgauguccucuggau

SEQ ID NO: 909955 - RNA, 19 nt, Homo sapiens
  misc_RNA (1)...(19): siRNA sense strand
gacuacuucuacuccuuug

SEQ ID NO: 909956 - RNA, 19 nt, Homo sapiens
  misc_RNA (1)...(19): siRNA sense strand
cagcaacugcagcgagaga

SEQ ID NO: 909957 - RNA, 19 nt, Homo sapiens
  misc_RNA (1)...(19): siRNA sense strand
gcaugaagcuccacaaaug

SEQ ID NO: 909958 - RNA, 19 nt, Homo sapiens
  misc_RNA (1)...(19): siRNA sense strand
gcccagaagucuaauguua

SEQ ID NO: 909959 - RNA, 19 nt, Homo sapiens
  misc_RNA (1)...(19): siRNA sense strand
acaaauaccucaaagauca

SEQ ID NO: 909960 - RNA, 19 nt, Homo sapiens
  misc_RNA (1)...(19): siRNA sense strand
ucccaaagcucgacacauu

SEQ ID NO: 909961 - RNA, 19 nt, Homo sapiens
  misc_RNA (1)...(19): siRNA sense strand
ugucaaaugugucaacaaa

SEQ ID NO: 909962 - RNA, 19 nt, Homo sapiens
  misc_RNA (1)...(19): siRNA sense strand
guacaaguguguggucaaa

SEQ ID NO: 909963 - RNA, 19 nt, Homo sapiens
  misc_RNA (1)...(19): siRNA sense strand
cuacaagugugucaaaugu

SEQ ID NO: 909964 - RNA, 19 nt, Homo sapiens
  misc_RNA (1)...(19): siRNA sense strand
ggagggcacugacaagcuu

SEQ ID NO: 909965 - RNA, 19 nt, Homo sapiens
  misc_RNA (1)...(19): siRNA sense strand
gugagaagcccuacaaaug

SEQ ID NO: 909966 - RNA, 19 nt, Homo sapiens
  misc_RNA (1)...(19): siRNA sense strand
gaaggacaaugccgucuac

SEQ ID NO: 909967 - RNA, 19 nt, Homo sapiens
  misc_RNA (1)...(19): siRNA sense strand
ggaugacgaggauguauuu

SEQ ID NO: 909968 - RNA, 19 nt, Homo sapiens
  misc_RNA (1)...(19): siRNA sense strand
ccacaaauaccucaaagau

SEQ ID NO: 909969 - RNA, 19 nt, Homo sapiens
  misc_RNA (1)...(19): siRNA sense strand
guacagcccuggcaaacag

SEQ ID NO: 909970 - RNA, 19 nt, Homo sapiens
  misc_RNA (1)...(19): siRNA sense strand
ggaaguguaagaagcaauu

SEQ ID NO: 909971 - RNA, 19 nt, Homo sapiens
  misc_RNA (1)...(19): siRNA sense strand
ggacaaugccgucuacaag

SEQ ID NO: 909972 - RNA, 19 nt, Homo sapiens
  misc_RNA (1)...(19): siRNA sense strand
guccacagcuggugaggaa

SEQ ID NO: 909973 - RNA, 19 nt, Homo sapiens
  misc_RNA (1)...(19): siRNA sense strand
gaaacucugugaccguaca

SEQ ID NO: 909974 - RNA, 19 nt, Homo sapiens
  misc_RNA (1)...(19): siRNA sense strand
cagcucaagucucacauga

SEQ ID NO: 909975 - RNA, 19 nt, Homo sapiens
  misc_RNA (1)...(19): siRNA sense strand
gcuccuaccugugccaauu

SEQ ID NO: 909976 - RNA, 19 nt, Homo sapiens
  misc_RNA (1)...(19): siRNA sense strand
ccagaagucuaauguuaag

SEQ ID NO: 909977 - RNA, 19 nt, Homo sapiens
  misc_RNA (1)...(19): siRNA sense strand
ccacgagcccuucaagaaa

SEQ ID NO: 909978 - RNA, 19 nt, Homo sapiens
  misc_RNA (1)...(19): siRNA sense strand
gcgggagcauuaucucaaa

SEQ ID NO: 909979 - RNA, 19 nt, Homo sapiens
  misc_RNA (1)...(19): siRNA sense strand
ugacccagcauaagaauga

SEQ ID NO: 909980 - RNA, 19 nt, Homo sapiens
  misc_RNA (1)...(19): siRNA sense strand
agaaugagcagguguacaa

SEQ ID NO: 909981 - RNA, 19 nt, Homo sapiens
  misc_RNA (1)...(19): siRNA sense strand
caaacugcaugcucacauc

SEQ ID NO: 909982 - RNA, 19 nt, Homo sapiens
  misc_RNA (1)...(19): siRNA sense strand
gcaccuacuuccagcucaa

SEQ ID NO: 909983 - RNA, 19 nt, Homo sapiens
  misc_RNA (1)...(19): siRNA sense strand
gcacacaggcugcaguaag

SEQ ID NO: 909984 - RNA, 19 nt, Homo sapiens
  misc_RNA (1)...(19): siRNA sense strand
gaccgccacucacaacuuc

SEQ ID NO: 909985 - RNA, 19 nt, Homo sapiens
  misc_RNA (1)...(19): siRNA sense strand
acaagugugucaaaugugu

SEQ ID NO: 909986 - RNA, 19 nt, Homo sapiens
  misc_RNA (1)...(19): siRNA sense strand
cgccagaucuccacauaca

SEQ ID NO: 909987 - RNA, 19 nt, Homo sapiens
  misc_RNA (1)...(19): siRNA sense strand
guaagaagcaauucaacuc

SEQ ID NO: 909988 - RNA, 19 nt, Homo sapiens
  misc_RNA (1)...(19): siRNA sense strand
gagaagcccuacaaaugcu

SEQ ID NO: 909989 - RNA, 19 nt, Homo sapiens
  misc_RNA (1)...(19): siRNA sense strand
acaaugccgucuacaagug

SEQ ID NO: 909990 - RNA, 19 nt, Homo sapiens
  misc_RNA (1)...(19): siRNA sense strand
cacgagcccuucaagaaau

SEQ ID NO: 909991 - RNA, 19 nt, Homo sapiens
  misc_RNA (1)...(19): siRNA sense strand
gcaaauucagcaccuacuu

SEQ ID NO: 909992 - RNA, 19 nt, Homo sapiens
  misc_RNA (1)...(19): siRNA sense strand
gaagagacacauguugauc

SEQ ID NO: 909993 - RNA, 19 nt, Homo sapiens
  misc_RNA (1)...(19): siRNA sense strand
gccaaaggcucagaaacuc

SEQ ID NO: 909994 - RNA, 19 nt, Homo sapiens
  misc_RNA (1)...(19): siRNA sense strand
ggugagaagcccuacaaau

SEQ ID NO: 909995 - RNA, 19 nt, Homo sapiens
  misc_RNA (1)...(19): siRNA sense strand
ugacgaggauguauuucuc

SEQ ID NO: 909996 - RNA, 19 nt, Homo sapiens
  misc_RNA (1)...(19): siRNA sense strand
gccauuggaugacgaggau

SEQ ID NO: 909997 - RNA, 19 nt, Homo sapiens
  misc_RNA (1)...(19): siRNA sense strand
gaagacccgacgagcuaaa

SEQ ID NO: 909998 - RNA, 19 nt, Homo sapiens
  misc_RNA (1)...(19): siRNA sense strand
caaauucagcaccuacuuc

SEQ ID NO: 909999 - RNA, 19 nt, Homo sapiens
  misc_RNA (1)...(19): siRNA sense strand
caaaggcucagaaacucaa

SEQ ID NO: 910000 - RNA, 19 nt, Homo sapiens
  misc_RNA (1)...(19): siRNA sense strand
aaauacaaaugcccuuucu

SEQ ID NO: 910001 - RNA, 19 nt, Homo sapiens
  misc_RNA (1)...(19): siRNA sense strand
ggagcauuaucucaaacug

SEQ ID NO: 910002 - RNA, 19 nt, Homo sapiens
  misc_RNA (1)...(19): siRNA sense strand
ccaaagcucgacacauuuc

SEQ ID NO: 910003 - RNA, 19 nt, Homo sapiens
  misc_RNA (1)...(19): siRNA sense strand
aaacucaagugcucauacu

SEQ ID NO: 910004 - RNA, 19 nt, Homo sapiens
  misc_RNA (1)...(19): siRNA sense strand
acacauuucuggagcacau

SEQ ID NO: 910005 - RNA, 19 nt, Homo sapiens
  misc_RNA (1)...(19): siRNA sense strand
cauccaggccuccgaguga

SEQ ID NO: 910006 - RNA, 19 nt, Homo sapiens
  misc_RNA (1)...(19): siRNA sense strand
aaacugaagagacacaugu

SEQ ID NO: 910007 - RNA, 19 nt, Homo sapiens
  misc_RNA (1)...(19): siRNA sense strand
cugaagacccgacgagcua

SEQ ID NO: 910008 - RNA, 19 nt, Homo sapiens
  misc_RNA (1)...(19): siRNA sense strand
ccaaggagcagucccugau

SEQ ID NO: 910009 - RNA, 19 nt, Homo sapiens
  misc_RNA (1)...(19): siRNA sense strand
gcccagacguucccaaagc

SEQ ID NO: 910010 - RNA, 19 nt, Homo sapiens
  misc_RNA (1)...(19): siRNA sense strand
cacaugacccagcauaaga

SEQ ID NO: 910011 - RNA, 19 nt, Homo sapiens
  misc_RNA (1)...(19): siRNA sense strand
ccaagcaggugguccucau

SEQ ID NO: 910012 - RNA, 19 nt, Homo sapiens
  misc_RNA (1)...(19): siRNA sense strand
gaaacucaagugcucauac

SEQ ID NO: 910013 - RNA, 19 nt, Homo sapiens
  misc_RNA (1)...(19): siRNA sense strand
gacaaugccgucuacaagu

SEQ ID NO: 910014 - RNA, 19 nt, Homo sapiens
  misc_RNA (1)...(19): siRNA sense strand
ggaaacugagcugguggua

SEQ ID NO: 910015 - RNA, 19 nt, Homo sapiens
  misc_RNA (1)...(19): siRNA sense strand
gcaaggacaaacugaagag

SEQ ID NO: 910016 - RNA, 19 nt, Homo sapiens
  misc_RNA (1)...(19): siRNA sense strand
uggcaaacagggauucaaa

SEQ ID NO: 910017 - RNA, 19 nt, Homo sapiens
  misc_RNA (1)...(19): siRNA sense strand
acgagcccuucaagaaaua

SEQ ID NO: 910018 - RNA, 19 nt, Homo sapiens
  misc_RNA (1)...(19): siRNA sense strand
ccacagcuggugaggaaga

SEQ ID NO: 910019 - RNA, 19 nt, Homo sapiens
  misc_RNA (1)...(19): siRNA sense strand
caccgugucucgaaacucu

SEQ ID NO: 910020 - RNA, 19 nt, Homo sapiens
  misc_RNA (1)...(19): siRNA sense strand
cccagaagucuaauguuaa

SEQ ID NO: 910021 - RNA, 19 nt, Homo sapiens
  misc_RNA (1)...(19): siRNA sense strand
ccagaucuccacauacauc

SEQ ID NO: 910022 - RNA, 19 nt, Homo sapiens
  misc_RNA (1)...(19): siRNA sense strand
aggacaaacugaagagaca

SEQ ID NO: 910023 - RNA, 19 nt, Homo sapiens
  misc_RNA (1)...(19): siRNA sense strand
ugagaagcccuacaaaugc

SEQ ID NO: 910024 - RNA, 19 nt, Homo sapiens
  misc_RNA (1)...(19): siRNA sense strand
gcauguggccgugccuuug

SEQ ID NO: 910025 - RNA, 19 nt, Homo sapiens
  misc_RNA (1)...(19): siRNA sense strand
gacaagucauucaccaaaa

SEQ ID NO: 910026 - RNA, 19 nt, Homo sapiens
  misc_RNA (1)...(19): siRNA sense strand
ggcaugaagcuccacaaau

SEQ ID NO: 910027 - RNA, 19 nt, Homo sapiens
  misc_RNA (1)...(19): siRNA sense strand
cacacaggcugcaguaagg

SEQ ID NO: 910028 - RNA, 19 nt, Homo sapiens
  misc_RNA (1)...(19): siRNA sense strand
ccagcaaauucagcaccua

SEQ ID NO: 910029 - RNA, 19 nt, Homo sapiens
  misc_RNA (1)...(19): siRNA sense strand
cugaagagacacauguuga

SEQ ID NO: 910030 - RNA, 19 nt, Homo sapiens
  misc_RNA (1)...(19): siRNA sense strand
guauuucucugcgggaagu

SEQ ID NO: 910031 - RNA, 19 nt, Homo sapiens
  misc_RNA (1)...(19): siRNA sense strand
gaucuccacauacaucaca

SEQ ID NO: 910032 - RNA, 19 nt, Homo sapiens
  misc_RNA (1)...(19): siRNA sense strand
cagcguuuaugacccacaa

SEQ ID NO: 910033 - RNA, 19 nt, Homo sapiens
  misc_RNA (1)...(19): siRNA sense strand
caaaugugucaacaaauac

SEQ ID NO: 910034 - RNA, 19 nt, Homo sapiens
  misc_RNA (1)...(19): siRNA sense strand
cagcacauccgaagguaca

SEQ ID NO: 910035 - RNA, 19 nt, Homo sapiens
  misc_RNA (1)...(19): siRNA sense strand
gcucauacugugacaaguc

SEQ ID NO: 910036 - RNA, 19 nt, Homo sapiens
  misc_RNA (1)...(19): siRNA sense strand
gcaggugccaaaccagugu

SEQ ID NO: 910037 - RNA, 19 nt, Homo sapiens
  misc_RNA (1)...(19): siRNA sense strand
ugaagagacacauguugau

SEQ ID NO: 910038 - RNA, 19 nt, Homo sapiens
  misc_RNA (1)...(19): siRNA sense strand
gggauucaaacccaaagga

SEQ ID NO: 910039 - RNA, 19 nt, Homo sapiens
  misc_RNA (1)...(19): siRNA sense strand
uccacgagcccuucaagaa

SEQ ID NO: 910040 - RNA, 19 nt, Homo sapiens
  misc_RNA (1)...(19): siRNA sense strand
gcagaccgccacucacaac

SEQ ID NO: 910041 - RNA, 19 nt, Homo sapiens
  misc_RNA (1)...(19): siRNA sense strand
gcaaacagggauucaaacc

SEQ ID NO: 910042 - RNA, 19 nt, Homo sapiens
  misc_RNA (1)...(19): siRNA sense strand
gcuguccagucauuauugg

SEQ ID NO: 910043 - RNA, 19 nt, Homo sapiens
  misc_RNA (1)...(19): siRNA sense strand
agaaauacaaaugcccuuu

SEQ ID NO: 910044 - RNA, 19 nt, Homo sapiens
  misc_RNA (1)...(19): siRNA sense strand
ccaaaggcucagaaacuca

SEQ ID NO: 910045 - RNA, 19 nt, Homo sapiens
  misc_RNA (1)...(19): siRNA sense strand
ucacaugacccagcauaag

SEQ ID NO: 910046 - RNA, 19 nt, Homo sapiens
  misc_RNA (1)...(19): siRNA sense strand
agagacacauguugaucca

SEQ ID NO: 910047 - RNA, 19 nt, Homo sapiens
  misc_RNA (1)...(19): siRNA sense strand
auaagaaugagcaggugua

SEQ ID NO: 910048 - RNA, 19 nt, Homo sapiens
  misc_RNA (1)...(19): siRNA sense strand
augagcagguguacaagug

SEQ ID NO: 910049 - RNA, 19 nt, Homo sapiens
  misc_RNA (1)...(19): siRNA sense strand
ggacaaggaccugcaaacc

SEQ ID NO: 910050 - RNA, 19 nt, Homo sapiens
  misc_RNA (1)...(19): siRNA sense strand
cacaaauaccucaaagauc

SEQ ID NO: 910051 - RNA, 19 nt, Homo sapiens
  misc_RNA (1)...(19): siRNA sense strand
ucaagugcucauacuguga

SEQ ID NO: 910052 - RNA, 19 nt, Homo sapiens
  misc_RNA (1)...(19): siRNA sense strand
agaaggacaaugccgucua

SEQ ID NO: 910053 - RNA, 19 nt, Homo sapiens
  misc_RNA (1)...(19): siRNA sense strand
ucucacaugacccagcaua

SEQ ID NO: 910054 - RNA, 19 nt, Homo sapiens
  misc_RNA (1)...(19): siRNA sense strand
cccaaagcucgacacauuu

SEQ ID NO: 910055 - RNA, 19 nt, Homo sapiens
  misc_RNA (1)...(19): siRNA sense strand
ggcgggagcauuaucucaa

SEQ ID NO: 910056 - RNA, 19 nt, Homo sapiens
  misc_RNA (1)...(19): siRNA sense strand
cgucuacaagugugucaaa

SEQ ID NO: 910057 - RNA, 19 nt, Homo sapiens
  misc_RNA (1)...(19): siRNA sense strand
ggauaaaucuggccucuuu

SEQ ID NO: 910058 - RNA, 19 nt, Homo sapiens
  misc_RNA (1)...(19): siRNA sense strand
gaagaugucugcucccaaa

SEQ ID NO: 910059 - RNA, 19 nt, Homo sapiens
  misc_RNA (1)...(19): siRNA sense strand
caaaguggcuccuccauga

SEQ ID NO: 910060 - RNA, 19 nt, Homo sapiens
  misc_RNA (1)...(19): siRNA sense strand
gaaauagaguugaagaaag

SEQ ID NO: 910061 - RNA, 19 nt, Homo sapiens
  misc_RNA (1)...(19): siRNA sense strand
ggaaauagaguugaagaaa

SEQ ID NO: 910062 - RNA, 19 nt, Homo sapiens
  misc_RNA (1)...(19): siRNA sense strand
ccacaaaccugcagugagu

SEQ ID NO: 910063 - RNA, 19 nt, Homo sapiens
  misc_RNA (1)...(19): siRNA sense strand
gaaguuacaucgccagaag

SEQ ID NO: 910064 - RNA, 19 nt, Homo sapiens
  misc_RNA (1)...(19): siRNA sense strand
ccuggaagcuugauaagaa

SEQ ID NO: 910065 - RNA, 19 nt, Homo sapiens
  misc_RNA (1)...(19): siRNA sense strand
auaagaaacuggaucauug

SEQ ID NO: 910066 - RNA, 19 nt, Homo sapiens
  misc_RNA (1)...(19): siRNA sense strand
ggaugagggugagaugaua

SEQ ID NO: 910067 - RNA, 19 nt, Homo sapiens
  misc_RNA (1)...(19): siRNA sense strand
gguaugagaucccagaauc

SEQ ID NO: 910068 - RNA, 19 nt, Homo sapiens
  misc_RNA (1)...(19): siRNA sense strand
gaagcgcucuaacccauau

SEQ ID NO: 910069 - RNA, 19 nt, Homo sapiens
  misc_RNA (1)...(19): siRNA sense strand
ucccaaaucucaaguagaa

SEQ ID NO: 910070 - RNA, 19 nt, Homo sapiens
  misc_RNA (1)...(19): siRNA sense strand
acccauaugugaagacuua

SEQ ID NO: 910071 - RNA, 19 nt, Homo sapiens
  misc_RNA (1)...(19): siRNA sense strand
ccaaggaaauagaguugaa

SEQ ID NO: 910072 - RNA, 19 nt, Homo sapiens
  misc_RNA (1)...(19): siRNA sense strand
ggaagaggaagaagaagaa

SEQ ID NO: 910073 - RNA, 19 nt, Homo sapiens
  misc_RNA (1)...(19): siRNA sense strand
gauaagaaacuggaucauu

SEQ ID NO: 910074 - RNA, 19 nt, Homo sapiens
  misc_RNA (1)...(19): siRNA sense strand
gaacaaggccaguaaacgu

SEQ ID NO: 910075 - RNA, 19 nt, Homo sapiens
  misc_RNA (1)...(19): siRNA sense strand
gaacuugacggcugccaaa

SEQ ID NO: 910076 - RNA, 19 nt, Homo sapiens
  misc_RNA (1)...(19): siRNA sense strand
ccgcacagguagugagaua

SEQ ID NO: 910077 - RNA, 19 nt, Homo sapiens
  misc_RNA (1)...(19): siRNA sense strand
gaagaucuacagcauaugu

SEQ ID NO: 910078 - RNA, 19 nt, Homo sapiens
  misc_RNA (1)...(19): siRNA sense strand
uggaagaucuacagcauau

SEQ ID NO: 910079 - RNA, 19 nt, Homo sapiens
  misc_RNA (1)...(19): siRNA sense strand
ggugacaucuggccaggaa

SEQ ID NO: 910080 - RNA, 19 nt, Homo sapiens
  misc_RNA (1)...(19): siRNA sense strand
gacagucccuccuucauca

SEQ ID NO: 910081 - RNA, 19 nt, Homo sapiens
  misc_RNA (1)...(19): siRNA sense strand
agggugagaugauauuuaa

SEQ ID NO: 910082 - RNA, 19 nt, Homo sapiens
  misc_RNA (1)...(19): siRNA sense strand
guagugagauaaucaggau

SEQ ID NO: 910083 - RNA, 19 nt, Homo sapiens
  misc_RNA (1)...(19): siRNA sense strand
cagugaagcuggugauuuc

SEQ ID NO: 910084 - RNA, 19 nt, Homo sapiens
  misc_RNA (1)...(19): siRNA sense strand
gaaaaggauuugauucuca

SEQ ID NO: 910085 - RNA, 19 nt, Homo sapiens
  misc_RNA (1)...(19): siRNA sense strand
ggcagaagaugcgacagua

SEQ ID NO: 910086 - RNA, 19 nt, Homo sapiens
  misc_RNA (1)...(19): siRNA sense strand
gcgaguuggugguuucauu

SEQ ID NO: 910087 - RNA, 19 nt, Homo sapiens
  misc_RNA (1)...(19): siRNA sense strand
gagggugagaugauauuua

SEQ ID NO: 910088 - RNA, 19 nt, Homo sapiens
  misc_RNA (1)...(19): siRNA sense strand
aaacuccugugaugaagaa

SEQ ID NO: 910089 - RNA, 19 nt, Homo sapiens
  misc_RNA (1)...(19): siRNA sense strand
ggacacuguuaauccacua

SEQ ID NO: 910090 - RNA, 19 nt, Homo sapiens
  misc_RNA (1)...(19): siRNA sense strand
ucaaagaagccaagaacuu

SEQ ID NO: 910091 - RNA, 19 nt, Homo sapiens
  misc_RNA (1)...(19): siRNA sense strand
ucacuacaaccauacauuu

SEQ ID NO: 910092 - RNA, 19 nt, Homo sapiens
  misc_RNA (1)...(19): siRNA sense strand
gaaggagcccagugugcua

SEQ ID NO: 910093 - RNA, 19 nt, Homo sapiens
  misc_RNA (1)...(19): siRNA sense strand
ggugagaugauauuuaaga

SEQ ID NO: 910094 - RNA, 19 nt, Homo sapiens
  misc_RNA (1)...(19): siRNA sense strand
gcacagguagugagauaau

SEQ ID NO: 910095 - RNA, 19 nt, Homo sapiens
  misc_RNA (1)...(19): siRNA sense strand
agaagaagaagaagacauu

SEQ ID NO: 910096 - RNA, 19 nt, Homo sapiens
  misc_RNA (1)...(19): siRNA sense strand
gcagaagcuggguuuauga

SEQ ID NO: 910097 - RNA, 19 nt, Homo sapiens
  misc_RNA (1)...(19): siRNA sense strand
ggaagaagaagaagaagac

SEQ ID NO: 910098 - RNA, 19 nt, Homo sapiens
  misc_RNA (1)...(19): siRNA sense strand
ggauaccuccuucccauga

SEQ ID NO: 910099 - RNA, 19 nt, Homo sapiens
  misc_RNA (1)...(19): siRNA sense strand
ccggaaagcagaugagaaa

SEQ ID NO: 910100 - RNA, 19 nt, Homo sapiens
  misc_RNA (1)...(19): siRNA sense strand
gcagcuccguuccucaaug

SEQ ID NO: 910101 - RNA, 19 nt, Homo sapiens
  misc_RNA (1)...(19): siRNA sense strand
gaucauugccucccuuuac

SEQ ID NO: 910102 - RNA, 19 nt, Homo sapiens
  misc_RNA (1)...(19): siRNA sense strand
gccagaagcuagccagaag

SEQ ID NO: 910103 - RNA, 19 nt, Homo sapiens
  misc_RNA (1)...(19): siRNA sense strand
gcgacuaaagaaugaguua

SEQ ID NO: 910104 - RNA, 19 nt, Homo sapiens
  misc_RNA (1)...(19): siRNA sense strand
gaucaaagaagccaagaac

SEQ ID NO: 910105 - RNA, 19 nt, Homo sapiens
  misc_RNA (1)...(19): siRNA sense strand
gugagagucuggauagcuu

SEQ ID NO: 910106 - RNA, 19 nt, Homo sapiens
  misc_RNA (1)...(19): siRNA sense strand
ggagcccagugugcuauuu

SEQ ID NO: 910107 - RNA, 19 nt, Homo sapiens
  misc_RNA (1)...(19): siRNA sense strand
uuaagaagaacaccagaaa

SEQ ID NO: 910108 - RNA, 19 nt, Homo sapiens
  misc_RNA (1)...(19): siRNA sense strand
gaugucugcucccaaaucu

SEQ ID NO: 910109 - RNA, 19 nt, Homo sapiens
  misc_RNA (1)...(19): siRNA sense strand
gagagugagagucuggaua

SEQ ID NO: 910110 - RNA, 19 nt, Homo sapiens
  misc_RNA (1)...(19): siRNA sense strand
ugacaagucccgccaagga

SEQ ID NO: 910111 - RNA, 19 nt, Homo sapiens
  misc_RNA (1)...(19): siRNA sense strand
guacacuaaaucugugaua

SEQ ID NO: 910112 - RNA, 19 nt, Homo sapiens
  misc_RNA (1)...(19): siRNA sense strand
aaauagaguugaagaaagc

SEQ ID NO: 910113 - RNA, 19 nt, Homo sapiens
  misc_RNA (1)...(19): siRNA sense strand
ggauuugauucucaguguu

SEQ ID NO: 910114 - RNA, 19 nt, Homo sapiens
  misc_RNA (1)...(19): siRNA sense strand
gccagaagcagcaugcaaa

SEQ ID NO: 910115 - RNA, 19 nt, Homo sapiens
  misc_RNA (1)...(19): siRNA sense strand
uggaaagagugcauuggaa

SEQ ID NO: 910116 - RNA, 19 nt, Homo sapiens
  misc_RNA (1)...(19): siRNA sense strand
ggugugcgccaaggaaaua

SEQ ID NO: 910117 - RNA, 19 nt, Homo sapiens
  misc_RNA (1)...(19): siRNA sense strand
gggaagugguggacuggau

SEQ ID NO: 910118 - RNA, 19 nt, Homo sapiens
  misc_RNA (1)...(19): siRNA sense strand
gaugagacgcugagguaug

SEQ ID NO: 910119 - RNA, 19 nt, Homo sapiens
  misc_RNA (1)...(19): siRNA sense strand
gcucuaacccauaugugaa

SEQ ID NO: 910120 - RNA, 19 nt, Homo sapiens
  misc_RNA (1)...(19): siRNA sense strand
ccucaggccuucagaguac

SEQ ID NO: 910121 - RNA, 19 nt, Homo sapiens
  misc_RNA (1)...(19): siRNA sense strand
ccaagcagaagcuggguuu

SEQ ID NO: 910122 - RNA, 19 nt, Homo sapiens
  misc_RNA (1)...(19): siRNA sense strand
aauccucacuacaaccaua

SEQ ID NO: 910123 - RNA, 19 nt, Homo sapiens
  misc_RNA (1)...(19): siRNA sense strand
gacauugaccaccuaguga

SEQ ID NO: 910124 - RNA, 19 nt, Homo sapiens
  misc_RNA (1)...(19): siRNA sense strand
agaagacauugaccaccua

SEQ ID NO: 910125 - RNA, 19 nt, Homo sapiens
  misc_RNA (1)...(19): siRNA sense strand
gaagaagaagaagacauug

SEQ ID NO: 910126 - RNA, 19 nt, Homo sapiens
  misc_RNA (1)...(19): siRNA sense strand
gauagaucuucgcccagaa

SEQ ID NO: 910127 - RNA, 19 nt, Homo sapiens
  misc_RNA (1)...(19): siRNA sense strand
gcucccaaaucucaaguag

SEQ ID NO: 910128 - RNA, 19 nt, Homo sapiens
  misc_RNA (1)...(19): siRNA sense strand
guuaauccacuauaugaug

SEQ ID NO: 910129 - RNA, 19 nt, Homo sapiens
  misc_RNA (1)...(19): siRNA sense strand
ccagugugcuauuugaagu

SEQ ID NO: 910130 - RNA, 19 nt, Homo sapiens
  misc_RNA (1)...(19): siRNA sense strand
caaggccaguaaacguaaa

SEQ ID NO: 910131 - RNA, 19 nt, Homo sapiens
  misc_RNA (1)...(19): siRNA sense strand
agaggaagaagaagaagaa

SEQ ID NO: 910132 - RNA, 19 nt, Homo sapiens
  misc_RNA (1)...(19): siRNA sense strand
agaaugaguuacuggagau

SEQ ID NO: 910133 - RNA, 19 nt, Homo sapiens
  misc_RNA (1)...(19): siRNA sense strand
ggauauggaagaggaagaa

SEQ ID NO: 910134 - RNA, 19 nt, Homo sapiens
  misc_RNA (1)...(19): siRNA sense strand
ggacugccgcauacaggaa

SEQ ID NO: 910135 - RNA, 19 nt, Homo sapiens
  misc_RNA (1)...(19): siRNA sense strand
ugaggaacaaggccaguaa

SEQ ID NO: 910136 - RNA, 19 nt, Homo sapiens
  misc_RNA (1)...(19): siRNA sense strand
gcaucaagcgggacacugu

SEQ ID NO: 910137 - RNA, 19 nt, Homo sapiens
  misc_RNA (1)...(19): siRNA sense strand
gaaagcagaugagaaaagg

SEQ ID NO: 910138 - RNA, 19 nt, Homo sapiens
  misc_RNA (1)...(19): siRNA sense strand
uauggaagaggaagaagaa

SEQ ID NO: 910139 - RNA, 19 nt, Homo sapiens
  misc_RNA (1)...(19): siRNA sense strand
guaaaacuccugugaugaa

SEQ ID NO: 910140 - RNA, 19 nt, Homo sapiens
  misc_RNA (1)...(19): siRNA sense strand
ggaugucccugcgccacaa

SEQ ID NO: 910141 - RNA, 19 nt, Homo sapiens
  misc_RNA (1)...(19): siRNA sense strand
agaagcagcaugcaaagug

SEQ ID NO: 910142 - RNA, 19 nt, Homo sapiens
  misc_RNA (1)...(19): siRNA sense strand
acacuaaaucugugauaga

SEQ ID NO: 910143 - RNA, 19 nt, Homo sapiens
  misc_RNA (1)...(19): siRNA sense strand
gaggaacaaggccaguaaa

SEQ ID NO: 910144 - RNA, 19 nt, Homo sapiens
  misc_RNA (1)...(19): siRNA sense strand
augagacgcugagguauga

SEQ ID NO: 910145 - RNA, 19 nt, Homo sapiens
  misc_RNA (1)...(19): siRNA sense strand
gacaagucccgccaaggaa

SEQ ID NO: 910146 - RNA, 19 nt, Homo sapiens
  misc_RNA (1)...(19): siRNA sense strand
gcagaugagaaaaggauua

SEQ ID NO: 910147 - RNA, 19 nt, Homo sapiens
  misc_RNA (1)...(19): siRNA sense strand
gaagcuugauaagaaacug

SEQ ID NO: 910148 - RNA, 19 nt, Homo sapiens
  misc_RNA (1)...(19): siRNA sense strand
gaaugaguuacuggagaua

SEQ ID NO: 910149 - RNA, 19 nt, Homo sapiens
  misc_RNA (1)...(19): siRNA sense strand
aagugaaucgcuuugcuua

SEQ ID NO: 910150 - RNA, 19 nt, Homo sapiens
  misc_RNA (1)...(19): siRNA sense strand
caaggugugcgccaaggaa

SEQ ID NO: 910151 - RNA, 19 nt, Homo sapiens
  misc_RNA (1)...(19): siRNA sense strand
gcuggccuaugcugaugaa

SEQ ID NO: 910152 - RNA, 19 nt, Homo sapiens
  misc_RNA (1)...(19): siRNA sense strand
ccaggaagaaagaucauuc

SEQ ID NO: 910153 - RNA, 19 nt, Homo sapiens
  misc_RNA (1)...(19): siRNA sense strand
gauuugauucucaguguuc

SEQ ID NO: 910154 - RNA, 19 nt, Homo sapiens
  misc_RNA (1)...(19): siRNA sense strand
cuggaagcuugauaagaaa

SEQ ID NO: 910155 - RNA, 19 nt, Homo sapiens
  misc_RNA (1)...(19): siRNA sense strand
gcgggacacuguuaaucca

SEQ ID NO: 910156 - RNA, 19 nt, Homo sapiens
  misc_RNA (1)...(19): siRNA sense strand
gaaaaggauuaggcgacua

SEQ ID NO: 910157 - RNA, 19 nt, Homo sapiens
  misc_RNA (1)...(19): siRNA sense strand
gcaaauggguacagucuca

SEQ ID NO: 910158 - RNA, 19 nt, Homo sapiens
  misc_RNA (1)...(19): siRNA sense strand
gacaauccaggcagucuuu

SEQ ID NO: 910159 - RNA, 19 nt, Homo sapiens
  misc_RNA (1)...(19): siRNA sense strand
ccacagcgcaaacuucuca

SEQ ID NO: 910160 - RNA, 19 nt, Homo sapiens
  misc_RNA (1)...(19): siRNA sense strand
gcacuaggacugacaaucc

SEQ ID NO: 910161 - RNA, 19 nt, Homo sapiens
  misc_RNA (1)...(19): siRNA sense strand
gcucuacuccugcaaaugg

SEQ ID NO: 910162 - RNA, 19 nt, Homo sapiens
  misc_RNA (1)...(19): siRNA sense strand
ggucagcuuccucaccuuu

SEQ ID NO: 910163 - RNA, 19 nt, Homo sapiens
  misc_RNA (1)...(19): siRNA sense strand
ucagcuuccucaccuuuga

SEQ ID NO: 910164 - RNA, 19 nt, Homo sapiens
  misc_RNA (1)...(19): siRNA sense strand
ccuuugaccugcuccauag

SEQ ID NO: 910165 - RNA, 19 nt, Homo sapiens
  misc_RNA (1)...(19): siRNA sense strand
ccagugcguccaccuguau

SEQ ID NO: 910166 - RNA, 19 nt, Homo sapiens
  misc_RNA (1)...(19): siRNA sense strand
gaggcucuacuccugcaaa

SEQ ID NO: 910167 - RNA, 19 nt, Homo sapiens
  misc_RNA (1)...(19): siRNA sense strand
gguacagucucaggacaac

SEQ ID NO: 910168 - RNA, 19 nt, Homo sapiens
  misc_RNA (1)...(19): siRNA sense strand
gcaaauaacugcacuaagg

SEQ ID NO: 910169 - RNA, 19 nt, Homo sapiens
  misc_RNA (1)...(19): siRNA sense strand
ggacagagaagguuaaucu

SEQ ID NO: 910170 - RNA, 19 nt, Homo sapiens
  misc_RNA (1)...(19): siRNA sense strand
gauaacaacagucgaagaa

SEQ ID NO: 910171 - RNA, 19 nt, Homo sapiens
  misc_RNA (1)...(19): siRNA sense strand
gcaaaguuguuggcuggua

SEQ ID NO: 910172 - RNA, 19 nt, Homo sapiens
  misc_RNA (1)...(19): siRNA sense strand
ucaaacagauaacaacagu

SEQ ID NO: 910173 - RNA, 19 nt, Homo sapiens
  misc_RNA (1)...(19): siRNA sense strand
gaacuggaaccgaaagcaa

SEQ ID NO: 910174 - RNA, 19 nt, Homo sapiens
  misc_RNA (1)...(19): siRNA sense strand
gaugcaagaaucugacuuu

SEQ ID NO: 910175 - RNA, 19 nt, Homo sapiens
  misc_RNA (1)...(19): siRNA sense strand
uaacaacagucgaagaacu

SEQ ID NO: 910176 - RNA, 19 nt, Homo sapiens
  misc_RNA (1)...(19): siRNA sense strand
gauccuaauugucaucauc

SEQ ID NO: 910177 - RNA, 19 nt, Homo sapiens
  misc_RNA (1)...(19): siRNA sense strand
gaaucugacuuucucaaac

SEQ ID NO: 910178 - RNA, 19 nt, Homo sapiens
  misc_RNA (1)...(19): siRNA sense strand
gaaccgaaagcaaauaacu

SEQ ID NO: 910179 - RNA, 19 nt, Homo sapiens
  misc_RNA (1)...(19): siRNA sense strand
gaacguccgcugguggaaa

SEQ ID NO: 910180 - RNA, 19 nt, Homo sapiens
  misc_RNA (1)...(19): siRNA sense strand
aaucugacuuucucaaaca

SEQ ID NO: 910181 - RNA, 19 nt, Homo sapiens
  misc_RNA (1)...(19): siRNA sense strand
ggcaggauuugcuguaagu

SEQ ID NO: 910182 - RNA, 19 nt, Homo sapiens
  misc_RNA (1)...(19): siRNA sense strand
gcuguaagucuucaaguca

SEQ ID NO: 910183 - RNA, 19 nt, Homo sapiens
  misc_RNA (1)...(19): siRNA sense strand
ccuauagucuggagcucuu

SEQ ID NO: 910184 - RNA, 19 nt, Homo sapiens
  misc_RNA (1)...(19): siRNA sense strand
caaauaacugcacuaaggu

SEQ ID NO: 910185 - RNA, 19 nt, Homo sapiens
  misc_RNA (1)...(19): siRNA sense strand
uguaagucuucaagucauu

SEQ ID NO: 910186 - RNA, 19 nt, Homo sapiens
  misc_RNA (1)...(19): siRNA sense strand
gacagagaagguuaaucua

SEQ ID NO: 910187 - RNA, 19 nt, Homo sapiens
  misc_RNA (1)...(19): siRNA sense strand
acagauaacaacagucgaa

SEQ ID NO: 910188 - RNA, 19 nt, Homo sapiens
  misc_RNA (1)...(19): siRNA sense strand
gcagcugcccaccaucuau

SEQ ID NO: 910189 - RNA, 19 nt, Homo sapiens
  misc_RNA (1)...(19): siRNA sense strand
aagcaaauaacugcacuaa

SEQ ID NO: 910190 - RNA, 19 nt, Homo sapiens
  misc_RNA (1)...(19): siRNA sense strand
gaagaacuggaaccgaaag

SEQ ID NO: 910191 - RNA, 19 nt, Homo sapiens
  misc_RNA (1)...(19): siRNA sense strand
uggcgcagcugcacuggau

SEQ ID NO: 910192 - RNA, 19 nt, Homo sapiens
  misc_RNA (1)...(19): siRNA sense strand
ggaaaacggcaaaguuguu

SEQ ID NO: 910193 - RNA, 19 nt, Homo sapiens
  misc_RNA (1)...(19): siRNA sense strand
cgaagaacuggaaccgaaa

SEQ ID NO: 910194 - RNA, 19 nt, Homo sapiens
  misc_RNA (1)...(19): siRNA sense strand
ggagagcagacaggccuuu

SEQ ID NO: 910195 - RNA, 19 nt, Homo sapiens
  misc_RNA (1)...(19): siRNA sense strand
ccaccuggacacagugaaa

SEQ ID NO: 910196 - RNA, 19 nt, Homo sapiens
  misc_RNA (1)...(19): siRNA sense strand
cuccugcccuggauccuaa

SEQ ID NO: 910197 - RNA, 19 nt, Homo sapiens
  misc_RNA (1)...(19): siRNA sense strand
guaagucuucaagucauuu

SEQ ID NO: 910198 - RNA, 19 nt, Homo sapiens
  misc_RNA (1)...(19): siRNA sense strand
gacuuucucaaacagauaa

SEQ ID NO: 910199 - RNA, 19 nt, Homo sapiens
  misc_RNA (1)...(19): siRNA sense strand
ccaacgagccaaaguacca

SEQ ID NO: 910200 - RNA, 19 nt, Homo sapiens
  misc_RNA (1)...(19): siRNA sense strand
acagagaagguuaaucuag

SEQ ID NO: 910201 - RNA, 19 nt, Homo sapiens
  misc_RNA (1)...(19): siRNA sense strand
uagccaacgagccaaagua

SEQ ID NO: 910202 - RNA, 19 nt, Homo sapiens
  misc_RNA (1)...(19): siRNA sense strand
gacgacaacaccuauaguc

SEQ ID NO: 910203 - RNA, 19 nt, Homo sapiens
  misc_RNA (1)...(19): siRNA sense strand
cagugaaaauugagguaua

SEQ ID NO: 910204 - RNA, 19 nt, Homo sapiens
  misc_RNA (1)...(19): siRNA sense strand
cgacauggcaggauuugcu

SEQ ID NO: 910205 - RNA, 19 nt, Homo sapiens
  misc_RNA (1)...(19): siRNA sense strand
ugacgacgacaacaccuau

SEQ ID NO: 910206 - RNA, 19 nt, Homo sapiens
  misc_RNA (1)...(19): siRNA sense strand
uaacugcacuaagguucuc

SEQ ID NO: 910207 - RNA, 19 nt, Homo sapiens
  misc_RNA (1)...(19): siRNA sense strand
uggaaccgaaagcaaauaa

SEQ ID NO: 910208 - RNA, 19 nt, Homo sapiens
  misc_RNA (1)...(19): siRNA sense strand
gaaaacggcaaaguuguug

SEQ ID NO: 910209 - RNA, 19 nt, Homo sapiens
  misc_RNA (1)...(19): siRNA sense strand
ugacuuucucaaacagaua

SEQ ID NO: 910210 - RNA, 19 nt, Homo sapiens
  misc_RNA (1)...(19): siRNA sense strand
aggauuugcuguaagucuu

SEQ ID NO: 910211 - RNA, 19 nt, Homo sapiens
  misc_RNA (1)...(19): siRNA sense strand
gacgacgacaacaccuaua

SEQ ID NO: 910212 - RNA, 19 nt, Homo sapiens
  misc_RNA (1)...(19): siRNA sense strand
caucgacauggcaggauuu

SEQ ID NO: 910213 - RNA, 19 nt, Homo sapiens
  misc_RNA (1)...(19): siRNA sense strand
cauggcaggauuugcugua

SEQ ID NO: 910214 - RNA, 19 nt, Homo sapiens
  misc_RNA (1)...(19): siRNA sense strand
agccagggaugcaagaauc

SEQ ID NO: 910215 - RNA, 19 nt, Homo sapiens
  misc_RNA (1)...(19): siRNA sense strand
aaauaacugcacuaagguu

SEQ ID NO: 910216 - RNA, 19 nt, Homo sapiens
  misc_RNA (1)...(19): siRNA sense strand
ggauuugcuguaagucuuc

SEQ ID NO: 910217 - RNA, 19 nt, Homo sapiens
  misc_RNA (1)...(19): siRNA sense strand
ggauguggcuguccugugu

SEQ ID NO: 910218 - RNA, 19 nt, Homo sapiens
  misc_RNA (1)...(19): siRNA sense strand
aggaagauguuaaccagua

SEQ ID NO: 910219 - RNA, 19 nt, Homo sapiens
  misc_RNA (1)...(19): siRNA sense strand
ggacugggcuuggcagaca

SEQ ID NO: 910220 - RNA, 19 nt, Homo sapiens
  misc_RNA (1)...(19): siRNA sense strand
gcacaaggaagcagagaug

SEQ ID NO: 910221 - RNA, 19 nt, Homo sapiens
  misc_RNA (1)...(19): siRNA sense strand
cugcugcucugcucucaua

SEQ ID NO: 910222 - RNA, 19 nt, Homo sapiens
  misc_RNA (1)...(19): siRNA sense strand
ccacuccacugcccuuuca

SEQ ID NO: 910223 - RNA, 19 nt, Homo sapiens
  misc_RNA (1)...(19): siRNA sense strand
ggaagauguuaaccaguag

SEQ ID NO: 910224 - RNA, 19 nt, Homo sapiens
  misc_RNA (1)...(19): siRNA sense strand
cuacgacacugccgaaugg

SEQ ID NO: 910225 - RNA, 19 nt, Homo sapiens
  misc_RNA (1)...(19): siRNA sense strand
gacgaugacugggacuuug

SEQ ID NO: 910226 - RNA, 19 nt, Homo sapiens
  misc_RNA (1)...(19): siRNA sense strand
cgacacugccgaauggaaa

SEQ ID NO: 910227 - RNA, 19 nt, Homo sapiens
  misc_RNA (1)...(19): siRNA sense strand
ccugugugaugaauucuug

SEQ ID NO: 910228 - RNA, 19 nt, Homo sapiens
  misc_RNA (1)...(19): siRNA sense strand
ggaugccgcuguggucugu

SEQ ID NO: 910229 - RNA, 19 nt, Homo sapiens
  misc_RNA (1)...(19): siRNA sense strand
gcaucuacgucuggucaau

SEQ ID NO: 910230 - RNA, 19 nt, Homo sapiens
  misc_RNA (1)...(19): siRNA sense strand
acaauugcuuucacuacga

SEQ ID NO: 910231 - RNA, 19 nt, Homo sapiens
  misc_RNA (1)...(19): siRNA sense strand
ggacgccaacguagugugu

SEQ ID NO: 910232 - RNA, 19 nt, Homo sapiens
  misc_RNA (1)...(19): siRNA sense strand
gaagauguuaaccaguaga

SEQ ID NO: 910233 - RNA, 19 nt, Homo sapiens
  misc_RNA (1)...(19): siRNA sense strand
gacacauccugcuggacaa

SEQ ID NO: 910234 - RNA, 19 nt, Homo sapiens
  misc_RNA (1)...(19): siRNA sense strand
ggguggagguugggagaug

SEQ ID NO: 910235 - RNA, 19 nt, Homo sapiens
  misc_RNA (1)...(19): siRNA sense strand
uguccugugugaugaauuc

SEQ ID NO: 910236 - RNA, 19 nt, Homo sapiens
  misc_RNA (1)...(19): siRNA sense strand
cgacgaugacugggacuuu

SEQ ID NO: 910237 - RNA, 19 nt, Homo sapiens
  misc_RNA (1)...(19): siRNA sense strand
gggcguccacaauugcuuu

SEQ ID NO: 910238 - RNA, 19 nt, Homo sapiens
  misc_RNA (1)...(19): siRNA sense strand
gguggacgccaacguagug

SEQ ID NO: 910239 - RNA, 19 nt, Homo sapiens
  misc_RNA (1)...(19): siRNA sense strand
ggcacugucugugaugaug

SEQ ID NO: 910240 - RNA, 19 nt, Homo sapiens
  misc_RNA (1)...(19): siRNA sense strand
ccacaauugcuuucacuac

SEQ ID NO: 910241 - RNA, 19 nt, Homo sapiens
  misc_RNA (1)...(19): siRNA sense strand
cuacgggacugggccacuu

SEQ ID NO: 910242 - RNA, 19 nt, Homo sapiens
  misc_RNA (1)...(19): siRNA sense strand
gagcaccuccuacgacacu

SEQ ID NO: 910243 - RNA, 19 nt, Homo sapiens
  misc_RNA (1)...(19): siRNA sense strand
cgugguggacgccaacgua

SEQ ID NO: 910244 - RNA, 19 nt, Homo sapiens
  misc_RNA (1)...(19): siRNA sense strand
uggcuguccugugugauga

SEQ ID NO: 910245 - RNA, 19 nt, Homo sapiens
  misc_RNA (1)...(19): siRNA sense strand
caacgccuucuucggcuau

SEQ ID NO: 910246 - RNA, 19 nt, Homo sapiens
  misc_RNA (1)...(19): siRNA sense strand
gguaugagguggagauuaa

SEQ ID NO: 910247 - RNA, 19 nt, Homo sapiens
  misc_RNA (1)...(19): siRNA sense strand
ugaggaacaugcaggauuu

SEQ ID NO: 910248 - RNA, 19 nt, Homo sapiens
  misc_RNA (1)...(19): siRNA sense strand
caggaugucuggcgaauau

SEQ ID NO: 910249 - RNA, 19 nt, Homo sapiens
  misc_RNA (1)...(19): siRNA sense strand
gagcagcugugccaccaaa

SEQ ID NO: 910250 - RNA, 19 nt, Homo sapiens
  misc_RNA (1)...(19): siRNA sense strand
ucaaggcgcuaaacaacaa

SEQ ID NO: 910251 - RNA, 19 nt, Homo sapiens
  misc_RNA (1)...(19): siRNA sense strand
gcucagagauagggaaugu

SEQ ID NO: 910252 - RNA, 19 nt, Homo sapiens
  misc_RNA (1)...(19): siRNA sense strand
ggacguggaugcugcuuac

SEQ ID NO: 910253 - RNA, 19 nt, Homo sapiens
  misc_RNA (1)...(19): siRNA sense strand
gaggauccgcucagagaua

SEQ ID NO: 910254 - RNA, 19 nt, Homo sapiens
  misc_RNA (1)...(19): siRNA sense strand
gaaccuggagcccauuuau

SEQ ID NO: 910255 - RNA, 19 nt, Homo sapiens
  misc_RNA (1)...(19): siRNA sense strand
caccaaggcugaaaucucu

SEQ ID NO: 910256 - RNA, 19 nt, Homo sapiens
  misc_RNA (1)...(19): siRNA sense strand
ggaugcugcuuacaugaau

SEQ ID NO: 910257 - RNA, 19 nt, Homo sapiens
  misc_RNA (1)...(19): siRNA sense strand
ggacugcgcccugaaagau

SEQ ID NO: 910258 - RNA, 19 nt, Homo sapiens
  misc_RNA (1)...(19): siRNA sense strand
caaguucgccuccuucauc

SEQ ID NO: 910259 - RNA, 19 nt, Homo sapiens
  misc_RNA (1)...(19): siRNA sense strand
gaugcugcuuacaugaaua

SEQ ID NO: 910260 - RNA, 19 nt, Homo sapiens
  misc_RNA (1)...(19): siRNA sense strand
gaucaaggcgcuaaacaac

SEQ ID NO: 910261 - RNA, 19 nt, Homo sapiens
  misc_RNA (1)...(19): siRNA sense strand
guggaggacuacaagaaga

SEQ ID NO: 910262 - RNA, 19 nt, Homo sapiens
  misc_RNA (1)...(19): siRNA sense strand
acgaggagauugcccuaaa

SEQ ID NO: 910263 - RNA, 19 nt, Homo sapiens
  misc_RNA (1)...(19): siRNA sense strand
ggaccuggacagcaucauu

SEQ ID NO: 910264 - RNA, 19 nt, Homo sapiens
  misc_RNA (1)...(19): siRNA sense strand
gagcagaucaaggcgcuaa

SEQ ID NO: 910265 - RNA, 19 nt, Homo sapiens
  misc_RNA (1)...(19): siRNA sense strand
ucagagauagggaauguga

SEQ ID NO: 910266 - RNA, 19 nt, Homo sapiens
  misc_RNA (1)...(19): siRNA sense strand
cagaggauccgcucagaga

SEQ ID NO: 910267 - RNA, 19 nt, Homo sapiens
  misc_RNA (1)...(19): siRNA sense strand
gccgccaacugacccauuu

SEQ ID NO: 910268 - RNA, 19 nt, Homo sapiens
  misc_RNA (1)...(19): siRNA sense strand
uugaacaacugcaggaaga

SEQ ID NO: 910269 - RNA, 19 nt, Homo sapiens
  misc_RNA (1)...(19): siRNA sense strand
gaggagauugcccuaaaga

SEQ ID NO: 910270 - RNA, 19 nt, Homo sapiens
  misc_RNA (1)...(19): siRNA sense strand
ucagcaaccugcagaagca

SEQ ID NO: 910271 - RNA, 19 nt, Homo sapiens
  misc_RNA (1)...(19): siRNA sense strand
gaagcuggcccuggauaug

SEQ ID NO: 910272 - RNA, 19 nt, Homo sapiens
  misc_RNA (1)...(19): siRNA sense strand
gaagcagugugccgaucug

SEQ ID NO: 910273 - RNA, 19 nt, Homo sapiens
  misc_RNA (1)...(19): siRNA sense strand
ugaaaucucugagcucaac

SEQ ID NO: 910274 - RNA, 19 nt, Homo sapiens
  misc_RNA (1)...(19): siRNA sense strand
gauagggaaugugaagaag

SEQ ID NO: 910275 - RNA, 19 nt, Homo sapiens
  misc_RNA (1)...(19): siRNA sense strand
cagcuggacuugaacaacu

SEQ ID NO: 910276 - RNA, 19 nt, Homo sapiens
  misc_RNA (1)...(19): siRNA sense strand
gaccuggacagcaucauug

SEQ ID NO: 910277 - RNA, 19 nt, Homo sapiens
  misc_RNA (1)...(19): siRNA sense strand
cuugacagaugagauuaaa

SEQ ID NO: 910278 - RNA, 19 nt, Homo sapiens
  misc_RNA (1)...(19): siRNA sense strand
auauggagaucgccaccua

SEQ ID NO: 910279 - RNA, 19 nt, Homo sapiens
  misc_RNA (1)...(19): siRNA sense strand
cagcagcuccgccucauuc

SEQ ID NO: 910280 - RNA, 19 nt, Homo sapiens
  misc_RNA (1)...(19): siRNA sense strand
acaacaaguucgccuccuu

SEQ ID NO: 910281 - RNA, 19 nt, Homo sapiens
  misc_RNA (1)...(19): siRNA sense strand
cugcagacgucaagaccaa

SEQ ID NO: 910282 - RNA, 19 nt, Homo sapiens
  misc_RNA (1)...(19): siRNA sense strand
uagggaaugugaagaagca

SEQ ID NO: 910283 - RNA, 19 nt, Homo sapiens
  misc_RNA (1)...(19): siRNA sense strand
cguggaugcugcuuacaug

SEQ ID NO: 910284 - RNA, 19 nt, Homo sapiens
  misc_RNA (1)...(19): siRNA sense strand
aagcaguuauagcuacaaa

SEQ ID NO: 910285 - RNA, 19 nt, Homo sapiens
  misc_RNA (1)...(19): siRNA sense strand
gugagcaucuccgucauca

SEQ ID NO: 910286 - RNA, 19 nt, Homo sapiens
  misc_RNA (1)...(19): siRNA sense strand
cagauccagucccacauca

SEQ ID NO: 910287 - RNA, 19 nt, Homo sapiens
  misc_RNA (1)...(19): siRNA sense strand
caaauucugugagcaucuc

SEQ ID NO: 910288 - RNA, 19 nt, Homo sapiens
  misc_RNA (1)...(19): siRNA sense strand
gcaggaugucuggcgaaua

SEQ ID NO: 910289 - RNA, 19 nt, Homo sapiens
  misc_RNA (1)...(19): siRNA sense strand
cgaggagauugcccuaaag

SEQ ID NO: 910290 - RNA, 19 nt, Homo sapiens
  misc_RNA (1)...(19): siRNA sense strand
ucaagcaguuauagcuaca

SEQ ID NO: 910291 - RNA, 19 nt, Homo sapiens
  misc_RNA (1)...(19): siRNA sense strand
cagaaucaggugcuagaga

SEQ ID NO: 910292 - RNA, 19 nt, Homo sapiens
  misc_RNA (1)...(19): siRNA sense strand
guggacuccuugacagaug

SEQ ID NO: 910293 - RNA, 19 nt, Homo sapiens
  misc_RNA (1)...(19): siRNA sense strand
gaacaacugcaggaagaac

SEQ ID NO: 910294 - RNA, 19 nt, Homo sapiens
  misc_RNA (1)...(19): siRNA sense strand
agauagggaaugugaagaa

SEQ ID NO: 910295 - RNA, 19 nt, Homo sapiens
  misc_RNA (1)...(19): siRNA sense strand
ggucacagcaggccagcau

SEQ ID NO: 910296 - RNA, 19 nt, Homo sapiens
  misc_RNA (1)...(19): siRNA sense strand
gaagaaccuggagcccauu

SEQ ID NO: 910297 - RNA, 19 nt, Homo sapiens
  misc_RNA (1)...(19): siRNA sense strand
ccucaagcaguuauagcua

SEQ ID NO: 910298 - RNA, 19 nt, Homo sapiens
  misc_RNA (1)...(19): siRNA sense strand
ccaaggcugaaaucucuga

SEQ ID NO: 910299 - RNA, 19 nt, Homo sapiens
  misc_RNA (1)...(19): siRNA sense strand
ggacaacaaccgggaucug

SEQ ID NO: 910300 - RNA, 19 nt, Homo sapiens
  misc_RNA (1)...(19): siRNA sense strand
gacagaugagauuaaauuc

SEQ ID NO: 910301 - RNA, 19 nt, Homo sapiens
  misc_RNA (1)...(19): siRNA sense strand
aggauuugguggaggacua

SEQ ID NO: 910302 - RNA, 19 nt, Homo sapiens
  misc_RNA (1)...(19): siRNA sense strand
gcagaagcagcuggagaug

SEQ ID NO: 910303 - RNA, 19 nt, Homo sapiens
  misc_RNA (1)...(19): siRNA sense strand
ggaacaugcaggauuuggu

SEQ ID NO: 910304 - RNA, 19 nt, Homo sapiens
  misc_RNA (1)...(19): siRNA sense strand
gaccaaguggaaccuccua

SEQ ID NO: 910305 - RNA, 19 nt, Homo sapiens
  misc_RNA (1)...(19): siRNA sense strand
accuggagcccauuuauga

SEQ ID NO: 910306 - RNA, 19 nt, Homo sapiens
  misc_RNA (1)...(19): siRNA sense strand
gggacugcgcccugaaaga

SEQ ID NO: 910307 - RNA, 19 nt, Homo sapiens
  misc_RNA (1)...(19): siRNA sense strand
gagauagggaaugugaaga

SEQ ID NO: 910308 - RNA, 19 nt, Homo sapiens
  misc_RNA (1)...(19): siRNA sense strand
gcagcagcuccgccucauu

SEQ ID NO: 910309 - RNA, 19 nt, Homo sapiens
  misc_RNA (1)...(19): siRNA sense strand
gguggaggacuacaagaag

SEQ ID NO: 910310 - RNA, 19 nt, Homo sapiens
  misc_RNA (1)...(19): siRNA sense strand
gcucaagaaggacguggau

SEQ ID NO: 910311 - RNA, 19 nt, Homo sapiens
  misc_RNA (1)...(19): siRNA sense strand
gcagacgucaagaccaaag

SEQ ID NO: 910312 - RNA, 19 nt, Homo sapiens
  misc_RNA (1)...(19): siRNA sense strand
gucaucagcagcaccaaug

SEQ ID NO: 910313 - RNA, 19 nt, Homo sapiens
  misc_RNA (1)...(19): siRNA sense strand
ucuggcgaauauccaaauu

SEQ ID NO: 910314 - RNA, 19 nt, Homo sapiens
  misc_RNA (1)...(19): siRNA sense strand
cugaggaacaugcaggauu

SEQ ID NO: 910315 - RNA, 19 nt, Homo sapiens
  misc_RNA (1)...(19): siRNA sense strand
gcucaccaaggcugaaauc

SEQ ID NO: 910316 - RNA, 19 nt, Homo sapiens
  misc_RNA (1)...(19): siRNA sense strand
ucaggucaccgucaacaag

SEQ ID NO: 910317 - RNA, 19 nt, Homo sapiens
  misc_RNA (1)...(19): siRNA sense strand
uggacuccuugacagauga

SEQ ID NO: 910318 - RNA, 19 nt, Homo sapiens
  misc_RNA (1)...(19): siRNA sense strand
ggacuacaagaagagguau

SEQ ID NO: 910319 - RNA, 19 nt, Homo sapiens
  misc_RNA (1)...(19): siRNA sense strand
caggucaccgucaacaaga

SEQ ID NO: 910320 - RNA, 19 nt, Homo sapiens
  misc_RNA (1)...(19): siRNA sense strand
gcacauucauggccauugg

SEQ ID NO: 910321 - RNA, 19 nt, Homo sapiens
  misc_RNA (1)...(19): siRNA sense strand
gcagaguggcggcaccuuu

SEQ ID NO: 910322 - RNA, 19 nt, Homo sapiens
  misc_RNA (1)...(19): siRNA sense strand
caaaaugggcuucgugaug

SEQ ID NO: 910323 - RNA, 19 nt, Homo sapiens
  misc_RNA (1)...(19): siRNA sense strand
cagaguggcggcaccuuug

SEQ ID NO: 910324 - RNA, 19 nt, Homo sapiens
  misc_RNA (1)...(19): siRNA sense strand
cugcuucgaccgugucaaa

SEQ ID NO: 910325 - RNA, 19 nt, Homo sapiens
  misc_RNA (1)...(19): siRNA sense strand
cggcaccuuuggcacauuc

SEQ ID NO: 910326 - RNA, 19 nt, Homo sapiens
  misc_RNA (1)...(19): siRNA sense strand
ccaaagaacuuaaggauuu

SEQ ID NO: 910327 - RNA, 19 nt, Homo sapiens
  misc_RNA (1)...(19): siRNA sense strand
uuaaggauuucugcaagua

SEQ ID NO: 910328 - RNA, 19 nt, Homo sapiens
  misc_RNA (1)...(19): siRNA sense strand
caaagaacuuaaggauuuc

SEQ ID NO: 910329 - RNA, 19 nt, Homo sapiens
  misc_RNA (1)...(19): siRNA sense strand
aaccauaucugcgcauuga

SEQ ID NO: 910330 - RNA, 19 nt, Homo sapiens
  misc_RNA (1)...(19): siRNA sense strand
ggaaccauaucugcgcauu

SEQ ID NO: 910331 - RNA, 19 nt, Homo sapiens
  misc_RNA (1)...(19): siRNA sense strand
ccgccuggguguccucuuu

SEQ ID NO: 910332 - RNA, 19 nt, Homo sapiens
  misc_RNA (1)...(19): siRNA sense strand
gcucuacagccaucucuug

SEQ ID NO: 910333 - RNA, 19 nt, Homo sapiens
  misc_RNA (1)...(19): siRNA sense strand
gaaccauaucugcgcauug

SEQ ID NO: 910334 - RNA, 19 nt, Homo sapiens
  misc_RNA (1)...(19): siRNA sense strand
gacaugcacaucaucauca

SEQ ID NO: 910335 - RNA, 19 nt, Homo sapiens
  misc_RNA (1)...(19): siRNA sense strand
gcccaaagaacuuaaggau

SEQ ID NO: 910336 - RNA, 19 nt, Homo sapiens
  misc_RNA (1)...(19): siRNA sense strand
caaagagcgugcgccuugu

SEQ ID NO: 910337 - RNA, 19 nt, Homo sapiens
  misc_RNA (1)...(19): siRNA sense strand
aaggauuucugcaaguaug

SEQ ID NO: 910338 - RNA, 19 nt, Homo sapiens
  misc_RNA (1)...(19): siRNA sense strand
cgacaugcacaucaucauc

SEQ ID NO: 910339 - RNA, 19 nt, Homo sapiens
  misc_RNA (1)...(19): siRNA sense strand
acaugcacaucaucaucaa

SEQ ID NO: 910340 - RNA, 19 nt, Homo sapiens
  misc_RNA (1)...(19): siRNA sense strand
ccaccugcccaaagaacuu

SEQ ID NO: 910341 - RNA, 19 nt, Homo sapiens
  misc_RNA (1)...(19): siRNA sense strand
ggcuccaccugcccaaaga

SEQ ID NO: 910342 - RNA, 19 nt, Homo sapiens
  misc_RNA (1)...(19): siRNA sense strand
caucaacggcgaggacaug

SEQ ID NO: 910343 - RNA, 19 nt, Homo sapiens
  misc_RNA (1)...(19): siRNA sense strand
cccaaagaacuuaaggauu

SEQ ID NO: 910344 - RNA, 19 nt, Homo sapiens
  misc_RNA (1)...(19): siRNA sense strand
ugccaucccugcagacucu

SEQ ID NO: 910345 - RNA, 19 nt, Homo sapiens
  misc_RNA (1)...(19): siRNA sense strand
cuuaaggauuucugcaagu

SEQ ID NO: 910346 - RNA, 19 nt, Homo sapiens
  misc_RNA (1)...(19): siRNA sense strand
uaaggauuucugcaaguau

SEQ ID NO: 910347 - RNA, 19 nt, Homo sapiens
  misc_RNA (1)...(19): siRNA sense strand
ucuuggaccagcucuauga

SEQ ID NO: 910348 - RNA, 19 nt, Homo sapiens
  misc_RNA (1)...(19): siRNA sense strand
ccaggcugcucucucauua

SEQ ID NO: 910349 - RNA, 19 nt, Homo sapiens
  misc_RNA (1)...(19): siRNA sense strand
gcugcucucucauuauaaa

SEQ ID NO: 910350 - RNA, 19 nt, Homo sapiens
  misc_RNA (1)...(19): siRNA sense strand
aggaagagcuggagaaugg

SEQ ID NO: 910351 - RNA, 19 nt, Homo sapiens
  misc_RNA (1)...(19): siRNA sense strand
aggcugcucucucauuaua

SEQ ID NO: 910352 - RNA, 19 nt, Homo sapiens
  misc_RNA (1)...(19): siRNA sense strand
ucgaggacuuccaauauga

SEQ ID NO: 910353 - RNA, 19 nt, Homo sapiens
  misc_RNA (1)...(19): siRNA sense strand
gggaagguguggcaaugug

SEQ ID NO: 910354 - RNA, 19 nt, Homo sapiens
  misc_RNA (1)...(19): siRNA sense strand
aaucgaggacuuccaauau

SEQ ID NO: 910355 - RNA, 19 nt, Homo sapiens
  misc_RNA (1)...(19): siRNA sense strand
aaaucgaggacuuccaaua

SEQ ID NO: 910356 - RNA, 19 nt, Homo sapiens
  misc_RNA (1)...(19): siRNA sense strand
ccaaggaagagcuggagaa

SEQ ID NO: 910357 - RNA, 19 nt, Homo sapiens
  misc_RNA (1)...(19): siRNA sense strand
uguccaggcugcucucuca

SEQ ID NO: 910358 - RNA, 19 nt, Homo sapiens
  misc_RNA (1)...(19): siRNA sense strand
ggacucggagacauauuuc

SEQ ID NO: 910359 - RNA, 19 nt, Homo sapiens
  misc_RNA (1)...(19): siRNA sense strand
caaggaagagcuggagaau

SEQ ID NO: 910360 - RNA, 19 nt, Homo sapiens
  misc_RNA (1)...(19): siRNA sense strand
ggaagguguggcaaugugu

SEQ ID NO: 910361 - RNA, 19 nt, Homo sapiens
  misc_RNA (1)...(19): siRNA sense strand
gaaaucgaggacuuccaau

SEQ ID NO: 910362 - RNA, 19 nt, Homo sapiens
  misc_RNA (1)...(19): siRNA sense strand
ucaguuugcguguggagaa

SEQ ID NO: 910363 - RNA, 19 nt, Homo sapiens
  misc_RNA (1)...(19): siRNA sense strand
caguuugcguguggagaaa

SEQ ID NO: 910364 - RNA, 19 nt, Homo sapiens
  misc_RNA (1)...(19): siRNA sense strand
gagaagaaguugcaucgua

SEQ ID NO: 910365 - RNA, 19 nt, Homo sapiens
  misc_RNA (1)...(19): siRNA sense strand
ggacauggcuggcucuuca

SEQ ID NO: 910366 - RNA, 19 nt, Homo sapiens
  misc_RNA (1)...(19): siRNA sense strand
cuacagcugugaugcauua

SEQ ID NO: 910367 - RNA, 19 nt, Homo sapiens
  misc_RNA (1)...(19): siRNA sense strand
gcacauacauggugacucu

SEQ ID NO: 910368 - RNA, 19 nt, Homo sapiens
  misc_RNA (1)...(19): siRNA sense strand
gaacaggugcuccuucauu

SEQ ID NO: 910369 - RNA, 19 nt, Homo sapiens
  misc_RNA (1)...(19): siRNA sense strand
gcaaauccauccuuuaaaa

SEQ ID NO: 910370 - RNA, 19 nt, Homo sapiens
  misc_RNA (1)...(19): siRNA sense strand
ggaggacucucaccagguu

SEQ ID NO: 910371 - RNA, 19 nt, Homo sapiens
  misc_RNA (1)...(19): siRNA sense strand
gagaacaggugcuccuuca

SEQ ID NO: 910372 - RNA, 19 nt, Homo sapiens
  misc_RNA (1)...(19): siRNA sense strand
gaacaaggaacgagaaagu

SEQ ID NO: 910373 - RNA, 19 nt, Homo sapiens
  misc_RNA (1)...(19): siRNA sense strand
gaaguugcaucguaguuca

SEQ ID NO: 910374 - RNA, 19 nt, Homo sapiens
  misc_RNA (1)...(19): siRNA sense strand
cagcaaauccauccuuuaa

SEQ ID NO: 910375 - RNA, 19 nt, Homo sapiens
  misc_RNA (1)...(19): siRNA sense strand
gcucugaacuagccuacaa

SEQ ID NO: 910376 - RNA, 19 nt, Homo sapiens
  misc_RNA (1)...(19): siRNA sense strand
ggugaaauuugucugcauu

SEQ ID NO: 910377 - RNA, 19 nt, Homo sapiens
  misc_RNA (1)...(19): siRNA sense strand
ccugugaacugcuguggua

SEQ ID NO: 910378 - RNA, 19 nt, Homo sapiens
  misc_RNA (1)...(19): siRNA sense strand
cagcugugaugcauuauug

SEQ ID NO: 910379 - RNA, 19 nt, Homo sapiens
  misc_RNA (1)...(19): siRNA sense strand
ccacacaacccgacucuug

SEQ ID NO: 910380 - RNA, 19 nt, Homo sapiens
  misc_RNA (1)...(19): siRNA sense strand
ccaaaggcuugaagaacuu

SEQ ID NO: 910381 - RNA, 19 nt, Homo sapiens
  misc_RNA (1)...(19): siRNA sense strand
ccacaccuccucccaaauu

SEQ ID NO: 910382 - RNA, 19 nt, Homo sapiens
  misc_RNA (1)...(19): siRNA sense strand
gcccacaccuccucccaaa

SEQ ID NO: 910383 - RNA, 19 nt, Homo sapiens
  misc_RNA (1)...(19): siRNA sense strand
caacccgacucuuggagaa

SEQ ID NO: 910384 - RNA, 19 nt, Homo sapiens
  misc_RNA (1)...(19): siRNA sense strand
ggacggaacgacaugauuc

SEQ ID NO: 910385 - RNA, 19 nt, Homo sapiens
  misc_RNA (1)...(19): siRNA sense strand
guacaaguguccucaaagc

SEQ ID NO: 910386 - RNA, 19 nt, Homo sapiens
  misc_RNA (1)...(19): siRNA sense strand
ucagugaacuaaacacaca

SEQ ID NO: 910387 - RNA, 19 nt, Homo sapiens
  misc_RNA (1)...(19): siRNA sense strand
caagaaggcuuuuggaauc

SEQ ID NO: 910388 - RNA, 19 nt, Homo sapiens
  misc_RNA (1)...(19): siRNA sense strand
uaagaugaccgaccuguuc

SEQ ID NO: 910389 - RNA, 19 nt, Homo sapiens
  misc_RNA (1)...(19): siRNA sense strand
cguacuugcuccuaaggua

SEQ ID NO: 910390 - RNA, 19 nt, Homo sapiens
  misc_RNA (1)...(19): siRNA sense strand
ggacugcauccucugcuuu

SEQ ID NO: 910391 - RNA, 19 nt, Homo sapiens
  misc_RNA (1)...(19): siRNA sense strand
agacaccacuggcaaaucu

SEQ ID NO: 910392 - RNA, 19 nt, Homo sapiens
  misc_RNA (1)...(19): siRNA sense strand
cauccucuaugcuuucuug

SEQ ID NO: 910393 - RNA, 19 nt, Homo sapiens
  misc_RNA (1)...(19): siRNA sense strand
ggagaacaaggaacgagaa

SEQ ID NO: 910394 - RNA, 19 nt, Homo sapiens
  misc_RNA (1)...(19): siRNA sense strand
gcagcugcuucaagaccua

SEQ ID NO: 910395 - RNA, 19 nt, Homo sapiens
  misc_RNA (1)...(19): siRNA sense strand
ccagccaucugagcucuuu

SEQ ID NO: 910396 - RNA, 19 nt, Homo sapiens
  misc_RNA (1)...(19): siRNA sense strand
ggcagaagaaguaccagua

SEQ ID NO: 910397 - RNA, 19 nt, Homo sapiens
  misc_RNA (1)...(19): siRNA sense strand
gcaugccacugaaguccaa

SEQ ID NO: 910398 - RNA, 19 nt, Homo sapiens
  misc_RNA (1)...(19): siRNA sense strand
cacaccuccucccaaauua

SEQ ID NO: 910399 - RNA, 19 nt, Homo sapiens
  misc_RNA (1)...(19): siRNA sense strand
caucguaguucagcaaauc

SEQ ID NO: 910400 - RNA, 19 nt, Homo sapiens
  misc_RNA (1)...(19): siRNA sense strand
uagcaaaagugaugaagaa

SEQ ID NO: 910401 - RNA, 19 nt, Homo sapiens
  misc_RNA (1)...(19): siRNA sense strand
ccagcguacuugcuccuaa

SEQ ID NO: 910402 - RNA, 19 nt, Homo sapiens
  misc_RNA (1)...(19): siRNA sense strand
gcucuucaguggacguuca

SEQ ID NO: 910403 - RNA, 19 nt, Homo sapiens
  misc_RNA (1)...(19): siRNA sense strand
caaggugucaagccucuuu

SEQ ID NO: 910404 - RNA, 19 nt, Homo sapiens
  misc_RNA (1)...(19): siRNA sense strand
gagaacaaggaacgagaaa

SEQ ID NO: 910405 - RNA, 19 nt, Homo sapiens
  misc_RNA (1)...(19): siRNA sense strand
cuucugaccuggccaagau

SEQ ID NO: 910406 - RNA, 19 nt, Homo sapiens
  misc_RNA (1)...(19): siRNA sense strand
gcauucggacccaaucaaa

SEQ ID NO: 910407 - RNA, 19 nt, Homo sapiens
  misc_RNA (1)...(19): siRNA sense strand
caagaccuaugaggacuuc

SEQ ID NO: 910408 - RNA, 19 nt, Homo sapiens
  misc_RNA (1)...(19): siRNA sense strand
gcaccuccauccgcgaaga

SEQ ID NO: 910409 - RNA, 19 nt, Homo sapiens
  misc_RNA (1)...(19): siRNA sense strand
gcuccaggaucgugguaug

SEQ ID NO: 910410 - RNA, 19 nt, Homo sapiens
  misc_RNA (1)...(19): siRNA sense strand
gcaagcaugccacugaagu

SEQ ID NO: 910411 - RNA, 19 nt, Homo sapiens
  misc_RNA (1)...(19): siRNA sense strand
gccacauccucuaugcuuu

SEQ ID NO: 910412 - RNA, 19 nt, Homo sapiens
  misc_RNA (1)...(19): siRNA sense strand
gaacuuucuuaagguagau

SEQ ID NO: 910413 - RNA, 19 nt, Homo sapiens
  misc_RNA (1)...(19): siRNA sense strand
cauacauggugacucuaaa

SEQ ID NO: 910414 - RNA, 19 nt, Homo sapiens
  misc_RNA (1)...(19): siRNA sense strand
caacgagagacuagauaga

SEQ ID NO: 910415 - RNA, 19 nt, Homo sapiens
  misc_RNA (1)...(19): siRNA sense strand
guacaacgagagacuagau

SEQ ID NO: 910416 - RNA, 19 nt, Homo sapiens
  misc_RNA (1)...(19): siRNA sense strand
ggauuacauagacuucuuu

SEQ ID NO: 910417 - RNA, 19 nt, Homo sapiens
  misc_RNA (1)...(19): siRNA sense strand
gcaaggacggaacgacaug

SEQ ID NO: 910418 - RNA, 19 nt, Homo sapiens
  misc_RNA (1)...(19): siRNA sense strand
gccgguggcagaagaagua

SEQ ID NO: 910419 - RNA, 19 nt, Homo sapiens
  misc_RNA (1)...(19): siRNA sense strand
uuaaaagucucaugaagga

SEQ ID NO: 910420 - RNA, 19 nt, Homo sapiens
  misc_RNA (1)...(19): siRNA sense strand
caaucaaacaggaagagaa

SEQ ID NO: 910421 - RNA, 19 nt, Homo sapiens
  misc_RNA (1)...(19): siRNA sense strand
ucagcaaauccauccuuua

SEQ ID NO: 910422 - RNA, 19 nt, Homo sapiens
  misc_RNA (1)...(19): siRNA sense strand
cgagagacuagauagacua

SEQ ID NO: 910423 - RNA, 19 nt, Homo sapiens
  misc_RNA (1)...(19): siRNA sense strand
caaugugccugcagagacu

SEQ ID NO: 910424 - RNA, 19 nt, Homo sapiens
  misc_RNA (1)...(19): siRNA sense strand
gcauccuccuuuccaucua

SEQ ID NO: 910425 - RNA, 19 nt, Homo sapiens
  misc_RNA (1)...(19): siRNA sense strand
gaacacccagggccacauc

SEQ ID NO: 910426 - RNA, 19 nt, Homo sapiens
  misc_RNA (1)...(19): siRNA sense strand
gcagggaguuagcaaaccu

SEQ ID NO: 910427 - RNA, 19 nt, Homo sapiens
  misc_RNA (1)...(19): siRNA sense strand
agugggaggugguacagaa

SEQ ID NO: 910428 - RNA, 19 nt, Homo sapiens
  misc_RNA (1)...(19): siRNA sense strand
cugggcagcugcuucaaga

SEQ ID NO: 910429 - RNA, 19 nt, Homo sapiens
  misc_RNA (1)...(19): siRNA sense strand
ggagacaccacuggcaaau

SEQ ID NO: 910430 - RNA, 19 nt, Homo sapiens
  misc_RNA (1)...(19): siRNA sense strand
ggccacauccucuaugcuu

SEQ ID NO: 910431 - RNA, 19 nt, Homo sapiens
  misc_RNA (1)...(19): siRNA sense strand
caagauagcaaaagugaug

SEQ ID NO: 910432 - RNA, 19 nt, Homo sapiens
  misc_RNA (1)...(19): siRNA sense strand
uggauuacauagacuucuu

SEQ ID NO: 910433 - RNA, 19 nt, Homo sapiens
  misc_RNA (1)...(19): siRNA sense strand
cuagauaagguacaagugu

SEQ ID NO: 910434 - RNA, 19 nt, Homo sapiens
  misc_RNA (1)...(19): siRNA sense strand
aacaggugcuccuucauuc

SEQ ID NO: 910435 - RNA, 19 nt, Homo sapiens
  misc_RNA (1)...(19): siRNA sense strand
ugaaguccaagaaggcuuu

SEQ ID NO: 910436 - RNA, 19 nt, Homo sapiens
  misc_RNA (1)...(19): siRNA sense strand
gagcaucuucacagaguuc

SEQ ID NO: 910437 - RNA, 19 nt, Homo sapiens
  misc_RNA (1)...(19): siRNA sense strand
guaagaugaccgaccuguu

SEQ ID NO: 910438 - RNA, 19 nt, Homo sapiens
  misc_RNA (1)...(19): siRNA sense strand
uuccagagcaguaagauga

SEQ ID NO: 910439 - RNA, 19 nt, Homo sapiens
  misc_RNA (1)...(19): siRNA sense strand
ccuaugaggacuucaagga

SEQ ID NO: 910440 - RNA, 19 nt, Homo sapiens
  misc_RNA (1)...(19): siRNA sense strand
gcgcaagauuguggauauc

SEQ ID NO: 910441 - RNA, 19 nt, Homo sapiens
  misc_RNA (1)...(19): siRNA sense strand
gcaucguaguucagcaaau

SEQ ID NO: 910442 - RNA, 19 nt, Homo sapiens
  misc_RNA (1)...(19): siRNA sense strand
uguaugugcaggugaaauu

SEQ ID NO: 910443 - RNA, 19 nt, Homo sapiens
  misc_RNA (1)...(19): siRNA sense strand
gaagaaguugcaucguagu

SEQ ID NO: 910444 - RNA, 19 nt, Homo sapiens
  misc_RNA (1)...(19): siRNA sense strand
ccacauccucuaugcuuuc

SEQ ID NO: 910445 - RNA, 19 nt, Homo sapiens
  misc_RNA (1)...(19): siRNA sense strand
uggcaaaucucaaaagaca

SEQ ID NO: 910446 - RNA, 19 nt, Homo sapiens
  misc_RNA (1)...(19): siRNA sense strand
ugcgcaagauuguggauau

SEQ ID NO: 910447 - RNA, 19 nt, Homo sapiens
  misc_RNA (1)...(19): siRNA sense strand
cugcagcuguuccuuucaa

SEQ ID NO: 910448 - RNA, 19 nt, Homo sapiens
  misc_RNA (1)...(19): siRNA sense strand
ucaccagguuagcaaagau

SEQ ID NO: 910449 - RNA, 19 nt, Homo sapiens
  misc_RNA (1)...(19): siRNA sense strand
cagccucccugcagaagag

SEQ ID NO: 910450 - RNA, 19 nt, Homo sapiens
  misc_RNA (1)...(19): siRNA sense strand
caaggucaagguggucuuu

SEQ ID NO: 910451 - RNA, 19 nt, Homo sapiens
  misc_RNA (1)...(19): siRNA sense strand
cugagcaucuucacagagu

SEQ ID NO: 910452 - RNA, 19 nt, Homo sapiens
  misc_RNA (1)...(19): siRNA sense strand
uuccauggcuuccuucagu

SEQ ID NO: 910453 - RNA, 19 nt, Homo sapiens
  misc_RNA (1)...(19): siRNA sense strand
ccgcgaagacauccuguau

SEQ ID NO: 910454 - RNA, 19 nt, Homo sapiens
  misc_RNA (1)...(19): siRNA sense strand
uaaacacacagcacauaca

SEQ ID NO: 910455 - RNA, 19 nt, Homo sapiens
  misc_RNA (1)...(19): siRNA sense strand
cagcagccaggagacuuua

SEQ ID NO: 910456 - RNA, 19 nt, Homo sapiens
  misc_RNA (1)...(19): siRNA sense strand
cagcguacuugcuccuaag

SEQ ID NO: 910457 - RNA, 19 nt, Homo sapiens
  misc_RNA (1)...(19): siRNA sense strand
caccuccucccaaauuaaa

SEQ ID NO: 910458 - RNA, 19 nt, Homo sapiens
  misc_RNA (1)...(19): siRNA sense strand
gugcuucagcgccuacaaa

SEQ ID NO: 910459 - RNA, 19 nt, Homo sapiens
  misc_RNA (1)...(19): siRNA sense strand
accaaaggcuugaagaacu

SEQ ID NO: 910460 - RNA, 19 nt, Homo sapiens
  misc_RNA (1)...(19): siRNA sense strand
gcaaaucucaaaagacaau

SEQ ID NO: 910461 - RNA, 19 nt, Homo sapiens
  misc_RNA (1)...(19): siRNA sense strand
aaacacacagcacauacau

SEQ ID NO: 910462 - RNA, 19 nt, Homo sapiens
  misc_RNA (1)...(19): siRNA sense strand
guacagcagcagucacaag

SEQ ID NO: 910463 - RNA, 19 nt, Homo sapiens
  misc_RNA (1)...(19): siRNA sense strand
guaugugcaggugaaauuu

SEQ ID NO: 910464 - RNA, 19 nt, Homo sapiens
  misc_RNA (1)...(19): siRNA sense strand
gaaggaaccuggagaagua

SEQ ID NO: 910465 - RNA, 19 nt, Homo sapiens
  misc_RNA (1)...(19): siRNA sense strand
cagaagaguugaagaauua

SEQ ID NO: 910466 - RNA, 19 nt, Homo sapiens
  misc_RNA (1)...(19): siRNA sense strand
caaauaaccuguggaaaua

SEQ ID NO: 910467 - RNA, 19 nt, Homo sapiens
  misc_RNA (1)...(19): siRNA sense strand
gcaaacauguucuauauug

SEQ ID NO: 910468 - RNA, 19 nt, Homo sapiens
  misc_RNA (1)...(19): siRNA sense strand
gaaagaguaugauuuggaa

SEQ ID NO: 910469 - RNA, 19 nt, Homo sapiens
  misc_RNA (1)...(19): siRNA sense strand
gaagagcucuacaauacaa

SEQ ID NO: 910470 - RNA, 19 nt, Homo sapiens
  misc_RNA (1)...(19): siRNA sense strand
gcaccaaccucaauaggaa

SEQ ID NO: 910471 - RNA, 19 nt, Homo sapiens
  misc_RNA (1)...(19): siRNA sense strand
ucagaacacuuucaacuuu

SEQ ID NO: 910472 - RNA, 19 nt, Homo sapiens
  misc_RNA (1)...(19): siRNA sense strand
cagcaaacauguucuauau

SEQ ID NO: 910473 - RNA, 19 nt, Homo sapiens
  misc_RNA (1)...(19): siRNA sense strand
aaacaaggaccuacuaaua

SEQ ID NO: 910474 - RNA, 19 nt, Homo sapiens
  misc_RNA (1)...(19): siRNA sense strand
gaggagaaauugaugaaga

SEQ ID NO: 910475 - RNA, 19 nt, Homo sapiens
  misc_RNA (1)...(19): siRNA sense strand
caacaacaauggugaugaa

SEQ ID NO: 910476 - RNA, 19 nt, Homo sapiens
  misc_RNA (1)...(19): siRNA sense strand
caacaacguuuacuuagau

SEQ ID NO: 910477 - RNA, 19 nt, Homo sapiens
  misc_RNA (1)...(19): siRNA sense strand
gaaacugucuugccucugu

SEQ ID NO: 910478 - RNA, 19 nt, Homo sapiens
  misc_RNA (1)...(19): siRNA sense strand
cgaauaaccuugauugaca

SEQ ID NO: 910479 - RNA, 19 nt, Homo sapiens
  misc_RNA (1)...(19): siRNA sense strand
gagaagaaauaacugucua

SEQ ID NO: 910480 - RNA, 19 nt, Homo sapiens
  misc_RNA (1)...(19): siRNA sense strand
ggagaucgcuggagagaag

SEQ ID NO: 910481 - RNA, 19 nt, Homo sapiens
  misc_RNA (1)...(19): siRNA sense strand
gaaaugaagcucagaagga

SEQ ID NO: 910482 - RNA, 19 nt, Homo sapiens
  misc_RNA (1)...(19): siRNA sense strand
caacaauggugaugaaauc

SEQ ID NO: 910483 - RNA, 19 nt, Homo sapiens
  misc_RNA (1)...(19): siRNA sense strand
uaaagaaagugaacaaugg

SEQ ID NO: 910484 - RNA, 19 nt, Homo sapiens
  misc_RNA (1)...(19): siRNA sense strand
gcaauuaaaucuggcaaug

SEQ ID NO: 910485 - RNA, 19 nt, Homo sapiens
  misc_RNA (1)...(19): siRNA sense strand
gagcguggauaauaacuga

SEQ ID NO: 910486 - RNA, 19 nt, Homo sapiens
  misc_RNA (1)...(19): siRNA sense strand
caagaaacacaaaguagua

SEQ ID NO: 910487 - RNA, 19 nt, Homo sapiens
  misc_RNA (1)...(19): siRNA sense strand
gagucuagcucgagauauu

SEQ ID NO: 910488 - RNA, 19 nt, Homo sapiens
  misc_RNA (1)...(19): siRNA sense strand
gugcaggaguggcuuguua

SEQ ID NO: 910489 - RNA, 19 nt, Homo sapiens
  misc_RNA (1)...(19): siRNA sense strand
cagaacacuuucaacuuua

SEQ ID NO: 910490 - RNA, 19 nt, Homo sapiens
  misc_RNA (1)...(19): siRNA sense strand
agagagaccuuauuggaaa

SEQ ID NO: 910491 - RNA, 19 nt, Homo sapiens
  misc_RNA (1)...(19): siRNA sense strand
acaaacaccuggcagauga

SEQ ID NO: 910492 - RNA, 19 nt, Homo sapiens
  misc_RNA (1)...(19): siRNA sense strand
gaagaggaguacagcaaga

SEQ ID NO: 910493 - RNA, 19 nt, Homo sapiens
  misc_RNA (1)...(19): siRNA sense strand
gcacagccauacaaauuca

SEQ ID NO: 910494 - RNA, 19 nt, Homo sapiens
  misc_RNA (1)...(19): siRNA sense strand
acuaugcccucuaaauuua

SEQ ID NO: 910495 - RNA, 19 nt, Homo sapiens
  misc_RNA (1)...(19): siRNA sense strand
uggaagagcucuacaauac

SEQ ID NO: 910496 - RNA, 19 nt, Homo sapiens
  misc_RNA (1)...(19): siRNA sense strand
gggauuguauuaccauauu

SEQ ID NO: 910497 - RNA, 19 nt, Homo sapiens
  misc_RNA (1)...(19): siRNA sense strand
acaacaaccucuacagaaa

SEQ ID NO: 910498 - RNA, 19 nt, Homo sapiens
  misc_RNA (1)...(19): siRNA sense strand
caucaugccaaguauauua

SEQ ID NO: 910499 - RNA, 19 nt, Homo sapiens
  misc_RNA (1)...(19): siRNA sense strand
ucccaggacuuccaauuua

SEQ ID NO: 910500 - RNA, 19 nt, Homo sapiens
  misc_RNA (1)...(19): siRNA sense strand
ccaugacgcuguugacgua

SEQ ID NO: 910501 - RNA, 19 nt, Homo sapiens
  misc_RNA (1)...(19): siRNA sense strand
gugaagcucuuaauagaau

SEQ ID NO: 910502 - RNA, 19 nt, Homo sapiens
  misc_RNA (1)...(19): siRNA sense strand
gguuaaagcugcagagaca

SEQ ID NO: 910503 - RNA, 19 nt, Homo sapiens
  misc_RNA (1)...(19): siRNA sense strand
caagaucucagccuccuua

SEQ ID NO: 910504 - RNA, 19 nt, Homo sapiens
  misc_RNA (1)...(19): siRNA sense strand
uggaucaucuguuacauuu

SEQ ID NO: 910505 - RNA, 19 nt, Homo sapiens
  misc_RNA (1)...(19): siRNA sense strand
ucaaauaaccuguggaaau

SEQ ID NO: 910506 - RNA, 19 nt, Homo sapiens
  misc_RNA (1)...(19): siRNA sense strand
ucagaagaguugaagaauu

SEQ ID NO: 910507 - RNA, 19 nt, Homo sapiens
  misc_RNA (1)...(19): siRNA sense strand
acaaugaccugcugguuug

SEQ ID NO: 910508 - RNA, 19 nt, Homo sapiens
  misc_RNA (1)...(19): siRNA sense strand
gggcaaguauggaaaugaa

SEQ ID NO: 910509 - RNA, 19 nt, Homo sapiens
  misc_RNA (1)...(19): siRNA sense strand
gaaaugagucugcagaaag

SEQ ID NO: 910510 - RNA, 19 nt, Homo sapiens
  misc_RNA (1)...(19): siRNA sense strand
gcauagacaucauauucug

SEQ ID NO: 910511 - RNA, 19 nt, Homo sapiens
  misc_RNA (1)...(19): siRNA sense strand
gcauuuacaucuucaccaa

SEQ ID NO: 910512 - RNA, 19 nt, Homo sapiens
  misc_RNA (1)...(19): siRNA sense strand
gaacaagcaaugucagaug

SEQ ID NO: 910513 - RNA, 19 nt, Homo sapiens
  misc_RNA (1)...(19): siRNA sense strand
ggaaguauaacaacaacaa

SEQ ID NO: 910514 - RNA, 19 nt, Homo sapiens
  misc_RNA (1)...(19): siRNA sense strand
ucaagaggaucucagcaaa

SEQ ID NO: 910515 - RNA, 19 nt, Homo sapiens
  misc_RNA (1)...(19): siRNA sense strand
gaagauggaagaugugaau

SEQ ID NO: 910516 - RNA, 19 nt, Homo sapiens
  misc_RNA (1)...(19): siRNA sense strand
agucuaugcuggagaaaua

SEQ ID NO: 910517 - RNA, 19 nt, Homo sapiens
  misc_RNA (1)...(19): siRNA sense strand
gagaggaggccacgguuaa

SEQ ID NO: 910518 - RNA, 19 nt, Homo sapiens
  misc_RNA (1)...(19): siRNA sense strand
gaacugcacagccauacaa

SEQ ID NO: 910519 - RNA, 19 nt, Homo sapiens
  misc_RNA (1)...(19): siRNA sense strand
gaaccuccaucgcuuucuu

SEQ ID NO: 910520 - RNA, 19 nt, Homo sapiens
  misc_RNA (1)...(19): siRNA sense strand
ucucagaccauaccauuua

SEQ ID NO: 910521 - RNA, 19 nt, Homo sapiens
  misc_RNA (1)...(19): siRNA sense strand
ggacuucuuugcugugaau

SEQ ID NO: 910522 - RNA, 19 nt, Homo sapiens
  misc_RNA (1)...(19): siRNA sense strand
gaaagucuaugaguucuac

SEQ ID NO: 910523 - RNA, 19 nt, Homo sapiens
  misc_RNA (1)...(19): siRNA sense strand
ccaggaaagucuaugaguu

SEQ ID NO: 910524 - RNA, 19 nt, Homo sapiens
  misc_RNA (1)...(19): siRNA sense strand
ggcagaagauggcuauguu

SEQ ID NO: 910525 - RNA, 19 nt, Homo sapiens
  misc_RNA (1)...(19): siRNA sense strand
cuaauacacucuugcauca

SEQ ID NO: 910526 - RNA, 19 nt, Homo sapiens
  misc_RNA (1)...(19): siRNA sense strand
guaaagaaagugaacaaug

SEQ ID NO: 910527 - RNA, 19 nt, Homo sapiens
  misc_RNA (1)...(19): siRNA sense strand
aaagagaggcuacaaaugu

SEQ ID NO: 910528 - RNA, 19 nt, Homo sapiens
  misc_RNA (1)...(19): siRNA sense strand
gauggaagaugugaauugu

SEQ ID NO: 910529 - RNA, 19 nt, Homo sapiens
  misc_RNA (1)...(19): siRNA sense strand
gauugacauuggauuagua

SEQ ID NO: 910530 - RNA, 19 nt, Homo sapiens
  misc_RNA (1)...(19): siRNA sense strand
gcagcaagaccuggacuua

SEQ ID NO: 910531 - RNA, 19 nt, Homo sapiens
  misc_RNA (1)...(19): siRNA sense strand
gcugaagggcacaaauuua

SEQ ID NO: 910532 - RNA, 19 nt, Homo sapiens
  misc_RNA (1)...(19): siRNA sense strand
cagaugugcuggcaacuga

SEQ ID NO: 910533 - RNA, 19 nt, Homo sapiens
  misc_RNA (1)...(19): siRNA sense strand
gagagaagaaauaccagua

SEQ ID NO: 910534 - RNA, 19 nt, Homo sapiens
  misc_RNA (1)...(19): siRNA sense strand
aagcaaagcugagauguca

SEQ ID NO: 910535 - RNA, 19 nt, Homo sapiens
  misc_RNA (1)...(19): siRNA sense strand
ggauuacgacccuuuguuu

SEQ ID NO: 910536 - RNA, 19 nt, Homo sapiens
  misc_RNA (1)...(19): siRNA sense strand
gagcauaucgcagcaacua

SEQ ID NO: 910537 - RNA, 19 nt, Homo sapiens
  misc_RNA (1)...(19): siRNA sense strand
gaauguagcacaaucauac

SEQ ID NO: 910538 - RNA, 19 nt, Homo sapiens
  misc_RNA (1)...(19): siRNA sense strand
acaggagcguggauaauaa

SEQ ID NO: 910539 - RNA, 19 nt, Homo sapiens
  misc_RNA (1)...(19): siRNA sense strand
gcaagcacacucaaaguau

SEQ ID NO: 910540 - RNA, 19 nt, Homo sapiens
  misc_RNA (1)...(19): siRNA sense strand
ucaacaacguuuacuuaga

SEQ ID NO: 910541 - RNA, 19 nt, Homo sapiens
  misc_RNA (1)...(19): siRNA sense strand
guucacagggauuguauua

SEQ ID NO: 910542 - RNA, 19 nt, Homo sapiens
  misc_RNA (1)...(19): siRNA sense strand
gaacugcccaagcuuguga

SEQ ID NO: 910543 - RNA, 19 nt, Homo sapiens
  misc_RNA (1)...(19): siRNA sense strand
gcacuuggucugaggauga

SEQ ID NO: 910544 - RNA, 19 nt, Homo sapiens
  misc_RNA (1)...(19): siRNA sense strand
ucugauaacucaacaagau

SEQ ID NO: 910545 - RNA, 19 nt, Homo sapiens
  misc_RNA (1)...(19): siRNA sense strand
agacugagguucuuguuca

SEQ ID NO: 910546 - RNA, 19 nt, Homo sapiens
  misc_RNA (1)...(19): siRNA sense strand
gagagaauguagcacaauc

SEQ ID NO: 910547 - RNA, 19 nt, Homo sapiens
  misc_RNA (1)...(19): siRNA sense strand
aaaugaagcucagaaggaa

SEQ ID NO: 910548 - RNA, 19 nt, Homo sapiens
  misc_RNA (1)...(19): siRNA sense strand
acaaugagcuccccucuuu

SEQ ID NO: 910549 - RNA, 19 nt, Homo sapiens
  misc_RNA (1)...(19): siRNA sense strand
uguaagaaaugaccaggaa

SEQ ID NO: 910550 - RNA, 19 nt, Homo sapiens
  misc_RNA (1)...(19): siRNA sense strand
cagaaaggguuacagagau

SEQ ID NO: 910551 - RNA, 19 nt, Homo sapiens
  misc_RNA (1)...(19): siRNA sense strand
gaauuguaguugugaggaa

SEQ ID NO: 910552 - RNA, 19 nt, Homo sapiens
  misc_RNA (1)...(19): siRNA sense strand
gaagaugugaauuguaguu

SEQ ID NO: 910553 - RNA, 19 nt, Homo sapiens
  misc_RNA (1)...(19): siRNA sense strand
gagccauacuggaugauau

SEQ ID NO: 910554 - RNA, 19 nt, Homo sapiens
  misc_RNA (1)...(19): siRNA sense strand
gugcuucugugaaagagua

SEQ ID NO: 910555 - RNA, 19 nt, Homo sapiens
  misc_RNA (1)...(19): siRNA sense strand
ccauacaaauucaaggaaa

SEQ ID NO: 910556 - RNA, 19 nt, Homo sapiens
  misc_RNA (1)...(19): siRNA sense strand
gaagggcacaaauuuauca

SEQ ID NO: 910557 - RNA, 19 nt, Homo sapiens
  misc_RNA (1)...(19): siRNA sense strand
gggaagaugcaauuagaaa

SEQ ID NO: 910558 - RNA, 19 nt, Homo sapiens
  misc_RNA (1)...(19): siRNA sense strand
gguugaccauugagaagua

SEQ ID NO: 910559 - RNA, 19 nt, Homo sapiens
  misc_RNA (1)...(19): siRNA sense strand
ggaaauucaacaacaaaga

SEQ ID NO: 910560 - RNA, 19 nt, Homo sapiens
  misc_RNA (1)...(19): siRNA sense strand
gaaaggcaagaaacacaaa

SEQ ID NO: 910561 - RNA, 19 nt, Homo sapiens
  misc_RNA (1)...(19): siRNA sense strand
guaguagaauaccucauug

SEQ ID NO: 910562 - RNA, 19 nt, Homo sapiens
  misc_RNA (1)...(19): siRNA sense strand
caagaggaaugguguuugg

SEQ ID NO: 910563 - RNA, 19 nt, Homo sapiens
  misc_RNA (1)...(19): siRNA sense strand
gaagaugauaugcaacuau

SEQ ID NO: 910564 - RNA, 19 nt, Homo sapiens
  misc_RNA (1)...(19): siRNA sense strand
gaacaacaauacaacaugu

SEQ ID NO: 910565 - RNA, 19 nt, Homo sapiens
  misc_RNA (1)...(19): siRNA sense strand
gaaacacucucucucaaug

SEQ ID NO: 910566 - RNA, 19 nt, Homo sapiens
  misc_RNA (1)...(19): siRNA sense strand
gaagagagccuaugcuaca

SEQ ID NO: 910567 - RNA, 19 nt, Homo sapiens
  misc_RNA (1)...(19): siRNA sense strand
gaaccacauuuauuggauu

SEQ ID NO: 910568 - RNA, 19 nt, Homo sapiens
  misc_RNA (1)...(19): siRNA sense strand
ggcauaaucauuccaguua

SEQ ID NO: 910569 - RNA, 19 nt, Homo sapiens
  misc_RNA (1)...(19): siRNA sense strand
gagaagagagccuaugcua

SEQ ID NO: 910570 - RNA, 19 nt, Homo sapiens
  misc_RNA (1)...(19): siRNA sense strand
ggagaaagauuugacuuac

SEQ ID NO: 910571 - RNA, 19 nt, Homo sapiens
  misc_RNA (1)...(19): siRNA sense strand
gaauaucaaucugcucaau

SEQ ID NO: 910572 - RNA, 19 nt, Homo sapiens
  misc_RNA (1)...(19): siRNA sense strand
agagauaacugucagcaau

SEQ ID NO: 910573 - RNA, 19 nt, Homo sapiens
  misc_RNA (1)...(19): siRNA sense strand
gagaaagauuugacuuaca

SEQ ID NO: 910574 - RNA, 19 nt, Homo sapiens
  misc_RNA (1)...(19): siRNA sense strand
cauccagauucuacuaaua

SEQ ID NO: 910575 - RNA, 19 nt, Homo sapiens
  misc_RNA (1)...(19): siRNA sense strand
gcacagaccccauuauauu

SEQ ID NO: 910576 - RNA, 19 nt, Homo sapiens
  misc_RNA (1)...(19): siRNA sense strand
ccuugugacugcaaacuua

SEQ ID NO: 910577 - RNA, 19 nt, Homo sapiens
  misc_RNA (1)...(19): siRNA sense strand
cauagaggcuacagaagga

SEQ ID NO: 910578 - RNA, 19 nt, Homo sapiens
  misc_RNA (1)...(19): siRNA sense strand
ggaaccacauuuauuggau

SEQ ID NO: 910579 - RNA, 19 nt, Homo sapiens
  misc_RNA (1)...(19): siRNA sense strand
guacugggcauaaucauuc

SEQ ID NO: 910580 - RNA, 19 nt, Homo sapiens
  misc_RNA (1)...(19): siRNA sense strand
gaaccuguacguccauuau

SEQ ID NO: 910581 - RNA, 19 nt, Homo sapiens
  misc_RNA (1)...(19): siRNA sense strand
uaaguuggauugccauaag

SEQ ID NO: 910582 - RNA, 19 nt, Homo sapiens
  misc_RNA (1)...(19): siRNA sense strand
guacuaacaucauacuacu

SEQ ID NO: 910583 - RNA, 19 nt, Homo sapiens
  misc_RNA (1)...(19): siRNA sense strand
uaugcuaccuuaaugcaaa

SEQ ID NO: 910584 - RNA, 19 nt, Homo sapiens
  misc_RNA (1)...(19): siRNA sense strand
caacuuugcuagaaaacua

SEQ ID NO: 910585 - RNA, 19 nt, Homo sapiens
  misc_RNA (1)...(19): siRNA sense strand
ggaaacacucucucucaau

SEQ ID NO: 910586 - RNA, 19 nt, Homo sapiens
  misc_RNA (1)...(19): siRNA sense strand
aaacaucaacgcacaucua

SEQ ID NO: 910587 - RNA, 19 nt, Homo sapiens
  misc_RNA (1)...(19): siRNA sense strand
gacaaaacauucaagaaga

SEQ ID NO: 910588 - RNA, 19 nt, Homo sapiens
  misc_RNA (1)...(19): siRNA sense strand
gaacuaggagccaugaucu

SEQ ID NO: 910589 - RNA, 19 nt, Homo sapiens
  misc_RNA (1)...(19): siRNA sense strand
gagacuacuucaugcuaug

SEQ ID NO: 910590 - RNA, 19 nt, Homo sapiens
  misc_RNA (1)...(19): siRNA sense strand
ucauuuacauccuccuuug

SEQ ID NO: 910591 - RNA, 19 nt, Homo sapiens
  misc_RNA (1)...(19): siRNA sense strand
gagauaacugucagcaauu

SEQ ID NO: 910592 - RNA, 19 nt, Homo sapiens
  misc_RNA (1)...(19): siRNA sense strand
guucuacaccaaagagaua

SEQ ID NO: 910593 - RNA, 19 nt, Homo sapiens
  misc_RNA (1)...(19): siRNA sense strand
gauugcaggucucauugga

SEQ ID NO: 910594 - RNA, 19 nt, Homo sapiens
  misc_RNA (1)...(19): siRNA sense strand
uggagaaagauuugacuua

SEQ ID NO: 910595 - RNA, 19 nt, Homo sapiens
  misc_RNA (1)...(19): siRNA sense strand
guuugucagucucuuaauu

SEQ ID NO: 910596 - RNA, 19 nt, Homo sapiens
  misc_RNA (1)...(19): siRNA sense strand
ggaguuguacugggcauaa

SEQ ID NO: 910597 - RNA, 19 nt, Homo sapiens
  misc_RNA (1)...(19): siRNA sense strand
agaaagauuugacuuacag

SEQ ID NO: 910598 - RNA, 19 nt, Homo sapiens
  misc_RNA (1)...(19): siRNA sense strand
gagagccuaugcuacaauc

SEQ ID NO: 910599 - RNA, 19 nt, Homo sapiens
  misc_RNA (1)...(19): siRNA sense strand
gcagugccaugccuuucau

SEQ ID NO: 910600 - RNA, 19 nt, Homo sapiens
  misc_RNA (1)...(19): siRNA sense strand
ggaacuaggagccaugauc

SEQ ID NO: 910601 - RNA, 19 nt, Homo sapiens
  misc_RNA (1)...(19): siRNA sense strand
cguauacuacucagucaua

SEQ ID NO: 910602 - RNA, 19 nt, Homo sapiens
  misc_RNA (1)...(19): siRNA sense strand
ccgcuaugcuaccuuaaug

SEQ ID NO: 910603 - RNA, 19 nt, Homo sapiens
  misc_RNA (1)...(19): siRNA sense strand
aagccgcuaugcuaccuua

SEQ ID NO: 910604 - RNA, 19 nt, Homo sapiens
  misc_RNA (1)...(19): siRNA sense strand
uggaaacacucucucucaa

SEQ ID NO: 910605 - RNA, 19 nt, Homo sapiens
  misc_RNA (1)...(19): siRNA sense strand
cagcccaacuuugcuagaa

SEQ ID NO: 910606 - RNA, 19 nt, Homo sapiens
  misc_RNA (1)...(19): siRNA sense strand
aaugcagaguggucaauuu

SEQ ID NO: 910607 - RNA, 19 nt, Homo sapiens
  misc_RNA (1)...(19): siRNA sense strand
caaguauguuugucagucu

SEQ ID NO: 910608 - RNA, 19 nt, Homo sapiens
  misc_RNA (1)...(19): siRNA sense strand
agauaacugucagcaauug

SEQ ID NO: 910609 - RNA, 19 nt, Homo sapiens
  misc_RNA (1)...(19): siRNA sense strand
ucagauugcaggucucauu

SEQ ID NO: 910610 - RNA, 19 nt, Homo sapiens
  misc_RNA (1)...(19): siRNA sense strand
uaggagccaugaucucuca

SEQ ID NO: 910611 - RNA, 19 nt, Homo sapiens
  misc_RNA (1)...(19): siRNA sense strand
gcauaaucauuccaguuac

SEQ ID NO: 910612 - RNA, 19 nt, Homo sapiens
  misc_RNA (1)...(19): siRNA sense strand
ccaaugggaauaucaaucu

SEQ ID NO: 910613 - RNA, 19 nt, Homo sapiens
  misc_RNA (1)...(19): siRNA sense strand
ggucauccagauucuacua

SEQ ID NO: 910614 - RNA, 19 nt, Homo sapiens
  misc_RNA (1)...(19): siRNA sense strand
aaccaucuaugaucucuuc

SEQ ID NO: 910615 - RNA, 19 nt, Homo sapiens
  misc_RNA (1)...(19): siRNA sense strand
ucauuccaguuaccguaua

SEQ ID NO: 910616 - RNA, 19 nt, Homo sapiens
  misc_RNA (1)...(19): siRNA sense strand
cgcaagagacuacuucaug

SEQ ID NO: 910617 - RNA, 19 nt, Homo sapiens
  misc_RNA (1)...(19): siRNA sense strand
uaguuugcuuccuuccuua

SEQ ID NO: 910618 - RNA, 19 nt, Homo sapiens
  misc_RNA (1)...(19): siRNA sense strand
gggcauaaucauuccaguu

SEQ ID NO: 910619 - RNA, 19 nt, Homo sapiens
  misc_RNA (1)...(19): siRNA sense strand
gcuagaaaacuaugcauuu

SEQ ID NO: 910620 - RNA, 19 nt, Homo sapiens
  misc_RNA (1)...(19): siRNA sense strand
uuauggccauuuacugaaa

SEQ ID NO: 910621 - RNA, 19 nt, Homo sapiens
  misc_RNA (1)...(19): siRNA sense strand
agagacuacuucaugcuau

SEQ ID NO: 910622 - RNA, 19 nt, Homo sapiens
  misc_RNA (1)...(19): siRNA sense strand
uguauucaaccaucuauga

SEQ ID NO: 910623 - RNA, 19 nt, Homo sapiens
  misc_RNA (1)...(19): siRNA sense strand
uuccauggcuuuaccaauc

SEQ ID NO: 910624 - RNA, 19 nt, Homo sapiens
  misc_RNA (1)...(19): siRNA sense strand
uaauucagcacauaugcaa

SEQ ID NO: 910625 - RNA, 19 nt, Homo sapiens
  misc_RNA (1)...(19): siRNA sense strand
cauuggaaccacauuuauu

SEQ ID NO: 910626 - RNA, 19 nt, Homo sapiens
  misc_RNA (1)...(19): siRNA sense strand
uggcuuuaccaaucauuua

SEQ ID NO: 910627 - RNA, 19 nt, Homo sapiens
  misc_RNA (1)...(19): siRNA sense strand
cacucucucucaauggaua

SEQ ID NO: 910628 - RNA, 19 nt, Homo sapiens
  misc_RNA (1)...(19): siRNA sense strand
cauccuccuuuguauuguu

SEQ ID NO: 910629 - RNA, 19 nt, Homo sapiens
  misc_RNA (1)...(19): siRNA sense strand
caucuaugaucucuuccau

SEQ ID NO: 910630 - RNA, 19 nt, Homo sapiens
  misc_RNA (1)...(19): siRNA sense strand
acugcaaacuuacuugugu

SEQ ID NO: 910631 - RNA, 19 nt, Homo sapiens
  misc_RNA (1)...(19): siRNA sense strand
gauaacugucagcaauuga

SEQ ID NO: 910632 - RNA, 19 nt, Homo sapiens
  misc_RNA (1)...(19): siRNA sense strand
auaguuugcuuccuuccuu

SEQ ID NO: 910633 - RNA, 19 nt, Homo sapiens
  misc_RNA (1)...(19): siRNA sense strand
gaaggagaagagagccuau

SEQ ID NO: 910634 - RNA, 19 nt, Homo sapiens
  misc_RNA (1)...(19): siRNA sense strand
gaagacacuauauaaucuc

SEQ ID NO: 910635 - RNA, 19 nt, Homo sapiens
  misc_RNA (1)...(19): siRNA sense strand
agucauagaggcuacagaa

SEQ ID NO: 910636 - RNA, 19 nt, Homo sapiens
  misc_RNA (1)...(19): siRNA sense strand
caaugggaauaucaaucug

SEQ ID NO: 910637 - RNA, 19 nt, Homo sapiens
  misc_RNA (1)...(19): siRNA sense strand
cauucaagaagacacuaua

SEQ ID NO: 910638 - RNA, 19 nt, Homo sapiens
  misc_RNA (1)...(19): siRNA sense strand
ucauccagauucuacuaau

SEQ ID NO: 910639 - RNA, 19 nt, Homo sapiens
  misc_RNA (1)...(19): siRNA sense strand
gcuacaaucggcagaugga

SEQ ID NO: 910640 - RNA, 19 nt, Homo sapiens
  misc_RNA (1)...(19): siRNA sense strand
guauacuacucagucauag

SEQ ID NO: 910641 - RNA, 19 nt, Homo sapiens
  misc_RNA (1)...(19): siRNA sense strand
gcagaguggucaauuuucu

SEQ ID NO: 910642 - RNA, 19 nt, Homo sapiens
  misc_RNA (1)...(19): siRNA sense strand
cucauuggaaccacauuua

SEQ ID NO: 910643 - RNA, 19 nt, Homo sapiens
  misc_RNA (1)...(19): siRNA sense strand
gaucucuuccauggcuuua

SEQ ID NO: 910644 - RNA, 19 nt, Homo sapiens
  misc_RNA (1)...(19): siRNA sense strand
gaguuguacugggcauaau

SEQ ID NO: 910645 - RNA, 19 nt, Homo sapiens
  misc_RNA (1)...(19): siRNA sense strand
uagcacagaccccauuaua

SEQ ID NO: 910646 - RNA, 19 nt, Homo sapiens
  misc_RNA (1)...(19): siRNA sense strand
gauuugacuuacaguucug

SEQ ID NO: 910647 - RNA, 19 nt, Homo sapiens
  misc_RNA (1)...(19): siRNA sense strand
agauuugacuuacaguucu

SEQ ID NO: 910648 - RNA, 19 nt, Homo sapiens
  misc_RNA (1)...(19): siRNA sense strand
cagauugcaggucucauug

SEQ ID NO: 910649 - RNA, 19 nt, Homo sapiens
  misc_RNA (1)...(19): siRNA sense strand
ggaauaucaaucugcucaa

SEQ ID NO: 910650 - RNA, 19 nt, Homo sapiens
  misc_RNA (1)...(19): siRNA sense strand
cuuccuuccuuauaguauu

SEQ ID NO: 910651 - RNA, 19 nt, Homo sapiens
  misc_RNA (1)...(19): siRNA sense strand
aagagacuacuucaugcua

SEQ ID NO: 910652 - RNA, 19 nt, Homo sapiens
  misc_RNA (1)...(19): siRNA sense strand
caaugcagaguggucaauu

SEQ ID NO: 910653 - RNA, 19 nt, Homo sapiens
  misc_RNA (1)...(19): siRNA sense strand
uaacugucagcaauugaau

SEQ ID NO: 910654 - RNA, 19 nt, Homo sapiens
  misc_RNA (1)...(19): siRNA sense strand
cauuauggagaaagauuug

SEQ ID NO: 910655 - RNA, 19 nt, Homo sapiens
  misc_RNA (1)...(19): siRNA sense strand
ucauuggaaccacauuuau

SEQ ID NO: 910656 - RNA, 19 nt, Homo sapiens
  misc_RNA (1)...(19): siRNA sense strand
ggagccaugaucucucaga

SEQ ID NO: 910657 - RNA, 19 nt, Homo sapiens
  misc_RNA (1)...(19): siRNA sense strand
aagagagccuaugcuacaa

SEQ ID NO: 910658 - RNA, 19 nt, Homo sapiens
  misc_RNA (1)...(19): siRNA sense strand
uauguuugucagucucuua

SEQ ID NO: 910659 - RNA, 19 nt, Homo sapiens
  misc_RNA (1)...(19): siRNA sense strand
gcuaugcuaccuuaaugca

SEQ ID NO: 910660 - RNA, 19 nt, Homo sapiens
  misc_RNA (1)...(19): siRNA sense strand
guauucaaccaucuaugau

SEQ ID NO: 910661 - RNA, 19 nt, Homo sapiens
  misc_RNA (1)...(19): siRNA sense strand
gcccaacuuugcuagaaaa

SEQ ID NO: 910662 - RNA, 19 nt, Homo sapiens
  misc_RNA (1)...(19): siRNA sense strand
aacacucucucucaaugga

SEQ ID NO: 910663 - RNA, 19 nt, Homo sapiens
  misc_RNA (1)...(19): siRNA sense strand
auucucaccugucuugcuu

SEQ ID NO: 910664 - RNA, 19 nt, Homo sapiens
  misc_RNA (1)...(19): siRNA sense strand
gcacauuggaaucucauua

SEQ ID NO: 910665 - RNA, 19 nt, Homo sapiens
  misc_RNA (1)...(19): siRNA sense strand
ccagugagaaucagcauua

SEQ ID NO: 910666 - RNA, 19 nt, Homo sapiens
  misc_RNA (1)...(19): siRNA sense strand
gcauuacgcuagucucugu

SEQ ID NO: 910667 - RNA, 19 nt, Homo sapiens
  misc_RNA (1)...(19): siRNA sense strand
gcaagucacagcaacugaa

SEQ ID NO: 910668 - RNA, 19 nt, Homo sapiens
  misc_RNA (1)...(19): siRNA sense strand
gcugaaacucggauuuaaa

SEQ ID NO: 910669 - RNA, 19 nt, Homo sapiens
  misc_RNA (1)...(19): siRNA sense strand
gcaaagcaagucacagcaa

SEQ ID NO: 910670 - RNA, 19 nt, Homo sapiens
  misc_RNA (1)...(19): siRNA sense strand
gaaacucggauuuaaagag

SEQ ID NO: 910671 - RNA, 19 nt, Homo sapiens
  misc_RNA (1)...(19): siRNA sense strand
ucaagaguauggcacuguu

SEQ ID NO: 910672 - RNA, 19 nt, Homo sapiens
  misc_RNA (1)...(19): siRNA sense strand
gcccuugauugucagauau

SEQ ID NO: 910673 - RNA, 19 nt, Homo sapiens
  misc_RNA (1)...(19): siRNA sense strand
caagucacagcaacugaaa

SEQ ID NO: 910674 - RNA, 19 nt, Homo sapiens
  misc_RNA (1)...(19): siRNA sense strand
cacauuggaaucucauuaa

SEQ ID NO: 910675 - RNA, 19 nt, Homo sapiens
  misc_RNA (1)...(19): siRNA sense strand
gggcauauuuuacaugguu

SEQ ID NO: 910676 - RNA, 19 nt, Homo sapiens
  misc_RNA (1)...(19): siRNA sense strand
gaaucagcauuacgcuagu

SEQ ID NO: 910677 - RNA, 19 nt, Homo sapiens
  misc_RNA (1)...(19): siRNA sense strand
gcacuguuggcgugucauu

SEQ ID NO: 910678 - RNA, 19 nt, Homo sapiens
  misc_RNA (1)...(19): siRNA sense strand
uuaauuuccuugggcauau

SEQ ID NO: 910679 - RNA, 19 nt, Homo sapiens
  misc_RNA (1)...(19): siRNA sense strand
gcaauccacaagcuguuug

SEQ ID NO: 910680 - RNA, 19 nt, Homo sapiens
  misc_RNA (1)...(19): siRNA sense strand
ucugugcccuugauuguca

SEQ ID NO: 910681 - RNA, 19 nt, Homo sapiens
  misc_RNA (1)...(19): siRNA sense strand
uaauuuccuugggcauauu

SEQ ID NO: 910682 - RNA, 19 nt, Homo sapiens
  misc_RNA (1)...(19): siRNA sense strand
cugcugaaacucggauuua

SEQ ID NO: 910683 - RNA, 19 nt, Homo sapiens
  misc_RNA (1)...(19): siRNA sense strand
ugcugaaacucggauuuaa

SEQ ID NO: 910684 - RNA, 19 nt, Homo sapiens
  misc_RNA (1)...(19): siRNA sense strand
uuacaugguugugucaagu

SEQ ID NO: 910685 - RNA, 19 nt, Homo sapiens
  misc_RNA (1)...(19): siRNA sense strand
ugcccuugauugucagaua

SEQ ID NO: 910686 - RNA, 19 nt, Homo sapiens
  misc_RNA (1)...(19): siRNA sense strand
ggcgugucauugcacauug

SEQ ID NO: 910687 - RNA, 19 nt, Homo sapiens
  misc_RNA (1)...(19): siRNA sense strand
uuaaagagucccugguaca

SEQ ID NO: 910688 - RNA, 19 nt, Homo sapiens
  misc_RNA (1)...(19): siRNA sense strand
caagaguauggcacuguug

SEQ ID NO: 910689 - RNA, 19 nt, Homo sapiens
  misc_RNA (1)...(19): siRNA sense strand
ccuugauugucagauauuu

SEQ ID NO: 910690 - RNA, 19 nt, Homo sapiens
  misc_RNA (1)...(19): siRNA sense strand
uuaaaccuccagcugcaaa

SEQ ID NO: 910691 - RNA, 19 nt, Homo sapiens
  misc_RNA (1)...(19): siRNA sense strand
guguggacaugccugcaau

SEQ ID NO: 910692 - RNA, 19 nt, Homo sapiens
  misc_RNA (1)...(19): siRNA sense strand
gcuguuugcgccagugaga

SEQ ID NO: 910693 - RNA, 19 nt, Homo sapiens
  misc_RNA (1)...(19): siRNA sense strand
cugaaacucggauuuaaag

SEQ ID NO: 910694 - RNA, 19 nt, Homo sapiens
  misc_RNA (1)...(19): siRNA sense strand
cugcaauccugcugaaacu

SEQ ID NO: 910695 - RNA, 19 nt, Homo sapiens
  misc_RNA (1)...(19): siRNA sense strand
gucaagugguguggacaug

SEQ ID NO: 910696 - RNA, 19 nt, Homo sapiens
  misc_RNA (1)...(19): siRNA sense strand
ggaccaguuugcagaguga

SEQ ID NO: 910697 - RNA, 19 nt, Homo sapiens
  misc_RNA (1)...(19): siRNA sense strand
gcauuggguucaaggaauc

SEQ ID NO: 910698 - RNA, 19 nt, Homo sapiens
  misc_RNA (1)...(19): siRNA sense strand
gcuagcagcccuugugugu

SEQ ID NO: 910699 - RNA, 19 nt, Homo sapiens
  misc_RNA (1)...(19): siRNA sense strand
ggcauuggguucaaggaau

SEQ ID NO: 910700 - RNA, 19 nt, Homo sapiens
  misc_RNA (1)...(19): siRNA sense strand
cgucaggccuaccucaagu

SEQ ID NO: 910701 - RNA, 19 nt, Homo sapiens
  misc_RNA (1)...(19): siRNA sense strand
ugacggccuucuugguuuc

SEQ ID NO: 910702 - RNA, 19 nt, Homo sapiens
  misc_RNA (1)...(19): siRNA sense strand
gggcauuggguucaaggaa

SEQ ID NO: 910703 - RNA, 19 nt, Homo sapiens
  misc_RNA (1)...(19): siRNA sense strand
uugacggccuucuugguuu

SEQ ID NO: 910704 - RNA, 19 nt, Homo sapiens
  misc_RNA (1)...(19): siRNA sense strand
ccucgaggcuggugguuuu

SEQ ID NO: 910705 - RNA, 19 nt, Homo sapiens
  misc_RNA (1)...(19): siRNA sense strand
aggccuaccucaaguucuu

SEQ ID NO: 910706 - RNA, 19 nt, Homo sapiens
  misc_RNA (1)...(19): siRNA sense strand
cuuggugucugguuucugu

SEQ ID NO: 910707 - RNA, 19 nt, Homo sapiens
  misc_RNA (1)...(19): siRNA sense strand
gagcaggaggccgacguuu

SEQ ID NO: 910708 - RNA, 19 nt, Homo sapiens
  misc_RNA (1)...(19): siRNA sense strand
gcaggaggccgacguuuuc

SEQ ID NO: 910709 - RNA, 19 nt, Homo sapiens
  misc_RNA (1)...(19): siRNA sense strand
ucacugaccucgccaagga

SEQ ID NO: 910710 - RNA, 19 nt, Homo sapiens
  misc_RNA (1)...(19): siRNA sense strand
ccaaggagauccagacacu

SEQ ID NO: 910711 - RNA, 19 nt, Homo sapiens
  misc_RNA (1)...(19): siRNA sense strand
gcagaagggacggcucuuu

SEQ ID NO: 910712 - RNA, 19 nt, Homo sapiens
  misc_RNA (1)...(19): siRNA sense strand
gcuccaagaucccggucaa

SEQ ID NO: 910713 - RNA, 19 nt, Homo sapiens
  misc_RNA (1)...(19): siRNA sense strand
gaucaaggucaucaaguca

SEQ ID NO: 910714 - RNA, 19 nt, Homo sapiens
  misc_RNA (1)...(19): siRNA sense strand
cgaucaaggucaucaaguc

SEQ ID NO: 910715 - RNA, 19 nt, Homo sapiens
  misc_RNA (1)...(19): siRNA sense strand
ggccaauuaucgugucuuc

SEQ ID NO: 910716 - RNA, 19 nt, Homo sapiens
  misc_RNA (1)...(19): siRNA sense strand
gcucaaggacgacaucuac

SEQ ID NO: 910717 - RNA, 19 nt, Homo sapiens
  misc_RNA (1)...(19): siRNA sense strand
caucaagucagccaacaug

SEQ ID NO: 910718 - RNA, 19 nt, Homo sapiens
  misc_RNA (1)...(19): siRNA sense strand
caagucagccaacaugaag

SEQ ID NO: 910719 - RNA, 19 nt, Homo sapiens
  misc_RNA (1)...(19): siRNA sense strand
ucaagucagccaacaugaa

SEQ ID NO: 910720 - RNA, 19 nt, Homo sapiens
  misc_RNA (1)...(19): siRNA sense strand
aaggagauccagacacuga

SEQ ID NO: 910721 - RNA, 19 nt, Homo sapiens
  misc_RNA (1)...(19): siRNA sense strand
ccaauuaucgugucuucuc

SEQ ID NO: 910722 - RNA, 19 nt, Homo sapiens
  misc_RNA (1)...(19): siRNA sense strand
cagaagggacggcucuuuc

SEQ ID NO: 910723 - RNA, 19 nt, Homo sapiens
  misc_RNA (1)...(19): siRNA sense strand
ccaagaucccggucaagug

SEQ ID NO: 910724 - RNA, 19 nt, Homo sapiens
  misc_RNA (1)...(19): siRNA sense strand
gcucuuccuugcgcucuau

SEQ ID NO: 910725 - RNA, 19 nt, Homo sapiens
  misc_RNA (1)...(19): siRNA sense strand
caucgucacggaacucaug

SEQ ID NO: 910726 - RNA, 19 nt, Homo sapiens
  misc_RNA (1)...(19): siRNA sense strand
ccugcaagguggcugacuu

SEQ ID NO: 910727 - RNA, 19 nt, Homo sapiens
  misc_RNA (1)...(19): siRNA sense strand
gcugggugaaggcuacuuu

SEQ ID NO: 910728 - RNA, 19 nt, Homo sapiens
  misc_RNA (1)...(19): siRNA sense strand
ggaggucuacgugcucaug

SEQ ID NO: 910729 - RNA, 19 nt, Homo sapiens
  misc_RNA (1)...(19): siRNA sense strand
ccaacaugaagcucacuga

SEQ ID NO: 910730 - RNA, 19 nt, Homo sapiens
  misc_RNA (1)...(19): siRNA sense strand
ggagauccagacacugaag

SEQ ID NO: 910731 - RNA, 19 nt, Homo sapiens
  misc_RNA (1)...(19): siRNA sense strand
uggcugagggcaugagcua

SEQ ID NO: 910732 - RNA, 19 nt, Homo sapiens
  misc_RNA (1)...(19): siRNA sense strand
caggcucugugcccucgaa

SEQ ID NO: 910733 - RNA, 19 nt, Homo sapiens
  misc_RNA (1)...(19): siRNA sense strand
gacaaggccugguggaaau

SEQ ID NO: 910734 - RNA, 19 nt, Homo sapiens
  misc_RNA (1)...(19): siRNA sense strand
ggacaaggccugguggaaa

SEQ ID NO: 910735 - RNA, 19 nt, Homo sapiens
  misc_RNA (1)...(19): siRNA sense strand
ggaccaaagcacccaagca

SEQ ID NO: 910736 - RNA, 19 nt, Homo sapiens
  misc_RNA (1)...(19): siRNA sense strand
ccaccucacucggaagaag

SEQ ID NO: 910737 - RNA, 19 nt, Homo sapiens
  misc_RNA (1)...(19): siRNA sense strand
cuaccaggaucgugcugau

SEQ ID NO: 910738 - RNA, 19 nt, Homo sapiens
  misc_RNA (1)...(19): siRNA sense strand
ccaggaucgugcugauucu

SEQ ID NO: 910739 - RNA, 19 nt, Homo sapiens
  misc_RNA (1)...(19): siRNA sense strand
gcaacgacaucgaccaaua

SEQ ID NO: 910740 - RNA, 19 nt, Homo sapiens
  misc_RNA (1)...(19): siRNA sense strand
ggaggaagcuguuuaaagg

SEQ ID NO: 910741 - RNA, 19 nt, Homo sapiens
  misc_RNA (1)...(19): siRNA sense strand
ggagcgagcuugggaaauu

SEQ ID NO: 910742 - RNA, 19 nt, Homo sapiens
  misc_RNA (1)...(19): siRNA sense strand
cagaugcucuaagugauaa

SEQ ID NO: 910743 - RNA, 19 nt, Homo sapiens
  misc_RNA (1)...(19): siRNA sense strand
gagcgagcuugggaaauug

SEQ ID NO: 910744 - RNA, 19 nt, Homo sapiens
  misc_RNA (1)...(19): siRNA sense strand
gcucuaagugauaagauuu

SEQ ID NO: 910745 - RNA, 19 nt, Homo sapiens
  misc_RNA (1)...(19): siRNA sense strand
gaagcuguuuaaagggauu

SEQ ID NO: 910746 - RNA, 19 nt, Homo sapiens
  misc_RNA (1)...(19): siRNA sense strand
ucagaugcucuaagugaua

SEQ ID NO: 910747 - RNA, 19 nt, Homo sapiens
  misc_RNA (1)...(19): siRNA sense strand
ggaugcagcuggagaugcu

SEQ ID NO: 910748 - RNA, 19 nt, Homo sapiens
  misc_RNA (1)...(19): siRNA sense strand
gugauaagauuuuggaaga

SEQ ID NO: 910749 - RNA, 19 nt, Homo sapiens
  misc_RNA (1)...(19): siRNA sense strand
caaucucccucuugcuguu

SEQ ID NO: 910750 - RNA, 19 nt, Homo sapiens
  misc_RNA (1)...(19): siRNA sense strand
ucacccaucucccacuuuc

SEQ ID NO: 910751 - RNA, 19 nt, Homo sapiens
  misc_RNA (1)...(19): siRNA sense strand
gaacucagggagcgagcuu

SEQ ID NO: 910752 - RNA, 19 nt, Homo sapiens
  misc_RNA (1)...(19): siRNA sense strand
cuucagaugcucuaaguga

SEQ ID NO: 910753 - RNA, 19 nt, Homo sapiens
  misc_RNA (1)...(19): siRNA sense strand
gauaagauuuuggaagaug

SEQ ID NO: 910754 - RNA, 19 nt, Homo sapiens
  misc_RNA (1)...(19): siRNA sense strand
uuuggaagauggucugguu

SEQ ID NO: 910755 - RNA, 19 nt, Homo sapiens
  misc_RNA (1)...(19): siRNA sense strand
caacgacaucgaccaauac

SEQ ID NO: 910756 - RNA, 19 nt, Homo sapiens
  misc_RNA (1)...(19): siRNA sense strand
gguguggacuucagaugcu

SEQ ID NO: 910757 - RNA, 19 nt, Homo sapiens
  misc_RNA (1)...(19): siRNA sense strand
ggacuucagaugcucuaag

SEQ ID NO: 910758 - RNA, 19 nt, Homo sapiens
  misc_RNA (1)...(19): siRNA sense strand
ggugagccauuuugauuuc

SEQ ID NO: 910759 - RNA, 19 nt, Homo sapiens
  misc_RNA (1)...(19): siRNA sense strand
gcuccagccuuggcaacga

SEQ ID NO: 910760 - RNA, 19 nt, Homo sapiens
  misc_RNA (1)...(19): siRNA sense strand
ccucacccaucucccacuu

SEQ ID NO: 910761 - RNA, 19 nt, Homo sapiens
  misc_RNA (1)...(19): siRNA sense strand
uggaggaagcuguuuaaag

SEQ ID NO: 910762 - RNA, 19 nt, Homo sapiens
  misc_RNA (1)...(19): siRNA sense strand
gaccugguguggacuucag

SEQ ID NO: 910763 - RNA, 19 nt, Homo sapiens
  misc_RNA (1)...(19): siRNA sense strand
uguggaggaagcuguuuaa

SEQ ID NO: 910764 - RNA, 19 nt, Homo sapiens
  misc_RNA (1)...(19): siRNA sense strand
aaagaggccucaaggagua

SEQ ID NO: 910765 - RNA, 19 nt, Homo sapiens
  misc_RNA (1)...(19): siRNA sense strand
caaaguccaucaacaggaa

SEQ ID NO: 910766 - RNA, 19 nt, Homo sapiens
  misc_RNA (1)...(19): siRNA sense strand
gaaaggcacauucggaaga

SEQ ID NO: 910767 - RNA, 19 nt, Homo sapiens
  misc_RNA (1)...(19): siRNA sense strand
ggaacccguuugauacuga

SEQ ID NO: 910768 - RNA, 19 nt, Homo sapiens
  misc_RNA (1)...(19): siRNA sense strand
caaacgcgcuguguggaaa

SEQ ID NO: 910769 - RNA, 19 nt, Homo sapiens
  misc_RNA (1)...(19): siRNA sense strand
gaugagcugucccuguuug

SEQ ID NO: 910770 - RNA, 19 nt, Homo sapiens
  misc_RNA (1)...(19): siRNA sense strand
gaucuucgaagcauugaaa

SEQ ID NO: 910771 - RNA, 19 nt, Homo sapiens
  misc_RNA (1)...(19): siRNA sense strand
cggaugagcugucccuguu

SEQ ID NO: 910772 - RNA, 19 nt, Homo sapiens
  misc_RNA (1)...(19): siRNA sense strand
gagcuucgccuuccucaau

SEQ ID NO: 910773 - RNA, 19 nt, Homo sapiens
  misc_RNA (1)...(19): siRNA sense strand
ugacaucgccgacuucuuc

SEQ ID NO: 910774 - RNA, 19 nt, Homo sapiens
  misc_RNA (1)...(19): siRNA sense strand
caggcuggcuuucuauuau

SEQ ID NO: 910775 - RNA, 19 nt, Homo sapiens
  misc_RNA (1)...(19): siRNA sense strand
caacaggaacuccgugaga

SEQ ID NO: 910776 - RNA, 19 nt, Homo sapiens
  misc_RNA (1)...(19): siRNA sense strand
ggagagauacuaccugucu

SEQ ID NO: 910777 - RNA, 19 nt, Homo sapiens
  misc_RNA (1)...(19): siRNA sense strand
gaucgcgaaugccugcaaa

SEQ ID NO: 910778 - RNA, 19 nt, Homo sapiens
  misc_RNA (1)...(19): siRNA sense strand
ggaguuggguaccaucaag

SEQ ID NO: 910779 - RNA, 19 nt, Homo sapiens
  misc_RNA (1)...(19): siRNA sense strand
gcaaaauccuccaagaugu

SEQ ID NO: 910780 - RNA, 19 nt, Homo sapiens
  misc_RNA (1)...(19): siRNA sense strand
caguggaacccguuugaua

SEQ ID NO: 910781 - RNA, 19 nt, Homo sapiens
  misc_RNA (1)...(19): siRNA sense strand
gcaaacgcgcuguguggaa

SEQ ID NO: 910782 - RNA, 19 nt, Homo sapiens
  misc_RNA (1)...(19): siRNA sense strand
ccaccuccauccucagcua

SEQ ID NO: 910783 - RNA, 19 nt, Homo sapiens
  misc_RNA (1)...(19): siRNA sense strand
aaagacaccaggaggaauu

SEQ ID NO: 910784 - RNA, 19 nt, Homo sapiens
  misc_RNA (1)...(19): siRNA sense strand
gcaagguggaugagcugua

SEQ ID NO: 910785 - RNA, 19 nt, Homo sapiens
  misc_RNA (1)...(19): siRNA sense strand
caagguggaugagcuguac

SEQ ID NO: 910786 - RNA, 19 nt, Homo sapiens
  misc_RNA (1)...(19): siRNA sense strand
gccgagagccugauagagu

SEQ ID NO: 910787 - RNA, 19 nt, Homo sapiens
  misc_RNA (1)...(19): siRNA sense strand
ccagaacggccacgaggaa

SEQ ID NO: 910788 - RNA, 19 nt, Homo sapiens
  misc_RNA (1)...(19): siRNA sense strand
acaucaaggugacggaguu

SEQ ID NO: 910789 - RNA, 19 nt, Homo sapiens
  misc_RNA (1)...(19): siRNA sense strand
ggcuggcuuucuauuauga

SEQ ID NO: 910790 - RNA, 19 nt, Homo sapiens
  misc_RNA (1)...(19): siRNA sense strand
caugagaaccuggacauca

SEQ ID NO: 910791 - RNA, 19 nt, Homo sapiens
  misc_RNA (1)...(19): siRNA sense strand
ucaaggaguaucugugugu

SEQ ID NO: 910792 - RNA, 19 nt, Homo sapiens
  misc_RNA (1)...(19): siRNA sense strand
augagaaccuggacaucaa

SEQ ID NO: 910793 - RNA, 19 nt, Homo sapiens
  misc_RNA (1)...(19): siRNA sense strand
ggucggaucgagucagaug

SEQ ID NO: 910794 - RNA, 19 nt, Homo sapiens
  misc_RNA (1)...(19): siRNA sense strand
caaaauccuccaagaugua

SEQ ID NO: 910795 - RNA, 19 nt, Homo sapiens
  misc_RNA (1)...(19): siRNA sense strand
ugccugagauggacuccuu

SEQ ID NO: 910796 - RNA, 19 nt, Homo sapiens
  misc_RNA (1)...(19): siRNA sense strand
auuaugaccuggacaagca

SEQ ID NO: 910797 - RNA, 19 nt, Homo sapiens
  misc_RNA (1)...(19): siRNA sense strand
cccagcaggugaagaagau

SEQ ID NO: 910798 - RNA, 19 nt, Homo sapiens
  misc_RNA (1)...(19): siRNA sense strand
acaaagacaccaggaggaa

SEQ ID NO: 910799 - RNA, 19 nt, Homo sapiens
  misc_RNA (1)...(19): siRNA sense strand
aaaggcacauucggaagau

SEQ ID NO: 910800 - RNA, 19 nt, Homo sapiens
  misc_RNA (1)...(19): siRNA sense strand
gccggaggaucgcaaaguc

SEQ ID NO: 910801 - RNA, 19 nt, Homo sapiens
  misc_RNA (1)...(19): siRNA sense strand
cgugugacaucgccgacuu

SEQ ID NO: 910802 - RNA, 19 nt, Homo sapiens
  misc_RNA (1)...(19): siRNA sense strand
ggaugagcugucccuguuu

SEQ ID NO: 910803 - RNA, 19 nt, Homo sapiens
  misc_RNA (1)...(19): siRNA sense strand
ggaagauggaguuucacau

SEQ ID NO: 910804 - RNA, 19 nt, Homo sapiens
  misc_RNA (1)...(19): siRNA sense strand
ccucaaggaguaucugugu

SEQ ID NO: 910805 - RNA, 19 nt, Homo sapiens
  misc_RNA (1)...(19): siRNA sense strand
ucacggaguuggguaccau

SEQ ID NO: 910806 - RNA, 19 nt, Homo sapiens
  misc_RNA (1)...(19): siRNA sense strand
ugggugcagugacguguga

SEQ ID NO: 910807 - RNA, 19 nt, Homo sapiens
  misc_RNA (1)...(19): siRNA sense strand
caaagacaccaggaggaau

SEQ ID NO: 910808 - RNA, 19 nt, Homo sapiens
  misc_RNA (1)...(19): siRNA sense strand
uucggaagauggaguuuca

SEQ ID NO: 910809 - RNA, 19 nt, Homo sapiens
  misc_RNA (1)...(19): siRNA sense strand
ccagcuuccgggagagaua

SEQ ID NO: 910810 - RNA, 19 nt, Homo sapiens
  misc_RNA (1)...(19): siRNA sense strand
gcgaaugccugcaaaaucc

SEQ ID NO: 910811 - RNA, 19 nt, Homo sapiens
  misc_RNA (1)...(19): siRNA sense strand
aacaggaacuccgugagau

SEQ ID NO: 910812 - RNA, 19 nt, Homo sapiens
  misc_RNA (1)...(19): siRNA sense strand
ugguggacaucacggaguu

SEQ ID NO: 910813 - RNA, 19 nt, Homo sapiens
  misc_RNA (1)...(19): siRNA sense strand
ggacaaauccauagacaau

SEQ ID NO: 910814 - RNA, 19 nt, Homo sapiens
  misc_RNA (1)...(19): siRNA sense strand
gaugaccgcuuaagaaagu

SEQ ID NO: 910815 - RNA, 19 nt, Homo sapiens
  misc_RNA (1)...(19): siRNA sense strand
gaacuuggaugagacaauc

SEQ ID NO: 910816 - RNA, 19 nt, Homo sapiens
  misc_RNA (1)...(19): siRNA sense strand
ccgaggacaugcucuauaa

SEQ ID NO: 910817 - RNA, 19 nt, Homo sapiens
  misc_RNA (1)...(19): siRNA sense strand
gagcaacuuucaccaaugu

SEQ ID NO: 910818 - RNA, 19 nt, Homo sapiens
  misc_RNA (1)...(19): siRNA sense strand
gaauaugggccaacugaga

SEQ ID NO: 910819 - RNA, 19 nt, Homo sapiens
  misc_RNA (1)...(19): siRNA sense strand
ugagaugaauggccgcaua

SEQ ID NO: 910820 - RNA, 19 nt, Homo sapiens
  misc_RNA (1)...(19): siRNA sense strand
gugccuaucuauauuaaga

SEQ ID NO: 910821 - RNA, 19 nt, Homo sapiens
  misc_RNA (1)...(19): siRNA sense strand
caacugagaguguuaaagu

SEQ ID NO: 910822 - RNA, 19 nt, Homo sapiens
  misc_RNA (1)...(19): siRNA sense strand
ucagccagaugaccgcuua

SEQ ID NO: 910823 - RNA, 19 nt, Homo sapiens
  misc_RNA (1)...(19): siRNA sense strand
ccagaugaccgcuuaagaa

SEQ ID NO: 910824 - RNA, 19 nt, Homo sapiens
  misc_RNA (1)...(19): siRNA sense strand
ggaacauucuguccugcaa

SEQ ID NO: 910825 - RNA, 19 nt, Homo sapiens
  misc_RNA (1)...(19): siRNA sense strand
ccaaagcaguggaugagau

SEQ ID NO: 910826 - RNA, 19 nt, Homo sapiens
  misc_RNA (1)...(19): siRNA sense strand
ccaaagugaugauggaagu

SEQ ID NO: 910827 - RNA, 19 nt, Homo sapiens
  misc_RNA (1)...(19): siRNA sense strand
gugcuagacuugcauggaa

SEQ ID NO: 910828 - RNA, 19 nt, Homo sapiens
  misc_RNA (1)...(19): siRNA sense strand
ugaaggaacuuuucuguga

SEQ ID NO: 910829 - RNA, 19 nt, Homo sapiens
  misc_RNA (1)...(19): siRNA sense strand
acaaauccauagacaauag

SEQ ID NO: 910830 - RNA, 19 nt, Homo sapiens
  misc_RNA (1)...(19): siRNA sense strand
gaggacaugcucuauaaga

SEQ ID NO: 910831 - RNA, 19 nt, Homo sapiens
  misc_RNA (1)...(19): siRNA sense strand
uauguuaacuuccgcuuuc

SEQ ID NO: 910832 - RNA, 19 nt, Homo sapiens
  misc_RNA (1)...(19): siRNA sense strand
ugaagaggcuaccaaagca

SEQ ID NO: 910833 - RNA, 19 nt, Homo sapiens
  misc_RNA (1)...(19): siRNA sense strand
aaacauuggagacgacaua

SEQ ID NO: 910834 - RNA, 19 nt, Homo sapiens
  misc_RNA (1)...(19): siRNA sense strand
gcaacuuucaccaauguuu

SEQ ID NO: 910835 - RNA, 19 nt, Homo sapiens
  misc_RNA (1)...(19): siRNA sense strand
gcaaagucguaugcgauga

SEQ ID NO: 910836 - RNA, 19 nt, Homo sapiens
  misc_RNA (1)...(19): siRNA sense strand
cagaugaccgcuuaagaaa

SEQ ID NO: 910837 - RNA, 19 nt, Homo sapiens
  misc_RNA (1)...(19): siRNA sense strand
gcuuuggauuugugagaua

SEQ ID NO: 910838 - RNA, 19 nt, Homo sapiens
  misc_RNA (1)...(19): siRNA sense strand
gacaugcucuauaagaagu

SEQ ID NO: 910839 - RNA, 19 nt, Homo sapiens
  misc_RNA (1)...(19): siRNA sense strand
caacggcucuaaggguuau

SEQ ID NO: 910840 - RNA, 19 nt, Homo sapiens
  misc_RNA (1)...(19): siRNA sense strand
uagagcaacuuucaccaau

SEQ ID NO: 910841 - RNA, 19 nt, Homo sapiens
  misc_RNA (1)...(19): siRNA sense strand
gaguugaggcggagauuug

SEQ ID NO: 910842 - RNA, 19 nt, Homo sapiens
  misc_RNA (1)...(19): siRNA sense strand
ggacaugcucuauaagaag

SEQ ID NO: 910843 - RNA, 19 nt, Homo sapiens
  misc_RNA (1)...(19): siRNA sense strand
gggccaaagugaugaugga

SEQ ID NO: 910844 - RNA, 19 nt, Homo sapiens
  misc_RNA (1)...(19): siRNA sense strand
gggugccuaucuauauuaa

SEQ ID NO: 910845 - RNA, 19 nt, Homo sapiens
  misc_RNA (1)...(19): siRNA sense strand
gaaagucuggagugggaaa

SEQ ID NO: 910846 - RNA, 19 nt, Homo sapiens
  misc_RNA (1)...(19): siRNA sense strand
gaacauucuguccugcaaa

SEQ ID NO: 910847 - RNA, 19 nt, Homo sapiens
  misc_RNA (1)...(19): siRNA sense strand
gacaaauccauagacaaua

SEQ ID NO: 910848 - RNA, 19 nt, Homo sapiens
  misc_RNA (1)...(19): siRNA sense strand
gaacuuuucugugaauaug

SEQ ID NO: 910849 - RNA, 19 nt, Homo sapiens
  misc_RNA (1)...(19): siRNA sense strand
gaaggaacuuuucugugaa

SEQ ID NO: 910850 - RNA, 19 nt, Homo sapiens
  misc_RNA (1)...(19): siRNA sense strand
gaggucagaaccagggaua

SEQ ID NO: 910851 - RNA, 19 nt, Homo sapiens
  misc_RNA (1)...(19): siRNA sense strand
uaaggguuaugccuauguu

SEQ ID NO: 910852 - RNA, 19 nt, Homo sapiens
  misc_RNA (1)...(19): siRNA sense strand
gauucaaauucccagaaga

SEQ ID NO: 910853 - RNA, 19 nt, Homo sapiens
  misc_RNA (1)...(19): siRNA sense strand
ggaaaaguccucuauguag

SEQ ID NO: 910854 - RNA, 19 nt, Homo sapiens
  misc_RNA (1)...(19): siRNA sense strand
gugaauaugggccaacuga

SEQ ID NO: 910855 - RNA, 19 nt, Homo sapiens
  misc_RNA (1)...(19): siRNA sense strand
caacaaccgccagguguau

SEQ ID NO: 910856 - RNA, 19 nt, Homo sapiens
  misc_RNA (1)...(19): siRNA sense strand
auuaagaacuuggaugaga

SEQ ID NO: 910857 - RNA, 19 nt, Homo sapiens
  misc_RNA (1)...(19): siRNA sense strand
ggagugggaaauauauuca

SEQ ID NO: 910858 - RNA, 19 nt, Homo sapiens
  misc_RNA (1)...(19): siRNA sense strand
uaauccugcuggcaagaaa

SEQ ID NO: 910859 - RNA, 19 nt, Homo sapiens
  misc_RNA (1)...(19): siRNA sense strand
caaagcaguggaugagaug

SEQ ID NO: 910860 - RNA, 19 nt, Homo sapiens
  misc_RNA (1)...(19): siRNA sense strand
cggcugagguuaaaagaaa

SEQ ID NO: 910861 - RNA, 19 nt, Homo sapiens
  misc_RNA (1)...(19): siRNA sense strand
gauuugaacggcugagguu

SEQ ID NO: 910862 - RNA, 19 nt, Homo sapiens
  misc_RNA (1)...(19): siRNA sense strand
ccuugaacaccaugaauuu

SEQ ID NO: 910863 - RNA, 19 nt, Homo sapiens
  misc_RNA (1)...(19): siRNA sense strand
gaugaauggccgcauagug

SEQ ID NO: 910864 - RNA, 19 nt, Homo sapiens
  misc_RNA (1)...(19): siRNA sense strand
gauuugguguggucugcuu

SEQ ID NO: 910865 - RNA, 19 nt, Homo sapiens
  misc_RNA (1)...(19): siRNA sense strand
ggucagaaccagggauaga

SEQ ID NO: 910866 - RNA, 19 nt, Homo sapiens
  misc_RNA (1)...(19): siRNA sense strand
aggacaugcucuauaagaa

SEQ ID NO: 910867 - RNA, 19 nt, Homo sapiens
  misc_RNA (1)...(19): siRNA sense strand
ucaccaauguuuucguuaa

SEQ ID NO: 910868 - RNA, 19 nt, Homo sapiens
  misc_RNA (1)...(19): siRNA sense strand
ucaacaaccgccaggugua

SEQ ID NO: 910869 - RNA, 19 nt, Homo sapiens
  misc_RNA (1)...(19): siRNA sense strand
ccagggauagagcaacuuu

SEQ ID NO: 910870 - RNA, 19 nt, Homo sapiens
  misc_RNA (1)...(19): siRNA sense strand
cuauggguauguuaacuuc

SEQ ID NO: 910871 - RNA, 19 nt, Homo sapiens
  misc_RNA (1)...(19): siRNA sense strand
uugaacggcugagguuaaa

SEQ ID NO: 910872 - RNA, 19 nt, Homo sapiens
  misc_RNA (1)...(19): siRNA sense strand
gagcacagaagaaaauuga

SEQ ID NO: 910873 - RNA, 19 nt, Homo sapiens
  misc_RNA (1)...(19): siRNA sense strand
gguguauguuggcagauuc

SEQ ID NO: 910874 - RNA, 19 nt, Homo sapiens
  misc_RNA (1)...(19): siRNA sense strand
gcgaugacaacggcucuaa

SEQ ID NO: 910875 - RNA, 19 nt, Homo sapiens
  misc_RNA (1)...(19): siRNA sense strand
ggauuugugagauaugaga

SEQ ID NO: 910876 - RNA, 19 nt, Homo sapiens
  misc_RNA (1)...(19): siRNA sense strand
uuaugccuauguucacuuu

SEQ ID NO: 910877 - RNA, 19 nt, Homo sapiens
  misc_RNA (1)...(19): siRNA sense strand
gaugacaacggcucuaagg

SEQ ID NO: 910878 - RNA, 19 nt, Homo sapiens
  misc_RNA (1)...(19): siRNA sense strand
aacugagaguguuaaagua

SEQ ID NO: 910879 - RNA, 19 nt, Homo sapiens
  misc_RNA (1)...(19): siRNA sense strand
acugagaguguuaaaguaa

SEQ ID NO: 910880 - RNA, 19 nt, Homo sapiens
  misc_RNA (1)...(19): siRNA sense strand
gcuauggguauguuaacuu

SEQ ID NO: 910881 - RNA, 19 nt, Homo sapiens
  misc_RNA (1)...(19): siRNA sense strand
acaauagggcccuguuuua

SEQ ID NO: 910882 - RNA, 19 nt, Homo sapiens
  misc_RNA (1)...(19): siRNA sense strand
gagaugaauggccgcauag

SEQ ID NO: 910883 - RNA, 19 nt, Homo sapiens
  misc_RNA (1)...(19): siRNA sense strand
guagggcgagcacagaaga

SEQ ID NO: 910884 - RNA, 19 nt, Homo sapiens
  misc_RNA (1)...(19): siRNA sense strand
agagcaacuuucaccaaug

SEQ ID NO: 910885 - RNA, 19 nt, Homo sapiens
  misc_RNA (1)...(19): siRNA sense strand
caccaugaauuuugauuug

SEQ ID NO: 910886 - RNA, 19 nt, Homo sapiens
  misc_RNA (1)...(19): siRNA sense strand
uauguuggcagauucaaau

SEQ ID NO: 910887 - RNA, 19 nt, Homo sapiens
  misc_RNA (1)...(19): siRNA sense strand
gggccaacugagaguguua

SEQ ID NO: 910888 - RNA, 19 nt, Homo sapiens
  misc_RNA (1)...(19): siRNA sense strand
gacaauagggcccuguuuu

SEQ ID NO: 910889 - RNA, 19 nt, Homo sapiens
  misc_RNA (1)...(19): siRNA sense strand
gccuugaacaccaugaauu

SEQ ID NO: 910890 - RNA, 19 nt, Homo sapiens
  misc_RNA (1)...(19): siRNA sense strand
aaaccauuccgccuuaugu

SEQ ID NO: 910891 - RNA, 19 nt, Homo sapiens
  misc_RNA (1)...(19): siRNA sense strand
cauuggagacgacauagau

SEQ ID NO: 910892 - RNA, 19 nt, Homo sapiens
  misc_RNA (1)...(19): siRNA sense strand
gcagagugggccuugaaca

SEQ ID NO: 910893 - RNA, 19 nt, Homo sapiens
  misc_RNA (1)...(19): siRNA sense strand
augccuauguucacuuuga

SEQ ID NO: 910894 - RNA, 19 nt, Homo sapiens
  misc_RNA (1)...(19): siRNA sense strand
uugaacgccuggcugaguu

SEQ ID NO: 910895 - RNA, 19 nt, Homo sapiens
  misc_RNA (1)...(19): siRNA sense strand
caauuagucgggccaaagu

SEQ ID NO: 910896 - RNA, 19 nt, Homo sapiens
  misc_RNA (1)...(19): siRNA sense strand
agacaauagggcccuguuu

SEQ ID NO: 910897 - RNA, 19 nt, Homo sapiens
  misc_RNA (1)...(19): siRNA sense strand
ugaacaccaugaauuuuga

SEQ ID NO: 910898 - RNA, 19 nt, Homo sapiens
  misc_RNA (1)...(19): siRNA sense strand
cugagaguguuaaaguaau

SEQ ID NO: 910899 - RNA, 19 nt, Homo sapiens
  misc_RNA (1)...(19): siRNA sense strand
gccagaugaccgcuuaaga

SEQ ID NO: 910900 - RNA, 19 nt, Homo sapiens
  misc_RNA (1)...(19): siRNA sense strand
cagauucaaauucccagaa

SEQ ID NO: 910901 - RNA, 19 nt, Homo sapiens
  misc_RNA (1)...(19): siRNA sense strand
gaugcagagugggccuuga

SEQ ID NO: 910902 - RNA, 19 nt, Homo sapiens
  misc_RNA (1)...(19): siRNA sense strand
guauguuaacuuccgcuuu

SEQ ID NO: 910903 - RNA, 19 nt, Homo sapiens
  misc_RNA (1)...(19): siRNA sense strand
cuaccaaagcaguggauga

SEQ ID NO: 910904 - RNA, 19 nt, Homo sapiens
  misc_RNA (1)...(19): siRNA sense strand
ucucaaggccgcucuguac

SEQ ID NO: 910905 - RNA, 19 nt, Homo sapiens
  misc_RNA (1)...(19): siRNA sense strand
ucaccgaggacaugcucua

SEQ ID NO: 910906 - RNA, 19 nt, Homo sapiens
  misc_RNA (1)...(19): siRNA sense strand
acaacggcucuaaggguua

SEQ ID NO: 910907 - RNA, 19 nt, Homo sapiens
  misc_RNA (1)...(19): siRNA sense strand
ggucugcuuuuccucuuuu

SEQ ID NO: 910908 - RNA, 19 nt, Homo sapiens
  misc_RNA (1)...(19): siRNA sense strand
gaacgccuggcugaguuga

SEQ ID NO: 910909 - RNA, 19 nt, Homo sapiens
  misc_RNA (1)...(19): siRNA sense strand
acacgaggcugcccaaaag

SEQ ID NO: 910910 - RNA, 19 nt, Homo sapiens
  misc_RNA (1)...(19): siRNA sense strand
acccgaaucugccgugauc

SEQ ID NO: 910911 - RNA, 19 nt, Homo sapiens
  misc_RNA (1)...(19): siRNA sense strand
agucuggagugggaaauau

SEQ ID NO: 910912 - RNA, 19 nt, Homo sapiens
  misc_RNA (1)...(19): siRNA sense strand
guauguuggcagauucaaa

SEQ ID NO: 910913 - RNA, 19 nt, Homo sapiens
  misc_RNA (1)...(19): siRNA sense strand
ugaaggagauccacgagaa

SEQ ID NO: 910914 - RNA, 19 nt, Homo sapiens
  misc_RNA (1)...(19): siRNA sense strand
ggaaggccaucacagagaa

SEQ ID NO: 910915 - RNA, 19 nt, Homo sapiens
  misc_RNA (1)...(19): siRNA sense strand
gaagagaacgagaccuuga

SEQ ID NO: 910916 - RNA, 19 nt, Homo sapiens
  misc_RNA (1)...(19): siRNA sense strand
gaccggcucugccuccuaa

SEQ ID NO: 910917 - RNA, 19 nt, Homo sapiens
  misc_RNA (1)...(19): siRNA sense strand
agaagacacugaaggagaa

SEQ ID NO: 910918 - RNA, 19 nt, Homo sapiens
  misc_RNA (1)...(19): siRNA sense strand
gaacaagcuucuggaacug

SEQ ID NO: 910919 - RNA, 19 nt, Homo sapiens
  misc_RNA (1)...(19): siRNA sense strand
ugaacgggcugaaggaaga

SEQ ID NO: 910920 - RNA, 19 nt, Homo sapiens
  misc_RNA (1)...(19): siRNA sense strand
gaacagcagaagacacuga

SEQ ID NO: 910921 - RNA, 19 nt, Homo sapiens
  misc_RNA (1)...(19): siRNA sense strand
ugaacaggcugaaggagau

SEQ ID NO: 910922 - RNA, 19 nt, Homo sapiens
  misc_RNA (1)...(19): siRNA sense strand
uacagaagaugaagacaca

SEQ ID NO: 910923 - RNA, 19 nt, Homo sapiens
  misc_RNA (1)...(19): siRNA sense strand
ggaagcggcagcaggaguu

SEQ ID NO: 910924 - RNA, 19 nt, Homo sapiens
  misc_RNA (1)...(19): siRNA sense strand
ggacugugcccuagacaag

SEQ ID NO: 910925 - RNA, 19 nt, Homo sapiens
  misc_RNA (1)...(19): siRNA sense strand
gcuggaaggccaucacaga

SEQ ID NO: 910926 - RNA, 19 nt, Homo sapiens
  misc_RNA (1)...(19): siRNA sense strand
gcaggacugugcccuagac

SEQ ID NO: 910927 - RNA, 19 nt, Homo sapiens
  misc_RNA (1)...(19): siRNA sense strand
gaaccugcagcgcaucuuc

SEQ ID NO: 910928 - RNA, 19 nt, Homo sapiens
  misc_RNA (1)...(19): siRNA sense strand
ggagauccacgagaaggaa

SEQ ID NO: 910929 - RNA, 19 nt, Homo sapiens
  misc_RNA (1)...(19): siRNA sense strand
gggaggagcccacagaacu

SEQ ID NO: 910930 - RNA, 19 nt, Homo sapiens
  misc_RNA (1)...(19): siRNA sense strand
gggaacagcagaagacacu

SEQ ID NO: 910931 - RNA, 19 nt, Homo sapiens
  misc_RNA (1)...(19): siRNA sense strand
gaaggagauccacgagaag

SEQ ID NO: 910932 - RNA, 19 nt, Homo sapiens
  misc_RNA (1)...(19): siRNA sense strand
gaagugcugagaccagagu

SEQ ID NO: 910933 - RNA, 19 nt, Homo sapiens
  misc_RNA (1)...(19): siRNA sense strand
ccacgaggaggcugaggaa

SEQ ID NO: 910934 - RNA, 19 nt, Homo sapiens
  misc_RNA (1)...(19): siRNA sense strand
ggaccugaaggccagagaa

SEQ ID NO: 910935 - RNA, 19 nt, Homo sapiens
  misc_RNA (1)...(19): siRNA sense strand
gcaguacagaagaugaaga

SEQ ID NO: 910936 - RNA, 19 nt, Homo sapiens
  misc_RNA (1)...(19): siRNA sense strand
ggaggagcccacagaacug

SEQ ID NO: 910937 - RNA, 19 nt, Homo sapiens
  misc_RNA (1)...(19): siRNA sense strand
acaagcuucuggaacugaa

SEQ ID NO: 910938 - RNA, 19 nt, Homo sapiens
  misc_RNA (1)...(19): siRNA sense strand
cgaggaggcugaggaagac

SEQ ID NO: 910939 - RNA, 19 nt, Homo sapiens
  misc_RNA (1)...(19): siRNA sense strand
gagaccagaguccgacgaa

SEQ ID NO: 910940 - RNA, 19 nt, Homo sapiens
  misc_RNA (1)...(19): siRNA sense strand
cagcugcacgggaccauug

SEQ ID NO: 910941 - RNA, 19 nt, Homo sapiens
  misc_RNA (1)...(19): siRNA sense strand
gaugaacgggcugaaggaa

SEQ ID NO: 910942 - RNA, 19 nt, Homo sapiens
  misc_RNA (1)...(19): siRNA sense strand
cugagggcccugagaauga

SEQ ID NO: 910943 - RNA, 19 nt, Homo sapiens
  misc_RNA (1)...(19): siRNA sense strand
gcaucuucauccucaccaa

SEQ ID NO: 910944 - RNA, 19 nt, Homo sapiens
  misc_RNA (1)...(19): siRNA sense strand
gaacuggaugagacagaca

SEQ ID NO: 910945 - RNA, 19 nt, Homo sapiens
  misc_RNA (1)...(19): siRNA sense strand
gaccagaguccgacgaacu

SEQ ID NO: 910946 - RNA, 19 nt, Homo sapiens
  misc_RNA (1)...(19): siRNA sense strand
gaggaucgaggagcucuuc

SEQ ID NO: 910947 - RNA, 19 nt, Homo sapiens
  misc_RNA (1)...(19): siRNA sense strand
uggaaggccaucacagaga

SEQ ID NO: 910948 - RNA, 19 nt, Homo sapiens
  misc_RNA (1)...(19): siRNA sense strand
acgaggaggcugaggaaga

SEQ ID NO: 910949 - RNA, 19 nt, Homo sapiens
  misc_RNA (1)...(19): siRNA sense strand
ggagacauaugguaacuua

SEQ ID NO: 910950 - RNA, 19 nt, Homo sapiens
  misc_RNA (1)...(19): siRNA sense strand
gaagauaugugccagaagu

SEQ ID NO: 910951 - RNA, 19 nt, Homo sapiens
  misc_RNA (1)...(19): siRNA sense strand
ggaaagauuuaaggaauuc

SEQ ID NO: 910952 - RNA, 19 nt, Homo sapiens
  misc_RNA (1)...(19): siRNA sense strand
cagaacagcuggaauaucu

SEQ ID NO: 910953 - RNA, 19 nt, Homo sapiens
  misc_RNA (1)...(19): siRNA sense strand
gaacagcuggaauaucuuu

SEQ ID NO: 910954 - RNA, 19 nt, Homo sapiens
  misc_RNA (1)...(19): siRNA sense strand
caaagcaccucgguacaaa

SEQ ID NO: 910955 - RNA, 19 nt, Homo sapiens
  misc_RNA (1)...(19): siRNA sense strand
ugaauacucuccuauggaa

SEQ ID NO: 910956 - RNA, 19 nt, Homo sapiens
  misc_RNA (1)...(19): siRNA sense strand
gaggacuucuuugcuaaua

SEQ ID NO: 910957 - RNA, 19 nt, Homo sapiens
  misc_RNA (1)...(19): siRNA sense strand
gcaaagccgagucacauuu

SEQ ID NO: 910958 - RNA, 19 nt, Homo sapiens
  misc_RNA (1)...(19): siRNA sense strand
caaaucauauccucugcaa

SEQ ID NO: 910959 - RNA, 19 nt, Homo sapiens
  misc_RNA (1)...(19): siRNA sense strand
ucagaaggaugcucaguau

SEQ ID NO: 910960 - RNA, 19 nt, Homo sapiens
  misc_RNA (1)...(19): siRNA sense strand
gggaggacuucuuugcuaa

SEQ ID NO: 910961 - RNA, 19 nt, Homo sapiens
  misc_RNA (1)...(19): siRNA sense strand
uccgagaacucuuggcuua

SEQ ID NO: 910962 - RNA, 19 nt, Homo sapiens
  misc_RNA (1)...(19): siRNA sense strand
ggacuucuuugcuaauaag

SEQ ID NO: 910963 - RNA, 19 nt, Homo sapiens
  misc_RNA (1)...(19): siRNA sense strand
ugacaaugaugacgagaug

SEQ ID NO: 910964 - RNA, 19 nt, Homo sapiens
  misc_RNA (1)...(19): siRNA sense strand
ggauaaggaaggaaauauu

SEQ ID NO: 910965 - RNA, 19 nt, Homo sapiens
  misc_RNA (1)...(19): siRNA sense strand
cgccauggauaucaucaua

SEQ ID NO: 910966 - RNA, 19 nt, Homo sapiens
  misc_RNA (1)...(19): siRNA sense strand
gcagaagggcaacagcuuu

SEQ ID NO: 910967 - RNA, 19 nt, Homo sapiens
  misc_RNA (1)...(19): siRNA sense strand
gcacaaggguagcuguuuu

SEQ ID NO: 910968 - RNA, 19 nt, Homo sapiens
  misc_RNA (1)...(19): siRNA sense strand
ggacaagcuucagcaggaa

SEQ ID NO: 910969 - RNA, 19 nt, Homo sapiens
  misc_RNA (1)...(19): siRNA sense strand
agaaggaacugggacugua

SEQ ID NO: 910970 - RNA, 19 nt, Homo sapiens
  misc_RNA (1)...(19): siRNA sense strand
gaaacuuccacaucucaaa

SEQ ID NO: 910971 - RNA, 19 nt, Homo sapiens
  misc_RNA (1)...(19): siRNA sense strand
ccauggauaucaucauaau

SEQ ID NO: 910972 - RNA, 19 nt, Homo sapiens
  misc_RNA (1)...(19): siRNA sense strand
ggaaauggacguucugcau

SEQ ID NO: 910973 - RNA, 19 nt, Homo sapiens
  misc_RNA (1)...(19): siRNA sense strand
ccgggaauaucaaaucauu

SEQ ID NO: 910974 - RNA, 19 nt, Homo sapiens
  misc_RNA (1)...(19): siRNA sense strand
ccauucagaucaugcagaa

SEQ ID NO: 910975 - RNA, 19 nt, Homo sapiens
  misc_RNA (1)...(19): siRNA sense strand
ccuggcagcuccugaagaa

SEQ ID NO: 910976 - RNA, 19 nt, Homo sapiens
  misc_RNA (1)...(19): siRNA sense strand
aaacggaguuccugguugu

SEQ ID NO: 910977 - RNA, 19 nt, Homo sapiens
  misc_RNA (1)...(19): siRNA sense strand
cgggaggacuucuuugcua

SEQ ID NO: 910978 - RNA, 19 nt, Homo sapiens
  misc_RNA (1)...(19): siRNA sense strand
aaucauauccucugcaaga

SEQ ID NO: 910979 - RNA, 19 nt, Homo sapiens
  misc_RNA (1)...(19): siRNA sense strand
caaaggccauucagaucau

SEQ ID NO: 910980 - RNA, 19 nt, Homo sapiens
  misc_RNA (1)...(19): siRNA sense strand
gacuuuagcuccuugaaac

SEQ ID NO: 910981 - RNA, 19 nt, Homo sapiens
  misc_RNA (1)...(19): siRNA sense strand
agacccaccugagugaaua

SEQ ID NO: 910982 - RNA, 19 nt, Homo sapiens
  misc_RNA (1)...(19): siRNA sense strand
gaagagagagaucuacaac

SEQ ID NO: 910983 - RNA, 19 nt, Homo sapiens
  misc_RNA (1)...(19): siRNA sense strand
ccaaaggccauucagauca

SEQ ID NO: 910984 - RNA, 19 nt, Homo sapiens
  misc_RNA (1)...(19): siRNA sense strand
ccugggaaaugaguugaua

SEQ ID NO: 910985 - RNA, 19 nt, Homo sapiens
  misc_RNA (1)...(19): siRNA sense strand
ggcaacagcuuuuauuuca

SEQ ID NO: 910986 - RNA, 19 nt, Homo sapiens
  misc_RNA (1)...(19): siRNA sense strand
ggaauuccagaucaaauca

SEQ ID NO: 910987 - RNA, 19 nt, Homo sapiens
  misc_RNA (1)...(19): siRNA sense strand
uuaggaagauggagcuguu

SEQ ID NO: 910988 - RNA, 19 nt, Homo sapiens
  misc_RNA (1)...(19): siRNA sense strand
gagaacagaggaugagauc

SEQ ID NO: 910989 - RNA, 19 nt, Homo sapiens
  misc_RNA (1)...(19): siRNA sense strand
ccaagaagagagagaucua

SEQ ID NO: 910990 - RNA, 19 nt, Homo sapiens
  misc_RNA (1)...(19): siRNA sense strand
gguccaccaucgucuguau

SEQ ID NO: 910991 - RNA, 19 nt, Homo sapiens
  misc_RNA (1)...(19): siRNA sense strand
agaaguuccuccagcagaa

SEQ ID NO: 910992 - RNA, 19 nt, Homo sapiens
  misc_RNA (1)...(19): siRNA sense strand
uguuaaagcucaauauugc

SEQ ID NO: 910993 - RNA, 19 nt, Homo sapiens
  misc_RNA (1)...(19): siRNA sense strand
aaugugccaugaucaauau

SEQ ID NO: 910994 - RNA, 19 nt, Homo sapiens
  misc_RNA (1)...(19): siRNA sense strand
cauauccucugcaagacuu

SEQ ID NO: 910995 - RNA, 19 nt, Homo sapiens
  misc_RNA (1)...(19): siRNA sense strand
aaaugugccaugaucaaua

SEQ ID NO: 910996 - RNA, 19 nt, Homo sapiens
  misc_RNA (1)...(19): siRNA sense strand
gcaucaacaagacgacuaa

SEQ ID NO: 910997 - RNA, 19 nt, Homo sapiens
  misc_RNA (1)...(19): siRNA sense strand
ugaugagccugggaaauga

SEQ ID NO: 910998 - RNA, 19 nt, Homo sapiens
  misc_RNA (1)...(19): siRNA sense strand
gagucacccuucaucaugu

SEQ ID NO: 910999 - RNA, 19 nt, Homo sapiens
  misc_RNA (1)...(19): siRNA sense strand
uuaaggaauuccagaucaa

SEQ ID NO: 911000 - RNA, 19 nt, Homo sapiens
  misc_RNA (1)...(19): siRNA sense strand
uggcgaagauagagagguu

SEQ ID NO: 911001 - RNA, 19 nt, Homo sapiens
  misc_RNA (1)...(19): siRNA sense strand
ggaauaucuuucggaagga

SEQ ID NO: 911002 - RNA, 19 nt, Homo sapiens
  misc_RNA (1)...(19): siRNA sense strand
gaguugauacggauaagga

SEQ ID NO: 911003 - RNA, 19 nt, Homo sapiens
  misc_RNA (1)...(19): siRNA sense strand
aagccucguuauccuauuu

SEQ ID NO: 911004 - RNA, 19 nt, Homo sapiens
  misc_RNA (1)...(19): siRNA sense strand
ggccgucuguaacaucuug

SEQ ID NO: 911005 - RNA, 19 nt, Homo sapiens
  misc_RNA (1)...(19): siRNA sense strand
gaggagacauaugguaacu

SEQ ID NO: 911006 - RNA, 19 nt, Homo sapiens
  misc_RNA (1)...(19): siRNA sense strand
ucaaaugugccaugaucaa

SEQ ID NO: 911007 - RNA, 19 nt, Homo sapiens
  misc_RNA (1)...(19): siRNA sense strand
ugaagacccaccugaguga

SEQ ID NO: 911008 - RNA, 19 nt, Homo sapiens
  misc_RNA (1)...(19): siRNA sense strand
cagcagugccuuccuagau

SEQ ID NO: 911009 - RNA, 19 nt, Homo sapiens
  misc_RNA (1)...(19): siRNA sense strand
uuuaaggaauuccagauca

SEQ ID NO: 911010 - RNA, 19 nt, Homo sapiens
  misc_RNA (1)...(19): siRNA sense strand
ggagagucacccuucauca

SEQ ID NO: 911011 - RNA, 19 nt, Homo sapiens
  misc_RNA (1)...(19): siRNA sense strand
caacagcuuuuauuucauc

SEQ ID NO: 911012 - RNA, 19 nt, Homo sapiens
  misc_RNA (1)...(19): siRNA sense strand
ucaaagcaccucgguacaa

SEQ ID NO: 911013 - RNA, 19 nt, Homo sapiens
  misc_RNA (1)...(19): siRNA sense strand
agucugugguccuggauuu

SEQ ID NO: 911014 - RNA, 19 nt, Homo sapiens
  misc_RNA (1)...(19): siRNA sense strand
gagagucacccuucaucau

SEQ ID NO: 911015 - RNA, 19 nt, Homo sapiens
  misc_RNA (1)...(19): siRNA sense strand
cggaguuccugguuguuga

SEQ ID NO: 911016 - RNA, 19 nt, Homo sapiens
  misc_RNA (1)...(19): siRNA sense strand
gcacaguugcaauaaccaa

SEQ ID NO: 911017 - RNA, 19 nt, Homo sapiens
  misc_RNA (1)...(19): siRNA sense strand
ccaggaaguucagaaggau

SEQ ID NO: 911018 - RNA, 19 nt, Homo sapiens
  misc_RNA (1)...(19): siRNA sense strand
ggagaacagaggaugagau

SEQ ID NO: 911019 - RNA, 19 nt, Homo sapiens
  misc_RNA (1)...(19): siRNA sense strand
gaucuacaacccuaagucu

SEQ ID NO: 911020 - RNA, 19 nt, Homo sapiens
  misc_RNA (1)...(19): siRNA sense strand
caaugaugacgagaugaua

SEQ ID NO: 911021 - RNA, 19 nt, Homo sapiens
  misc_RNA (1)...(19): siRNA sense strand
uaaggaauuccagaucaaa

SEQ ID NO: 911022 - RNA, 19 nt, Homo sapiens
  misc_RNA (1)...(19): siRNA sense strand
aaagccgagucacauuuga

SEQ ID NO: 911023 - RNA, 19 nt, Homo sapiens
  misc_RNA (1)...(19): siRNA sense strand
augggcagcugaucucaaa

SEQ ID NO: 911024 - RNA, 19 nt, Homo sapiens
  misc_RNA (1)...(19): siRNA sense strand
gaugcucaguaucgguuug

SEQ ID NO: 911025 - RNA, 19 nt, Homo sapiens
  misc_RNA (1)...(19): siRNA sense strand
gggcacaguugcaauaacc

SEQ ID NO: 911026 - RNA, 19 nt, Homo sapiens
  misc_RNA (1)...(19): siRNA sense strand
aaagcucaauauugcauuc

SEQ ID NO: 911027 - RNA, 19 nt, Homo sapiens
  misc_RNA (1)...(19): siRNA sense strand
ccuugaaacuuccacaucu

SEQ ID NO: 911028 - RNA, 19 nt, Homo sapiens
  misc_RNA (1)...(19): siRNA sense strand
gaagauggagcuguuugca

SEQ ID NO: 911029 - RNA, 19 nt, Homo sapiens
  misc_RNA (1)...(19): siRNA sense strand
gaaggaacugggacuguac

SEQ ID NO: 911030 - RNA, 19 nt, Homo sapiens
  misc_RNA (1)...(19): siRNA sense strand
caucgucuguauggaagaa

SEQ ID NO: 911031 - RNA, 19 nt, Homo sapiens
  misc_RNA (1)...(19): siRNA sense strand
ugaccgggaggacuucuuu

SEQ ID NO: 911032 - RNA, 19 nt, Homo sapiens
  misc_RNA (1)...(19): siRNA sense strand
cgacuaagccucguuaucc

SEQ ID NO: 911033 - RNA, 19 nt, Homo sapiens
  misc_RNA (1)...(19): siRNA sense strand
cguggagccuugccaaagu

SEQ ID NO: 911034 - RNA, 19 nt, Homo sapiens
  misc_RNA (1)...(19): siRNA sense strand
gcagaggagggucacuuuc

SEQ ID NO: 911035 - RNA, 19 nt, Homo sapiens
  misc_RNA (1)...(19): siRNA sense strand
caaaugugccaugaucaau

SEQ ID NO: 911036 - RNA, 19 nt, Homo sapiens
  misc_RNA (1)...(19): siRNA sense strand
auaaugauccgagugugua

SEQ ID NO: 911037 - RNA, 19 nt, Homo sapiens
  misc_RNA (1)...(19): siRNA sense strand
agucaacuguucacuccaa

SEQ ID NO: 911038 - RNA, 19 nt, Homo sapiens
  misc_RNA (1)...(19): siRNA sense strand
gcagaacagcuggaauauc

SEQ ID NO: 911039 - RNA, 19 nt, Homo sapiens
  misc_RNA (1)...(19): siRNA sense strand
aaugaugacgagaugauaa

SEQ ID NO: 911040 - RNA, 19 nt, Homo sapiens
  misc_RNA (1)...(19): siRNA sense strand
ucaguaucgguuugaauuu

SEQ ID NO: 911041 - RNA, 19 nt, Homo sapiens
  misc_RNA (1)...(19): siRNA sense strand
uguaccagcucgccaugga

SEQ ID NO: 911042 - RNA, 19 nt, Homo sapiens
  misc_RNA (1)...(19): siRNA sense strand
uaccagcucgccauggaua

SEQ ID NO: 911043 - RNA, 19 nt, Homo sapiens
  misc_RNA (1)...(19): siRNA sense strand
gugaauacucuccuaugga

SEQ ID NO: 911044 - RNA, 19 nt, Homo sapiens
  misc_RNA (1)...(19): siRNA sense strand
ggaccaggaaguucagaag

SEQ ID NO: 911045 - RNA, 19 nt, Homo sapiens
  misc_RNA (1)...(19): siRNA sense strand
gcuccuggccaaagucaug

SEQ ID NO: 911046 - RNA, 19 nt, Homo sapiens
  misc_RNA (1)...(19): siRNA sense strand
cacccuaucuucuccuucu

SEQ ID NO: 911047 - RNA, 19 nt, Homo sapiens
  misc_RNA (1)...(19): siRNA sense strand
ucgaucaaaugugccauga

SEQ ID NO: 911048 - RNA, 19 nt, Homo sapiens
  misc_RNA (1)...(19): siRNA sense strand
cugaugagccugggaaaug

SEQ ID NO: 911049 - RNA, 19 nt, Homo sapiens
  misc_RNA (1)...(19): siRNA sense strand
gagaaaggauccuggguua

SEQ ID NO: 911050 - RNA, 19 nt, Homo sapiens
  misc_RNA (1)...(19): siRNA sense strand
gcaaagagggcaaucaaga

SEQ ID NO: 911051 - RNA, 19 nt, Homo sapiens
  misc_RNA (1)...(19): siRNA sense strand
ggaccggccugaugccuuu

SEQ ID NO: 911052 - RNA, 19 nt, Homo sapiens
  misc_RNA (1)...(19): siRNA sense strand
ggucacaugugcugcuuaa

SEQ ID NO: 911053 - RNA, 19 nt, Homo sapiens
  misc_RNA (1)...(19): siRNA sense strand
gaaaggauccuggguuaug

SEQ ID NO: 911054 - RNA, 19 nt, Homo sapiens
  misc_RNA (1)...(19): siRNA sense strand
caacaaaaguuucaugcua

SEQ ID NO: 911055 - RNA, 19 nt, Homo sapiens
  misc_RNA (1)...(19): siRNA sense strand
cuacauggcuccugaaguc

SEQ ID NO: 911056 - RNA, 19 nt, Homo sapiens
  misc_RNA (1)...(19): siRNA sense strand
gcuacggcgugguuuauga

SEQ ID NO: 911057 - RNA, 19 nt, Homo sapiens
  misc_RNA (1)...(19): siRNA sense strand
gaggagcccugcuaucucu

SEQ ID NO: 911058 - RNA, 19 nt, Homo sapiens
  misc_RNA (1)...(19): siRNA sense strand
gaacuugaaaccagaaugg

SEQ ID NO: 911059 - RNA, 19 nt, Homo sapiens
  misc_RNA (1)...(19): siRNA sense strand
gggcaaugauagaaagaau

SEQ ID NO: 911060 - RNA, 19 nt, Homo sapiens
  misc_RNA (1)...(19): siRNA sense strand
guggagaccucgcugaaag

SEQ ID NO: 911061 - RNA, 19 nt, Homo sapiens
  misc_RNA (1)...(19): siRNA sense strand
gcagcuacggcgugguuua

SEQ ID NO: 911062 - RNA, 19 nt, Homo sapiens
  misc_RNA (1)...(19): siRNA sense strand
gcccugcuaucucugguuu

SEQ ID NO: 911063 - RNA, 19 nt, Homo sapiens
  misc_RNA (1)...(19): siRNA sense strand
ccugaugccuuugaacuug

SEQ ID NO: 911064 - RNA, 19 nt, Homo sapiens
  misc_RNA (1)...(19): siRNA sense strand
gcaggacuuccaugucuga

SEQ ID NO: 911065 - RNA, 19 nt, Homo sapiens
  misc_RNA (1)...(19): siRNA sense strand
ccagacaacauccucauca

SEQ ID NO: 911066 - RNA, 19 nt, Homo sapiens
  misc_RNA (1)...(19): siRNA sense strand
acaacauccucaucacaga

SEQ ID NO: 911067 - RNA, 19 nt, Homo sapiens
  misc_RNA (1)...(19): siRNA sense strand
gugaggcgcugcuagaaaa

SEQ ID NO: 911068 - RNA, 19 nt, Homo sapiens
  misc_RNA (1)...(19): siRNA sense strand
ggugaggcgcugcuagaaa

SEQ ID NO: 911069 - RNA, 19 nt, Homo sapiens
  misc_RNA (1)...(19): siRNA sense strand
ggguggcggucaagaagau

SEQ ID NO: 911070 - RNA, 19 nt, Homo sapiens
  misc_RNA (1)...(19): siRNA sense strand
ccagaacgucgugcaguuu

SEQ ID NO: 911071 - RNA, 19 nt, Homo sapiens
  misc_RNA (1)...(19): siRNA sense strand
ccgcagagguacacaaagc

SEQ ID NO: 911072 - RNA, 19 nt, Homo sapiens
  misc_RNA (1)...(19): siRNA sense strand
gggcaaucaagacaacaaa

SEQ ID NO: 911073 - RNA, 19 nt, Homo sapiens
  misc_RNA (1)...(19): siRNA sense strand
aaacgcaggacuuccaugu

SEQ ID NO: 911074 - RNA, 19 nt, Homo sapiens
  misc_RNA (1)...(19): siRNA sense strand
acgcaggacuuccaugucu

SEQ ID NO: 911075 - RNA, 19 nt, Homo sapiens
  misc_RNA (1)...(19): siRNA sense strand
agacccagccaccaacaaa

SEQ ID NO: 911076 - RNA, 19 nt, Homo sapiens
  misc_RNA (1)...(19): siRNA sense strand
agaacgucgugcaguuuga

SEQ ID NO: 911077 - RNA, 19 nt, Homo sapiens
  misc_RNA (1)...(19): siRNA sense strand
aaagagggcaaucaagaca

SEQ ID NO: 911078 - RNA, 19 nt, Homo sapiens
  misc_RNA (1)...(19): siRNA sense strand
caaagagggcaaucaagac

SEQ ID NO: 911079 - RNA, 19 nt, Homo sapiens
  misc_RNA (1)...(19): siRNA sense strand
acccaaagauggaguugca

SEQ ID NO: 911080 - RNA, 19 nt, Homo sapiens
  misc_RNA (1)...(19): siRNA sense strand
ggagaccucgcugaaagga

SEQ ID NO: 911081 - RNA, 19 nt, Homo sapiens
  misc_RNA (1)...(19): siRNA sense strand
acucugagaccaagaagga

SEQ ID NO: 911082 - RNA, 19 nt, Homo sapiens
  misc_RNA (1)...(19): siRNA sense strand
agccaaggcggacaucuuu

SEQ ID NO: 911083 - RNA, 19 nt, Homo sapiens
  misc_RNA (1)...(19): siRNA sense strand
gcccgcagagguacacaaa

SEQ ID NO: 911084 - RNA, 19 nt, Homo sapiens
  misc_RNA (1)...(19): siRNA sense strand
cagaacgucgugcaguuug

SEQ ID NO: 911085 - RNA, 19 nt, Homo sapiens
  misc_RNA (1)...(19): siRNA sense strand
gguggagaccucgcugaaa

SEQ ID NO: 911086 - RNA, 19 nt, Homo sapiens
  misc_RNA (1)...(19): siRNA sense strand
ucacuuuuauugacucuga

SEQ ID NO: 911087 - RNA, 19 nt, Homo sapiens
  misc_RNA (1)...(19): siRNA sense strand
caucugggcaaugauagaa

SEQ ID NO: 911088 - RNA, 19 nt, Homo sapiens
  misc_RNA (1)...(19): siRNA sense strand
ugcuaucucugguuuguca

SEQ ID NO: 911089 - RNA, 19 nt, Homo sapiens
  misc_RNA (1)...(19): siRNA sense strand
ccugcuaucucugguuugu

SEQ ID NO: 911090 - RNA, 19 nt, Homo sapiens
  misc_RNA (1)...(19): siRNA sense strand
acugagaucgucccuguug

SEQ ID NO: 911091 - RNA, 19 nt, Homo sapiens
  misc_RNA (1)...(19): siRNA sense strand
gucauggaguucugugaag

SEQ ID NO: 911092 - RNA, 19 nt, Homo sapiens
  misc_RNA (1)...(19): siRNA sense strand
cugaugccuuugaacuuga

SEQ ID NO: 911093 - RNA, 19 nt, Homo sapiens
  misc_RNA (1)...(19): siRNA sense strand
accagaacgucgugcaguu

SEQ ID NO: 911094 - RNA, 19 nt, Homo sapiens
  misc_RNA (1)...(19): siRNA sense strand
cagccaaggcggacaucuu

SEQ ID NO: 911095 - RNA, 19 nt, Homo sapiens
  misc_RNA (1)...(19): siRNA sense strand
guggccgacuuuggacuaa

SEQ ID NO: 911096 - RNA, 19 nt, Homo sapiens
  misc_RNA (1)...(19): siRNA sense strand
cagcuacggcgugguuuau

SEQ ID NO: 911097 - RNA, 19 nt, Homo sapiens
  misc_RNA (1)...(19): siRNA sense strand
ccauugccuuccugcacaa

SEQ ID NO: 911098 - RNA, 19 nt, Homo sapiens
  misc_RNA (1)...(19): siRNA sense strand
gcauuaucaucugggcaau

SEQ ID NO: 911099 - RNA, 19 nt, Homo sapiens
  misc_RNA (1)...(19): siRNA sense strand
ugaaugugaauaaguacug

SEQ ID NO: 911100 - RNA, 19 nt, Homo sapiens
  misc_RNA (1)...(19): siRNA sense strand
gagaugcgacacccacuua

SEQ ID NO: 911101 - RNA, 19 nt, Homo sapiens
  misc_RNA (1)...(19): siRNA sense strand
cagaggacaugcagagaug

SEQ ID NO: 911102 - RNA, 19 nt, Homo sapiens
  misc_RNA (1)...(19): siRNA sense strand
uccaaggucugcucggaua

SEQ ID NO: 911103 - RNA, 19 nt, Homo sapiens
  misc_RNA (1)...(19): siRNA sense strand
gaugcgacacccacuuaaa

SEQ ID NO: 911104 - RNA, 19 nt, Homo sapiens
  misc_RNA (1)...(19): siRNA sense strand
acucgaaguugcaaagaug

SEQ ID NO: 911105 - RNA, 19 nt, Homo sapiens
  misc_RNA (1)...(19): siRNA sense strand
ggcgcuggcugucauugug

SEQ ID NO: 911106 - RNA, 19 nt, Homo sapiens
  misc_RNA (1)...(19): siRNA sense strand
caaggucugcucggauauu

SEQ ID NO: 911107 - RNA, 19 nt, Homo sapiens
  misc_RNA (1)...(19): siRNA sense strand
ggucugcucggauauugga

SEQ ID NO: 911108 - RNA, 19 nt, Homo sapiens
  misc_RNA (1)...(19): siRNA sense strand
gauauuggacagaggacau

SEQ ID NO: 911109 - RNA, 19 nt, Homo sapiens
  misc_RNA (1)...(19): siRNA sense strand
aaggucugcucggauauug

SEQ ID NO: 911110 - RNA, 19 nt, Homo sapiens
  misc_RNA (1)...(19): siRNA sense strand
gggaccugcugccacagau

SEQ ID NO: 911111 - RNA, 19 nt, Homo sapiens
  misc_RNA (1)...(19): siRNA sense strand
caaagaugcaaaugagacu

SEQ ID NO: 911112 - RNA, 19 nt, Homo sapiens
  misc_RNA (1)...(19): siRNA sense strand
ucaaagagauacaugcuua

SEQ ID NO: 911113 - RNA, 19 nt, Homo sapiens
  misc_RNA (1)...(19): siRNA sense strand
gaagugcuguaaugaauaa

SEQ ID NO: 911114 - RNA, 19 nt, Homo sapiens
  misc_RNA (1)...(19): siRNA sense strand
guacagaaauccuugagaa

SEQ ID NO: 911115 - RNA, 19 nt, Homo sapiens
  misc_RNA (1)...(19): siRNA sense strand
gaacaaguguaugcaguaa

SEQ ID NO: 911116 - RNA, 19 nt, Homo sapiens
  misc_RNA (1)...(19): siRNA sense strand
guacagaaguuuccugaau

SEQ ID NO: 911117 - RNA, 19 nt, Homo sapiens
  misc_RNA (1)...(19): siRNA sense strand
gaaguuuccugaauauaga

SEQ ID NO: 911118 - RNA, 19 nt, Homo sapiens
  misc_RNA (1)...(19): siRNA sense strand
ccacucagcucuuauugaa

SEQ ID NO: 911119 - RNA, 19 nt, Homo sapiens
  misc_RNA (1)...(19): siRNA sense strand
ggagaaagcuuuuaacaug

SEQ ID NO: 911120 - RNA, 19 nt, Homo sapiens
  misc_RNA (1)...(19): siRNA sense strand
ucacucauaucacagaaua

SEQ ID NO: 911121 - RNA, 19 nt, Homo sapiens
  misc_RNA (1)...(19): siRNA sense strand
ggacagguacuucguguaa

SEQ ID NO: 911122 - RNA, 19 nt, Homo sapiens
  misc_RNA (1)...(19): siRNA sense strand
aaagagaccaugacaguua

SEQ ID NO: 911123 - RNA, 19 nt, Homo sapiens
  misc_RNA (1)...(19): siRNA sense strand
gaguagagcugugguaaug

SEQ ID NO: 911124 - RNA, 19 nt, Homo sapiens
  misc_RNA (1)...(19): siRNA sense strand
ggaugucccugaagagaaa

SEQ ID NO: 911125 - RNA, 19 nt, Homo sapiens
  misc_RNA (1)...(19): siRNA sense strand
gaagagaaacccaguaaca

SEQ ID NO: 911126 - RNA, 19 nt, Homo sapiens
  misc_RNA (1)...(19): siRNA sense strand
ggaauccaaugcacaaaug

SEQ ID NO: 911127 - RNA, 19 nt, Homo sapiens
  misc_RNA (1)...(19): siRNA sense strand
gacaaccacucagcucuua

SEQ ID NO: 911128 - RNA, 19 nt, Homo sapiens
  misc_RNA (1)...(19): siRNA sense strand
gagaaucaauuaccaccaa

SEQ ID NO: 911129 - RNA, 19 nt, Homo sapiens
  misc_RNA (1)...(19): siRNA sense strand
guacaccucuccugaugaa

SEQ ID NO: 911130 - RNA, 19 nt, Homo sapiens
  misc_RNA (1)...(19): siRNA sense strand
gcagagcaauuccaucuag

SEQ ID NO: 911131 - RNA, 19 nt, Homo sapiens
  misc_RNA (1)...(19): siRNA sense strand
ucaaguagcacauaagauu

SEQ ID NO: 911132 - RNA, 19 nt, Homo sapiens
  misc_RNA (1)...(19): siRNA sense strand
gaaccagcauugucuaugg

SEQ ID NO: 911133 - RNA, 19 nt, Homo sapiens
  misc_RNA (1)...(19): siRNA sense strand
gauacaugcuuaacccaaa

SEQ ID NO: 911134 - RNA, 19 nt, Homo sapiens
  misc_RNA (1)...(19): siRNA sense strand
ggaaacagcuaagaaaauu

SEQ ID NO: 911135 - RNA, 19 nt, Homo sapiens
  misc_RNA (1)...(19): siRNA sense strand
uacagaaguuuccugaaua

SEQ ID NO: 911136 - RNA, 19 nt, Homo sapiens
  misc_RNA (1)...(19): siRNA sense strand
gguagaaguuggagauguu

SEQ ID NO: 911137 - RNA, 19 nt, Homo sapiens
  misc_RNA (1)...(19): siRNA sense strand
cagaaauccuugagaaaug

SEQ ID NO: 911138 - RNA, 19 nt, Homo sapiens
  misc_RNA (1)...(19): siRNA sense strand
cagcucggauuuacauuaa

SEQ ID NO: 911139 - RNA, 19 nt, Homo sapiens
  misc_RNA (1)...(19): siRNA sense strand
gagccaaguuaaacaagaa

SEQ ID NO: 911140 - RNA, 19 nt, Homo sapiens
  misc_RNA (1)...(19): siRNA sense strand
aaccagugcucaaguauuu

SEQ ID NO: 911141 - RNA, 19 nt, Homo sapiens
  misc_RNA (1)...(19): siRNA sense strand
guucaaacccgaugaggua

SEQ ID NO: 911142 - RNA, 19 nt, Homo sapiens
  misc_RNA (1)...(19): siRNA sense strand
uagaaaguguccuaacauu

SEQ ID NO: 911143 - RNA, 19 nt, Homo sapiens
  misc_RNA (1)...(19): siRNA sense strand
uaggugguauguacaguua

SEQ ID NO: 911144 - RNA, 19 nt, Homo sapiens
  misc_RNA (1)...(19): siRNA sense strand
gaccaugacaguuacauuu

SEQ ID NO: 911145 - RNA, 19 nt, Homo sapiens
  misc_RNA (1)...(19): siRNA sense strand
gggaauagaacaaguguau

SEQ ID NO: 911146 - RNA, 19 nt, Homo sapiens
  misc_RNA (1)...(19): siRNA sense strand
acagcaagcucaucaguau

SEQ ID NO: 911147 - RNA, 19 nt, Homo sapiens
  misc_RNA (1)...(19): siRNA sense strand
uuacacaacuacaggguuu

SEQ ID NO: 911148 - RNA, 19 nt, Homo sapiens
  misc_RNA (1)...(19): siRNA sense strand
gcugugguaucaguaaaua

SEQ ID NO: 911149 - RNA, 19 nt, Homo sapiens
  misc_RNA (1)...(19): siRNA sense strand
ucaaacauccuucccauug

SEQ ID NO: 911150 - RNA, 19 nt, Homo sapiens
  misc_RNA (1)...(19): siRNA sense strand
cauuaagagucaaccauaa

SEQ ID NO: 911151 - RNA, 19 nt, Homo sapiens
  misc_RNA (1)...(19): siRNA sense strand
uaagugagacugaauuaga

SEQ ID NO: 911152 - RNA, 19 nt, Homo sapiens
  misc_RNA (1)...(19): siRNA sense strand
ggaagugcuguaaugaaua

SEQ ID NO: 911153 - RNA, 19 nt, Homo sapiens
  misc_RNA (1)...(19): siRNA sense strand
uaaggaaacagcuaagaaa

SEQ ID NO: 911154 - RNA, 19 nt, Homo sapiens
  misc_RNA (1)...(19): siRNA sense strand
agaugagaauugugcauua

SEQ ID NO: 911155 - RNA, 19 nt, Homo sapiens
  misc_RNA (1)...(19): siRNA sense strand
gugggaauauucucaaaga

SEQ ID NO: 911156 - RNA, 19 nt, Homo sapiens
  misc_RNA (1)...(19): siRNA sense strand
gagaaacccaguaacagaa

SEQ ID NO: 911157 - RNA, 19 nt, Homo sapiens
  misc_RNA (1)...(19): siRNA sense strand
guaauggagugucaguaug

SEQ ID NO: 911158 - RNA, 19 nt, Homo sapiens
  misc_RNA (1)...(19): siRNA sense strand
cagccacuuucuucuaaua

SEQ ID NO: 911159 - RNA, 19 nt, Homo sapiens
  misc_RNA (1)...(19): siRNA sense strand
ggaauggcacaagugauua

SEQ ID NO: 911160 - RNA, 19 nt, Homo sapiens
  misc_RNA (1)...(19): siRNA sense strand
aauaggaagugcuguaaug

SEQ ID NO: 911161 - RNA, 19 nt, Homo sapiens
  misc_RNA (1)...(19): siRNA sense strand
gcaguaaggaaacagcuaa

SEQ ID NO: 911162 - RNA, 19 nt, Homo sapiens
  misc_RNA (1)...(19): siRNA sense strand
acagguacuucguguaauu

SEQ ID NO: 911163 - RNA, 19 nt, Homo sapiens
  misc_RNA (1)...(19): siRNA sense strand
uaaacaagaacccaaagaa

SEQ ID NO: 911164 - RNA, 19 nt, Homo sapiens
  misc_RNA (1)...(19): siRNA sense strand
guaaggaaacagcuaagaa

SEQ ID NO: 911165 - RNA, 19 nt, Homo sapiens
  misc_RNA (1)...(19): siRNA sense strand
guucuuaggugguauguac

SEQ ID NO: 911166 - RNA, 19 nt, Homo sapiens
  misc_RNA (1)...(19): siRNA sense strand
aagaagaacuugguagaug

SEQ ID NO: 911167 - RNA, 19 nt, Homo sapiens
  misc_RNA (1)...(19): siRNA sense strand
guagagcugugguaaugga

SEQ ID NO: 911168 - RNA, 19 nt, Homo sapiens
  misc_RNA (1)...(19): siRNA sense strand
uaccguggcuacuguguaa

SEQ ID NO: 911169 - RNA, 19 nt, Homo sapiens
  misc_RNA (1)...(19): siRNA sense strand
gcauuacccucacguuuac

SEQ ID NO: 911170 - RNA, 19 nt, Homo sapiens
  misc_RNA (1)...(19): siRNA sense strand
acagaaguuuccugaauau

SEQ ID NO: 911171 - RNA, 19 nt, Homo sapiens
  misc_RNA (1)...(19): siRNA sense strand
uaaagaagaacuugguaga

SEQ ID NO: 911172 - RNA, 19 nt, Homo sapiens
  misc_RNA (1)...(19): siRNA sense strand
gguagaugcuggugguguu

SEQ ID NO: 911173 - RNA, 19 nt, Homo sapiens
  misc_RNA (1)...(19): siRNA sense strand
gaauauagaguuccuacag

SEQ ID NO: 911174 - RNA, 19 nt, Homo sapiens
  misc_RNA (1)...(19): siRNA sense strand
ucaaagagaccaugacagu

SEQ ID NO: 911175 - RNA, 19 nt, Homo sapiens
  misc_RNA (1)...(19): siRNA sense strand
cagacaauaccagcaauua

SEQ ID NO: 911176 - RNA, 19 nt, Homo sapiens
  misc_RNA (1)...(19): siRNA sense strand
gagacucccugccucacuu

SEQ ID NO: 911177 - RNA, 19 nt, Homo sapiens
  misc_RNA (1)...(19): siRNA sense strand
gguaauggagugucaguau

SEQ ID NO: 911178 - RNA, 19 nt, Homo sapiens
  misc_RNA (1)...(19): siRNA sense strand
gacaauaccagcaauuaca

SEQ ID NO: 911179 - RNA, 19 nt, Homo sapiens
  misc_RNA (1)...(19): siRNA sense strand
gaauagaacaaguguaugc

SEQ ID NO: 911180 - RNA, 19 nt, Homo sapiens
  misc_RNA (1)...(19): siRNA sense strand
caaagaaccagcauugucu

SEQ ID NO: 911181 - RNA, 19 nt, Homo sapiens
  misc_RNA (1)...(19): siRNA sense strand
ggagaugugcagacuauuc

SEQ ID NO: 911182 - RNA, 19 nt, Homo sapiens
  misc_RNA (1)...(19): siRNA sense strand
ugagguaccugaaagacau

SEQ ID NO: 911183 - RNA, 19 nt, Homo sapiens
  misc_RNA (1)...(19): siRNA sense strand
ucaccaggagaaucaauua

SEQ ID NO: 911184 - RNA, 19 nt, Homo sapiens
  misc_RNA (1)...(19): siRNA sense strand
gucauagccuucaaagaga

SEQ ID NO: 911185 - RNA, 19 nt, Homo sapiens
  misc_RNA (1)...(19): siRNA sense strand
uaacagaaacuuaccaacu

SEQ ID NO: 911186 - RNA, 19 nt, Homo sapiens
  misc_RNA (1)...(19): siRNA sense strand
gauuauagacaaccacuca

SEQ ID NO: 911187 - RNA, 19 nt, Homo sapiens
  misc_RNA (1)...(19): siRNA sense strand
ccagcucggauuuacauua

SEQ ID NO: 911188 - RNA, 19 nt, Homo sapiens
  misc_RNA (1)...(19): siRNA sense strand
auaugggccugccgucuua

SEQ ID NO: 911189 - RNA, 19 nt, Homo sapiens
  misc_RNA (1)...(19): siRNA sense strand
caaccacucagcucuuauu

SEQ ID NO: 911190 - RNA, 19 nt, Homo sapiens
  misc_RNA (1)...(19): siRNA sense strand
gagaugagaauugugcauu

SEQ ID NO: 911191 - RNA, 19 nt, Homo sapiens
  misc_RNA (1)...(19): siRNA sense strand
ugggagaugugcagacuau

SEQ ID NO: 911192 - RNA, 19 nt, Homo sapiens
  misc_RNA (1)...(19): siRNA sense strand
aacagaaacuuaccaacug

SEQ ID NO: 911193 - RNA, 19 nt, Homo sapiens
  misc_RNA (1)...(19): siRNA sense strand
gaagaaaauccagaaagua

SEQ ID NO: 911194 - RNA, 19 nt, Homo sapiens
  misc_RNA (1)...(19): siRNA sense strand
caaagagauacaugcuuaa

SEQ ID NO: 911195 - RNA, 19 nt, Homo sapiens
  misc_RNA (1)...(19): siRNA sense strand
aggaagugcuguaaugaau

SEQ ID NO: 911196 - RNA, 19 nt, Homo sapiens
  misc_RNA (1)...(19): siRNA sense strand
ucaauggacuacagacagu

SEQ ID NO: 911197 - RNA, 19 nt, Homo sapiens
  misc_RNA (1)...(19): siRNA sense strand
guaccugaaagacauaauu

SEQ ID NO: 911198 - RNA, 19 nt, Homo sapiens
  misc_RNA (1)...(19): siRNA sense strand
ucauuaagagucaaccaua

SEQ ID NO: 911199 - RNA, 19 nt, Homo sapiens
  misc_RNA (1)...(19): siRNA sense strand
ugcauuacccucacguuua

SEQ ID NO: 911200 - RNA, 19 nt, Homo sapiens
  misc_RNA (1)...(19): siRNA sense strand
gaugagaauugugcauuac

SEQ ID NO: 911201 - RNA, 19 nt, Homo sapiens
  misc_RNA (1)...(19): siRNA sense strand
gcaguuagagaugagaauu

SEQ ID NO: 911202 - RNA, 19 nt, Homo sapiens
  misc_RNA (1)...(19): siRNA sense strand
acaguuaccuacacagcaa

SEQ ID NO: 911203 - RNA, 19 nt, Homo sapiens
  misc_RNA (1)...(19): siRNA sense strand
gaauggagcaggagaaagc

SEQ ID NO: 911204 - RNA, 19 nt, Homo sapiens
  misc_RNA (1)...(19): siRNA sense strand
aauauagaguuccuacaga

SEQ ID NO: 911205 - RNA, 19 nt, Homo sapiens
  misc_RNA (1)...(19): siRNA sense strand
ugaauuagaaaguguccua

SEQ ID NO: 911206 - RNA, 19 nt, Homo sapiens
  misc_RNA (1)...(19): siRNA sense strand
gagacugaauuagaaagug

SEQ ID NO: 911207 - RNA, 19 nt, Homo sapiens
  misc_RNA (1)...(19): siRNA sense strand
gcagacaauaccagcaauu

SEQ ID NO: 911208 - RNA, 19 nt, Homo sapiens
  misc_RNA (1)...(19): siRNA sense strand
gaauggcacaagugauuau

SEQ ID NO: 911209 - RNA, 19 nt, Homo sapiens
  misc_RNA (1)...(19): siRNA sense strand
ccaaagaaccagcauuguc

SEQ ID NO: 911210 - RNA, 19 nt, Homo sapiens
  misc_RNA (1)...(19): siRNA sense strand
agaaaguguccuaacauuu

SEQ ID NO: 911211 - RNA, 19 nt, Homo sapiens
  misc_RNA (1)...(19): siRNA sense strand
aagugagacugaauuagaa

SEQ ID NO: 911212 - RNA, 19 nt, Homo sapiens
  misc_RNA (1)...(19): siRNA sense strand
gaacgacccugacagaaug

SEQ ID NO: 911213 - RNA, 19 nt, Homo sapiens
  misc_RNA (1)...(19): siRNA sense strand
uaacaugaguggauugauu

SEQ ID NO: 911214 - RNA, 19 nt, Homo sapiens
  misc_RNA (1)...(19): siRNA sense strand
ggacuuagauauugcauac

SEQ ID NO: 911215 - RNA, 19 nt, Homo sapiens
  misc_RNA (1)...(19): siRNA sense strand
ggacaacaaggauaugaaa

SEQ ID NO: 911216 - RNA, 19 nt, Homo sapiens
  misc_RNA (1)...(19): siRNA sense strand
gaacuuggccugcagaaac

SEQ ID NO: 911217 - RNA, 19 nt, Homo sapiens
  misc_RNA (1)...(19): siRNA sense strand
gcggauuccuguaacauga

SEQ ID NO: 911218 - RNA, 19 nt, Homo sapiens
  misc_RNA (1)...(19): siRNA sense strand
gggaacugguggaauacua

SEQ ID NO: 911219 - RNA, 19 nt, Homo sapiens
  misc_RNA (1)...(19): siRNA sense strand
cuugggaacugguggaaua

SEQ ID NO: 911220 - RNA, 19 nt, Homo sapiens
  misc_RNA (1)...(19): siRNA sense strand
ggaacgacccugacagaau

SEQ ID NO: 911221 - RNA, 19 nt, Homo sapiens
  misc_RNA (1)...(19): siRNA sense strand
gcacguggaauagggcuua

SEQ ID NO: 911222 - RNA, 19 nt, Homo sapiens
  misc_RNA (1)...(19): siRNA sense strand
gcuauucgguauguucaaa

SEQ ID NO: 911223 - RNA, 19 nt, Homo sapiens
  misc_RNA (1)...(19): siRNA sense strand
gcaacacccuucucagacu

SEQ ID NO: 911224 - RNA, 19 nt, Homo sapiens
  misc_RNA (1)...(19): siRNA sense strand
gaauguugcugcgggaugu

SEQ ID NO: 911225 - RNA, 19 nt, Homo sapiens
  misc_RNA (1)...(19): siRNA sense strand
gcacggcuuugccucuuuc

SEQ ID NO: 911226 - RNA, 19 nt, Homo sapiens
  misc_RNA (1)...(19): siRNA sense strand
gaucgccuuuguagucuau

SEQ ID NO: 911227 - RNA, 19 nt, Homo sapiens
  misc_RNA (1)...(19): siRNA sense strand
ggugagcugugaaggcuau

SEQ ID NO: 911228 - RNA, 19 nt, Homo sapiens
  misc_RNA (1)...(19): siRNA sense strand
gggcagcuauucgguaugu

SEQ ID NO: 911229 - RNA, 19 nt, Homo sapiens
  misc_RNA (1)...(19): siRNA sense strand
gcucuuacccuccacuaug

SEQ ID NO: 911230 - RNA, 19 nt, Homo sapiens
  misc_RNA (1)...(19): siRNA sense strand
uggcuuggaguauaauuua

SEQ ID NO: 911231 - RNA, 19 nt, Homo sapiens
  misc_RNA (1)...(19): siRNA sense strand
gcuaugaguccucugaaga

SEQ ID NO: 911232 - RNA, 19 nt, Homo sapiens
  misc_RNA (1)...(19): siRNA sense strand
aaacuguggugagcuguga

SEQ ID NO: 911233 - RNA, 19 nt, Homo sapiens
  misc_RNA (1)...(19): siRNA sense strand
gaucccaucccacaguuga

SEQ ID NO: 911234 - RNA, 19 nt, Homo sapiens
  misc_RNA (1)...(19): siRNA sense strand
uaccagagauucaccaacu

SEQ ID NO: 911235 - RNA, 19 nt, Homo sapiens
  misc_RNA (1)...(19): siRNA sense strand
aagacggacuuagauauug

SEQ ID NO: 911236 - RNA, 19 nt, Homo sapiens
  misc_RNA (1)...(19): siRNA sense strand
gcaucaggauaugguggua

SEQ ID NO: 911237 - RNA, 19 nt, Homo sapiens
  misc_RNA (1)...(19): siRNA sense strand
aacaugaguggauugauua

SEQ ID NO: 911238 - RNA, 19 nt, Homo sapiens
  misc_RNA (1)...(19): siRNA sense strand
ccagaacugcaucaggaua

SEQ ID NO: 911239 - RNA, 19 nt, Homo sapiens
  misc_RNA (1)...(19): siRNA sense strand
cagcugguugugauucuua

SEQ ID NO: 911240 - RNA, 19 nt, Homo sapiens
  misc_RNA (1)...(19): siRNA sense strand
ccucuuucucugauuauua

SEQ ID NO: 911241 - RNA, 19 nt, Homo sapiens
  misc_RNA (1)...(19): siRNA sense strand
ggauggguaugauguacag

SEQ ID NO: 911242 - RNA, 19 nt, Homo sapiens
  misc_RNA (1)...(19): siRNA sense strand
uuacaggacaacaaggaua

SEQ ID NO: 911243 - RNA, 19 nt, Homo sapiens
  misc_RNA (1)...(19): siRNA sense strand
cauacagugucagaacaaa

SEQ ID NO: 911244 - RNA, 19 nt, Homo sapiens
  misc_RNA (1)...(19): siRNA sense strand
gcagcuauucgguauguuc

SEQ ID NO: 911245 - RNA, 19 nt, Homo sapiens
  misc_RNA (1)...(19): siRNA sense strand
gauauuuguuuggcagcaa

SEQ ID NO: 911246 - RNA, 19 nt, Homo sapiens
  misc_RNA (1)...(19): siRNA sense strand
ucacaggaccacagaauac

SEQ ID NO: 911247 - RNA, 19 nt, Homo sapiens
  misc_RNA (1)...(19): siRNA sense strand
cuuguggcuuggaguauaa

SEQ ID NO: 911248 - RNA, 19 nt, Homo sapiens
  misc_RNA (1)...(19): siRNA sense strand
cggcaacacccuucucaga

SEQ ID NO: 911249 - RNA, 19 nt, Homo sapiens
  misc_RNA (1)...(19): siRNA sense strand
ucuuguggcuuggaguaua

SEQ ID NO: 911250 - RNA, 19 nt, Homo sapiens
  misc_RNA (1)...(19): siRNA sense strand
caaaggcugggauggguau

SEQ ID NO: 911251 - RNA, 19 nt, Homo sapiens
  misc_RNA (1)...(19): siRNA sense strand
ggaacugguggaauacuag

SEQ ID NO: 911252 - RNA, 19 nt, Homo sapiens
  misc_RNA (1)...(19): siRNA sense strand
ggaucgccuuuguagucua

SEQ ID NO: 911253 - RNA, 19 nt, Homo sapiens
  misc_RNA (1)...(19): siRNA sense strand
uugccucuuucucugauua

SEQ ID NO: 911254 - RNA, 19 nt, Homo sapiens
  misc_RNA (1)...(19): siRNA sense strand
cagcacggcuuugccucuu

SEQ ID NO: 911255 - RNA, 19 nt, Homo sapiens
  misc_RNA (1)...(19): siRNA sense strand
cagaacugcaucaggauau

SEQ ID NO: 911256 - RNA, 19 nt, Homo sapiens
  misc_RNA (1)...(19): siRNA sense strand
ccuguaacaugaguggauu

SEQ ID NO: 911257 - RNA, 19 nt, Homo sapiens
  misc_RNA (1)...(19): siRNA sense strand
aaacugaaggagucuggaa

SEQ ID NO: 911258 - RNA, 19 nt, Homo sapiens
  misc_RNA (1)...(19): siRNA sense strand
cguccuauccucccuccua

SEQ ID NO: 911259 - RNA, 19 nt, Homo sapiens
  misc_RNA (1)...(19): siRNA sense strand
gucauacagugucagaaca

SEQ ID NO: 911260 - RNA, 19 nt, Homo sapiens
  misc_RNA (1)...(19): siRNA sense strand
ucgggcagcuauucgguau

SEQ ID NO: 911261 - RNA, 19 nt, Homo sapiens
  misc_RNA (1)...(19): siRNA sense strand
guucacaggaccacagaau

SEQ ID NO: 911262 - RNA, 19 nt, Homo sapiens
  misc_RNA (1)...(19): siRNA sense strand
ccagagauucaccaacuca

SEQ ID NO: 911263 - RNA, 19 nt, Homo sapiens
  misc_RNA (1)...(19): siRNA sense strand
ugagugacgggcaguauuc

SEQ ID NO: 911264 - RNA, 19 nt, Homo sapiens
  misc_RNA (1)...(19): siRNA sense strand
ccucggcggauuccuguaa

SEQ ID NO: 911265 - RNA, 19 nt, Homo sapiens
  misc_RNA (1)...(19): siRNA sense strand
gggaauguaagacggacuu

SEQ ID NO: 911266 - RNA, 19 nt, Homo sapiens
  misc_RNA (1)...(19): siRNA sense strand
guucaaacucagacacgaa

SEQ ID NO: 911267 - RNA, 19 nt, Homo sapiens
  misc_RNA (1)...(19): siRNA sense strand
ggauuccuguaacaugagu

SEQ ID NO: 911268 - RNA, 19 nt, Homo sapiens
  misc_RNA (1)...(19): siRNA sense strand
gcuuggaguauaauuuaga

SEQ ID NO: 911269 - RNA, 19 nt, Homo sapiens
  misc_RNA (1)...(19): siRNA sense strand
guucuuguggcuuggagua

SEQ ID NO: 911270 - RNA, 19 nt, Homo sapiens
  misc_RNA (1)...(19): siRNA sense strand
caaaagucauacaguguca

SEQ ID NO: 911271 - RNA, 19 nt, Homo sapiens
  misc_RNA (1)...(19): siRNA sense strand
uacccuggcacguggaaua

SEQ ID NO: 911272 - RNA, 19 nt, Homo sapiens
  misc_RNA (1)...(19): siRNA sense strand
acagaauacuggccauggu

SEQ ID NO: 911273 - RNA, 19 nt, Homo sapiens
  misc_RNA (1)...(19): siRNA sense strand
ucgccuuuguagucuauaa

SEQ ID NO: 911274 - RNA, 19 nt, Homo sapiens
  misc_RNA (1)...(19): siRNA sense strand
gggaucgccuuuguagucu

SEQ ID NO: 911275 - RNA, 19 nt, Homo sapiens
  misc_RNA (1)...(19): siRNA sense strand
cucuuacccuccacuauga

SEQ ID NO: 911276 - RNA, 19 nt, Homo sapiens
  misc_RNA (1)...(19): siRNA sense strand
gaacugcaucaggauaugg

SEQ ID NO: 911277 - RNA, 19 nt, Homo sapiens
  misc_RNA (1)...(19): siRNA sense strand
ccucugaagaccaguaugu

SEQ ID NO: 911278 - RNA, 19 nt, Homo sapiens
  misc_RNA (1)...(19): siRNA sense strand
cugguggaauacuaggaua

SEQ ID NO: 911279 - RNA, 19 nt, Homo sapiens
  misc_RNA (1)...(19): siRNA sense strand
gcugggauggguaugaugu

SEQ ID NO: 911280 - RNA, 19 nt, Homo sapiens
  misc_RNA (1)...(19): siRNA sense strand
ggugguaccaggagacgau

SEQ ID NO: 911281 - RNA, 19 nt, Homo sapiens
  misc_RNA (1)...(19): siRNA sense strand
ccuccacuaugaccgcuau

SEQ ID NO: 911282 - RNA, 19 nt, Homo sapiens
  misc_RNA (1)...(19): siRNA sense strand
caggacaacaaggauauga

SEQ ID NO: 911283 - RNA, 19 nt, Homo sapiens
  misc_RNA (1)...(19): siRNA sense strand
ugggaucgccuuuguaguc

SEQ ID NO: 911284 - RNA, 19 nt, Homo sapiens
  misc_RNA (1)...(19): siRNA sense strand
ugaguggauugauuaccau

SEQ ID NO: 911285 - RNA, 19 nt, Homo sapiens
  misc_RNA (1)...(19): siRNA sense strand
agaacugcaucaggauaug

SEQ ID NO: 911286 - RNA, 19 nt, Homo sapiens
  misc_RNA (1)...(19): siRNA sense strand
aaagucauacagugucaga

SEQ ID NO: 911287 - RNA, 19 nt, Homo sapiens
  misc_RNA (1)...(19): siRNA sense strand
auaagcuguuccugaguga

SEQ ID NO: 911288 - RNA, 19 nt, Homo sapiens
  misc_RNA (1)...(19): siRNA sense strand
agacggacuuagauauugc

SEQ ID NO: 911289 - RNA, 19 nt, Homo sapiens
  misc_RNA (1)...(19): siRNA sense strand
uacaggacaacaaggauau

SEQ ID NO: 911290 - RNA, 19 nt, Homo sapiens
  misc_RNA (1)...(19): siRNA sense strand
cuccucggcuugcauuugu

SEQ ID NO: 911291 - RNA, 19 nt, Homo sapiens
  misc_RNA (1)...(19): siRNA sense strand
ggcuaugaguccucugaag

SEQ ID NO: 911292 - RNA, 19 nt, Homo sapiens
  misc_RNA (1)...(19): siRNA sense strand
ggaagaggaggaagaauua

SEQ ID NO: 911293 - RNA, 19 nt, Homo sapiens
  misc_RNA (1)...(19): siRNA sense strand
ggaaagaggagaagaggaa

SEQ ID NO: 911294 - RNA, 19 nt, Homo sapiens
  misc_RNA (1)...(19): siRNA sense strand
ugaacaacauggugaauau

SEQ ID NO: 911295 - RNA, 19 nt, Homo sapiens
  misc_RNA (1)...(19): siRNA sense strand
ccagauggauccagauaug

SEQ ID NO: 911296 - RNA, 19 nt, Homo sapiens
  misc_RNA (1)...(19): siRNA sense strand
gaagagagccgggaguaug

SEQ ID NO: 911297 - RNA, 19 nt, Homo sapiens
  misc_RNA (1)...(19): siRNA sense strand
gcaaggcaccuauuuauac

SEQ ID NO: 911298 - RNA, 19 nt, Homo sapiens
  misc_RNA (1)...(19): siRNA sense strand
gaaggagagugggcaaaug

SEQ ID NO: 911299 - RNA, 19 nt, Homo sapiens
  misc_RNA (1)...(19): siRNA sense strand
gagagugguuugcucauca

SEQ ID NO: 911300 - RNA, 19 nt, Homo sapiens
  misc_RNA (1)...(19): siRNA sense strand
agaagaaacuagacaguca

SEQ ID NO: 911301 - RNA, 19 nt, Homo sapiens
  misc_RNA (1)...(19): siRNA sense strand
gcacggccauggcguauac

SEQ ID NO: 911302 - RNA, 19 nt, Homo sapiens
  misc_RNA (1)...(19): siRNA sense strand
gaagaauuaguaacuguug

SEQ ID NO: 911303 - RNA, 19 nt, Homo sapiens
  misc_RNA (1)...(19): siRNA sense strand
gaagggagcuacgaauucg

SEQ ID NO: 911304 - RNA, 19 nt, Homo sapiens
  misc_RNA (1)...(19): siRNA sense strand
gggcaaggcaccuauuuau

SEQ ID NO: 911305 - RNA, 19 nt, Homo sapiens
  misc_RNA (1)...(19): siRNA sense strand
gugaauaucguuuaacaga

SEQ ID NO: 911306 - RNA, 19 nt, Homo sapiens
  misc_RNA (1)...(19): siRNA sense strand
caugaggccuggagaugaa

SEQ ID NO: 911307 - RNA, 19 nt, Homo sapiens
  misc_RNA (1)...(19): siRNA sense strand
cggagaauauguuagaaau

SEQ ID NO: 911308 - RNA, 19 nt, Homo sapiens
  misc_RNA (1)...(19): siRNA sense strand
gaugagggaaacauuaauu

SEQ ID NO: 911309 - RNA, 19 nt, Homo sapiens
  misc_RNA (1)...(19): siRNA sense strand
ggagggagagaaugauauu

SEQ ID NO: 911310 - RNA, 19 nt, Homo sapiens
  misc_RNA (1)...(19): siRNA sense strand
agggaaacauuaauucuga

SEQ ID NO: 911311 - RNA, 19 nt, Homo sapiens
  misc_RNA (1)...(19): siRNA sense strand
ggcaaggcaccuauuuaua

SEQ ID NO: 911312 - RNA, 19 nt, Homo sapiens
  misc_RNA (1)...(19): siRNA sense strand
cauggugaauaucguuuaa

SEQ ID NO: 911313 - RNA, 19 nt, Homo sapiens
  misc_RNA (1)...(19): siRNA sense strand
gaggagggagagaaugaua

SEQ ID NO: 911314 - RNA, 19 nt, Homo sapiens
  misc_RNA (1)...(19): siRNA sense strand
caggggaucuacaaauuua

SEQ ID NO: 911315 - RNA, 19 nt, Homo sapiens
  misc_RNA (1)...(19): siRNA sense strand
ggauggaccuggccaagac

SEQ ID NO: 911316 - RNA, 19 nt, Homo sapiens
  misc_RNA (1)...(19): siRNA sense strand
ggaggaagaauuaguaacu

SEQ ID NO: 911317 - RNA, 19 nt, Homo sapiens
  misc_RNA (1)...(19): siRNA sense strand
gaagaagaaacuagacagu

SEQ ID NO: 911318 - RNA, 19 nt, Homo sapiens
  misc_RNA (1)...(19): siRNA sense strand
cuacccaaaucacugaauu

SEQ ID NO: 911319 - RNA, 19 nt, Homo sapiens
  misc_RNA (1)...(19): siRNA sense strand
gaggaagaauuaguaacug

SEQ ID NO: 911320 - RNA, 19 nt, Homo sapiens
  misc_RNA (1)...(19): siRNA sense strand
ggaagaauuaguaacuguu

SEQ ID NO: 911321 - RNA, 19 nt, Homo sapiens
  misc_RNA (1)...(19): siRNA sense strand
gagcuacgaauucgguaaa

SEQ ID NO: 911322 - RNA, 19 nt, Homo sapiens
  misc_RNA (1)...(19): siRNA sense strand
gggaaacauuaauucugaa

SEQ ID NO: 911323 - RNA, 19 nt, Homo sapiens
  misc_RNA (1)...(19): siRNA sense strand
ggagagugguuugcucauc

SEQ ID NO: 911324 - RNA, 19 nt, Homo sapiens
  misc_RNA (1)...(19): siRNA sense strand
gaggaggaagaauuaguaa

SEQ ID NO: 911325 - RNA, 19 nt, Homo sapiens
  misc_RNA (1)...(19): siRNA sense strand
gccauggcguauacuacua

SEQ ID NO: 911326 - RNA, 19 nt, Homo sapiens
  misc_RNA (1)...(19): siRNA sense strand
ugaagaagaagaaacuaga

SEQ ID NO: 911327 - RNA, 19 nt, Homo sapiens
  misc_RNA (1)...(19): siRNA sense strand
gugaacaacauggugaaua

SEQ ID NO: 911328 - RNA, 19 nt, Homo sapiens
  misc_RNA (1)...(19): siRNA sense strand
ggagacgggcaguaaguau

SEQ ID NO: 911329 - RNA, 19 nt, Homo sapiens
  misc_RNA (1)...(19): siRNA sense strand
ggaguuccgcuaugacaug

SEQ ID NO: 911330 - RNA, 19 nt, Homo sapiens
  misc_RNA (1)...(19): siRNA sense strand
gggaagagagccgggagua

SEQ ID NO: 911331 - RNA, 19 nt, Homo sapiens
  misc_RNA (1)...(19): siRNA sense strand
caacauggugaauaucguu

SEQ ID NO: 911332 - RNA, 19 nt, Homo sapiens
  misc_RNA (1)...(19): siRNA sense strand
ggaaaguauguauuugaug

SEQ ID NO: 911333 - RNA, 19 nt, Homo sapiens
  misc_RNA (1)...(19): siRNA sense strand
cgaagggagcuacgaauuc

SEQ ID NO: 911334 - RNA, 19 nt, Homo sapiens
  misc_RNA (1)...(19): siRNA sense strand
aaauggugcucgauauauc

SEQ ID NO: 911335 - RNA, 19 nt, Homo sapiens
  misc_RNA (1)...(19): siRNA sense strand
uaguaacuguuguuccaaa

SEQ ID NO: 911336 - RNA, 19 nt, Homo sapiens
  misc_RNA (1)...(19): siRNA sense strand
agaggaggaagaauuagua

SEQ ID NO: 911337 - RNA, 19 nt, Homo sapiens
  misc_RNA (1)...(19): siRNA sense strand
uaucggagaauauguuaga

SEQ ID NO: 911338 - RNA, 19 nt, Homo sapiens
  misc_RNA (1)...(19): siRNA sense strand
ggucaaggcacuuuuauau

SEQ ID NO: 911339 - RNA, 19 nt, Homo sapiens
  misc_RNA (1)...(19): siRNA sense strand
gagggaaacauuaauucug

SEQ ID NO: 911340 - RNA, 19 nt, Homo sapiens
  misc_RNA (1)...(19): siRNA sense strand
gaaugaggcaggcgaaagg

SEQ ID NO: 911341 - RNA, 19 nt, Homo sapiens
  misc_RNA (1)...(19): siRNA sense strand
auggaaagcuacccaaauc

SEQ ID NO: 911342 - RNA, 19 nt, Homo sapiens
  misc_RNA (1)...(19): siRNA sense strand
ggacaugaggccuggagau

SEQ ID NO: 911343 - RNA, 19 nt, Homo sapiens
  misc_RNA (1)...(19): siRNA sense strand
gaacaacauggugaauauc

SEQ ID NO: 911344 - RNA, 19 nt, Homo sapiens
  misc_RNA (1)...(19): siRNA sense strand
ugacauggaugagggaaac

SEQ ID NO: 911345 - RNA, 19 nt, Homo sapiens
  misc_RNA (1)...(19): siRNA sense strand
ggaggaggagggagagaau

SEQ ID NO: 911346 - RNA, 19 nt, Homo sapiens
  misc_RNA (1)...(19): siRNA sense strand
ggaagagagccgggaguau

SEQ ID NO: 911347 - RNA, 19 nt, Homo sapiens
  misc_RNA (1)...(19): siRNA sense strand
caaggcaccuauuuauacg

SEQ ID NO: 911348 - RNA, 19 nt, Homo sapiens
  misc_RNA (1)...(19): siRNA sense strand
gccaggggaucuacaaauu

SEQ ID NO: 911349 - RNA, 19 nt, Homo sapiens
  misc_RNA (1)...(19): siRNA sense strand
gagacgggcaguaaguaug

SEQ ID NO: 911350 - RNA, 19 nt, Homo sapiens
  misc_RNA (1)...(19): siRNA sense strand
caggaggaguuccgcuaug

SEQ ID NO: 911351 - RNA, 19 nt, Homo sapiens
  misc_RNA (1)...(19): siRNA sense strand
gaaagcuacccaaaucacu

SEQ ID NO: 911352 - RNA, 19 nt, Homo sapiens
  misc_RNA (1)...(19): siRNA sense strand
ggagcuacgaauucgguaa

SEQ ID NO: 911353 - RNA, 19 nt, Homo sapiens
  misc_RNA (1)...(19): siRNA sense strand
aggaagaggaggaagaauu

SEQ ID NO: 911354 - RNA, 19 nt, Homo sapiens
  misc_RNA (1)...(19): siRNA sense strand
gcacggccgagcucauuca

SEQ ID NO: 911355 - RNA, 19 nt, Homo sapiens
  misc_RNA (1)...(19): siRNA sense strand
uggaugagggaaacauuaa

SEQ ID NO: 911356 - RNA, 19 nt, Homo sapiens
  misc_RNA (1)...(19): siRNA sense strand
aggaggaguuccgcuauga

SEQ ID NO: 911357 - RNA, 19 nt, Homo sapiens
  misc_RNA (1)...(19): siRNA sense strand
uauuugauguuggguguga

SEQ ID NO: 911358 - RNA, 19 nt, Homo sapiens
  misc_RNA (1)...(19): siRNA sense strand
gaagaagaagaaacuagac

SEQ ID NO: 911359 - RNA, 19 nt, Homo sapiens
  misc_RNA (1)...(19): siRNA sense strand
ggaaacauuaauucugaag

SEQ ID NO: 911360 - RNA, 19 nt, Homo sapiens
  misc_RNA (1)...(19): siRNA sense strand
ggaaugaggcaggcgaaag

SEQ ID NO: 911361 - RNA, 19 nt, Homo sapiens
  misc_RNA (1)...(19): siRNA sense strand
gacaugaggccuggagaug

SEQ ID NO: 911362 - RNA, 19 nt, Homo sapiens
  misc_RNA (1)...(19): siRNA sense strand
aaggagagugggcaaauga

SEQ ID NO: 911363 - RNA, 19 nt, Homo sapiens
  misc_RNA (1)...(19): siRNA sense strand
gaggaguuccgcuaugaca

SEQ ID NO: 911364 - RNA, 19 nt, Homo sapiens
  misc_RNA (1)...(19): siRNA sense strand
uaacuguuguuccaaaaug

SEQ ID NO: 911365 - RNA, 19 nt, Homo sapiens
  misc_RNA (1)...(19): siRNA sense strand
aggaagaauuaguaacugu

SEQ ID NO: 911366 - RNA, 19 nt, Homo sapiens
  misc_RNA (1)...(19): siRNA sense strand
uggugaauaucguuuaaca

SEQ ID NO: 911367 - RNA, 19 nt, Homo sapiens
  misc_RNA (1)...(19): siRNA sense strand
ggaaagcuacccaaaucac

SEQ ID NO: 911368 - RNA, 19 nt, Homo sapiens
  misc_RNA (1)...(19): siRNA sense strand
ccuggaaaguauguauuug

SEQ ID NO: 911369 - RNA, 19 nt, Homo sapiens
  misc_RNA (1)...(19): siRNA sense strand
aagagagccgggaguauga

SEQ ID NO: 911370 - RNA, 19 nt, Homo sapiens
  misc_RNA (1)...(19): siRNA sense strand
gaauuaguaacuguuguuc

SEQ ID NO: 911371 - RNA, 19 nt, Homo sapiens
  misc_RNA (1)...(19): siRNA sense strand
uguuggcccuggaaaguau

SEQ ID NO: 911372 - RNA, 19 nt, Homo sapiens
  misc_RNA (1)...(19): siRNA sense strand
gaagaggaggaagaauuag

SEQ ID NO: 911373 - RNA, 19 nt, Homo sapiens
  misc_RNA (1)...(19): siRNA sense strand
ggcguauacuacuacauca

SEQ ID NO: 911374 - RNA, 19 nt, Homo sapiens
  misc_RNA (1)...(19): siRNA sense strand
gccuggagaugaagaugca

SEQ ID NO: 911375 - RNA, 19 nt, Homo sapiens
  misc_RNA (1)...(19): siRNA sense strand
gggcuucgagggugagaug

SEQ ID NO: 911376 - RNA, 19 nt, Homo sapiens
  misc_RNA (1)...(19): siRNA sense strand
ugggcaaggcaccuauuua

SEQ ID NO: 911377 - RNA, 19 nt, Homo sapiens
  misc_RNA (1)...(19): siRNA sense strand
cuggaaaguauguauuuga

SEQ ID NO: 911378 - RNA, 19 nt, Homo sapiens
  misc_RNA (1)...(19): siRNA sense strand
ggaugagggaaacauuaau

SEQ ID NO: 911379 - RNA, 19 nt, Homo sapiens
  misc_RNA (1)...(19): siRNA sense strand
cuacgaagggagcuacgaa

SEQ ID NO: 911380 - RNA, 19 nt, Homo sapiens
  misc_RNA (1)...(19): siRNA sense strand
cguauacuacuacaucaau

SEQ ID NO: 911381 - RNA, 19 nt, Homo sapiens
  misc_RNA (1)...(19): siRNA sense strand
gcggagacgggcaguaagu

SEQ ID NO: 911382 - RNA, 19 nt, Homo sapiens
  misc_RNA (1)...(19): siRNA sense strand
agauggauccagauaugaa

SEQ ID NO: 911383 - RNA, 19 nt, Homo sapiens
  misc_RNA (1)...(19): siRNA sense strand
aaauggaaagcuacccaaa

SEQ ID NO: 911384 - RNA, 19 nt, Homo sapiens
  misc_RNA (1)...(19): siRNA sense strand
ugaaggagagugggcaaau

SEQ ID NO: 911385 - RNA, 19 nt, Homo sapiens
  misc_RNA (1)...(19): siRNA sense strand
agagugguuugcucaucaa

SEQ ID NO: 911386 - RNA, 19 nt, Homo sapiens
  misc_RNA (1)...(19): siRNA sense strand
guuccgcuaugacauggau

SEQ ID NO: 911387 - RNA, 19 nt, Homo sapiens
  misc_RNA (1)...(19): siRNA sense strand
auuaguaacuguuguucca

SEQ ID NO: 911388 - RNA, 19 nt, Homo sapiens
  misc_RNA (1)...(19): siRNA sense strand
ccaggaggaguuccgcuau

SEQ ID NO: 911389 - RNA, 19 nt, Homo sapiens
  misc_RNA (1)...(19): siRNA sense strand
acgaagggagcuacgaauu

SEQ ID NO: 911390 - RNA, 19 nt, Homo sapiens
  misc_RNA (1)...(19): siRNA sense strand
cagauggauccagauauga

SEQ ID NO: 911391 - RNA, 19 nt, Homo sapiens
  misc_RNA (1)...(19): siRNA sense strand
ucggagaauauguuagaaa

SEQ ID NO: 911392 - RNA, 19 nt, Homo sapiens
  misc_RNA (1)...(19): siRNA sense strand
gaagucaccaugcgcuaca

SEQ ID NO: 911393 - RNA, 19 nt, Homo sapiens
  misc_RNA (1)...(19): siRNA sense strand
gcucaacgucuucgucaag

SEQ ID NO: 911394 - RNA, 19 nt, Homo sapiens
  misc_RNA (1)...(19): siRNA sense strand
ucaagggcaagaagcugua

SEQ ID NO: 911395 - RNA, 19 nt, Homo sapiens
  misc_RNA (1)...(19): siRNA sense strand
cacccacgcuguaguuggu

SEQ ID NO: 911396 - RNA, 19 nt, Homo sapiens
  misc_RNA (1)...(19): siRNA sense strand
aaaacuaucugcaguacca

SEQ ID NO: 911397 - RNA, 19 nt, Homo sapiens
  misc_RNA (1)...(19): siRNA sense strand
uggaccagcuguuggacau

SEQ ID NO: 911398 - RNA, 19 nt, Homo sapiens
  misc_RNA (1)...(19): siRNA sense strand
gagggcacacucagcuuca

SEQ ID NO: 911399 - RNA, 19 nt, Homo sapiens
  misc_RNA (1)...(19): siRNA sense strand
gaacuucacugcauucaua

SEQ ID NO: 911400 - RNA, 19 nt, Homo sapiens
  misc_RNA (1)...(19): siRNA sense strand
ccacuggacucaaacauga

SEQ ID NO: 911401 - RNA, 19 nt, Homo sapiens
  misc_RNA (1)...(19): siRNA sense strand
gaaguaauucccaccauaa

SEQ ID NO: 911402 - RNA, 19 nt, Homo sapiens
  misc_RNA (1)...(19): siRNA sense strand
gaucaucuauggagucuuc

SEQ ID NO: 911403 - RNA, 19 nt, Homo sapiens
  misc_RNA (1)...(19): siRNA sense strand
caaacuuuauggccuauuu

SEQ ID NO: 911404 - RNA, 19 nt, Homo sapiens
  misc_RNA (1)...(19): siRNA sense strand
ccauggaaaugaaguaauu

SEQ ID NO: 911405 - RNA, 19 nt, Homo sapiens
  misc_RNA (1)...(19): siRNA sense strand
ggaaugugcccuucuggua

SEQ ID NO: 911406 - RNA, 19 nt, Homo sapiens
  misc_RNA (1)...(19): siRNA sense strand
ugacuucaguggcuaaauu

SEQ ID NO: 911407 - RNA, 19 nt, Homo sapiens
  misc_RNA (1)...(19): siRNA sense strand
ugaaguaauucccaccaua

SEQ ID NO: 911408 - RNA, 19 nt, Homo sapiens
  misc_RNA (1)...(19): siRNA sense strand
gcucccaccuuccucauuu

SEQ ID NO: 911409 - RNA, 19 nt, Homo sapiens
  misc_RNA (1)...(19): siRNA sense strand
cauccuaggcggucauuua

SEQ ID NO: 911410 - RNA, 19 nt, Homo sapiens
  misc_RNA (1)...(19): siRNA sense strand
gaagugucgucgcuuuguu

SEQ ID NO: 911411 - RNA, 19 nt, Homo sapiens
  misc_RNA (1)...(19): siRNA sense strand
gaagguucgugcucagaug

SEQ ID NO: 911412 - RNA, 19 nt, Homo sapiens
  misc_RNA (1)...(19): siRNA sense strand
gaaugaagaaugccagaga

SEQ ID NO: 911413 - RNA, 19 nt, Homo sapiens
  misc_RNA (1)...(19): siRNA sense strand
guaauucccaccauaauca

SEQ ID NO: 911414 - RNA, 19 nt, Homo sapiens
  misc_RNA (1)...(19): siRNA sense strand
ccuaggcggucauuuauca

SEQ ID NO: 911415 - RNA, 19 nt, Homo sapiens
  misc_RNA (1)...(19): siRNA sense strand
uacgagauuugcaaacuuu

SEQ ID NO: 911416 - RNA, 19 nt, Homo sapiens
  misc_RNA (1)...(19): siRNA sense strand
gaugcacucuugagaaucu

SEQ ID NO: 911417 - RNA, 19 nt, Homo sapiens
  misc_RNA (1)...(19): siRNA sense strand
agagaagugucgucgcuuu

SEQ ID NO: 911418 - RNA, 19 nt, Homo sapiens
  misc_RNA (1)...(19): siRNA sense strand
gaguggaagugacgcaguu

SEQ ID NO: 911419 - RNA, 19 nt, Homo sapiens
  misc_RNA (1)...(19): siRNA sense strand
gccagaugcuucucauguu

SEQ ID NO: 911420 - RNA, 19 nt, Homo sapiens
  misc_RNA (1)...(19): siRNA sense strand
uaaaccagaggaaggcuua

SEQ ID NO: 911421 - RNA, 19 nt, Homo sapiens
  misc_RNA (1)...(19): siRNA sense strand
gaaugugcccuucugguau

SEQ ID NO: 911422 - RNA, 19 nt, Homo sapiens
  misc_RNA (1)...(19): siRNA sense strand
ccagagaaccaaagcaaga

SEQ ID NO: 911423 - RNA, 19 nt, Homo sapiens
  misc_RNA (1)...(19): siRNA sense strand
ccagaugcuucucauguuc

SEQ ID NO: 911424 - RNA, 19 nt, Homo sapiens
  misc_RNA (1)...(19): siRNA sense strand
agugggaucugguauguga

SEQ ID NO: 911425 - RNA, 19 nt, Homo sapiens
  misc_RNA (1)...(19): siRNA sense strand
ucagacagguuugggagaa

SEQ ID NO: 911426 - RNA, 19 nt, Homo sapiens
  misc_RNA (1)...(19): siRNA sense strand
ggcuaaauuuguauucaug

SEQ ID NO: 911427 - RNA, 19 nt, Homo sapiens
  misc_RNA (1)...(19): siRNA sense strand
ucugcucgguggcucauua

SEQ ID NO: 911428 - RNA, 19 nt, Homo sapiens
  misc_RNA (1)...(19): siRNA sense strand
cgucugcucuugccaauac

SEQ ID NO: 911429 - RNA, 19 nt, Homo sapiens
  misc_RNA (1)...(19): siRNA sense strand
cauccaccaucgugacuga

SEQ ID NO: 911430 - RNA, 19 nt, Homo sapiens
  misc_RNA (1)...(19): siRNA sense strand
ggaucucccuccuguccuu

SEQ ID NO: 911431 - RNA, 19 nt, Homo sapiens
  misc_RNA (1)...(19): siRNA sense strand
ucauuuaucagacagguuu

SEQ ID NO: 911432 - RNA, 19 nt, Homo sapiens
  misc_RNA (1)...(19): siRNA sense strand
gauccuaaguguguauucu

SEQ ID NO: 911433 - RNA, 19 nt, Homo sapiens
  misc_RNA (1)...(19): siRNA sense strand
ugagugggaucugguaugu

SEQ ID NO: 911434 - RNA, 19 nt, Homo sapiens
  misc_RNA (1)...(19): siRNA sense strand
caccuugggcacugaaaua

SEQ ID NO: 911435 - RNA, 19 nt, Homo sapiens
  misc_RNA (1)...(19): siRNA sense strand
gagauuugcaaacuuuaug

SEQ ID NO: 911436 - RNA, 19 nt, Homo sapiens
  misc_RNA (1)...(19): siRNA sense strand
agaggaaggcuuaaaggaa

SEQ ID NO: 911437 - RNA, 19 nt, Homo sapiens
  misc_RNA (1)...(19): siRNA sense strand
caacaauaaaccagaggaa

SEQ ID NO: 911438 - RNA, 19 nt, Homo sapiens
  misc_RNA (1)...(19): siRNA sense strand
uaccauacuuugugaucuu

SEQ ID NO: 911439 - RNA, 19 nt, Homo sapiens
  misc_RNA (1)...(19): siRNA sense strand
uucaguggcuaaauuugua

SEQ ID NO: 911440 - RNA, 19 nt, Homo sapiens
  misc_RNA (1)...(19): siRNA sense strand
gguaugugacucucaauca

SEQ ID NO: 911441 - RNA, 19 nt, Homo sapiens
  misc_RNA (1)...(19): siRNA sense strand
ccaccuuccucauuuacug

SEQ ID NO: 911442 - RNA, 19 nt, Homo sapiens
  misc_RNA (1)...(19): siRNA sense strand
gaccucaaguuggcugcua

SEQ ID NO: 911443 - RNA, 19 nt, Homo sapiens
  misc_RNA (1)...(19): siRNA sense strand
cuucugguauugcauuuau

SEQ ID NO: 911444 - RNA, 19 nt, Homo sapiens
  misc_RNA (1)...(19): siRNA sense strand
aaugugcccuucugguauu

SEQ ID NO: 911445 - RNA, 19 nt, Homo sapiens
  misc_RNA (1)...(19): siRNA sense strand
uuacgagauuugcaaacuu

SEQ ID NO: 911446 - RNA, 19 nt, Homo sapiens
  misc_RNA (1)...(19): siRNA sense strand
guugcuacauaccuucauu

SEQ ID NO: 911447 - RNA, 19 nt, Homo sapiens
  misc_RNA (1)...(19): siRNA sense strand
ucuuugcuguugcuacaua

SEQ ID NO: 911448 - RNA, 19 nt, Homo sapiens
  misc_RNA (1)...(19): siRNA sense strand
gagaagugucgucgcuuug

SEQ ID NO: 911449 - RNA, 19 nt, Homo sapiens
  misc_RNA (1)...(19): siRNA sense strand
uggagaacuucacugcauu

SEQ ID NO: 911450 - RNA, 19 nt, Homo sapiens
  misc_RNA (1)...(19): siRNA sense strand
guggauggcuggguguaug

SEQ ID NO: 911451 - RNA, 19 nt, Homo sapiens
  misc_RNA (1)...(19): siRNA sense strand
ggagauuccagauccuuca

SEQ ID NO: 911452 - RNA, 19 nt, Homo sapiens
  misc_RNA (1)...(19): siRNA sense strand
gauccgagaguggaaguga

SEQ ID NO: 911453 - RNA, 19 nt, Homo sapiens
  misc_RNA (1)...(19): siRNA sense strand
ccaucccacuggacucaaa

SEQ ID NO: 911454 - RNA, 19 nt, Homo sapiens
  misc_RNA (1)...(19): siRNA sense strand
gcucgguggcucauuauca

SEQ ID NO: 911455 - RNA, 19 nt, Homo sapiens
  misc_RNA (1)...(19): siRNA sense strand
ggagaacuucacugcauuc

SEQ ID NO: 911456 - RNA, 19 nt, Homo sapiens
  misc_RNA (1)...(19): siRNA sense strand
aaucuuugcuguugcuaca

SEQ ID NO: 911457 - RNA, 19 nt, Homo sapiens
  misc_RNA (1)...(19): siRNA sense strand
gacuucaguggcuaaauuu

SEQ ID NO: 911458 - RNA, 19 nt, Homo sapiens
  misc_RNA (1)...(19): siRNA sense strand
cuggagaacuucacugcau

SEQ ID NO: 911459 - RNA, 19 nt, Homo sapiens
  misc_RNA (1)...(19): siRNA sense strand
ucaaacaugaggccagaga

SEQ ID NO: 911460 - RNA, 19 nt, Homo sapiens
  misc_RNA (1)...(19): siRNA sense strand
ggggaucaaugcaaccuuu

SEQ ID NO: 911461 - RNA, 19 nt, Homo sapiens
  misc_RNA (1)...(19): siRNA sense strand
cagaggaaggcuuaaagga

SEQ ID NO: 911462 - RNA, 19 nt, Homo sapiens
  misc_RNA (1)...(19): siRNA sense strand
ugucgucgcuuuguucauc

SEQ ID NO: 911463 - RNA, 19 nt, Homo sapiens
  misc_RNA (1)...(19): siRNA sense strand
ggccaugggaauuacauug

SEQ ID NO: 911464 - RNA, 19 nt, Homo sapiens
  misc_RNA (1)...(19): siRNA sense strand
guaccauacuuugugaucu

SEQ ID NO: 911465 - RNA, 19 nt, Homo sapiens
  misc_RNA (1)...(19): siRNA sense strand
cuggugaccuguggagauu

SEQ ID NO: 911466 - RNA, 19 nt, Homo sapiens
  misc_RNA (1)...(19): siRNA sense strand
caagugacgcagacaugga

SEQ ID NO: 911467 - RNA, 19 nt, Homo sapiens
  misc_RNA (1)...(19): siRNA sense strand
guggcuaaauuuguauuca

SEQ ID NO: 911468 - RNA, 19 nt, Homo sapiens
  misc_RNA (1)...(19): siRNA sense strand
ggaagugacgcaguuuuaa

SEQ ID NO: 911469 - RNA, 19 nt, Homo sapiens
  misc_RNA (1)...(19): siRNA sense strand
gaaggcuuaaaggaacuua

SEQ ID NO: 911470 - RNA, 19 nt, Homo sapiens
  misc_RNA (1)...(19): siRNA sense strand
ucuguaccauacuuuguga

SEQ ID NO: 911471 - RNA, 19 nt, Homo sapiens
  misc_RNA (1)...(19): siRNA sense strand
ccagauccuucagacuguu

SEQ ID NO: 911472 - RNA, 19 nt, Homo sapiens
  misc_RNA (1)...(19): siRNA sense strand
cgagauuugcaaacuuuau

SEQ ID NO: 911473 - RNA, 19 nt, Homo sapiens
  misc_RNA (1)...(19): siRNA sense strand
gguggcucauuaucaacaa

SEQ ID NO: 911474 - RNA, 19 nt, Homo sapiens
  misc_RNA (1)...(19): siRNA sense strand
gagaagguucgugcucaga

SEQ ID NO: 911475 - RNA, 19 nt, Homo sapiens
  misc_RNA (1)...(19): siRNA sense strand
gcccauggaaaugaaguaa

SEQ ID NO: 911476 - RNA, 19 nt, Homo sapiens
  misc_RNA (1)...(19): siRNA sense strand
gcuacauaccuucauuuua

SEQ ID NO: 911477 - RNA, 19 nt, Homo sapiens
  misc_RNA (1)...(19): siRNA sense strand
uacaugaaccgucgagcaa

SEQ ID NO: 911478 - RNA, 19 nt, Homo sapiens
  misc_RNA (1)...(19): siRNA sense strand
caaacaugaggccagagaa

SEQ ID NO: 911479 - RNA, 19 nt, Homo sapiens
  misc_RNA (1)...(19): siRNA sense strand
cgagugggcaacacacaga

SEQ ID NO: 911480 - RNA, 19 nt, Homo sapiens
  misc_RNA (1)...(19): siRNA sense strand
ccuccagguugccauuguu

SEQ ID NO: 911481 - RNA, 19 nt, Homo sapiens
  misc_RNA (1)...(19): siRNA sense strand
gcaccuugggcacugaaau

SEQ ID NO: 911482 - RNA, 19 nt, Homo sapiens
  misc_RNA (1)...(19): siRNA sense strand
ucugguaugugacucucaa

SEQ ID NO: 911483 - RNA, 19 nt, Homo sapiens
  misc_RNA (1)...(19): siRNA sense strand
gaugauccuaaguguguau

SEQ ID NO: 911484 - RNA, 19 nt, Homo sapiens
  misc_RNA (1)...(19): siRNA sense strand
ccuucuggccaucauauuu

SEQ ID NO: 911485 - RNA, 19 nt, Homo sapiens
  misc_RNA (1)...(19): siRNA sense strand
ccucauuuacugcucacua

SEQ ID NO: 911486 - RNA, 19 nt, Homo sapiens
  misc_RNA (1)...(19): siRNA sense strand
cuugggcacugaaauacau

SEQ ID NO: 911487 - RNA, 19 nt, Homo sapiens
  misc_RNA (1)...(19): siRNA sense strand
cucgguggcucauuaucaa

SEQ ID NO: 911488 - RNA, 19 nt, Homo sapiens
  misc_RNA (1)...(19): siRNA sense strand
aaacaugaggccagagaag

SEQ ID NO: 911489 - RNA, 19 nt, Homo sapiens
  misc_RNA (1)...(19): siRNA sense strand
cucccaccuuccucauuua

SEQ ID NO: 911490 - RNA, 19 nt, Homo sapiens
  misc_RNA (1)...(19): siRNA sense strand
auaaucagggcaagagcua

SEQ ID NO: 911491 - RNA, 19 nt, Homo sapiens
  misc_RNA (1)...(19): siRNA sense strand
ucucuuuggugcagucauc

SEQ ID NO: 911492 - RNA, 19 nt, Homo sapiens
  misc_RNA (1)...(19): siRNA sense strand
gcuccacaugcccaacaua

SEQ ID NO: 911493 - RNA, 19 nt, Homo sapiens
  misc_RNA (1)...(19): siRNA sense strand
gcuggugaccuguggagau

SEQ ID NO: 911494 - RNA, 19 nt, Homo sapiens
  misc_RNA (1)...(19): siRNA sense strand
ucugguauugcauuuauga

SEQ ID NO: 911495 - RNA, 19 nt, Homo sapiens
  misc_RNA (1)...(19): siRNA sense strand
cuucaucucuggcuuugcu

SEQ ID NO: 911496 - RNA, 19 nt, Homo sapiens
  misc_RNA (1)...(19): siRNA sense strand
ccaauacccuugcuuuugc

SEQ ID NO: 911497 - RNA, 19 nt, Homo sapiens
  misc_RNA (1)...(19): siRNA sense strand
uggcucauuaucaacaaua

SEQ ID NO: 911498 - RNA, 19 nt, Homo sapiens
  misc_RNA (1)...(19): siRNA sense strand
cauacuuugugaucuuucu

SEQ ID NO: 911499 - RNA, 19 nt, Homo sapiens
  misc_RNA (1)...(19): siRNA sense strand
caucaggaaucaacuauua

SEQ ID NO: 911500 - RNA, 19 nt, Homo sapiens
  misc_RNA (1)...(19): siRNA sense strand
gcacugauauggagaacuu

SEQ ID NO: 911501 - RNA, 19 nt, Homo sapiens
  misc_RNA (1)...(19): siRNA sense strand
ggaaucaacuauuaaccaa

SEQ ID NO: 911502 - RNA, 19 nt, Homo sapiens
  misc_RNA (1)...(19): siRNA sense strand
gcucccagauggaauauuu

SEQ ID NO: 911503 - RNA, 19 nt, Homo sapiens
  misc_RNA (1)...(19): siRNA sense strand
ggaagacauccaauuauuu

SEQ ID NO: 911504 - RNA, 19 nt, Homo sapiens
  misc_RNA (1)...(19): siRNA sense strand
gaagacauccaauuauuuc

SEQ ID NO: 911505 - RNA, 19 nt, Homo sapiens
  misc_RNA (1)...(19): siRNA sense strand
gaagcaauauauucugcaa

SEQ ID NO: 911506 - RNA, 19 nt, Homo sapiens
  misc_RNA (1)...(19): siRNA sense strand
auacaaagauccaugugaa

SEQ ID NO: 911507 - RNA, 19 nt, Homo sapiens
  misc_RNA (1)...(19): siRNA sense strand
cagauuacauugcauuugu

SEQ ID NO: 911508 - RNA, 19 nt, Homo sapiens
  misc_RNA (1)...(19): siRNA sense strand
uuacaucuuugcagacuaa

SEQ ID NO: 911509 - RNA, 19 nt, Homo sapiens
  misc_RNA (1)...(19): siRNA sense strand
uaaagacacagcugaguuu

SEQ ID NO: 911510 - RNA, 19 nt, Homo sapiens
  misc_RNA (1)...(19): siRNA sense strand
uuaggaagacauccaauua

SEQ ID NO: 911511 - RNA, 19 nt, Homo sapiens
  misc_RNA (1)...(19): siRNA sense strand
aggaagacauccaauuauu

SEQ ID NO: 911512 - RNA, 19 nt, Homo sapiens
  misc_RNA (1)...(19): siRNA sense strand
gaaccaaggauuuacagau

SEQ ID NO: 911513 - RNA, 19 nt, Homo sapiens
  misc_RNA (1)...(19): siRNA sense strand
ugaauuggcugacauccau

SEQ ID NO: 911514 - RNA, 19 nt, Homo sapiens
  misc_RNA (1)...(19): siRNA sense strand
uuacauuccuucaacaaga

SEQ ID NO: 911515 - RNA, 19 nt, Homo sapiens
  misc_RNA (1)...(19): siRNA sense strand
gaacuuucacaccaguaua

SEQ ID NO: 911516 - RNA, 19 nt, Homo sapiens
  misc_RNA (1)...(19): siRNA sense strand
agauccaugugaacuauua

SEQ ID NO: 911517 - RNA, 19 nt, Homo sapiens
  misc_RNA (1)...(19): siRNA sense strand
caaagauccaugugaacua

SEQ ID NO: 911518 - RNA, 19 nt, Homo sapiens
  misc_RNA (1)...(19): siRNA sense strand
acugcaauauggaaucuua

SEQ ID NO: 911519 - RNA, 19 nt, Homo sapiens
  misc_RNA (1)...(19): siRNA sense strand
ucaacaagauacaaagauc

SEQ ID NO: 911520 - RNA, 19 nt, Homo sapiens
  misc_RNA (1)...(19): siRNA sense strand
ucaaggaaauaaagacaca

SEQ ID NO: 911521 - RNA, 19 nt, Homo sapiens
  misc_RNA (1)...(19): siRNA sense strand
acgcacuacucacagauua

SEQ ID NO: 911522 - RNA, 19 nt, Homo sapiens
  misc_RNA (1)...(19): siRNA sense strand
aaagauccaugugaacuau

SEQ ID NO: 911523 - RNA, 19 nt, Homo sapiens
  misc_RNA (1)...(19): siRNA sense strand
gagaguaagaguaaugguu

SEQ ID NO: 911524 - RNA, 19 nt, Homo sapiens
  misc_RNA (1)...(19): siRNA sense strand
guucaagacagaaguugua

SEQ ID NO: 911525 - RNA, 19 nt, Homo sapiens
  misc_RNA (1)...(19): siRNA sense strand
gaguaagaguaaugguuga

SEQ ID NO: 911526 - RNA, 19 nt, Homo sapiens
  misc_RNA (1)...(19): siRNA sense strand
gauacaaagauccauguga

SEQ ID NO: 911527 - RNA, 19 nt, Homo sapiens
  misc_RNA (1)...(19): siRNA sense strand
acaauucuguacuggguuu

SEQ ID NO: 911528 - RNA, 19 nt, Homo sapiens
  misc_RNA (1)...(19): siRNA sense strand
gcaauauggaaucuuagaa

SEQ ID NO: 911529 - RNA, 19 nt, Homo sapiens
  misc_RNA (1)...(19): siRNA sense strand
ugagguauguggacuugga

SEQ ID NO: 911530 - RNA, 19 nt, Homo sapiens
  misc_RNA (1)...(19): siRNA sense strand
caucacaccucucuuuuau

SEQ ID NO: 911531 - RNA, 19 nt, Homo sapiens
  misc_RNA (1)...(19): siRNA sense strand
uuauguagcucagacaaga

SEQ ID NO: 911532 - RNA, 19 nt, Homo sapiens
  misc_RNA (1)...(19): siRNA sense strand
uggcugacauccaugaaga

SEQ ID NO: 911533 - RNA, 19 nt, Homo sapiens
  misc_RNA (1)...(19): siRNA sense strand
gauggaauauuuucacuuc

SEQ ID NO: 911534 - RNA, 19 nt, Homo sapiens
  misc_RNA (1)...(19): siRNA sense strand
aaugguugaucgugaauug

SEQ ID NO: 911535 - RNA, 19 nt, Homo sapiens
  misc_RNA (1)...(19): siRNA sense strand
agacacagcugaguuuagg

SEQ ID NO: 911536 - RNA, 19 nt, Homo sapiens
  misc_RNA (1)...(19): siRNA sense strand
guuacgaaccaaggauuua

SEQ ID NO: 911537 - RNA, 19 nt, Homo sapiens
  misc_RNA (1)...(19): siRNA sense strand
gcaauauauucugcaaucu

SEQ ID NO: 911538 - RNA, 19 nt, Homo sapiens
  misc_RNA (1)...(19): siRNA sense strand
gaucgugaauuggcugaca

SEQ ID NO: 911539 - RNA, 19 nt, Homo sapiens
  misc_RNA (1)...(19): siRNA sense strand
ucacagauuacauugcauu

SEQ ID NO: 911540 - RNA, 19 nt, Homo sapiens
  misc_RNA (1)...(19): siRNA sense strand
aaccaaggauuuacagauc

SEQ ID NO: 911541 - RNA, 19 nt, Homo sapiens
  misc_RNA (1)...(19): siRNA sense strand
agacuauguucaagacaga

SEQ ID NO: 911542 - RNA, 19 nt, Homo sapiens
  misc_RNA (1)...(19): siRNA sense strand
ucuaauuccugcucgucua

SEQ ID NO: 911543 - RNA, 19 nt, Homo sapiens
  misc_RNA (1)...(19): siRNA sense strand
gcaaucuccuugacaaaau

SEQ ID NO: 911544 - RNA, 19 nt, Homo sapiens
  misc_RNA (1)...(19): siRNA sense strand
guuguaaccuggcacugau

SEQ ID NO: 911545 - RNA, 19 nt, Homo sapiens
  misc_RNA (1)...(19): siRNA sense strand
ucacaccucucuuuuaugu

SEQ ID NO: 911546 - RNA, 19 nt, Homo sapiens
  misc_RNA (1)...(19): siRNA sense strand
uuacauugcauuuguggaa

SEQ ID NO: 911547 - RNA, 19 nt, Homo sapiens
  misc_RNA (1)...(19): siRNA sense strand
aaauacuacugcaauaugg

SEQ ID NO: 911548 - RNA, 19 nt, Homo sapiens
  misc_RNA (1)...(19): siRNA sense strand
agcaauauauucugcaauc

SEQ ID NO: 911549 - RNA, 19 nt, Homo sapiens
  misc_RNA (1)...(19): siRNA sense strand
gacuaaccaucaggaauca

SEQ ID NO: 911550 - RNA, 19 nt, Homo sapiens
  misc_RNA (1)...(19): siRNA sense strand
uggcaucacaccucucuuu

SEQ ID NO: 911551 - RNA, 19 nt, Homo sapiens
  misc_RNA (1)...(19): siRNA sense strand
gcacuacucacagauuaca

SEQ ID NO: 911552 - RNA, 19 nt, Homo sapiens
  misc_RNA (1)...(19): siRNA sense strand
acucacagauuacauugca

SEQ ID NO: 911553 - RNA, 19 nt, Homo sapiens
  misc_RNA (1)...(19): siRNA sense strand
uaggaagacauccaauuau

SEQ ID NO: 911554 - RNA, 19 nt, Homo sapiens
  misc_RNA (1)...(19): siRNA sense strand
aaagacacagcugaguuua

SEQ ID NO: 911555 - RNA, 19 nt, Homo sapiens
  misc_RNA (1)...(19): siRNA sense strand
aguaaugguugaucgugaa

SEQ ID NO: 911556 - RNA, 19 nt, Homo sapiens
  misc_RNA (1)...(19): siRNA sense strand
uguccaagcccauuaagug

SEQ ID NO: 911557 - RNA, 19 nt, Homo sapiens
  misc_RNA (1)...(19): siRNA sense strand
agacuaaccaucaggaauc

SEQ ID NO: 911558 - RNA, 19 nt, Homo sapiens
  misc_RNA (1)...(19): siRNA sense strand
gaacuauuacaucuuugca

SEQ ID NO: 911559 - RNA, 19 nt, Homo sapiens
  misc_RNA (1)...(19): siRNA sense strand
gauuacauuccuucaacaa

SEQ ID NO: 911560 - RNA, 19 nt, Homo sapiens
  misc_RNA (1)...(19): siRNA sense strand
gacaaaagacuauguucaa

SEQ ID NO: 911561 - RNA, 19 nt, Homo sapiens
  misc_RNA (1)...(19): siRNA sense strand
gcagacuaaccaucaggaa

SEQ ID NO: 911562 - RNA, 19 nt, Homo sapiens
  misc_RNA (1)...(19): siRNA sense strand
uauguggacuuggaugguu

SEQ ID NO: 911563 - RNA, 19 nt, Homo sapiens
  misc_RNA (1)...(19): siRNA sense strand
agagugcuuucugucauuu

SEQ ID NO: 911564 - RNA, 19 nt, Homo sapiens
  misc_RNA (1)...(19): siRNA sense strand
cauguuugguacuauguuc

SEQ ID NO: 911565 - RNA, 19 nt, Homo sapiens
  misc_RNA (1)...(19): siRNA sense strand
ucugcaaucuccuugacaa

SEQ ID NO: 911566 - RNA, 19 nt, Homo sapiens
  misc_RNA (1)...(19): siRNA sense strand
gcaucacaccucucuuuua

SEQ ID NO: 911567 - RNA, 19 nt, Homo sapiens
  misc_RNA (1)...(19): siRNA sense strand
cccauuaaguggcaucaca

SEQ ID NO: 911568 - RNA, 19 nt, Homo sapiens
  misc_RNA (1)...(19): siRNA sense strand
uguccaagaagcaauauau

SEQ ID NO: 911569 - RNA, 19 nt, Homo sapiens
  misc_RNA (1)...(19): siRNA sense strand
aagguaauccugacuuugu

SEQ ID NO: 911570 - RNA, 19 nt, Homo sapiens
  misc_RNA (1)...(19): siRNA sense strand
acagcugaguuuaggaaga

SEQ ID NO: 911571 - RNA, 19 nt, Homo sapiens
  misc_RNA (1)...(19): siRNA sense strand
gaagacaaaagacuauguu

SEQ ID NO: 911572 - RNA, 19 nt, Homo sapiens
  misc_RNA (1)...(19): siRNA sense strand
gaaaagguaauccugacuu

SEQ ID NO: 911573 - RNA, 19 nt, Homo sapiens
  misc_RNA (1)...(19): siRNA sense strand
ccaugaagaugccaaaaca

SEQ ID NO: 911574 - RNA, 19 nt, Homo sapiens
  misc_RNA (1)...(19): siRNA sense strand
ggauaccguuuugaaguaa

SEQ ID NO: 911575 - RNA, 19 nt, Homo sapiens
  misc_RNA (1)...(19): siRNA sense strand
guccaagaagcaauauauu

SEQ ID NO: 911576 - RNA, 19 nt, Homo sapiens
  misc_RNA (1)...(19): siRNA sense strand
acacagcugaguuuaggaa

SEQ ID NO: 911577 - RNA, 19 nt, Homo sapiens
  misc_RNA (1)...(19): siRNA sense strand
auaaagacacagcugaguu

SEQ ID NO: 911578 - RNA, 19 nt, Homo sapiens
  misc_RNA (1)...(19): siRNA sense strand
gaagaugccaaaacauguu

SEQ ID NO: 911579 - RNA, 19 nt, Homo sapiens
  misc_RNA (1)...(19): siRNA sense strand
gggauaucacuguuacgaa

SEQ ID NO: 911580 - RNA, 19 nt, Homo sapiens
  misc_RNA (1)...(19): siRNA sense strand
ggacuuggaugguuuugac

SEQ ID NO: 911581 - RNA, 19 nt, Homo sapiens
  misc_RNA (1)...(19): siRNA sense strand
uacauugcauuuguggaaa

SEQ ID NO: 911582 - RNA, 19 nt, Homo sapiens
  misc_RNA (1)...(19): siRNA sense strand
aacaauaugcucccagaug

SEQ ID NO: 911583 - RNA, 19 nt, Homo sapiens
  misc_RNA (1)...(19): siRNA sense strand
uccaagaagcaauauauuc

SEQ ID NO: 911584 - RNA, 19 nt, Homo sapiens
  misc_RNA (1)...(19): siRNA sense strand
uacauuccuucaacaagau

SEQ ID NO: 911585 - RNA, 19 nt, Homo sapiens
  misc_RNA (1)...(19): siRNA sense strand
cagcugaguuuaggaagac

SEQ ID NO: 911586 - RNA, 19 nt, Homo sapiens
  misc_RNA (1)...(19): siRNA sense strand
gacagucuaauaucuucaa

SEQ ID NO: 911587 - RNA, 19 nt, Homo sapiens
  misc_RNA (1)...(19): siRNA sense strand
caaaagacuauguucaaga

SEQ ID NO: 911588 - RNA, 19 nt, Homo sapiens
  misc_RNA (1)...(19): siRNA sense strand
ucugagguauguggacuug

SEQ ID NO: 911589 - RNA, 19 nt, Homo sapiens
  misc_RNA (1)...(19): siRNA sense strand
uaugcucccagauggaaua

SEQ ID NO: 911590 - RNA, 19 nt, Homo sapiens
  misc_RNA (1)...(19): siRNA sense strand
caauauauucugcaaucuc

SEQ ID NO: 911591 - RNA, 19 nt, Homo sapiens
  misc_RNA (1)...(19): siRNA sense strand
gagaacuuucacaccagua

SEQ ID NO: 911592 - RNA, 19 nt, Homo sapiens
  misc_RNA (1)...(19): siRNA sense strand
ugauuacauuccuucaaca

SEQ ID NO: 911593 - RNA, 19 nt, Homo sapiens
  misc_RNA (1)...(19): siRNA sense strand
ccuaucaacauugucuuaa

SEQ ID NO: 911594 - RNA, 19 nt, Homo sapiens
  misc_RNA (1)...(19): siRNA sense strand
ucaagaagacaaaagacua

SEQ ID NO: 911595 - RNA, 19 nt, Homo sapiens
  misc_RNA (1)...(19): siRNA sense strand
aaaagacccucccuacagu

SEQ ID NO: 911596 - RNA, 19 nt, Homo sapiens
  misc_RNA (1)...(19): siRNA sense strand
uaaccuggcacugauaugg

SEQ ID NO: 911597 - RNA, 19 nt, Homo sapiens
  misc_RNA (1)...(19): siRNA sense strand
caagacagaaguuguaacc

SEQ ID NO: 911598 - RNA, 19 nt, Homo sapiens
  misc_RNA (1)...(19): siRNA sense strand
cagacuaaccaucaggaau

SEQ ID NO: 911599 - RNA, 19 nt, Homo sapiens
  misc_RNA (1)...(19): siRNA sense strand
gaaacgagagccauccaua

SEQ ID NO: 911600 - RNA, 19 nt, Homo sapiens
  misc_RNA (1)...(19): siRNA sense strand
ccaguaaaguccacagaaa

SEQ ID NO: 911601 - RNA, 19 nt, Homo sapiens
  misc_RNA (1)...(19): siRNA sense strand
aaagauggcucacagaaag

SEQ ID NO: 911602 - RNA, 19 nt, Homo sapiens
  misc_RNA (1)...(19): siRNA sense strand
acaaaucucucacuacuac

SEQ ID NO: 911603 - RNA, 19 nt, Homo sapiens
  misc_RNA (1)...(19): siRNA sense strand
guacaaugaugcagaggau

SEQ ID NO: 911604 - RNA, 19 nt, Homo sapiens
  misc_RNA (1)...(19): siRNA sense strand
gaagcugaguucuaucaca

SEQ ID NO: 911605 - RNA, 19 nt, Homo sapiens
  misc_RNA (1)...(19): siRNA sense strand
agacaaaucucucacuacu

SEQ ID NO: 911606 - RNA, 19 nt, Homo sapiens
  misc_RNA (1)...(19): siRNA sense strand
ccucuucucaucuaaauaa

SEQ ID NO: 911607 - RNA, 19 nt, Homo sapiens
  misc_RNA (1)...(19): siRNA sense strand
acaccacacugaccacuga

SEQ ID NO: 911608 - RNA, 19 nt, Homo sapiens
  misc_RNA (1)...(19): siRNA sense strand
auccauaccucaauaaaga

SEQ ID NO: 911609 - RNA, 19 nt, Homo sapiens
  misc_RNA (1)...(19): siRNA sense strand
cagaaaagccuacgcuaua

SEQ ID NO: 911610 - RNA, 19 nt, Homo sapiens
  misc_RNA (1)...(19): siRNA sense strand
uaaagauggcucacagaaa

SEQ ID NO: 911611 - RNA, 19 nt, Homo sapiens
  misc_RNA (1)...(19): siRNA sense strand
ugaguucuaucacaucaga

SEQ ID NO: 911612 - RNA, 19 nt, Homo sapiens
  misc_RNA (1)...(19): siRNA sense strand
cagaaaagccuacagaaaa

SEQ ID NO: 911613 - RNA, 19 nt, Homo sapiens
  misc_RNA (1)...(19): siRNA sense strand
caaggucacaggagacaaa

SEQ ID NO: 911614 - RNA, 19 nt, Homo sapiens
  misc_RNA (1)...(19): siRNA sense strand
caucagaagccacaggaaa

SEQ ID NO: 911615 - RNA, 19 nt, Homo sapiens
  misc_RNA (1)...(19): siRNA sense strand
ggacagaugggagagaaug

SEQ ID NO: 911616 - RNA, 19 nt, Homo sapiens
  misc_RNA (1)...(19): siRNA sense strand
gcugaguucuaucacauca

SEQ ID NO: 911617 - RNA, 19 nt, Homo sapiens
  misc_RNA (1)...(19): siRNA sense strand
aaacacaccagucccagaa

SEQ ID NO: 911618 - RNA, 19 nt, Homo sapiens
  misc_RNA (1)...(19): siRNA sense strand
gaacacccaguacaaugau

SEQ ID NO: 911619 - RNA, 19 nt, Homo sapiens
  misc_RNA (1)...(19): siRNA sense strand
aaacagcagcagucacaaa

SEQ ID NO: 911620 - RNA, 19 nt, Homo sapiens
  misc_RNA (1)...(19): siRNA sense strand
uaacccagaacacccagua

SEQ ID NO: 911621 - RNA, 19 nt, Homo sapiens
  misc_RNA (1)...(19): siRNA sense strand
uauaaaaccuucagucaag

SEQ ID NO: 911622 - RNA, 19 nt, Homo sapiens
  misc_RNA (1)...(19): siRNA sense strand
gaagaccauaugcaccaaa

SEQ ID NO: 911623 - RNA, 19 nt, Homo sapiens
  misc_RNA (1)...(19): siRNA sense strand
cagaacacccaguacaaug

SEQ ID NO: 911624 - RNA, 19 nt, Homo sapiens
  misc_RNA (1)...(19): siRNA sense strand
ggucacaggagacaaaucu

SEQ ID NO: 911625 - RNA, 19 nt, Homo sapiens
  misc_RNA (1)...(19): siRNA sense strand
gacaaaucucucacuacua

SEQ ID NO: 911626 - RNA, 19 nt, Homo sapiens
  misc_RNA (1)...(19): siRNA sense strand
acaaugaugcagaggauga

SEQ ID NO: 911627 - RNA, 19 nt, Homo sapiens
  misc_RNA (1)...(19): siRNA sense strand
ccacgucaaccacagagaa

SEQ ID NO: 911628 - RNA, 19 nt, Homo sapiens
  misc_RNA (1)...(19): siRNA sense strand
gaaaagaccacgucaacca

SEQ ID NO: 911629 - RNA, 19 nt, Homo sapiens
  misc_RNA (1)...(19): siRNA sense strand
cauaaaagccccaguaaag

SEQ ID NO: 911630 - RNA, 19 nt, Homo sapiens
  misc_RNA (1)...(19): siRNA sense strand
cggacacgccgcacacuaa

SEQ ID NO: 911631 - RNA, 19 nt, Homo sapiens
  misc_RNA (1)...(19): siRNA sense strand
ccacagaacacccagaaaa

SEQ ID NO: 911632 - RNA, 19 nt, Homo sapiens
  misc_RNA (1)...(19): siRNA sense strand
cagcagcagucacaaagac

SEQ ID NO: 911633 - RNA, 19 nt, Homo sapiens
  misc_RNA (1)...(19): siRNA sense strand
agccauccauaccucaaua

SEQ ID NO: 911634 - RNA, 19 nt, Homo sapiens
  misc_RNA (1)...(19): siRNA sense strand
agaacacccaguacaauga

SEQ ID NO: 911635 - RNA, 19 nt, Homo sapiens
  misc_RNA (1)...(19): siRNA sense strand
cauaugcaccaaagggaaa

SEQ ID NO: 911636 - RNA, 19 nt, Homo sapiens
  misc_RNA (1)...(19): siRNA sense strand
aagcugaguucuaucacau

SEQ ID NO: 911637 - RNA, 19 nt, Homo sapiens
  misc_RNA (1)...(19): siRNA sense strand
acuacuaccucuucucauc

SEQ ID NO: 911638 - RNA, 19 nt, Homo sapiens
  misc_RNA (1)...(19): siRNA sense strand
ucacuacuaccucuucuca

SEQ ID NO: 911639 - RNA, 19 nt, Homo sapiens
  misc_RNA (1)...(19): siRNA sense strand
auaaagauggcucacagaa

SEQ ID NO: 911640 - RNA, 19 nt, Homo sapiens
  misc_RNA (1)...(19): siRNA sense strand
ccagaacacccaguacaau

SEQ ID NO: 911641 - RNA, 19 nt, Homo sapiens
  misc_RNA (1)...(19): siRNA sense strand
uacuaccucuucucaucua

SEQ ID NO: 911642 - RNA, 19 nt, Homo sapiens
  misc_RNA (1)...(19): siRNA sense strand
caucaggugcccacugguu

SEQ ID NO: 911643 - RNA, 19 nt, Homo sapiens
  misc_RNA (1)...(19): siRNA sense strand
uaccucuucucaucuaaau

SEQ ID NO: 911644 - RNA, 19 nt, Homo sapiens
  misc_RNA (1)...(19): siRNA sense strand
ccagaaaagccuacagaaa

SEQ ID NO: 911645 - RNA, 19 nt, Homo sapiens
  misc_RNA (1)...(19): siRNA sense strand
ugauggagcagcagaaucu

SEQ ID NO: 911646 - RNA, 19 nt, Homo sapiens
  misc_RNA (1)...(19): siRNA sense strand
cagaugggagagaaugauu

SEQ ID NO: 911647 - RNA, 19 nt, Homo sapiens
  misc_RNA (1)...(19): siRNA sense strand
cucauuacaucuagaacga

SEQ ID NO: 911648 - RNA, 19 nt, Homo sapiens
  misc_RNA (1)...(19): siRNA sense strand
acucagagaagaccauaug

SEQ ID NO: 911649 - RNA, 19 nt, Homo sapiens
  misc_RNA (1)...(19): siRNA sense strand
agccuacgcuauacucaga

SEQ ID NO: 911650 - RNA, 19 nt, Homo sapiens
  misc_RNA (1)...(19): siRNA sense strand
ccacagaaaacccagaaaa

SEQ ID NO: 911651 - RNA, 19 nt, Homo sapiens
  misc_RNA (1)...(19): siRNA sense strand
gacagaugggagagaauga

SEQ ID NO: 911652 - RNA, 19 nt, Homo sapiens
  misc_RNA (1)...(19): siRNA sense strand
gaucuucuuggucuccuau

SEQ ID NO: 911653 - RNA, 19 nt, Homo sapiens
  misc_RNA (1)...(19): siRNA sense strand
acugaccacugagaccaua

SEQ ID NO: 911654 - RNA, 19 nt, Homo sapiens
  misc_RNA (1)...(19): siRNA sense strand
uucuuggucuccuauauga

SEQ ID NO: 911655 - RNA, 19 nt, Homo sapiens
  misc_RNA (1)...(19): siRNA sense strand
gguguuccuuggccugauc

SEQ ID NO: 911656 - RNA, 19 nt, Homo sapiens
  misc_RNA (1)...(19): siRNA sense strand
gguucuuucacccucauua

SEQ ID NO: 911657 - RNA, 19 nt, Homo sapiens
  misc_RNA (1)...(19): siRNA sense strand
ggugcccacugguucuuuc

SEQ ID NO: 911658 - RNA, 19 nt, Homo sapiens
  misc_RNA (1)...(19): siRNA sense strand
gaccauaaaagccccagua

SEQ ID NO: 911659 - RNA, 19 nt, Homo sapiens
  misc_RNA (1)...(19): siRNA sense strand
aaacgagagccauccauac

SEQ ID NO: 911660 - RNA, 19 nt, Homo sapiens
  misc_RNA (1)...(19): siRNA sense strand
ccacaagaaccccagaaaa

SEQ ID NO: 911661 - RNA, 19 nt, Homo sapiens
  misc_RNA (1)...(19): siRNA sense strand
ggaaacgagagccauccau

SEQ ID NO: 911662 - RNA, 19 nt, Homo sapiens
  misc_RNA (1)...(19): siRNA sense strand
gccgcacacuaacccagaa

SEQ ID NO: 911663 - RNA, 19 nt, Homo sapiens
  misc_RNA (1)...(19): siRNA sense strand
ccauccauaccucaauaaa

SEQ ID NO: 911664 - RNA, 19 nt, Homo sapiens
  misc_RNA (1)...(19): siRNA sense strand
ugaccacugagaccauaaa

SEQ ID NO: 911665 - RNA, 19 nt, Homo sapiens
  misc_RNA (1)...(19): siRNA sense strand
ggacacgccgcacacuaac

SEQ ID NO: 911666 - RNA, 19 nt, Homo sapiens
  misc_RNA (1)...(19): siRNA sense strand
cuggacagaugggagagaa

SEQ ID NO: 911667 - RNA, 19 nt, Homo sapiens
  misc_RNA (1)...(19): siRNA sense strand
gggaauaccuuuagucuuc

SEQ ID NO: 911668 - RNA, 19 nt, Homo sapiens
  misc_RNA (1)...(19): siRNA sense strand
ggaaacaaccacagcuuua

SEQ ID NO: 911669 - RNA, 19 nt, Homo sapiens
  misc_RNA (1)...(19): siRNA sense strand
gaacaagacccacaaggaa

SEQ ID NO: 911670 - RNA, 19 nt, Homo sapiens
  misc_RNA (1)...(19): siRNA sense strand
gaaguguucaucaauguua

SEQ ID NO: 911671 - RNA, 19 nt, Homo sapiens
  misc_RNA (1)...(19): siRNA sense strand
acaaggagcucaugacaga

SEQ ID NO: 911672 - RNA, 19 nt, Homo sapiens
  misc_RNA (1)...(19): siRNA sense strand
gacacugccucauuucaua

SEQ ID NO: 911673 - RNA, 19 nt, Homo sapiens
  misc_RNA (1)...(19): siRNA sense strand
gacgagagcucagguuuga

SEQ ID NO: 911674 - RNA, 19 nt, Homo sapiens
  misc_RNA (1)...(19): siRNA sense strand
gaacaagacgagaacauug

SEQ ID NO: 911675 - RNA, 19 nt, Homo sapiens
  misc_RNA (1)...(19): siRNA sense strand
caacccagcuccucucaau

SEQ ID NO: 911676 - RNA, 19 nt, Homo sapiens
  misc_RNA (1)...(19): siRNA sense strand
caaauucugugaaggucua

SEQ ID NO: 911677 - RNA, 19 nt, Homo sapiens
  misc_RNA (1)...(19): siRNA sense strand
ggacagaacugaggacaac

SEQ ID NO: 911678 - RNA, 19 nt, Homo sapiens
  misc_RNA (1)...(19): siRNA sense strand
acgaaacucucaaacauuu

SEQ ID NO: 911679 - RNA, 19 nt, Homo sapiens
  misc_RNA (1)...(19): siRNA sense strand
ggagaauucuugggagauu

SEQ ID NO: 911680 - RNA, 19 nt, Homo sapiens
  misc_RNA (1)...(19): siRNA sense strand
gaaggccucugugcgcaua

SEQ ID NO: 911681 - RNA, 19 nt, Homo sapiens
  misc_RNA (1)...(19): siRNA sense strand
gaugggagcugggaagugu

SEQ ID NO: 911682 - RNA, 19 nt, Homo sapiens
  misc_RNA (1)...(19): siRNA sense strand
ccagaugaugcuuauauua

SEQ ID NO: 911683 - RNA, 19 nt, Homo sapiens
  misc_RNA (1)...(19): siRNA sense strand
acacgaaacucucaaacau

SEQ ID NO: 911684 - RNA, 19 nt, Homo sapiens
  misc_RNA (1)...(19): siRNA sense strand
ggagccagaugaugcuuau

SEQ ID NO: 911685 - RNA, 19 nt, Homo sapiens
  misc_RNA (1)...(19): siRNA sense strand
guacaaugcaucccagaaa

SEQ ID NO: 911686 - RNA, 19 nt, Homo sapiens
  misc_RNA (1)...(19): siRNA sense strand
ccagcgacauugcuuugua

SEQ ID NO: 911687 - RNA, 19 nt, Homo sapiens
  misc_RNA (1)...(19): siRNA sense strand
gcgaguggguccaucagaa

SEQ ID NO: 911688 - RNA, 19 nt, Homo sapiens
  misc_RNA (1)...(19): siRNA sense strand
gcggauuugugcuacauuu

SEQ ID NO: 911689 - RNA, 19 nt, Homo sapiens
  misc_RNA (1)...(19): siRNA sense strand
caaaggccaugaacagauc

SEQ ID NO: 911690 - RNA, 19 nt, Homo sapiens
  misc_RNA (1)...(19): siRNA sense strand
guggacagcuccuggaaga

SEQ ID NO: 911691 - RNA, 19 nt, Homo sapiens
  misc_RNA (1)...(19): siRNA sense strand
ggacacagcagggcaaaug

SEQ ID NO: 911692 - RNA, 19 nt, Homo sapiens
  misc_RNA (1)...(19): siRNA sense strand
gaaauaaaaugcccuacau

SEQ ID NO: 911693 - RNA, 19 nt, Homo sapiens
  misc_RNA (1)...(19): siRNA sense strand
aaccacagcuuuaguacaa

SEQ ID NO: 911694 - RNA, 19 nt, Homo sapiens
  misc_RNA (1)...(19): siRNA sense strand
gcgaaguguucaucaaugu

SEQ ID NO: 911695 - RNA, 19 nt, Homo sapiens
  misc_RNA (1)...(19): siRNA sense strand
gaaccaaaauugcugcauu

SEQ ID NO: 911696 - RNA, 19 nt, Homo sapiens
  misc_RNA (1)...(19): siRNA sense strand
caucaauccuagagaguga

SEQ ID NO: 911697 - RNA, 19 nt, Homo sapiens
  misc_RNA (1)...(19): siRNA sense strand
ggccagccaugcagauauu

SEQ ID NO: 911698 - RNA, 19 nt, Homo sapiens
  misc_RNA (1)...(19): siRNA sense strand
ggcaaggacuggcagaugu

SEQ ID NO: 911699 - RNA, 19 nt, Homo sapiens
  misc_RNA (1)...(19): siRNA sense strand
gagaauucuugggagauuu

SEQ ID NO: 911700 - RNA, 19 nt, Homo sapiens
  misc_RNA (1)...(19): siRNA sense strand
ggucuuugcauccuagaua

SEQ ID NO: 911701 - RNA, 19 nt, Homo sapiens
  misc_RNA (1)...(19): siRNA sense strand
guaacucccugcuccugaa

SEQ ID NO: 911702 - RNA, 19 nt, Homo sapiens
  misc_RNA (1)...(19): siRNA sense strand
gccagaugaugcuuauauu

SEQ ID NO: 911703 - RNA, 19 nt, Homo sapiens
  misc_RNA (1)...(19): siRNA sense strand
ucucaaacauuucagaauc

SEQ ID NO: 911704 - RNA, 19 nt, Homo sapiens
  misc_RNA (1)...(19): siRNA sense strand
ccacccagcuguccugcaa

SEQ ID NO: 911705 - RNA, 19 nt, Homo sapiens
  misc_RNA (1)...(19): siRNA sense strand
gaacgagcacgucucugaa

SEQ ID NO: 911706 - RNA, 19 nt, Homo sapiens
  misc_RNA (1)...(19): siRNA sense strand
ggacaaggagcucaugaca

SEQ ID NO: 911707 - RNA, 19 nt, Homo sapiens
  misc_RNA (1)...(19): siRNA sense strand
ggacagcuuugggaccuau

SEQ ID NO: 911708 - RNA, 19 nt, Homo sapiens
  misc_RNA (1)...(19): siRNA sense strand
gggaggaagugaugucagu

SEQ ID NO: 911709 - RNA, 19 nt, Homo sapiens
  misc_RNA (1)...(19): siRNA sense strand
caaugcaucccagaaauaa

SEQ ID NO: 911710 - RNA, 19 nt, Homo sapiens
  misc_RNA (1)...(19): siRNA sense strand
gcagauauucuucaaaugc

SEQ ID NO: 911711 - RNA, 19 nt, Homo sapiens
  misc_RNA (1)...(19): siRNA sense strand
cauugacucuucugcauug

SEQ ID NO: 911712 - RNA, 19 nt, Homo sapiens
  misc_RNA (1)...(19): siRNA sense strand
ccacagcuuuaguacaaug

SEQ ID NO: 911713 - RNA, 19 nt, Homo sapiens
  misc_RNA (1)...(19): siRNA sense strand
ggcaacagguggaggacuu

SEQ ID NO: 911714 - RNA, 19 nt, Homo sapiens
  misc_RNA (1)...(19): siRNA sense strand
ggauuugugcuacauuuga

SEQ ID NO: 911715 - RNA, 19 nt, Homo sapiens
  misc_RNA (1)...(19): siRNA sense strand
gaacgagaaaccaucacuu

SEQ ID NO: 911716 - RNA, 19 nt, Homo sapiens
  misc_RNA (1)...(19): siRNA sense strand
gaaucuacauccuguuacu

SEQ ID NO: 911717 - RNA, 19 nt, Homo sapiens
  misc_RNA (1)...(19): siRNA sense strand
gaucgucaccacucccuuu

SEQ ID NO: 911718 - RNA, 19 nt, Homo sapiens
  misc_RNA (1)...(19): siRNA sense strand
gaaacaaccacagcuuuag

SEQ ID NO: 911719 - RNA, 19 nt, Homo sapiens
  misc_RNA (1)...(19): siRNA sense strand
ggacgagagcucagguuug

SEQ ID NO: 911720 - RNA, 19 nt, Homo sapiens
  misc_RNA (1)...(19): siRNA sense strand
uagcccaucugcugucauu

SEQ ID NO: 911721 - RNA, 19 nt, Homo sapiens
  misc_RNA (1)...(19): siRNA sense strand
ggaauaccuuuagucuuca

SEQ ID NO: 911722 - RNA, 19 nt, Homo sapiens
  misc_RNA (1)...(19): siRNA sense strand
caaaugggaggaagugaug

SEQ ID NO: 911723 - RNA, 19 nt, Homo sapiens
  misc_RNA (1)...(19): siRNA sense strand
gaaaauaaccugcacuucu

SEQ ID NO: 911724 - RNA, 19 nt, Homo sapiens
  misc_RNA (1)...(19): siRNA sense strand
uuaaagcucucagugaugu

SEQ ID NO: 911725 - RNA, 19 nt, Homo sapiens
  misc_RNA (1)...(19): siRNA sense strand
gaagguccgcgaaguguuc

SEQ ID NO: 911726 - RNA, 19 nt, Homo sapiens
  misc_RNA (1)...(19): siRNA sense strand
gcacagauggucuuugcau

SEQ ID NO: 911727 - RNA, 19 nt, Homo sapiens
  misc_RNA (1)...(19): siRNA sense strand
cagaaucccagcuugauga

SEQ ID NO: 911728 - RNA, 19 nt, Homo sapiens
  misc_RNA (1)...(19): siRNA sense strand
guucugagcauuggaauau

SEQ ID NO: 911729 - RNA, 19 nt, Homo sapiens
  misc_RNA (1)...(19): siRNA sense strand
acaaugcaucccagaaaua

SEQ ID NO: 911730 - RNA, 19 nt, Homo sapiens
  misc_RNA (1)...(19): siRNA sense strand
gcagauguuagcacagaaa

SEQ ID NO: 911731 - RNA, 19 nt, Homo sapiens
  misc_RNA (1)...(19): siRNA sense strand
gcaaaugggaggaagugau

SEQ ID NO: 911732 - RNA, 19 nt, Homo sapiens
  misc_RNA (1)...(19): siRNA sense strand
gguagaggauggcagaaac

SEQ ID NO: 911733 - RNA, 19 nt, Homo sapiens
  misc_RNA (1)...(19): siRNA sense strand
ugaugucaguggaagauga

SEQ ID NO: 911734 - RNA, 19 nt, Homo sapiens
  misc_RNA (1)...(19): siRNA sense strand
aaacaguccgucaagguaa

SEQ ID NO: 911735 - RNA, 19 nt, Homo sapiens
  misc_RNA (1)...(19): siRNA sense strand
gcaggacccucuggacaag

SEQ ID NO: 911736 - RNA, 19 nt, Homo sapiens
  misc_RNA (1)...(19): siRNA sense strand
uaucuuauuucgcuacaca

SEQ ID NO: 911737 - RNA, 19 nt, Homo sapiens
  misc_RNA (1)...(19): siRNA sense strand
gcaaggacuggcagauguu

SEQ ID NO: 911738 - RNA, 19 nt, Homo sapiens
  misc_RNA (1)...(19): siRNA sense strand
gcucaaaggccaugaacag

SEQ ID NO: 911739 - RNA, 19 nt, Homo sapiens
  misc_RNA (1)...(19): siRNA sense strand
aggaagugguuucagauga

SEQ ID NO: 911740 - RNA, 19 nt, Homo sapiens
  misc_RNA (1)...(19): siRNA sense strand
caauaccccuugugcauuu

SEQ ID NO: 911741 - RNA, 19 nt, Homo sapiens
  misc_RNA (1)...(19): siRNA sense strand
agaacgagcacgucucuga

SEQ ID NO: 911742 - RNA, 19 nt, Homo sapiens
  misc_RNA (1)...(19): siRNA sense strand
cagcaucaacaggaauuua

SEQ ID NO: 911743 - RNA, 19 nt, Homo sapiens
  misc_RNA (1)...(19): siRNA sense strand
cugggacacugccucauuu

SEQ ID NO: 911744 - RNA, 19 nt, Homo sapiens
  misc_RNA (1)...(19): siRNA sense strand
ggacacugccucauuucau

SEQ ID NO: 911745 - RNA, 19 nt, Homo sapiens
  misc_RNA (1)...(19): siRNA sense strand
caccagggcugaccauaac

SEQ ID NO: 911746 - RNA, 19 nt, Homo sapiens
  misc_RNA (1)...(19): siRNA sense strand
ugaacaagacccacaagga

SEQ ID NO: 911747 - RNA, 19 nt, Homo sapiens
  misc_RNA (1)...(19): siRNA sense strand
gaaugucagugcagaaaau

SEQ ID NO: 911748 - RNA, 19 nt, Homo sapiens
  misc_RNA (1)...(19): siRNA sense strand
caaggacuggcagauguua

SEQ ID NO: 911749 - RNA, 19 nt, Homo sapiens
  misc_RNA (1)...(19): siRNA sense strand
gauuugugcuacauuugau

SEQ ID NO: 911750 - RNA, 19 nt, Homo sapiens
  misc_RNA (1)...(19): siRNA sense strand
ccuagagagugaacgagaa

SEQ ID NO: 911751 - RNA, 19 nt, Homo sapiens
  misc_RNA (1)...(19): siRNA sense strand
agaauucuugggagauuua

SEQ ID NO: 911752 - RNA, 19 nt, Homo sapiens
  misc_RNA (1)...(19): siRNA sense strand
cagauauucuucaaaugca

SEQ ID NO: 911753 - RNA, 19 nt, Homo sapiens
  misc_RNA (1)...(19): siRNA sense strand
uacaaugcaucccagaaau

SEQ ID NO: 911754 - RNA, 19 nt, Homo sapiens
  misc_RNA (1)...(19): siRNA sense strand
guccagagugugaacauuu

SEQ ID NO: 911755 - RNA, 19 nt, Homo sapiens
  misc_RNA (1)...(19): siRNA sense strand
gaaauaaaaccccaaagca

SEQ ID NO: 911756 - RNA, 19 nt, Homo sapiens
  misc_RNA (1)...(19): siRNA sense strand
ugaacaagacgagaacauu

SEQ ID NO: 911757 - RNA, 19 nt, Homo sapiens
  misc_RNA (1)...(19): siRNA sense strand
agauuucuguccuugauau

SEQ ID NO: 911758 - RNA, 19 nt, Homo sapiens
  misc_RNA (1)...(19): siRNA sense strand
caacugaagguggcgguuu

SEQ ID NO: 911759 - RNA, 19 nt, Homo sapiens
  misc_RNA (1)...(19): siRNA sense strand
ccagagcucguucaugguu

SEQ ID NO: 911760 - RNA, 19 nt, Homo sapiens
  misc_RNA (1)...(19): siRNA sense strand
gggaaugucagugcagaaa

SEQ ID NO: 911761 - RNA, 19 nt, Homo sapiens
  misc_RNA (1)...(19): siRNA sense strand
ggaagugaugucaguggaa

SEQ ID NO: 911762 - RNA, 19 nt, Homo sapiens
  misc_RNA (1)...(19): siRNA sense strand
uggcagauguuagcacaga

SEQ ID NO: 911763 - RNA, 19 nt, Homo sapiens
  misc_RNA (1)...(19): siRNA sense strand
agacagcggauuugugcua

SEQ ID NO: 911764 - RNA, 19 nt, Homo sapiens
  misc_RNA (1)...(19): siRNA sense strand
ccuuuagucuucagauuuc

SEQ ID NO: 911765 - RNA, 19 nt, Homo sapiens
  misc_RNA (1)...(19): siRNA sense strand
gauccugguguuaguuaaa

SEQ ID NO: 911766 - RNA, 19 nt, Homo sapiens
  misc_RNA (1)...(19): siRNA sense strand
ccuguaacucccuggauua

SEQ ID NO: 911767 - RNA, 19 nt, Homo sapiens
  misc_RNA (1)...(19): siRNA sense strand
ggaagguggugaaaguguu

SEQ ID NO: 911768 - RNA, 19 nt, Homo sapiens
  misc_RNA (1)...(19): siRNA sense strand
ucacggaggugccaaacau

SEQ ID NO: 911769 - RNA, 19 nt, Homo sapiens
  misc_RNA (1)...(19): siRNA sense strand
gaagguggugaaaguguuu

SEQ ID NO: 911770 - RNA, 19 nt, Homo sapiens
  misc_RNA (1)...(19): siRNA sense strand
gcuagaggccagucccaaa

SEQ ID NO: 911771 - RNA, 19 nt, Homo sapiens
  misc_RNA (1)...(19): siRNA sense strand
gcaacacggcacugcacua

SEQ ID NO: 911772 - RNA, 19 nt, Homo sapiens
  misc_RNA (1)...(19): siRNA sense strand
gcaucuggcugcccucaac

SEQ ID NO: 911773 - RNA, 19 nt, Homo sapiens
  misc_RNA (1)...(19): siRNA sense strand
ccacauccgccucguguuc

SEQ ID NO: 911774 - RNA, 19 nt, Homo sapiens
  misc_RNA (1)...(19): siRNA sense strand
ucgggaagguggugaaagu

SEQ ID NO: 911775 - RNA, 19 nt, Homo sapiens
  misc_RNA (1)...(19): siRNA sense strand
cgcacgaccugcugcugua

SEQ ID NO: 911776 - RNA, 19 nt, Homo sapiens
  misc_RNA (1)...(19): siRNA sense strand
gaggccagucccaaaguuu

SEQ ID NO: 911777 - RNA, 19 nt, Homo sapiens
  misc_RNA (1)...(19): siRNA sense strand
gacgggaaccugcguguag

SEQ ID NO: 911778 - RNA, 19 nt, Homo sapiens
  misc_RNA (1)...(19): siRNA sense strand
caggaccgcucugcaagug

SEQ ID NO: 911779 - RNA, 19 nt, Homo sapiens
  misc_RNA (1)...(19): siRNA sense strand
gacgcugggugcaguguca

SEQ ID NO: 911780 - RNA, 19 nt, Homo sapiens
  misc_RNA (1)...(19): siRNA sense strand
ucaccaagcaccacuccuu

SEQ ID NO: 911781 - RNA, 19 nt, Homo sapiens
  misc_RNA (1)...(19): siRNA sense strand
gcaccaugccucccucaag

SEQ ID NO: 911782 - RNA, 19 nt, Homo sapiens
  misc_RNA (1)...(19): siRNA sense strand
ugauacggcugcugcuaca

SEQ ID NO: 911783 - RNA, 19 nt, Homo sapiens
  misc_RNA (1)...(19): siRNA sense strand
ccaccaacagccaggguuu

SEQ ID NO: 911784 - RNA, 19 nt, Homo sapiens
  misc_RNA (1)...(19): siRNA sense strand
guacgacaacgcccagauc

SEQ ID NO: 911785 - RNA, 19 nt, Homo sapiens
  misc_RNA (1)...(19): siRNA sense strand
agaggccagucccaaaguu

SEQ ID NO: 911786 - RNA, 19 nt, Homo sapiens
  misc_RNA (1)...(19): siRNA sense strand
gggaagguggugaaagugu

SEQ ID NO: 911787 - RNA, 19 nt, Homo sapiens
  misc_RNA (1)...(19): siRNA sense strand
ccaggauggcggaguuuau

SEQ ID NO: 911788 - RNA, 19 nt, Homo sapiens
  misc_RNA (1)...(19): siRNA sense strand
gccagguggucgucagcaa

SEQ ID NO: 911789 - RNA, 19 nt, Homo sapiens
  misc_RNA (1)...(19): siRNA sense strand
caacacggcacugcacuac

SEQ ID NO: 911790 - RNA, 19 nt, Homo sapiens
  misc_RNA (1)...(19): siRNA sense strand
gugugugccuggacuacga

SEQ ID NO: 911791 - RNA, 19 nt, Homo sapiens
  misc_RNA (1)...(19): siRNA sense strand
ggaggugccaaacaucgau

SEQ ID NO: 911792 - RNA, 19 nt, Homo sapiens
  misc_RNA (1)...(19): siRNA sense strand
cgaguggacggacgacaug

SEQ ID NO: 911793 - RNA, 19 nt, Homo sapiens
  misc_RNA (1)...(19): siRNA sense strand
caucggcgaccuugacaca

SEQ ID NO: 911794 - RNA, 19 nt, Homo sapiens
  misc_RNA (1)...(19): siRNA sense strand
gagaacaaaagcucacuga

SEQ ID NO: 911795 - RNA, 19 nt, Homo sapiens
  misc_RNA (1)...(19): siRNA sense strand
gcgcuagcugugagaaaga

SEQ ID NO: 911796 - RNA, 19 nt, Homo sapiens
  misc_RNA (1)...(19): siRNA sense strand
uggcugcccucaacaacca

SEQ ID NO: 911797 - RNA, 19 nt, Homo sapiens
  misc_RNA (1)...(19): siRNA sense strand
gguggucgucagcaagaaa

SEQ ID NO: 911798 - RNA, 19 nt, Homo sapiens
  misc_RNA (1)...(19): siRNA sense strand
caucaugggugucaacgua

SEQ ID NO: 911799 - RNA, 19 nt, Homo sapiens
  misc_RNA (1)...(19): siRNA sense strand
gaagggaccuccaguucug

SEQ ID NO: 911800 - RNA, 19 nt, Homo sapiens
  misc_RNA (1)...(19): siRNA sense strand
ccaaagaggccuacugcua

SEQ ID NO: 911801 - RNA, 19 nt, Homo sapiens
  misc_RNA (1)...(19): siRNA sense strand
uaacagcagucucauuaag

SEQ ID NO: 911802 - RNA, 19 nt, Homo sapiens
  misc_RNA (1)...(19): siRNA sense strand
cgagaacccugagaucuug

SEQ ID NO: 911803 - RNA, 19 nt, Homo sapiens
  misc_RNA (1)...(19): siRNA sense strand
acuaacagcagucucauua

SEQ ID NO: 911804 - RNA, 19 nt, Homo sapiens
  misc_RNA (1)...(19): siRNA sense strand
caaaguggccggagacauc

SEQ ID NO: 911805 - RNA, 19 nt, Homo sapiens
  misc_RNA (1)...(19): siRNA sense strand
ggacgcgguugaccuagug

SEQ ID NO: 911806 - RNA, 19 nt, Homo sapiens
  misc_RNA (1)...(19): siRNA sense strand
cugcuaagcugcugacugu

SEQ ID NO: 911807 - RNA, 19 nt, Homo sapiens
  misc_RNA (1)...(19): siRNA sense strand
ccggagacaucuucaagga

SEQ ID NO: 911808 - RNA, 19 nt, Homo sapiens
  misc_RNA (1)...(19): siRNA sense strand
ugacgaagccgcucacaca

SEQ ID NO: 911809 - RNA, 19 nt, Homo sapiens
  misc_RNA (1)...(19): siRNA sense strand
cagcuggacuccgacauga

SEQ ID NO: 911810 - RNA, 19 nt, Homo sapiens
  misc_RNA (1)...(19): siRNA sense strand
ccacaggcaacgccacuaa

SEQ ID NO: 911811 - RNA, 19 nt, Homo sapiens
  misc_RNA (1)...(19): siRNA sense strand
ucaagcugcucaacucugu

SEQ ID NO: 911812 - RNA, 19 nt, Homo sapiens
  misc_RNA (1)...(19): siRNA sense strand
gaaaagacucugaggaaug

SEQ ID NO: 911813 - RNA, 19 nt, Homo sapiens
  misc_RNA (1)...(19): siRNA sense strand
ggaaaagacucugaggaau

SEQ ID NO: 911814 - RNA, 19 nt, Homo sapiens
  misc_RNA (1)...(19): siRNA sense strand
aaaagacucugaggaauga

SEQ ID NO: 911815 - RNA, 19 nt, Homo sapiens
  misc_RNA (1)...(19): siRNA sense strand
cgaaggccaccaccaaaga

SEQ ID NO: 911816 - RNA, 19 nt, Homo sapiens
  misc_RNA (1)...(19): siRNA sense strand
gcagcuggacuccgacaug

SEQ ID NO: 911817 - RNA, 19 nt, Homo sapiens
  misc_RNA (1)...(19): siRNA sense strand
gcagagcagcagcgucuuc

SEQ ID NO: 911818 - RNA, 19 nt, Homo sapiens
  misc_RNA (1)...(19): siRNA sense strand
acagcagucucauuaagca

SEQ ID NO: 911819 - RNA, 19 nt, Homo sapiens
  misc_RNA (1)...(19): siRNA sense strand
ugaggacagucaucaaugc

SEQ ID NO: 911820 - RNA, 19 nt, Homo sapiens
  misc_RNA (1)...(19): siRNA sense strand
caguucugcuccagucuug

SEQ ID NO: 911821 - RNA, 19 nt, Homo sapiens
  misc_RNA (1)...(19): siRNA sense strand
gagacaucuucaaggacaa

SEQ ID NO: 911822 - RNA, 19 nt, Homo sapiens
  misc_RNA (1)...(19): siRNA sense strand
gaaggccaccaccaaagag

SEQ ID NO: 911823 - RNA, 19 nt, Homo sapiens
  misc_RNA (1)...(19): siRNA sense strand
ccucauccacuucuucuuc

SEQ ID NO: 911824 - RNA, 19 nt, Homo sapiens
  misc_RNA (1)...(19): siRNA sense strand
uagucaagcugcucaacuc

SEQ ID NO: 911825 - RNA, 19 nt, Homo sapiens
  misc_RNA (1)...(19): siRNA sense strand
cuaacagcagucucauuaa

SEQ ID NO: 911826 - RNA, 19 nt, Homo sapiens
  misc_RNA (1)...(19): siRNA sense strand
uggcuggacuggucauugg

SEQ ID NO: 911827 - RNA, 19 nt, Homo sapiens
  misc_RNA (1)...(19): siRNA sense strand
ggagaggcuaagugagcua

SEQ ID NO: 911828 - RNA, 19 nt, Homo sapiens
  misc_RNA (1)...(19): siRNA sense strand
gugaggacagucaucaaug

SEQ ID NO: 911829 - RNA, 19 nt, Homo sapiens
  misc_RNA (1)...(19): siRNA sense strand
gcuggacuccgacaugauc

SEQ ID NO: 911830 - RNA, 19 nt, Homo sapiens
  misc_RNA (1)...(19): siRNA sense strand
gccacuaacagcagucuca

SEQ ID NO: 911831 - RNA, 19 nt, Homo sapiens
  misc_RNA (1)...(19): siRNA sense strand
acaacguggugcuguccaa

SEQ ID NO: 911832 - RNA, 19 nt, Homo sapiens
  misc_RNA (1)...(19): siRNA sense strand
gcgguugaccuaguggaaa

SEQ ID NO: 911833 - RNA, 19 nt, Homo sapiens
  misc_RNA (1)...(19): siRNA sense strand
gcuacgagaacccugagau

SEQ ID NO: 911834 - RNA, 19 nt, Homo sapiens
  misc_RNA (1)...(19): siRNA sense strand
ccggcauccugcuguggua

SEQ ID NO: 911835 - RNA, 19 nt, Homo sapiens
  misc_RNA (1)...(19): siRNA sense strand
gcaaaguggccggagacau

SEQ ID NO: 911836 - RNA, 19 nt, Homo sapiens
  misc_RNA (1)...(19): siRNA sense strand
gaucuucaacuggcucaca

SEQ ID NO: 911837 - RNA, 19 nt, Homo sapiens
  misc_RNA (1)...(19): siRNA sense strand
gaauuucagagggcuuuca

SEQ ID NO: 911838 - RNA, 19 nt, Homo sapiens
  misc_RNA (1)...(19): siRNA sense strand
agaaacagcugcaaaauuu

SEQ ID NO: 911839 - RNA, 19 nt, Homo sapiens
  misc_RNA (1)...(19): siRNA sense strand
gcaaaccgcuggucuuucg

SEQ ID NO: 911840 - RNA, 19 nt, Homo sapiens
  misc_RNA (1)...(19): siRNA sense strand
gaagccaccucaaguccuu

SEQ ID NO: 911841 - RNA, 19 nt, Homo sapiens
  misc_RNA (1)...(19): siRNA sense strand
ucacggagcuggccaggau

SEQ ID NO: 911842 - RNA, 19 nt, Homo sapiens
  misc_RNA (1)...(19): siRNA sense strand
uuaagaagauugaggaaca

SEQ ID NO: 911843 - RNA, 19 nt, Homo sapiens
  misc_RNA (1)...(19): siRNA sense strand
ggguauggaucgauggauu

SEQ ID NO: 911844 - RNA, 19 nt, Homo sapiens
  misc_RNA (1)...(19): siRNA sense strand
gguauggaucgauggauua

SEQ ID NO: 911845 - RNA, 19 nt, Homo sapiens
  misc_RNA (1)...(19): siRNA sense strand
gggaagauuuuguaccaua

SEQ ID NO: 911846 - RNA, 19 nt, Homo sapiens
  misc_RNA (1)...(19): siRNA sense strand
ggucagcccucugugcaau

SEQ ID NO: 911847 - RNA, 19 nt, Homo sapiens
  misc_RNA (1)...(19): siRNA sense strand
cgaccaggccuaugacuuc

SEQ ID NO: 911848 - RNA, 19 nt, Homo sapiens
  misc_RNA (1)...(19): siRNA sense strand
gcaauuucaacaucauaga

SEQ ID NO: 911849 - RNA, 19 nt, Homo sapiens
  misc_RNA (1)...(19): siRNA sense strand
ucaacaucauagagucuuu

SEQ ID NO: 911850 - RNA, 19 nt, Homo sapiens
  misc_RNA (1)...(19): siRNA sense strand
gauccuggucuacgacauu

SEQ ID NO: 911851 - RNA, 19 nt, Homo sapiens
  misc_RNA (1)...(19): siRNA sense strand
gaucgauggauuaagaaga

SEQ ID NO: 911852 - RNA, 19 nt, Homo sapiens
  misc_RNA (1)...(19): siRNA sense strand
cgagcaagguacugagcuu

SEQ ID NO: 911853 - RNA, 19 nt, Homo sapiens
  misc_RNA (1)...(19): siRNA sense strand
ucagcccucugugcaauuu

SEQ ID NO: 911854 - RNA, 19 nt, Homo sapiens
  misc_RNA (1)...(19): siRNA sense strand
gccuacaucuggcauucaa

SEQ ID NO: 911855 - RNA, 19 nt, Homo sapiens
  misc_RNA (1)...(19): siRNA sense strand
auggaucgauggauuaaga

SEQ ID NO: 911856 - RNA, 19 nt, Homo sapiens
  misc_RNA (1)...(19): siRNA sense strand
gagugauccuggucuacga

SEQ ID NO: 911857 - RNA, 19 nt, Homo sapiens
  misc_RNA (1)...(19): siRNA sense strand
uaagaagccaccucaaguc

SEQ ID NO: 911858 - RNA, 19 nt, Homo sapiens
  misc_RNA (1)...(19): siRNA sense strand
ggaagauuuuguaccauau

SEQ ID NO: 911859 - RNA, 19 nt, Homo sapiens
  misc_RNA (1)...(19): siRNA sense strand
uuaagaagccaccucaagu

SEQ ID NO: 911860 - RNA, 19 nt, Homo sapiens
  misc_RNA (1)...(19): siRNA sense strand
uaagaagauugaggaacau

SEQ ID NO: 911861 - RNA, 19 nt, Homo sapiens
  misc_RNA (1)...(19): siRNA sense strand
guauggaucgauggauuaa

SEQ ID NO: 911862 - RNA, 19 nt, Homo sapiens
  misc_RNA (1)...(19): siRNA sense strand
gcuggucuuucgaggguau

SEQ ID NO: 911863 - RNA, 19 nt, Homo sapiens
  misc_RNA (1)...(19): siRNA sense strand
caccagcuccacucacaaa

SEQ ID NO: 911864 - RNA, 19 nt, Homo sapiens
  misc_RNA (1)...(19): siRNA sense strand
cuacaucuggcauucaaga

SEQ ID NO: 911865 - RNA, 19 nt, Homo sapiens
  misc_RNA (1)...(19): siRNA sense strand
gauggauuaagaagauuga

SEQ ID NO: 911866 - RNA, 19 nt, Homo sapiens
  misc_RNA (1)...(19): siRNA sense strand
ccuaugacuuccugcucaa

SEQ ID NO: 911867 - RNA, 19 nt, Homo sapiens
  misc_RNA (1)...(19): siRNA sense strand
caccagaaacagcugcaaa

SEQ ID NO: 911868 - RNA, 19 nt, Homo sapiens
  misc_RNA (1)...(19): siRNA sense strand
gugcaauuucaacaucaua

SEQ ID NO: 911869 - RNA, 19 nt, Homo sapiens
  misc_RNA (1)...(19): siRNA sense strand
gauuaagaagauugaggaa

SEQ ID NO: 911870 - RNA, 19 nt, Homo sapiens
  misc_RNA (1)...(19): siRNA sense strand
gacguaggcaagagugaga

SEQ ID NO: 911871 - RNA, 19 nt, Homo sapiens
  misc_RNA (1)...(19): siRNA sense strand
cagaaacagcugcaaaauu

SEQ ID NO: 911872 - RNA, 19 nt, Homo sapiens
  misc_RNA (1)...(19): siRNA sense strand
gggcagggaagauuuugua

SEQ ID NO: 911873 - RNA, 19 nt, Homo sapiens
  misc_RNA (1)...(19): siRNA sense strand
ucugugcaauuucaacauc

SEQ ID NO: 911874 - RNA, 19 nt, Homo sapiens
  misc_RNA (1)...(19): siRNA sense strand
uugcaaaccgcuggucuuu

SEQ ID NO: 911875 - RNA, 19 nt, Homo sapiens
  misc_RNA (1)...(19): siRNA sense strand
ggagcuggccaggauagug

SEQ ID NO: 911876 - RNA, 19 nt, Homo sapiens
  misc_RNA (1)...(19): siRNA sense strand
caacaucauagagucuuuc

SEQ ID NO: 911877 - RNA, 19 nt, Homo sapiens
  misc_RNA (1)...(19): siRNA sense strand
ggaaugagauccuacuacu

SEQ ID NO: 911878 - RNA, 19 nt, Homo sapiens
  misc_RNA (1)...(19): siRNA sense strand
auucaugccuguagguuua

SEQ ID NO: 911879 - RNA, 19 nt, Homo sapiens
  misc_RNA (1)...(19): siRNA sense strand
acacagcacugguuguuuc

SEQ ID NO: 911880 - RNA, 19 nt, Homo sapiens
  misc_RNA (1)...(19): siRNA sense strand
gaaugagauccuacuacua

SEQ ID NO: 911881 - RNA, 19 nt, Homo sapiens
  misc_RNA (1)...(19): siRNA sense strand
aaugagauccuacuacuau

SEQ ID NO: 911882 - RNA, 19 nt, Homo sapiens
  misc_RNA (1)...(19): siRNA sense strand
ugggaucguuggcuaugua

SEQ ID NO: 911883 - RNA, 19 nt, Homo sapiens
  misc_RNA (1)...(19): siRNA sense strand
gugcuuaccagcuguauca

SEQ ID NO: 911884 - RNA, 19 nt, Homo sapiens
  misc_RNA (1)...(19): siRNA sense strand
cauuagugccuuugcauug

SEQ ID NO: 911885 - RNA, 19 nt, Homo sapiens
  misc_RNA (1)...(19): siRNA sense strand
gccuguagguuuaauugca

SEQ ID NO: 911886 - RNA, 19 nt, Homo sapiens
  misc_RNA (1)...(19): siRNA sense strand
gauccuacuacuauggaaa

SEQ ID NO: 911887 - RNA, 19 nt, Homo sapiens
  misc_RNA (1)...(19): siRNA sense strand
cuacacagcacugguuguu

SEQ ID NO: 911888 - RNA, 19 nt, Homo sapiens
  misc_RNA (1)...(19): siRNA sense strand
cuacuacuauggaaaauuc

SEQ ID NO: 911889 - RNA, 19 nt, Homo sapiens
  misc_RNA (1)...(19): siRNA sense strand
caaggaacguuugggguuu

SEQ ID NO: 911890 - RNA, 19 nt, Homo sapiens
  misc_RNA (1)...(19): siRNA sense strand
gagauccuacuacuaugga

SEQ ID NO: 911891 - RNA, 19 nt, Homo sapiens
  misc_RNA (1)...(19): siRNA sense strand
gaucguuggcuauguaaaa

SEQ ID NO: 911892 - RNA, 19 nt, Homo sapiens
  misc_RNA (1)...(19): siRNA sense strand
uaauugcaggugccaguuu

SEQ ID NO: 911893 - RNA, 19 nt, Homo sapiens
  misc_RNA (1)...(19): siRNA sense strand
cuacaucuguuacuuuugu

SEQ ID NO: 911894 - RNA, 19 nt, Homo sapiens
  misc_RNA (1)...(19): siRNA sense strand
ccgcuacaucuguuacuuu

SEQ ID NO: 911895 - RNA, 19 nt, Homo sapiens
  misc_RNA (1)...(19): siRNA sense strand
caggauccaaggaacguuu

SEQ ID NO: 911896 - RNA, 19 nt, Homo sapiens
  misc_RNA (1)...(19): siRNA sense strand
aauugcaggugccaguuug

SEQ ID NO: 911897 - RNA, 19 nt, Homo sapiens
  misc_RNA (1)...(19): siRNA sense strand
gggaaugagauccuacuac

SEQ ID NO: 911898 - RNA, 19 nt, Homo sapiens
  misc_RNA (1)...(19): siRNA sense strand
ccauuagugccuuugcauu

SEQ ID NO: 911899 - RNA, 19 nt, Homo sapiens
  misc_RNA (1)...(19): siRNA sense strand
gggaucguuggcuauguaa

SEQ ID NO: 911900 - RNA, 19 nt, Homo sapiens
  misc_RNA (1)...(19): siRNA sense strand
gguguuaugggaaugagau

SEQ ID NO: 911901 - RNA, 19 nt, Homo sapiens
  misc_RNA (1)...(19): siRNA sense strand
gccgcuacaucuguuacuu

SEQ ID NO: 911902 - RNA, 19 nt, Homo sapiens
  misc_RNA (1)...(19): siRNA sense strand
ggaaaauucaugccuguag

SEQ ID NO: 911903 - RNA, 19 nt, Homo sapiens
  misc_RNA (1)...(19): siRNA sense strand
gaagaaagcuggacauuua

SEQ ID NO: 911904 - RNA, 19 nt, Homo sapiens
  misc_RNA (1)...(19): siRNA sense strand
gcaaauagaugacauaaug

SEQ ID NO: 911905 - RNA, 19 nt, Homo sapiens
  misc_RNA (1)...(19): siRNA sense strand
gaagaaaugccucagcuua

SEQ ID NO: 911906 - RNA, 19 nt, Homo sapiens
  misc_RNA (1)...(19): siRNA sense strand
gaagaagacuggaaaugug

SEQ ID NO: 911907 - RNA, 19 nt, Homo sapiens
  misc_RNA (1)...(19): siRNA sense strand
gaacauuucuggugagaca

SEQ ID NO: 911908 - RNA, 19 nt, Homo sapiens
  misc_RNA (1)...(19): siRNA sense strand
gaaggaagcagaauuugaa

SEQ ID NO: 911909 - RNA, 19 nt, Homo sapiens
  misc_RNA (1)...(19): siRNA sense strand
gaagaucccaaagaaauua

SEQ ID NO: 911910 - RNA, 19 nt, Homo sapiens
  misc_RNA (1)...(19): siRNA sense strand
gcagagauuucuucaaaca

SEQ ID NO: 911911 - RNA, 19 nt, Homo sapiens
  misc_RNA (1)...(19): siRNA sense strand
caacuccgcucacccauga

SEQ ID NO: 911912 - RNA, 19 nt, Homo sapiens
  misc_RNA (1)...(19): siRNA sense strand
agaagaagaucacaaaugu

SEQ ID NO: 911913 - RNA, 19 nt, Homo sapiens
  misc_RNA (1)...(19): siRNA sense strand
gagcaguacuccagaaaug

SEQ ID NO: 911914 - RNA, 19 nt, Homo sapiens
  misc_RNA (1)...(19): siRNA sense strand
ccgcaaagcuggaugaaga

SEQ ID NO: 911915 - RNA, 19 nt, Homo sapiens
  misc_RNA (1)...(19): siRNA sense strand
gaaaggcaguaauagaaau

SEQ ID NO: 911916 - RNA, 19 nt, Homo sapiens
  misc_RNA (1)...(19): siRNA sense strand
gccgagauaucuucaagua

SEQ ID NO: 911917 - RNA, 19 nt, Homo sapiens
  misc_RNA (1)...(19): siRNA sense strand
ggaagaaucaaagcuaaua

SEQ ID NO: 911918 - RNA, 19 nt, Homo sapiens
  misc_RNA (1)...(19): siRNA sense strand
ccaaagaaauuagaaagga

SEQ ID NO: 911919 - RNA, 19 nt, Homo sapiens
  misc_RNA (1)...(19): siRNA sense strand
aaagcuggaugaagaauuu

SEQ ID NO: 911920 - RNA, 19 nt, Homo sapiens
  misc_RNA (1)...(19): siRNA sense strand
gaaaggaagaguuagaaga

SEQ ID NO: 911921 - RNA, 19 nt, Homo sapiens
  misc_RNA (1)...(19): siRNA sense strand
caaacaagccugugaaauc

SEQ ID NO: 911922 - RNA, 19 nt, Homo sapiens
  misc_RNA (1)...(19): siRNA sense strand
ucaacagccucccucaaua

SEQ ID NO: 911923 - RNA, 19 nt, Homo sapiens
  misc_RNA (1)...(19): siRNA sense strand
gcaagaaguucaagaagac

SEQ ID NO: 911924 - RNA, 19 nt, Homo sapiens
  misc_RNA (1)...(19): siRNA sense strand
gaagaggaggauauugaua

SEQ ID NO: 911925 - RNA, 19 nt, Homo sapiens
  misc_RNA (1)...(19): siRNA sense strand
ggaagaagaggaagacgaa

SEQ ID NO: 911926 - RNA, 19 nt, Homo sapiens
  misc_RNA (1)...(19): siRNA sense strand
caacaacgcaagaaccuuu

SEQ ID NO: 911927 - RNA, 19 nt, Homo sapiens
  misc_RNA (1)...(19): siRNA sense strand
uugcagagauuucuucaaa

SEQ ID NO: 911928 - RNA, 19 nt, Homo sapiens
  misc_RNA (1)...(19): siRNA sense strand
ccauggagccuguucauaa

SEQ ID NO: 911929 - RNA, 19 nt, Homo sapiens
  misc_RNA (1)...(19): siRNA sense strand
aaagugaaaucaagagaga

SEQ ID NO: 911930 - RNA, 19 nt, Homo sapiens
  misc_RNA (1)...(19): siRNA sense strand
gcaagaagguccgcacauc

SEQ ID NO: 911931 - RNA, 19 nt, Homo sapiens
  misc_RNA (1)...(19): siRNA sense strand
ggaaauguguccucagaac

SEQ ID NO: 911932 - RNA, 19 nt, Homo sapiens
  misc_RNA (1)...(19): siRNA sense strand
gacaaaugcucacacaaca

SEQ ID NO: 911933 - RNA, 19 nt, Homo sapiens
  misc_RNA (1)...(19): siRNA sense strand
gccaguagcaagauaauaa

SEQ ID NO: 911934 - RNA, 19 nt, Homo sapiens
  misc_RNA (1)...(19): siRNA sense strand
gaagaagaucacaaaugua

SEQ ID NO: 911935 - RNA, 19 nt, Homo sapiens
  misc_RNA (1)...(19): siRNA sense strand
gucaagaccuccagauuuc

SEQ ID NO: 911936 - RNA, 19 nt, Homo sapiens
  misc_RNA (1)...(19): siRNA sense strand
acacagacauggccaagga

SEQ ID NO: 911937 - RNA, 19 nt, Homo sapiens
  misc_RNA (1)...(19): siRNA sense strand
ggaagaucccaaagaaauu

SEQ ID NO: 911938 - RNA, 19 nt, Homo sapiens
  misc_RNA (1)...(19): siRNA sense strand
aaacuccucugaucaugaa

SEQ ID NO: 911939 - RNA, 19 nt, Homo sapiens
  misc_RNA (1)...(19): siRNA sense strand
aauggaagaucccaaagaa

SEQ ID NO: 911940 - RNA, 19 nt, Homo sapiens
  misc_RNA (1)...(19): siRNA sense strand
aaacgaaagugucuucagu

SEQ ID NO: 911941 - RNA, 19 nt, Homo sapiens
  misc_RNA (1)...(19): siRNA sense strand
ccaagauacuagcugauug

SEQ ID NO: 911942 - RNA, 19 nt, Homo sapiens
  misc_RNA (1)...(19): siRNA sense strand
caugaaggguguuggaaug

SEQ ID NO: 911943 - RNA, 19 nt, Homo sapiens
  misc_RNA (1)...(19): siRNA sense strand
cgucauauauaccauugaa

SEQ ID NO: 911944 - RNA, 19 nt, Homo sapiens
  misc_RNA (1)...(19): siRNA sense strand
gaaagcaaagacugaagaa

SEQ ID NO: 911945 - RNA, 19 nt, Homo sapiens
  misc_RNA (1)...(19): siRNA sense strand
gcagaaauacacagacaug

SEQ ID NO: 911946 - RNA, 19 nt, Homo sapiens
  misc_RNA (1)...(19): siRNA sense strand
caaaugggaggccugagua

SEQ ID NO: 911947 - RNA, 19 nt, Homo sapiens
  misc_RNA (1)...(19): siRNA sense strand
gagacagacugcaaugaca

SEQ ID NO: 911948 - RNA, 19 nt, Homo sapiens
  misc_RNA (1)...(19): siRNA sense strand
ggagcaagaaguucaagaa

SEQ ID NO: 911949 - RNA, 19 nt, Homo sapiens
  misc_RNA (1)...(19): siRNA sense strand
ggaaacuccucugaucaug

SEQ ID NO: 911950 - RNA, 19 nt, Homo sapiens
  misc_RNA (1)...(19): siRNA sense strand
cgagaggucuugcaaaggu

SEQ ID NO: 911951 - RNA, 19 nt, Homo sapiens
  misc_RNA (1)...(19): siRNA sense strand
gggcuguucuugauccaaa

SEQ ID NO: 911952 - RNA, 19 nt, Homo sapiens
  misc_RNA (1)...(19): siRNA sense strand
gcaaggaaaaccaagauua

SEQ ID NO: 911953 - RNA, 19 nt, Homo sapiens
  misc_RNA (1)...(19): siRNA sense strand
caacagccucccucaauau

SEQ ID NO: 911954 - RNA, 19 nt, Homo sapiens
  misc_RNA (1)...(19): siRNA sense strand
gaaaucaagagagaagaaa

SEQ ID NO: 911955 - RNA, 19 nt, Homo sapiens
  misc_RNA (1)...(19): siRNA sense strand
cagcuuaacuuuggaaugg

SEQ ID NO: 911956 - RNA, 19 nt, Homo sapiens
  misc_RNA (1)...(19): siRNA sense strand
cgucagaagucaccauugu

SEQ ID NO: 911957 - RNA, 19 nt, Homo sapiens
  misc_RNA (1)...(19): siRNA sense strand
gaaacuccucugaucauga

SEQ ID NO: 911958 - RNA, 19 nt, Homo sapiens
  misc_RNA (1)...(19): siRNA sense strand
ucagaagucaccauuguuu

SEQ ID NO: 911959 - RNA, 19 nt, Homo sapiens
  misc_RNA (1)...(19): siRNA sense strand
gaagaucacaaauguaguc

SEQ ID NO: 911960 - RNA, 19 nt, Homo sapiens
  misc_RNA (1)...(19): siRNA sense strand
aaaggaagaguuagaagaa

SEQ ID NO: 911961 - RNA, 19 nt, Homo sapiens
  misc_RNA (1)...(19): siRNA sense strand
ccgaggugcuaccaagaua

SEQ ID NO: 911962 - RNA, 19 nt, Homo sapiens
  misc_RNA (1)...(19): siRNA sense strand
guagaaaggaucauaugug

SEQ ID NO: 911963 - RNA, 19 nt, Homo sapiens
  misc_RNA (1)...(19): siRNA sense strand
ugaauuacgucagaaguca

SEQ ID NO: 911964 - RNA, 19 nt, Homo sapiens
  misc_RNA (1)...(19): siRNA sense strand
gcaagauguuggugaaacu

SEQ ID NO: 911965 - RNA, 19 nt, Homo sapiens
  misc_RNA (1)...(19): siRNA sense strand
gaaggguguuggaaugaag

SEQ ID NO: 911966 - RNA, 19 nt, Homo sapiens
  misc_RNA (1)...(19): siRNA sense strand
gcauuaaacaagccagaaa

SEQ ID NO: 911967 - RNA, 19 nt, Homo sapiens
  misc_RNA (1)...(19): siRNA sense strand
guuagaagaagaucacaaa

SEQ ID NO: 911968 - RNA, 19 nt, Homo sapiens
  misc_RNA (1)...(19): siRNA sense strand
acagaaggaagcagaauuu

SEQ ID NO: 911969 - RNA, 19 nt, Homo sapiens
  misc_RNA (1)...(19): siRNA sense strand
caaaggaaaagcagaaaua

SEQ ID NO: 911970 - RNA, 19 nt, Homo sapiens
  misc_RNA (1)...(19): siRNA sense strand
caacugagacagacugcaa

SEQ ID NO: 911971 - RNA, 19 nt, Homo sapiens
  misc_RNA (1)...(19): siRNA sense strand
gaucgacauggaaaugaua

SEQ ID NO: 911972 - RNA, 19 nt, Homo sapiens
  misc_RNA (1)...(19): siRNA sense strand
caaaauggaucgacaugga

SEQ ID NO: 911973 - RNA, 19 nt, Homo sapiens
  misc_RNA (1)...(19): siRNA sense strand
gaugacauaauggcuauaa

SEQ ID NO: 911974 - RNA, 19 nt, Homo sapiens
  misc_RNA (1)...(19): siRNA sense strand
aaacuagguuacagaagga

SEQ ID NO: 911975 - RNA, 19 nt, Homo sapiens
  misc_RNA (1)...(19): siRNA sense strand
ggaggauauugauaagguu

SEQ ID NO: 911976 - RNA, 19 nt, Homo sapiens
  misc_RNA (1)...(19): siRNA sense strand
ccaagaaagcaaagacuga

SEQ ID NO: 911977 - RNA, 19 nt, Homo sapiens
  misc_RNA (1)...(19): siRNA sense strand
aagaggaggauauugauaa

SEQ ID NO: 911978 - RNA, 19 nt, Homo sapiens
  misc_RNA (1)...(19): siRNA sense strand
agaaaugccugccgugucu

SEQ ID NO: 911979 - RNA, 19 nt, Homo sapiens
  misc_RNA (1)...(19): siRNA sense strand
aagcaaagacugaagaaau

SEQ ID NO: 911980 - RNA, 19 nt, Homo sapiens
  misc_RNA (1)...(19): siRNA sense strand
gcaguaauagaaauaagga

SEQ ID NO: 911981 - RNA, 19 nt, Homo sapiens
  misc_RNA (1)...(19): siRNA sense strand
ucaagaagacaaagccaaa

SEQ ID NO: 911982 - RNA, 19 nt, Homo sapiens
  misc_RNA (1)...(19): siRNA sense strand
acaaagcagugucaaacau

SEQ ID NO: 911983 - RNA, 19 nt, Homo sapiens
  misc_RNA (1)...(19): siRNA sense strand
agcaaagacugaagaaaug

SEQ ID NO: 911984 - RNA, 19 nt, Homo sapiens
  misc_RNA (1)...(19): siRNA sense strand
uagaugacauaauggcuau

SEQ ID NO: 911985 - RNA, 19 nt, Homo sapiens
  misc_RNA (1)...(19): siRNA sense strand
ucaguggcauccauugcua

SEQ ID NO: 911986 - RNA, 19 nt, Homo sapiens
  misc_RNA (1)...(19): siRNA sense strand
ugaagaaagcuggacauuu

SEQ ID NO: 911987 - RNA, 19 nt, Homo sapiens
  misc_RNA (1)...(19): siRNA sense strand
ggaucgacauggaaaugau

SEQ ID NO: 911988 - RNA, 19 nt, Homo sapiens
  misc_RNA (1)...(19): siRNA sense strand
gaaauuagaaaggaagagu

SEQ ID NO: 911989 - RNA, 19 nt, Homo sapiens
  misc_RNA (1)...(19): siRNA sense strand
gaacaccccaggcuugaua

SEQ ID NO: 911990 - RNA, 19 nt, Homo sapiens
  misc_RNA (1)...(19): siRNA sense strand
caaacaagcaacucuucuu

SEQ ID NO: 911991 - RNA, 19 nt, Homo sapiens
  misc_RNA (1)...(19): siRNA sense strand
gauaaauccacacccaaga

SEQ ID NO: 911992 - RNA, 19 nt, Homo sapiens
  misc_RNA (1)...(19): siRNA sense strand
gauaagguucaacuucuug

SEQ ID NO: 911993 - RNA, 19 nt, Homo sapiens
  misc_RNA (1)...(19): siRNA sense strand
uagaagaagaucacaaaug

SEQ ID NO: 911994 - RNA, 19 nt, Homo sapiens
  misc_RNA (1)...(19): siRNA sense strand
uaaggaucauucagcagaa

SEQ ID NO: 911995 - RNA, 19 nt, Homo sapiens
  misc_RNA (1)...(19): siRNA sense strand
ggaguauaaggaugcauuu

SEQ ID NO: 911996 - RNA, 19 nt, Homo sapiens
  misc_RNA (1)...(19): siRNA sense strand
ggaaaacgaccaaaacgaa

SEQ ID NO: 911997 - RNA, 19 nt, Homo sapiens
  misc_RNA (1)...(19): siRNA sense strand
gcacuaccacccagccuau

SEQ ID NO: 911998 - RNA, 19 nt, Homo sapiens
  misc_RNA (1)...(19): siRNA sense strand
uggaagaucccaaagaaau

SEQ ID NO: 911999 - RNA, 19 nt, Homo sapiens
  misc_RNA (1)...(19): siRNA sense strand
agaauccgaugguggaaga

SEQ ID NO: 912000 - RNA, 19 nt, Homo sapiens
  misc_RNA (1)...(19): siRNA sense strand
guaaaacgcuguggaaagu

SEQ ID NO: 912001 - RNA, 19 nt, Homo sapiens
  misc_RNA (1)...(19): siRNA sense strand
aagaaaugccucagcuuaa

SEQ ID NO: 912002 - RNA, 19 nt, Homo sapiens
  misc_RNA (1)...(19): siRNA sense strand
ggagguacuuuggaugaca

SEQ ID NO: 912003 - RNA, 19 nt, Homo sapiens
  misc_RNA (1)...(19): siRNA sense strand
gcaagauacuguagaguua

SEQ ID NO: 912004 - RNA, 19 nt, Homo sapiens
  misc_RNA (1)...(19): siRNA sense strand
ccacauagcgucauuaaua

SEQ ID NO: 912005 - RNA, 19 nt, Homo sapiens
  misc_RNA (1)...(19): siRNA sense strand
gcacauaggugguacacaa

SEQ ID NO: 912006 - RNA, 19 nt, Homo sapiens
  misc_RNA (1)...(19): siRNA sense strand
gaacauggcuccaauacca

SEQ ID NO: 912007 - RNA, 19 nt, Homo sapiens
  misc_RNA (1)...(19): siRNA sense strand
gaaacuagcuucaucucuu

SEQ ID NO: 912008 - RNA, 19 nt, Homo sapiens
  misc_RNA (1)...(19): siRNA sense strand
gcagcaaacuuucuguuaa

SEQ ID NO: 912009 - RNA, 19 nt, Homo sapiens
  misc_RNA (1)...(19): siRNA sense strand
gacagaagaugaaauagaa

SEQ ID NO: 912010 - RNA, 19 nt, Homo sapiens
  misc_RNA (1)...(19): siRNA sense strand
acaaagaccucauuucuga

SEQ ID NO: 912011 - RNA, 19 nt, Homo sapiens
  misc_RNA (1)...(19): siRNA sense strand
gaacagaacagaaagaaau

SEQ ID NO: 912012 - RNA, 19 nt, Homo sapiens
  misc_RNA (1)...(19): siRNA sense strand
guagauaccuggaugauuc

SEQ ID NO: 912013 - RNA, 19 nt, Homo sapiens
  misc_RNA (1)...(19): siRNA sense strand
gaugggagcuucuaugaga

SEQ ID NO: 912014 - RNA, 19 nt, Homo sapiens
  misc_RNA (1)...(19): siRNA sense strand
gaacguggcucccaucaag

SEQ ID NO: 912015 - RNA, 19 nt, Homo sapiens
  misc_RNA (1)...(19): siRNA sense strand
caguaaaggucuagauaua

SEQ ID NO: 912016 - RNA, 19 nt, Homo sapiens
  misc_RNA (1)...(19): siRNA sense strand
uggaacagcuggaaguuua

SEQ ID NO: 912017 - RNA, 19 nt, Homo sapiens
  misc_RNA (1)...(19): siRNA sense strand
gaagaacaaucauuucgau

SEQ ID NO: 912018 - RNA, 19 nt, Homo sapiens
  misc_RNA (1)...(19): siRNA sense strand
gaacagucgccaaguauuu

SEQ ID NO: 912019 - RNA, 19 nt, Homo sapiens
  misc_RNA (1)...(19): siRNA sense strand
gcagugauguggagcauga

SEQ ID NO: 912020 - RNA, 19 nt, Homo sapiens
  misc_RNA (1)...(19): siRNA sense strand
gaggaaauguugaaagaga

SEQ ID NO: 912021 - RNA, 19 nt, Homo sapiens
  misc_RNA (1)...(19): siRNA sense strand
gaagaaaugccuaacagaa

SEQ ID NO: 912022 - RNA, 19 nt, Homo sapiens
  misc_RNA (1)...(19): siRNA sense strand
caucagcacuguuauaguu

SEQ ID NO: 912023 - RNA, 19 nt, Homo sapiens
  misc_RNA (1)...(19): siRNA sense strand
gcaaagggaaguccacaua

SEQ ID NO: 912024 - RNA, 19 nt, Homo sapiens
  misc_RNA (1)...(19): siRNA sense strand
caaagaaacucagaacguu

SEQ ID NO: 912025 - RNA, 19 nt, Homo sapiens
  misc_RNA (1)...(19): siRNA sense strand
ugacagagguggaagaaga

SEQ ID NO: 912026 - RNA, 19 nt, Homo sapiens
  misc_RNA (1)...(19): siRNA sense strand
gagagucaccgcagauuua

SEQ ID NO: 912027 - RNA, 19 nt, Homo sapiens
  misc_RNA (1)...(19): siRNA sense strand
ggaaauauuugcugaggau

SEQ ID NO: 912028 - RNA, 19 nt, Homo sapiens
  misc_RNA (1)...(19): siRNA sense strand
ggaagaacuugcuaagaga

SEQ ID NO: 912029 - RNA, 19 nt, Homo sapiens
  misc_RNA (1)...(19): siRNA sense strand
gcaaagagaguaaaugaau

SEQ ID NO: 912030 - RNA, 19 nt, Homo sapiens
  misc_RNA (1)...(19): siRNA sense strand
gaggaacagucgccaagua

SEQ ID NO: 912031 - RNA, 19 nt, Homo sapiens
  misc_RNA (1)...(19): siRNA sense strand
gauguuaccucccagcauu

SEQ ID NO: 912032 - RNA, 19 nt, Homo sapiens
  misc_RNA (1)...(19): siRNA sense strand
ggagaugguucgacaguau

SEQ ID NO: 912033 - RNA, 19 nt, Homo sapiens
  misc_RNA (1)...(19): siRNA sense strand
gaagaaacccgaaacaaag

SEQ ID NO: 912034 - RNA, 19 nt, Homo sapiens
  misc_RNA (1)...(19): siRNA sense strand
uaacaggauuuaagccuaa

SEQ ID NO: 912035 - RNA, 19 nt, Homo sapiens
  misc_RNA (1)...(19): siRNA sense strand
cagaagaacuuuggaaaug

SEQ ID NO: 912036 - RNA, 19 nt, Homo sapiens
  misc_RNA (1)...(19): siRNA sense strand
cagcugaagucaucacuaa

SEQ ID NO: 912037 - RNA, 19 nt, Homo sapiens
  misc_RNA (1)...(19): siRNA sense strand
gcagacgaguuauuugauu

SEQ ID NO: 912038 - RNA, 19 nt, Homo sapiens
  misc_RNA (1)...(19): siRNA sense strand
gaagaaacuuaauggugaa

SEQ ID NO: 912039 - RNA, 19 nt, Homo sapiens
  misc_RNA (1)...(19): siRNA sense strand
gaccagaacugaaacagau

SEQ ID NO: 912040 - RNA, 19 nt, Homo sapiens
  misc_RNA (1)...(19): siRNA sense strand
ugacaugucucucucagaa

SEQ ID NO: 912041 - RNA, 19 nt, Homo sapiens
  misc_RNA (1)...(19): siRNA sense strand
ggaguuagauaaaccugaa

SEQ ID NO: 912042 - RNA, 19 nt, Homo sapiens
  misc_RNA (1)...(19): siRNA sense strand
gaaagaccuaguuggauua

SEQ ID NO: 912043 - RNA, 19 nt, Homo sapiens
  misc_RNA (1)...(19): siRNA sense strand
uaagugguguuucauauga

SEQ ID NO: 912044 - RNA, 19 nt, Homo sapiens
  misc_RNA (1)...(19): siRNA sense strand
gaaaagaccuugcuugaag

SEQ ID NO: 912045 - RNA, 19 nt, Homo sapiens
  misc_RNA (1)...(19): siRNA sense strand
gaugaagacuuugguuuga

SEQ ID NO: 912046 - RNA, 19 nt, Homo sapiens
  misc_RNA (1)...(19): siRNA sense strand
uaaagaaacuagcuucauc

SEQ ID NO: 912047 - RNA, 19 nt, Homo sapiens
  misc_RNA (1)...(19): siRNA sense strand
gaagaacuuuggaaaugga

SEQ ID NO: 912048 - RNA, 19 nt, Homo sapiens
  misc_RNA (1)...(19): siRNA sense strand
cagcaaacuuucuguuaaa

SEQ ID NO: 912049 - RNA, 19 nt, Homo sapiens
  misc_RNA (1)...(19): siRNA sense strand
uuauacagaugccuuguua

SEQ ID NO: 912050 - RNA, 19 nt, Homo sapiens
  misc_RNA (1)...(19): siRNA sense strand
ccaaucaucugucaucaau

SEQ ID NO: 912051 - RNA, 19 nt, Homo sapiens
  misc_RNA (1)...(19): siRNA sense strand
gaggaugaguuguguguga

SEQ ID NO: 912052 - RNA, 19 nt, Homo sapiens
  misc_RNA (1)...(19): siRNA sense strand
agguaaaucugaugucuua

SEQ ID NO: 912053 - RNA, 19 nt, Homo sapiens
  misc_RNA (1)...(19): siRNA sense strand
ccagaucacaguauacuua

SEQ ID NO: 912054 - RNA, 19 nt, Homo sapiens
  misc_RNA (1)...(19): siRNA sense strand
gaagaggaaucuccaguac

SEQ ID NO: 912055 - RNA, 19 nt, Homo sapiens
  misc_RNA (1)...(19): siRNA sense strand
ccaagaaaguccuucaguu

SEQ ID NO: 912056 - RNA, 19 nt, Homo sapiens
  misc_RNA (1)...(19): siRNA sense strand
ccaaggaacucucaaagca

SEQ ID NO: 912057 - RNA, 19 nt, Homo sapiens
  misc_RNA (1)...(19): siRNA sense strand
ucagaacguucgagaagua

SEQ ID NO: 912058 - RNA, 19 nt, Homo sapiens
  misc_RNA (1)...(19): siRNA sense strand
ggaagaagaagaacugcua

SEQ ID NO: 912059 - RNA, 19 nt, Homo sapiens
  misc_RNA (1)...(19): siRNA sense strand
gauaggcagucgagaagaa

SEQ ID NO: 912060 - RNA, 19 nt, Homo sapiens
  misc_RNA (1)...(19): siRNA sense strand
caagugaaguacucaaguu

SEQ ID NO: 912061 - RNA, 19 nt, Homo sapiens
  misc_RNA (1)...(19): siRNA sense strand
ccaaauaaccuugaugaaa

SEQ ID NO: 912062 - RNA, 19 nt, Homo sapiens
  misc_RNA (1)...(19): siRNA sense strand
agaaagaccuaguuggauu

SEQ ID NO: 912063 - RNA, 19 nt, Homo sapiens
  misc_RNA (1)...(19): siRNA sense strand
agaaagaaauagcaaguga

SEQ ID NO: 912064 - RNA, 19 nt, Homo sapiens
  misc_RNA (1)...(19): siRNA sense strand
caaaggagaggaugauaaa

SEQ ID NO: 912065 - RNA, 19 nt, Homo sapiens
  misc_RNA (1)...(19): siRNA sense strand
caacgucuauugcaacaga

SEQ ID NO: 912066 - RNA, 19 nt, Homo sapiens
  misc_RNA (1)...(19): siRNA sense strand
gaaaggaagagaaagcaaa

SEQ ID NO: 912067 - RNA, 19 nt, Homo sapiens
  misc_RNA (1)...(19): siRNA sense strand
gcacuucacuuugcagaug

SEQ ID NO: 912068 - RNA, 19 nt, Homo sapiens
  misc_RNA (1)...(19): siRNA sense strand
ccaagugcaucuuccagua

SEQ ID NO: 912069 - RNA, 19 nt, Homo sapiens
  misc_RNA (1)...(19): siRNA sense strand
gagcaugaacagcaaguua

SEQ ID NO: 912070 - RNA, 19 nt, Homo sapiens
  misc_RNA (1)...(19): siRNA sense strand
gaacugaaacagauaggaa

SEQ ID NO: 912071 - RNA, 19 nt, Homo sapiens
  misc_RNA (1)...(19): siRNA sense strand
gacuagaacucauaucuca

SEQ ID NO: 912072 - RNA, 19 nt, Homo sapiens
  misc_RNA (1)...(19): siRNA sense strand
gcaggcaccucaagaagau

SEQ ID NO: 912073 - RNA, 19 nt, Homo sapiens
  misc_RNA (1)...(19): siRNA sense strand
cagcauagauucagucagu

SEQ ID NO: 912074 - RNA, 19 nt, Homo sapiens
  misc_RNA (1)...(19): siRNA sense strand
gaacaaucauuucgaucau

SEQ ID NO: 912075 - RNA, 19 nt, Homo sapiens
  misc_RNA (1)...(19): siRNA sense strand
gcagaugauucucuacgaa

SEQ ID NO: 912076 - RNA, 19 nt, Homo sapiens
  misc_RNA (1)...(19): siRNA sense strand
agaacuguaucgagauuua

SEQ ID NO: 912077 - RNA, 19 nt, Homo sapiens
  misc_RNA (1)...(19): siRNA sense strand
caacagcaguuuacagaag

SEQ ID NO: 912078 - RNA, 19 nt, Homo sapiens
  misc_RNA (1)...(19): siRNA sense strand
gauaggguguugauuggaa

SEQ ID NO: 912079 - RNA, 19 nt, Homo sapiens
  misc_RNA (1)...(19): siRNA sense strand
gaaaagacauucacgaaca

SEQ ID NO: 912080 - RNA, 19 nt, Homo sapiens
  misc_RNA (1)...(19): siRNA sense strand
gugaggaaauguugaaaga

SEQ ID NO: 912081 - RNA, 19 nt, Homo sapiens
  misc_RNA (1)...(19): siRNA sense strand
gaucauuacuaccuucaga

SEQ ID NO: 912082 - RNA, 19 nt, Homo sapiens
  misc_RNA (1)...(19): siRNA sense strand
uaaacuggaucguauugaa

SEQ ID NO: 912083 - RNA, 19 nt, Homo sapiens
  misc_RNA (1)...(19): siRNA sense strand
uggagaaucugacaaagaa

SEQ ID NO: 912084 - RNA, 19 nt, Homo sapiens
  misc_RNA (1)...(19): siRNA sense strand
gaagucaucagcaccagua

SEQ ID NO: 912085 - RNA, 19 nt, Homo sapiens
  misc_RNA (1)...(19): siRNA sense strand
aagaagaacugcuaaaucu

SEQ ID NO: 912086 - RNA, 19 nt, Homo sapiens
  misc_RNA (1)...(19): siRNA sense strand
gaagaagaacugcuaaauc

SEQ ID NO: 912087 - RNA, 19 nt, Homo sapiens
  misc_RNA (1)...(19): siRNA sense strand
gcaaagaacagcaucaagu

SEQ ID NO: 912088 - RNA, 19 nt, Homo sapiens
  misc_RNA (1)...(19): siRNA sense strand
guagcacaguuaucaagua

SEQ ID NO: 912089 - RNA, 19 nt, Homo sapiens
  misc_RNA (1)...(19): siRNA sense strand
ggaggaccauucuaacaga

SEQ ID NO: 912090 - RNA, 19 nt, Homo sapiens
  misc_RNA (1)...(19): siRNA sense strand
gaugacacuuuagacaaua

SEQ ID NO: 912091 - RNA, 19 nt, Homo sapiens
  misc_RNA (1)...(19): siRNA sense strand
gauauagaagccucaguua

SEQ ID NO: 912092 - RNA, 19 nt, Homo sapiens
  misc_RNA (1)...(19): siRNA sense strand
uaaugaagaugaagacugu

SEQ ID NO: 912093 - RNA, 19 nt, Homo sapiens
  misc_RNA (1)...(19): siRNA sense strand
gaagaagaguaagauugaa

SEQ ID NO: 912094 - RNA, 19 nt, Homo sapiens
  misc_RNA (1)...(19): siRNA sense strand
gguaguagucaucuuauaa

SEQ ID NO: 912095 - RNA, 19 nt, Homo sapiens
  misc_RNA (1)...(19): siRNA sense strand
uaagagacuugcugaacuu

SEQ ID NO: 912096 - RNA, 19 nt, Homo sapiens
  misc_RNA (1)...(19): siRNA sense strand
uauuucagguugcuucuua

SEQ ID NO: 912097 - RNA, 19 nt, Homo sapiens
  misc_RNA (1)...(19): siRNA sense strand
ggacacagucaaucaacua

SEQ ID NO: 912098 - RNA, 19 nt, Homo sapiens
  misc_RNA (1)...(19): siRNA sense strand
ugcagaagaugacacuuua

SEQ ID NO: 912099 - RNA, 19 nt, Homo sapiens
  misc_RNA (1)...(19): siRNA sense strand
caaagagaguaaaugaaug

SEQ ID NO: 912100 - RNA, 19 nt, Homo sapiens
  misc_RNA (1)...(19): siRNA sense strand
gaggaucccuggagccuau

SEQ ID NO: 912101 - RNA, 19 nt, Homo sapiens
  misc_RNA (1)...(19): siRNA sense strand
gaacagaaagaaauagcaa

SEQ ID NO: 912102 - RNA, 19 nt, Homo sapiens
  misc_RNA (1)...(19): siRNA sense strand
acaggaaacuuacuccaaa

SEQ ID NO: 912103 - RNA, 19 nt, Homo sapiens
  misc_RNA (1)...(19): siRNA sense strand
gaaggagggucuuugauuu

SEQ ID NO: 912104 - RNA, 19 nt, Homo sapiens
  misc_RNA (1)...(19): siRNA sense strand
gcaacuaccucaucauauu

SEQ ID NO: 912105 - RNA, 19 nt, Homo sapiens
  misc_RNA (1)...(19): siRNA sense strand
ggaauauucuucaugauug

SEQ ID NO: 912106 - RNA, 19 nt, Homo sapiens
  misc_RNA (1)...(19): siRNA sense strand
gcaaugagcagucaauuug

SEQ ID NO: 912107 - RNA, 19 nt, Homo sapiens
  misc_RNA (1)...(19): siRNA sense strand
caaacggugucaaauauuu

SEQ ID NO: 912108 - RNA, 19 nt, Homo sapiens
  misc_RNA (1)...(19): siRNA sense strand
aaaagaagcuggcagauua

SEQ ID NO: 912109 - RNA, 19 nt, Homo sapiens
  misc_RNA (1)...(19): siRNA sense strand
ggaaaucugucauucaaca

SEQ ID NO: 912110 - RNA, 19 nt, Homo sapiens
  misc_RNA (1)...(19): siRNA sense strand
gcagucaauuugcuaauga

SEQ ID NO: 912111 - RNA, 19 nt, Homo sapiens
  misc_RNA (1)...(19): siRNA sense strand
gauacgacauuuccugauu

SEQ ID NO: 912112 - RNA, 19 nt, Homo sapiens
  misc_RNA (1)...(19): siRNA sense strand
cagcaaaguguauacauua

SEQ ID NO: 912113 - RNA, 19 nt, Homo sapiens
  misc_RNA (1)...(19): siRNA sense strand
ggaaggagggucuuugauu

SEQ ID NO: 912114 - RNA, 19 nt, Homo sapiens
  misc_RNA (1)...(19): siRNA sense strand
ggaagcauggcacucauua

SEQ ID NO: 912115 - RNA, 19 nt, Homo sapiens
  misc_RNA (1)...(19): siRNA sense strand
ugaacuaccugaaguaauc

SEQ ID NO: 912116 - RNA, 19 nt, Homo sapiens
  misc_RNA (1)...(19): siRNA sense strand
gcauggcacucauuauaau

SEQ ID NO: 912117 - RNA, 19 nt, Homo sapiens
  misc_RNA (1)...(19): siRNA sense strand
gccaagggcucucuucaug

SEQ ID NO: 912118 - RNA, 19 nt, Homo sapiens
  misc_RNA (1)...(19): siRNA sense strand
gagggucuuugauuuauga

SEQ ID NO: 912119 - RNA, 19 nt, Homo sapiens
  misc_RNA (1)...(19): siRNA sense strand
caaauacccugcccucuac

SEQ ID NO: 912120 - RNA, 19 nt, Homo sapiens
  misc_RNA (1)...(19): siRNA sense strand
agacaucccucuucucaug

SEQ ID NO: 912121 - RNA, 19 nt, Homo sapiens
  misc_RNA (1)...(19): siRNA sense strand
gagcagcaguggagaaagu

SEQ ID NO: 912122 - RNA, 19 nt, Homo sapiens
  misc_RNA (1)...(19): siRNA sense strand
ugacaagugugaacccaaa

SEQ ID NO: 912123 - RNA, 19 nt, Homo sapiens
  misc_RNA (1)...(19): siRNA sense strand
guuggaauauucuucauga

SEQ ID NO: 912124 - RNA, 19 nt, Homo sapiens
  misc_RNA (1)...(19): siRNA sense strand
caucuacagugaacuuaaa

SEQ ID NO: 912125 - RNA, 19 nt, Homo sapiens
  misc_RNA (1)...(19): siRNA sense strand
ccaaauacccugcccucua

SEQ ID NO: 912126 - RNA, 19 nt, Homo sapiens
  misc_RNA (1)...(19): siRNA sense strand
ggagaaugguaccucaaug

SEQ ID NO: 912127 - RNA, 19 nt, Homo sapiens
  misc_RNA (1)...(19): siRNA sense strand
aaagaucggucccggagaa

SEQ ID NO: 912128 - RNA, 19 nt, Homo sapiens
  misc_RNA (1)...(19): siRNA sense strand
gauugcagcugugcuuauu

SEQ ID NO: 912129 - RNA, 19 nt, Homo sapiens
  misc_RNA (1)...(19): siRNA sense strand
caacaacacgcuuccaaug

SEQ ID NO: 912130 - RNA, 19 nt, Homo sapiens
  misc_RNA (1)...(19): siRNA sense strand
caagcuaccucuuuaucau

SEQ ID NO: 912131 - RNA, 19 nt, Homo sapiens
  misc_RNA (1)...(19): siRNA sense strand
aagcauggcacucauuaua

SEQ ID NO: 912132 - RNA, 19 nt, Homo sapiens
  misc_RNA (1)...(19): siRNA sense strand
gaaguaaucagagcauuca

SEQ ID NO: 912133 - RNA, 19 nt, Homo sapiens
  misc_RNA (1)...(19): siRNA sense strand
caacuaccucaucauauuu

SEQ ID NO: 912134 - RNA, 19 nt, Homo sapiens
  misc_RNA (1)...(19): siRNA sense strand
agaaauuccugacaaaugg

SEQ ID NO: 912135 - RNA, 19 nt, Homo sapiens
  misc_RNA (1)...(19): siRNA sense strand
gcaaacggugucaaauauu

SEQ ID NO: 912136 - RNA, 19 nt, Homo sapiens
  misc_RNA (1)...(19): siRNA sense strand
ugcaaacggugucaaauau

SEQ ID NO: 912137 - RNA, 19 nt, Homo sapiens
  misc_RNA (1)...(19): siRNA sense strand
ccauggaacugagaaaugu

SEQ ID NO: 912138 - RNA, 19 nt, Homo sapiens
  misc_RNA (1)...(19): siRNA sense strand
caaugcaugugguaauguu

SEQ ID NO: 912139 - RNA, 19 nt, Homo sapiens
  misc_RNA (1)...(19): siRNA sense strand
cugcagggcuggaugagaa

SEQ ID NO: 912140 - RNA, 19 nt, Homo sapiens
  misc_RNA (1)...(19): siRNA sense strand
acagcaaaguguauacauu

SEQ ID NO: 912141 - RNA, 19 nt, Homo sapiens
  misc_RNA (1)...(19): siRNA sense strand
gcaaaguguauacauuaga

SEQ ID NO: 912142 - RNA, 19 nt, Homo sapiens
  misc_RNA (1)...(19): siRNA sense strand
gagaaagugcuccagauag

SEQ ID NO: 912143 - RNA, 19 nt, Homo sapiens
  misc_RNA (1)...(19): siRNA sense strand
gaauauucuucaugauugg

SEQ ID NO: 912144 - RNA, 19 nt, Homo sapiens
  misc_RNA (1)...(19): siRNA sense strand
uggagaaguugaagaugaa

SEQ ID NO: 912145 - RNA, 19 nt, Homo sapiens
  misc_RNA (1)...(19): siRNA sense strand
cagaaauuccugacaaaug

SEQ ID NO: 912146 - RNA, 19 nt, Homo sapiens
  misc_RNA (1)...(19): siRNA sense strand
caaauuccaagcaucacua

SEQ ID NO: 912147 - RNA, 19 nt, Homo sapiens
  misc_RNA (1)...(19): siRNA sense strand
caaaguguauacauuagac

SEQ ID NO: 912148 - RNA, 19 nt, Homo sapiens
  misc_RNA (1)...(19): siRNA sense strand
gauaggaaauucagaaaag

SEQ ID NO: 912149 - RNA, 19 nt, Homo sapiens
  misc_RNA (1)...(19): siRNA sense strand
caacacagggaucauacuu

SEQ ID NO: 912150 - RNA, 19 nt, Homo sapiens
  misc_RNA (1)...(19): siRNA sense strand
acaguggaguagaauauga

SEQ ID NO: 912151 - RNA, 19 nt, Homo sapiens
  misc_RNA (1)...(19): siRNA sense strand
aaauacaucuucggauuca

SEQ ID NO: 912152 - RNA, 19 nt, Homo sapiens
  misc_RNA (1)...(19): siRNA sense strand
guauucaguucaccuuuua

SEQ ID NO: 912153 - RNA, 19 nt, Homo sapiens
  misc_RNA (1)...(19): siRNA sense strand
caauuccuauccuaguauu

SEQ ID NO: 912154 - RNA, 19 nt, Homo sapiens
  misc_RNA (1)...(19): siRNA sense strand
gagcauucaugggacuuga

SEQ ID NO: 912155 - RNA, 19 nt, Homo sapiens
  misc_RNA (1)...(19): siRNA sense strand
ggagggucuuugauuuaug

SEQ ID NO: 912156 - RNA, 19 nt, Homo sapiens
  misc_RNA (1)...(19): siRNA sense strand
gaacugagaaaugucaaca

SEQ ID NO: 912157 - RNA, 19 nt, Homo sapiens
  misc_RNA (1)...(19): siRNA sense strand
aaggagggucuuugauuua

SEQ ID NO: 912158 - RNA, 19 nt, Homo sapiens
  misc_RNA (1)...(19): siRNA sense strand
gcaauuccuauccuaguau

SEQ ID NO: 912159 - RNA, 19 nt, Homo sapiens
  misc_RNA (1)...(19): siRNA sense strand
uuggaaaucugucauucaa

SEQ ID NO: 912160 - RNA, 19 nt, Homo sapiens
  misc_RNA (1)...(19): siRNA sense strand
caucauauuugugucuguu

SEQ ID NO: 912161 - RNA, 19 nt, Homo sapiens
  misc_RNA (1)...(19): siRNA sense strand
gagagcagcaguggagaaa

SEQ ID NO: 912162 - RNA, 19 nt, Homo sapiens
  misc_RNA (1)...(19): siRNA sense strand
aauaugaacuaccugaagu

SEQ ID NO: 912163 - RNA, 19 nt, Homo sapiens
  misc_RNA (1)...(19): siRNA sense strand
acacagggaucauacuuuu

SEQ ID NO: 912164 - RNA, 19 nt, Homo sapiens
  misc_RNA (1)...(19): siRNA sense strand
ggucggggcuuuaauuuuc

SEQ ID NO: 912165 - RNA, 19 nt, Homo sapiens
  misc_RNA (1)...(19): siRNA sense strand
ggaucacaguguuggaaau

SEQ ID NO: 912166 - RNA, 19 nt, Homo sapiens
  misc_RNA (1)...(19): siRNA sense strand
ucaugacaguggaguagaa

SEQ ID NO: 912167 - RNA, 19 nt, Homo sapiens
  misc_RNA (1)...(19): siRNA sense strand
ugcaauuccuauccuagua

SEQ ID NO: 912168 - RNA, 19 nt, Homo sapiens
  misc_RNA (1)...(19): siRNA sense strand
ugacaguggaguagaauau

SEQ ID NO: 912169 - RNA, 19 nt, Homo sapiens
  misc_RNA (1)...(19): siRNA sense strand
guaccucaauggcaacuac

SEQ ID NO: 912170 - RNA, 19 nt, Homo sapiens
  misc_RNA (1)...(19): siRNA sense strand
caagggcucucuucaugac

SEQ ID NO: 912171 - RNA, 19 nt, Homo sapiens
  misc_RNA (1)...(19): siRNA sense strand
uagguuaucuuggcuauac

SEQ ID NO: 912172 - RNA, 19 nt, Homo sapiens
  misc_RNA (1)...(19): siRNA sense strand
uggcaacuaccucaucaua

SEQ ID NO: 912173 - RNA, 19 nt, Homo sapiens
  misc_RNA (1)...(19): siRNA sense strand
agcuaccucuuuaucauua

SEQ ID NO: 912174 - RNA, 19 nt, Homo sapiens
  misc_RNA (1)...(19): siRNA sense strand
ccaauucguacaucaguga

SEQ ID NO: 912175 - RNA, 19 nt, Homo sapiens
  misc_RNA (1)...(19): siRNA sense strand
ucaauuugcuaaugaagac

SEQ ID NO: 912176 - RNA, 19 nt, Homo sapiens
  misc_RNA (1)...(19): siRNA sense strand
gagaaugguaccucaaugg

SEQ ID NO: 912177 - RNA, 19 nt, Homo sapiens
  misc_RNA (1)...(19): siRNA sense strand
auacaucuucggauucaua

SEQ ID NO: 912178 - RNA, 19 nt, Homo sapiens
  misc_RNA (1)...(19): siRNA sense strand
auggagaaguugaagauga

SEQ ID NO: 912179 - RNA, 19 nt, Homo sapiens
  misc_RNA (1)...(19): siRNA sense strand
ucugagaguucugauguga

SEQ ID NO: 912180 - RNA, 19 nt, Homo sapiens
  misc_RNA (1)...(19): siRNA sense strand
acaacacgcuuccaaugca

SEQ ID NO: 912181 - RNA, 19 nt, Homo sapiens
  misc_RNA (1)...(19): siRNA sense strand
guggcaauauuaucacugu

SEQ ID NO: 912182 - RNA, 19 nt, Homo sapiens
  misc_RNA (1)...(19): siRNA sense strand
uuuaugauccuccaaauuc

SEQ ID NO: 912183 - RNA, 19 nt, Homo sapiens
  misc_RNA (1)...(19): siRNA sense strand
gcuggcagauuaugcugau

SEQ ID NO: 912184 - RNA, 19 nt, Homo sapiens
  misc_RNA (1)...(19): siRNA sense strand
gggauaggaaauucagaaa

SEQ ID NO: 912185 - RNA, 19 nt, Homo sapiens
  misc_RNA (1)...(19): siRNA sense strand
gcuaaugaagacacugaaa

SEQ ID NO: 912186 - RNA, 19 nt, Homo sapiens
  misc_RNA (1)...(19): siRNA sense strand
gaaaucugucauucaacaa

SEQ ID NO: 912187 - RNA, 19 nt, Homo sapiens
  misc_RNA (1)...(19): siRNA sense strand
ggcaauauuaucacuguau

SEQ ID NO: 912188 - RNA, 19 nt, Homo sapiens
  misc_RNA (1)...(19): siRNA sense strand
auacgacauuuccugauug

SEQ ID NO: 912189 - RNA, 19 nt, Homo sapiens
  misc_RNA (1)...(19): siRNA sense strand
caacacgcuuccaaugcau

SEQ ID NO: 912190 - RNA, 19 nt, Homo sapiens
  misc_RNA (1)...(19): siRNA sense strand
uuaguguggugauuuacaa

SEQ ID NO: 912191 - RNA, 19 nt, Homo sapiens
  misc_RNA (1)...(19): siRNA sense strand
cagauuaugcugaugaaca

SEQ ID NO: 912192 - RNA, 19 nt, Homo sapiens
  misc_RNA (1)...(19): siRNA sense strand
agaaagugcuccagauagc

SEQ ID NO: 912193 - RNA, 19 nt, Homo sapiens
  misc_RNA (1)...(19): siRNA sense strand
gugugaacccaaauacuuu

SEQ ID NO: 912194 - RNA, 19 nt, Homo sapiens
  misc_RNA (1)...(19): siRNA sense strand
uuguuaguguggugauuua

SEQ ID NO: 912195 - RNA, 19 nt, Homo sapiens
  misc_RNA (1)...(19): siRNA sense strand
gaagcauggcacucauuau

SEQ ID NO: 912196 - RNA, 19 nt, Homo sapiens
  misc_RNA (1)...(19): siRNA sense strand
gagaaguugaagaugaauu

SEQ ID NO: 912197 - RNA, 19 nt, Homo sapiens
  misc_RNA (1)...(19): siRNA sense strand
augcaaacggugucaaaua

SEQ ID NO: 912198 - RNA, 19 nt, Homo sapiens
  misc_RNA (1)...(19): siRNA sense strand
ggcagauuaugcugaugaa

SEQ ID NO: 912199 - RNA, 19 nt, Homo sapiens
  misc_RNA (1)...(19): siRNA sense strand
acaagugugaacccaaaua

SEQ ID NO: 912200 - RNA, 19 nt, Homo sapiens
  misc_RNA (1)...(19): siRNA sense strand
uaaugaagacacugaaagu

SEQ ID NO: 912201 - RNA, 19 nt, Homo sapiens
  misc_RNA (1)...(19): siRNA sense strand
ucacaguguuggaaaucug

SEQ ID NO: 912202 - RNA, 19 nt, Homo sapiens
  misc_RNA (1)...(19): siRNA sense strand
guguggugauuuacaagaa

SEQ ID NO: 912203 - RNA, 19 nt, Homo sapiens
  misc_RNA (1)...(19): siRNA sense strand
ggauucagauugaguauuu

SEQ ID NO: 912204 - RNA, 19 nt, Homo sapiens
  misc_RNA (1)...(19): siRNA sense strand
gcaaggcgcugaucaccaa

SEQ ID NO: 912205 - RNA, 19 nt, Homo sapiens
  misc_RNA (1)...(19): siRNA sense strand
agaagcagguucagaguua

SEQ ID NO: 912206 - RNA, 19 nt, Homo sapiens
  misc_RNA (1)...(19): siRNA sense strand
gcaaagaaacacagcauga

SEQ ID NO: 912207 - RNA, 19 nt, Homo sapiens
  misc_RNA (1)...(19): siRNA sense strand
ggaagcagauccucucauc

SEQ ID NO: 912208 - RNA, 19 nt, Homo sapiens
  misc_RNA (1)...(19): siRNA sense strand
gaagagugaugaccuuuac

SEQ ID NO: 912209 - RNA, 19 nt, Homo sapiens
  misc_RNA (1)...(19): siRNA sense strand
acaaguggauucagauuga

SEQ ID NO: 912210 - RNA, 19 nt, Homo sapiens
  misc_RNA (1)...(19): siRNA sense strand
ggacucuccuuaauucuuc

SEQ ID NO: 912211 - RNA, 19 nt, Homo sapiens
  misc_RNA (1)...(19): siRNA sense strand
cagacaagacucaguguua

SEQ ID NO: 912212 - RNA, 19 nt, Homo sapiens
  misc_RNA (1)...(19): siRNA sense strand
caucucagguggcaaagaa

SEQ ID NO: 912213 - RNA, 19 nt, Homo sapiens
  misc_RNA (1)...(19): siRNA sense strand
agaagaagcuguaugugau

SEQ ID NO: 912214 - RNA, 19 nt, Homo sapiens
  misc_RNA (1)...(19): siRNA sense strand
cgaggaggcucagguguuu

SEQ ID NO: 912215 - RNA, 19 nt, Homo sapiens
  misc_RNA (1)...(19): siRNA sense strand
gcgggacucuccuuaauuc

SEQ ID NO: 912216 - RNA, 19 nt, Homo sapiens
  misc_RNA (1)...(19): siRNA sense strand
guucagaguuacaucauuc

SEQ ID NO: 912217 - RNA, 19 nt, Homo sapiens
  misc_RNA (1)...(19): siRNA sense strand
gaggcuaaaugcaucaaug

SEQ ID NO: 912218 - RNA, 19 nt, Homo sapiens
  misc_RNA (1)...(19): siRNA sense strand
ucaacaauguggagaccua

SEQ ID NO: 912219 - RNA, 19 nt, Homo sapiens
  misc_RNA (1)...(19): siRNA sense strand
ggcauaagauggugguguu

SEQ ID NO: 912220 - RNA, 19 nt, Homo sapiens
  misc_RNA (1)...(19): siRNA sense strand
gcacaagccaucagaacga

SEQ ID NO: 912221 - RNA, 19 nt, Homo sapiens
  misc_RNA (1)...(19): siRNA sense strand
cagaugagcccucccagaa

SEQ ID NO: 912222 - RNA, 19 nt, Homo sapiens
  misc_RNA (1)...(19): siRNA sense strand
cacgaaggaugaacgguuu

SEQ ID NO: 912223 - RNA, 19 nt, Homo sapiens
  misc_RNA (1)...(19): siRNA sense strand
cugcaacgauuuaaaggaa

SEQ ID NO: 912224 - RNA, 19 nt, Homo sapiens
  misc_RNA (1)...(19): siRNA sense strand
agacaagacucaguguuau

SEQ ID NO: 912225 - RNA, 19 nt, Homo sapiens
  misc_RNA (1)...(19): siRNA sense strand
cugcuaaccucuuccaguu

SEQ ID NO: 912226 - RNA, 19 nt, Homo sapiens
  misc_RNA (1)...(19): siRNA sense strand
aaacugcguuggaauacug

SEQ ID NO: 912227 - RNA, 19 nt, Homo sapiens
  misc_RNA (1)...(19): siRNA sense strand
gaaacuggccacagacaag

SEQ ID NO: 912228 - RNA, 19 nt, Homo sapiens
  misc_RNA (1)...(19): siRNA sense strand
caacaaguggauucagauu

SEQ ID NO: 912229 - RNA, 19 nt, Homo sapiens
  misc_RNA (1)...(19): siRNA sense strand
gccaggauguaccaccuuu

SEQ ID NO: 912230 - RNA, 19 nt, Homo sapiens
  misc_RNA (1)...(19): siRNA sense strand
gaugagcccucccagaaaa

SEQ ID NO: 912231 - RNA, 19 nt, Homo sapiens
  misc_RNA (1)...(19): siRNA sense strand
aagaagaagcuguauguga

SEQ ID NO: 912232 - RNA, 19 nt, Homo sapiens
  misc_RNA (1)...(19): siRNA sense strand
uuacagagaaucaacaaug

SEQ ID NO: 912233 - RNA, 19 nt, Homo sapiens
  misc_RNA (1)...(19): siRNA sense strand
gcaugauguuuggaaauau

SEQ ID NO: 912234 - RNA, 19 nt, Homo sapiens
  misc_RNA (1)...(19): siRNA sense strand
ugaagagugaugaccuuua

SEQ ID NO: 912235 - RNA, 19 nt, Homo sapiens
  misc_RNA (1)...(19): siRNA sense strand
agcaugauguuuggaaaua

SEQ ID NO: 912236 - RNA, 19 nt, Homo sapiens
  misc_RNA (1)...(19): siRNA sense strand
gccauguucugcaacgauu

SEQ ID NO: 912237 - RNA, 19 nt, Homo sapiens
  misc_RNA (1)...(19): siRNA sense strand
gaaacccugcgaauggaaa

SEQ ID NO: 912238 - RNA, 19 nt, Homo sapiens
  misc_RNA (1)...(19): siRNA sense strand
gcaacaaccggcucuacau

SEQ ID NO: 912239 - RNA, 19 nt, Homo sapiens
  misc_RNA (1)...(19): siRNA sense strand
gccauaagaagaagcugua

SEQ ID NO: 912240 - RNA, 19 nt, Homo sapiens
  misc_RNA (1)...(19): siRNA sense strand
uacagagaaucaacaaugu

SEQ ID NO: 912241 - RNA, 19 nt, Homo sapiens
  misc_RNA (1)...(19): siRNA sense strand
cggaggcuuugacggcuua

SEQ ID NO: 912242 - RNA, 19 nt, Homo sapiens
  misc_RNA (1)...(19): siRNA sense strand
caucuuguguguggacauu

SEQ ID NO: 912243 - RNA, 19 nt, Homo sapiens
  misc_RNA (1)...(19): siRNA sense strand
gagacuuggucgagaucuu

SEQ ID NO: 912244 - RNA, 19 nt, Homo sapiens
  misc_RNA (1)...(19): siRNA sense strand
ugcaugaguuccagucuga

SEQ ID NO: 912245 - RNA, 19 nt, Homo sapiens
  misc_RNA (1)...(19): siRNA sense strand
gaagaagcuguaugugauc

SEQ ID NO: 912246 - RNA, 19 nt, Homo sapiens
  misc_RNA (1)...(19): siRNA sense strand
auaggccgcuggaggcaua

SEQ ID NO: 912247 - RNA, 19 nt, Homo sapiens
  misc_RNA (1)...(19): siRNA sense strand
cauguucugcaacgauuua

SEQ ID NO: 912248 - RNA, 19 nt, Homo sapiens
  misc_RNA (1)...(19): siRNA sense strand
guuaugacccuuccaccaa

SEQ ID NO: 912249 - RNA, 19 nt, Homo sapiens
  misc_RNA (1)...(19): siRNA sense strand
ggaaacuggccacagacaa

SEQ ID NO: 912250 - RNA, 19 nt, Homo sapiens
  misc_RNA (1)...(19): siRNA sense strand
aaagaaacacagcaugaug

SEQ ID NO: 912251 - RNA, 19 nt, Homo sapiens
  misc_RNA (1)...(19): siRNA sense strand
caaagaaacacagcaugau

SEQ ID NO: 912252 - RNA, 19 nt, Homo sapiens
  misc_RNA (1)...(19): siRNA sense strand
gcaacgauuuaaaggaaaa

SEQ ID NO: 912253 - RNA, 19 nt, Homo sapiens
  misc_RNA (1)...(19): siRNA sense strand
gguucagaguuacaucauu

SEQ ID NO: 912254 - RNA, 19 nt, Homo sapiens
  misc_RNA (1)...(19): siRNA sense strand
gcagccaccagccauaaga

SEQ ID NO: 912255 - RNA, 19 nt, Homo sapiens
  misc_RNA (1)...(19): siRNA sense strand
cuacaucucagguggcaaa

SEQ ID NO: 912256 - RNA, 19 nt, Homo sapiens
  misc_RNA (1)...(19): siRNA sense strand
agacuuggucgagaucuua

SEQ ID NO: 912257 - RNA, 19 nt, Homo sapiens
  misc_RNA (1)...(19): siRNA sense strand
agucugagguguucaugau

SEQ ID NO: 912258 - RNA, 19 nt, Homo sapiens
  misc_RNA (1)...(19): siRNA sense strand
ccaccagccauaagaagaa

SEQ ID NO: 912259 - RNA, 19 nt, Homo sapiens
  misc_RNA (1)...(19): siRNA sense strand
cgacgcgggacucuccuua

SEQ ID NO: 912260 - RNA, 19 nt, Homo sapiens
  misc_RNA (1)...(19): siRNA sense strand
ccgcagccagcaacuauuu

SEQ ID NO: 912261 - RNA, 19 nt, Homo sapiens
  misc_RNA (1)...(19): siRNA sense strand
caacaaccggcucuacauc

SEQ ID NO: 912262 - RNA, 19 nt, Homo sapiens
  misc_RNA (1)...(19): siRNA sense strand
auaagaagaagcuguaugu

SEQ ID NO: 912263 - RNA, 19 nt, Homo sapiens
  misc_RNA (1)...(19): siRNA sense strand
gcuggacagucuaaagaag

SEQ ID NO: 912264 - RNA, 19 nt, Homo sapiens
  misc_RNA (1)...(19): siRNA sense strand
gaccaugcacacucuguug

SEQ ID NO: 912265 - RNA, 19 nt, Homo sapiens
  misc_RNA (1)...(19): siRNA sense strand
caggagacuuggucgagau

SEQ ID NO: 912266 - RNA, 19 nt, Homo sapiens
  misc_RNA (1)...(19): siRNA sense strand
uuugacggcuuacagagaa

SEQ ID NO: 912267 - RNA, 19 nt, Homo sapiens
  misc_RNA (1)...(19): siRNA sense strand
gagguguucaugaucauug

SEQ ID NO: 912268 - RNA, 19 nt, Homo sapiens
  misc_RNA (1)...(19): siRNA sense strand
gcaccaagcccaggaugca

SEQ ID NO: 912269 - RNA, 19 nt, Homo sapiens
  misc_RNA (1)...(19): siRNA sense strand
ccagaaaacugcguuggaa

SEQ ID NO: 912270 - RNA, 19 nt, Homo sapiens
  misc_RNA (1)...(19): siRNA sense strand
gcagccagcaacuauuuca

SEQ ID NO: 912271 - RNA, 19 nt, Homo sapiens
  misc_RNA (1)...(19): siRNA sense strand
accaacaaguggaguuuga

SEQ ID NO: 912272 - RNA, 19 nt, Homo sapiens
  misc_RNA (1)...(19): siRNA sense strand
gacaagacucaguguuaug

SEQ ID NO: 912273 - RNA, 19 nt, Homo sapiens
  misc_RNA (1)...(19): siRNA sense strand
gagcuggagagugggaaua

SEQ ID NO: 912274 - RNA, 19 nt, Homo sapiens
  misc_RNA (1)...(19): siRNA sense strand
ucugagguguucaugauca

SEQ ID NO: 912275 - RNA, 19 nt, Homo sapiens
  misc_RNA (1)...(19): siRNA sense strand
cagaguuacaucauucaaa

SEQ ID NO: 912276 - RNA, 19 nt, Homo sapiens
  misc_RNA (1)...(19): siRNA sense strand
ucagggccauguucugcaa

SEQ ID NO: 912277 - RNA, 19 nt, Homo sapiens
  misc_RNA (1)...(19): siRNA sense strand
acaagacucaguguuauga

SEQ ID NO: 912278 - RNA, 19 nt, Homo sapiens
  misc_RNA (1)...(19): siRNA sense strand
ggaguuugcaugcgugaca

SEQ ID NO: 912279 - RNA, 19 nt, Homo sapiens
  misc_RNA (1)...(19): siRNA sense strand
agaaguggguggaguuugc

SEQ ID NO: 912280 - RNA, 19 nt, Homo sapiens
  misc_RNA (1)...(19): siRNA sense strand
uaagaaguggguggaguuu

SEQ ID NO: 912281 - RNA, 19 nt, Homo sapiens
  misc_RNA (1)...(19): siRNA sense strand
gaagcagauccucucauca

SEQ ID NO: 912282 - RNA, 19 nt, Homo sapiens
  misc_RNA (1)...(19): siRNA sense strand
ggaaaaguaugagaaaagg

SEQ ID NO: 912283 - RNA, 19 nt, Homo sapiens
  misc_RNA (1)...(19): siRNA sense strand
ggacgagaagaacgagguu

SEQ ID NO: 912284 - RNA, 19 nt, Homo sapiens
  misc_RNA (1)...(19): siRNA sense strand
uugcaugcgugacauugaa

SEQ ID NO: 912285 - RNA, 19 nt, Homo sapiens
  misc_RNA (1)...(19): siRNA sense strand
ggaaacccugcgaauggaa

SEQ ID NO: 912286 - RNA, 19 nt, Homo sapiens
  misc_RNA (1)...(19): siRNA sense strand
guaccaccuuucuggcaau

SEQ ID NO: 912287 - RNA, 19 nt, Homo sapiens
  misc_RNA (1)...(19): siRNA sense strand
gaagcagguucagaguuac

SEQ ID NO: 912288 - RNA, 19 nt, Homo sapiens
  misc_RNA (1)...(19): siRNA sense strand
ggaccgcaucuaugucguu

SEQ ID NO: 912289 - RNA, 19 nt, Homo sapiens
  misc_RNA (1)...(19): siRNA sense strand
gggacucuccuuaauucuu

SEQ ID NO: 912290 - RNA, 19 nt, Homo sapiens
  misc_RNA (1)...(19): siRNA sense strand
gaucuuaaauggggaaaag

SEQ ID NO: 912291 - RNA, 19 nt, Homo sapiens
  misc_RNA (1)...(19): siRNA sense strand
auucuucgaucaacaagug

SEQ ID NO: 912292 - RNA, 19 nt, Homo sapiens
  misc_RNA (1)...(19): siRNA sense strand
acagcaugauguuuggaaa

SEQ ID NO: 912293 - RNA, 19 nt, Homo sapiens
  misc_RNA (1)...(19): siRNA sense strand
cacacucgcuggacagucu

SEQ ID NO: 912294 - RNA, 19 nt, Homo sapiens
  misc_RNA (1)...(19): siRNA sense strand
ccuggcaccuucuacagau

SEQ ID NO: 912295 - RNA, 19 nt, Homo sapiens
  misc_RNA (1)...(19): siRNA sense strand
caacaaguggaguuugaag

SEQ ID NO: 912296 - RNA, 19 nt, Homo sapiens
  misc_RNA (1)...(19): siRNA sense strand
acgcgggacucuccuuaau

SEQ ID NO: 912297 - RNA, 19 nt, Homo sapiens
  misc_RNA (1)...(19): siRNA sense strand
gauguggucgagaagaguu

SEQ ID NO: 912298 - RNA, 19 nt, Homo sapiens
  misc_RNA (1)...(19): siRNA sense strand
gagaagaacgagguuaucg

SEQ ID NO: 912299 - RNA, 19 nt, Homo sapiens
  misc_RNA (1)...(19): siRNA sense strand
gacgagaagaacgagguua

SEQ ID NO: 912300 - RNA, 19 nt, Homo sapiens
  misc_RNA (1)...(19): siRNA sense strand
ccaugcccguggaggcuaa

SEQ ID NO: 912301 - RNA, 19 nt, Homo sapiens
  misc_RNA (1)...(19): siRNA sense strand
uggaaacccugcgaaugga

SEQ ID NO: 912302 - RNA, 19 nt, Homo sapiens
  misc_RNA (1)...(19): siRNA sense strand
aagaaacacagcaugaugu

SEQ ID NO: 912303 - RNA, 19 nt, Homo sapiens
  misc_RNA (1)...(19): siRNA sense strand
gcaaagccaucuucaucuu

SEQ ID NO: 912304 - RNA, 19 nt, Homo sapiens
  misc_RNA (1)...(19): siRNA sense strand
guucagcucuacagccuua

SEQ ID NO: 912305 - RNA, 19 nt, Homo sapiens
  misc_RNA (1)...(19): siRNA sense strand
ccaaggcgcugguggugaa

SEQ ID NO: 912306 - RNA, 19 nt, Homo sapiens
  misc_RNA (1)...(19): siRNA sense strand
ucgaugagauggacaagau

SEQ ID NO: 912307 - RNA, 19 nt, Homo sapiens
  misc_RNA (1)...(19): siRNA sense strand
aaagccaucuucaucuuca

SEQ ID NO: 912308 - RNA, 19 nt, Homo sapiens
  misc_RNA (1)...(19): siRNA sense strand
ccgcaaagccaucuucauc

SEQ ID NO: 912309 - RNA, 19 nt, Homo sapiens
  misc_RNA (1)...(19): siRNA sense strand
gggcuuagcugggcuuucc

SEQ ID NO: 912310 - RNA, 19 nt, Homo sapiens
  misc_RNA (1)...(19): siRNA sense strand
gcuacaagaaggaucugaa

SEQ ID NO: 912311 - RNA, 19 nt, Homo sapiens
  misc_RNA (1)...(19): siRNA sense strand
ugccgggucuggaguguga

SEQ ID NO: 912312 - RNA, 19 nt, Homo sapiens
  misc_RNA (1)...(19): siRNA sense strand
ccacaucgagcgcuacaag

SEQ ID NO: 912313 - RNA, 19 nt, Homo sapiens
  misc_RNA (1)...(19): siRNA sense strand
caaagccaucuucaucuuc

SEQ ID NO: 912314 - RNA, 19 nt, Homo sapiens
  misc_RNA (1)...(19): siRNA sense strand
acaagaaggaucugaagag

SEQ ID NO: 912315 - RNA, 19 nt, Homo sapiens
  misc_RNA (1)...(19): siRNA sense strand
cgggaccaauuaccgcaaa

SEQ ID NO: 912316 - RNA, 19 nt, Homo sapiens
  misc_RNA (1)...(19): siRNA sense strand
acaucgagcgcuacaagaa

SEQ ID NO: 912317 - RNA, 19 nt, Homo sapiens
  misc_RNA (1)...(19): siRNA sense strand
uggaaguccugcggccuuu

SEQ ID NO: 912318 - RNA, 19 nt, Homo sapiens
  misc_RNA (1)...(19): siRNA sense strand
gcaccggcaaauccuaugu

SEQ ID NO: 912319 - RNA, 19 nt, Homo sapiens
  misc_RNA (1)...(19): siRNA sense strand
gaaggaaaguagcaaauuu

SEQ ID NO: 912320 - RNA, 19 nt, Homo sapiens
  misc_RNA (1)...(19): siRNA sense strand
caucagaagugaaaucaua

SEQ ID NO: 912321 - RNA, 19 nt, Homo sapiens
  misc_RNA (1)...(19): siRNA sense strand
gaaaguagcaaauuugaug

SEQ ID NO: 912322 - RNA, 19 nt, Homo sapiens
  misc_RNA (1)...(19): siRNA sense strand
ucaaagaugguaacacuua

SEQ ID NO: 912323 - RNA, 19 nt, Homo sapiens
  misc_RNA (1)...(19): siRNA sense strand
ggagacagcuagaguugga

SEQ ID NO: 912324 - RNA, 19 nt, Homo sapiens
  misc_RNA (1)...(19): siRNA sense strand
gcagugaagucggucauuu

SEQ ID NO: 912325 - RNA, 19 nt, Homo sapiens
  misc_RNA (1)...(19): siRNA sense strand
gagaaggaaaguucgauua

SEQ ID NO: 912326 - RNA, 19 nt, Homo sapiens
  misc_RNA (1)...(19): siRNA sense strand
ggaagagcaugauguuuua

SEQ ID NO: 912327 - RNA, 19 nt, Homo sapiens
  misc_RNA (1)...(19): siRNA sense strand
ugaacaagaucauguggaa

SEQ ID NO: 912328 - RNA, 19 nt, Homo sapiens
  misc_RNA (1)...(19): siRNA sense strand
gaaggaaaguucgauuaca

SEQ ID NO: 912329 - RNA, 19 nt, Homo sapiens
  misc_RNA (1)...(19): siRNA sense strand
aagaagagguuccacuuug

SEQ ID NO: 912330 - RNA, 19 nt, Homo sapiens
  misc_RNA (1)...(19): siRNA sense strand
ugagaaacaugcuggaguu

SEQ ID NO: 912331 - RNA, 19 nt, Homo sapiens
  misc_RNA (1)...(19): siRNA sense strand
ucacaucaccuguccuaua

SEQ ID NO: 912332 - RNA, 19 nt, Homo sapiens
  misc_RNA (1)...(19): siRNA sense strand
caacagugcuuuucucauu

SEQ ID NO: 912333 - RNA, 19 nt, Homo sapiens
  misc_RNA (1)...(19): siRNA sense strand
gcucaucccuuucugaagu

SEQ ID NO: 912334 - RNA, 19 nt, Homo sapiens
  misc_RNA (1)...(19): siRNA sense strand
aaaguucgauuacaacaug

SEQ ID NO: 912335 - RNA, 19 nt, Homo sapiens
  misc_RNA (1)...(19): siRNA sense strand
gaagaaaaccccucaaaga

SEQ ID NO: 912336 - RNA, 19 nt, Homo sapiens
  misc_RNA (1)...(19): siRNA sense strand
gaucagcuguaucacauca

SEQ ID NO: 912337 - RNA, 19 nt, Homo sapiens
  misc_RNA (1)...(19): siRNA sense strand
caacaugaagauaccuuua

SEQ ID NO: 912338 - RNA, 19 nt, Homo sapiens
  misc_RNA (1)...(19): siRNA sense strand
ugacaaacccaaagacuug

SEQ ID NO: 912339 - RNA, 19 nt, Homo sapiens
  misc_RNA (1)...(19): siRNA sense strand
caucguaucuuacuuuaac

SEQ ID NO: 912340 - RNA, 19 nt, Homo sapiens
  misc_RNA (1)...(19): siRNA sense strand
uagcauccuuccuuacuuu

SEQ ID NO: 912341 - RNA, 19 nt, Homo sapiens
  misc_RNA (1)...(19): siRNA sense strand
gaauccaacccauuucaaa

SEQ ID NO: 912342 - RNA, 19 nt, Homo sapiens
  misc_RNA (1)...(19): siRNA sense strand
auucaugcaucguaucuua

SEQ ID NO: 912343 - RNA, 19 nt, Homo sapiens
  misc_RNA (1)...(19): siRNA sense strand
gcauggagaucaguaucaa

SEQ ID NO: 912344 - RNA, 19 nt, Homo sapiens
  misc_RNA (1)...(19): siRNA sense strand
uugagaagcuuguuagugu

SEQ ID NO: 912345 - RNA, 19 nt, Homo sapiens
  misc_RNA (1)...(19): siRNA sense strand
ccguagauauguuuaaguu

SEQ ID NO: 912346 - RNA, 19 nt, Homo sapiens
  misc_RNA (1)...(19): siRNA sense strand
gcacaagcauggagaucag

SEQ ID NO: 912347 - RNA, 19 nt, Homo sapiens
  misc_RNA (1)...(19): siRNA sense strand
uagagaauccuccugauga

SEQ ID NO: 912348 - RNA, 19 nt, Homo sapiens
  misc_RNA (1)...(19): siRNA sense strand
gaaacagcagccucuugua

SEQ ID NO: 912349 - RNA, 19 nt, Homo sapiens
  misc_RNA (1)...(19): siRNA sense strand
caaagaagagguuccacuu

SEQ ID NO: 912350 - RNA, 19 nt, Homo sapiens
  misc_RNA (1)...(19): siRNA sense strand
gaaguccguagauauguuu

SEQ ID NO: 912351 - RNA, 19 nt, Homo sapiens
  misc_RNA (1)...(19): siRNA sense strand
aaggaaaguucgauuacaa

SEQ ID NO: 912352 - RNA, 19 nt, Homo sapiens
  misc_RNA (1)...(19): siRNA sense strand
gacaguggcuacuauuucu

SEQ ID NO: 912353 - RNA, 19 nt, Homo sapiens
  misc_RNA (1)...(19): siRNA sense strand
gaugauggguuuguaagca

SEQ ID NO: 912354 - RNA, 19 nt, Homo sapiens
  misc_RNA (1)...(19): siRNA sense strand
gcuggaguuuccugcguua

SEQ ID NO: 912355 - RNA, 19 nt, Homo sapiens
  misc_RNA (1)...(19): siRNA sense strand
uaaucuggcugcugagaga

SEQ ID NO: 912356 - RNA, 19 nt, Homo sapiens
  misc_RNA (1)...(19): siRNA sense strand
uuacaaugcugcugaugau

SEQ ID NO: 912357 - RNA, 19 nt, Homo sapiens
  misc_RNA (1)...(19): siRNA sense strand
ccucaaagaugguaacacu

SEQ ID NO: 912358 - RNA, 19 nt, Homo sapiens
  misc_RNA (1)...(19): siRNA sense strand
gaggagacagcuagaguug

SEQ ID NO: 912359 - RNA, 19 nt, Homo sapiens
  misc_RNA (1)...(19): siRNA sense strand
ucagaccuguguugaaguu

SEQ ID NO: 912360 - RNA, 19 nt, Homo sapiens
  misc_RNA (1)...(19): siRNA sense strand
guguugggcucaucccuuu

SEQ ID NO: 912361 - RNA, 19 nt, Homo sapiens
  misc_RNA (1)...(19): siRNA sense strand
ggacaaguuauaaccauca

SEQ ID NO: 912362 - RNA, 19 nt, Homo sapiens
  misc_RNA (1)...(19): siRNA sense strand
uuacuuugcuggaaaucuu

SEQ ID NO: 912363 - RNA, 19 nt, Homo sapiens
  misc_RNA (1)...(19): siRNA sense strand
uaacugaacaagaucaugu

SEQ ID NO: 912364 - RNA, 19 nt, Homo sapiens
  misc_RNA (1)...(19): siRNA sense strand
aaacagcagccucuuguau

SEQ ID NO: 912365 - RNA, 19 nt, Homo sapiens
  misc_RNA (1)...(19): siRNA sense strand
gagacaguggcuacuauuu

SEQ ID NO: 912366 - RNA, 19 nt, Homo sapiens
  misc_RNA (1)...(19): siRNA sense strand
gaauucgccuaggcagaaa

SEQ ID NO: 912367 - RNA, 19 nt, Homo sapiens
  misc_RNA (1)...(19): siRNA sense strand
cugcuagcauccuuccuua

SEQ ID NO: 912368 - RNA, 19 nt, Homo sapiens
  misc_RNA (1)...(19): siRNA sense strand
guccuauacugaaugauga

SEQ ID NO: 912369 - RNA, 19 nt, Homo sapiens
  misc_RNA (1)...(19): siRNA sense strand
aaaccagucacacuucuaa

SEQ ID NO: 912370 - RNA, 19 nt, Homo sapiens
  misc_RNA (1)...(19): siRNA sense strand
uggaugacauacaguuuga

SEQ ID NO: 912371 - RNA, 19 nt, Homo sapiens
  misc_RNA (1)...(19): siRNA sense strand
gcuagaguuggacaaguua

SEQ ID NO: 912372 - RNA, 19 nt, Homo sapiens
  misc_RNA (1)...(19): siRNA sense strand
acaaugcugcugaugauaa

SEQ ID NO: 912373 - RNA, 19 nt, Homo sapiens
  misc_RNA (1)...(19): siRNA sense strand
ugaaguccguagauauguu

SEQ ID NO: 912374 - RNA, 19 nt, Homo sapiens
  misc_RNA (1)...(19): siRNA sense strand
gcugagagaaggaaaguuc

SEQ ID NO: 912375 - RNA, 19 nt, Homo sapiens
  misc_RNA (1)...(19): siRNA sense strand
gcaaaccaucacggaaaua

SEQ ID NO: 912376 - RNA, 19 nt, Homo sapiens
  misc_RNA (1)...(19): siRNA sense strand
cacaguacaucagaaguga

SEQ ID NO: 912377 - RNA, 19 nt, Homo sapiens
  misc_RNA (1)...(19): siRNA sense strand
cacaucaccuguccuauac

SEQ ID NO: 912378 - RNA, 19 nt, Homo sapiens
  misc_RNA (1)...(19): siRNA sense strand
ggagacaguggcuacuauu

SEQ ID NO: 912379 - RNA, 19 nt, Homo sapiens
  misc_RNA (1)...(19): siRNA sense strand
gaagaggaaggagcgguuu

SEQ ID NO: 912380 - RNA, 19 nt, Homo sapiens
  misc_RNA (1)...(19): siRNA sense strand
cgaauucgccuaggcagaa

SEQ ID NO: 912381 - RNA, 19 nt, Homo sapiens
  misc_RNA (1)...(19): siRNA sense strand
uguauacaguucuuagaga

SEQ ID NO: 912382 - RNA, 19 nt, Homo sapiens
  misc_RNA (1)...(19): siRNA sense strand
ugaagaugaucagcuguau

SEQ ID NO: 912383 - RNA, 19 nt, Homo sapiens
  misc_RNA (1)...(19): siRNA sense strand
guccagcacauuuggcuua

SEQ ID NO: 912384 - RNA, 19 nt, Homo sapiens
  misc_RNA (1)...(19): siRNA sense strand
guagcaaauuugaugaucu

SEQ ID NO: 912385 - RNA, 19 nt, Homo sapiens
  misc_RNA (1)...(19): siRNA sense strand
guaucaaggucaugguaca

SEQ ID NO: 912386 - RNA, 19 nt, Homo sapiens
  misc_RNA (1)...(19): siRNA sense strand
gacaaguuauaaccaucaa

SEQ ID NO: 912387 - RNA, 19 nt, Homo sapiens
  misc_RNA (1)...(19): siRNA sense strand
cagcaauucaugcaucgua

SEQ ID NO: 912388 - RNA, 19 nt, Homo sapiens
  misc_RNA (1)...(19): siRNA sense strand
gugaagaugaucagcugua

SEQ ID NO: 912389 - RNA, 19 nt, Homo sapiens
  misc_RNA (1)...(19): siRNA sense strand
ucucuugucugacuuuaca

SEQ ID NO: 912390 - RNA, 19 nt, Homo sapiens
  misc_RNA (1)...(19): siRNA sense strand
cuuaucgucucuugucuga

SEQ ID NO: 912391 - RNA, 19 nt, Homo sapiens
  misc_RNA (1)...(19): siRNA sense strand
uuucugaaguccguagaua

SEQ ID NO: 912392 - RNA, 19 nt, Homo sapiens
  misc_RNA (1)...(19): siRNA sense strand
ugaaggaaaguagcaaauu

SEQ ID NO: 912393 - RNA, 19 nt, Homo sapiens
  misc_RNA (1)...(19): siRNA sense strand
ggaaaguucgauuacaaca

SEQ ID NO: 912394 - RNA, 19 nt, Homo sapiens
  misc_RNA (1)...(19): siRNA sense strand
guuauaaccaucaaagcaa

SEQ ID NO: 912395 - RNA, 19 nt, Homo sapiens
  misc_RNA (1)...(19): siRNA sense strand
gcaccuccguucagagcau

SEQ ID NO: 912396 - RNA, 19 nt, Homo sapiens
  misc_RNA (1)...(19): siRNA sense strand
gcauugagaagcuuguuag

SEQ ID NO: 912397 - RNA, 19 nt, Homo sapiens
  misc_RNA (1)...(19): siRNA sense strand
aacagcagccucuuguaua

SEQ ID NO: 912398 - RNA, 19 nt, Homo sapiens
  misc_RNA (1)...(19): siRNA sense strand
ugcaucguaucuuacuuua

SEQ ID NO: 912399 - RNA, 19 nt, Homo sapiens
  misc_RNA (1)...(19): siRNA sense strand
caucaccuguccuauacug

SEQ ID NO: 912400 - RNA, 19 nt, Homo sapiens
  misc_RNA (1)...(19): siRNA sense strand
uaucacaucaccuguccua

SEQ ID NO: 912401 - RNA, 19 nt, Homo sapiens
  misc_RNA (1)...(19): siRNA sense strand
uucaaaggaugauuucaga

SEQ ID NO: 912402 - RNA, 19 nt, Homo sapiens
  misc_RNA (1)...(19): siRNA sense strand
caaguuauaaccaucaaag

SEQ ID NO: 912403 - RNA, 19 nt, Homo sapiens
  misc_RNA (1)...(19): siRNA sense strand
gaaaguucgauuacaacau

SEQ ID NO: 912404 - RNA, 19 nt, Homo sapiens
  misc_RNA (1)...(19): siRNA sense strand
caaaccaguuggaaaagaa

SEQ ID NO: 912405 - RNA, 19 nt, Homo sapiens
  misc_RNA (1)...(19): siRNA sense strand
ggaaaguagcaaauuugau

SEQ ID NO: 912406 - RNA, 19 nt, Homo sapiens
  misc_RNA (1)...(19): siRNA sense strand
gaaugaugacaaacccaaa

SEQ ID NO: 912407 - RNA, 19 nt, Homo sapiens
  misc_RNA (1)...(19): siRNA sense strand
gaagagguuccacuuugca

SEQ ID NO: 912408 - RNA, 19 nt, Homo sapiens
  misc_RNA (1)...(19): siRNA sense strand
caaugcugcugaugauaag

SEQ ID NO: 912409 - RNA, 19 nt, Homo sapiens
  misc_RNA (1)...(19): siRNA sense strand
gggcucaucccuuucugaa

SEQ ID NO: 912410 - RNA, 19 nt, Homo sapiens
  misc_RNA (1)...(19): siRNA sense strand
uagcaaauuugaugaucuc

SEQ ID NO: 912411 - RNA, 19 nt, Homo sapiens
  misc_RNA (1)...(19): siRNA sense strand
gaaggagcgguuuccacaa

SEQ ID NO: 912412 - RNA, 19 nt, Homo sapiens
  misc_RNA (1)...(19): siRNA sense strand
guacaucagaagugaaauc

SEQ ID NO: 912413 - RNA, 19 nt, Homo sapiens
  misc_RNA (1)...(19): siRNA sense strand
ccacaguacaucagaagug

SEQ ID NO: 912414 - RNA, 19 nt, Homo sapiens
  misc_RNA (1)...(19): siRNA sense strand
gggaaguccagcacauuug

SEQ ID NO: 912415 - RNA, 19 nt, Homo sapiens
  misc_RNA (1)...(19): siRNA sense strand
gggaccaucuacaguugga

SEQ ID NO: 912416 - RNA, 19 nt, Homo sapiens
  misc_RNA (1)...(19): siRNA sense strand
uacauuugguggccagauu

SEQ ID NO: 912417 - RNA, 19 nt, Homo sapiens
  misc_RNA (1)...(19): siRNA sense strand
caaaauccauugaagaaac

SEQ ID NO: 912418 - RNA, 19 nt, Homo sapiens
  misc_RNA (1)...(19): siRNA sense strand
agagaauccuccugaugau

SEQ ID NO: 912419 - RNA, 19 nt, Homo sapiens
  misc_RNA (1)...(19): siRNA sense strand
ggaaagggauauaacguua

SEQ ID NO: 912420 - RNA, 19 nt, Homo sapiens
  misc_RNA (1)...(19): siRNA sense strand
gaaaaggucugcaaacuaa

SEQ ID NO: 912421 - RNA, 19 nt, Homo sapiens
  misc_RNA (1)...(19): siRNA sense strand
gaggacagcuauuaccaua

SEQ ID NO: 912422 - RNA, 19 nt, Homo sapiens
  misc_RNA (1)...(19): siRNA sense strand
ggacagcuauuaccauaug

SEQ ID NO: 912423 - RNA, 19 nt, Homo sapiens
  misc_RNA (1)...(19): siRNA sense strand
ggacagaggugcuaaugca

SEQ ID NO: 912424 - RNA, 19 nt, Homo sapiens
  misc_RNA (1)...(19): siRNA sense strand
gaagaaguaucuacaugga

SEQ ID NO: 912425 - RNA, 19 nt, Homo sapiens
  misc_RNA (1)...(19): siRNA sense strand
gaacuacuacuuucaagaa

SEQ ID NO: 912426 - RNA, 19 nt, Homo sapiens
  misc_RNA (1)...(19): siRNA sense strand
gauauaacguuaagacauc

SEQ ID NO: 912427 - RNA, 19 nt, Homo sapiens
  misc_RNA (1)...(19): siRNA sense strand
gaugauggcugggagauug

SEQ ID NO: 912428 - RNA, 19 nt, Homo sapiens
  misc_RNA (1)...(19): siRNA sense strand
aaacaaacaucaugagauc

SEQ ID NO: 912429 - RNA, 19 nt, Homo sapiens
  misc_RNA (1)...(19): siRNA sense strand
ggaaagaugccaagugaga

SEQ ID NO: 912430 - RNA, 19 nt, Homo sapiens
  misc_RNA (1)...(19): siRNA sense strand
gagggaagaugaauuuaca

SEQ ID NO: 912431 - RNA, 19 nt, Homo sapiens
  misc_RNA (1)...(19): siRNA sense strand
guaucuacauggaauagua

SEQ ID NO: 912432 - RNA, 19 nt, Homo sapiens
  misc_RNA (1)...(19): siRNA sense strand
aauaacagcuguacagaau

SEQ ID NO: 912433 - RNA, 19 nt, Homo sapiens
  misc_RNA (1)...(19): siRNA sense strand
uaacagcuguacagaaugu

SEQ ID NO: 912434 - RNA, 19 nt, Homo sapiens
  misc_RNA (1)...(19): siRNA sense strand
gggaagaaguaucuacaug

SEQ ID NO: 912435 - RNA, 19 nt, Homo sapiens
  misc_RNA (1)...(19): siRNA sense strand
gguagaagagauacaauuu

SEQ ID NO: 912436 - RNA, 19 nt, Homo sapiens
  misc_RNA (1)...(19): siRNA sense strand
gcuccuagauucuggcauu

SEQ ID NO: 912437 - RNA, 19 nt, Homo sapiens
  misc_RNA (1)...(19): siRNA sense strand
gauacaauuuggagagcua

SEQ ID NO: 912438 - RNA, 19 nt, Homo sapiens
  misc_RNA (1)...(19): siRNA sense strand
caagaaaugcugauccaaa

SEQ ID NO: 912439 - RNA, 19 nt, Homo sapiens
  misc_RNA (1)...(19): siRNA sense strand
uaguguagauuccaacuuu

SEQ ID NO: 912440 - RNA, 19 nt, Homo sapiens
  misc_RNA (1)...(19): siRNA sense strand
gaaacaaacaucaugagau

SEQ ID NO: 912441 - RNA, 19 nt, Homo sapiens
  misc_RNA (1)...(19): siRNA sense strand
gaaaugcugauccaaaugu

SEQ ID NO: 912442 - RNA, 19 nt, Homo sapiens
  misc_RNA (1)...(19): siRNA sense strand
gcuauuacccauugaagaa

SEQ ID NO: 912443 - RNA, 19 nt, Homo sapiens
  misc_RNA (1)...(19): siRNA sense strand
gagacaaaguuggaaauca

SEQ ID NO: 912444 - RNA, 19 nt, Homo sapiens
  misc_RNA (1)...(19): siRNA sense strand
gaagagacaaaguuggaaa

SEQ ID NO: 912445 - RNA, 19 nt, Homo sapiens
  misc_RNA (1)...(19): siRNA sense strand
ggagagcuaucugaagaga

SEQ ID NO: 912446 - RNA, 19 nt, Homo sapiens
  misc_RNA (1)...(19): siRNA sense strand
gaaagggauauaacguuaa

SEQ ID NO: 912447 - RNA, 19 nt, Homo sapiens
  misc_RNA (1)...(19): siRNA sense strand
ggacgucucagaaauugaa

SEQ ID NO: 912448 - RNA, 19 nt, Homo sapiens
  misc_RNA (1)...(19): siRNA sense strand
aaccaaagauggaaagaug

SEQ ID NO: 912449 - RNA, 19 nt, Homo sapiens
  misc_RNA (1)...(19): siRNA sense strand
caugagaucuucaacuuac

SEQ ID NO: 912450 - RNA, 19 nt, Homo sapiens
  misc_RNA (1)...(19): siRNA sense strand
gagaaugguuacacugcuu

SEQ ID NO: 912451 - RNA, 19 nt, Homo sapiens
  misc_RNA (1)...(19): siRNA sense strand
uagaagagauacaauuugg

SEQ ID NO: 912452 - RNA, 19 nt, Homo sapiens
  misc_RNA (1)...(19): siRNA sense strand
aagaaaugcugauccaaau

SEQ ID NO: 912453 - RNA, 19 nt, Homo sapiens
  misc_RNA (1)...(19): siRNA sense strand
gaccggacgucucagaaau

SEQ ID NO: 912454 - RNA, 19 nt, Homo sapiens
  misc_RNA (1)...(19): siRNA sense strand
gaacuuggagcuaauaaaa

SEQ ID NO: 912455 - RNA, 19 nt, Homo sapiens
  misc_RNA (1)...(19): siRNA sense strand
agaaguaucuacauggaau

SEQ ID NO: 912456 - RNA, 19 nt, Homo sapiens
  misc_RNA (1)...(19): siRNA sense strand
gaacauaugacagauuuac

SEQ ID NO: 912457 - RNA, 19 nt, Homo sapiens
  misc_RNA (1)...(19): siRNA sense strand
caugagggaagaugaauuu

SEQ ID NO: 912458 - RNA, 19 nt, Homo sapiens
  misc_RNA (1)...(19): siRNA sense strand
acaauuaagggaagaagua

SEQ ID NO: 912459 - RNA, 19 nt, Homo sapiens
  misc_RNA (1)...(19): siRNA sense strand
cuaaagaagacacuauuug

SEQ ID NO: 912460 - RNA, 19 nt, Homo sapiens
  misc_RNA (1)...(19): siRNA sense strand
ccucaacuuucuucucaaa

SEQ ID NO: 912461 - RNA, 19 nt, Homo sapiens
  misc_RNA (1)...(19): siRNA sense strand
ggucuuggacuugaacaua

SEQ ID NO: 912462 - RNA, 19 nt, Homo sapiens
  misc_RNA (1)...(19): siRNA sense strand
guugaagauuugagugaaa

SEQ ID NO: 912463 - RNA, 19 nt, Homo sapiens
  misc_RNA (1)...(19): siRNA sense strand
gggaagaugaauuuacaaa

SEQ ID NO: 912464 - RNA, 19 nt, Homo sapiens
  misc_RNA (1)...(19): siRNA sense strand
gaaguaucuacauggaaua

SEQ ID NO: 912465 - RNA, 19 nt, Homo sapiens
  misc_RNA (1)...(19): siRNA sense strand
gaucuugaaguguguagaa

SEQ ID NO: 912466 - RNA, 19 nt, Homo sapiens
  misc_RNA (1)...(19): siRNA sense strand
guagaagagauacaauuug

SEQ ID NO: 912467 - RNA, 19 nt, Homo sapiens
  misc_RNA (1)...(19): siRNA sense strand
ggauauaacguuaagacau

SEQ ID NO: 912468 - RNA, 19 nt, Homo sapiens
  misc_RNA (1)...(19): siRNA sense strand
uuggagaucuggaaguauu

SEQ ID NO: 912469 - RNA, 19 nt, Homo sapiens
  misc_RNA (1)...(19): siRNA sense strand
gagaaggauaagcaaagua

SEQ ID NO: 912470 - RNA, 19 nt, Homo sapiens
  misc_RNA (1)...(19): siRNA sense strand
caguguggccauuuaauaa

SEQ ID NO: 912471 - RNA, 19 nt, Homo sapiens
  misc_RNA (1)...(19): siRNA sense strand
aggaacagaucuugaagug

SEQ ID NO: 912472 - RNA, 19 nt, Homo sapiens
  misc_RNA (1)...(19): siRNA sense strand
auggaaagaugccaaguga

SEQ ID NO: 912473 - RNA, 19 nt, Homo sapiens
  misc_RNA (1)...(19): siRNA sense strand
guacagaauguuauuacug

SEQ ID NO: 912474 - RNA, 19 nt, Homo sapiens
  misc_RNA (1)...(19): siRNA sense strand
uuggagagcuaucugaaga

SEQ ID NO: 912475 - RNA, 19 nt, Homo sapiens
  misc_RNA (1)...(19): siRNA sense strand
uucaacagcuaacuaaaga

SEQ ID NO: 912476 - RNA, 19 nt, Homo sapiens
  misc_RNA (1)...(19): siRNA sense strand
gauuccaacuuucaguaug

SEQ ID NO: 912477 - RNA, 19 nt, Homo sapiens
  misc_RNA (1)...(19): siRNA sense strand
agacaaaguuggaaaucag

SEQ ID NO: 912478 - RNA, 19 nt, Homo sapiens
  misc_RNA (1)...(19): siRNA sense strand
gcauuaguguagauuccaa

SEQ ID NO: 912479 - RNA, 19 nt, Homo sapiens
  misc_RNA (1)...(19): siRNA sense strand
gaaugguuacacugcuuua

SEQ ID NO: 912480 - RNA, 19 nt, Homo sapiens
  misc_RNA (1)...(19): siRNA sense strand
gcuuguaggagacuuauga

SEQ ID NO: 912481 - RNA, 19 nt, Homo sapiens
  misc_RNA (1)...(19): siRNA sense strand
cuugaaguguguagaacua

SEQ ID NO: 912482 - RNA, 19 nt, Homo sapiens
  misc_RNA (1)...(19): siRNA sense strand
cagaggaacagaucuugaa

SEQ ID NO: 912483 - RNA, 19 nt, Homo sapiens
  misc_RNA (1)...(19): siRNA sense strand
acaguguggccauuuaaua

SEQ ID NO: 912484 - RNA, 19 nt, Homo sapiens
  misc_RNA (1)...(19): siRNA sense strand
aagaauggaauuaccagua

SEQ ID NO: 912485 - RNA, 19 nt, Homo sapiens
  misc_RNA (1)...(19): siRNA sense strand
gguuguugcucuccuuguu

SEQ ID NO: 912486 - RNA, 19 nt, Homo sapiens
  misc_RNA (1)...(19): siRNA sense strand
aaacuucaacagcuaacua

SEQ ID NO: 912487 - RNA, 19 nt, Homo sapiens
  misc_RNA (1)...(19): siRNA sense strand
uugaagaggacagcuauua

SEQ ID NO: 912488 - RNA, 19 nt, Homo sapiens
  misc_RNA (1)...(19): siRNA sense strand
ugauccaacucauauacaa

SEQ ID NO: 912489 - RNA, 19 nt, Homo sapiens
  misc_RNA (1)...(19): siRNA sense strand
agagcuaucugaagagaca

SEQ ID NO: 912490 - RNA, 19 nt, Homo sapiens
  misc_RNA (1)...(19): siRNA sense strand
aaagggauauaacguuaag

SEQ ID NO: 912491 - RNA, 19 nt, Homo sapiens
  misc_RNA (1)...(19): siRNA sense strand
gaaggauaagcaaaguauu

SEQ ID NO: 912492 - RNA, 19 nt, Homo sapiens
  misc_RNA (1)...(19): siRNA sense strand
cuaaaggaaagggauauaa

SEQ ID NO: 912493 - RNA, 19 nt, Homo sapiens
  misc_RNA (1)...(19): siRNA sense strand
caacagcuaacuaaagaag

SEQ ID NO: 912494 - RNA, 19 nt, Homo sapiens
  misc_RNA (1)...(19): siRNA sense strand
ggaagaugaauuuacaaag

SEQ ID NO: 912495 - RNA, 19 nt, Homo sapiens
  misc_RNA (1)...(19): siRNA sense strand
aaacaguguggccauuuaa

SEQ ID NO: 912496 - RNA, 19 nt, Homo sapiens
  misc_RNA (1)...(19): siRNA sense strand
guaaagaccagcagaaaau

SEQ ID NO: 912497 - RNA, 19 nt, Homo sapiens
  misc_RNA (1)...(19): siRNA sense strand
uauguaugcugcuaguguu

SEQ ID NO: 912498 - RNA, 19 nt, Homo sapiens
  misc_RNA (1)...(19): siRNA sense strand
aaaaugaacgggaaaauga

SEQ ID NO: 912499 - RNA, 19 nt, Homo sapiens
  misc_RNA (1)...(19): siRNA sense strand
uaauaacagcuguacagaa

SEQ ID NO: 912500 - RNA, 19 nt, Homo sapiens
  misc_RNA (1)...(19): siRNA sense strand
gaucuucaacuuacuuucu

SEQ ID NO: 912501 - RNA, 19 nt, Homo sapiens
  misc_RNA (1)...(19): siRNA sense strand
gcuaaugcaagcuuugaga

SEQ ID NO: 912502 - RNA, 19 nt, Homo sapiens
  misc_RNA (1)...(19): siRNA sense strand
aauucuggcugcucuuaaa

SEQ ID NO: 912503 - RNA, 19 nt, Homo sapiens
  misc_RNA (1)...(19): siRNA sense strand
gaaagaugccaagugagau

SEQ ID NO: 912504 - RNA, 19 nt, Homo sapiens
  misc_RNA (1)...(19): siRNA sense strand
ggaugagaaugguuacacu

SEQ ID NO: 912505 - RNA, 19 nt, Homo sapiens
  misc_RNA (1)...(19): siRNA sense strand
agaaggauaagcaaaguau

SEQ ID NO: 912506 - RNA, 19 nt, Homo sapiens
  misc_RNA (1)...(19): siRNA sense strand
ugagaaggauaagcaaagu

SEQ ID NO: 912507 - RNA, 19 nt, Homo sapiens
  misc_RNA (1)...(19): siRNA sense strand
guagcgagagcgaggauga

SEQ ID NO: 912508 - RNA, 19 nt, Homo sapiens
  misc_RNA (1)...(19): siRNA sense strand
uaucugaagagacaaaguu

SEQ ID NO: 912509 - RNA, 19 nt, Homo sapiens
  misc_RNA (1)...(19): siRNA sense strand
ucaugagaucuucaacuua

SEQ ID NO: 912510 - RNA, 19 nt, Homo sapiens
  misc_RNA (1)...(19): siRNA sense strand
aaagaugccaagugagauu

SEQ ID NO: 912511 - RNA, 19 nt, Homo sapiens
  misc_RNA (1)...(19): siRNA sense strand
cauguaugcugcucgagau

SEQ ID NO: 912512 - RNA, 19 nt, Homo sapiens
  misc_RNA (1)...(19): siRNA sense strand
gauggaaagaugccaagug

SEQ ID NO: 912513 - RNA, 19 nt, Homo sapiens
  misc_RNA (1)...(19): siRNA sense strand
ccggacgucucagaaauug

SEQ ID NO: 912514 - RNA, 19 nt, Homo sapiens
  misc_RNA (1)...(19): siRNA sense strand
acaaacaucaugagaucuu

SEQ ID NO: 912515 - RNA, 19 nt, Homo sapiens
  misc_RNA (1)...(19): siRNA sense strand
caaacaucaugagaucuuc

SEQ ID NO: 912516 - RNA, 19 nt, Homo sapiens
  misc_RNA (1)...(19): siRNA sense strand
aaaaggcuauuacccauug

SEQ ID NO: 912517 - RNA, 19 nt, Homo sapiens
  misc_RNA (1)...(19): siRNA sense strand
gucuuggacuugaacauau

SEQ ID NO: 912518 - RNA, 19 nt, Homo sapiens
  misc_RNA (1)...(19): siRNA sense strand
gagaucuucaacuuacuuu

SEQ ID NO: 912519 - RNA, 19 nt, Homo sapiens
  misc_RNA (1)...(19): siRNA sense strand
ggacaauccuuucauuaau

SEQ ID NO: 912520 - RNA, 19 nt, Homo sapiens
  misc_RNA (1)...(19): siRNA sense strand
ggacaaagacccagcuaau

SEQ ID NO: 912521 - RNA, 19 nt, Homo sapiens
  misc_RNA (1)...(19): siRNA sense strand
gaaggaggguggccugcaa

SEQ ID NO: 912522 - RNA, 19 nt, Homo sapiens
  misc_RNA (1)...(19): siRNA sense strand
gggacaauccuuucauuaa

SEQ ID NO: 912523 - RNA, 19 nt, Homo sapiens
  misc_RNA (1)...(19): siRNA sense strand
ccaagccucuacaucauaa

SEQ ID NO: 912524 - RNA, 19 nt, Homo sapiens
  misc_RNA (1)...(19): siRNA sense strand
caaccuauaugaccagauc

SEQ ID NO: 912525 - RNA, 19 nt, Homo sapiens
  misc_RNA (1)...(19): siRNA sense strand
gaaaggccuuccguccauu

SEQ ID NO: 912526 - RNA, 19 nt, Homo sapiens
  misc_RNA (1)...(19): siRNA sense strand
gaaggucgaauuaaguaug

SEQ ID NO: 912527 - RNA, 19 nt, Homo sapiens
  misc_RNA (1)...(19): siRNA sense strand
gcagugaaggucgaauuaa

SEQ ID NO: 912528 - RNA, 19 nt, Homo sapiens
  misc_RNA (1)...(19): siRNA sense strand
gugaaggucgaauuaagua

SEQ ID NO: 912529 - RNA, 19 nt, Homo sapiens
  misc_RNA (1)...(19): siRNA sense strand
ccucaucagugucuacuuc

SEQ ID NO: 912530 - RNA, 19 nt, Homo sapiens
  misc_RNA (1)...(19): siRNA sense strand
gacaaagacccagcuaaug

SEQ ID NO: 912531 - RNA, 19 nt, Homo sapiens
  misc_RNA (1)...(19): siRNA sense strand
aagcaguguuugacagaaa

SEQ ID NO: 912532 - RNA, 19 nt, Homo sapiens
  misc_RNA (1)...(19): siRNA sense strand
ucuguaaacuggacaucuu

SEQ ID NO: 912533 - RNA, 19 nt, Homo sapiens
  misc_RNA (1)...(19): siRNA sense strand
ggucgaauuaaguaugaua

SEQ ID NO: 912534 - RNA, 19 nt, Homo sapiens
  misc_RNA (1)...(19): siRNA sense strand
agaaaggccuuccguccau

SEQ ID NO: 912535 - RNA, 19 nt, Homo sapiens
  misc_RNA (1)...(19): siRNA sense strand
ugacaucauuccuguggau

SEQ ID NO: 912536 - RNA, 19 nt, Homo sapiens
  misc_RNA (1)...(19): siRNA sense strand
caaagacccagcuaaugga

SEQ ID NO: 912537 - RNA, 19 nt, Homo sapiens
  misc_RNA (1)...(19): siRNA sense strand
ggccaagccucuacaucau

SEQ ID NO: 912538 - RNA, 19 nt, Homo sapiens
  misc_RNA (1)...(19): siRNA sense strand
gguugacccugcugucuuc

SEQ ID NO: 912539 - RNA, 19 nt, Homo sapiens
  misc_RNA (1)...(19): siRNA sense strand
acaaagacccagcuaaugg

SEQ ID NO: 912540 - RNA, 19 nt, Homo sapiens
  misc_RNA (1)...(19): siRNA sense strand
gccaagccucuacaucaua

SEQ ID NO: 912541 - RNA, 19 nt, Homo sapiens
  misc_RNA (1)...(19): siRNA sense strand
cagugaaggucgaauuaag

SEQ ID NO: 912542 - RNA, 19 nt, Homo sapiens
  misc_RNA (1)...(19): siRNA sense strand
aaggucgaauuaaguauga

SEQ ID NO: 912543 - RNA, 19 nt, Homo sapiens
  misc_RNA (1)...(19): siRNA sense strand
ggaguuagcagggaagaag

SEQ ID NO: 912544 - RNA, 19 nt, Homo sapiens
  misc_RNA (1)...(19): siRNA sense strand
caagcaguguuugacagaa

SEQ ID NO: 912545 - RNA, 19 nt, Homo sapiens
  misc_RNA (1)...(19): siRNA sense strand
guaaacuggacaucuucua

SEQ ID NO: 912546 - RNA, 19 nt, Homo sapiens
  misc_RNA (1)...(19): siRNA sense strand
caaugagggugaccagcau

SEQ ID NO: 912547 - RNA, 19 nt, Homo sapiens
  misc_RNA (1)...(19): siRNA sense strand
acaaggaggugugggagau

SEQ ID NO: 912548 - RNA, 19 nt, Homo sapiens
  misc_RNA (1)...(19): siRNA sense strand
guggauggauuugguaugg

SEQ ID NO: 912549 - RNA, 19 nt, Homo sapiens
  misc_RNA (1)...(19): siRNA sense strand
guucuuuccucuacacagu

SEQ ID NO: 912550 - RNA, 19 nt, Homo sapiens
  misc_RNA (1)...(19): siRNA sense strand
cgaauuaaguaugauaagc

SEQ ID NO: 912551 - RNA, 19 nt, Homo sapiens
  misc_RNA (1)...(19): siRNA sense strand
caucaauaaacucacagua

SEQ ID NO: 912552 - RNA, 19 nt, Homo sapiens
  misc_RNA (1)...(19): siRNA sense strand
ugggacaauccuuucauua

SEQ ID NO: 912553 - RNA, 19 nt, Homo sapiens
  misc_RNA (1)...(19): siRNA sense strand
caucaauugcucaggcuuu

SEQ ID NO: 912554 - RNA, 19 nt, Homo sapiens
  misc_RNA (1)...(19): siRNA sense strand
uaaguaugauaagccaaug

SEQ ID NO: 912555 - RNA, 19 nt, Homo sapiens
  misc_RNA (1)...(19): siRNA sense strand
ccaagcaguguuugacaga

SEQ ID NO: 912556 - RNA, 19 nt, Homo sapiens
  misc_RNA (1)...(19): siRNA sense strand
ggaagaggcgacgcuuuua

SEQ ID NO: 912557 - RNA, 19 nt, Homo sapiens
  misc_RNA (1)...(19): siRNA sense strand
cagcagugaaggucgaauu

SEQ ID NO: 912558 - RNA, 19 nt, Homo sapiens
  misc_RNA (1)...(19): siRNA sense strand
gcuuucugguugccauuga

SEQ ID NO: 912559 - RNA, 19 nt, Homo sapiens
  misc_RNA (1)...(19): siRNA sense strand
ugacccugcugucuuccaa

SEQ ID NO: 912560 - RNA, 19 nt, Homo sapiens
  misc_RNA (1)...(19): siRNA sense strand
cagcagagagcgagaaucg

SEQ ID NO: 912561 - RNA, 19 nt, Homo sapiens
  misc_RNA (1)...(19): siRNA sense strand
gaguguguuggcaucaaua

SEQ ID NO: 912562 - RNA, 19 nt, Homo sapiens
  misc_RNA (1)...(19): siRNA sense strand
gaccagaucauguuuuaug

SEQ ID NO: 912563 - RNA, 19 nt, Homo sapiens
  misc_RNA (1)...(19): siRNA sense strand
cuucaguucuuuccucuac

SEQ ID NO: 912564 - RNA, 19 nt, Homo sapiens
  misc_RNA (1)...(19): siRNA sense strand
uggcaucaauaaacucaca

SEQ ID NO: 912565 - RNA, 19 nt, Homo sapiens
  misc_RNA (1)...(19): siRNA sense strand
gguaugggacaauccuuuc

SEQ ID NO: 912566 - RNA, 19 nt, Homo sapiens
  misc_RNA (1)...(19): siRNA sense strand
gagggugaccagcaucugu

SEQ ID NO: 912567 - RNA, 19 nt, Homo sapiens
  misc_RNA (1)...(19): siRNA sense strand
gauggacacccugcucuuc

SEQ ID NO: 912568 - RNA, 19 nt, Homo sapiens
  misc_RNA (1)...(19): siRNA sense strand
ucauuccuguggauggauu

SEQ ID NO: 912569 - RNA, 19 nt, Homo sapiens
  misc_RNA (1)...(19): siRNA sense strand
cauccuuacugucauuguc

SEQ ID NO: 912570 - RNA, 19 nt, Homo sapiens
  misc_RNA (1)...(19): siRNA sense strand
aauaagggccugggucuca

SEQ ID NO: 912571 - RNA, 19 nt, Homo sapiens
  misc_RNA (1)...(19): siRNA sense strand
gaccagcaucuguaaacug

SEQ ID NO: 912572 - RNA, 19 nt, Homo sapiens
  misc_RNA (1)...(19): siRNA sense strand
uaaacuggacaucuucuac

SEQ ID NO: 912573 - RNA, 19 nt, Homo sapiens
  misc_RNA (1)...(19): siRNA sense strand
cuacuucccuuuugaccaa

SEQ ID NO: 912574 - RNA, 19 nt, Homo sapiens
  misc_RNA (1)...(19): siRNA sense strand
agaguguguuggcaucaau

SEQ ID NO: 912575 - RNA, 19 nt, Homo sapiens
  misc_RNA (1)...(19): siRNA sense strand
ccuccuccauccuuacugu

SEQ ID NO: 912576 - RNA, 19 nt, Homo sapiens
  misc_RNA (1)...(19): siRNA sense strand
ggucucacugccuauauca

SEQ ID NO: 912577 - RNA, 19 nt, Homo sapiens
  misc_RNA (1)...(19): siRNA sense strand
agcagugaaggucgaauua

SEQ ID NO: 912578 - RNA, 19 nt, Homo sapiens
  misc_RNA (1)...(19): siRNA sense strand
agagagaccgagccagaug

SEQ ID NO: 912579 - RNA, 19 nt, Homo sapiens
  misc_RNA (1)...(19): siRNA sense strand
caugggcaacaaccuauau

SEQ ID NO: 912580 - RNA, 19 nt, Homo sapiens
  misc_RNA (1)...(19): siRNA sense strand
guccaugggcaacaaccua

SEQ ID NO: 912581 - RNA, 19 nt, Homo sapiens
  misc_RNA (1)...(19): siRNA sense strand
ugggagcucuugggcauca

SEQ ID NO: 912582 - RNA, 19 nt, Homo sapiens
  misc_RNA (1)...(19): siRNA sense strand
aacuguaccuucaccuuca

SEQ ID NO: 912583 - RNA, 19 nt, Homo sapiens
  misc_RNA (1)...(19): siRNA sense strand
uaaacucacaguauuagcu

SEQ ID NO: 912584 - RNA, 19 nt, Homo sapiens
  misc_RNA (1)...(19): siRNA sense strand
uugaugcccucagcuucua

SEQ ID NO: 912585 - RNA, 19 nt, Homo sapiens
  misc_RNA (1)...(19): siRNA sense strand
ccaugggcaacaaccuaua

SEQ ID NO: 912586 - RNA, 19 nt, Homo sapiens
  misc_RNA (1)...(19): siRNA sense strand
aacuggacaucuucuacuu

SEQ ID NO: 912587 - RNA, 19 nt, Homo sapiens
  misc_RNA (1)...(19): siRNA sense strand
gggaggagcucgagaucuu

SEQ ID NO: 912588 - RNA, 19 nt, Homo sapiens
  misc_RNA (1)...(19): siRNA sense strand
ugaagaaggucaaaguaca

SEQ ID NO: 912589 - RNA, 19 nt, Homo sapiens
  misc_RNA (1)...(19): siRNA sense strand
caacaucaccuccgucucu

SEQ ID NO: 912590 - RNA, 19 nt, Homo sapiens
  misc_RNA (1)...(19): siRNA sense strand
aaguacagcugcagugugu

SEQ ID NO: 912591 - RNA, 19 nt, Homo sapiens
  misc_RNA (1)...(19): siRNA sense strand
gaagaaggucaaaguacag

SEQ ID NO: 912592 - RNA, 19 nt, Homo sapiens
  misc_RNA (1)...(19): siRNA sense strand
ggagggaggagcucgagau

SEQ ID NO: 912593 - RNA, 19 nt, Homo sapiens
  misc_RNA (1)...(19): siRNA sense strand
ccugaagaaggucaaagua

SEQ ID NO: 912594 - RNA, 19 nt, Homo sapiens
  misc_RNA (1)...(19): siRNA sense strand
cucaaacccugguccucua

SEQ ID NO: 912595 - RNA, 19 nt, Homo sapiens
  misc_RNA (1)...(19): siRNA sense strand
caaaguacagcugcagugu

SEQ ID NO: 912596 - RNA, 19 nt, Homo sapiens
  misc_RNA (1)...(19): siRNA sense strand
caucccaggcugccacuug

SEQ ID NO: 912597 - RNA, 19 nt, Homo sapiens
  misc_RNA (1)...(19): siRNA sense strand
gaggagcucgagaucuuca

SEQ ID NO: 912598 - RNA, 19 nt, Homo sapiens
  misc_RNA (1)...(19): siRNA sense strand
ucgccucucucgcuacuag

SEQ ID NO: 912599 - RNA, 19 nt, Homo sapiens
  misc_RNA (1)...(19): siRNA sense strand
aaacccugguccucuaucu

SEQ ID NO: 912600 - RNA, 19 nt, Homo sapiens
  misc_RNA (1)...(19): siRNA sense strand
ccaguugguugauaagaua

SEQ ID NO: 912601 - RNA, 19 nt, Homo sapiens
  misc_RNA (1)...(19): siRNA sense strand
guagaacaauugaagaaga

SEQ ID NO: 912602 - RNA, 19 nt, Homo sapiens
  misc_RNA (1)...(19): siRNA sense strand
gaauuccucucgugccaaa

SEQ ID NO: 912603 - RNA, 19 nt, Homo sapiens
  misc_RNA (1)...(19): siRNA sense strand
ggaccuggaugccaauaag

SEQ ID NO: 912604 - RNA, 19 nt, Homo sapiens
  misc_RNA (1)...(19): siRNA sense strand
gacaguugcuuguaaugau

SEQ ID NO: 912605 - RNA, 19 nt, Homo sapiens
  misc_RNA (1)...(19): siRNA sense strand
gcaaggcaaggaagagauu

SEQ ID NO: 912606 - RNA, 19 nt, Homo sapiens
  misc_RNA (1)...(19): siRNA sense strand
agcgagagcucacggaauu

SEQ ID NO: 912607 - RNA, 19 nt, Homo sapiens
  misc_RNA (1)...(19): siRNA sense strand
gguggcagcucugacaguu

SEQ ID NO: 912608 - RNA, 19 nt, Homo sapiens
  misc_RNA (1)...(19): siRNA sense strand
cgaaguggauuuuaaugaa

SEQ ID NO: 912609 - RNA, 19 nt, Homo sapiens
  misc_RNA (1)...(19): siRNA sense strand
acaguugcuuguaaugauu

SEQ ID NO: 912610 - RNA, 19 nt, Homo sapiens
  misc_RNA (1)...(19): siRNA sense strand
ccaauaaggacaacgaagu

SEQ ID NO: 912611 - RNA, 19 nt, Homo sapiens
  misc_RNA (1)...(19): siRNA sense strand
caauaaggacaacgaagug

SEQ ID NO: 912612 - RNA, 19 nt, Homo sapiens
  misc_RNA (1)...(19): siRNA sense strand
gaacaauugaagaagaaag

SEQ ID NO: 912613 - RNA, 19 nt, Homo sapiens
  misc_RNA (1)...(19): siRNA sense strand
acaacgaaguggauuuuaa

SEQ ID NO: 912614 - RNA, 19 nt, Homo sapiens
  misc_RNA (1)...(19): siRNA sense strand
gcucugacaguugcuugua

SEQ ID NO: 912615 - RNA, 19 nt, Homo sapiens
  misc_RNA (1)...(19): siRNA sense strand
ugacaguugcuuguaauga

SEQ ID NO: 912616 - RNA, 19 nt, Homo sapiens
  misc_RNA (1)...(19): siRNA sense strand
ggacaacgaaguggauuuu

SEQ ID NO: 912617 - RNA, 19 nt, Homo sapiens
  misc_RNA (1)...(19): siRNA sense strand
caauugaagaagaaaggaa

SEQ ID NO: 912618 - RNA, 19 nt, Homo sapiens
  misc_RNA (1)...(19): siRNA sense strand
ucugacaguugcuuguaau

SEQ ID NO: 912619 - RNA, 19 nt, Homo sapiens
  misc_RNA (1)...(19): siRNA sense strand
cccaguugguugauaagau

SEQ ID NO: 912620 - RNA, 19 nt, Homo sapiens
  misc_RNA (1)...(19): siRNA sense strand
uaaggacaacgaaguggau

SEQ ID NO: 912621 - RNA, 19 nt, Homo sapiens
  misc_RNA (1)...(19): siRNA sense strand
uggacaccaugauuagaau

SEQ ID NO: 912622 - RNA, 19 nt, Homo sapiens
  misc_RNA (1)...(19): siRNA sense strand
caaggaagagauucaagcu

SEQ ID NO: 912623 - RNA, 19 nt, Homo sapiens
  misc_RNA (1)...(19): siRNA sense strand
caacgaaguggauuuuaau

SEQ ID NO: 912624 - RNA, 19 nt, Homo sapiens
  misc_RNA (1)...(19): siRNA sense strand
gagauacgcccgucaggua

SEQ ID NO: 912625 - RNA, 19 nt, Homo sapiens
  misc_RNA (1)...(19): siRNA sense strand
gaaacacacuggaaaucgu

SEQ ID NO: 912626 - RNA, 19 nt, Homo sapiens
  misc_RNA (1)...(19): siRNA sense strand
ggaggaaacacacuggaaa

SEQ ID NO: 912627 - RNA, 19 nt, Homo sapiens
  misc_RNA (1)...(19): siRNA sense strand
aaagucaccugguuuaaag

SEQ ID NO: 912628 - RNA, 19 nt, Homo sapiens
  misc_RNA (1)...(19): siRNA sense strand
ugaguaacuuguggacuuu

SEQ ID NO: 912629 - RNA, 19 nt, Homo sapiens
  misc_RNA (1)...(19): siRNA sense strand
cugaguaacuuguggacuu

SEQ ID NO: 912630 - RNA, 19 nt, Homo sapiens
  misc_RNA (1)...(19): siRNA sense strand
gaggaaacacacuggaaau

SEQ ID NO: 912631 - RNA, 19 nt, Homo sapiens
  misc_RNA (1)...(19): siRNA sense strand
ucggcgaccuugcugagua

SEQ ID NO: 912632 - RNA, 19 nt, Homo sapiens
  misc_RNA (1)...(19): siRNA sense strand
ucaccugguuuaaagacaa

SEQ ID NO: 912633 - RNA, 19 nt, Homo sapiens
  misc_RNA (1)...(19): siRNA sense strand
cgaccuugcugaguaacuu

SEQ ID NO: 912634 - RNA, 19 nt, Homo sapiens
  misc_RNA (1)...(19): siRNA sense strand
ggaaaucgugcagaagaug

SEQ ID NO: 912635 - RNA, 19 nt, Homo sapiens
  misc_RNA (1)...(19): siRNA sense strand
ccacccgcauccuaaauca

SEQ ID NO: 912636 - RNA, 19 nt, Homo sapiens
  misc_RNA (1)...(19): siRNA sense strand
cggcgaccuugcugaguaa

SEQ ID NO: 912637 - RNA, 19 nt, Homo sapiens
  misc_RNA (1)...(19): siRNA sense strand
ggaaacacacuggaaaucg

SEQ ID NO: 912638 - RNA, 19 nt, Homo sapiens
  misc_RNA (1)...(19): siRNA sense strand
acugagacccugccuggua

SEQ ID NO: 912639 - RNA, 19 nt, Homo sapiens
  misc_RNA (1)...(19): siRNA sense strand
caccugguuuaaagacaaa

SEQ ID NO: 912640 - RNA, 19 nt, Homo sapiens
  misc_RNA (1)...(19): siRNA sense strand
cuaaaucagggacagagaa

SEQ ID NO: 912641 - RNA, 19 nt, Homo sapiens
  misc_RNA (1)...(19): siRNA sense strand
cacuggaaaucgugcagaa

SEQ ID NO: 912642 - RNA, 19 nt, Homo sapiens
  misc_RNA (1)...(19): siRNA sense strand
gugcggagaaggacugaga

SEQ ID NO: 912643 - RNA, 19 nt, Homo sapiens
  misc_RNA (1)...(19): siRNA sense strand
ugcagaagaugggaagaug

SEQ ID NO: 912644 - RNA, 19 nt, Homo sapiens
  misc_RNA (1)...(19): siRNA sense strand
uggaaaucgugcagaagau

SEQ ID NO: 912645 - RNA, 19 nt, Homo sapiens
  misc_RNA (1)...(19): siRNA sense strand
cagaagaugggaagaugca

SEQ ID NO: 912646 - RNA, 19 nt, Homo sapiens
  misc_RNA (1)...(19): siRNA sense strand
uaaaucagggacagagaag

SEQ ID NO: 912647 - RNA, 19 nt, Homo sapiens
  misc_RNA (1)...(19): siRNA sense strand
cuggaaaucgugcagaaga

SEQ ID NO: 912648 - RNA, 19 nt, Homo sapiens
  misc_RNA (1)...(19): siRNA sense strand
gaggagggcugccaaaucu

SEQ ID NO: 912649 - RNA, 19 nt, Homo sapiens
  misc_RNA (1)...(19): siRNA sense strand
gagcaaaguucugggugaa

SEQ ID NO: 912650 - RNA, 19 nt, Homo sapiens
  misc_RNA (1)...(19): siRNA sense strand
agaccggacugugacauua

SEQ ID NO: 912651 - RNA, 19 nt, Homo sapiens
  misc_RNA (1)...(19): siRNA sense strand
agagugaccugcuggaaga

SEQ ID NO: 912652 - RNA, 19 nt, Homo sapiens
  misc_RNA (1)...(19): siRNA sense strand
gcuaugaggccaugaguag

SEQ ID NO: 912653 - RNA, 19 nt, Homo sapiens
  misc_RNA (1)...(19): siRNA sense strand
acugugacauuagguauuu

SEQ ID NO: 912654 - RNA, 19 nt, Homo sapiens
  misc_RNA (1)...(19): siRNA sense strand
ggacugugacauuagguau

SEQ ID NO: 912655 - RNA, 19 nt, Homo sapiens
  misc_RNA (1)...(19): siRNA sense strand
ugccaaaucuacuuaugug

SEQ ID NO: 912656 - RNA, 19 nt, Homo sapiens
  misc_RNA (1)...(19): siRNA sense strand
gggcugccaaaucuacuua

SEQ ID NO: 912657 - RNA, 19 nt, Homo sapiens
  misc_RNA (1)...(19): siRNA sense strand
gcugccaaaucuacuuaug

SEQ ID NO: 912658 - RNA, 19 nt, Homo sapiens
  misc_RNA (1)...(19): siRNA sense strand
ccaggacuaugcagacagu

SEQ ID NO: 912659 - RNA, 19 nt, Homo sapiens
  misc_RNA (1)...(19): siRNA sense strand
gagaccggacugugacauu

SEQ ID NO: 912660 - RNA, 19 nt, Homo sapiens
  misc_RNA (1)...(19): siRNA sense strand
uaugaggccaugaguagaa

SEQ ID NO: 912661 - RNA, 19 nt, Homo sapiens
  misc_RNA (1)...(19): siRNA sense strand
acagacagcagcagcuuug

SEQ ID NO: 912662 - RNA, 19 nt, Homo sapiens
  misc_RNA (1)...(19): siRNA sense strand
ggagggcugccaaaucuac

SEQ ID NO: 912663 - RNA, 19 nt, Homo sapiens
  misc_RNA (1)...(19): siRNA sense strand
gugaccugcuggaagaaga

SEQ ID NO: 912664 - RNA, 19 nt, Homo sapiens
  misc_RNA (1)...(19): siRNA sense strand
cgucugcuaugaccucaca

SEQ ID NO: 912665 - RNA, 19 nt, Homo sapiens
  misc_RNA (1)...(19): siRNA sense strand
caagagugaccugcuggaa

SEQ ID NO: 912666 - RNA, 19 nt, Homo sapiens
  misc_RNA (1)...(19): siRNA sense strand
aggcugccaucgucugcua

SEQ ID NO: 912667 - RNA, 19 nt, Homo sapiens
  misc_RNA (1)...(19): siRNA sense strand
gacugugacauuagguauu

SEQ ID NO: 912668 - RNA, 19 nt, Homo sapiens
  misc_RNA (1)...(19): siRNA sense strand
agggcaaggugcucuagga

SEQ ID NO: 912669 - RNA, 19 nt, Homo sapiens
  misc_RNA (1)...(19): siRNA sense strand
uauguggcaccaagaguga

SEQ ID NO: 912670 - RNA, 19 nt, Homo sapiens
  misc_RNA (1)...(19): siRNA sense strand
caagggaccucaacaaauu

SEQ ID NO: 912671 - RNA, 19 nt, Homo sapiens
  misc_RNA (1)...(19): siRNA sense strand
gaagacacccgcuccagua

SEQ ID NO: 912672 - RNA, 19 nt, Homo sapiens
  misc_RNA (1)...(19): siRNA sense strand
gcaaugaauuccaagaugu

SEQ ID NO: 912673 - RNA, 19 nt, Homo sapiens
  misc_RNA (1)...(19): siRNA sense strand
gagauggacuagaggcuuu

SEQ ID NO: 912674 - RNA, 19 nt, Homo sapiens
  misc_RNA (1)...(19): siRNA sense strand
ucugaaaucugacaucuau

SEQ ID NO: 912675 - RNA, 19 nt, Homo sapiens
  misc_RNA (1)...(19): siRNA sense strand
gcacuuggccaaagaaaca

SEQ ID NO: 912676 - RNA, 19 nt, Homo sapiens
  misc_RNA (1)...(19): siRNA sense strand
aaucagacguugccauuug

SEQ ID NO: 912677 - RNA, 19 nt, Homo sapiens
  misc_RNA (1)...(19): siRNA sense strand
caagacaguuauacacguu

SEQ ID NO: 912678 - RNA, 19 nt, Homo sapiens
  misc_RNA (1)...(19): siRNA sense strand
gcaagggaccucaacaaau

SEQ ID NO: 912679 - RNA, 19 nt, Homo sapiens
  misc_RNA (1)...(19): siRNA sense strand
caaauucaccuuaaagcaa

SEQ ID NO: 912680 - RNA, 19 nt, Homo sapiens
  misc_RNA (1)...(19): siRNA sense strand
caacauugcuuuucuuuuc

SEQ ID NO: 912681 - RNA, 19 nt, Homo sapiens
  misc_RNA (1)...(19): siRNA sense strand
gaagaaacaagcaaagaag

SEQ ID NO: 912682 - RNA, 19 nt, Homo sapiens
  misc_RNA (1)...(19): siRNA sense strand
gagacgaucacgcucauuu

SEQ ID NO: 912683 - RNA, 19 nt, Homo sapiens
  misc_RNA (1)...(19): siRNA sense strand
gacaaacugcuuucccaua

SEQ ID NO: 912684 - RNA, 19 nt, Homo sapiens
  misc_RNA (1)...(19): siRNA sense strand
gauagccugugaagauuuc

SEQ ID NO: 912685 - RNA, 19 nt, Homo sapiens
  misc_RNA (1)...(19): siRNA sense strand
gcacaaagcagaguguauc

SEQ ID NO: 912686 - RNA, 19 nt, Homo sapiens
  misc_RNA (1)...(19): siRNA sense strand
caaccuacccuccacaguu

SEQ ID NO: 912687 - RNA, 19 nt, Homo sapiens
  misc_RNA (1)...(19): siRNA sense strand
gaacaagacaguuauacac

SEQ ID NO: 912688 - RNA, 19 nt, Homo sapiens
  misc_RNA (1)...(19): siRNA sense strand
ggaaggaagaccucagaga

SEQ ID NO: 912689 - RNA, 19 nt, Homo sapiens
  misc_RNA (1)...(19): siRNA sense strand
acaaacugcuuucccauag

SEQ ID NO: 912690 - RNA, 19 nt, Homo sapiens
  misc_RNA (1)...(19): siRNA sense strand
caacaaauucaccuuaaag

SEQ ID NO: 912691 - RNA, 19 nt, Homo sapiens
  misc_RNA (1)...(19): siRNA sense strand
caaacugcuuucccauaga

SEQ ID NO: 912692 - RNA, 19 nt, Homo sapiens
  misc_RNA (1)...(19): siRNA sense strand
cagagaccaacaaaucuua

SEQ ID NO: 912693 - RNA, 19 nt, Homo sapiens
  misc_RNA (1)...(19): siRNA sense strand
ggaacaagacaguuauaca

SEQ ID NO: 912694 - RNA, 19 nt, Homo sapiens
  misc_RNA (1)...(19): siRNA sense strand
caguagaucugggcacuug

SEQ ID NO: 912695 - RNA, 19 nt, Homo sapiens
  misc_RNA (1)...(19): siRNA sense strand
caaugaauuccaagaugua

SEQ ID NO: 912696 - RNA, 19 nt, Homo sapiens
  misc_RNA (1)...(19): siRNA sense strand
aaccuacccuccacaguuu

SEQ ID NO: 912697 - RNA, 19 nt, Homo sapiens
  misc_RNA (1)...(19): siRNA sense strand
uguaucagcucauggaaca

SEQ ID NO: 912698 - RNA, 19 nt, Homo sapiens
  misc_RNA (1)...(19): siRNA sense strand
ccucagagaccaacaaauc

SEQ ID NO: 912699 - RNA, 19 nt, Homo sapiens
  misc_RNA (1)...(19): siRNA sense strand
ucauggaacaagacaguua

SEQ ID NO: 912700 - RNA, 19 nt, Homo sapiens
  misc_RNA (1)...(19): siRNA sense strand
agacguugccauuugguua

SEQ ID NO: 912701 - RNA, 19 nt, Homo sapiens
  misc_RNA (1)...(19): siRNA sense strand
agaagaaacaagcaaagaa

SEQ ID NO: 912702 - RNA, 19 nt, Homo sapiens
  misc_RNA (1)...(19): siRNA sense strand
ccucaacaaauucaccuua

SEQ ID NO: 912703 - RNA, 19 nt, Homo sapiens
  misc_RNA (1)...(19): siRNA sense strand
caaagaagccaaaaucaga

SEQ ID NO: 912704 - RNA, 19 nt, Homo sapiens
  misc_RNA (1)...(19): siRNA sense strand
ccagauuucuuaaaacuga

SEQ ID NO: 912705 - RNA, 19 nt, Homo sapiens
  misc_RNA (1)...(19): siRNA sense strand
gacacccgcuccaguagau

SEQ ID NO: 912706 - RNA, 19 nt, Homo sapiens
  misc_RNA (1)...(19): siRNA sense strand
cucaacaaauucaccuuaa

SEQ ID NO: 912707 - RNA, 19 nt, Homo sapiens
  misc_RNA (1)...(19): siRNA sense strand
ggauagccugugaagauuu

SEQ ID NO: 912708 - RNA, 19 nt, Homo sapiens
  misc_RNA (1)...(19): siRNA sense strand
aaccugaguuucaugaaga

SEQ ID NO: 912709 - RNA, 19 nt, Homo sapiens
  misc_RNA (1)...(19): siRNA sense strand
agacgaucacgcucauuua

SEQ ID NO: 912710 - RNA, 19 nt, Homo sapiens
  misc_RNA (1)...(19): siRNA sense strand
uggauagccugugaagauu

SEQ ID NO: 912711 - RNA, 19 nt, Homo sapiens
  misc_RNA (1)...(19): siRNA sense strand
auuccaagauguacaauca

SEQ ID NO: 912712 - RNA, 19 nt, Homo sapiens
  misc_RNA (1)...(19): siRNA sense strand
uccaagauguacaaucaga

SEQ ID NO: 912713 - RNA, 19 nt, Homo sapiens
  misc_RNA (1)...(19): siRNA sense strand
acaaucagacguugccauu

SEQ ID NO: 912714 - RNA, 19 nt, Homo sapiens
  misc_RNA (1)...(19): siRNA sense strand
aaacugcuuucccauagag

SEQ ID NO: 912715 - RNA, 19 nt, Homo sapiens
  misc_RNA (1)...(19): siRNA sense strand
ugcaaugaauuccaagaug

SEQ ID NO: 912716 - RNA, 19 nt, Homo sapiens
  misc_RNA (1)...(19): siRNA sense strand
uuacaaacagcaucacuca

SEQ ID NO: 912717 - RNA, 19 nt, Homo sapiens
  misc_RNA (1)...(19): siRNA sense strand
gaaaagaagaaacaagcaa

SEQ ID NO: 912718 - RNA, 19 nt, Homo sapiens
  misc_RNA (1)...(19): siRNA sense strand
gcucauggaacaagacagu

SEQ ID NO: 912719 - RNA, 19 nt, Homo sapiens
  misc_RNA (1)...(19): siRNA sense strand
cagaguguaucagcucaug

SEQ ID NO: 912720 - RNA, 19 nt, Homo sapiens
  misc_RNA (1)...(19): siRNA sense strand
cugaagaggcagugaaaug

SEQ ID NO: 912721 - RNA, 19 nt, Homo sapiens
  misc_RNA (1)...(19): siRNA sense strand
gcaaaagcaauauaugaga

SEQ ID NO: 912722 - RNA, 19 nt, Homo sapiens
  misc_RNA (1)...(19): siRNA sense strand
gcuuuuaccagauuucuua

SEQ ID NO: 912723 - RNA, 19 nt, Homo sapiens
  misc_RNA (1)...(19): siRNA sense strand
caaguuaauacaugguuca

SEQ ID NO: 912724 - RNA, 19 nt, Homo sapiens
  misc_RNA (1)...(19): siRNA sense strand
ugaauuccaagauguacaa

SEQ ID NO: 912725 - RNA, 19 nt, Homo sapiens
  misc_RNA (1)...(19): siRNA sense strand
ucagagaccaacaaaucuu

SEQ ID NO: 912726 - RNA, 19 nt, Homo sapiens
  misc_RNA (1)...(19): siRNA sense strand
gaccucagagaccaacaaa

SEQ ID NO: 912727 - RNA, 19 nt, Homo sapiens
  misc_RNA (1)...(19): siRNA sense strand
uaauacaugguucaggaaa

SEQ ID NO: 912728 - RNA, 19 nt, Homo sapiens
  misc_RNA (1)...(19): siRNA sense strand
gaguguaucagcucaugga

SEQ ID NO: 912729 - RNA, 19 nt, Homo sapiens
  misc_RNA (1)...(19): siRNA sense strand
uuggauagccugugaagau

SEQ ID NO: 912730 - RNA, 19 nt, Homo sapiens
  misc_RNA (1)...(19): siRNA sense strand
acaaacagcaucacucaac

SEQ ID NO: 912731 - RNA, 19 nt, Homo sapiens
  misc_RNA (1)...(19): siRNA sense strand
uaccugcaaugaauuccaa

SEQ ID NO: 912732 - RNA, 19 nt, Homo sapiens
  misc_RNA (1)...(19): siRNA sense strand
gcagugaaauggggugaau

SEQ ID NO: 912733 - RNA, 19 nt, Homo sapiens
  misc_RNA (1)...(19): siRNA sense strand
gacguugccauuugguuau

SEQ ID NO: 912734 - RNA, 19 nt, Homo sapiens
  misc_RNA (1)...(19): siRNA sense strand
ugaagaggcagugaaaugg

SEQ ID NO: 912735 - RNA, 19 nt, Homo sapiens
  misc_RNA (1)...(19): siRNA sense strand
gacgaucacgcucauuuac

SEQ ID NO: 912736 - RNA, 19 nt, Homo sapiens
  misc_RNA (1)...(19): siRNA sense strand
ggaagaccucagagaccaa

SEQ ID NO: 912737 - RNA, 19 nt, Homo sapiens
  misc_RNA (1)...(19): siRNA sense strand
aagaagaaacaagcaaaga

SEQ ID NO: 912738 - RNA, 19 nt, Homo sapiens
  misc_RNA (1)...(19): siRNA sense strand
cuauuuagacuugauggaa

SEQ ID NO: 912739 - RNA, 19 nt, Homo sapiens
  misc_RNA (1)...(19): siRNA sense strand
aagcaagggaccucaacaa

SEQ ID NO: 912740 - RNA, 19 nt, Homo sapiens
  misc_RNA (1)...(19): siRNA sense strand
caaucagacguugccauuu

SEQ ID NO: 912741 - RNA, 19 nt, Homo sapiens
  misc_RNA (1)...(19): siRNA sense strand
cgaucacgcucauuuaccu

SEQ ID NO: 912742 - RNA, 19 nt, Homo sapiens
  misc_RNA (1)...(19): siRNA sense strand
aaagaagaaacaagcaaag

SEQ ID NO: 912743 - RNA, 19 nt, Homo sapiens
  misc_RNA (1)...(19): siRNA sense strand
cauggaacaagacaguuau

SEQ ID NO: 912744 - RNA, 19 nt, Homo sapiens
  misc_RNA (1)...(19): siRNA sense strand
acaaauucaccuuaaagca

SEQ ID NO: 912745 - RNA, 19 nt, Homo sapiens
  misc_RNA (1)...(19): siRNA sense strand
caaaaucagagcuaaggaa

SEQ ID NO: 912746 - RNA, 19 nt, Homo sapiens
  misc_RNA (1)...(19): siRNA sense strand
aagaagucauuacaaacag

SEQ ID NO: 912747 - RNA, 19 nt, Homo sapiens
  misc_RNA (1)...(19): siRNA sense strand
agcaagggaccucaacaaa

SEQ ID NO: 912748 - RNA, 19 nt, Homo sapiens
  misc_RNA (1)...(19): siRNA sense strand
caacgggccugaagacuuu

SEQ ID NO: 912749 - RNA, 19 nt, Homo sapiens
  misc_RNA (1)...(19): siRNA sense strand
gaacaagugucugcugcua

SEQ ID NO: 912750 - RNA, 19 nt, Homo sapiens
  misc_RNA (1)...(19): siRNA sense strand
ugaaguaucugauguuugu

SEQ ID NO: 912751 - RNA, 19 nt, Homo sapiens
  misc_RNA (1)...(19): siRNA sense strand
ccaaggagcucaccaagca

SEQ ID NO: 912752 - RNA, 19 nt, Homo sapiens
  misc_RNA (1)...(19): siRNA sense strand
acaagugucugcugcuauu

SEQ ID NO: 912753 - RNA, 19 nt, Homo sapiens
  misc_RNA (1)...(19): siRNA sense strand
caugaaguaucugauguuu

SEQ ID NO: 912754 - RNA, 19 nt, Homo sapiens
  misc_RNA (1)...(19): siRNA sense strand
gagaauucuucaccaagga

SEQ ID NO: 912755 - RNA, 19 nt, Homo sapiens
  misc_RNA (1)...(19): siRNA sense strand
ugucugagcugcaugaagu

SEQ ID NO: 912756 - RNA, 19 nt, Homo sapiens
  misc_RNA (1)...(19): siRNA sense strand
uaaguuugcaucuguguuu

SEQ ID NO: 912757 - RNA, 19 nt, Homo sapiens
  misc_RNA (1)...(19): siRNA sense strand
gcaugaaguaucugauguu

SEQ ID NO: 912758 - RNA, 19 nt, Homo sapiens
  misc_RNA (1)...(19): siRNA sense strand
gccuucaucuucagggaaa

SEQ ID NO: 912759 - RNA, 19 nt, Homo sapiens
  misc_RNA (1)...(19): siRNA sense strand
ggaacucggucaugaucac

SEQ ID NO: 912760 - RNA, 19 nt, Homo sapiens
  misc_RNA (1)...(19): siRNA sense strand
cauccuggccuucaucuuc

SEQ ID NO: 912761 - RNA, 19 nt, Homo sapiens
  misc_RNA (1)...(19): siRNA sense strand
ucaacaccuucgagaccua

SEQ ID NO: 912762 - RNA, 19 nt, Homo sapiens
  misc_RNA (1)...(19): siRNA sense strand
guacuggccaucgagcuuu

SEQ ID NO: 912763 - RNA, 19 nt, Homo sapiens
  misc_RNA (1)...(19): siRNA sense strand
gucaugaucacauuugguu

SEQ ID NO: 912764 - RNA, 19 nt, Homo sapiens
  misc_RNA (1)...(19): siRNA sense strand
ucaacgggccugaagacuu

SEQ ID NO: 912765 - RNA, 19 nt, Homo sapiens
  misc_RNA (1)...(19): siRNA sense strand
ugagcugcaugaaguaucu

SEQ ID NO: 912766 - RNA, 19 nt, Homo sapiens
  misc_RNA (1)...(19): siRNA sense strand
guuacacggugauccucaa

SEQ ID NO: 912767 - RNA, 19 nt, Homo sapiens
  misc_RNA (1)...(19): siRNA sense strand
ccagggcaauaacgacaca

SEQ ID NO: 912768 - RNA, 19 nt, Homo sapiens
  misc_RNA (1)...(19): siRNA sense strand
gacccuggauagugaagag

SEQ ID NO: 912769 - RNA, 19 nt, Homo sapiens
  misc_RNA (1)...(19): siRNA sense strand
gagccuauuccuaaacaag

SEQ ID NO: 912770 - RNA, 19 nt, Homo sapiens
  misc_RNA (1)...(19): siRNA sense strand
ggagccuauuccuaaacaa

SEQ ID NO: 912771 - RNA, 19 nt, Homo sapiens
  misc_RNA (1)...(19): siRNA sense strand
ugcaugaaguaucugaugu

SEQ ID NO: 912772 - RNA, 19 nt, Homo sapiens
  misc_RNA (1)...(19): siRNA sense strand
cccgagaauucuucaccaa

SEQ ID NO: 912773 - RNA, 19 nt, Homo sapiens
  misc_RNA (1)...(19): siRNA sense strand
cgacuccugacccuggaua

SEQ ID NO: 912774 - RNA, 19 nt, Homo sapiens
  misc_RNA (1)...(19): siRNA sense strand
gcacuaccagggcaauaac

SEQ ID NO: 912775 - RNA, 19 nt, Homo sapiens
  misc_RNA (1)...(19): siRNA sense strand
acucggucaugaucacauu

SEQ ID NO: 912776 - RNA, 19 nt, Homo sapiens
  misc_RNA (1)...(19): siRNA sense strand
ucaccaaggagcucaccaa

SEQ ID NO: 912777 - RNA, 19 nt, Homo sapiens
  misc_RNA (1)...(19): siRNA sense strand
gguacuggccaucgagcuu

SEQ ID NO: 912778 - RNA, 19 nt, Homo sapiens
  misc_RNA (1)...(19): siRNA sense strand
gaguugagguccugauuaa

SEQ ID NO: 912779 - RNA, 19 nt, Homo sapiens
  misc_RNA (1)...(19): siRNA sense strand
gaaagccaauaaagaccua

SEQ ID NO: 912780 - RNA, 19 nt, Homo sapiens
  misc_RNA (1)...(19): siRNA sense strand
gcccugaacuugcagauug

SEQ ID NO: 912781 - RNA, 19 nt, Homo sapiens
  misc_RNA (1)...(19): siRNA sense strand
ugaaggagaucuugagcaa

SEQ ID NO: 912782 - RNA, 19 nt, Homo sapiens
  misc_RNA (1)...(19): siRNA sense strand
gagagaaaguacaccugaa

SEQ ID NO: 912783 - RNA, 19 nt, Homo sapiens
  misc_RNA (1)...(19): siRNA sense strand
ggcagaggcugaaggaaga

SEQ ID NO: 912784 - RNA, 19 nt, Homo sapiens
  misc_RNA (1)...(19): siRNA sense strand
gaagagaagaacaaacaga

SEQ ID NO: 912785 - RNA, 19 nt, Homo sapiens
  misc_RNA (1)...(19): siRNA sense strand
gaacuugcagauugaagaa

SEQ ID NO: 912786 - RNA, 19 nt, Homo sapiens
  misc_RNA (1)...(19): siRNA sense strand
ccagugacaugguggaguu

SEQ ID NO: 912787 - RNA, 19 nt, Homo sapiens
  misc_RNA (1)...(19): siRNA sense strand
cagagcggcuggcaaagga

SEQ ID NO: 912788 - RNA, 19 nt, Homo sapiens
  misc_RNA (1)...(19): siRNA sense strand
uggaagacgugaagcauca

SEQ ID NO: 912789 - RNA, 19 nt, Homo sapiens
  misc_RNA (1)...(19): siRNA sense strand
gugaggcccugcagaagga

SEQ ID NO: 912790 - RNA, 19 nt, Homo sapiens
  misc_RNA (1)...(19): siRNA sense strand
cgaguugagguccugauua

SEQ ID NO: 912791 - RNA, 19 nt, Homo sapiens
  misc_RNA (1)...(19): siRNA sense strand
aaagaaagccaauaaagac

SEQ ID NO: 912792 - RNA, 19 nt, Homo sapiens
  misc_RNA (1)...(19): siRNA sense strand
cagcagaagugccaacaac

SEQ ID NO: 912793 - RNA, 19 nt, Homo sapiens
  misc_RNA (1)...(19): siRNA sense strand
gaacagcuggaagaucuga

SEQ ID NO: 912794 - RNA, 19 nt, Homo sapiens
  misc_RNA (1)...(19): siRNA sense strand
gaauuucugcccugaacuu

SEQ ID NO: 912795 - RNA, 19 nt, Homo sapiens
  misc_RNA (1)...(19): siRNA sense strand
gagguuggcauucgaggaa

SEQ ID NO: 912796 - RNA, 19 nt, Homo sapiens
  misc_RNA (1)...(19): siRNA sense strand
aggaacagcuggaagaucu

SEQ ID NO: 912797 - RNA, 19 nt, Homo sapiens
  misc_RNA (1)...(19): siRNA sense strand
acaaggaccucugggacuu

SEQ ID NO: 912798 - RNA, 19 nt, Homo sapiens
  misc_RNA (1)...(19): siRNA sense strand
aagaagagaagaacaaaca

SEQ ID NO: 912799 - RNA, 19 nt, Homo sapiens
  misc_RNA (1)...(19): siRNA sense strand
ggucaaggcgacacuggaa

SEQ ID NO: 912800 - RNA, 19 nt, Homo sapiens
  misc_RNA (1)...(19): siRNA sense strand
aaggagaucuugagcaaaa

SEQ ID NO: 912801 - RNA, 19 nt, Homo sapiens
  misc_RNA (1)...(19): siRNA sense strand
ccagagcacacaagaggaa

SEQ ID NO: 912802 - RNA, 19 nt, Homo sapiens
  misc_RNA (1)...(19): siRNA sense strand
gaaagugggaagccuagag

SEQ ID NO: 912803 - RNA, 19 nt, Homo sapiens
  misc_RNA (1)...(19): siRNA sense strand
acaggaagcacaccauguu

SEQ ID NO: 912804 - RNA, 19 nt, Homo sapiens
  misc_RNA (1)...(19): siRNA sense strand
aaagugaggcacacaggaa

SEQ ID NO: 912805 - RNA, 19 nt, Homo sapiens
  misc_RNA (1)...(19): siRNA sense strand
ggaagcacaccauguugca

SEQ ID NO: 912806 - RNA, 19 nt, Homo sapiens
  misc_RNA (1)...(19): siRNA sense strand
gaaggagaucuugagcaaa

SEQ ID NO: 912807 - RNA, 19 nt, Homo sapiens
  misc_RNA (1)...(19): siRNA sense strand
ugaagaagagaagaacaaa

SEQ ID NO: 912808 - RNA, 19 nt, Homo sapiens
  misc_RNA (1)...(19): siRNA sense strand
gcagauugaagaagagaag

SEQ ID NO: 912809 - RNA, 19 nt, Homo sapiens
  misc_RNA (1)...(19): siRNA sense strand
gcagaagugccaacaacag

SEQ ID NO: 912810 - RNA, 19 nt, Homo sapiens
  misc_RNA (1)...(19): siRNA sense strand
gccaacaacagcagcagaa

SEQ ID NO: 912811 - RNA, 19 nt, Homo sapiens
  misc_RNA (1)...(19): siRNA sense strand
gaagaagagaagaacaaac

SEQ ID NO: 912812 - RNA, 19 nt, Homo sapiens
  misc_RNA (1)...(19): siRNA sense strand
ggagugcaaggagagaauu

SEQ ID NO: 912813 - RNA, 19 nt, Homo sapiens
  misc_RNA (1)...(19): siRNA sense strand
gagugcaaggagagaauuu

SEQ ID NO: 912814 - RNA, 19 nt, Homo sapiens
  misc_RNA (1)...(19): siRNA sense strand
aaguacaccugaaggagau

SEQ ID NO: 912815 - RNA, 19 nt, Homo sapiens
  misc_RNA (1)...(19): siRNA sense strand
ucaaggcgacacuggaaga

SEQ ID NO: 912816 - RNA, 19 nt, Homo sapiens
  misc_RNA (1)...(19): siRNA sense strand
agaaaguacaccugaagga

SEQ ID NO: 912817 - RNA, 19 nt, Homo sapiens
  misc_RNA (1)...(19): siRNA sense strand
cagcugagguuggcauucg

SEQ ID NO: 912818 - RNA, 19 nt, Homo sapiens
  misc_RNA (1)...(19): siRNA sense strand
ugaacuugcagauugaaga

SEQ ID NO: 912819 - RNA, 19 nt, Homo sapiens
  misc_RNA (1)...(19): siRNA sense strand
aggaagagcuggaaaagca

SEQ ID NO: 912820 - RNA, 19 nt, Homo sapiens
  misc_RNA (1)...(19): siRNA sense strand
cggcugcauugccaggaaa

SEQ ID NO: 912821 - RNA, 19 nt, Homo sapiens
  misc_RNA (1)...(19): siRNA sense strand
gguccugauuaaccggauu

SEQ ID NO: 912822 - RNA, 19 nt, Homo sapiens
  misc_RNA (1)...(19): siRNA sense strand
acuugcagauugaagaaga

SEQ ID NO: 912823 - RNA, 19 nt, Homo sapiens
  misc_RNA (1)...(19): siRNA sense strand
gcagcagaagugccaacaa

SEQ ID NO: 912824 - RNA, 19 nt, Homo sapiens
  misc_RNA (1)...(19): siRNA sense strand
ucgaggaacagcuggaaga

SEQ ID NO: 912825 - RNA, 19 nt, Homo sapiens
  misc_RNA (1)...(19): siRNA sense strand
ccucugggacuuccacaug

SEQ ID NO: 912826 - RNA, 19 nt, Homo sapiens
  misc_RNA (1)...(19): siRNA sense strand
guccugauuaaccggauua

SEQ ID NO: 912827 - RNA, 19 nt, Homo sapiens
  misc_RNA (1)...(19): siRNA sense strand
aacaagagacccugaggau

SEQ ID NO: 912828 - RNA, 19 nt, Homo sapiens
  misc_RNA (1)...(19): siRNA sense strand
agagaagaacaaacagaga

SEQ ID NO: 912829 - RNA, 19 nt, Homo sapiens
  misc_RNA (1)...(19): siRNA sense strand
caggaagcacaccauguug

SEQ ID NO: 912830 - RNA, 19 nt, Homo sapiens
  misc_RNA (1)...(19): siRNA sense strand
ggagaaaggcgaaccaaua

SEQ ID NO: 912831 - RNA, 19 nt, Homo sapiens
  misc_RNA (1)...(19): siRNA sense strand
ccuaagcacuuccauaaua

SEQ ID NO: 912832 - RNA, 19 nt, Homo sapiens
  misc_RNA (1)...(19): siRNA sense strand
gaggaaagccuauauuauu

SEQ ID NO: 912833 - RNA, 19 nt, Homo sapiens
  misc_RNA (1)...(19): siRNA sense strand
ggaaggcagucuuucuaua

SEQ ID NO: 912834 - RNA, 19 nt, Homo sapiens
  misc_RNA (1)...(19): siRNA sense strand
cuucgaaucuuccuaaaua

SEQ ID NO: 912835 - RNA, 19 nt, Homo sapiens
  misc_RNA (1)...(19): siRNA sense strand
guagaaggauggacacauu

SEQ ID NO: 912836 - RNA, 19 nt, Homo sapiens
  misc_RNA (1)...(19): siRNA sense strand
gagaaaggcgaaccaauaa

SEQ ID NO: 912837 - RNA, 19 nt, Homo sapiens
  misc_RNA (1)...(19): siRNA sense strand
cgacuucuacgacuuauua

SEQ ID NO: 912838 - RNA, 19 nt, Homo sapiens
  misc_RNA (1)...(19): siRNA sense strand
ugagaaggcugguuucaga

SEQ ID NO: 912839 - RNA, 19 nt, Homo sapiens
  misc_RNA (1)...(19): siRNA sense strand
gauauugcaugacauugaa

SEQ ID NO: 912840 - RNA, 19 nt, Homo sapiens
  misc_RNA (1)...(19): siRNA sense strand
ugaaacaucucuacaacug

SEQ ID NO: 912841 - RNA, 19 nt, Homo sapiens
  misc_RNA (1)...(19): siRNA sense strand
gaaugaaaguccacagaca

SEQ ID NO: 912842 - RNA, 19 nt, Homo sapiens
  misc_RNA (1)...(19): siRNA sense strand
gaaauccaauugaggaagu

SEQ ID NO: 912843 - RNA, 19 nt, Homo sapiens
  misc_RNA (1)...(19): siRNA sense strand
guugugcgguuucuagaua

SEQ ID NO: 912844 - RNA, 19 nt, Homo sapiens
  misc_RNA (1)...(19): siRNA sense strand
agacggauacucuuuauaa

SEQ ID NO: 912845 - RNA, 19 nt, Homo sapiens
  misc_RNA (1)...(19): siRNA sense strand
gaaagaaagcccacacaca

SEQ ID NO: 912846 - RNA, 19 nt, Homo sapiens
  misc_RNA (1)...(19): siRNA sense strand
ggaggcaccugcgaaagaa

SEQ ID NO: 912847 - RNA, 19 nt, Homo sapiens
  misc_RNA (1)...(19): siRNA sense strand
caauaaauuucagggagua

SEQ ID NO: 912848 - RNA, 19 nt, Homo sapiens
  misc_RNA (1)...(19): siRNA sense strand
ugaaagagcuuaugauccu

SEQ ID NO: 912849 - RNA, 19 nt, Homo sapiens
  misc_RNA (1)...(19): siRNA sense strand
agaauuugcuguggagaua

SEQ ID NO: 912850 - RNA, 19 nt, Homo sapiens
  misc_RNA (1)...(19): siRNA sense strand
aaagaaagcccacacacaa

SEQ ID NO: 912851 - RNA, 19 nt, Homo sapiens
  misc_RNA (1)...(19): siRNA sense strand
ggugauguaugugaucuaa

SEQ ID NO: 912852 - RNA, 19 nt, Homo sapiens
  misc_RNA (1)...(19): siRNA sense strand
cauaauagggucaguagaa

SEQ ID NO: 912853 - RNA, 19 nt, Homo sapiens
  misc_RNA (1)...(19): siRNA sense strand
gaaggcagucuuucuauag

SEQ ID NO: 912854 - RNA, 19 nt, Homo sapiens
  misc_RNA (1)...(19): siRNA sense strand
gacggauacucuuuauaaa

SEQ ID NO: 912855 - RNA, 19 nt, Homo sapiens
  misc_RNA (1)...(19): siRNA sense strand
gaaagagcuuaugauccua

SEQ ID NO: 912856 - RNA, 19 nt, Homo sapiens
  misc_RNA (1)...(19): siRNA sense strand
ggaaauuguucgauauugc

SEQ ID NO: 912857 - RNA, 19 nt, Homo sapiens
  misc_RNA (1)...(19): siRNA sense strand
ggaagaaccgggacuaugg

SEQ ID NO: 912858 - RNA, 19 nt, Homo sapiens
  misc_RNA (1)...(19): siRNA sense strand
ucacugacagcaaacuuua

SEQ ID NO: 912859 - RNA, 19 nt, Homo sapiens
  misc_RNA (1)...(19): siRNA sense strand
gaaaauuuauccaccagaa

SEQ ID NO: 912860 - RNA, 19 nt, Homo sapiens
  misc_RNA (1)...(19): siRNA sense strand
ggaugucacucuccuccuu

SEQ ID NO: 912861 - RNA, 19 nt, Homo sapiens
  misc_RNA (1)...(19): siRNA sense strand
ccgaggaaagccuauauua

SEQ ID NO: 912862 - RNA, 19 nt, Homo sapiens
  misc_RNA (1)...(19): siRNA sense strand
guggauggcucaagaucuu

SEQ ID NO: 912863 - RNA, 19 nt, Homo sapiens
  misc_RNA (1)...(19): siRNA sense strand
uacaaucuaugcagugaaa

SEQ ID NO: 912864 - RNA, 19 nt, Homo sapiens
  misc_RNA (1)...(19): siRNA sense strand
gcagugaaagagcuuauga

SEQ ID NO: 912865 - RNA, 19 nt, Homo sapiens
  misc_RNA (1)...(19): siRNA sense strand
uaucgagucuacaaucuau

SEQ ID NO: 912866 - RNA, 19 nt, Homo sapiens
  misc_RNA (1)...(19): siRNA sense strand
ccacacacaagugaauuua

SEQ ID NO: 912867 - RNA, 19 nt, Homo sapiens
  misc_RNA (1)...(19): siRNA sense strand
ccacagacaaacgaauuua

SEQ ID NO: 912868 - RNA, 19 nt, Homo sapiens
  misc_RNA (1)...(19): siRNA sense strand
uaaaggaggcaaaggaaga

SEQ ID NO: 912869 - RNA, 19 nt, Homo sapiens
  misc_RNA (1)...(19): siRNA sense strand
cagaacguauuauugcuau

SEQ ID NO: 912870 - RNA, 19 nt, Homo sapiens
  misc_RNA (1)...(19): siRNA sense strand
gacaaacgaauuuaaagga

SEQ ID NO: 912871 - RNA, 19 nt, Homo sapiens
  misc_RNA (1)...(19): siRNA sense strand
gaacguauuauugcuaugu

SEQ ID NO: 912872 - RNA, 19 nt, Homo sapiens
  misc_RNA (1)...(19): siRNA sense strand
gaaguugugcgguuucuag

SEQ ID NO: 912873 - RNA, 19 nt, Homo sapiens
  misc_RNA (1)...(19): siRNA sense strand
guccaccucuguaugauga

SEQ ID NO: 912874 - RNA, 19 nt, Homo sapiens
  misc_RNA (1)...(19): siRNA sense strand
guacuucauuaggaaauug

SEQ ID NO: 912875 - RNA, 19 nt, Homo sapiens
  misc_RNA (1)...(19): siRNA sense strand
gaaaggcgaaccaauaaaa

SEQ ID NO: 912876 - RNA, 19 nt, Homo sapiens
  misc_RNA (1)...(19): siRNA sense strand
cagaauagauauguuggau

SEQ ID NO: 912877 - RNA, 19 nt, Homo sapiens
  misc_RNA (1)...(19): siRNA sense strand
gacagcaaacuuuauauuc

SEQ ID NO: 912878 - RNA, 19 nt, Homo sapiens
  misc_RNA (1)...(19): siRNA sense strand
cauugaaacagacaaagua

SEQ ID NO: 912879 - RNA, 19 nt, Homo sapiens
  misc_RNA (1)...(19): siRNA sense strand
cgaggaaagccuauauuau

SEQ ID NO: 912880 - RNA, 19 nt, Homo sapiens
  misc_RNA (1)...(19): siRNA sense strand
ucguagcgauucacuguaa

SEQ ID NO: 912881 - RNA, 19 nt, Homo sapiens
  misc_RNA (1)...(19): siRNA sense strand
acauuuaguucgacuucua

SEQ ID NO: 912882 - RNA, 19 nt, Homo sapiens
  misc_RNA (1)...(19): siRNA sense strand
ucucauggauguucuucuu

SEQ ID NO: 912883 - RNA, 19 nt, Homo sapiens
  misc_RNA (1)...(19): siRNA sense strand
gauccuaagcacuuccaua

SEQ ID NO: 912884 - RNA, 19 nt, Homo sapiens
  misc_RNA (1)...(19): siRNA sense strand
ggauguucuucuucgagua

SEQ ID NO: 912885 - RNA, 19 nt, Homo sapiens
  misc_RNA (1)...(19): siRNA sense strand
agaaggauggacacauuua

SEQ ID NO: 912886 - RNA, 19 nt, Homo sapiens
  misc_RNA (1)...(19): siRNA sense strand
caacacgucuuuuauucaa

SEQ ID NO: 912887 - RNA, 19 nt, Homo sapiens
  misc_RNA (1)...(19): siRNA sense strand
cgaaucuuccuaaauacua

SEQ ID NO: 912888 - RNA, 19 nt, Homo sapiens
  misc_RNA (1)...(19): siRNA sense strand
gaaauuguucgauauugca

SEQ ID NO: 912889 - RNA, 19 nt, Homo sapiens
  misc_RNA (1)...(19): siRNA sense strand
cuaagcacuuccauaauag

SEQ ID NO: 912890 - RNA, 19 nt, Homo sapiens
  misc_RNA (1)...(19): siRNA sense strand
ggaguaucguucuauuucu

SEQ ID NO: 912891 - RNA, 19 nt, Homo sapiens
  misc_RNA (1)...(19): siRNA sense strand
uaacaggcuuugucuacca

SEQ ID NO: 912892 - RNA, 19 nt, Homo sapiens
  misc_RNA (1)...(19): siRNA sense strand
ugaggaaguugugcgguuu

SEQ ID NO: 912893 - RNA, 19 nt, Homo sapiens
  misc_RNA (1)...(19): siRNA sense strand
cgaaaccacuaucgagucu

SEQ ID NO: 912894 - RNA, 19 nt, Homo sapiens
  misc_RNA (1)...(19): siRNA sense strand
guucgacuucuacgacuua

SEQ ID NO: 912895 - RNA, 19 nt, Homo sapiens
  misc_RNA (1)...(19): siRNA sense strand
ucaccaaggaaguaaauga

SEQ ID NO: 912896 - RNA, 19 nt, Homo sapiens
  misc_RNA (1)...(19): siRNA sense strand
ucgaguauuuguagaagga

SEQ ID NO: 912897 - RNA, 19 nt, Homo sapiens
  misc_RNA (1)...(19): siRNA sense strand
cgauauugcaugacauuga

SEQ ID NO: 912898 - RNA, 19 nt, Homo sapiens
  misc_RNA (1)...(19): siRNA sense strand
gcuaugucauuuccaucuu

SEQ ID NO: 912899 - RNA, 19 nt, Homo sapiens
  misc_RNA (1)...(19): siRNA sense strand
cuagaccucacuuacguua

SEQ ID NO: 912900 - RNA, 19 nt, Homo sapiens
  misc_RNA (1)...(19): siRNA sense strand
gaaggauggacacauuuag

SEQ ID NO: 912901 - RNA, 19 nt, Homo sapiens
  misc_RNA (1)...(19): siRNA sense strand
gggauggauuugaccuaga

SEQ ID NO: 912902 - RNA, 19 nt, Homo sapiens
  misc_RNA (1)...(19): siRNA sense strand
ugcaugacauugaaacaga

SEQ ID NO: 912903 - RNA, 19 nt, Homo sapiens
  misc_RNA (1)...(19): siRNA sense strand
agaccucacuuacguuaca

SEQ ID NO: 912904 - RNA, 19 nt, Homo sapiens
  misc_RNA (1)...(19): siRNA sense strand
ggauggacacauuuaguuc

SEQ ID NO: 912905 - RNA, 19 nt, Homo sapiens
  misc_RNA (1)...(19): siRNA sense strand
gaaagcccacacacaagug

SEQ ID NO: 912906 - RNA, 19 nt, Homo sapiens
  misc_RNA (1)...(19): siRNA sense strand
cuauagaaauccaauugag

SEQ ID NO: 912907 - RNA, 19 nt, Homo sapiens
  misc_RNA (1)...(19): siRNA sense strand
ggauggauuugaccuagac

SEQ ID NO: 912908 - RNA, 19 nt, Homo sapiens
  misc_RNA (1)...(19): siRNA sense strand
gaguaucguucuauuucuc

SEQ ID NO: 912909 - RNA, 19 nt, Homo sapiens
  misc_RNA (1)...(19): siRNA sense strand
ggcuuugucuaccaagaaa

SEQ ID NO: 912910 - RNA, 19 nt, Homo sapiens
  misc_RNA (1)...(19): siRNA sense strand
ucuguaugaugaugugaaa

SEQ ID NO: 912911 - RNA, 19 nt, Homo sapiens
  misc_RNA (1)...(19): siRNA sense strand
gauucguggugauguaugu

SEQ ID NO: 912912 - RNA, 19 nt, Homo sapiens
  misc_RNA (1)...(19): siRNA sense strand
ccacagcaauaaauuucag

SEQ ID NO: 912913 - RNA, 19 nt, Homo sapiens
  misc_RNA (1)...(19): siRNA sense strand
guuacagaacguauuauug

SEQ ID NO: 912914 - RNA, 19 nt, Homo sapiens
  misc_RNA (1)...(19): siRNA sense strand
aaacccacagcaauaaauu

SEQ ID NO: 912915 - RNA, 19 nt, Homo sapiens
  misc_RNA (1)...(19): siRNA sense strand
agaaacaucgaaaccacua

SEQ ID NO: 912916 - RNA, 19 nt, Homo sapiens
  misc_RNA (1)...(19): siRNA sense strand
gauguucuucuucgaguau

SEQ ID NO: 912917 - RNA, 19 nt, Homo sapiens
  misc_RNA (1)...(19): siRNA sense strand
uaaauuucagggaguagaa

SEQ ID NO: 912918 - RNA, 19 nt, Homo sapiens
  misc_RNA (1)...(19): siRNA sense strand
aaaccacuaucgagucuac

SEQ ID NO: 912919 - RNA, 19 nt, Homo sapiens
  misc_RNA (1)...(19): siRNA sense strand
gagaaggcugguuucagaa

SEQ ID NO: 912920 - RNA, 19 nt, Homo sapiens
  misc_RNA (1)...(19): siRNA sense strand
auacacaagggauggauuu

SEQ ID NO: 912921 - RNA, 19 nt, Homo sapiens
  misc_RNA (1)...(19): siRNA sense strand
acugacagcaaacuuuaua

SEQ ID NO: 912922 - RNA, 19 nt, Homo sapiens
  misc_RNA (1)...(19): siRNA sense strand
ugacauugaaacagacaaa

SEQ ID NO: 912923 - RNA, 19 nt, Homo sapiens
  misc_RNA (1)...(19): siRNA sense strand
gcacaagugaaacaucucu

SEQ ID NO: 912924 - RNA, 19 nt, Homo sapiens
  misc_RNA (1)...(19): siRNA sense strand
cgaggaggcaccugcgaaa

SEQ ID NO: 912925 - RNA, 19 nt, Homo sapiens
  misc_RNA (1)...(19): siRNA sense strand
gaagaaccgggacuauggu

SEQ ID NO: 912926 - RNA, 19 nt, Homo sapiens
  misc_RNA (1)...(19): siRNA sense strand
auaauagggucaguagaau

SEQ ID NO: 912927 - RNA, 19 nt, Homo sapiens
  misc_RNA (1)...(19): siRNA sense strand
ucuacaaucuaugcaguga

SEQ ID NO: 912928 - RNA, 19 nt, Homo sapiens
  misc_RNA (1)...(19): siRNA sense strand
aaggcagucuuucuauaga

SEQ ID NO: 912929 - RNA, 19 nt, Homo sapiens
  misc_RNA (1)...(19): siRNA sense strand
uuacagaacguauuauugc

SEQ ID NO: 912930 - RNA, 19 nt, Homo sapiens
  misc_RNA (1)...(19): siRNA sense strand
ggcagcaacuaccugauug

SEQ ID NO: 912931 - RNA, 19 nt, Homo sapiens
  misc_RNA (1)...(19): siRNA sense strand
gggcagcaacuaccugauu

SEQ ID NO: 912932 - RNA, 19 nt, Homo sapiens
  misc_RNA (1)...(19): siRNA sense strand
ggauggacauucgcaaagu

SEQ ID NO: 912933 - RNA, 19 nt, Homo sapiens
  misc_RNA (1)...(19): siRNA sense strand
gauggacauucgcaaagug

SEQ ID NO: 912934 - RNA, 19 nt, Homo sapiens
  misc_RNA (1)...(19): siRNA sense strand
gcagaggaccauccagugu

SEQ ID NO: 912935 - RNA, 19 nt, Homo sapiens
  misc_RNA (1)...(19): siRNA sense strand
acuacgugcucacagguua

SEQ ID NO: 912936 - RNA, 19 nt, Homo sapiens
  misc_RNA (1)...(19): siRNA sense strand
caagguggccugugagaag

SEQ ID NO: 912937 - RNA, 19 nt, Homo sapiens
  misc_RNA (1)...(19): siRNA sense strand
ccaguuugaggccgaguua

SEQ ID NO: 912938 - RNA, 19 nt, Homo sapiens
  misc_RNA (1)...(19): siRNA sense strand
gauccagucuugggugaca

SEQ ID NO: 912939 - RNA, 19 nt, Homo sapiens
  misc_RNA (1)...(19): siRNA sense strand
cgggugcucuccauacaga

SEQ ID NO: 912940 - RNA, 19 nt, Homo sapiens
  misc_RNA (1)...(19): siRNA sense strand
ggcugaacaacaugaauaa

SEQ ID NO: 912941 - RNA, 19 nt, Homo sapiens
  misc_RNA (1)...(19): siRNA sense strand
ggacaugcugcacucuaug

SEQ ID NO: 912942 - RNA, 19 nt, Homo sapiens
  misc_RNA (1)...(19): siRNA sense strand
ggaccuccuucccgucuac

SEQ ID NO: 912943 - RNA, 19 nt, Homo sapiens
  misc_RNA (1)...(19): siRNA sense strand
ggaagggccaagugcugaa

SEQ ID NO: 912944 - RNA, 19 nt, Homo sapiens
  misc_RNA (1)...(19): siRNA sense strand
uggacaugcugcacucuau

SEQ ID NO: 912945 - RNA, 19 nt, Homo sapiens
  misc_RNA (1)...(19): siRNA sense strand
uaucacgcccaaccaguuu

SEQ ID NO: 912946 - RNA, 19 nt, Homo sapiens
  misc_RNA (1)...(19): siRNA sense strand
aggcugaacaacaugaaua

SEQ ID NO: 912947 - RNA, 19 nt, Homo sapiens
  misc_RNA (1)...(19): siRNA sense strand
cgugugugauccagucuug

SEQ ID NO: 912948 - RNA, 19 nt, Homo sapiens
  misc_RNA (1)...(19): siRNA sense strand
ccauggugguggacauugu

SEQ ID NO: 912949 - RNA, 19 nt, Homo sapiens
  misc_RNA (1)...(19): siRNA sense strand
ggagucagaggaggaggaa

SEQ ID NO: 912950 - RNA, 19 nt, Homo sapiens
  misc_RNA (1)...(19): siRNA sense strand
gcugaacaacaugaauaaa

SEQ ID NO: 912951 - RNA, 19 nt, Homo sapiens
  misc_RNA (1)...(19): siRNA sense strand
gccgggugcucuccauaca

SEQ ID NO: 912952 - RNA, 19 nt, Homo sapiens
  misc_RNA (1)...(19): siRNA sense strand
caucgaggacccagagauc

SEQ ID NO: 912953 - RNA, 19 nt, Homo sapiens
  misc_RNA (1)...(19): siRNA sense strand
gaagggccaagugcugaau

SEQ ID NO: 912954 - RNA, 19 nt, Homo sapiens
  misc_RNA (1)...(19): siRNA sense strand
gcagcaacuaccugauugu

SEQ ID NO: 912955 - RNA, 19 nt, Homo sapiens
  misc_RNA (1)...(19): siRNA sense strand
aagguggccugugagaaga

SEQ ID NO: 912956 - RNA, 19 nt, Homo sapiens
  misc_RNA (1)...(19): siRNA sense strand
gaucagaacuucgacuaua

SEQ ID NO: 912957 - RNA, 19 nt, Homo sapiens
  misc_RNA (1)...(19): siRNA sense strand
ccacgcaaaucaagaccua

SEQ ID NO: 912958 - RNA, 19 nt, Homo sapiens
  misc_RNA (1)...(19): siRNA sense strand
ggacaacgcccaggucauc

SEQ ID NO: 912959 - RNA, 19 nt, Homo sapiens
  misc_RNA (1)...(19): siRNA sense strand
uguaugacaucgccaauca

SEQ ID NO: 912960 - RNA, 19 nt, Homo sapiens
  misc_RNA (1)...(19): siRNA sense strand
ugacaucgccaaucaggaa

SEQ ID NO: 912961 - RNA, 19 nt, Homo sapiens
  misc_RNA (1)...(19): siRNA sense strand
guucaaacugcuacugaua

SEQ ID NO: 912962 - RNA, 19 nt, Homo sapiens
  misc_RNA (1)...(19): siRNA sense strand
guacugugggcaucgauuu

SEQ ID NO: 912963 - RNA, 19 nt, Homo sapiens
  misc_RNA (1)...(19): siRNA sense strand
gaugaacgagucccuggaa

SEQ ID NO: 912964 - RNA, 19 nt, Homo sapiens
  misc_RNA (1)...(19): siRNA sense strand
cgaccuugguuucgaguuc

SEQ ID NO: 912965 - RNA, 19 nt, Homo sapiens
  misc_RNA (1)...(19): siRNA sense strand
ggacugggccacgcaaauc

SEQ ID NO: 912966 - RNA, 19 nt, Homo sapiens
  misc_RNA (1)...(19): siRNA sense strand
gcaagacuuccuuccuguu

SEQ ID NO: 912967 - RNA, 19 nt, Homo sapiens
  misc_RNA (1)...(19): siRNA sense strand
cagcagaucagaacuucga

SEQ ID NO: 912968 - RNA, 19 nt, Homo sapiens
  misc_RNA (1)...(19): siRNA sense strand
gcaucgauuucaaggucaa

SEQ ID NO: 912969 - RNA, 19 nt, Homo sapiens
  misc_RNA (1)...(19): siRNA sense strand
cagaucagaacuucgacua

SEQ ID NO: 912970 - RNA, 19 nt, Homo sapiens
  misc_RNA (1)...(19): siRNA sense strand
caagacuuccuuccuguuc

SEQ ID NO: 912971 - RNA, 19 nt, Homo sapiens
  misc_RNA (1)...(19): siRNA sense strand
ucaaacugcuacugauagg

SEQ ID NO: 912972 - RNA, 19 nt, Homo sapiens
  misc_RNA (1)...(19): siRNA sense strand
ggaggacgaacguguugug

SEQ ID NO: 912973 - RNA, 19 nt, Homo sapiens
  misc_RNA (1)...(19): siRNA sense strand
ucgacuauauguucaaacu

SEQ ID NO: 912974 - RNA, 19 nt, Homo sapiens
  misc_RNA (1)...(19): siRNA sense strand
cuuccuuccuguuccgaua

SEQ ID NO: 912975 - RNA, 19 nt, Homo sapiens
  misc_RNA (1)...(19): siRNA sense strand
gcagugugggcaagacuuc

SEQ ID NO: 912976 - RNA, 19 nt, Homo sapiens
  misc_RNA (1)...(19): siRNA sense strand
ucagaacuucgacuauaug

SEQ ID NO: 912977 - RNA, 19 nt, Homo sapiens
  misc_RNA (1)...(19): siRNA sense strand
ggaugcagcagaucagaac

SEQ ID NO: 912978 - RNA, 19 nt, Homo sapiens
  misc_RNA (1)...(19): siRNA sense strand
aucagaacuucgacuauau

SEQ ID NO: 912979 - RNA, 19 nt, Homo sapiens
  misc_RNA (1)...(19): siRNA sense strand
gggaugcagcagaucagaa

SEQ ID NO: 912980 - RNA, 19 nt, Homo sapiens
  misc_RNA (1)...(19): siRNA sense strand
gagcgcuaccgcaccauca

SEQ ID NO: 912981 - RNA, 19 nt, Homo sapiens
  misc_RNA (1)...(19): siRNA sense strand
ucgagcgccugguggaugu

SEQ ID NO: 912982 - RNA, 19 nt, Homo sapiens
  misc_RNA (1)...(19): siRNA sense strand
gcacuccguuucccaagaa

SEQ ID NO: 912983 - RNA, 19 nt, Homo sapiens
  misc_RNA (1)...(19): siRNA sense strand
acaagcacuucuacuauuu

SEQ ID NO: 912984 - RNA, 19 nt, Homo sapiens
  misc_RNA (1)...(19): siRNA sense strand
gcuucgagcugcacaagaa

SEQ ID NO: 912985 - RNA, 19 nt, Homo sapiens
  misc_RNA (1)...(19): siRNA sense strand
gcuacaagcacuucuacua

SEQ ID NO: 912986 - RNA, 19 nt, Homo sapiens
  misc_RNA (1)...(19): siRNA sense strand
uacaagcacuucuacuauu

SEQ ID NO: 912987 - RNA, 19 nt, Homo sapiens
  misc_RNA (1)...(19): siRNA sense strand
cuacaagcacuucuacuau

SEQ ID NO: 912988 - RNA, 19 nt, Homo sapiens
  misc_RNA (1)...(19): siRNA sense strand
ucaacaaggacaagacauu

SEQ ID NO: 912989 - RNA, 19 nt, Homo sapiens
  misc_RNA (1)...(19): siRNA sense strand
guacauggaccugcugaug

SEQ ID NO: 912990 - RNA, 19 nt, Homo sapiens
  misc_RNA (1)...(19): siRNA sense strand
caacaaggacaagacauuc

SEQ ID NO: 912991 - RNA, 19 nt, Homo sapiens
  misc_RNA (1)...(19): siRNA sense strand
gcuggcaggaugagcauaa

SEQ ID NO: 912992 - RNA, 19 nt, Homo sapiens
  misc_RNA (1)...(19): siRNA sense strand
acauggaccugcugaugga

SEQ ID NO: 912993 - RNA, 19 nt, Homo sapiens
  misc_RNA (1)...(19): siRNA sense strand
ggagcuggagccacugaaa

SEQ ID NO: 912994 - RNA, 19 nt, Homo sapiens
  misc_RNA (1)...(19): siRNA sense strand
ucacgugguggacuucuuu

SEQ ID NO: 912995 - RNA, 19 nt, Homo sapiens
  misc_RNA (1)...(19): siRNA sense strand
gcaggaugagcauaaguuc

SEQ ID NO: 912996 - RNA, 19 nt, Homo sapiens
  misc_RNA (1)...(19): siRNA sense strand
ggcaggaugagcauaaguu

SEQ ID NO: 912997 - RNA, 19 nt, Homo sapiens
  misc_RNA (1)...(19): siRNA sense strand
uggagccacugaaagaaau

SEQ ID NO: 912998 - RNA, 19 nt, Homo sapiens
  misc_RNA (1)...(19): siRNA sense strand
ucuacuauuucgucaagga

SEQ ID NO: 912999 - RNA, 19 nt, Homo sapiens
  misc_RNA (1)...(19): siRNA sense strand
ggcacuccguuucccaaga

SEQ ID NO: 913000 - RNA, 19 nt, Homo sapiens
  misc_RNA (1)...(19): siRNA sense strand
gagcuggagccacugaaag

SEQ ID NO: 913001 - RNA, 19 nt, Homo sapiens
  misc_RNA (1)...(19): siRNA sense strand
gaacgacuggguggcuguu

SEQ ID NO: 913002 - RNA, 19 nt, Homo sapiens
  misc_RNA (1)...(19): siRNA sense strand
aggcgcagaucaacaacga

SEQ ID NO: 913003 - RNA, 19 nt, Homo sapiens
  misc_RNA (1)...(19): siRNA sense strand
cgucuacauccaccacuuu

SEQ ID NO: 913004 - RNA, 19 nt, Homo sapiens
  misc_RNA (1)...(19): siRNA sense strand
cuucuacuauuucgucaag

SEQ ID NO: 913005 - RNA, 19 nt, Homo sapiens
  misc_RNA (1)...(19): siRNA sense strand
caagcacuucuacuauuuc

SEQ ID NO: 913006 - RNA, 19 nt, Homo sapiens
  misc_RNA (1)...(19): siRNA sense strand
ucgaggcgcagaucaacaa

SEQ ID NO: 913007 - RNA, 19 nt, Homo sapiens
  misc_RNA (1)...(19): siRNA sense strand
gaagagcaaugaauacuga

SEQ ID NO: 913008 - RNA, 19 nt, Homo sapiens
  misc_RNA (1)...(19): siRNA sense strand
gcacgaagagcaaugaaua

SEQ ID NO: 913009 - RNA, 19 nt, Homo sapiens
  misc_RNA (1)...(19): siRNA sense strand
gagaugaugcaaagaauua

SEQ ID NO: 913010 - RNA, 19 nt, Homo sapiens
  misc_RNA (1)...(19): siRNA sense strand
gaaagaaaaugaacggaua

SEQ ID NO: 913011 - RNA, 19 nt, Homo sapiens
  misc_RNA (1)...(19): siRNA sense strand
uagaaggccuacaggauua

SEQ ID NO: 913012 - RNA, 19 nt, Homo sapiens
  misc_RNA (1)...(19): siRNA sense strand
cagaaugguugaaggauaa

SEQ ID NO: 913013 - RNA, 19 nt, Homo sapiens
  misc_RNA (1)...(19): siRNA sense strand
cuagaaaucuugcuccaaa

SEQ ID NO: 913014 - RNA, 19 nt, Homo sapiens
  misc_RNA (1)...(19): siRNA sense strand
ugacauagcugaacuuugc

SEQ ID NO: 913015 - RNA, 19 nt, Homo sapiens
  misc_RNA (1)...(19): siRNA sense strand
caacuagaauuguauguag

SEQ ID NO: 913016 - RNA, 19 nt, Homo sapiens
  misc_RNA (1)...(19): siRNA sense strand
ggucaacuuuccuccauuu

SEQ ID NO: 913017 - RNA, 19 nt, Homo sapiens
  misc_RNA (1)...(19): siRNA sense strand
gaugaagauugaagaagaa

SEQ ID NO: 913018 - RNA, 19 nt, Homo sapiens
  misc_RNA (1)...(19): siRNA sense strand
ccagaaugguugaaggaua

SEQ ID NO: 913019 - RNA, 19 nt, Homo sapiens
  misc_RNA (1)...(19): siRNA sense strand
cuaaggcacuggaauuauu

SEQ ID NO: 913020 - RNA, 19 nt, Homo sapiens
  misc_RNA (1)...(19): siRNA sense strand
aagcaaagauugggaauga

SEQ ID NO: 913021 - RNA, 19 nt, Homo sapiens
  misc_RNA (1)...(19): siRNA sense strand
acaaagagaugaugcaaag

SEQ ID NO: 913022 - RNA, 19 nt, Homo sapiens
  misc_RNA (1)...(19): siRNA sense strand
ucagagagaagagaaauua

SEQ ID NO: 913023 - RNA, 19 nt, Homo sapiens
  misc_RNA (1)...(19): siRNA sense strand
uagcugaacuuugcgauuu

SEQ ID NO: 913024 - RNA, 19 nt, Homo sapiens
  misc_RNA (1)...(19): siRNA sense strand
ggauaaaggaaacaaauug

SEQ ID NO: 913025 - RNA, 19 nt, Homo sapiens
  misc_RNA (1)...(19): siRNA sense strand
gaaauuuggcaucuagaaa

SEQ ID NO: 913026 - RNA, 19 nt, Homo sapiens
  misc_RNA (1)...(19): siRNA sense strand
acacaaggcuauugaagau

SEQ ID NO: 913027 - RNA, 19 nt, Homo sapiens
  misc_RNA (1)...(19): siRNA sense strand
caacagcucuucgugaauc

SEQ ID NO: 913028 - RNA, 19 nt, Homo sapiens
  misc_RNA (1)...(19): siRNA sense strand
ugaugaagauugaagaaga

SEQ ID NO: 913029 - RNA, 19 nt, Homo sapiens
  misc_RNA (1)...(19): siRNA sense strand
gagaagagaaauuauguca

SEQ ID NO: 913030 - RNA, 19 nt, Homo sapiens
  misc_RNA (1)...(19): siRNA sense strand
gcacauguacgacguggaa

SEQ ID NO: 913031 - RNA, 19 nt, Homo sapiens
  misc_RNA (1)...(19): siRNA sense strand
gaugagagcagcaaagcaa

SEQ ID NO: 913032 - RNA, 19 nt, Homo sapiens
  misc_RNA (1)...(19): siRNA sense strand
ugacggguguugacaaaga

SEQ ID NO: 913033 - RNA, 19 nt, Homo sapiens
  misc_RNA (1)...(19): siRNA sense strand
agacaaugcuaaugcaaga

SEQ ID NO: 913034 - RNA, 19 nt, Homo sapiens
  misc_RNA (1)...(19): siRNA sense strand
gagagaagagaaauuaugu

SEQ ID NO: 913035 - RNA, 19 nt, Homo sapiens
  misc_RNA (1)...(19): siRNA sense strand
aagcggcacuuaagauuga

SEQ ID NO: 913036 - RNA, 19 nt, Homo sapiens
  misc_RNA (1)...(19): siRNA sense strand
cagcaaagcgggaagauca

SEQ ID NO: 913037 - RNA, 19 nt, Homo sapiens
  misc_RNA (1)...(19): siRNA sense strand
uggcagcuaucaaugcaua

SEQ ID NO: 913038 - RNA, 19 nt, Homo sapiens
  misc_RNA (1)...(19): siRNA sense strand
uaagaugccacuauuguau

SEQ ID NO: 913039 - RNA, 19 nt, Homo sapiens
  misc_RNA (1)...(19): siRNA sense strand
gagcagcaaagcaaagauu

SEQ ID NO: 913040 - RNA, 19 nt, Homo sapiens
  misc_RNA (1)...(19): siRNA sense strand
gaaguuaaaggaagacagu

SEQ ID NO: 913041 - RNA, 19 nt, Homo sapiens
  misc_RNA (1)...(19): siRNA sense strand
aaagagaugaugcaaagaa

SEQ ID NO: 913042 - RNA, 19 nt, Homo sapiens
  misc_RNA (1)...(19): siRNA sense strand
gaagcggcacuuaagauug

SEQ ID NO: 913043 - RNA, 19 nt, Homo sapiens
  misc_RNA (1)...(19): siRNA sense strand
acaaggcuauugaagauuc

SEQ ID NO: 913044 - RNA, 19 nt, Homo sapiens
  misc_RNA (1)...(19): siRNA sense strand
gcugaacuuugcgauuuaa

SEQ ID NO: 913045 - RNA, 19 nt, Homo sapiens
  misc_RNA (1)...(19): siRNA sense strand
gcaaauuaaagaaggaaga

SEQ ID NO: 913046 - RNA, 19 nt, Homo sapiens
  misc_RNA (1)...(19): siRNA sense strand
gcaaagauugggaaugaca

SEQ ID NO: 913047 - RNA, 19 nt, Homo sapiens
  misc_RNA (1)...(19): siRNA sense strand
cccaacagcucuucgugaa

SEQ ID NO: 913048 - RNA, 19 nt, Homo sapiens
  misc_RNA (1)...(19): siRNA sense strand
gaaggauaaaggaaacaaa

SEQ ID NO: 913049 - RNA, 19 nt, Homo sapiens
  misc_RNA (1)...(19): siRNA sense strand
gaggaggaguggcuacaca

SEQ ID NO: 913050 - RNA, 19 nt, Homo sapiens
  misc_RNA (1)...(19): siRNA sense strand
gcaaagcgggaagaucaaa

SEQ ID NO: 913051 - RNA, 19 nt, Homo sapiens
  misc_RNA (1)...(19): siRNA sense strand
acaaauugaugcugagaag

SEQ ID NO: 913052 - RNA, 19 nt, Homo sapiens
  misc_RNA (1)...(19): siRNA sense strand
agaugccacuauuguauuu

SEQ ID NO: 913053 - RNA, 19 nt, Homo sapiens
  misc_RNA (1)...(19): siRNA sense strand
gcagcuaucaaugcauaua

SEQ ID NO: 913054 - RNA, 19 nt, Homo sapiens
  misc_RNA (1)...(19): siRNA sense strand
gaagauugaagaagaagag

SEQ ID NO: 913055 - RNA, 19 nt, Homo sapiens
  misc_RNA (1)...(19): siRNA sense strand
gaaaaugaacggauaaaag

SEQ ID NO: 913056 - RNA, 19 nt, Homo sapiens
  misc_RNA (1)...(19): siRNA sense strand
ucugucaacuagaauugua

SEQ ID NO: 913057 - RNA, 19 nt, Homo sapiens
  misc_RNA (1)...(19): siRNA sense strand
gggagaaauucagaaaaua

SEQ ID NO: 913058 - RNA, 19 nt, Homo sapiens
  misc_RNA (1)...(19): siRNA sense strand
uuauugaugccaccuguua

SEQ ID NO: 913059 - RNA, 19 nt, Homo sapiens
  misc_RNA (1)...(19): siRNA sense strand
aaagggagaaauucagaaa

SEQ ID NO: 913060 - RNA, 19 nt, Homo sapiens
  misc_RNA (1)...(19): siRNA sense strand
ugaagcggcacuuaagauu

SEQ ID NO: 913061 - RNA, 19 nt, Homo sapiens
  misc_RNA (1)...(19): siRNA sense strand
ggaggaguggcuacacaaa

SEQ ID NO: 913062 - RNA, 19 nt, Homo sapiens
  misc_RNA (1)...(19): siRNA sense strand
aaaagaagcuacagaagca

SEQ ID NO: 913063 - RNA, 19 nt, Homo sapiens
  misc_RNA (1)...(19): siRNA sense strand
agcaaugaauacugacaua

SEQ ID NO: 913064 - RNA, 19 nt, Homo sapiens
  misc_RNA (1)...(19): siRNA sense strand
guuaaaggaagacaguauu

SEQ ID NO: 913065 - RNA, 19 nt, Homo sapiens
  misc_RNA (1)...(19): siRNA sense strand
uuacugagaaguuaaagga

SEQ ID NO: 913066 - RNA, 19 nt, Homo sapiens
  misc_RNA (1)...(19): siRNA sense strand
gaaaagcugaggagcaaaa

SEQ ID NO: 913067 - RNA, 19 nt, Homo sapiens
  misc_RNA (1)...(19): siRNA sense strand
ugggagacccuuucuguga

SEQ ID NO: 913068 - RNA, 19 nt, Homo sapiens
  misc_RNA (1)...(19): siRNA sense strand
aaucacaaguagcagaaga

SEQ ID NO: 913069 - RNA, 19 nt, Homo sapiens
  misc_RNA (1)...(19): siRNA sense strand
gauaaaagccacuaaagca

SEQ ID NO: 913070 - RNA, 19 nt, Homo sapiens
  misc_RNA (1)...(19): siRNA sense strand
gacaaagagaugaugcaaa

SEQ ID NO: 913071 - RNA, 19 nt, Homo sapiens
  misc_RNA (1)...(19): siRNA sense strand
ugugacggguguugacaaa

SEQ ID NO: 913072 - RNA, 19 nt, Homo sapiens
  misc_RNA (1)...(19): siRNA sense strand
gauuaugaagcggcacuua

SEQ ID NO: 913073 - RNA, 19 nt, Homo sapiens
  misc_RNA (1)...(19): siRNA sense strand
gagucuuacuagaaauuug

SEQ ID NO: 913074 - RNA, 19 nt, Homo sapiens
  misc_RNA (1)...(19): siRNA sense strand
gagagcagcaaagcaaaga

SEQ ID NO: 913075 - RNA, 19 nt, Homo sapiens
  misc_RNA (1)...(19): siRNA sense strand
ggaagccuggaaagaauau

SEQ ID NO: 913076 - RNA, 19 nt, Homo sapiens
  misc_RNA (1)...(19): siRNA sense strand
aagagaugaugcaaagaau

SEQ ID NO: 913077 - RNA, 19 nt, Homo sapiens
  misc_RNA (1)...(19): siRNA sense strand
cagcuaucaaugcauauaa

SEQ ID NO: 913078 - RNA, 19 nt, Homo sapiens
  misc_RNA (1)...(19): siRNA sense strand
cuggaaagaauaucaaaga

SEQ ID NO: 913079 - RNA, 19 nt, Homo sapiens
  misc_RNA (1)...(19): siRNA sense strand
ucaaggaacagaacuaaaa

SEQ ID NO: 913080 - RNA, 19 nt, Homo sapiens
  misc_RNA (1)...(19): siRNA sense strand
cugagaaguuaaaggaaga

SEQ ID NO: 913081 - RNA, 19 nt, Homo sapiens
  misc_RNA (1)...(19): siRNA sense strand
ugaagaagaagagaggaaa

SEQ ID NO: 913082 - RNA, 19 nt, Homo sapiens
  misc_RNA (1)...(19): siRNA sense strand
caagaaugaaggcacaugu

SEQ ID NO: 913083 - RNA, 19 nt, Homo sapiens
  misc_RNA (1)...(19): siRNA sense strand
gguugaaggauaaaggaaa

SEQ ID NO: 913084 - RNA, 19 nt, Homo sapiens
  misc_RNA (1)...(19): siRNA sense strand
gcaaugaauacugacauag

SEQ ID NO: 913085 - RNA, 19 nt, Homo sapiens
  misc_RNA (1)...(19): siRNA sense strand
aggaguggcuacacaaaca

SEQ ID NO: 913086 - RNA, 19 nt, Homo sapiens
  misc_RNA (1)...(19): siRNA sense strand
agagagaagagaaauuaug

SEQ ID NO: 913087 - RNA, 19 nt, Homo sapiens
  misc_RNA (1)...(19): siRNA sense strand
gaugaugcaaagaauuaga

SEQ ID NO: 913088 - RNA, 19 nt, Homo sapiens
  misc_RNA (1)...(19): siRNA sense strand
uaaggcacuggaauuauug

SEQ ID NO: 913089 - RNA, 19 nt, Homo sapiens
  misc_RNA (1)...(19): siRNA sense strand
caaaggcgugugcgucaga

SEQ ID NO: 913090 - RNA, 19 nt, Homo sapiens
  misc_RNA (1)...(19): siRNA sense strand
gaaaagaacccagaauggu

SEQ ID NO: 913091 - RNA, 19 nt, Homo sapiens
  misc_RNA (1)...(19): siRNA sense strand
ccauugucuucaccuugua

SEQ ID NO: 913092 - RNA, 19 nt, Homo sapiens
  misc_RNA (1)...(19): siRNA sense strand
aagaaugaaggcacaugua

SEQ ID NO: 913093 - RNA, 19 nt, Homo sapiens
  misc_RNA (1)...(19): siRNA sense strand
caaugcuaaugcaagaaug

SEQ ID NO: 913094 - RNA, 19 nt, Homo sapiens
  misc_RNA (1)...(19): siRNA sense strand
auaagaugccacuauugua

SEQ ID NO: 913095 - RNA, 19 nt, Homo sapiens
  misc_RNA (1)...(19): siRNA sense strand
guugaaggauaaaggaaac

SEQ ID NO: 913096 - RNA, 19 nt, Homo sapiens
  misc_RNA (1)...(19): siRNA sense strand
uuggaagccuggaaagaau

SEQ ID NO: 913097 - RNA, 19 nt, Homo sapiens
  misc_RNA (1)...(19): siRNA sense strand
gcaagaaugaaggcacaug

SEQ ID NO: 913098 - RNA, 19 nt, Homo sapiens
  misc_RNA (1)...(19): siRNA sense strand
aaauugaugcugagaagau

SEQ ID NO: 913099 - RNA, 19 nt, Homo sapiens
  misc_RNA (1)...(19): siRNA sense strand
uuugaggcauuucuuuaug

SEQ ID NO: 913100 - RNA, 19 nt, Homo sapiens
  misc_RNA (1)...(19): siRNA sense strand
gcacuuaagauugauccau

SEQ ID NO: 913101 - RNA, 19 nt, Homo sapiens
  misc_RNA (1)...(19): siRNA sense strand
aaaacuaucugaaggucaa

SEQ ID NO: 913102 - RNA, 19 nt, Homo sapiens
  misc_RNA (1)...(19): siRNA sense strand
ugaaucacaaguagcagaa

SEQ ID NO: 913103 - RNA, 19 nt, Homo sapiens
  misc_RNA (1)...(19): siRNA sense strand
agaaauuuggcaucuagaa

SEQ ID NO: 913104 - RNA, 19 nt, Homo sapiens
  misc_RNA (1)...(19): siRNA sense strand
gaauacugacauagcugaa

SEQ ID NO: 913105 - RNA, 19 nt, Homo sapiens
  misc_RNA (1)...(19): siRNA sense strand
gauugauccauccaacaaa

SEQ ID NO: 913106 - RNA, 19 nt, Homo sapiens
  misc_RNA (1)...(19): siRNA sense strand
agcugaacuuugcgauuua

SEQ ID NO: 913107 - RNA, 19 nt, Homo sapiens
  misc_RNA (1)...(19): siRNA sense strand
gcacaucacugaacucaau

SEQ ID NO: 913108 - RNA, 19 nt, Homo sapiens
  misc_RNA (1)...(19): siRNA sense strand
gagccaagcuguccugaug

SEQ ID NO: 913109 - RNA, 19 nt, Homo sapiens
  misc_RNA (1)...(19): siRNA sense strand
gcagaacaaucgccucaga

SEQ ID NO: 913110 - RNA, 19 nt, Homo sapiens
  misc_RNA (1)...(19): siRNA sense strand
gagaacaggcucacggaua

SEQ ID NO: 913111 - RNA, 19 nt, Homo sapiens
  misc_RNA (1)...(19): siRNA sense strand
gcaacuggcuccugcucaa

SEQ ID NO: 913112 - RNA, 19 nt, Homo sapiens
  misc_RNA (1)...(19): siRNA sense strand
gcaaccaccuggaauacau

SEQ ID NO: 913113 - RNA, 19 nt, Homo sapiens
  misc_RNA (1)...(19): siRNA sense strand
ucccugaggugccuaguua

SEQ ID NO: 913114 - RNA, 19 nt, Homo sapiens
  misc_RNA (1)...(19): siRNA sense strand
caacgucaauggccucaug

SEQ ID NO: 913115 - RNA, 19 nt, Homo sapiens
  misc_RNA (1)...(19): siRNA sense strand
guaaccagcuguugcagau

SEQ ID NO: 913116 - RNA, 19 nt, Homo sapiens
  misc_RNA (1)...(19): siRNA sense strand
agaacaggcucacggauau

SEQ ID NO: 913117 - RNA, 19 nt, Homo sapiens
  misc_RNA (1)...(19): siRNA sense strand
uaucaucaaugucaacguu

SEQ ID NO: 913118 - RNA, 19 nt, Homo sapiens
  misc_RNA (1)...(19): siRNA sense strand
acaaccagcuggagaacuu

SEQ ID NO: 913119 - RNA, 19 nt, Homo sapiens
  misc_RNA (1)...(19): siRNA sense strand
gcaaucagaucagcuucau

SEQ ID NO: 913120 - RNA, 19 nt, Homo sapiens
  misc_RNA (1)...(19): siRNA sense strand
ccacauccgucucuucuac

SEQ ID NO: 913121 - RNA, 19 nt, Homo sapiens
  misc_RNA (1)...(19): siRNA sense strand
acacugaucugacuaccau

SEQ ID NO: 913122 - RNA, 19 nt, Homo sapiens
  misc_RNA (1)...(19): siRNA sense strand
gaaggcacccaaugagugu

SEQ ID NO: 913123 - RNA, 19 nt, Homo sapiens
  misc_RNA (1)...(19): siRNA sense strand
gaacaucucccugcagaac

SEQ ID NO: 913124 - RNA, 19 nt, Homo sapiens
  misc_RNA (1)...(19): siRNA sense strand
ccauccagcugcagaacaa

SEQ ID NO: 913125 - RNA, 19 nt, Homo sapiens
  misc_RNA (1)...(19): siRNA sense strand
acaacaagcugcagguucu

SEQ ID NO: 913126 - RNA, 19 nt, Homo sapiens
  misc_RNA (1)...(19): siRNA sense strand
ggccauugccgccauugua

SEQ ID NO: 913127 - RNA, 19 nt, Homo sapiens
  misc_RNA (1)...(19): siRNA sense strand
gacucuaccuguccaacaa

SEQ ID NO: 913128 - RNA, 19 nt, Homo sapiens
  misc_RNA (1)...(19): siRNA sense strand
gcacggcaaccaccuggaa

SEQ ID NO: 913129 - RNA, 19 nt, Homo sapiens
  misc_RNA (1)...(19): siRNA sense strand
gaaugucuuccgcauguug

SEQ ID NO: 913130 - RNA, 19 nt, Homo sapiens
  misc_RNA (1)...(19): siRNA sense strand
ucaacacgcacaucacuga

SEQ ID NO: 913131 - RNA, 19 nt, Homo sapiens
  misc_RNA (1)...(19): siRNA sense strand
gugccuaguuacccagaaa

SEQ ID NO: 913132 - RNA, 19 nt, Homo sapiens
  misc_RNA (1)...(19): siRNA sense strand
caaccgucuuacucucuuu

SEQ ID NO: 913133 - RNA, 19 nt, Homo sapiens
  misc_RNA (1)...(19): siRNA sense strand
agacuacacugaucugacu

SEQ ID NO: 913134 - RNA, 19 nt, Homo sapiens
  misc_RNA (1)...(19): siRNA sense strand
gccauugccgccauuguaa

SEQ ID NO: 913135 - RNA, 19 nt, Homo sapiens
  misc_RNA (1)...(19): siRNA sense strand
agaauagccucacccacau

SEQ ID NO: 913136 - RNA, 19 nt, Homo sapiens
  misc_RNA (1)...(19): siRNA sense strand
gaagacuacacugaucuga

SEQ ID NO: 913137 - RNA, 19 nt, Homo sapiens
  misc_RNA (1)...(19): siRNA sense strand
uaaccagcccuguggaaga

SEQ ID NO: 913138 - RNA, 19 nt, Homo sapiens
  misc_RNA (1)...(19): siRNA sense strand
gagcugcggcuguaugaca

SEQ ID NO: 913139 - RNA, 19 nt, Homo sapiens
  misc_RNA (1)...(19): siRNA sense strand
ugugugagcugcggcugua

SEQ ID NO: 913140 - RNA, 19 nt, Homo sapiens
  misc_RNA (1)...(19): siRNA sense strand
gccagucccucauuaucau

SEQ ID NO: 913141 - RNA, 19 nt, Homo sapiens
  misc_RNA (1)...(19): siRNA sense strand
guggaagacuacacugauc

SEQ ID NO: 913142 - RNA, 19 nt, Homo sapiens
  misc_RNA (1)...(19): siRNA sense strand
aaccacaucucuucucuac

SEQ ID NO: 913143 - RNA, 19 nt, Homo sapiens
  misc_RNA (1)...(19): siRNA sense strand
caaccacaaccuccagaga

SEQ ID NO: 913144 - RNA, 19 nt, Homo sapiens
  misc_RNA (1)...(19): siRNA sense strand
gaugaaggcacccaaugag

SEQ ID NO: 913145 - RNA, 19 nt, Homo sapiens
  misc_RNA (1)...(19): siRNA sense strand
ggccagucccucauuauca

SEQ ID NO: 913146 - RNA, 19 nt, Homo sapiens
  misc_RNA (1)...(19): siRNA sense strand
ggaauaucuucgccaacgu

SEQ ID NO: 913147 - RNA, 19 nt, Homo sapiens
  misc_RNA (1)...(19): siRNA sense strand
ucagcaaccuccgccaguu

SEQ ID NO: 913148 - RNA, 19 nt, Homo sapiens
  misc_RNA (1)...(19): siRNA sense strand
caacaacaagcugcagguu

SEQ ID NO: 913149 - RNA, 19 nt, Homo sapiens
  misc_RNA (1)...(19): siRNA sense strand
gcagaugaaggcacccaau

SEQ ID NO: 913150 - RNA, 19 nt, Homo sapiens
  misc_RNA (1)...(19): siRNA sense strand
gaagcauuaucuccuuuug

SEQ ID NO: 913151 - RNA, 19 nt, Homo sapiens
  misc_RNA (1)...(19): siRNA sense strand
caauaucucagcccucauc

SEQ ID NO: 913152 - RNA, 19 nt, Homo sapiens
  misc_RNA (1)...(19): siRNA sense strand
gccaagcuguccugaugca

SEQ ID NO: 913153 - RNA, 19 nt, Homo sapiens
  misc_RNA (1)...(19): siRNA sense strand
ccuggucucuuccacaaca

SEQ ID NO: 913154 - RNA, 19 nt, Homo sapiens
  misc_RNA (1)...(19): siRNA sense strand
aaugagcugucgcgcauca

SEQ ID NO: 913155 - RNA, 19 nt, Homo sapiens
  misc_RNA (1)...(19): siRNA sense strand
agaugaaggcacccaauga

SEQ ID NO: 913156 - RNA, 19 nt, Homo sapiens
  misc_RNA (1)...(19): siRNA sense strand
uaucuucgccaacgucaau

SEQ ID NO: 913157 - RNA, 19 nt, Homo sapiens
  misc_RNA (1)...(19): siRNA sense strand
cugaagcauuaucuccuuu

SEQ ID NO: 913158 - RNA, 19 nt, Homo sapiens
  misc_RNA (1)...(19): siRNA sense strand
auucuuagccgcaaucaga

SEQ ID NO: 913159 - RNA, 19 nt, Homo sapiens
  misc_RNA (1)...(19): siRNA sense strand
ucaaccgucuuacucucuu

SEQ ID NO: 913160 - RNA, 19 nt, Homo sapiens
  misc_RNA (1)...(19): siRNA sense strand
uggccaaccugcagaacau

SEQ ID NO: 913161 - RNA, 19 nt, Homo sapiens
  misc_RNA (1)...(19): siRNA sense strand
ggaagacuacacugaucug

SEQ ID NO: 913162 - RNA, 19 nt, Homo sapiens
  misc_RNA (1)...(19): siRNA sense strand
agaacaaccagcuggagaa

SEQ ID NO: 913163 - RNA, 19 nt, Homo sapiens
  misc_RNA (1)...(19): siRNA sense strand
caacacgcacaucacugaa

SEQ ID NO: 913164 - RNA, 19 nt, Homo sapiens
  misc_RNA (1)...(19): siRNA sense strand
gcuaaccagcccuguggaa

SEQ ID NO: 913165 - RNA, 19 nt, Homo sapiens
  misc_RNA (1)...(19): siRNA sense strand
guuagggacggacacugua

SEQ ID NO: 913166 - RNA, 19 nt, Homo sapiens
  misc_RNA (1)...(19): siRNA sense strand
cuuacucucuuugggaauu

SEQ ID NO: 913167 - RNA, 19 nt, Homo sapiens
  misc_RNA (1)...(19): siRNA sense strand
cagaugaaggcacccaaug

SEQ ID NO: 913168 - RNA, 19 nt, Homo sapiens
  misc_RNA (1)...(19): siRNA sense strand
ccagcccuguggaagacua

SEQ ID NO: 913169 - RNA, 19 nt, Homo sapiens
  misc_RNA (1)...(19): siRNA sense strand
gaacaaccagcuggagaac

SEQ ID NO: 913170 - RNA, 19 nt, Homo sapiens
  misc_RNA (1)...(19): siRNA sense strand
gugcaggguuggccuacca

SEQ ID NO: 913171 - RNA, 19 nt, Homo sapiens
  misc_RNA (1)...(19): siRNA sense strand
acaucucccugcagaacaa

SEQ ID NO: 913172 - RNA, 19 nt, Homo sapiens
  misc_RNA (1)...(19): siRNA sense strand
cccugaggauugagaagaa

SEQ ID NO: 913173 - RNA, 19 nt, Homo sapiens
  misc_RNA (1)...(19): siRNA sense strand
ucucuucucuacccgacaa

SEQ ID NO: 913174 - RNA, 19 nt, Homo sapiens
  misc_RNA (1)...(19): siRNA sense strand
caaccacaucucuucucua

SEQ ID NO: 913175 - RNA, 19 nt, Homo sapiens
  misc_RNA (1)...(19): siRNA sense strand
acccagacacacccaguua

SEQ ID NO: 913176 - RNA, 19 nt, Homo sapiens
  misc_RNA (1)...(19): siRNA sense strand
gaacaggcucacggauauc

SEQ ID NO: 913177 - RNA, 19 nt, Homo sapiens
  misc_RNA (1)...(19): siRNA sense strand
acugaagcauuaucuccuu

SEQ ID NO: 913178 - RNA, 19 nt, Homo sapiens
  misc_RNA (1)...(19): siRNA sense strand
cauugccgccauuguaauu

SEQ ID NO: 913179 - RNA, 19 nt, Homo sapiens
  misc_RNA (1)...(19): siRNA sense strand
acacgcacaucacugaacu

SEQ ID NO: 913180 - RNA, 19 nt, Homo sapiens
  misc_RNA (1)...(19): siRNA sense strand
gguuagggacggacacugu

SEQ ID NO: 913181 - RNA, 19 nt, Homo sapiens
  misc_RNA (1)...(19): siRNA sense strand
acaaccacaucucuucucu

SEQ ID NO: 913182 - RNA, 19 nt, Homo sapiens
  misc_RNA (1)...(19): siRNA sense strand
ugcaggaacuggcucuaca

SEQ ID NO: 913183 - RNA, 19 nt, Homo sapiens
  misc_RNA (1)...(19): siRNA sense strand
ccaguaaccagcuguugca

SEQ ID NO: 913184 - RNA, 19 nt, Homo sapiens
  misc_RNA (1)...(19): siRNA sense strand
caaugucaacguugcuguu

SEQ ID NO: 913185 - RNA, 19 nt, Homo sapiens
  misc_RNA (1)...(19): siRNA sense strand
ggacucacgaagcucaauc

SEQ ID NO: 913186 - RNA, 19 nt, Homo sapiens
  misc_RNA (1)...(19): siRNA sense strand
cuacagcagaaccagauug

SEQ ID NO: 913187 - RNA, 19 nt, Homo sapiens
  misc_RNA (1)...(19): siRNA sense strand
aagcuguccugaugcagau

SEQ ID NO: 913188 - RNA, 19 nt, Homo sapiens
  misc_RNA (1)...(19): siRNA sense strand
ucaucgcccugaggauuga

SEQ ID NO: 913189 - RNA, 19 nt, Homo sapiens
  misc_RNA (1)...(19): siRNA sense strand
gaauagccucacccacauc

SEQ ID NO: 913190 - RNA, 19 nt, Homo sapiens
  misc_RNA (1)...(19): siRNA sense strand
cauuguaauuggcauuguc

SEQ ID NO: 913191 - RNA, 19 nt, Homo sapiens
  misc_RNA (1)...(19): siRNA sense strand
acugaugaccgcagcguuu

SEQ ID NO: 913192 - RNA, 19 nt, Homo sapiens
  misc_RNA (1)...(19): siRNA sense strand
ugaggauugagaagaauga

SEQ ID NO: 913193 - RNA, 19 nt, Homo sapiens
  misc_RNA (1)...(19): siRNA sense strand
gaggugugacucagacauc

SEQ ID NO: 913194 - RNA, 19 nt, Homo sapiens
  misc_RNA (1)...(19): siRNA sense strand
gugagcugcggcuguauga

SEQ ID NO: 913195 - RNA, 19 nt, Homo sapiens
  misc_RNA (1)...(19): siRNA sense strand
cagcucaaccgucuuacuc

SEQ ID NO: 913196 - RNA, 19 nt, Homo sapiens
  misc_RNA (1)...(19): siRNA sense strand
uggcugcccuagcgagugu

SEQ ID NO: 913197 - RNA, 19 nt, Homo sapiens
  misc_RNA (1)...(19): siRNA sense strand
cgugauggcugcauaugga

SEQ ID NO: 913198 - RNA, 19 nt, Homo sapiens
  misc_RNA (1)...(19): siRNA sense strand
cauauggacugucggaaca

SEQ ID NO: 913199 - RNA, 19 nt, Homo sapiens
  misc_RNA (1)...(19): siRNA sense strand
cuacugcccuauaugauca

SEQ ID NO: 913200 - RNA, 19 nt, Homo sapiens
  misc_RNA (1)...(19): siRNA sense strand
caagacggccugcguagau

SEQ ID NO: 913201 - RNA, 19 nt, Homo sapiens
  misc_RNA (1)...(19): siRNA sense strand
gggacgugauggcugcaua

SEQ ID NO: 913202 - RNA, 19 nt, Homo sapiens
  misc_RNA (1)...(19): siRNA sense strand
gcagcgaggucccuaugac

SEQ ID NO: 913203 - RNA, 19 nt, Homo sapiens
  misc_RNA (1)...(19): siRNA sense strand
ugaggcuacugcccuauau

SEQ ID NO: 913204 - RNA, 19 nt, Homo sapiens
  misc_RNA (1)...(19): siRNA sense strand
agacugagcccagaguuga

SEQ ID NO: 913205 - RNA, 19 nt, Homo sapiens
  misc_RNA (1)...(19): siRNA sense strand
agcaacagcuccagugugu

SEQ ID NO: 913206 - RNA, 19 nt, Homo sapiens
  misc_RNA (1)...(19): siRNA sense strand
ggacgugauggcugcauau

SEQ ID NO: 913207 - RNA, 19 nt, Homo sapiens
  misc_RNA (1)...(19): siRNA sense strand
aagacggccugcguagaua

SEQ ID NO: 913208 - RNA, 19 nt, Homo sapiens
  misc_RNA (1)...(19): siRNA sense strand
gagacugagcccagaguug

SEQ ID NO: 913209 - RNA, 19 nt, Homo sapiens
  misc_RNA (1)...(19): siRNA sense strand
gcgacgccgugcacaacuu

SEQ ID NO: 913210 - RNA, 19 nt, Homo sapiens
  misc_RNA (1)...(19): siRNA sense strand
cagcucagccagucagaga

SEQ ID NO: 913211 - RNA, 19 nt, Homo sapiens
  misc_RNA (1)...(19): siRNA sense strand
gccgagcccucaguacuuc

SEQ ID NO: 913212 - RNA, 19 nt, Homo sapiens
  misc_RNA (1)...(19): siRNA sense strand
gcuacugcccuauaugauc

SEQ ID NO: 913213 - RNA, 19 nt, Homo sapiens
  misc_RNA (1)...(19): siRNA sense strand
gacgcuguccugcaucuga

SEQ ID NO: 913214 - RNA, 19 nt, Homo sapiens
  misc_RNA (1)...(19): siRNA sense strand
guacuucguggacuuugug

SEQ ID NO: 913215 - RNA, 19 nt, Homo sapiens
  misc_RNA (1)...(19): siRNA sense strand
cucaucagcuccagcaaca

SEQ ID NO: 913216 - RNA, 19 nt, Homo sapiens
  misc_RNA (1)...(19): siRNA sense strand
ggacacgguaugccugagu

SEQ ID NO: 913217 - RNA, 19 nt, Homo sapiens
  misc_RNA (1)...(19): siRNA sense strand
ggagacugagcccagaguu

SEQ ID NO: 913218 - RNA, 19 nt, Homo sapiens
  misc_RNA (1)...(19): siRNA sense strand
cagcagcgaggucccuaug

SEQ ID NO: 913219 - RNA, 19 nt, Homo sapiens
  misc_RNA (1)...(19): siRNA sense strand
aggcuacugcccuauauga

SEQ ID NO: 913220 - RNA, 19 nt, Homo sapiens
  misc_RNA (1)...(19): siRNA sense strand
cuacgccuucuuccuguuu

SEQ ID NO: 913221 - RNA, 19 nt, Homo sapiens
  misc_RNA (1)...(19): siRNA sense strand
cgugauggcugcauaugga

SEQ ID NO: 913222 - RNA, 19 nt, Homo sapiens
  misc_RNA (1)...(19): siRNA sense strand
cauauggacugucggaaca

SEQ ID NO: 913223 - RNA, 19 nt, Homo sapiens
  misc_RNA (1)...(19): siRNA sense strand
cuacugcccuauaugauca

SEQ ID NO: 913224 - RNA, 19 nt, Homo sapiens
  misc_RNA (1)...(19): siRNA sense strand
caagacggccugcguagau

SEQ ID NO: 913225 - RNA, 19 nt, Homo sapiens
  misc_RNA (1)...(19): siRNA sense strand
gggacgugauggcugcaua

SEQ ID NO: 913226 - RNA, 19 nt, Homo sapiens
  misc_RNA (1)...(19): siRNA sense strand
gcagcgaggucccuaugac

SEQ ID NO: 913227 - RNA, 19 nt, Homo sapiens
  misc_RNA (1)...(19): siRNA sense strand
ugaggcuacugcccuauau

SEQ ID NO: 913228 - RNA, 19 nt, Homo sapiens
  misc_RNA (1)...(19): siRNA sense strand
agacugagcccagaguuga

SEQ ID NO: 913229 - RNA, 19 nt, Homo sapiens
  misc_RNA (1)...(19): siRNA sense strand
agcaacagcuccagugugu

SEQ ID NO: 913230 - RNA, 19 nt, Homo sapiens
  misc_RNA (1)...(19): siRNA sense strand
ggacgugauggcugcauau

SEQ ID NO: 913231 - RNA, 19 nt, Homo sapiens
  misc_RNA (1)...(19): siRNA sense strand
aagacggccugcguagaua

SEQ ID NO: 913232 - RNA, 19 nt, Homo sapiens
  misc_RNA (1)...(19): siRNA sense strand
gagacugagcccagaguug

SEQ ID NO: 913233 - RNA, 19 nt, Homo sapiens
  misc_RNA (1)...(19): siRNA sense strand
gcgacgccgugcacaacuu

SEQ ID NO: 913234 - RNA, 19 nt, Homo sapiens
  misc_RNA (1)...(19): siRNA sense strand
cagcucagccagucagaga

SEQ ID NO: 913235 - RNA, 19 nt, Homo sapiens
  misc_RNA (1)...(19): siRNA sense strand
gccgagcccucaguacuuc

SEQ ID NO: 913236 - RNA, 19 nt, Homo sapiens
  misc_RNA (1)...(19): siRNA sense strand
gcuacugcccuauaugauc

SEQ ID NO: 913237 - RNA, 19 nt, Homo sapiens
  misc_RNA (1)...(19): siRNA sense strand
gacgcuguccugcaucuga

SEQ ID NO: 913238 - RNA, 19 nt, Homo sapiens
  misc_RNA (1)...(19): siRNA sense strand
guacuucguggacuuugug

SEQ ID NO: 913239 - RNA, 19 nt, Homo sapiens
  misc_RNA (1)...(19): siRNA sense strand
cucaucagcuccagcaaca

SEQ ID NO: 913240 - RNA, 19 nt, Homo sapiens
  misc_RNA (1)...(19): siRNA sense strand
ggacacgguaugccugagu

SEQ ID NO: 913241 - RNA, 19 nt, Homo sapiens
  misc_RNA (1)...(19): siRNA sense strand
ggagacugagcccagaguu

SEQ ID NO: 913242 - RNA, 19 nt, Homo sapiens
  misc_RNA (1)...(19): siRNA sense strand
cagcagcgaggucccuaug

SEQ ID NO: 913243 - RNA, 19 nt, Homo sapiens
  misc_RNA (1)...(19): siRNA sense strand
aggcuacugcccuauauga

SEQ ID NO: 913244 - RNA, 19 nt, Homo sapiens
  misc_RNA (1)...(19): siRNA sense strand
cuacgccuucuuccuguuu

SEQ ID NO: 913245 - RNA, 19 nt, Homo sapiens
  misc_RNA (1)...(19): siRNA sense strand
gcauggagcuggagaagua

SEQ ID NO: 913246 - RNA, 19 nt, Homo sapiens
  misc_RNA (1)...(19): siRNA sense strand
agaaauaccuccagaagua

SEQ ID NO: 913247 - RNA, 19 nt, Homo sapiens
  misc_RNA (1)...(19): siRNA sense strand
gaacacagaucugcuagaa

SEQ ID NO: 913248 - RNA, 19 nt, Homo sapiens
  misc_RNA (1)...(19): siRNA sense strand
gaagauggcucaccaacug

SEQ ID NO: 913249 - RNA, 19 nt, Homo sapiens
  misc_RNA (1)...(19): siRNA sense strand
gaaaggagcugggacugaa

SEQ ID NO: 913250 - RNA, 19 nt, Homo sapiens
  misc_RNA (1)...(19): siRNA sense strand
ggaaagagcuggagcaaaa

SEQ ID NO: 913251 - RNA, 19 nt, Homo sapiens
  misc_RNA (1)...(19): siRNA sense strand
ugaaugagcugaugcagaa

SEQ ID NO: 913252 - RNA, 19 nt, Homo sapiens
  misc_RNA (1)...(19): siRNA sense strand
gaaagcgucugcagcaaug

SEQ ID NO: 913253 - RNA, 19 nt, Homo sapiens
  misc_RNA (1)...(19): siRNA sense strand
ggaaugaacuccggcagaa

SEQ ID NO: 913254 - RNA, 19 nt, Homo sapiens
  misc_RNA (1)...(19): siRNA sense strand
ggaagaagcccagcagaaa

SEQ ID NO: 913255 - RNA, 19 nt, Homo sapiens
  misc_RNA (1)...(19): siRNA sense strand
ggaagcaguucaugagguu

SEQ ID NO: 913256 - RNA, 19 nt, Homo sapiens
  misc_RNA (1)...(19): siRNA sense strand
gcagauagcagcuccuuug

SEQ ID NO: 913257 - RNA, 19 nt, Homo sapiens
  misc_RNA (1)...(19): siRNA sense strand
ggaaaggagccgcuuguuu

SEQ ID NO: 913258 - RNA, 19 nt, Homo sapiens
  misc_RNA (1)...(19): siRNA sense strand
gguccaagccugaagauaa

SEQ ID NO: 913259 - RNA, 19 nt, Homo sapiens
  misc_RNA (1)...(19): siRNA sense strand
ggagaaggaugcagaaagg

SEQ ID NO: 913260 - RNA, 19 nt, Homo sapiens
  misc_RNA (1)...(19): siRNA sense strand
cgagagaucccagaaauuu

SEQ ID NO: 913261 - RNA, 19 nt, Homo sapiens
  misc_RNA (1)...(19): siRNA sense strand
gaaaggagccgcuuguuuu

SEQ ID NO: 913262 - RNA, 19 nt, Homo sapiens
  misc_RNA (1)...(19): siRNA sense strand
guagagggcuccagugaca

SEQ ID NO: 913263 - RNA, 19 nt, Homo sapiens
  misc_RNA (1)...(19): siRNA sense strand
cgaggagggucaaagcaua

SEQ ID NO: 913264 - RNA, 19 nt, Homo sapiens
  misc_RNA (1)...(19): siRNA sense strand
gaaaagagauggauaacgu

SEQ ID NO: 913265 - RNA, 19 nt, Homo sapiens
  misc_RNA (1)...(19): siRNA sense strand
gaggacacaugcacuguug

SEQ ID NO: 913266 - RNA, 19 nt, Homo sapiens
  misc_RNA (1)...(19): siRNA sense strand
acacagaucugcuagaaag

SEQ ID NO: 913267 - RNA, 19 nt, Homo sapiens
  misc_RNA (1)...(19): siRNA sense strand
gcaggaagggugagacuuu

SEQ ID NO: 913268 - RNA, 19 nt, Homo sapiens
  misc_RNA (1)...(19): siRNA sense strand
caaaggaggugagcacaau

SEQ ID NO: 913269 - RNA, 19 nt, Homo sapiens
  misc_RNA (1)...(19): siRNA sense strand
gcaagaguaugaagagaag

SEQ ID NO: 913270 - RNA, 19 nt, Homo sapiens
  misc_RNA (1)...(19): siRNA sense strand
ucaaaugcaucucuucaga

SEQ ID NO: 913271 - RNA, 19 nt, Homo sapiens
  misc_RNA (1)...(19): siRNA sense strand
ucaagaagcugaagauucg

SEQ ID NO: 913272 - RNA, 19 nt, Homo sapiens
  misc_RNA (1)...(19): siRNA sense strand
gaagaaauaccuccagaag

SEQ ID NO: 913273 - RNA, 19 nt, Homo sapiens
  misc_RNA (1)...(19): siRNA sense strand
gaaugucucuaaggacgua

SEQ ID NO: 913274 - RNA, 19 nt, Homo sapiens
  misc_RNA (1)...(19): siRNA sense strand
agacagaccuggagacauc

SEQ ID NO: 913275 - RNA, 19 nt, Homo sapiens
  misc_RNA (1)...(19): siRNA sense strand
gagcaagcaugaacaaguc

SEQ ID NO: 913276 - RNA, 19 nt, Homo sapiens
  misc_RNA (1)...(19): siRNA sense strand
ccucugaccuugccgauga

SEQ ID NO: 913277 - RNA, 19 nt, Homo sapiens
  misc_RNA (1)...(19): siRNA sense strand
guccaagccugaagauaaa

SEQ ID NO: 913278 - RNA, 19 nt, Homo sapiens
  misc_RNA (1)...(19): siRNA sense strand
gaggaaagacgacgauguu

SEQ ID NO: 913279 - RNA, 19 nt, Homo sapiens
  misc_RNA (1)...(19): siRNA sense strand
gaaguggcauccagugaca

SEQ ID NO: 913280 - RNA, 19 nt, Homo sapiens
  misc_RNA (1)...(19): siRNA sense strand
ucagagaaguugcggaaug

SEQ ID NO: 913281 - RNA, 19 nt, Homo sapiens
  misc_RNA (1)...(19): siRNA sense strand
gaaaguccacagagagauu

SEQ ID NO: 913282 - RNA, 19 nt, Homo sapiens
  misc_RNA (1)...(19): siRNA sense strand
acaagagccugguggauga

SEQ ID NO: 913283 - RNA, 19 nt, Homo sapiens
  misc_RNA (1)...(19): siRNA sense strand
ugaagcagaugcaccagaa

SEQ ID NO: 913284 - RNA, 19 nt, Homo sapiens
  misc_RNA (1)...(19): siRNA sense strand
gaauaagaaggacaaagaa

SEQ ID NO: 913285 - RNA, 19 nt, Homo sapiens
  misc_RNA (1)...(19): siRNA sense strand
cgagcauaaugaagaaaua

SEQ ID NO: 913286 - RNA, 19 nt, Homo sapiens
  misc_RNA (1)...(19): siRNA sense strand
gaacgagagaucccagaaa

SEQ ID NO: 913287 - RNA, 19 nt, Homo sapiens
  misc_RNA (1)...(19): siRNA sense strand
cgacagaucauccagcaaa

SEQ ID NO: 913288 - RNA, 19 nt, Homo sapiens
  misc_RNA (1)...(19): siRNA sense strand
ugaaugacuuggaaaggaa

SEQ ID NO: 913289 - RNA, 19 nt, Homo sapiens
  misc_RNA (1)...(19): siRNA sense strand
cagagaaaguccacagaga

SEQ ID NO: 913290 - RNA, 19 nt, Homo sapiens
  misc_RNA (1)...(19): siRNA sense strand
ggcaaacccuccagacaga

SEQ ID NO: 913291 - RNA, 19 nt, Homo sapiens
  misc_RNA (1)...(19): siRNA sense strand
gcaaggaggagcuggagaa

SEQ ID NO: 913292 - RNA, 19 nt, Homo sapiens
  misc_RNA (1)...(19): siRNA sense strand
agaagaagcagaagaaguu

SEQ ID NO: 913293 - RNA, 19 nt, Homo sapiens
  misc_RNA (1)...(19): siRNA sense strand
gagaggagcugcggagucu

SEQ ID NO: 913294 - RNA, 19 nt, Homo sapiens
  misc_RNA (1)...(19): siRNA sense strand
uccagaaggugcagauuaa

SEQ ID NO: 913295 - RNA, 19 nt, Homo sapiens
  misc_RNA (1)...(19): siRNA sense strand
cagagaaguugcggaauga

SEQ ID NO: 913296 - RNA, 19 nt, Homo sapiens
  misc_RNA (1)...(19): siRNA sense strand
gcagaaaggccucggauac

SEQ ID NO: 913297 - RNA, 19 nt, Homo sapiens
  misc_RNA (1)...(19): siRNA sense strand
gaagggcuccggaggaaga

SEQ ID NO: 913298 - RNA, 19 nt, Homo sapiens
  misc_RNA (1)...(19): siRNA sense strand
gcuguggucuuacucauca

SEQ ID NO: 913299 - RNA, 19 nt, Homo sapiens
  misc_RNA (1)...(19): siRNA sense strand
gaccuggccucucucauca

SEQ ID NO: 913300 - RNA, 19 nt, Homo sapiens
  misc_RNA (1)...(19): siRNA sense strand
aaggauggauuuacucuug

SEQ ID NO: 913301 - RNA, 19 nt, Homo sapiens
  misc_RNA (1)...(19): siRNA sense strand
gaauaaacaguuggaagaa

SEQ ID NO: 913302 - RNA, 19 nt, Homo sapiens
  misc_RNA (1)...(19): siRNA sense strand
aaaugcagcuggagcaaga

SEQ ID NO: 913303 - RNA, 19 nt, Homo sapiens
  misc_RNA (1)...(19): siRNA sense strand
gaacacggccaccuucaag

SEQ ID NO: 913304 - RNA, 19 nt, Homo sapiens
  misc_RNA (1)...(19): siRNA sense strand
gagaaaguccacagagaga

SEQ ID NO: 913305 - RNA, 19 nt, Homo sapiens
  misc_RNA (1)...(19): siRNA sense strand
accaugagcuggagaagaa

SEQ ID NO: 913306 - RNA, 19 nt, Homo sapiens
  misc_RNA (1)...(19): siRNA sense strand
ugaauaaacaguuggaaga

SEQ ID NO: 913307 - RNA, 19 nt, Homo sapiens
  misc_RNA (1)...(19): siRNA sense strand
gcucagggcucaagaugac

SEQ ID NO: 913308 - RNA, 19 nt, Homo sapiens
  misc_RNA (1)...(19): siRNA sense strand
ccaggaaucccacgacuug

SEQ ID NO: 913309 - RNA, 19 nt, Homo sapiens
  misc_RNA (1)...(19): siRNA sense strand
agacagaguuccagaaggu

SEQ ID NO: 913310 - RNA, 19 nt, Homo sapiens
  misc_RNA (1)...(19): siRNA sense strand
ggucuuagaugaggaaguc

SEQ ID NO: 913311 - RNA, 19 nt, Homo sapiens
  misc_RNA (1)...(19): siRNA sense strand
gagcagagcccacaaacac

SEQ ID NO: 913312 - RNA, 19 nt, Homo sapiens
  misc_RNA (1)...(19): siRNA sense strand
agaauaagaaggacaaaga

SEQ ID NO: 913313 - RNA, 19 nt, Homo sapiens
  misc_RNA (1)...(19): siRNA sense strand
ggauuggacuuggaucuca

SEQ ID NO: 913314 - RNA, 19 nt, Homo sapiens
  misc_RNA (1)...(19): siRNA sense strand
gaagccagcagaucucuca

SEQ ID NO: 913315 - RNA, 19 nt, Homo sapiens
  misc_RNA (1)...(19): siRNA sense strand
gcugaaggccgacauggaa

SEQ ID NO: 913316 - RNA, 19 nt, Homo sapiens
  misc_RNA (1)...(19): siRNA sense strand
gagcaagaguaugaagaga

SEQ ID NO: 913317 - RNA, 19 nt, Homo sapiens
  misc_RNA (1)...(19): siRNA sense strand
gguuugagcuggagaucga

SEQ ID NO: 913318 - RNA, 19 nt, Homo sapiens
  misc_RNA (1)...(19): siRNA sense strand
gccaccaucuuaccuguga

SEQ ID NO: 913319 - RNA, 19 nt, Homo sapiens
  misc_RNA (1)...(19): siRNA sense strand
agaagaauguggcuguguu

SEQ ID NO: 913320 - RNA, 19 nt, Homo sapiens
  misc_RNA (1)...(19): siRNA sense strand
ggucccggcugcacuuuau

SEQ ID NO: 913321 - RNA, 19 nt, Homo sapiens
  misc_RNA (1)...(19): siRNA sense strand
ucaguugaaugacuuggaa

SEQ ID NO: 913322 - RNA, 19 nt, Homo sapiens
  misc_RNA (1)...(19): siRNA sense strand
gaaggagaagcacaagcua

SEQ ID NO: 913323 - RNA, 19 nt, Homo sapiens
  misc_RNA (1)...(19): siRNA sense strand
uguacaggcugcaguuuga

SEQ ID NO: 913324 - RNA, 19 nt, Homo sapiens
  misc_RNA (1)...(19): siRNA sense strand
aggaggagcuggagaaagu

SEQ ID NO: 913325 - RNA, 19 nt, Homo sapiens
  misc_RNA (1)...(19): siRNA sense strand
cacaugcacuguugucaga

SEQ ID NO: 913326 - RNA, 19 nt, Homo sapiens
  misc_RNA (1)...(19): siRNA sense strand
gacaagagcccuccaccau

SEQ ID NO: 913327 - RNA, 19 nt, Homo sapiens
  misc_RNA (1)...(19): siRNA sense strand
ccaccaauguccacagcaa

SEQ ID NO: 913328 - RNA, 19 nt, Homo sapiens
  misc_RNA (1)...(19): siRNA sense strand
gggacagccugaucaagau

SEQ ID NO: 913329 - RNA, 19 nt, Homo sapiens
  misc_RNA (1)...(19): siRNA sense strand
gaagaagcagaagaaguuu

SEQ ID NO: 913330 - RNA, 19 nt, Homo sapiens
  misc_RNA (1)...(19): siRNA sense strand
gcucagaaggauggauuua

SEQ ID NO: 913331 - RNA, 19 nt, Homo sapiens
  misc_RNA (1)...(19): siRNA sense strand
gugagucaguguuugagaa

SEQ ID NO: 913332 - RNA, 19 nt, Homo sapiens
  misc_RNA (1)...(19): siRNA sense strand
ggaccuggccucucucauc

SEQ ID NO: 913333 - RNA, 19 nt, Homo sapiens
  misc_RNA (1)...(19): siRNA sense strand
gcaugaacaaguccagaaa

SEQ ID NO: 913334 - RNA, 19 nt, Homo sapiens
  misc_RNA (1)...(19): siRNA sense strand
gauuugagguccuggugau

SEQ ID NO: 913335 - RNA, 19 nt, Homo sapiens
  misc_RNA (1)...(19): siRNA sense strand
gcacaagcuacaagaacaa

SEQ ID NO: 913336 - RNA, 19 nt, Homo sapiens
  misc_RNA (1)...(19): siRNA sense strand
ugggagaugugaauaaaca

SEQ ID NO: 913337 - RNA, 19 nt, Homo sapiens
  misc_RNA (1)...(19): siRNA sense strand
ucagaaggauggauuuacu

SEQ ID NO: 913338 - RNA, 19 nt, Homo sapiens
  misc_RNA (1)...(19): siRNA sense strand
gcaggaggcggucaucugu

SEQ ID NO: 913339 - RNA, 19 nt, Homo sapiens
  misc_RNA (1)...(19): siRNA sense strand
gaagcacaagcuacaagaa

SEQ ID NO: 913340 - RNA, 19 nt, Homo sapiens
  misc_RNA (1)...(19): siRNA sense strand
gaacaugacgcggaacaag

SEQ ID NO: 913341 - RNA, 19 nt, Homo sapiens
  misc_RNA (1)...(19): siRNA sense strand
ggacuuugauguggagaag

SEQ ID NO: 913342 - RNA, 19 nt, Homo sapiens
  misc_RNA (1)...(19): siRNA sense strand
ugaugucgcuggacuucaa

SEQ ID NO: 913343 - RNA, 19 nt, Homo sapiens
  misc_RNA (1)...(19): siRNA sense strand
gcagaugcgcuucgacugu

SEQ ID NO: 913344 - RNA, 19 nt, Homo sapiens
  misc_RNA (1)...(19): siRNA sense strand
gagaagaagcagaagaagu

SEQ ID NO: 913345 - RNA, 19 nt, Homo sapiens
  misc_RNA (1)...(19): siRNA sense strand
gaaagaaucugacucuauu

SEQ ID NO: 913346 - RNA, 19 nt, Homo sapiens
  misc_RNA (1)...(19): siRNA sense strand
caaagacgaugacaagaug

SEQ ID NO: 913347 - RNA, 19 nt, Homo sapiens
  misc_RNA (1)...(19): siRNA sense strand
gaagguuuaucuacaggua

SEQ ID NO: 913348 - RNA, 19 nt, Homo sapiens
  misc_RNA (1)...(19): siRNA sense strand
ggucugauguccaugauga

SEQ ID NO: 913349 - RNA, 19 nt, Homo sapiens
  misc_RNA (1)...(19): siRNA sense strand
aaacugggcuccuaugaug

SEQ ID NO: 913350 - RNA, 19 nt, Homo sapiens
  misc_RNA (1)...(19): siRNA sense strand
gaagaagguuuaucuacag

SEQ ID NO: 913351 - RNA, 19 nt, Homo sapiens
  misc_RNA (1)...(19): siRNA sense strand
ucccauagccuuugaguua

SEQ ID NO: 913352 - RNA, 19 nt, Homo sapiens
  misc_RNA (1)...(19): siRNA sense strand
gcaaagagagaucaguaaa

SEQ ID NO: 913353 - RNA, 19 nt, Homo sapiens
  misc_RNA (1)...(19): siRNA sense strand
gaggugcugugcuuuguuu

SEQ ID NO: 913354 - RNA, 19 nt, Homo sapiens
  misc_RNA (1)...(19): siRNA sense strand
ucacaauccugcugccuuu

SEQ ID NO: 913355 - RNA, 19 nt, Homo sapiens
  misc_RNA (1)...(19): siRNA sense strand
uaaagagguuguucucaug

SEQ ID NO: 913356 - RNA, 19 nt, Homo sapiens
  misc_RNA (1)...(19): siRNA sense strand
ugaagaagguuuaucuaca

SEQ ID NO: 913357 - RNA, 19 nt, Homo sapiens
  misc_RNA (1)...(19): siRNA sense strand
caucuggaauguucaagaa

SEQ ID NO: 913358 - RNA, 19 nt, Homo sapiens
  misc_RNA (1)...(19): siRNA sense strand
ggaauaccacuugcacuuu

SEQ ID NO: 913359 - RNA, 19 nt, Homo sapiens
  misc_RNA (1)...(19): siRNA sense strand
ccuaugauguggcauucua

SEQ ID NO: 913360 - RNA, 19 nt, Homo sapiens
  misc_RNA (1)...(19): siRNA sense strand
caucaugggucucuucgau

SEQ ID NO: 913361 - RNA, 19 nt, Homo sapiens
  misc_RNA (1)...(19): siRNA sense strand
gaauaccacuugcacuuuu

SEQ ID NO: 913362 - RNA, 19 nt, Homo sapiens
  misc_RNA (1)...(19): siRNA sense strand
uaaaaccacuggaaaagaa

SEQ ID NO: 913363 - RNA, 19 nt, Homo sapiens
  misc_RNA (1)...(19): siRNA sense strand
uagcggauccucccucuuu

SEQ ID NO: 913364 - RNA, 19 nt, Homo sapiens
  misc_RNA (1)...(19): siRNA sense strand
ggaugucucccaagcaauu

SEQ ID NO: 913365 - RNA, 19 nt, Homo sapiens
  misc_RNA (1)...(19): siRNA sense strand
gcaguuggaauaccacuug

SEQ ID NO: 913366 - RNA, 19 nt, Homo sapiens
  misc_RNA (1)...(19): siRNA sense strand
gcagcagugucuucacaau

SEQ ID NO: 913367 - RNA, 19 nt, Homo sapiens
  misc_RNA (1)...(19): siRNA sense strand
caagaaagaaucugacucu

SEQ ID NO: 913368 - RNA, 19 nt, Homo sapiens
  misc_RNA (1)...(19): siRNA sense strand
gaaaagaaaagauggagaa

SEQ ID NO: 913369 - RNA, 19 nt, Homo sapiens
  misc_RNA (1)...(19): siRNA sense strand
cuucauguuuguucucuuu

SEQ ID NO: 913370 - RNA, 19 nt, Homo sapiens
  misc_RNA (1)...(19): siRNA sense strand
caggaugucucccaagcaa

SEQ ID NO: 913371 - RNA, 19 nt, Homo sapiens
  misc_RNA (1)...(19): siRNA sense strand
gauacuuugugccuuaugu

SEQ ID NO: 913372 - RNA, 19 nt, Homo sapiens
  misc_RNA (1)...(19): siRNA sense strand
gcucuuaaggguucugauu

SEQ ID NO: 913373 - RNA, 19 nt, Homo sapiens
  misc_RNA (1)...(19): siRNA sense strand
agaaagaaucugacucuau

SEQ ID NO: 913374 - RNA, 19 nt, Homo sapiens
  misc_RNA (1)...(19): siRNA sense strand
uuggauacuuugugccuua

SEQ ID NO: 913375 - RNA, 19 nt, Homo sapiens
  misc_RNA (1)...(19): siRNA sense strand
ccaaagacgaugacaagau

SEQ ID NO: 913376 - RNA, 19 nt, Homo sapiens
  misc_RNA (1)...(19): siRNA sense strand
uaccaaagauaaagagagu

SEQ ID NO: 913377 - RNA, 19 nt, Homo sapiens
  misc_RNA (1)...(19): siRNA sense strand
auaaagagguuguucucau

SEQ ID NO: 913378 - RNA, 19 nt, Homo sapiens
  misc_RNA (1)...(19): siRNA sense strand
ucccguggauccauaguaa

SEQ ID NO: 913379 - RNA, 19 nt, Homo sapiens
  misc_RNA (1)...(19): siRNA sense strand
ggaugcuucauuuccauua

SEQ ID NO: 913380 - RNA, 19 nt, Homo sapiens
  misc_RNA (1)...(19): siRNA sense strand
gggugcugcuguuggauuu

SEQ ID NO: 913381 - RNA, 19 nt, Homo sapiens
  misc_RNA (1)...(19): siRNA sense strand
ucuucaaggugacagcuua

SEQ ID NO: 913382 - RNA, 19 nt, Homo sapiens
  misc_RNA (1)...(19): siRNA sense strand
ucuuaaggguucugauuga

SEQ ID NO: 913383 - RNA, 19 nt, Homo sapiens
  misc_RNA (1)...(19): siRNA sense strand
gggcucauguccaguucuu

SEQ ID NO: 913384 - RNA, 19 nt, Homo sapiens
  misc_RNA (1)...(19): siRNA sense strand
gaaaagauggagaaaaugu

SEQ ID NO: 913385 - RNA, 19 nt, Homo sapiens
  misc_RNA (1)...(19): siRNA sense strand
gaugcuucauuuccauuau

SEQ ID NO: 913386 - RNA, 19 nt, Homo sapiens
  misc_RNA (1)...(19): siRNA sense strand
gcucugcaucuucauguuu

SEQ ID NO: 913387 - RNA, 19 nt, Homo sapiens
  misc_RNA (1)...(19): siRNA sense strand
gauaaagagaguggaggua

SEQ ID NO: 913388 - RNA, 19 nt, Homo sapiens
  misc_RNA (1)...(19): siRNA sense strand
gugacaaacugggcuccua

SEQ ID NO: 913389 - RNA, 19 nt, Homo sapiens
  misc_RNA (1)...(19): siRNA sense strand
aagcaaagagagaucagua

SEQ ID NO: 913390 - RNA, 19 nt, Homo sapiens
  misc_RNA (1)...(19): siRNA sense strand
ccuauuugguugucggaaa

SEQ ID NO: 913391 - RNA, 19 nt, Homo sapiens
  misc_RNA (1)...(19): siRNA sense strand
uggcgucacuucaggaguu

SEQ ID NO: 913392 - RNA, 19 nt, Homo sapiens
  misc_RNA (1)...(19): siRNA sense strand
ggaaaccuucggcuccaaa

SEQ ID NO: 913393 - RNA, 19 nt, Homo sapiens
  misc_RNA (1)...(19): siRNA sense strand
ccugcugccuuugcucuua

SEQ ID NO: 913394 - RNA, 19 nt, Homo sapiens
  misc_RNA (1)...(19): siRNA sense strand
uucgauggaugcuucauuu

SEQ ID NO: 913395 - RNA, 19 nt, Homo sapiens
  misc_RNA (1)...(19): siRNA sense strand
uaccuuaccuauggaauca

SEQ ID NO: 913396 - RNA, 19 nt, Homo sapiens
  misc_RNA (1)...(19): siRNA sense strand
ggaauguucaagaaagaau

SEQ ID NO: 913397 - RNA, 19 nt, Homo sapiens
  misc_RNA (1)...(19): siRNA sense strand
caugaugauuccucugugu

SEQ ID NO: 913398 - RNA, 19 nt, Homo sapiens
  misc_RNA (1)...(19): siRNA sense strand
ugacagcgugggccucuuu

SEQ ID NO: 913399 - RNA, 19 nt, Homo sapiens
  misc_RNA (1)...(19): siRNA sense strand
gggacacuauuucaagaag

SEQ ID NO: 913400 - RNA, 19 nt, Homo sapiens
  misc_RNA (1)...(19): siRNA sense strand
cuaccaguaccaaagauaa

SEQ ID NO: 913401 - RNA, 19 nt, Homo sapiens
  misc_RNA (1)...(19): siRNA sense strand
gcuaccaguaccaaagaua

SEQ ID NO: 913402 - RNA, 19 nt, Homo sapiens
  misc_RNA (1)...(19): siRNA sense strand
guaagaagcaaagagagau

SEQ ID NO: 913403 - RNA, 19 nt, Homo sapiens
  misc_RNA (1)...(19): siRNA sense strand
agaacucucugcugucaag

SEQ ID NO: 913404 - RNA, 19 nt, Homo sapiens
  misc_RNA (1)...(19): siRNA sense strand
caucgagccucuguaccuu

SEQ ID NO: 913405 - RNA, 19 nt, Homo sapiens
  misc_RNA (1)...(19): siRNA sense strand
aagaaagaaucugacucua

SEQ ID NO: 913406 - RNA, 19 nt, Homo sapiens
  misc_RNA (1)...(19): siRNA sense strand
uauuggaggugcugugcuu

SEQ ID NO: 913407 - RNA, 19 nt, Homo sapiens
  misc_RNA (1)...(19): siRNA sense strand
caaacugggcuccuaugau

SEQ ID NO: 913408 - RNA, 19 nt, Homo sapiens
  misc_RNA (1)...(19): siRNA sense strand
ucaaguucaucuggaaugu

SEQ ID NO: 913409 - RNA, 19 nt, Homo sapiens
  misc_RNA (1)...(19): siRNA sense strand
aaguucaucuggaauguuc

SEQ ID NO: 913410 - RNA, 19 nt, Homo sapiens
  misc_RNA (1)...(19): siRNA sense strand
uugcauaccagccuucauu

SEQ ID NO: 913411 - RNA, 19 nt, Homo sapiens
  misc_RNA (1)...(19): siRNA sense strand
gugaagaagguuuaucuac

SEQ ID NO: 913412 - RNA, 19 nt, Homo sapiens
  misc_RNA (1)...(19): siRNA sense strand
ucuggaauguucaagaaag

SEQ ID NO: 913413 - RNA, 19 nt, Homo sapiens
  misc_RNA (1)...(19): siRNA sense strand
ccauagccuuugaguuagu

SEQ ID NO: 913414 - RNA, 19 nt, Homo sapiens
  misc_RNA (1)...(19): siRNA sense strand
uggcagcagugucuucaca

SEQ ID NO: 913415 - RNA, 19 nt, Homo sapiens
  misc_RNA (1)...(19): siRNA sense strand
cuggaauguucaagaaaga

SEQ ID NO: 913416 - RNA, 19 nt, Homo sapiens
  misc_RNA (1)...(19): siRNA sense strand
caaagagagaucaguaaaa

SEQ ID NO: 913417 - RNA, 19 nt, Homo sapiens
  misc_RNA (1)...(19): siRNA sense strand
ugacaaacugggcuccuau

SEQ ID NO: 913418 - RNA, 19 nt, Homo sapiens
  misc_RNA (1)...(19): siRNA sense strand
aggguuacuucgugacaaa

SEQ ID NO: 913419 - RNA, 19 nt, Homo sapiens
  misc_RNA (1)...(19): siRNA sense strand
ucauuggucugauguccau

SEQ ID NO: 913420 - RNA, 19 nt, Homo sapiens
  misc_RNA (1)...(19): siRNA sense strand
uggaauaccacuugcacuu

SEQ ID NO: 913421 - RNA, 19 nt, Homo sapiens
  misc_RNA (1)...(19): siRNA sense strand
ugucgugggugcugcuguu

SEQ ID NO: 913422 - RNA, 19 nt, Homo sapiens
  misc_RNA (1)...(19): siRNA sense strand
uggagaaaauguuggaaaa

SEQ ID NO: 913423 - RNA, 19 nt, Homo sapiens
  misc_RNA (1)...(19): siRNA sense strand
guuguucucaugugcauug

SEQ ID NO: 913424 - RNA, 19 nt, Homo sapiens
  misc_RNA (1)...(19): siRNA sense strand
gccuuggacuggugaaugg

SEQ ID NO: 913425 - RNA, 19 nt, Homo sapiens
  misc_RNA (1)...(19): siRNA sense strand
guaccuuaccuauggaauc

SEQ ID NO: 913426 - RNA, 19 nt, Homo sapiens
  misc_RNA (1)...(19): siRNA sense strand
guuaguuggugcccaggau

SEQ ID NO: 913427 - RNA, 19 nt, Homo sapiens
  misc_RNA (1)...(19): siRNA sense strand
gauuaugugccugguguga

SEQ ID NO: 913428 - RNA, 19 nt, Homo sapiens
  misc_RNA (1)...(19): siRNA sense strand
ugccuuauguucacuugau

SEQ ID NO: 913429 - RNA, 19 nt, Homo sapiens
  misc_RNA (1)...(19): siRNA sense strand
agugugggcaguuggaaua

SEQ ID NO: 913430 - RNA, 19 nt, Homo sapiens
  misc_RNA (1)...(19): siRNA sense strand
aaaguucaguccuccaaaa

SEQ ID NO: 913431 - RNA, 19 nt, Homo sapiens
  misc_RNA (1)...(19): siRNA sense strand
cagccuucauuggucauuu

SEQ ID NO: 913432 - RNA, 19 nt, Homo sapiens
  misc_RNA (1)...(19): siRNA sense strand
uaagacagcauggguaggu

SEQ ID NO: 913433 - RNA, 19 nt, Homo sapiens
  misc_RNA (1)...(19): siRNA sense strand
auaguaagaagcaaagaga

SEQ ID NO: 913434 - RNA, 19 nt, Homo sapiens
  misc_RNA (1)...(19): siRNA sense strand
guggauccauaguaagaag

SEQ ID NO: 913435 - RNA, 19 nt, Homo sapiens
  misc_RNA (1)...(19): siRNA sense strand
gcuccuaugauguggcauu

SEQ ID NO: 913436 - RNA, 19 nt, Homo sapiens
  misc_RNA (1)...(19): siRNA sense strand
acaaacugggcuccuauga

SEQ ID NO: 913437 - RNA, 19 nt, Homo sapiens
  misc_RNA (1)...(19): siRNA sense strand
cauagccuuugaguuaguu

SEQ ID NO: 913438 - RNA, 19 nt, Homo sapiens
  misc_RNA (1)...(19): siRNA sense strand
uuggccggauugcagauua

SEQ ID NO: 913439 - RNA, 19 nt, Homo sapiens
  misc_RNA (1)...(19): siRNA sense strand
cugcugccuuugcucuuaa

SEQ ID NO: 913440 - RNA, 19 nt, Homo sapiens
  misc_RNA (1)...(19): siRNA sense strand
gcucggauucaugucuaua

SEQ ID NO: 913441 - RNA, 19 nt, Homo sapiens
  misc_RNA (1)...(19): siRNA sense strand
cagcauggguagguucucu

SEQ ID NO: 913442 - RNA, 19 nt, Homo sapiens
  misc_RNA (1)...(19): siRNA sense strand
aaagagagaucaguaaaac

SEQ ID NO: 913443 - RNA, 19 nt, Homo sapiens
  misc_RNA (1)...(19): siRNA sense strand
gugcugcuguuggauuugu

SEQ ID NO: 913444 - RNA, 19 nt, Homo sapiens
  misc_RNA (1)...(19): siRNA sense strand
ucuauacccaugacuguug

SEQ ID NO: 913445 - RNA, 19 nt, Homo sapiens
  misc_RNA (1)...(19): siRNA sense strand
ccgaggaggugcucaagua

SEQ ID NO: 913446 - RNA, 19 nt, Homo sapiens
  misc_RNA (1)...(19): siRNA sense strand
ggaggaagcugauggucau

SEQ ID NO: 913447 - RNA, 19 nt, Homo sapiens
  misc_RNA (1)...(19): siRNA sense strand
gggugaagcuggagaugga

SEQ ID NO: 913448 - RNA, 19 nt, Homo sapiens
  misc_RNA (1)...(19): siRNA sense strand
ggaccuggguggcuuugau

SEQ ID NO: 913449 - RNA, 19 nt, Homo sapiens
  misc_RNA (1)...(19): siRNA sense strand
gcucaacgaggaacucaaa

SEQ ID NO: 913450 - RNA, 19 nt, Homo sapiens
  misc_RNA (1)...(19): siRNA sense strand
gaacgaggccaagcagaug

SEQ ID NO: 913451 - RNA, 19 nt, Homo sapiens
  misc_RNA (1)...(19): siRNA sense strand
gggcaguccuucugaugga

SEQ ID NO: 913452 - RNA, 19 nt, Homo sapiens
  misc_RNA (1)...(19): siRNA sense strand
caacgaggaacucaaagug

SEQ ID NO: 913453 - RNA, 19 nt, Homo sapiens
  misc_RNA (1)...(19): siRNA sense strand
gccaggacauugacgacaa

SEQ ID NO: 913454 - RNA, 19 nt, Homo sapiens
  misc_RNA (1)...(19): siRNA sense strand
ggacgaggaaacacaggaa

SEQ ID NO: 913455 - RNA, 19 nt, Homo sapiens
  misc_RNA (1)...(19): siRNA sense strand
guaaaggccauagcgagaa

SEQ ID NO: 913456 - RNA, 19 nt, Homo sapiens
  misc_RNA (1)...(19): siRNA sense strand
ccaacagggaggagaauga

SEQ ID NO: 913457 - RNA, 19 nt, Homo sapiens
  misc_RNA (1)...(19): siRNA sense strand
caaaguggacgaggaaaca

SEQ ID NO: 913458 - RNA, 19 nt, Homo sapiens
  misc_RNA (1)...(19): siRNA sense strand
ggacgaguauaaggugaag

SEQ ID NO: 913459 - RNA, 19 nt, Homo sapiens
  misc_RNA (1)...(19): siRNA sense strand
uaaaggccauagcgagaag

SEQ ID NO: 913460 - RNA, 19 nt, Homo sapiens
  misc_RNA (1)...(19): siRNA sense strand
gagaugcagcgcuggauca

SEQ ID NO: 913461 - RNA, 19 nt, Homo sapiens
  misc_RNA (1)...(19): siRNA sense strand
gacgacaacugggugaaag

SEQ ID NO: 913462 - RNA, 19 nt, Homo sapiens
  misc_RNA (1)...(19): siRNA sense strand
ugucuugggacgaguauaa

SEQ ID NO: 913463 - RNA, 19 nt, Homo sapiens
  misc_RNA (1)...(19): siRNA sense strand
caagguggaugugaacacu

SEQ ID NO: 913464 - RNA, 19 nt, Homo sapiens
  misc_RNA (1)...(19): siRNA sense strand
ggaccaggacggugacaag

SEQ ID NO: 913465 - RNA, 19 nt, Homo sapiens
  misc_RNA (1)...(19): siRNA sense strand
gagagagaguagccaacag

SEQ ID NO: 913466 - RNA, 19 nt, Homo sapiens
  misc_RNA (1)...(19): siRNA sense strand
ggagagcaagacacacuuc

SEQ ID NO: 913467 - RNA, 19 nt, Homo sapiens
  misc_RNA (1)...(19): siRNA sense strand
gaggagagcaagacacacu

SEQ ID NO: 913468 - RNA, 19 nt, Homo sapiens
  misc_RNA (1)...(19): siRNA sense strand
gaucagugccaaggagaug

SEQ ID NO: 913469 - RNA, 19 nt, Homo sapiens
  misc_RNA (1)...(19): siRNA sense strand
gaacacugaccggaagauc

SEQ ID NO: 913470 - RNA, 19 nt, Homo sapiens
  misc_RNA (1)...(19): siRNA sense strand
ggaagaucagugccaagga

SEQ ID NO: 913471 - RNA, 19 nt, Homo sapiens
  misc_RNA (1)...(19): siRNA sense strand
cagcagggccaggacauug

SEQ ID NO: 913472 - RNA, 19 nt, Homo sapiens
  misc_RNA (1)...(19): siRNA sense strand
gcucaaguacagcgaguuc

SEQ ID NO: 913473 - RNA, 19 nt, Homo sapiens
  misc_RNA (1)...(19): siRNA sense strand
gugacaagcagcucucugu

SEQ ID NO: 913474 - RNA, 19 nt, Homo sapiens
  misc_RNA (1)...(19): siRNA sense strand
caacugggugaaagacaga

SEQ ID NO: 913475 - RNA, 19 nt, Homo sapiens
  misc_RNA (1)...(19): siRNA sense strand
ucaaguacagcgaguucuu

SEQ ID NO: 913476 - RNA, 19 nt, Homo sapiens
  misc_RNA (1)...(19): siRNA sense strand
ugaacgaggccaagcagau

SEQ ID NO: 913477 - RNA, 19 nt, Homo sapiens
  misc_RNA (1)...(19): siRNA sense strand
agguggaugugaacacuga

SEQ ID NO: 913478 - RNA, 19 nt, Homo sapiens
  misc_RNA (1)...(19): siRNA sense strand
gauggacgggcaccucaau

SEQ ID NO: 913479 - RNA, 19 nt, Homo sapiens
  misc_RNA (1)...(19): siRNA sense strand
gggacggucacgugucuug

SEQ ID NO: 913480 - RNA, 19 nt, Homo sapiens
  misc_RNA (1)...(19): siRNA sense strand
gcagcgugcacgaggaguu

SEQ ID NO: 913481 - RNA, 19 nt, Homo sapiens
  misc_RNA (1)...(19): siRNA sense strand
gaggaggugcucaaguaca

SEQ ID NO: 913482 - RNA, 19 nt, Homo sapiens
  misc_RNA (1)...(19): siRNA sense strand
cgagagagaguagccaaca

SEQ ID NO: 913483 - RNA, 19 nt, Homo sapiens
  misc_RNA (1)...(19): siRNA sense strand
caaguacagcgaguucuuc

SEQ ID NO: 913484 - RNA, 19 nt, Homo sapiens
  misc_RNA (1)...(19): siRNA sense strand
ugacgacaacugggugaaa

SEQ ID NO: 913485 - RNA, 19 nt, Homo sapiens
  misc_RNA (1)...(19): siRNA sense strand
caaggaccuggguggcuuu

SEQ ID NO: 913486 - RNA, 19 nt, Homo sapiens
  misc_RNA (1)...(19): siRNA sense strand
agaagacggccgagcacuu

SEQ ID NO: 913487 - RNA, 19 nt, Homo sapiens
  misc_RNA (1)...(19): siRNA sense strand
cagcgugcacgaggaguuu

SEQ ID NO: 913488 - RNA, 19 nt, Homo sapiens
  misc_RNA (1)...(19): siRNA sense strand
caacagggaggagaaugag

SEQ ID NO: 913489 - RNA, 19 nt, Homo sapiens
  misc_RNA (1)...(19): siRNA sense strand
ggaggaagcugauggucau

SEQ ID NO: 913490 - RNA, 19 nt, Homo sapiens
  misc_RNA (1)...(19): siRNA sense strand
gggugaagcuggagaugga

SEQ ID NO: 913491 - RNA, 19 nt, Homo sapiens
  misc_RNA (1)...(19): siRNA sense strand
ggaccuggguggcuuugau

SEQ ID NO: 913492 - RNA, 19 nt, Homo sapiens
  misc_RNA (1)...(19): siRNA sense strand
gcucaacgaggaacucaaa

SEQ ID NO: 913493 - RNA, 19 nt, Homo sapiens
  misc_RNA (1)...(19): siRNA sense strand
gggcaguccuucugaugga

SEQ ID NO: 913494 - RNA, 19 nt, Homo sapiens
  misc_RNA (1)...(19): siRNA sense strand
caacgaggaacucaaagug

SEQ ID NO: 913495 - RNA, 19 nt, Homo sapiens
  misc_RNA (1)...(19): siRNA sense strand
gccaggacauugacgacaa

SEQ ID NO: 913496 - RNA, 19 nt, Homo sapiens
  misc_RNA (1)...(19): siRNA sense strand
ggacgaggaaacacaggaa

SEQ ID NO: 913497 - RNA, 19 nt, Homo sapiens
  misc_RNA (1)...(19): siRNA sense strand
guaaaggccauagcgagaa

SEQ ID NO: 913498 - RNA, 19 nt, Homo sapiens
  misc_RNA (1)...(19): siRNA sense strand
ccaacagggaggagaauga

SEQ ID NO: 913499 - RNA, 19 nt, Homo sapiens
  misc_RNA (1)...(19): siRNA sense strand
caaaguggacgaggaaaca

SEQ ID NO: 913500 - RNA, 19 nt, Homo sapiens
  misc_RNA (1)...(19): siRNA sense strand
ggacgaguauaaggugaag

SEQ ID NO: 913501 - RNA, 19 nt, Homo sapiens
  misc_RNA (1)...(19): siRNA sense strand
uaaaggccauagcgagaag

SEQ ID NO: 913502 - RNA, 19 nt, Homo sapiens
  misc_RNA (1)...(19): siRNA sense strand
gagaugcagcgcuggauca

SEQ ID NO: 913503 - RNA, 19 nt, Homo sapiens
  misc_RNA (1)...(19): siRNA sense strand
gacgacaacugggugaaag

SEQ ID NO: 913504 - RNA, 19 nt, Homo sapiens
  misc_RNA (1)...(19): siRNA sense strand
ugucuugggacgaguauaa

SEQ ID NO: 913505 - RNA, 19 nt, Homo sapiens
  misc_RNA (1)...(19): siRNA sense strand
caagguggaugugaacacu

SEQ ID NO: 913506 - RNA, 19 nt, Homo sapiens
  misc_RNA (1)...(19): siRNA sense strand
ggaccaggacggugacaag

SEQ ID NO: 913507 - RNA, 19 nt, Homo sapiens
  misc_RNA (1)...(19): siRNA sense strand
gaacacugaccggaagauc

SEQ ID NO: 913508 - RNA, 19 nt, Homo sapiens
  misc_RNA (1)...(19): siRNA sense strand
gagagagaguagccaacag

SEQ ID NO: 913509 - RNA, 19 nt, Homo sapiens
  misc_RNA (1)...(19): siRNA sense strand
ggagagcaagacacacuuc

SEQ ID NO: 913510 - RNA, 19 nt, Homo sapiens
  misc_RNA (1)...(19): siRNA sense strand
gaggagagcaagacacacu

SEQ ID NO: 913511 - RNA, 19 nt, Homo sapiens
  misc_RNA (1)...(19): siRNA sense strand
gaucagugccaaggagaug

SEQ ID NO: 913512 - RNA, 19 nt, Homo sapiens
  misc_RNA (1)...(19): siRNA sense strand
ggaagaucagugccaagga

SEQ ID NO: 913513 - RNA, 19 nt, Homo sapiens
  misc_RNA (1)...(19): siRNA sense strand
cagcagggccaggacauug

SEQ ID NO: 913514 - RNA, 19 nt, Homo sapiens
  misc_RNA (1)...(19): siRNA sense strand
gugacaagcagcucucugu

SEQ ID NO: 913515 - RNA, 19 nt, Homo sapiens
  misc_RNA (1)...(19): siRNA sense strand
caacugggugaaagacaga

SEQ ID NO: 913516 - RNA, 19 nt, Homo sapiens
  misc_RNA (1)...(19): siRNA sense strand
agguggaugugaacacuga

SEQ ID NO: 913517 - RNA, 19 nt, Homo sapiens
  misc_RNA (1)...(19): siRNA sense strand
gauggacgggcaccucaau

SEQ ID NO: 913518 - RNA, 19 nt, Homo sapiens
  misc_RNA (1)...(19): siRNA sense strand
gggacggucacgugucuug

SEQ ID NO: 913519 - RNA, 19 nt, Homo sapiens
  misc_RNA (1)...(19): siRNA sense strand
ugacgacaacugggugaaa

SEQ ID NO: 913520 - RNA, 19 nt, Homo sapiens
  misc_RNA (1)...(19): siRNA sense strand
cgagagagaguagccaaca

SEQ ID NO: 913521 - RNA, 19 nt, Homo sapiens
  misc_RNA (1)...(19): siRNA sense strand
caaggaccuggguggcuuu

SEQ ID NO: 913522 - RNA, 19 nt, Homo sapiens
  misc_RNA (1)...(19): siRNA sense strand
agaagacggccgagcacuu

SEQ ID NO: 913523 - RNA, 19 nt, Homo sapiens
  misc_RNA (1)...(19): siRNA sense strand
caacagggaggagaaugag

SEQ ID NO: 913524 - RNA, 19 nt, Homo sapiens
  misc_RNA (1)...(19): siRNA sense strand
gaacuaugguuguaaaugc

SEQ ID NO: 913525 - RNA, 19 nt, Homo sapiens
  misc_RNA (1)...(19): siRNA sense strand
uaaagaggauccagaguca

SEQ ID NO: 913526 - RNA, 19 nt, Homo sapiens
  misc_RNA (1)...(19): siRNA sense strand
gaacaaccuuggacaacuc

SEQ ID NO: 913527 - RNA, 19 nt, Homo sapiens
  misc_RNA (1)...(19): siRNA sense strand
gcacaguucgugauauuga

SEQ ID NO: 913528 - RNA, 19 nt, Homo sapiens
  misc_RNA (1)...(19): siRNA sense strand
uaaggaauaucuucugauc

SEQ ID NO: 913529 - RNA, 19 nt, Homo sapiens
  misc_RNA (1)...(19): siRNA sense strand
caugguagcuccagauaag

SEQ ID NO: 913530 - RNA, 19 nt, Homo sapiens
  misc_RNA (1)...(19): siRNA sense strand
aagcacaguucgugauauu

SEQ ID NO: 913531 - RNA, 19 nt, Homo sapiens
  misc_RNA (1)...(19): siRNA sense strand
aagaggauccagagucaua

SEQ ID NO: 913532 - RNA, 19 nt, Homo sapiens
  misc_RNA (1)...(19): siRNA sense strand
ggaacuaugguuguaaaug

SEQ ID NO: 913533 - RNA, 19 nt, Homo sapiens
  misc_RNA (1)...(19): siRNA sense strand
gguuguaaaugcagaaggu

SEQ ID NO: 913534 - RNA, 19 nt, Homo sapiens
  misc_RNA (1)...(19): siRNA sense strand
ucagaucaaagaaacauga

SEQ ID NO: 913535 - RNA, 19 nt, Homo sapiens
  misc_RNA (1)...(19): siRNA sense strand
uauuggaacuaugguugua

SEQ ID NO: 913536 - RNA, 19 nt, Homo sapiens
  misc_RNA (1)...(19): siRNA sense strand
gguauucccauccgaacaa

SEQ ID NO: 913537 - RNA, 19 nt, Homo sapiens
  misc_RNA (1)...(19): siRNA sense strand
aggaauaucuucugaucgu

SEQ ID NO: 913538 - RNA, 19 nt, Homo sapiens
  misc_RNA (1)...(19): siRNA sense strand
cgaacaaccuuggacaacu

SEQ ID NO: 913539 - RNA, 19 nt, Homo sapiens
  misc_RNA (1)...(19): siRNA sense strand
gaggauccagagucauaaa

SEQ ID NO: 913540 - RNA, 19 nt, Homo sapiens
  misc_RNA (1)...(19): siRNA sense strand
augcaggccuucuucauca

SEQ ID NO: 913541 - RNA, 19 nt, Homo sapiens
  misc_RNA (1)...(19): siRNA sense strand
uuggaacuaugguuguaaa

SEQ ID NO: 913542 - RNA, 19 nt, Homo sapiens
  misc_RNA (1)...(19): siRNA sense strand
ucagaauccaugugaauag

SEQ ID NO: 913543 - RNA, 19 nt, Homo sapiens
  misc_RNA (1)...(19): siRNA sense strand
guaaaugcagaagguauuc

SEQ ID NO: 913544 - RNA, 19 nt, Homo sapiens
  misc_RNA (1)...(19): siRNA sense strand
aaagcacaguucgugauau

SEQ ID NO: 913545 - RNA, 19 nt, Homo sapiens
  misc_RNA (1)...(19): siRNA sense strand
uguaaaugcagaagguauu

SEQ ID NO: 913546 - RNA, 19 nt, Homo sapiens
  misc_RNA (1)...(19): siRNA sense strand
caauaugcaggccuucuuc

SEQ ID NO: 913547 - RNA, 19 nt, Homo sapiens
  misc_RNA (1)...(19): siRNA sense strand
uuggacaacucaacaacug

SEQ ID NO: 913548 - RNA, 19 nt, Homo sapiens
  misc_RNA (1)...(19): siRNA sense strand
gaccugacuuuucuuagga

SEQ ID NO: 913549 - RNA, 19 nt, Homo sapiens
  misc_RNA (1)...(19): siRNA sense strand
ugauauugauccucagaac

SEQ ID NO: 913550 - RNA, 19 nt, Homo sapiens
  misc_RNA (1)...(19): siRNA sense strand
guggaggaaaccuuaaaga

SEQ ID NO: 913551 - RNA, 19 nt, Homo sapiens
  misc_RNA (1)...(19): siRNA sense strand
uagcuccagauaaggaaua

SEQ ID NO: 913552 - RNA, 19 nt, Homo sapiens
  misc_RNA (1)...(19): siRNA sense strand
ucaauaugcaggccuucuu

SEQ ID NO: 913553 - RNA, 19 nt, Homo sapiens
  misc_RNA (1)...(19): siRNA sense strand
gcugaagucuggaaugaaa

SEQ ID NO: 913554 - RNA, 19 nt, Homo sapiens
  misc_RNA (1)...(19): siRNA sense strand
gaacagauguggcaauagc

SEQ ID NO: 913555 - RNA, 19 nt, Homo sapiens
  misc_RNA (1)...(19): siRNA sense strand
gauggaagccagaaaguuu

SEQ ID NO: 913556 - RNA, 19 nt, Homo sapiens
  misc_RNA (1)...(19): siRNA sense strand
gcaccaauguucgagagua

SEQ ID NO: 913557 - RNA, 19 nt, Homo sapiens
  misc_RNA (1)...(19): siRNA sense strand
uagaacagauguggcaaua

SEQ ID NO: 913558 - RNA, 19 nt, Homo sapiens
  misc_RNA (1)...(19): siRNA sense strand
gagcauagcaacaaccaaa

SEQ ID NO: 913559 - RNA, 19 nt, Homo sapiens
  misc_RNA (1)...(19): siRNA sense strand
gagcaaugaaucuuguuua

SEQ ID NO: 913560 - RNA, 19 nt, Homo sapiens
  misc_RNA (1)...(19): siRNA sense strand
aaacaagggucacaucaca

SEQ ID NO: 913561 - RNA, 19 nt, Homo sapiens
  misc_RNA (1)...(19): siRNA sense strand
caacgacaauuguacaaca

SEQ ID NO: 913562 - RNA, 19 nt, Homo sapiens
  misc_RNA (1)...(19): siRNA sense strand
cugcagagcuccacagaga

SEQ ID NO: 913563 - RNA, 19 nt, Homo sapiens
  misc_RNA (1)...(19): siRNA sense strand
gagaacaacucaggaacug

SEQ ID NO: 913564 - RNA, 19 nt, Homo sapiens
  misc_RNA (1)...(19): siRNA sense strand
gcaaagcgaaggcuacaug

SEQ ID NO: 913565 - RNA, 19 nt, Homo sapiens
  misc_RNA (1)...(19): siRNA sense strand
cauccacgaucaugagaaa

SEQ ID NO: 913566 - RNA, 19 nt, Homo sapiens
  misc_RNA (1)...(19): siRNA sense strand
aaacauagaggccaaagug

SEQ ID NO: 913567 - RNA, 19 nt, Homo sapiens
  misc_RNA (1)...(19): siRNA sense strand
gaaaaugaauccagcaagu

SEQ ID NO: 913568 - RNA, 19 nt, Homo sapiens
  misc_RNA (1)...(19): siRNA sense strand
ggccaccaguagagaguua

SEQ ID NO: 913569 - RNA, 19 nt, Homo sapiens
  misc_RNA (1)...(19): siRNA sense strand
gugcugaagucuggaauga

SEQ ID NO: 913570 - RNA, 19 nt, Homo sapiens
  misc_RNA (1)...(19): siRNA sense strand
cagcaagugugcagcagaa

SEQ ID NO: 913571 - RNA, 19 nt, Homo sapiens
  misc_RNA (1)...(19): siRNA sense strand
cgagacugcuucccuugaa

SEQ ID NO: 913572 - RNA, 19 nt, Homo sapiens
  misc_RNA (1)...(19): siRNA sense strand
aaagaaagccaguaagauc

SEQ ID NO: 913573 - RNA, 19 nt, Homo sapiens
  misc_RNA (1)...(19): siRNA sense strand
caacaggaccuagaacaga

SEQ ID NO: 913574 - RNA, 19 nt, Homo sapiens
  misc_RNA (1)...(19): siRNA sense strand
gcccacagcuacucuucaa

SEQ ID NO: 913575 - RNA, 19 nt, Homo sapiens
  misc_RNA (1)...(19): siRNA sense strand
gaagaucuccauccacgau

SEQ ID NO: 913576 - RNA, 19 nt, Homo sapiens
  misc_RNA (1)...(19): siRNA sense strand
caaugaaucuuguuuaccu

SEQ ID NO: 913577 - RNA, 19 nt, Homo sapiens
  misc_RNA (1)...(19): siRNA sense strand
guagauaucguggcuaaga

SEQ ID NO: 913578 - RNA, 19 nt, Homo sapiens
  misc_RNA (1)...(19): siRNA sense strand
caccaauguucgagaguaa

SEQ ID NO: 913579 - RNA, 19 nt, Homo sapiens
  misc_RNA (1)...(19): siRNA sense strand
ggagagggaauccaacaug

SEQ ID NO: 913580 - RNA, 19 nt, Homo sapiens
  misc_RNA (1)...(19): siRNA sense strand
gagacugcuucccuugaaa

SEQ ID NO: 913581 - RNA, 19 nt, Homo sapiens
  misc_RNA (1)...(19): siRNA sense strand
cagaggagaguacaacauu

SEQ ID NO: 913582 - RNA, 19 nt, Homo sapiens
  misc_RNA (1)...(19): siRNA sense strand
cugcuucccuugaaauuug

SEQ ID NO: 913583 - RNA, 19 nt, Homo sapiens
  misc_RNA (1)...(19): siRNA sense strand
gagaggugauugauguaca

SEQ ID NO: 913584 - RNA, 19 nt, Homo sapiens
  misc_RNA (1)...(19): siRNA sense strand
guccgcaucuggccauaaa

SEQ ID NO: 913585 - RNA, 19 nt, Homo sapiens
  misc_RNA (1)...(19): siRNA sense strand
cuacaugagugaacgagau

SEQ ID NO: 913586 - RNA, 19 nt, Homo sapiens
  misc_RNA (1)...(19): siRNA sense strand
ccacagcuacucuucaaug

SEQ ID NO: 913587 - RNA, 19 nt, Homo sapiens
  misc_RNA (1)...(19): siRNA sense strand
agaggagaguacaacauuu

SEQ ID NO: 913588 - RNA, 19 nt, Homo sapiens
  misc_RNA (1)...(19): siRNA sense strand
ugacagagagguagauauc

SEQ ID NO: 913589 - RNA, 19 nt, Homo sapiens
  misc_RNA (1)...(19): siRNA sense strand
ucacaucacaugacagaga

SEQ ID NO: 913590 - RNA, 19 nt, Homo sapiens
  misc_RNA (1)...(19): siRNA sense strand
ggaccugcaacgacaauug

SEQ ID NO: 913591 - RNA, 19 nt, Homo sapiens
  misc_RNA (1)...(19): siRNA sense strand
cuaagacgguggagaagca

SEQ ID NO: 913592 - RNA, 19 nt, Homo sapiens
  misc_RNA (1)...(19): siRNA sense strand
caagugugcagcagaaaga

SEQ ID NO: 913593 - RNA, 19 nt, Homo sapiens
  misc_RNA (1)...(19): siRNA sense strand
gugaacagcaugucagaug

SEQ ID NO: 913594 - RNA, 19 nt, Homo sapiens
  misc_RNA (1)...(19): siRNA sense strand
gaagaaccaaucugcaucu

SEQ ID NO: 913595 - RNA, 19 nt, Homo sapiens
  misc_RNA (1)...(19): siRNA sense strand
cacagcuacucuucaauga

SEQ ID NO: 913596 - RNA, 19 nt, Homo sapiens
  misc_RNA (1)...(19): siRNA sense strand
agggagaggugauugaugu

SEQ ID NO: 913597 - RNA, 19 nt, Homo sapiens
  misc_RNA (1)...(19): siRNA sense strand
gcaguugugucccucuucu

SEQ ID NO: 913598 - RNA, 19 nt, Homo sapiens
  misc_RNA (1)...(19): siRNA sense strand
aaacaaggaaagaagagaa

SEQ ID NO: 913599 - RNA, 19 nt, Homo sapiens
  misc_RNA (1)...(19): siRNA sense strand
gcacuaugacauccgagaa

SEQ ID NO: 913600 - RNA, 19 nt, Homo sapiens
  misc_RNA (1)...(19): siRNA sense strand
gcacaggagcuuuacaaaa

SEQ ID NO: 913601 - RNA, 19 nt, Homo sapiens
  misc_RNA (1)...(19): siRNA sense strand
gcaaggcaggugaaaguca

SEQ ID NO: 913602 - RNA, 19 nt, Homo sapiens
  misc_RNA (1)...(19): siRNA sense strand
caaguaugcaccaauguuc

SEQ ID NO: 913603 - RNA, 19 nt, Homo sapiens
  misc_RNA (1)...(19): siRNA sense strand
ggcgggagcagcuaucaaa

SEQ ID NO: 913604 - RNA, 19 nt, Homo sapiens
  misc_RNA (1)...(19): siRNA sense strand
caaaagaaagccaguaaga

SEQ ID NO: 913605 - RNA, 19 nt, Homo sapiens
  misc_RNA (1)...(19): siRNA sense strand
gcguuugcaggcaguauua

SEQ ID NO: 913606 - RNA, 19 nt, Homo sapiens
  misc_RNA (1)...(19): siRNA sense strand
gcagagcuccacagagaag

SEQ ID NO: 913607 - RNA, 19 nt, Homo sapiens
  misc_RNA (1)...(19): siRNA sense strand
ccaauguucgagaguaauu

SEQ ID NO: 913608 - RNA, 19 nt, Homo sapiens
  misc_RNA (1)...(19): siRNA sense strand
agguagauaucguggcuaa

SEQ ID NO: 913609 - RNA, 19 nt, Homo sapiens
  misc_RNA (1)...(19): siRNA sense strand
gggaagaaccaaucugcau

SEQ ID NO: 913610 - RNA, 19 nt, Homo sapiens
  misc_RNA (1)...(19): siRNA sense strand
ggugauugauguacacaac

SEQ ID NO: 913611 - RNA, 19 nt, Homo sapiens
  misc_RNA (1)...(19): siRNA sense strand
ucaaguaugcaccaauguu

SEQ ID NO: 913612 - RNA, 19 nt, Homo sapiens
  misc_RNA (1)...(19): siRNA sense strand
caaagcgaaggcuacauga

SEQ ID NO: 913613 - RNA, 19 nt, Homo sapiens
  misc_RNA (1)...(19): siRNA sense strand
uuucaaguaugcaccaaug

SEQ ID NO: 913614 - RNA, 19 nt, Homo sapiens
  misc_RNA (1)...(19): siRNA sense strand
aaacacgagagaugacaaa

SEQ ID NO: 913615 - RNA, 19 nt, Homo sapiens
  misc_RNA (1)...(19): siRNA sense strand
gcauagcaacaaccaaauc

SEQ ID NO: 913616 - RNA, 19 nt, Homo sapiens
  misc_RNA (1)...(19): siRNA sense strand
gaaggaggagcagcaagga

SEQ ID NO: 913617 - RNA, 19 nt, Homo sapiens
  misc_RNA (1)...(19): siRNA sense strand
ugaaauuugugaagaucuc

SEQ ID NO: 913618 - RNA, 19 nt, Homo sapiens
  misc_RNA (1)...(19): siRNA sense strand
cagcuugagugcggcguuu

SEQ ID NO: 913619 - RNA, 19 nt, Homo sapiens
  misc_RNA (1)...(19): siRNA sense strand
gcaggcccgucaagacucu

SEQ ID NO: 913620 - RNA, 19 nt, Homo sapiens
  misc_RNA (1)...(19): siRNA sense strand
caacagaggagaguacaac

SEQ ID NO: 913621 - RNA, 19 nt, Homo sapiens
  misc_RNA (1)...(19): siRNA sense strand
guucuggcccaaccaacua

SEQ ID NO: 913622 - RNA, 19 nt, Homo sapiens
  misc_RNA (1)...(19): siRNA sense strand
acagagagguagauaucgu

SEQ ID NO: 913623 - RNA, 19 nt, Homo sapiens
  misc_RNA (1)...(19): siRNA sense strand
gaggagaguacaacauuuu

SEQ ID NO: 913624 - RNA, 19 nt, Homo sapiens
  misc_RNA (1)...(19): siRNA sense strand
uagcacaggagcuuuacaa

SEQ ID NO: 913625 - RNA, 19 nt, Homo sapiens
  misc_RNA (1)...(19): siRNA sense strand
ccgccagucucucccaaga

SEQ ID NO: 913626 - RNA, 19 nt, Homo sapiens
  misc_RNA (1)...(19): siRNA sense strand
gcaacaggaccuagaacag

SEQ ID NO: 913627 - RNA, 19 nt, Homo sapiens
  misc_RNA (1)...(19): siRNA sense strand
caacuaaaaucugugaaca

SEQ ID NO: 913628 - RNA, 19 nt, Homo sapiens
  misc_RNA (1)...(19): siRNA sense strand
gagauggaagccagaaagu

SEQ ID NO: 913629 - RNA, 19 nt, Homo sapiens
  misc_RNA (1)...(19): siRNA sense strand
gcaagugugcagcagaaag

SEQ ID NO: 913630 - RNA, 19 nt, Homo sapiens
  misc_RNA (1)...(19): siRNA sense strand
uggcuaagacgguggagaa

SEQ ID NO: 913631 - RNA, 19 nt, Homo sapiens
  misc_RNA (1)...(19): siRNA sense strand
aagaaagccaguaagauca

SEQ ID NO: 913632 - RNA, 19 nt, Homo sapiens
  misc_RNA (1)...(19): siRNA sense strand
gcgaaggcuacaugaguga

SEQ ID NO: 913633 - RNA, 19 nt, Homo sapiens
  misc_RNA (1)...(19): siRNA sense strand
gaccugcaacgacaauugu

SEQ ID NO: 913634 - RNA, 19 nt, Homo sapiens
  misc_RNA (1)...(19): siRNA sense strand
ccgcaaggcaggugaaagu

SEQ ID NO: 913635 - RNA, 19 nt, Homo sapiens
  misc_RNA (1)...(19): siRNA sense strand
gcaaugaguccugcaacag

SEQ ID NO: 913636 - RNA, 19 nt, Homo sapiens
  misc_RNA (1)...(19): siRNA sense strand
aacaggaccuagaacagau

SEQ ID NO: 913637 - RNA, 19 nt, Homo sapiens
  misc_RNA (1)...(19): siRNA sense strand
ggaaagaagagaaaagaag

SEQ ID NO: 913638 - RNA, 19 nt, Homo sapiens
  misc_RNA (1)...(19): siRNA sense strand
ccuugaaauuugugaagau

SEQ ID NO: 913639 - RNA, 19 nt, Homo sapiens
  misc_RNA (1)...(19): siRNA sense strand
acaagggucacaucacaug

SEQ ID NO: 913640 - RNA, 19 nt, Homo sapiens
  misc_RNA (1)...(19): siRNA sense strand
aagaaccaaucugcaucua

SEQ ID NO: 913641 - RNA, 19 nt, Homo sapiens
  misc_RNA (1)...(19): siRNA sense strand
gaaaagaaggacagacauc

SEQ ID NO: 913642 - RNA, 19 nt, Homo sapiens
  misc_RNA (1)...(19): siRNA sense strand
gcaguauuacgaccagcaa

SEQ ID NO: 913643 - RNA, 19 nt, Homo sapiens
  misc_RNA (1)...(19): siRNA sense strand
gggagaggugauugaugua

SEQ ID NO: 913644 - RNA, 19 nt, Homo sapiens
  misc_RNA (1)...(19): siRNA sense strand
gagaaggggaucagaguga

SEQ ID NO: 913645 - RNA, 19 nt, Homo sapiens
  misc_RNA (1)...(19): siRNA sense strand
acuaugacauccgagaaga

SEQ ID NO: 913646 - RNA, 19 nt, Homo sapiens
  misc_RNA (1)...(19): siRNA sense strand
aaaggguacagcaacguaa

SEQ ID NO: 913647 - RNA, 19 nt, Homo sapiens
  misc_RNA (1)...(19): siRNA sense strand
gagaaaagaaggacagaca

SEQ ID NO: 913648 - RNA, 19 nt, Homo sapiens
  misc_RNA (1)...(19): siRNA sense strand
gcaguggcaggaacagcaa

SEQ ID NO: 913649 - RNA, 19 nt, Homo sapiens
  misc_RNA (1)...(19): siRNA sense strand
ccgagaagacggagaugau

SEQ ID NO: 913650 - RNA, 19 nt, Homo sapiens
  misc_RNA (1)...(19): siRNA sense strand
caugacagagagguagaua

SEQ ID NO: 913651 - RNA, 19 nt, Homo sapiens
  misc_RNA (1)...(19): siRNA sense strand
aaggacagacaucccagua

SEQ ID NO: 913652 - RNA, 19 nt, Homo sapiens
  misc_RNA (1)...(19): siRNA sense strand
cgagauggaagccagaaag

SEQ ID NO: 913653 - RNA, 19 nt, Homo sapiens
  misc_RNA (1)...(19): siRNA sense strand
gggaugggcuccucuccua

SEQ ID NO: 913654 - RNA, 19 nt, Homo sapiens
  misc_RNA (1)...(19): siRNA sense strand
ggaacuacauccaccugaa

SEQ ID NO: 913655 - RNA, 19 nt, Homo sapiens
  misc_RNA (1)...(19): siRNA sense strand
gcccugaaguggauguaua

SEQ ID NO: 913656 - RNA, 19 nt, Homo sapiens
  misc_RNA (1)...(19): siRNA sense strand
gggagacggugcagaaaug

SEQ ID NO: 913657 - RNA, 19 nt, Homo sapiens
  misc_RNA (1)...(19): siRNA sense strand
gacaucaaaugcagacuug

SEQ ID NO: 913658 - RNA, 19 nt, Homo sapiens
  misc_RNA (1)...(19): siRNA sense strand
gugcagaaauggcgagaau

SEQ ID NO: 913659 - RNA, 19 nt, Homo sapiens
  misc_RNA (1)...(19): siRNA sense strand
gcaagacagacaucaaaug

SEQ ID NO: 913660 - RNA, 19 nt, Homo sapiens
  misc_RNA (1)...(19): siRNA sense strand
gcagaaauggcgagaauac

SEQ ID NO: 913661 - RNA, 19 nt, Homo sapiens
  misc_RNA (1)...(19): siRNA sense strand
gaggucaucuuugccuuug

SEQ ID NO: 913662 - RNA, 19 nt, Homo sapiens
  misc_RNA (1)...(19): siRNA sense strand
gaacuacuggcucauuauc

SEQ ID NO: 913663 - RNA, 19 nt, Homo sapiens
  misc_RNA (1)...(19): siRNA sense strand
cagcuggaauuucggaaga

SEQ ID NO: 913664 - RNA, 19 nt, Homo sapiens
  misc_RNA (1)...(19): siRNA sense strand
ggaacuccaacaugaacua

SEQ ID NO: 913665 - RNA, 19 nt, Homo sapiens
  misc_RNA (1)...(19): siRNA sense strand
gaacuuccucaucuuuguu

SEQ ID NO: 913666 - RNA, 19 nt, Homo sapiens
  misc_RNA (1)...(19): siRNA sense strand
ggucaucuuugccuuugug

SEQ ID NO: 913667 - RNA, 19 nt, Homo sapiens
  misc_RNA (1)...(19): siRNA sense strand
uuacagagcucuccuucac

SEQ ID NO: 913668 - RNA, 19 nt, Homo sapiens
  misc_RNA (1)...(19): siRNA sense strand
ggucuucucugagcaaugg

SEQ ID NO: 913669 - RNA, 19 nt, Homo sapiens
  misc_RNA (1)...(19): siRNA sense strand
accaggaacuccaacauga

SEQ ID NO: 913670 - RNA, 19 nt, Homo sapiens
  misc_RNA (1)...(19): siRNA sense strand
gcaaccggaccuucgauga

SEQ ID NO: 913671 - RNA, 19 nt, Homo sapiens
  misc_RNA (1)...(19): siRNA sense strand
gugcaagacagacaucaaa

SEQ ID NO: 913672 - RNA, 19 nt, Homo sapiens
  misc_RNA (1)...(19): siRNA sense strand
caaccggaccuucgaugaa

SEQ ID NO: 913673 - RNA, 19 nt, Homo sapiens
  misc_RNA (1)...(19): siRNA sense strand
ggugaacuuccucaucuuu

SEQ ID NO: 913674 - RNA, 19 nt, Homo sapiens
  misc_RNA (1)...(19): siRNA sense strand
ugaacuuccucaucuuugu

SEQ ID NO: 913675 - RNA, 19 nt, Homo sapiens
  misc_RNA (1)...(19): siRNA sense strand
ggucaucugcaucguggua

SEQ ID NO: 913676 - RNA, 19 nt, Homo sapiens
  misc_RNA (1)...(19): siRNA sense strand
gcuggcggcuugagcacuu

SEQ ID NO: 913677 - RNA, 19 nt, Homo sapiens
  misc_RNA (1)...(19): siRNA sense strand
gcauguacacagccacuug

SEQ ID NO: 913678 - RNA, 19 nt, Homo sapiens
  misc_RNA (1)...(19): siRNA sense strand
gaccaggaacuccaacaug

SEQ ID NO: 913679 - RNA, 19 nt, Homo sapiens
  misc_RNA (1)...(19): siRNA sense strand
caagacagacaucaaaugc

SEQ ID NO: 913680 - RNA, 19 nt, Homo sapiens
  misc_RNA (1)...(19): siRNA sense strand
aaacugaaggccaaucuca

SEQ ID NO: 913681 - RNA, 19 nt, Homo sapiens
  misc_RNA (1)...(19): siRNA sense strand
gccaaucucaugugcaaga

SEQ ID NO: 913682 - RNA, 19 nt, Homo sapiens
  misc_RNA (1)...(19): siRNA sense strand
gaacuacauccaccugaac

SEQ ID NO: 913683 - RNA, 19 nt, Homo sapiens
  misc_RNA (1)...(19): siRNA sense strand
gagcugccgccugguguuu

SEQ ID NO: 913684 - RNA, 19 nt, Homo sapiens
  misc_RNA (1)...(19): siRNA sense strand
cagagggacagcagcauga

SEQ ID NO: 913685 - RNA, 19 nt, Homo sapiens
  misc_RNA (1)...(19): siRNA sense strand
ccaggaacuccaacaugaa

SEQ ID NO: 913686 - RNA, 19 nt, Homo sapiens
  misc_RNA (1)...(19): siRNA sense strand
aggccaaucucaugugcaa

SEQ ID NO: 913687 - RNA, 19 nt, Homo sapiens
  misc_RNA (1)...(19): siRNA sense strand
caaggacgcagcccugaag

SEQ ID NO: 913688 - RNA, 19 nt, Homo sapiens
  misc_RNA (1)...(19): siRNA sense strand
uggagggcguguaccugua

SEQ ID NO: 913689 - RNA, 19 nt, Homo sapiens
  misc_RNA (1)...(19): siRNA sense strand
acgcagcccugaaguggau

SEQ ID NO: 913690 - RNA, 19 nt, Homo sapiens
  misc_RNA (1)...(19): siRNA sense strand
gcaugaagccccucaagug

SEQ ID NO: 913691 - RNA, 19 nt, Homo sapiens
  misc_RNA (1)...(19): siRNA sense strand
gggugaacuuccucaucuu

SEQ ID NO: 913692 - RNA, 19 nt, Homo sapiens
  misc_RNA (1)...(19): siRNA sense strand
caggcucguucgugaaugu

SEQ ID NO: 913693 - RNA, 19 nt, Homo sapiens
  misc_RNA (1)...(19): siRNA sense strand
ggaccaggaacuccaacau

SEQ ID NO: 913694 - RNA, 19 nt, Homo sapiens
  misc_RNA (1)...(19): siRNA sense strand
gcuacgcacucuccuucuc

SEQ ID NO: 913695 - RNA, 19 nt, Homo sapiens
  misc_RNA (1)...(19): siRNA sense strand
ucugagcaauggaucuuca

SEQ ID NO: 913696 - RNA, 19 nt, Homo sapiens
  misc_RNA (1)...(19): siRNA sense strand
aaccggaccuucgaugaau

SEQ ID NO: 913697 - RNA, 19 nt, Homo sapiens
  misc_RNA (1)...(19): siRNA sense strand
cuccuucucugcucugguu

SEQ ID NO: 913698 - RNA, 19 nt, Homo sapiens
  misc_RNA (1)...(19): siRNA sense strand
gcauuguccgucuucauca

SEQ ID NO: 913699 - RNA, 19 nt, Homo sapiens
  misc_RNA (1)...(19): siRNA sense strand
ccuucucggucuucucuga

SEQ ID NO: 913700 - RNA, 19 nt, Homo sapiens
  misc_RNA (1)...(19): siRNA sense strand
cauuguccgucuucaucaa

SEQ ID NO: 913701 - RNA, 19 nt, Homo sapiens
  misc_RNA (1)...(19): siRNA sense strand
gcacugcaccaggaacuac

SEQ ID NO: 913702 - RNA, 19 nt, Homo sapiens
  misc_RNA (1)...(19): siRNA sense strand
ugaggucaucuuugccuuu

SEQ ID NO: 913703 - RNA, 19 nt, Homo sapiens
  misc_RNA (1)...(19): siRNA sense strand
gugaacuuccucaucuuug

SEQ ID NO: 913704 - RNA, 19 nt, Homo sapiens
  misc_RNA (1)...(19): siRNA sense strand
caauuacuacuggcucuug

SEQ ID NO: 913705 - RNA, 19 nt, Homo sapiens
  misc_RNA (1)...(19): siRNA sense strand
acacacugcuggccuucuc

SEQ ID NO: 913706 - RNA, 19 nt, Homo sapiens
  misc_RNA (1)...(19): siRNA sense strand
agacaucaaaugcagacuu

SEQ ID NO: 913707 - RNA, 19 nt, Homo sapiens
  misc_RNA (1)...(19): siRNA sense strand
caccugaaccuguuugcau

SEQ ID NO: 913708 - RNA, 19 nt, Homo sapiens
  misc_RNA (1)...(19): siRNA sense strand
ggggugaacuuccucaucu

SEQ ID NO: 913709 - RNA, 19 nt, Homo sapiens
  misc_RNA (1)...(19): siRNA sense strand
ugaacuacuggcucauuau

SEQ ID NO: 913710 - RNA, 19 nt, Homo sapiens
  misc_RNA (1)...(19): siRNA sense strand
acuccaacaugaacuacug

SEQ ID NO: 913711 - RNA, 19 nt, Homo sapiens
  misc_RNA (1)...(19): siRNA sense strand
gagcauuguccgucuucau

SEQ ID NO: 913712 - RNA, 19 nt, Homo sapiens
  misc_RNA (1)...(19): siRNA sense strand
acaaagugcuucucaagua

SEQ ID NO: 913713 - RNA, 19 nt, Homo sapiens
  misc_RNA (1)...(19): siRNA sense strand
uaacacagguggucugaug

SEQ ID NO: 913714 - RNA, 19 nt, Homo sapiens
  misc_RNA (1)...(19): siRNA sense strand
caacauaugguaccgagua

SEQ ID NO: 913715 - RNA, 19 nt, Homo sapiens
  misc_RNA (1)...(19): siRNA sense strand
ggucucaccugguaacuug

SEQ ID NO: 913716 - RNA, 19 nt, Homo sapiens
  misc_RNA (1)...(19): siRNA sense strand
ccaaugaauuuaggaauga

SEQ ID NO: 913717 - RNA, 19 nt, Homo sapiens
  misc_RNA (1)...(19): siRNA sense strand
gcaccgacauggacaaagu

SEQ ID NO: 913718 - RNA, 19 nt, Homo sapiens
  misc_RNA (1)...(19): siRNA sense strand
gaaccuguuucuccuccua

SEQ ID NO: 913719 - RNA, 19 nt, Homo sapiens
  misc_RNA (1)...(19): siRNA sense strand
acaagaauaugcaagcaaa

SEQ ID NO: 913720 - RNA, 19 nt, Homo sapiens
  misc_RNA (1)...(19): siRNA sense strand
caacagcaacaccuacaua

SEQ ID NO: 913721 - RNA, 19 nt, Homo sapiens
  misc_RNA (1)...(19): siRNA sense strand
ggauauccaucagccauuu

SEQ ID NO: 913722 - RNA, 19 nt, Homo sapiens
  misc_RNA (1)...(19): siRNA sense strand
caggugacauuuacaaaga

SEQ ID NO: 913723 - RNA, 19 nt, Homo sapiens
  misc_RNA (1)...(19): siRNA sense strand
uuacgaggauuauggauga

SEQ ID NO: 913724 - RNA, 19 nt, Homo sapiens
  misc_RNA (1)...(19): siRNA sense strand
gaacaagaauaugcaagca

SEQ ID NO: 913725 - RNA, 19 nt, Homo sapiens
  misc_RNA (1)...(19): siRNA sense strand
guggagacguugagaaaga

SEQ ID NO: 913726 - RNA, 19 nt, Homo sapiens
  misc_RNA (1)...(19): siRNA sense strand
uaaaccagaucuccgaguu

SEQ ID NO: 913727 - RNA, 19 nt, Homo sapiens
  misc_RNA (1)...(19): siRNA sense strand
ccagaucuccgaguucuua

SEQ ID NO: 913728 - RNA, 19 nt, Homo sapiens
  misc_RNA (1)...(19): siRNA sense strand
gacaaggaaugggaggaua

SEQ ID NO: 913729 - RNA, 19 nt, Homo sapiens
  misc_RNA (1)...(19): siRNA sense strand
gugcagaccugucaucucu

SEQ ID NO: 913730 - RNA, 19 nt, Homo sapiens
  misc_RNA (1)...(19): siRNA sense strand
gaauaaccguaaaccagau

SEQ ID NO: 913731 - RNA, 19 nt, Homo sapiens
  misc_RNA (1)...(19): siRNA sense strand
uaacagacaggugacauuu

SEQ ID NO: 913732 - RNA, 19 nt, Homo sapiens
  misc_RNA (1)...(19): siRNA sense strand
aaauuuggguugaugaaga

SEQ ID NO: 913733 - RNA, 19 nt, Homo sapiens
  misc_RNA (1)...(19): siRNA sense strand
ccaccaggcagcaagaaua

SEQ ID NO: 913734 - RNA, 19 nt, Homo sapiens
  misc_RNA (1)...(19): siRNA sense strand
gcagaggaauaguaugucu

SEQ ID NO: 913735 - RNA, 19 nt, Homo sapiens
  misc_RNA (1)...(19): siRNA sense strand
ggacaaagugcuucucaag

SEQ ID NO: 913736 - RNA, 19 nt, Homo sapiens
  misc_RNA (1)...(19): siRNA sense strand
gaggaaauuuggguugaug

SEQ ID NO: 913737 - RNA, 19 nt, Homo sapiens
  misc_RNA (1)...(19): siRNA sense strand
gaucagcaggcaaagauug

SEQ ID NO: 913738 - RNA, 19 nt, Homo sapiens
  misc_RNA (1)...(19): siRNA sense strand
gcaaagauugugugcuguu

SEQ ID NO: 913739 - RNA, 19 nt, Homo sapiens
  misc_RNA (1)...(19): siRNA sense strand
caaagugcuucucaaguac

SEQ ID NO: 913740 - RNA, 19 nt, Homo sapiens
  misc_RNA (1)...(19): siRNA sense strand
uaguaugucuccuggugua

SEQ ID NO: 913741 - RNA, 19 nt, Homo sapiens
  misc_RNA (1)...(19): siRNA sense strand
gcacuagcacucauuuauc

SEQ ID NO: 913742 - RNA, 19 nt, Homo sapiens
  misc_RNA (1)...(19): siRNA sense strand
cagcaacaccuacauaaca

SEQ ID NO: 913743 - RNA, 19 nt, Homo sapiens
  misc_RNA (1)...(19): siRNA sense strand
ggaaauuuggguugaugaa

SEQ ID NO: 913744 - RNA, 19 nt, Homo sapiens
  misc_RNA (1)...(19): siRNA sense strand
ggaaagucccucagucaag

SEQ ID NO: 913745 - RNA, 19 nt, Homo sapiens
  misc_RNA (1)...(19): siRNA sense strand
acucaaagccucaacauca

SEQ ID NO: 913746 - RNA, 19 nt, Homo sapiens
  misc_RNA (1)...(19): siRNA sense strand
ccagucggcucagucauug

SEQ ID NO: 913747 - RNA, 19 nt, Homo sapiens
  misc_RNA (1)...(19): siRNA sense strand
acagacaggugacauuuac

SEQ ID NO: 913748 - RNA, 19 nt, Homo sapiens
  misc_RNA (1)...(19): siRNA sense strand
cugcuggucucaccuggua

SEQ ID NO: 913749 - RNA, 19 nt, Homo sapiens
  misc_RNA (1)...(19): siRNA sense strand
ugaugaagaaggcuuauga

SEQ ID NO: 913750 - RNA, 19 nt, Homo sapiens
  misc_RNA (1)...(19): siRNA sense strand
gucaagcgcaugcgacuuu

SEQ ID NO: 913751 - RNA, 19 nt, Homo sapiens
  misc_RNA (1)...(19): siRNA sense strand
gaucuccgaguucuuauuc

SEQ ID NO: 913752 - RNA, 19 nt, Homo sapiens
  misc_RNA (1)...(19): siRNA sense strand
cccaaugaauuuaggaaug

SEQ ID NO: 913753 - RNA, 19 nt, Homo sapiens
  misc_RNA (1)...(19): siRNA sense strand
guaacagacaggugacauu

SEQ ID NO: 913754 - RNA, 19 nt, Homo sapiens
  misc_RNA (1)...(19): siRNA sense strand
cuaaugaucagcaggcaaa

SEQ ID NO: 913755 - RNA, 19 nt, Homo sapiens
  misc_RNA (1)...(19): siRNA sense strand
gauuauggaugaacguaac

SEQ ID NO: 913756 - RNA, 19 nt, Homo sapiens
  misc_RNA (1)...(19): siRNA sense strand
caugagagccggacaaacu

SEQ ID NO: 913757 - RNA, 19 nt, Homo sapiens
  misc_RNA (1)...(19): siRNA sense strand
caaagauugugugcuguuc

SEQ ID NO: 913758 - RNA, 19 nt, Homo sapiens
  misc_RNA (1)...(19): siRNA sense strand
ccacaacaguuugguguac

SEQ ID NO: 913759 - RNA, 19 nt, Homo sapiens
  misc_RNA (1)...(19): siRNA sense strand
ugaaggaugggcaacauga

SEQ ID NO: 913760 - RNA, 19 nt, Homo sapiens
  misc_RNA (1)...(19): siRNA sense strand
gaggaucaccggaacgaau

SEQ ID NO: 913761 - RNA, 19 nt, Homo sapiens
  misc_RNA (1)...(19): siRNA sense strand
uugagcagcuguagcaguu

SEQ ID NO: 913762 - RNA, 19 nt, Homo sapiens
  misc_RNA (1)...(19): siRNA sense strand
caucugcccucagucaguu

SEQ ID NO: 913763 - RNA, 19 nt, Homo sapiens
  misc_RNA (1)...(19): siRNA sense strand
cgccagcgcucuucaccuu

SEQ ID NO: 913764 - RNA, 19 nt, Homo sapiens
  misc_RNA (1)...(19): siRNA sense strand
caucagccauuucaacaac

SEQ ID NO: 913765 - RNA, 19 nt, Homo sapiens
  misc_RNA (1)...(19): siRNA sense strand
gacaaguacaggaaaauua

SEQ ID NO: 913766 - RNA, 19 nt, Homo sapiens
  misc_RNA (1)...(19): siRNA sense strand
ucauuuaucucagaguuca

SEQ ID NO: 913767 - RNA, 19 nt, Homo sapiens
  misc_RNA (1)...(19): siRNA sense strand
gaggaugucgaccugcuuu

SEQ ID NO: 913768 - RNA, 19 nt, Homo sapiens
  misc_RNA (1)...(19): siRNA sense strand
gcgcugaucaucuucaaca

SEQ ID NO: 913769 - RNA, 19 nt, Homo sapiens
  misc_RNA (1)...(19): siRNA sense strand
acacaucgaccuccaagug

SEQ ID NO: 913770 - RNA, 19 nt, Homo sapiens
  misc_RNA (1)...(19): siRNA sense strand
cgacauggacaaagugcuu

SEQ ID NO: 913771 - RNA, 19 nt, Homo sapiens
  misc_RNA (1)...(19): siRNA sense strand
cacuagcacucauuuaucu

SEQ ID NO: 913772 - RNA, 19 nt, Homo sapiens
  misc_RNA (1)...(19): siRNA sense strand
ggauuauggaugaacguaa

SEQ ID NO: 913773 - RNA, 19 nt, Homo sapiens
  misc_RNA (1)...(19): siRNA sense strand
aagaggaaauuuggguuga

SEQ ID NO: 913774 - RNA, 19 nt, Homo sapiens
  misc_RNA (1)...(19): siRNA sense strand
gacaaagugcuucucaagu

SEQ ID NO: 913775 - RNA, 19 nt, Homo sapiens
  misc_RNA (1)...(19): siRNA sense strand
caucaagucagaaccuguu

SEQ ID NO: 913776 - RNA, 19 nt, Homo sapiens
  misc_RNA (1)...(19): siRNA sense strand
ggacaaggaaugggaggau

SEQ ID NO: 913777 - RNA, 19 nt, Homo sapiens
  misc_RNA (1)...(19): siRNA sense strand
gacaggugacauuuacaaa

SEQ ID NO: 913778 - RNA, 19 nt, Homo sapiens
  misc_RNA (1)...(19): siRNA sense strand
cucaaagccucaacaucaa

SEQ ID NO: 913779 - RNA, 19 nt, Homo sapiens
  misc_RNA (1)...(19): siRNA sense strand
cuacauaacaugccaccau

SEQ ID NO: 913780 - RNA, 19 nt, Homo sapiens
  misc_RNA (1)...(19): siRNA sense strand
aggaaugaauaaccguaaa

SEQ ID NO: 913781 - RNA, 19 nt, Homo sapiens
  misc_RNA (1)...(19): siRNA sense strand
gaggacaaguacaggaaaa

SEQ ID NO: 913782 - RNA, 19 nt, Homo sapiens
  misc_RNA (1)...(19): siRNA sense strand
gaaauuuggguugaugaag

SEQ ID NO: 913783 - RNA, 19 nt, Homo sapiens
  misc_RNA (1)...(19): siRNA sense strand
aauuuggguugaugaagaa

SEQ ID NO: 913784 - RNA, 19 nt, Homo sapiens
  misc_RNA (1)...(19): siRNA sense strand
agauucagauuacgaggau

SEQ ID NO: 913785 - RNA, 19 nt, Homo sapiens
  misc_RNA (1)...(19): siRNA sense strand
caugcgacuuucugaagga

SEQ ID NO: 913786 - RNA, 19 nt, Homo sapiens
  misc_RNA (1)...(19): siRNA sense strand
agacaggugacauuuacaa

SEQ ID NO: 913787 - RNA, 19 nt, Homo sapiens
  misc_RNA (1)...(19): siRNA sense strand
gcugugugacugugagauu

SEQ ID NO: 913788 - RNA, 19 nt, Homo sapiens
  misc_RNA (1)...(19): siRNA sense strand
ggaaugaauaaccguaaac

SEQ ID NO: 913789 - RNA, 19 nt, Homo sapiens
  misc_RNA (1)...(19): siRNA sense strand
acaguuugguguacagcaa

SEQ ID NO: 913790 - RNA, 19 nt, Homo sapiens
  misc_RNA (1)...(19): siRNA sense strand
auucagauuacgaggauua

SEQ ID NO: 913791 - RNA, 19 nt, Homo sapiens
  misc_RNA (1)...(19): siRNA sense strand
gagaggaucaccggaacga

SEQ ID NO: 913792 - RNA, 19 nt, Homo sapiens
  misc_RNA (1)...(19): siRNA sense strand
cagauuacgaggauuaugg

SEQ ID NO: 913793 - RNA, 19 nt, Homo sapiens
  misc_RNA (1)...(19): siRNA sense strand
ggacaaacucagacaucgu

SEQ ID NO: 913794 - RNA, 19 nt, Homo sapiens
  misc_RNA (1)...(19): siRNA sense strand
ggagcgaccgagaggauca

SEQ ID NO: 913795 - RNA, 19 nt, Homo sapiens
  misc_RNA (1)...(19): siRNA sense strand
gcaacaccuacauaacaug

SEQ ID NO: 913796 - RNA, 19 nt, Homo sapiens
  misc_RNA (1)...(19): siRNA sense strand
ucaucucugucuggguuua

SEQ ID NO: 913797 - RNA, 19 nt, Homo sapiens
  misc_RNA (1)...(19): siRNA sense strand
gaguagugcagaccuguca

SEQ ID NO: 913798 - RNA, 19 nt, Homo sapiens
  misc_RNA (1)...(19): siRNA sense strand
uggagacguugagaaagaa

SEQ ID NO: 913799 - RNA, 19 nt, Homo sapiens
  misc_RNA (1)...(19): siRNA sense strand
uaacaccgccagcgcucuu

SEQ ID NO: 913800 - RNA, 19 nt, Homo sapiens
  misc_RNA (1)...(19): siRNA sense strand
ugacauuuacaaagaggaa

SEQ ID NO: 913801 - RNA, 19 nt, Homo sapiens
  misc_RNA (1)...(19): siRNA sense strand
gccucaacaucaagucaga

SEQ ID NO: 913802 - RNA, 19 nt, Homo sapiens
  misc_RNA (1)...(19): siRNA sense strand
aacagcaacaccuacauaa

SEQ ID NO: 913803 - RNA, 19 nt, Homo sapiens
  misc_RNA (1)...(19): siRNA sense strand
ucaccuugguucaguaacu

SEQ ID NO: 913804 - RNA, 19 nt, Homo sapiens
  misc_RNA (1)...(19): siRNA sense strand
gguugaugaagaaggcuua

SEQ ID NO: 913805 - RNA, 19 nt, Homo sapiens
  misc_RNA (1)...(19): siRNA sense strand
gccaccaucugcccucagu

SEQ ID NO: 913806 - RNA, 19 nt, Homo sapiens
  misc_RNA (1)...(19): siRNA sense strand
uaggaaugaauaaccguaa

SEQ ID NO: 913807 - RNA, 19 nt, Homo sapiens
  misc_RNA (1)...(19): siRNA sense strand
aacagacaggugacauuua

SEQ ID NO: 913808 - RNA, 19 nt, Homo sapiens
  misc_RNA (1)...(19): siRNA sense strand
gguaacacagguggucuga

SEQ ID NO: 913809 - RNA, 19 nt, Homo sapiens
  misc_RNA (1)...(19): siRNA sense strand
acaggaaaauuaacgaaga

SEQ ID NO: 913810 - RNA, 19 nt, Homo sapiens
  misc_RNA (1)...(19): siRNA sense strand
uaucucagaguucaaaucu

SEQ ID NO: 913811 - RNA, 19 nt, Homo sapiens
  misc_RNA (1)...(19): siRNA sense strand
gcgcaugcgacuuucugaa

SEQ ID NO: 913812 - RNA, 19 nt, Homo sapiens
  misc_RNA (1)...(19): siRNA sense strand
gcacaaagcuugguuauaa

SEQ ID NO: 913813 - RNA, 19 nt, Homo sapiens
  misc_RNA (1)...(19): siRNA sense strand
gaaaguaggugugaaagaa

SEQ ID NO: 913814 - RNA, 19 nt, Homo sapiens
  misc_RNA (1)...(19): siRNA sense strand
gaaaguaggugugaaagaa

SEQ ID NO: 913815 - RNA, 19 nt, Homo sapiens
  misc_RNA (1)...(19): siRNA sense strand
ccuaagaccugaacuauuu

SEQ ID NO: 913816 - RNA, 19 nt, Homo sapiens
  misc_RNA (1)...(19): siRNA sense strand
gaaagcagauguagaggaa

SEQ ID NO: 913817 - RNA, 19 nt, Homo sapiens
  misc_RNA (1)...(19): siRNA sense strand
gaaguucacagucaauuua

SEQ ID NO: 913818 - RNA, 19 nt, Homo sapiens
  misc_RNA (1)...(19): siRNA sense strand
gaaaaucucucuuccaaaa

SEQ ID NO: 913819 - RNA, 19 nt, Homo sapiens
  misc_RNA (1)...(19): siRNA sense strand
caaagaggaacacaaauua

SEQ ID NO: 913820 - RNA, 19 nt, Homo sapiens
  misc_RNA (1)...(19): siRNA sense strand
gaacuccagugcagaaauu

SEQ ID NO: 913821 - RNA, 19 nt, Homo sapiens
  misc_RNA (1)...(19): siRNA sense strand
ucaagaagcuccaagcaaa

SEQ ID NO: 913822 - RNA, 19 nt, Homo sapiens
  misc_RNA (1)...(19): siRNA sense strand
guaaaugggucuguuauug

SEQ ID NO: 913823 - RNA, 19 nt, Homo sapiens
  misc_RNA (1)...(19): siRNA sense strand
agaaagugcugaugguuua

SEQ ID NO: 913824 - RNA, 19 nt, Homo sapiens
  misc_RNA (1)...(19): siRNA sense strand
gcagaaaugugcaccaaug

SEQ ID NO: 913825 - RNA, 19 nt, Homo sapiens
  misc_RNA (1)...(19): siRNA sense strand
ggaaggaagucaacugaau

SEQ ID NO: 913826 - RNA, 19 nt, Homo sapiens
  misc_RNA (1)...(19): siRNA sense strand
aaagaaauuuccagcguua

SEQ ID NO: 913827 - RNA, 19 nt, Homo sapiens
  misc_RNA (1)...(19): siRNA sense strand
gaaaguggacguagaagaa

SEQ ID NO: 913828 - RNA, 19 nt, Homo sapiens
  misc_RNA (1)...(19): siRNA sense strand
gaaagucucugguaaugca

SEQ ID NO: 913829 - RNA, 19 nt, Homo sapiens
  misc_RNA (1)...(19): siRNA sense strand
gaacagcaacgacaugaaa

SEQ ID NO: 913830 - RNA, 19 nt, Homo sapiens
  misc_RNA (1)...(19): siRNA sense strand
auacagaacucaugaaaga

SEQ ID NO: 913831 - RNA, 19 nt, Homo sapiens
  misc_RNA (1)...(19): siRNA sense strand
gaacacaaauuacaagacu

SEQ ID NO: 913832 - RNA, 19 nt, Homo sapiens
  misc_RNA (1)...(19): siRNA sense strand
caacaaagaggaacacaaa

SEQ ID NO: 913833 - RNA, 19 nt, Homo sapiens
  misc_RNA (1)...(19): siRNA sense strand
gaccugaacuauuugauga

SEQ ID NO: 913834 - RNA, 19 nt, Homo sapiens
  misc_RNA (1)...(19): siRNA sense strand
ggaaagugcccaagccaua

SEQ ID NO: 913835 - RNA, 19 nt, Homo sapiens
  misc_RNA (1)...(19): siRNA sense strand
gaagaaaccaaacccagua

SEQ ID NO: 913836 - RNA, 19 nt, Homo sapiens
  misc_RNA (1)...(19): siRNA sense strand
gaaacgaacaccaucagua

SEQ ID NO: 913837 - RNA, 19 nt, Homo sapiens
  misc_RNA (1)...(19): siRNA sense strand
agaaagacaucaacacauu

SEQ ID NO: 913838 - RNA, 19 nt, Homo sapiens
  misc_RNA (1)...(19): siRNA sense strand
gaaagaaagugcugauggu

SEQ ID NO: 913839 - RNA, 19 nt, Homo sapiens
  misc_RNA (1)...(19): siRNA sense strand
gcugagaacucguaaggaa

SEQ ID NO: 913840 - RNA, 19 nt, Homo sapiens
  misc_RNA (1)...(19): siRNA sense strand
ccaggaagcuuucaacuag

SEQ ID NO: 913841 - RNA, 19 nt, Homo sapiens
  misc_RNA (1)...(19): siRNA sense strand
gaagaaagaguuggaugua

SEQ ID NO: 913842 - RNA, 19 nt, Homo sapiens
  misc_RNA (1)...(19): siRNA sense strand
gcagucaaguucacacaaa

SEQ ID NO: 913843 - RNA, 19 nt, Homo sapiens
  misc_RNA (1)...(19): siRNA sense strand
ggaagaggcccaaucacua

SEQ ID NO: 913844 - RNA, 19 nt, Homo sapiens
  misc_RNA (1)...(19): siRNA sense strand
gagcuugccugauacagaa

SEQ ID NO: 913845 - RNA, 19 nt, Homo sapiens
  misc_RNA (1)...(19): siRNA sense strand
ggaagaucuuucaggaaua

SEQ ID NO: 913846 - RNA, 19 nt, Homo sapiens
  misc_RNA (1)...(19): siRNA sense strand
ggucuuaguucaguugaua

SEQ ID NO: 913847 - RNA, 19 nt, Homo sapiens
  misc_RNA (1)...(19): siRNA sense strand
gcaaaucuccgcaaucaga

SEQ ID NO: 913848 - RNA, 19 nt, Homo sapiens
  misc_RNA (1)...(19): siRNA sense strand
caaaguagccugcaaaucu

SEQ ID NO: 913849 - RNA, 19 nt, Homo sapiens
  misc_RNA (1)...(19): siRNA sense strand
ugacagaccucaagagcuu

SEQ ID NO: 913850 - RNA, 19 nt, Homo sapiens
  misc_RNA (1)...(19): siRNA sense strand
ggacguagaagaagaauuc

SEQ ID NO: 913851 - RNA, 19 nt, Homo sapiens
  misc_RNA (1)...(19): siRNA sense strand
caagacaccuuuggagaaa

SEQ ID NO: 913852 - RNA, 19 nt, Homo sapiens
  misc_RNA (1)...(19): siRNA sense strand
caagagaaguaucaggaaa

SEQ ID NO: 913853 - RNA, 19 nt, Homo sapiens
  misc_RNA (1)...(19): siRNA sense strand
agaaagaguuggauguaaa

SEQ ID NO: 913854 - RNA, 19 nt, Homo sapiens
  misc_RNA (1)...(19): siRNA sense strand
agaccuagcuggcuucaaa

SEQ ID NO: 913855 - RNA, 19 nt, Homo sapiens
  misc_RNA (1)...(19): siRNA sense strand
gaaagcagacguagaggaa

SEQ ID NO: 913856 - RNA, 19 nt, Homo sapiens
  misc_RNA (1)...(19): siRNA sense strand
agaaagacaugaaagcauu

SEQ ID NO: 913857 - RNA, 19 nt, Homo sapiens
  misc_RNA (1)...(19): siRNA sense strand
gaaagcagacguagaggaa

SEQ ID NO: 913858 - RNA, 19 nt, Homo sapiens
  misc_RNA (1)...(19): siRNA sense strand
agacuuggcuggcuugaaa

SEQ ID NO: 913859 - RNA, 19 nt, Homo sapiens
  misc_RNA (1)...(19): siRNA sense strand
gaaagcagacguagaggaa

SEQ ID NO: 913860 - RNA, 19 nt, Homo sapiens
  misc_RNA (1)...(19): siRNA sense strand
ucaagaaugucaaagaaga

SEQ ID NO: 913861 - RNA, 19 nt, Homo sapiens
  misc_RNA (1)...(19): siRNA sense strand
gaaaggagaagcaggaaau

SEQ ID NO: 913862 - RNA, 19 nt, Homo sapiens
  misc_RNA (1)...(19): siRNA sense strand
gaaagcagacacugaagaa

SEQ ID NO: 913863 - RNA, 19 nt, Homo sapiens
  misc_RNA (1)...(19): siRNA sense strand
cgagaaaacuaccaaaaua

SEQ ID NO: 913864 - RNA, 19 nt, Homo sapiens
  misc_RNA (1)...(19): siRNA sense strand
aggaauagcugaaauguuc

SEQ ID NO: 913865 - RNA, 19 nt, Homo sapiens
  misc_RNA (1)...(19): siRNA sense strand
acaaagaccuguauacuac

SEQ ID NO: 913866 - RNA, 19 nt, Homo sapiens
  misc_RNA (1)...(19): siRNA sense strand
gcuacaaacucguaaggaa

SEQ ID NO: 913867 - RNA, 19 nt, Homo sapiens
  misc_RNA (1)...(19): siRNA sense strand
ggaacagccucaaccauca

SEQ ID NO: 913868 - RNA, 19 nt, Homo sapiens
  misc_RNA (1)...(19): siRNA sense strand
caacuuuggugauuccauu

SEQ ID NO: 913869 - RNA, 19 nt, Homo sapiens
  misc_RNA (1)...(19): siRNA sense strand
ggacgcagaagauguaauu

SEQ ID NO: 913870 - RNA, 19 nt, Homo sapiens
  misc_RNA (1)...(19): siRNA sense strand
ggaccagccaggaaauuua

SEQ ID NO: 913871 - RNA, 19 nt, Homo sapiens
  misc_RNA (1)...(19): siRNA sense strand
agaaagacaucaacacguu

SEQ ID NO: 913872 - RNA, 19 nt, Homo sapiens
  misc_RNA (1)...(19): siRNA sense strand
gaagucaacugaauuucca

SEQ ID NO: 913873 - RNA, 19 nt, Homo sapiens
  misc_RNA (1)...(19): siRNA sense strand
gaagaauccuuagcacuca

SEQ ID NO: 913874 - RNA, 19 nt, Homo sapiens
  misc_RNA (1)...(19): siRNA sense strand
guaagagcaugaaagcauu

SEQ ID NO: 913875 - RNA, 19 nt, Homo sapiens
  misc_RNA (1)...(19): siRNA sense strand
gcacacgccuaaaccauca

SEQ ID NO: 913876 - RNA, 19 nt, Homo sapiens
  misc_RNA (1)...(19): siRNA sense strand
caagaacgccuaaggaaga

SEQ ID NO: 913877 - RNA, 19 nt, Homo sapiens
  misc_RNA (1)...(19): siRNA sense strand
gcaaugaagagaucaagaa

SEQ ID NO: 913878 - RNA, 19 nt, Homo sapiens
  misc_RNA (1)...(19): siRNA sense strand
gaagaucuuucaggaauag

SEQ ID NO: 913879 - RNA, 19 nt, Homo sapiens
  misc_RNA (1)...(19): siRNA sense strand
ggaccugguuggcuucaaa

SEQ ID NO: 913880 - RNA, 19 nt, Homo sapiens
  misc_RNA (1)...(19): siRNA sense strand
caagagaagccucaagaaa

SEQ ID NO: 913881 - RNA, 19 nt, Homo sapiens
  misc_RNA (1)...(19): siRNA sense strand
gcacaaagcaauggccuaa

SEQ ID NO: 913882 - RNA, 19 nt, Homo sapiens
  misc_RNA (1)...(19): siRNA sense strand
gaaggaagucaacugaauu

SEQ ID NO: 913883 - RNA, 19 nt, Homo sapiens
  misc_RNA (1)...(19): siRNA sense strand
gaauugaaccugcggaaga

SEQ ID NO: 913884 - RNA, 19 nt, Homo sapiens
  misc_RNA (1)...(19): siRNA sense strand
uagaagaccugguugacuu

SEQ ID NO: 913885 - RNA, 19 nt, Homo sapiens
  misc_RNA (1)...(19): siRNA sense strand
caucaaagcguuuaaggaa

SEQ ID NO: 913886 - RNA, 19 nt, Homo sapiens
  misc_RNA (1)...(19): siRNA sense strand
ggccaaggcucuagaagau

SEQ ID NO: 913887 - RNA, 19 nt, Homo sapiens
  misc_RNA (1)...(19): siRNA sense strand
gccacaaacuccuaaagaa

SEQ ID NO: 913888 - RNA, 19 nt, Homo sapiens
  misc_RNA (1)...(19): siRNA sense strand
gagaaagacaucaucauau

SEQ ID NO: 913889 - RNA, 19 nt, Homo sapiens
  misc_RNA (1)...(19): siRNA sense strand
gaagcuaccuguggaaagu

SEQ ID NO: 913890 - RNA, 19 nt, Homo sapiens
  misc_RNA (1)...(19): siRNA sense strand
cuacagaguucaggaauau

SEQ ID NO: 913891 - RNA, 19 nt, Homo sapiens
  misc_RNA (1)...(19): siRNA sense strand
cagcaagccugagaaauug

SEQ ID NO: 913892 - RNA, 19 nt, Homo sapiens
  misc_RNA (1)...(19): siRNA sense strand
cuucaaggcuggugauaaa

SEQ ID NO: 913893 - RNA, 19 nt, Homo sapiens
  misc_RNA (1)...(19): siRNA sense strand
gaucuagcuucucuucuga

SEQ ID NO: 913894 - RNA, 19 nt, Homo sapiens
  misc_RNA (1)...(19): siRNA sense strand
caaaucaucaccagaacua

SEQ ID NO: 913895 - RNA, 19 nt, Homo sapiens
  misc_RNA (1)...(19): siRNA sense strand
gaaaagggauauaguggaa

SEQ ID NO: 913896 - RNA, 19 nt, Homo sapiens
  misc_RNA (1)...(19): siRNA sense strand
gaaagacaucaacacauuu

SEQ ID NO: 913897 - RNA, 19 nt, Homo sapiens
  misc_RNA (1)...(19): siRNA sense strand
gaaagaagagcuccuagca

SEQ ID NO: 913898 - RNA, 19 nt, Homo sapiens
  misc_RNA (1)...(19): siRNA sense strand
uaacuggaaugaagaagug

SEQ ID NO: 913899 - RNA, 19 nt, Homo sapiens
  misc_RNA (1)...(19): siRNA sense strand
gaaagaagagcuccuagca

SEQ ID NO: 913900 - RNA, 19 nt, Homo sapiens
  misc_RNA (1)...(19): siRNA sense strand
gaaaguaagagugaagaaa

SEQ ID NO: 913901 - RNA, 19 nt, Homo sapiens
  misc_RNA (1)...(19): siRNA sense strand
gaagaccccuguacaauau

SEQ ID NO: 913902 - RNA, 19 nt, Homo sapiens
  misc_RNA (1)...(19): siRNA sense strand
gaaagugggcgugaaagaa

SEQ ID NO: 913903 - RNA, 19 nt, Homo sapiens
  misc_RNA (1)...(19): siRNA sense strand
gaacaccagcuaaaguuga

SEQ ID NO: 913904 - RNA, 19 nt, Homo sapiens
  misc_RNA (1)...(19): siRNA sense strand
gaaauccucagguacauau

SEQ ID NO: 913905 - RNA, 19 nt, Homo sapiens
  misc_RNA (1)...(19): siRNA sense strand
ggacagugaagauauuuga

SEQ ID NO: 913906 - RNA, 19 nt, Homo sapiens
  misc_RNA (1)...(19): siRNA sense strand
gaagcaacgugcaaagaag

SEQ ID NO: 913907 - RNA, 19 nt, Homo sapiens
  misc_RNA (1)...(19): siRNA sense strand
aaauuuaccuggcagcaaa

SEQ ID NO: 913908 - RNA, 19 nt, Homo sapiens
  misc_RNA (1)...(19): siRNA sense strand
gaagagcuccuagcaguug

SEQ ID NO: 913909 - RNA, 19 nt, Homo sapiens
  misc_RNA (1)...(19): siRNA sense strand
acaaagcaauggccuaaga

SEQ ID NO: 913910 - RNA, 19 nt, Homo sapiens
  misc_RNA (1)...(19): siRNA sense strand
gaagagaaucugugaaucu

SEQ ID NO: 913911 - RNA, 19 nt, Homo sapiens
  misc_RNA (1)...(19): siRNA sense strand
ggaaacccauaccuagaga

SEQ ID NO: 913912 - RNA, 19 nt, Homo sapiens
  misc_RNA (1)...(19): siRNA sense strand
gcacaguacucuugguuua

SEQ ID NO: 913913 - RNA, 19 nt, Homo sapiens
  misc_RNA (1)...(19): siRNA sense strand
agucagaucuugugaauga

SEQ ID NO: 913914 - RNA, 19 nt, Homo sapiens
  misc_RNA (1)...(19): siRNA sense strand
gcucacagccucacuucua

SEQ ID NO: 913915 - RNA, 19 nt, Homo sapiens
  misc_RNA (1)...(19): siRNA sense strand
caacaugacccucacucua

SEQ ID NO: 913916 - RNA, 19 nt, Homo sapiens
  misc_RNA (1)...(19): siRNA sense strand
aaagucagaucuugugaau

SEQ ID NO: 913917 - RNA, 19 nt, Homo sapiens
  misc_RNA (1)...(19): siRNA sense strand
gaacgaugcaggauccuau

SEQ ID NO: 913918 - RNA, 19 nt, Homo sapiens
  misc_RNA (1)...(19): siRNA sense strand
uggcaacagucuaauugua

SEQ ID NO: 913919 - RNA, 19 nt, Homo sapiens
  misc_RNA (1)...(19): siRNA sense strand
cugccaagcucacuauuga

SEQ ID NO: 913920 - RNA, 19 nt, Homo sapiens
  misc_RNA (1)...(19): siRNA sense strand
gguuacagcugguacaaag

SEQ ID NO: 913921 - RNA, 19 nt, Homo sapiens
  misc_RNA (1)...(19): siRNA sense strand
gauggcaacagucuaauug

SEQ ID NO: 913922 - RNA, 19 nt, Homo sapiens
  misc_RNA (1)...(19): siRNA sense strand
uguaggauauguaauagga

SEQ ID NO: 913923 - RNA, 19 nt, Homo sapiens
  misc_RNA (1)...(19): siRNA sense strand
gaugcaggauccuaugaau

SEQ ID NO: 913924 - RNA, 19 nt, Homo sapiens
  misc_RNA (1)...(19): siRNA sense strand
ccggacaguuccauguaua

SEQ ID NO: 913925 - RNA, 19 nt, Homo sapiens
  misc_RNA (1)...(19): siRNA sense strand
ggaccacagucacgaugau

SEQ ID NO: 913926 - RNA, 19 nt, Homo sapiens
  misc_RNA (1)...(19): siRNA sense strand
uaacccaccugcacaguac

SEQ ID NO: 913927 - RNA, 19 nt, Homo sapiens
  misc_RNA (1)...(19): siRNA sense strand
cagggucgcucugauauag

SEQ ID NO: 913928 - RNA, 19 nt, Homo sapiens
  misc_RNA (1)...(19): siRNA sense strand
cccagaaucguauugguua

SEQ ID NO: 913929 - RNA, 19 nt, Homo sapiens
  misc_RNA (1)...(19): siRNA sense strand
aauaggaacucaacaagcu

SEQ ID NO: 913930 - RNA, 19 nt, Homo sapiens
  misc_RNA (1)...(19): siRNA sense strand
gucauaaagucagaucuug

SEQ ID NO: 913931 - RNA, 19 nt, Homo sapiens
  misc_RNA (1)...(19): siRNA sense strand
cagccucacuucuaaccuu

SEQ ID NO: 913932 - RNA, 19 nt, Homo sapiens
  misc_RNA (1)...(19): siRNA sense strand
ggccagggucgcucugaua

SEQ ID NO: 913933 - RNA, 19 nt, Homo sapiens
  misc_RNA (1)...(19): siRNA sense strand
gaucacagucucuggaagu

SEQ ID NO: 913934 - RNA, 19 nt, Homo sapiens
  misc_RNA (1)...(19): siRNA sense strand
ggauggcaacagucuaauu

SEQ ID NO: 913935 - RNA, 19 nt, Homo sapiens
  misc_RNA (1)...(19): siRNA sense strand
gugccaagcccauaacuca

SEQ ID NO: 913936 - RNA, 19 nt, Homo sapiens
  misc_RNA (1)...(19): siRNA sense strand
guggauggcaacagucuaa

SEQ ID NO: 913937 - RNA, 19 nt, Homo sapiens
  misc_RNA (1)...(19): siRNA sense strand
guaauaggaacucaacaag

SEQ ID NO: 913938 - RNA, 19 nt, Homo sapiens
  misc_RNA (1)...(19): siRNA sense strand
cauaaagucagaucuugug

SEQ ID NO: 913939 - RNA, 19 nt, Homo sapiens
  misc_RNA (1)...(19): siRNA sense strand
acagucuaauuguaggaua

SEQ ID NO: 913940 - RNA, 19 nt, Homo sapiens
  misc_RNA (1)...(19): siRNA sense strand
ggcugcagcuguccaaugg

SEQ ID NO: 913941 - RNA, 19 nt, Homo sapiens
  misc_RNA (1)...(19): siRNA sense strand
gccaagcucacuauugaau

SEQ ID NO: 913942 - RNA, 19 nt, Homo sapiens
  misc_RNA (1)...(19): siRNA sense strand
gauauguaauaggaacuca

SEQ ID NO: 913943 - RNA, 19 nt, Homo sapiens
  misc_RNA (1)...(19): siRNA sense strand
aagaguggauggcaacagu

SEQ ID NO: 913944 - RNA, 19 nt, Homo sapiens
  misc_RNA (1)...(19): siRNA sense strand
cucacagccucacuucuaa

SEQ ID NO: 913945 - RNA, 19 nt, Homo sapiens
  misc_RNA (1)...(19): siRNA sense strand
gcuguccaauggcaacaug

SEQ ID NO: 913946 - RNA, 19 nt, Homo sapiens
  misc_RNA (1)...(19): siRNA sense strand
agaagcaaccggacaguuc

SEQ ID NO: 913947 - RNA, 19 nt, Homo sapiens
  misc_RNA (1)...(19): siRNA sense strand
uaaagucagaucuugugaa

SEQ ID NO: 913948 - RNA, 19 nt, Homo sapiens
  misc_RNA (1)...(19): siRNA sense strand
caucccugcugauccagaa

SEQ ID NO: 913949 - RNA, 19 nt, Homo sapiens
  misc_RNA (1)...(19): siRNA sense strand
gcauacaguggucgagaga

SEQ ID NO: 913950 - RNA, 19 nt, Homo sapiens
  misc_RNA (1)...(19): siRNA sense strand
ggcaacagucuaauuguag

SEQ ID NO: 913951 - RNA, 19 nt, Homo sapiens
  misc_RNA (1)...(19): siRNA sense strand
cagucuaauuguaggauau

SEQ ID NO: 913952 - RNA, 19 nt, Homo sapiens
  misc_RNA (1)...(19): siRNA sense strand
gcaggauccuaugaaugug

SEQ ID NO: 913953 - RNA, 19 nt, Homo sapiens
  misc_RNA (1)...(19): siRNA sense strand
caaccggacaguuccaugu

SEQ ID NO: 913954 - RNA, 19 nt, Homo sapiens
  misc_RNA (1)...(19): siRNA sense strand
caagcucacuauugaaucc

SEQ ID NO: 913955 - RNA, 19 nt, Homo sapiens
  misc_RNA (1)...(19): siRNA sense strand
acaguacucuugguuuauc

SEQ ID NO: 913956 - RNA, 19 nt, Homo sapiens
  misc_RNA (1)...(19): siRNA sense strand
ccagggucgcucugauaua

SEQ ID NO: 913957 - RNA, 19 nt, Homo sapiens
  misc_RNA (1)...(19): siRNA sense strand
uguaauaggaacucaacaa

SEQ ID NO: 913958 - RNA, 19 nt, Homo sapiens
  misc_RNA (1)...(19): siRNA sense strand
cacccugaauguccucuau

SEQ ID NO: 913959 - RNA, 19 nt, Homo sapiens
  misc_RNA (1)...(19): siRNA sense strand
cuaugaaugugaaauacag

SEQ ID NO: 913960 - RNA, 19 nt, Homo sapiens
  misc_RNA (1)...(19): siRNA sense strand
ugcaggauccuaugaaugu

SEQ ID NO: 913961 - RNA, 19 nt, Homo sapiens
  misc_RNA (1)...(19): siRNA sense strand
ggaacgaugcaggauccua

SEQ ID NO: 913962 - RNA, 19 nt, Homo sapiens
  misc_RNA (1)...(19): siRNA sense strand
uccagaacgucacccagaa

SEQ ID NO: 913963 - RNA, 19 nt, Homo sapiens
  misc_RNA (1)...(19): siRNA sense strand
auacaguggucgagagaca

SEQ ID NO: 913964 - RNA, 19 nt, Homo sapiens
  misc_RNA (1)...(19): siRNA sense strand
ccacugccaagcucacuau

SEQ ID NO: 913965 - RNA, 19 nt, Homo sapiens
  misc_RNA (1)...(19): siRNA sense strand
ugaauaauagcggauccua

SEQ ID NO: 913966 - RNA, 19 nt, Homo sapiens
  misc_RNA (1)...(19): siRNA sense strand
acucuugguuuaucaaugg

SEQ ID NO: 913967 - RNA, 19 nt, Homo sapiens
  misc_RNA (1)...(19): siRNA sense strand
caaaggcgaaagaguggau

SEQ ID NO: 913968 - RNA, 19 nt, Homo sapiens
  misc_RNA (1)...(19): siRNA sense strand
aaugggacguuccagcaau

SEQ ID NO: 913969 - RNA, 19 nt, Homo sapiens
  misc_RNA (1)...(19): siRNA sense strand
cuaacccaccugcacagua

SEQ ID NO: 913970 - RNA, 19 nt, Homo sapiens
  misc_RNA (1)...(19): siRNA sense strand
uacaagucauaaagucaga

SEQ ID NO: 913971 - RNA, 19 nt, Homo sapiens
  misc_RNA (1)...(19): siRNA sense strand
aaugacacaggauucuaua

SEQ ID NO: 913972 - RNA, 19 nt, Homo sapiens
  misc_RNA (1)...(19): siRNA sense strand
gagacaauauaccccaaug

SEQ ID NO: 913973 - RNA, 19 nt, Homo sapiens
  misc_RNA (1)...(19): siRNA sense strand
gccagggucgcucugauau

SEQ ID NO: 913974 - RNA, 19 nt, Homo sapiens
  misc_RNA (1)...(19): siRNA sense strand
gcaacaugacccucacucu

SEQ ID NO: 913975 - RNA, 19 nt, Homo sapiens
  misc_RNA (1)...(19): siRNA sense strand
gaagaagcaaccggacagu

SEQ ID NO: 913976 - RNA, 19 nt, Homo sapiens
  misc_RNA (1)...(19): siRNA sense strand
cagaacgucacccagaaug

SEQ ID NO: 913977 - RNA, 19 nt, Homo sapiens
  misc_RNA (1)...(19): siRNA sense strand
caccugcacaguacucuug

SEQ ID NO: 913978 - RNA, 19 nt, Homo sapiens
  misc_RNA (1)...(19): siRNA sense strand
aggauucuauacccuacaa

SEQ ID NO: 913979 - RNA, 19 nt, Homo sapiens
  misc_RNA (1)...(19): siRNA sense strand
caaugggacguuccagcaa

SEQ ID NO: 913980 - RNA, 19 nt, Homo sapiens
  misc_RNA (1)...(19): siRNA sense strand
caacagucuaauuguagga

SEQ ID NO: 913981 - RNA, 19 nt, Homo sapiens
  misc_RNA (1)...(19): siRNA sense strand
gaaagaguggauggcaaca

SEQ ID NO: 913982 - RNA, 19 nt, Homo sapiens
  misc_RNA (1)...(19): siRNA sense strand
caggauccuaugaauguga

SEQ ID NO: 913983 - RNA, 19 nt, Homo sapiens
  misc_RNA (1)...(19): siRNA sense strand
gauucuauacccuacaagu

SEQ ID NO: 913984 - RNA, 19 nt, Homo sapiens
  misc_RNA (1)...(19): siRNA sense strand
ccagaacgucacccagaau

SEQ ID NO: 913985 - RNA, 19 nt, Homo sapiens
  misc_RNA (1)...(19): siRNA sense strand
ccagaaucguauugguuac

SEQ ID NO: 913986 - RNA, 19 nt, Homo sapiens
  misc_RNA (1)...(19): siRNA sense strand
ggacaugacugcccaauuu

SEQ ID NO: 913987 - RNA, 19 nt, Homo sapiens
  misc_RNA (1)...(19): siRNA sense strand
ccaaacaguucaccuauua

SEQ ID NO: 913988 - RNA, 19 nt, Homo sapiens
  misc_RNA (1)...(19): siRNA sense strand
gcacagaggugaaggaaga

SEQ ID NO: 913989 - RNA, 19 nt, Homo sapiens
  misc_RNA (1)...(19): siRNA sense strand
ggacgugucugauuccaaa

SEQ ID NO: 913990 - RNA, 19 nt, Homo sapiens
  misc_RNA (1)...(19): siRNA sense strand
gcagagaggcuuccgauuu

SEQ ID NO: 913991 - RNA, 19 nt, Homo sapiens
  misc_RNA (1)...(19): siRNA sense strand
caucaaaccugaagauuuc

SEQ ID NO: 913992 - RNA, 19 nt, Homo sapiens
  misc_RNA (1)...(19): siRNA sense strand
gugaagaccuugcugcuaa

SEQ ID NO: 913993 - RNA, 19 nt, Homo sapiens
  misc_RNA (1)...(19): siRNA sense strand
ccaaagaacugaagaaggu

SEQ ID NO: 913994 - RNA, 19 nt, Homo sapiens
  misc_RNA (1)...(19): siRNA sense strand
gcagaaagaugacauugag

SEQ ID NO: 913995 - RNA, 19 nt, Homo sapiens
  misc_RNA (1)...(19): siRNA sense strand
ggacuucucucccacagau

SEQ ID NO: 913996 - RNA, 19 nt, Homo sapiens
  misc_RNA (1)...(19): siRNA sense strand
aaauugaacuccuccauug

SEQ ID NO: 913997 - RNA, 19 nt, Homo sapiens
  misc_RNA (1)...(19): siRNA sense strand
gcaucaaaccugaagauuu

SEQ ID NO: 913998 - RNA, 19 nt, Homo sapiens
  misc_RNA (1)...(19): siRNA sense strand
gcagcgagcucgagaguac

SEQ ID NO: 913999 - RNA, 19 nt, Homo sapiens
  misc_RNA (1)...(19): siRNA sense strand
cagagaggcuuccgauuuc

SEQ ID NO: 914000 - RNA, 19 nt, Homo sapiens
  misc_RNA (1)...(19): siRNA sense strand
ggugauggaucugaguaua

SEQ ID NO: 914001 - RNA, 19 nt, Homo sapiens
  misc_RNA (1)...(19): siRNA sense strand
ugaagaaggugauggaucu

SEQ ID NO: 914002 - RNA, 19 nt, Homo sapiens
  misc_RNA (1)...(19): siRNA sense strand
cgugaacgcucgcaccuuu

SEQ ID NO: 914003 - RNA, 19 nt, Homo sapiens
  misc_RNA (1)...(19): siRNA sense strand
ggguggagaugaaguuuau

SEQ ID NO: 914004 - RNA, 19 nt, Homo sapiens
  misc_RNA (1)...(19): siRNA sense strand
gaugaaguuuaucugcuuu

SEQ ID NO: 914005 - RNA, 19 nt, Homo sapiens
  misc_RNA (1)...(19): siRNA sense strand
gugacaaggugcagaaaga

SEQ ID NO: 914006 - RNA, 19 nt, Homo sapiens
  misc_RNA (1)...(19): siRNA sense strand
gcauaugccugacuuugag

SEQ ID NO: 914007 - RNA, 19 nt, Homo sapiens
  misc_RNA (1)...(19): siRNA sense strand
aaguuuaucugcuuuguga

SEQ ID NO: 914008 - RNA, 19 nt, Homo sapiens
  misc_RNA (1)...(19): siRNA sense strand
gaaagaugacauugagguu

SEQ ID NO: 914009 - RNA, 19 nt, Homo sapiens
  misc_RNA (1)...(19): siRNA sense strand
gcaagaggccaaagaacug

SEQ ID NO: 914010 - RNA, 19 nt, Homo sapiens
  misc_RNA (1)...(19): siRNA sense strand
gcuaaaugcugcucagaac

SEQ ID NO: 914011 - RNA, 19 nt, Homo sapiens
  misc_RNA (1)...(19): siRNA sense strand
gcccauccaugauagcaaa

SEQ ID NO: 914012 - RNA, 19 nt, Homo sapiens
  misc_RNA (1)...(19): siRNA sense strand
gacaugacugcccaauuua

SEQ ID NO: 914013 - RNA, 19 nt, Homo sapiens
  misc_RNA (1)...(19): siRNA sense strand
caaauugaacuccuccauu

SEQ ID NO: 914014 - RNA, 19 nt, Homo sapiens
  misc_RNA (1)...(19): siRNA sense strand
cgaacagccuugcaucuag

SEQ ID NO: 914015 - RNA, 19 nt, Homo sapiens
  misc_RNA (1)...(19): siRNA sense strand
gcgcuucucugccuuccuu

SEQ ID NO: 914016 - RNA, 19 nt, Homo sapiens
  misc_RNA (1)...(19): siRNA sense strand
ggagcaagaggccaaagaa

SEQ ID NO: 914017 - RNA, 19 nt, Homo sapiens
  misc_RNA (1)...(19): siRNA sense strand
guagacacguaccgacaga

SEQ ID NO: 914018 - RNA, 19 nt, Homo sapiens
  misc_RNA (1)...(19): siRNA sense strand
ggaacagccuaagcagaga

SEQ ID NO: 914019 - RNA, 19 nt, Homo sapiens
  misc_RNA (1)...(19): siRNA sense strand
uaaacaguaugccauugug

SEQ ID NO: 914020 - RNA, 19 nt, Homo sapiens
  misc_RNA (1)...(19): siRNA sense strand
gaaggcuggugcugacauc

SEQ ID NO: 914021 - RNA, 19 nt, Homo sapiens
  misc_RNA (1)...(19): siRNA sense strand
cagaugugcauaaacagua

SEQ ID NO: 914022 - RNA, 19 nt, Homo sapiens
  misc_RNA (1)...(19): siRNA sense strand
ugaagaccuugcugcuaaa

SEQ ID NO: 914023 - RNA, 19 nt, Homo sapiens
  misc_RNA (1)...(19): siRNA sense strand
gggcagaccagugucauug

SEQ ID NO: 914024 - RNA, 19 nt, Homo sapiens
  misc_RNA (1)...(19): siRNA sense strand
gcagaccagugucauugag

SEQ ID NO: 914025 - RNA, 19 nt, Homo sapiens
  misc_RNA (1)...(19): siRNA sense strand
caaccuggguguccugcau

SEQ ID NO: 914026 - RNA, 19 nt, Homo sapiens
  misc_RNA (1)...(19): siRNA sense strand
gaaagaccuaucccacugu

SEQ ID NO: 914027 - RNA, 19 nt, Homo sapiens
  misc_RNA (1)...(19): siRNA sense strand
ugacuaagaagaacaugau

SEQ ID NO: 914028 - RNA, 19 nt, Homo sapiens
  misc_RNA (1)...(19): siRNA sense strand
gagaaggacacccgaagca

SEQ ID NO: 914029 - RNA, 19 nt, Homo sapiens
  misc_RNA (1)...(19): siRNA sense strand
ggacgagaacggagacaca

SEQ ID NO: 914030 - RNA, 19 nt, Homo sapiens
  misc_RNA (1)...(19): siRNA sense strand
cuaugaggaugaugagaau

SEQ ID NO: 914031 - RNA, 19 nt, Homo sapiens
  misc_RNA (1)...(19): siRNA sense strand
cugaagauuucucgaaugg

SEQ ID NO: 914032 - RNA, 19 nt, Homo sapiens
  misc_RNA (1)...(19): siRNA sense strand
ggaucggcauggagacuca

SEQ ID NO: 914033 - RNA, 19 nt, Homo sapiens
  misc_RNA (1)...(19): siRNA sense strand
ucauugagcagauagucua

SEQ ID NO: 914034 - RNA, 19 nt, Homo sapiens
  misc_RNA (1)...(19): siRNA sense strand
gaagauugagcggccugua

SEQ ID NO: 914035 - RNA, 19 nt, Homo sapiens
  misc_RNA (1)...(19): siRNA sense strand
acauugagguucgguucua

SEQ ID NO: 914036 - RNA, 19 nt, Homo sapiens
  misc_RNA (1)...(19): siRNA sense strand
uaucacaagaugaagauug

SEQ ID NO: 914037 - RNA, 19 nt, Homo sapiens
  misc_RNA (1)...(19): siRNA sense strand
gcagccugguagacacgua

SEQ ID NO: 914038 - RNA, 19 nt, Homo sapiens
  misc_RNA (1)...(19): siRNA sense strand
acaaggugcagaaagauga

SEQ ID NO: 914039 - RNA, 19 nt, Homo sapiens
  misc_RNA (1)...(19): siRNA sense strand
uccaaacaguucaccuauu

SEQ ID NO: 914040 - RNA, 19 nt, Homo sapiens
  misc_RNA (1)...(19): siRNA sense strand
gaauggauggcaggccuuu

SEQ ID NO: 914041 - RNA, 19 nt, Homo sapiens
  misc_RNA (1)...(19): siRNA sense strand
ccacugucaagaucuguaa

SEQ ID NO: 914042 - RNA, 19 nt, Homo sapiens
  misc_RNA (1)...(19): siRNA sense strand
ggucuggaugguauuauug

SEQ ID NO: 914043 - RNA, 19 nt, Homo sapiens
  misc_RNA (1)...(19): siRNA sense strand
agacgaguguggugagcuu

SEQ ID NO: 914044 - RNA, 19 nt, Homo sapiens
  misc_RNA (1)...(19): siRNA sense strand
ugacggcgcaggacgagaa

SEQ ID NO: 914045 - RNA, 19 nt, Homo sapiens
  misc_RNA (1)...(19): siRNA sense strand
ugauggaucugaguauagu

SEQ ID NO: 914046 - RNA, 19 nt, Homo sapiens
  misc_RNA (1)...(19): siRNA sense strand
ccugaagauuucucgaaug

SEQ ID NO: 914047 - RNA, 19 nt, Homo sapiens
  misc_RNA (1)...(19): siRNA sense strand
ggugaagaccuugcugcua

SEQ ID NO: 914048 - RNA, 19 nt, Homo sapiens
  misc_RNA (1)...(19): siRNA sense strand
caagaggccaaagaacuga

SEQ ID NO: 914049 - RNA, 19 nt, Homo sapiens
  misc_RNA (1)...(19): siRNA sense strand
agaccuugcugcuaaaugc

SEQ ID NO: 914050 - RNA, 19 nt, Homo sapiens
  misc_RNA (1)...(19): siRNA sense strand
cugaagggccugagaagga

SEQ ID NO: 914051 - RNA, 19 nt, Homo sapiens
  misc_RNA (1)...(19): siRNA sense strand
gaaguuuaucugcuuugug

SEQ ID NO: 914052 - RNA, 19 nt, Homo sapiens
  misc_RNA (1)...(19): siRNA sense strand
ccucaguugggacaaauaa

SEQ ID NO: 914053 - RNA, 19 nt, Homo sapiens
  misc_RNA (1)...(19): siRNA sense strand
gacaaggugcagaaagaug

SEQ ID NO: 914054 - RNA, 19 nt, Homo sapiens
  misc_RNA (1)...(19): siRNA sense strand
agcgggagcuggagcaaga

SEQ ID NO: 914055 - RNA, 19 nt, Homo sapiens
  misc_RNA (1)...(19): siRNA sense strand
aucacaagaugaagauuga

SEQ ID NO: 914056 - RNA, 19 nt, Homo sapiens
  misc_RNA (1)...(19): siRNA sense strand
ucuaugaggaugaugagaa

SEQ ID NO: 914057 - RNA, 19 nt, Homo sapiens
  misc_RNA (1)...(19): siRNA sense strand
gggcaucaaaccugaagau

SEQ ID NO: 914058 - RNA, 19 nt, Homo sapiens
  misc_RNA (1)...(19): siRNA sense strand
ugacugcccaauuuaacaa

SEQ ID NO: 914059 - RNA, 19 nt, Homo sapiens
  misc_RNA (1)...(19): siRNA sense strand
ugauacagcucugcagaac

SEQ ID NO: 914060 - RNA, 19 nt, Homo sapiens
  misc_RNA (1)...(19): siRNA sense strand
gcugacauccaugcugaaa

SEQ ID NO: 914061 - RNA, 19 nt, Homo sapiens
  misc_RNA (1)...(19): siRNA sense strand
ucacccgccuccuucugaa

SEQ ID NO: 914062 - RNA, 19 nt, Homo sapiens
  misc_RNA (1)...(19): siRNA sense strand
aagauugagcggccuguaa

SEQ ID NO: 914063 - RNA, 19 nt, Homo sapiens
  misc_RNA (1)...(19): siRNA sense strand
ugaaguuuaucugcuuugu

SEQ ID NO: 914064 - RNA, 19 nt, Homo sapiens
  misc_RNA (1)...(19): siRNA sense strand
agaugugcauaaacaguau

SEQ ID NO: 914065 - RNA, 19 nt, Homo sapiens
  misc_RNA (1)...(19): siRNA sense strand
ccacugcaccuagccauca

SEQ ID NO: 914066 - RNA, 19 nt, Homo sapiens
  misc_RNA (1)...(19): siRNA sense strand
gagcccuacucgacuacug

SEQ ID NO: 914067 - RNA, 19 nt, Homo sapiens
  misc_RNA (1)...(19): siRNA sense strand
gaggggacgugucugauuc

SEQ ID NO: 914068 - RNA, 19 nt, Homo sapiens
  misc_RNA (1)...(19): siRNA sense strand
gcaugugacuaagaagaac

SEQ ID NO: 914069 - RNA, 19 nt, Homo sapiens
  misc_RNA (1)...(19): siRNA sense strand
ccagugucauugagcagau

SEQ ID NO: 914070 - RNA, 19 nt, Homo sapiens
  misc_RNA (1)...(19): siRNA sense strand
ucccagcccauccaugaua

SEQ ID NO: 914071 - RNA, 19 nt, Homo sapiens
  misc_RNA (1)...(19): siRNA sense strand
acaugacugcccaauuuaa

SEQ ID NO: 914072 - RNA, 19 nt, Homo sapiens
  misc_RNA (1)...(19): siRNA sense strand
auacagcucugcagaaccu

SEQ ID NO: 914073 - RNA, 19 nt, Homo sapiens
  misc_RNA (1)...(19): siRNA sense strand
cgagggaccagccaagauc

SEQ ID NO: 914074 - RNA, 19 nt, Homo sapiens
  misc_RNA (1)...(19): siRNA sense strand
ugacuuugagggacuguau

SEQ ID NO: 914075 - RNA, 19 nt, Homo sapiens
  misc_RNA (1)...(19): siRNA sense strand
cagugucauugagcagaua

SEQ ID NO: 914076 - RNA, 19 nt, Homo sapiens
  misc_RNA (1)...(19): siRNA sense strand
cuauuacccucugguggaa

SEQ ID NO: 914077 - RNA, 19 nt, Homo sapiens
  misc_RNA (1)...(19): siRNA sense strand
gaaggugauggaucugagu

SEQ ID NO: 914078 - RNA, 19 nt, Homo sapiens
  misc_RNA (1)...(19): siRNA sense strand
gaagaccuugcugcuaaau

SEQ ID NO: 914079 - RNA, 19 nt, Homo sapiens
  misc_RNA (1)...(19): siRNA sense strand
gugauacagcucugcagaa

SEQ ID NO: 914080 - RNA, 19 nt, Homo sapiens
  misc_RNA (1)...(19): siRNA sense strand
cauccaugauagcaaaucu

SEQ ID NO: 914081 - RNA, 19 nt, Homo sapiens
  misc_RNA (1)...(19): siRNA sense strand
acgaacagccuugcaucua

SEQ ID NO: 914082 - RNA, 19 nt, Homo sapiens
  misc_RNA (1)...(19): siRNA sense strand
ggcuuccgauuucgauaug

SEQ ID NO: 914083 - RNA, 19 nt, Homo sapiens
  misc_RNA (1)...(19): siRNA sense strand
gagcaagaggccaaagaac

SEQ ID NO: 914084 - RNA, 19 nt, Homo sapiens
  misc_RNA (1)...(19): siRNA sense strand
agaccuaucccacugucaa

SEQ ID NO: 914085 - RNA, 19 nt, Homo sapiens
  misc_RNA (1)...(19): siRNA sense strand
agacacaccacugcaccua

SEQ ID NO: 914086 - RNA, 19 nt, Homo sapiens
  misc_RNA (1)...(19): siRNA sense strand
caacaaagcacaacccuua

SEQ ID NO: 914087 - RNA, 19 nt, Homo sapiens
  misc_RNA (1)...(19): siRNA sense strand
gaagauacauccacagaga

SEQ ID NO: 914088 - RNA, 19 nt, Homo sapiens
  misc_RNA (1)...(19): siRNA sense strand
gcacaacccuuaacuuaug

SEQ ID NO: 914089 - RNA, 19 nt, Homo sapiens
  misc_RNA (1)...(19): siRNA sense strand
gcaaaugcuuggaaaguaa

SEQ ID NO: 914090 - RNA, 19 nt, Homo sapiens
  misc_RNA (1)...(19): siRNA sense strand
gagauaacccuuuacaaua

SEQ ID NO: 914091 - RNA, 19 nt, Homo sapiens
  misc_RNA (1)...(19): siRNA sense strand
gcagaaacuugucuacauu

SEQ ID NO: 914092 - RNA, 19 nt, Homo sapiens
  misc_RNA (1)...(19): siRNA sense strand
ggauuuaccucaagcuuau

SEQ ID NO: 914093 - RNA, 19 nt, Homo sapiens
  misc_RNA (1)...(19): siRNA sense strand
gaacaugucugcugcuaac

SEQ ID NO: 914094 - RNA, 19 nt, Homo sapiens
  misc_RNA (1)...(19): siRNA sense strand
gaacaaaggaaacaacguu

SEQ ID NO: 914095 - RNA, 19 nt, Homo sapiens
  misc_RNA (1)...(19): siRNA sense strand
caacaugcccuccaaacua

SEQ ID NO: 914096 - RNA, 19 nt, Homo sapiens
  misc_RNA (1)...(19): siRNA sense strand
gcuuaucaguggaaucuua

SEQ ID NO: 914097 - RNA, 19 nt, Homo sapiens
  misc_RNA (1)...(19): siRNA sense strand
ccacagagacuaucaauuc

SEQ ID NO: 914098 - RNA, 19 nt, Homo sapiens
  misc_RNA (1)...(19): siRNA sense strand
ugacaaaucucacacaucu

SEQ ID NO: 914099 - RNA, 19 nt, Homo sapiens
  misc_RNA (1)...(19): siRNA sense strand
ggacugcaagagaauauua

SEQ ID NO: 914100 - RNA, 19 nt, Homo sapiens
  misc_RNA (1)...(19): siRNA sense strand
gaagagacaaccacaaaug

SEQ ID NO: 914101 - RNA, 19 nt, Homo sapiens
  misc_RNA (1)...(19): siRNA sense strand
ggcaaaugcuuggaaagua

SEQ ID NO: 914102 - RNA, 19 nt, Homo sapiens
  misc_RNA (1)...(19): siRNA sense strand
gagacaaccacaaauguaa

SEQ ID NO: 914103 - RNA, 19 nt, Homo sapiens
  misc_RNA (1)...(19): siRNA sense strand
caauguauaugcacagaga

SEQ ID NO: 914104 - RNA, 19 nt, Homo sapiens
  misc_RNA (1)...(19): siRNA sense strand
aagcacaacccuuaacuua

SEQ ID NO: 914105 - RNA, 19 nt, Homo sapiens
  misc_RNA (1)...(19): siRNA sense strand
caaacaauaucgaacaaag

SEQ ID NO: 914106 - RNA, 19 nt, Homo sapiens
  misc_RNA (1)...(19): siRNA sense strand
ugcaagagauaacccuuua

SEQ ID NO: 914107 - RNA, 19 nt, Homo sapiens
  misc_RNA (1)...(19): siRNA sense strand
caucuggacugcaagagaa

SEQ ID NO: 914108 - RNA, 19 nt, Homo sapiens
  misc_RNA (1)...(19): siRNA sense strand
gggaagagacaaccacaaa

SEQ ID NO: 914109 - RNA, 19 nt, Homo sapiens
  misc_RNA (1)...(19): siRNA sense strand
ggaaaagguuguccucauu

SEQ ID NO: 914110 - RNA, 19 nt, Homo sapiens
  misc_RNA (1)...(19): siRNA sense strand
caaccucaguaguaacaaa

SEQ ID NO: 914111 - RNA, 19 nt, Homo sapiens
  misc_RNA (1)...(19): siRNA sense strand
ucguggaccugucuaauaa

SEQ ID NO: 914112 - RNA, 19 nt, Homo sapiens
  misc_RNA (1)...(19): siRNA sense strand
ggcagaaacuugucuacau

SEQ ID NO: 914113 - RNA, 19 nt, Homo sapiens
  misc_RNA (1)...(19): siRNA sense strand
acaaaucucacacaucuuu

SEQ ID NO: 914114 - RNA, 19 nt, Homo sapiens
  misc_RNA (1)...(19): siRNA sense strand
aagccugccugcucacuua

SEQ ID NO: 914115 - RNA, 19 nt, Homo sapiens
  misc_RNA (1)...(19): siRNA sense strand
ggaccugucuaauaauucu

SEQ ID NO: 914116 - RNA, 19 nt, Homo sapiens
  misc_RNA (1)...(19): siRNA sense strand
caaccaacaugcccuccaa

SEQ ID NO: 914117 - RNA, 19 nt, Homo sapiens
  misc_RNA (1)...(19): siRNA sense strand
guucucaaccucaguagua

SEQ ID NO: 914118 - RNA, 19 nt, Homo sapiens
  misc_RNA (1)...(19): siRNA sense strand
ugaaaugccucaacaaagc

SEQ ID NO: 914119 - RNA, 19 nt, Homo sapiens
  misc_RNA (1)...(19): siRNA sense strand
gcacaacaauaaguucaca

SEQ ID NO: 914120 - RNA, 19 nt, Homo sapiens
  misc_RNA (1)...(19): siRNA sense strand
ucccacaccuucuggauuu

SEQ ID NO: 914121 - RNA, 19 nt, Homo sapiens
  misc_RNA (1)...(19): siRNA sense strand
gauagggacuccauguucu

SEQ ID NO: 914122 - RNA, 19 nt, Homo sapiens
  misc_RNA (1)...(19): siRNA sense strand
cagaaacuugucuacauua

SEQ ID NO: 914123 - RNA, 19 nt, Homo sapiens
  misc_RNA (1)...(19): siRNA sense strand
ggaauggucacaaacacaa

SEQ ID NO: 914124 - RNA, 19 nt, Homo sapiens
  misc_RNA (1)...(19): siRNA sense strand
gaaaagguuguccucauua

SEQ ID NO: 914125 - RNA, 19 nt, Homo sapiens
  misc_RNA (1)...(19): siRNA sense strand
uauaaccacuuuacugauc

SEQ ID NO: 914126 - RNA, 19 nt, Homo sapiens
  misc_RNA (1)...(19): siRNA sense strand
ucaagcuuauucacuguaa

SEQ ID NO: 914127 - RNA, 19 nt, Homo sapiens
  misc_RNA (1)...(19): siRNA sense strand
agagauaacccuuuacaau

SEQ ID NO: 914128 - RNA, 19 nt, Homo sapiens
  misc_RNA (1)...(19): siRNA sense strand
acacaaauucuuccaggua

SEQ ID NO: 914129 - RNA, 19 nt, Homo sapiens
  misc_RNA (1)...(19): siRNA sense strand
guggaccugucuaauaauu

SEQ ID NO: 914130 - RNA, 19 nt, Homo sapiens
  misc_RNA (1)...(19): siRNA sense strand
acaaaucugauacugcuua

SEQ ID NO: 914131 - RNA, 19 nt, Homo sapiens
  misc_RNA (1)...(19): siRNA sense strand
uuacugaucugcauaacca

SEQ ID NO: 914132 - RNA, 19 nt, Homo sapiens
  misc_RNA (1)...(19): siRNA sense strand
ugaggacccuggacauuuc

SEQ ID NO: 914133 - RNA, 19 nt, Homo sapiens
  misc_RNA (1)...(19): siRNA sense strand
ugugguaacucaacccaaa

SEQ ID NO: 914134 - RNA, 19 nt, Homo sapiens
  misc_RNA (1)...(19): siRNA sense strand
uaagugggaugcagacagu

SEQ ID NO: 914135 - RNA, 19 nt, Homo sapiens
  misc_RNA (1)...(19): siRNA sense strand
gcugcuaacaacaacauua

SEQ ID NO: 914136 - RNA, 19 nt, Homo sapiens
  misc_RNA (1)...(19): siRNA sense strand
cuacccaaauaucaucuuu

SEQ ID NO: 914137 - RNA, 19 nt, Homo sapiens
  misc_RNA (1)...(19): siRNA sense strand
aaacuugucuacauuacca

SEQ ID NO: 914138 - RNA, 19 nt, Homo sapiens
  misc_RNA (1)...(19): siRNA sense strand
aagauggaauggucacaaa

SEQ ID NO: 914139 - RNA, 19 nt, Homo sapiens
  misc_RNA (1)...(19): siRNA sense strand
aauaacagguggucaugug

SEQ ID NO: 914140 - RNA, 19 nt, Homo sapiens
  misc_RNA (1)...(19): siRNA sense strand
acuaagaagucucgagguu

SEQ ID NO: 914141 - RNA, 19 nt, Homo sapiens
  misc_RNA (1)...(19): siRNA sense strand
caaaucugauacugcuuau

SEQ ID NO: 914142 - RNA, 19 nt, Homo sapiens
  misc_RNA (1)...(19): siRNA sense strand
caauaucgaacaaaggaaa

SEQ ID NO: 914143 - RNA, 19 nt, Homo sapiens
  misc_RNA (1)...(19): siRNA sense strand
ugaaguggaugauggaaac

SEQ ID NO: 914144 - RNA, 19 nt, Homo sapiens
  misc_RNA (1)...(19): siRNA sense strand
cagagacuaucaauucaca

SEQ ID NO: 914145 - RNA, 19 nt, Homo sapiens
  misc_RNA (1)...(19): siRNA sense strand
gacaccaccuuuacuagca

SEQ ID NO: 914146 - RNA, 19 nt, Homo sapiens
  misc_RNA (1)...(19): siRNA sense strand
caagagauaacccuuuaca

SEQ ID NO: 914147 - RNA, 19 nt, Homo sapiens
  misc_RNA (1)...(19): siRNA sense strand
ggaagagacaaccacaaau

SEQ ID NO: 914148 - RNA, 19 nt, Homo sapiens
  misc_RNA (1)...(19): siRNA sense strand
caacaauaaguucacauuc

SEQ ID NO: 914149 - RNA, 19 nt, Homo sapiens
  misc_RNA (1)...(19): siRNA sense strand
caacacccaugacccuaag

SEQ ID NO: 914150 - RNA, 19 nt, Homo sapiens
  misc_RNA (1)...(19): siRNA sense strand
guaacucaacccaaaguga

SEQ ID NO: 914151 - RNA, 19 nt, Homo sapiens
  misc_RNA (1)...(19): siRNA sense strand
ccacuuuacugaucugcau

SEQ ID NO: 914152 - RNA, 19 nt, Homo sapiens
  misc_RNA (1)...(19): siRNA sense strand
agagacaaccacaaaugua

SEQ ID NO: 914153 - RNA, 19 nt, Homo sapiens
  misc_RNA (1)...(19): siRNA sense strand
cacagagacuaucaauuca

SEQ ID NO: 914154 - RNA, 19 nt, Homo sapiens
  misc_RNA (1)...(19): siRNA sense strand
gcagacaguggacaccauu

SEQ ID NO: 914155 - RNA, 19 nt, Homo sapiens
  misc_RNA (1)...(19): siRNA sense strand
gauaacccuuuacaauaac

SEQ ID NO: 914156 - RNA, 19 nt, Homo sapiens
  misc_RNA (1)...(19): siRNA sense strand
ccaaaauacccaaacaaua

SEQ ID NO: 914157 - RNA, 19 nt, Homo sapiens
  misc_RNA (1)...(19): siRNA sense strand
cugcaacucuaacuauuca

SEQ ID NO: 914158 - RNA, 19 nt, Homo sapiens
  misc_RNA (1)...(19): siRNA sense strand
gagacuaucaauucacaug

SEQ ID NO: 914159 - RNA, 19 nt, Homo sapiens
  misc_RNA (1)...(19): siRNA sense strand
ucuaagaacaugcuggaaa

SEQ ID NO: 914160 - RNA, 19 nt, Homo sapiens
  misc_RNA (1)...(19): siRNA sense strand
cagaagauacauccacaga

SEQ ID NO: 914161 - RNA, 19 nt, Homo sapiens
  misc_RNA (1)...(19): siRNA sense strand
uccauguucuacccaaaua

SEQ ID NO: 914162 - RNA, 19 nt, Homo sapiens
  misc_RNA (1)...(19): siRNA sense strand
caaaucucacacaucuuua

SEQ ID NO: 914163 - RNA, 19 nt, Homo sapiens
  misc_RNA (1)...(19): siRNA sense strand
ggaacaugucugcugcuaa

SEQ ID NO: 914164 - RNA, 19 nt, Homo sapiens
  misc_RNA (1)...(19): siRNA sense strand
uaacuauucaucuccaaga

SEQ ID NO: 914165 - RNA, 19 nt, Homo sapiens
  misc_RNA (1)...(19): siRNA sense strand
ccagguacauuaauaaacc

SEQ ID NO: 914166 - RNA, 19 nt, Homo sapiens
  misc_RNA (1)...(19): siRNA sense strand
ggacaguuccaaccaacau

SEQ ID NO: 914167 - RNA, 19 nt, Homo sapiens
  misc_RNA (1)...(19): siRNA sense strand
cuaagaacaugcuggaaaa

SEQ ID NO: 914168 - RNA, 19 nt, Homo sapiens
  misc_RNA (1)...(19): siRNA sense strand
cuuauaaccacuuuacuga

SEQ ID NO: 914169 - RNA, 19 nt, Homo sapiens
  misc_RNA (1)...(19): siRNA sense strand
caaaugcuuggaaaguaaa

SEQ ID NO: 914170 - RNA, 19 nt, Homo sapiens
  misc_RNA (1)...(19): siRNA sense strand
gauggaauggucacaaaca

SEQ ID NO: 914171 - RNA, 19 nt, Homo sapiens
  misc_RNA (1)...(19): siRNA sense strand
agacaguggacaccauuaa

SEQ ID NO: 914172 - RNA, 19 nt, Homo sapiens
  misc_RNA (1)...(19): siRNA sense strand
gaaaugccucaacaaagca

SEQ ID NO: 914173 - RNA, 19 nt, Homo sapiens
  misc_RNA (1)...(19): siRNA sense strand
ucucugaaaugccucaaca

SEQ ID NO: 914174 - RNA, 19 nt, Homo sapiens
  misc_RNA (1)...(19): siRNA sense strand
aacaaaagcccaugugaua

SEQ ID NO: 914175 - RNA, 19 nt, Homo sapiens
  misc_RNA (1)...(19): siRNA sense strand
gcucaauguuguggucaug

SEQ ID NO: 914176 - RNA, 19 nt, Homo sapiens
  misc_RNA (1)...(19): siRNA sense strand
ucugaaaugccucaacaaa

SEQ ID NO: 914177 - RNA, 19 nt, Homo sapiens
  misc_RNA (1)...(19): siRNA sense strand
cccaugacccuaaguauca

SEQ ID NO: 914178 - RNA, 19 nt, Homo sapiens
  misc_RNA (1)...(19): siRNA sense strand
gcagcugcaacucuaacua

SEQ ID NO: 914179 - RNA, 19 nt, Homo sapiens
  misc_RNA (1)...(19): siRNA sense strand
uggauuuaccucaagcuua

SEQ ID NO: 914180 - RNA, 19 nt, Homo sapiens
  misc_RNA (1)...(19): siRNA sense strand
ucuuccagguacauuaaua

SEQ ID NO: 914181 - RNA, 19 nt, Homo sapiens
  misc_RNA (1)...(19): siRNA sense strand
ccaacacccaugacccuaa

SEQ ID NO: 914182 - RNA, 19 nt, Homo sapiens
  misc_RNA (1)...(19): siRNA sense strand
gaccacaaacaaaacauua

SEQ ID NO: 914183 - RNA, 19 nt, Homo sapiens
  misc_RNA (1)...(19): siRNA sense strand
cagcugcaacucuaacuau

SEQ ID NO: 914184 - RNA, 19 nt, Homo sapiens
  misc_RNA (1)...(19): siRNA sense strand
gaaacaaaagcccauguga

SEQ ID NO: 914185 - RNA, 19 nt, Homo sapiens
  misc_RNA (1)...(19): siRNA sense strand
gcaacucuaacuauucauc

SEQ ID NO: 914186 - RNA, 19 nt, Homo sapiens
  misc_RNA (1)...(19): siRNA sense strand
ccaaagagcugaauguuau

SEQ ID NO: 914187 - RNA, 19 nt, Homo sapiens
  misc_RNA (1)...(19): siRNA sense strand
aaacagaucuugcugacaa

SEQ ID NO: 914188 - RNA, 19 nt, Homo sapiens
  misc_RNA (1)...(19): siRNA sense strand
ggaauccgcugaggaaauu

SEQ ID NO: 914189 - RNA, 19 nt, Homo sapiens
  misc_RNA (1)...(19): siRNA sense strand
caaaguggauugaugaugu

SEQ ID NO: 914190 - RNA, 19 nt, Homo sapiens
  misc_RNA (1)...(19): siRNA sense strand
gaaagaggaagugauguua

SEQ ID NO: 914191 - RNA, 19 nt, Homo sapiens
  misc_RNA (1)...(19): siRNA sense strand
gcaaagcguuggaaagaca

SEQ ID NO: 914192 - RNA, 19 nt, Homo sapiens
  misc_RNA (1)...(19): siRNA sense strand
gagaagauaugauugacau

SEQ ID NO: 914193 - RNA, 19 nt, Homo sapiens
  misc_RNA (1)...(19): siRNA sense strand
gcagagaagauaugauuga

SEQ ID NO: 914194 - RNA, 19 nt, Homo sapiens
  misc_RNA (1)...(19): siRNA sense strand
gagcaaagcguuggaaaga

SEQ ID NO: 914195 - RNA, 19 nt, Homo sapiens
  misc_RNA (1)...(19): siRNA sense strand
gagcugaauguuauguuua

SEQ ID NO: 914196 - RNA, 19 nt, Homo sapiens
  misc_RNA (1)...(19): siRNA sense strand
gccaaagagcugaauguua

SEQ ID NO: 914197 - RNA, 19 nt, Homo sapiens
  misc_RNA (1)...(19): siRNA sense strand
gacagaagcagagaagaua

SEQ ID NO: 914198 - RNA, 19 nt, Homo sapiens
  misc_RNA (1)...(19): siRNA sense strand
gaugaugucagaacagaaa

SEQ ID NO: 914199 - RNA, 19 nt, Homo sapiens
  misc_RNA (1)...(19): siRNA sense strand
gaacagaaagaggaaguga

SEQ ID NO: 914200 - RNA, 19 nt, Homo sapiens
  misc_RNA (1)...(19): siRNA sense strand
ggacagaagcagagaagau

SEQ ID NO: 914201 - RNA, 19 nt, Homo sapiens
  misc_RNA (1)...(19): siRNA sense strand
cuacaaaguggauugauga

SEQ ID NO: 914202 - RNA, 19 nt, Homo sapiens
  misc_RNA (1)...(19): siRNA sense strand
agagcugaauguuauguuu

SEQ ID NO: 914203 - RNA, 19 nt, Homo sapiens
  misc_RNA (1)...(19): siRNA sense strand
aagcagagaagauaugauu

SEQ ID NO: 914204 - RNA, 19 nt, Homo sapiens
  misc_RNA (1)...(19): siRNA sense strand
ggaaagcacacaggacaga

SEQ ID NO: 914205 - RNA, 19 nt, Homo sapiens
  misc_RNA (1)...(19): siRNA sense strand
agaggcaagugucaauuga

SEQ ID NO: 914206 - RNA, 19 nt, Homo sapiens
  misc_RNA (1)...(19): siRNA sense strand
gcagcucuuucgacgugua

SEQ ID NO: 914207 - RNA, 19 nt, Homo sapiens
  misc_RNA (1)...(19): siRNA sense strand
guggauugaugaugucaga

SEQ ID NO: 914208 - RNA, 19 nt, Homo sapiens
  misc_RNA (1)...(19): siRNA sense strand
gaaauucaagcugguguuc

SEQ ID NO: 914209 - RNA, 19 nt, Homo sapiens
  misc_RNA (1)...(19): siRNA sense strand
aagaggaagugauguuauc

SEQ ID NO: 914210 - RNA, 19 nt, Homo sapiens
  misc_RNA (1)...(19): siRNA sense strand
gaucaccagauucauguau

SEQ ID NO: 914211 - RNA, 19 nt, Homo sapiens
  misc_RNA (1)...(19): siRNA sense strand
caacaccuaucaggcaaca

SEQ ID NO: 914212 - RNA, 19 nt, Homo sapiens
  misc_RNA (1)...(19): siRNA sense strand
caaacuacaaaguggauug

SEQ ID NO: 914213 - RNA, 19 nt, Homo sapiens
  misc_RNA (1)...(19): siRNA sense strand
gagagaggaaagccaaaga

SEQ ID NO: 914214 - RNA, 19 nt, Homo sapiens
  misc_RNA (1)...(19): siRNA sense strand
gauugaugaugucagaaca

SEQ ID NO: 914215 - RNA, 19 nt, Homo sapiens
  misc_RNA (1)...(19): siRNA sense strand
acagaaagaggaagugaug

SEQ ID NO: 914216 - RNA, 19 nt, Homo sapiens
  misc_RNA (1)...(19): siRNA sense strand
agaaagaggaagugauguu

SEQ ID NO: 914217 - RNA, 19 nt, Homo sapiens
  misc_RNA (1)...(19): siRNA sense strand
ggagcaaccagucagugaa

SEQ ID NO: 914218 - RNA, 19 nt, Homo sapiens
  misc_RNA (1)...(19): siRNA sense strand
ggaaaagccucaggagcaa

SEQ ID NO: 914219 - RNA, 19 nt, Homo sapiens
  misc_RNA (1)...(19): siRNA sense strand
gaaagcacacaggacagaa

SEQ ID NO: 914220 - RNA, 19 nt, Homo sapiens
  misc_RNA (1)...(19): siRNA sense strand
guuaacucauuccagcaaa

SEQ ID NO: 914221 - RNA, 19 nt, Homo sapiens
  misc_RNA (1)...(19): siRNA sense strand
gggaauccgcugaggaaau

SEQ ID NO: 914222 - RNA, 19 nt, Homo sapiens
  misc_RNA (1)...(19): siRNA sense strand
ggaaauucaagcugguguu

SEQ ID NO: 914223 - RNA, 19 nt, Homo sapiens
  misc_RNA (1)...(19): siRNA sense strand
ggaaagccaaagagcugaa

SEQ ID NO: 914224 - RNA, 19 nt, Homo sapiens
  misc_RNA (1)...(19): siRNA sense strand
guacuuggaggaucgaaca

SEQ ID NO: 914225 - RNA, 19 nt, Homo sapiens
  misc_RNA (1)...(19): siRNA sense strand
gggcggagacuucgggaau

SEQ ID NO: 914226 - RNA, 19 nt, Homo sapiens
  misc_RNA (1)...(19): siRNA sense strand
ggaaauaaaacagaucuug

SEQ ID NO: 914227 - RNA, 19 nt, Homo sapiens
  misc_RNA (1)...(19): siRNA sense strand
acuacaaaguggauugaug

SEQ ID NO: 914228 - RNA, 19 nt, Homo sapiens
  misc_RNA (1)...(19): siRNA sense strand
ggagcaaagcguuggaaag

SEQ ID NO: 914229 - RNA, 19 nt, Homo sapiens
  misc_RNA (1)...(19): siRNA sense strand
ugcaaaagcuggauacaau

SEQ ID NO: 914230 - RNA, 19 nt, Homo sapiens
  misc_RNA (1)...(19): siRNA sense strand
caagaggcaagugucaauu

SEQ ID NO: 914231 - RNA, 19 nt, Homo sapiens
  misc_RNA (1)...(19): siRNA sense strand
gcaaccagucagugaagga

SEQ ID NO: 914232 - RNA, 19 nt, Homo sapiens
  misc_RNA (1)...(19): siRNA sense strand
aaagaggaagugauguuau

SEQ ID NO: 914233 - RNA, 19 nt, Homo sapiens
  misc_RNA (1)...(19): siRNA sense strand
gagcaaccagucagugaag

SEQ ID NO: 914234 - RNA, 19 nt, Homo sapiens
  misc_RNA (1)...(19): siRNA sense strand
cagcagcuuugccgggaau

SEQ ID NO: 914235 - RNA, 19 nt, Homo sapiens
  misc_RNA (1)...(19): siRNA sense strand
guuaucaucaugcuaguag

SEQ ID NO: 914236 - RNA, 19 nt, Homo sapiens
  misc_RNA (1)...(19): siRNA sense strand
cagaagcagagaagauaug

SEQ ID NO: 914237 - RNA, 19 nt, Homo sapiens
  misc_RNA (1)...(19): siRNA sense strand
aaaguggauugaugauguc

SEQ ID NO: 914238 - RNA, 19 nt, Homo sapiens
  misc_RNA (1)...(19): siRNA sense strand
gaaagccaaagagcugaau

SEQ ID NO: 914239 - RNA, 19 nt, Homo sapiens
  misc_RNA (1)...(19): siRNA sense strand
ucaucaugcuaguaggaaa

SEQ ID NO: 914240 - RNA, 19 nt, Homo sapiens
  misc_RNA (1)...(19): siRNA sense strand
aaacuacaaaguggauuga

SEQ ID NO: 914241 - RNA, 19 nt, Homo sapiens
  misc_RNA (1)...(19): siRNA sense strand
ggagagaggaaagccaaag

SEQ ID NO: 914242 - RNA, 19 nt, Homo sapiens
  misc_RNA (1)...(19): siRNA sense strand
acaccuaucaggcaacaau

SEQ ID NO: 914243 - RNA, 19 nt, Homo sapiens
  misc_RNA (1)...(19): siRNA sense strand
caugcuaguaggaaauaaa

SEQ ID NO: 914244 - RNA, 19 nt, Homo sapiens
  misc_RNA (1)...(19): siRNA sense strand
gggagcaaagcguuggaaa

SEQ ID NO: 914245 - RNA, 19 nt, Homo sapiens
  misc_RNA (1)...(19): siRNA sense strand
acaagaggcaagugucaau

SEQ ID NO: 914246 - RNA, 19 nt, Homo sapiens
  misc_RNA (1)...(19): siRNA sense strand
uugaugaugucagaacaga

SEQ ID NO: 914247 - RNA, 19 nt, Homo sapiens
  misc_RNA (1)...(19): siRNA sense strand
cagagaagauaugauugac

SEQ ID NO: 914248 - RNA, 19 nt, Homo sapiens
  misc_RNA (1)...(19): siRNA sense strand
caaagagcugaauguuaug

SEQ ID NO: 914249 - RNA, 19 nt, Homo sapiens
  misc_RNA (1)...(19): siRNA sense strand
gcaaacuacaaaguggauu

SEQ ID NO: 914250 - RNA, 19 nt, Homo sapiens
  misc_RNA (1)...(19): siRNA sense strand
aagaggcaagugucaauug

SEQ ID NO: 914251 - RNA, 19 nt, Homo sapiens
  misc_RNA (1)...(19): siRNA sense strand
ggauugaugaugucagaac

SEQ ID NO: 914252 - RNA, 19 nt, Homo sapiens
  misc_RNA (1)...(19): siRNA sense strand
agaagcagagaagauauga

SEQ ID NO: 914253 - RNA, 19 nt, Homo sapiens
  misc_RNA (1)...(19): siRNA sense strand
ucgggaauccgcugaggaa

SEQ ID NO: 914254 - RNA, 19 nt, Homo sapiens
  misc_RNA (1)...(19): siRNA sense strand
ccaaagagcugaauguuau

SEQ ID NO: 914255 - RNA, 19 nt, Homo sapiens
  misc_RNA (1)...(19): siRNA sense strand
aaacagaucuugcugacaa

SEQ ID NO: 914256 - RNA, 19 nt, Homo sapiens
  misc_RNA (1)...(19): siRNA sense strand
ggaauccgcugaggaaauu

SEQ ID NO: 914257 - RNA, 19 nt, Homo sapiens
  misc_RNA (1)...(19): siRNA sense strand
caaaguggauugaugaugu

SEQ ID NO: 914258 - RNA, 19 nt, Homo sapiens
  misc_RNA (1)...(19): siRNA sense strand
gaaagaggaagugauguua

SEQ ID NO: 914259 - RNA, 19 nt, Homo sapiens
  misc_RNA (1)...(19): siRNA sense strand
gcaaagcguuggaaagaca

SEQ ID NO: 914260 - RNA, 19 nt, Homo sapiens
  misc_RNA (1)...(19): siRNA sense strand
gagaagauaugauugacau

SEQ ID NO: 914261 - RNA, 19 nt, Homo sapiens
  misc_RNA (1)...(19): siRNA sense strand
gcagagaagauaugauuga

SEQ ID NO: 914262 - RNA, 19 nt, Homo sapiens
  misc_RNA (1)...(19): siRNA sense strand
gagcaaagcguuggaaaga

SEQ ID NO: 914263 - RNA, 19 nt, Homo sapiens
  misc_RNA (1)...(19): siRNA sense strand
gagcugaauguuauguuua

SEQ ID NO: 914264 - RNA, 19 nt, Homo sapiens
  misc_RNA (1)...(19): siRNA sense strand
gccaaagagcugaauguua

SEQ ID NO: 914265 - RNA, 19 nt, Homo sapiens
  misc_RNA (1)...(19): siRNA sense strand
gacagaagcagagaagaua

SEQ ID NO: 914266 - RNA, 19 nt, Homo sapiens
  misc_RNA (1)...(19): siRNA sense strand
gaugaugucagaacagaaa

SEQ ID NO: 914267 - RNA, 19 nt, Homo sapiens
  misc_RNA (1)...(19): siRNA sense strand
gaacagaaagaggaaguga

SEQ ID NO: 914268 - RNA, 19 nt, Homo sapiens
  misc_RNA (1)...(19): siRNA sense strand
ggacagaagcagagaagau

SEQ ID NO: 914269 - RNA, 19 nt, Homo sapiens
  misc_RNA (1)...(19): siRNA sense strand
cuacaaaguggauugauga

SEQ ID NO: 914270 - RNA, 19 nt, Homo sapiens
  misc_RNA (1)...(19): siRNA sense strand
agagcugaauguuauguuu

SEQ ID NO: 914271 - RNA, 19 nt, Homo sapiens
  misc_RNA (1)...(19): siRNA sense strand
aagcagagaagauaugauu

SEQ ID NO: 914272 - RNA, 19 nt, Homo sapiens
  misc_RNA (1)...(19): siRNA sense strand
ggaaagcacacaggacaga

SEQ ID NO: 914273 - RNA, 19 nt, Homo sapiens
  misc_RNA (1)...(19): siRNA sense strand
agaggcaagugucaauuga

SEQ ID NO: 914274 - RNA, 19 nt, Homo sapiens
  misc_RNA (1)...(19): siRNA sense strand
gcagcucuuucgacgugua

SEQ ID NO: 914275 - RNA, 19 nt, Homo sapiens
  misc_RNA (1)...(19): siRNA sense strand
guggauugaugaugucaga

SEQ ID NO: 914276 - RNA, 19 nt, Homo sapiens
  misc_RNA (1)...(19): siRNA sense strand
gaaauucaagcugguguuc

SEQ ID NO: 914277 - RNA, 19 nt, Homo sapiens
  misc_RNA (1)...(19): siRNA sense strand
aagaggaagugauguuauc

SEQ ID NO: 914278 - RNA, 19 nt, Homo sapiens
  misc_RNA (1)...(19): siRNA sense strand
gaucaccagauucauguau

SEQ ID NO: 914279 - RNA, 19 nt, Homo sapiens
  misc_RNA (1)...(19): siRNA sense strand
caacaccuaucaggcaaca

SEQ ID NO: 914280 - RNA, 19 nt, Homo sapiens
  misc_RNA (1)...(19): siRNA sense strand
caaacuacaaaguggauug

SEQ ID NO: 914281 - RNA, 19 nt, Homo sapiens
  misc_RNA (1)...(19): siRNA sense strand
gagagaggaaagccaaaga

SEQ ID NO: 914282 - RNA, 19 nt, Homo sapiens
  misc_RNA (1)...(19): siRNA sense strand
gauugaugaugucagaaca

SEQ ID NO: 914283 - RNA, 19 nt, Homo sapiens
  misc_RNA (1)...(19): siRNA sense strand
acagaaagaggaagugaug

SEQ ID NO: 914284 - RNA, 19 nt, Homo sapiens
  misc_RNA (1)...(19): siRNA sense strand
agaaagaggaagugauguu

SEQ ID NO: 914285 - RNA, 19 nt, Homo sapiens
  misc_RNA (1)...(19): siRNA sense strand
ggagcaaccagucagugaa

SEQ ID NO: 914286 - RNA, 19 nt, Homo sapiens
  misc_RNA (1)...(19): siRNA sense strand
ggaaaagccucaggagcaa

SEQ ID NO: 914287 - RNA, 19 nt, Homo sapiens
  misc_RNA (1)...(19): siRNA sense strand
gaaagcacacaggacagaa

SEQ ID NO: 914288 - RNA, 19 nt, Homo sapiens
  misc_RNA (1)...(19): siRNA sense strand
guuaacucauuccagcaaa

SEQ ID NO: 914289 - RNA, 19 nt, Homo sapiens
  misc_RNA (1)...(19): siRNA sense strand
gggaauccgcugaggaaau

SEQ ID NO: 914290 - RNA, 19 nt, Homo sapiens
  misc_RNA (1)...(19): siRNA sense strand
ggaaauucaagcugguguu

SEQ ID NO: 914291 - RNA, 19 nt, Homo sapiens
  misc_RNA (1)...(19): siRNA sense strand
ggaaagccaaagagcugaa

SEQ ID NO: 914292 - RNA, 19 nt, Homo sapiens
  misc_RNA (1)...(19): siRNA sense strand
guacuuggaggaucgaaca

SEQ ID NO: 914293 - RNA, 19 nt, Homo sapiens
  misc_RNA (1)...(19): siRNA sense strand
gggcggagacuucgggaau

SEQ ID NO: 914294 - RNA, 19 nt, Homo sapiens
  misc_RNA (1)...(19): siRNA sense strand
ggaaauaaaacagaucuug

SEQ ID NO: 914295 - RNA, 19 nt, Homo sapiens
  misc_RNA (1)...(19): siRNA sense strand
acuacaaaguggauugaug

SEQ ID NO: 914296 - RNA, 19 nt, Homo sapiens
  misc_RNA (1)...(19): siRNA sense strand
ggagcaaagcguuggaaag

SEQ ID NO: 914297 - RNA, 19 nt, Homo sapiens
  misc_RNA (1)...(19): siRNA sense strand
ugcaaaagcuggauacaau

SEQ ID NO: 914298 - RNA, 19 nt, Homo sapiens
  misc_RNA (1)...(19): siRNA sense strand
caagaggcaagugucaauu

SEQ ID NO: 914299 - RNA, 19 nt, Homo sapiens
  misc_RNA (1)...(19): siRNA sense strand
gcaaccagucagugaagga

SEQ ID NO: 914300 - RNA, 19 nt, Homo sapiens
  misc_RNA (1)...(19): siRNA sense strand
aaagaggaagugauguuau

SEQ ID NO: 914301 - RNA, 19 nt, Homo sapiens
  misc_RNA (1)...(19): siRNA sense strand
gagcaaccagucagugaag

SEQ ID NO: 914302 - RNA, 19 nt, Homo sapiens
  misc_RNA (1)...(19): siRNA sense strand
cagcagcuuugccgggaau

SEQ ID NO: 914303 - RNA, 19 nt, Homo sapiens
  misc_RNA (1)...(19): siRNA sense strand
guuaucaucaugcuaguag

SEQ ID NO: 914304 - RNA, 19 nt, Homo sapiens
  misc_RNA (1)...(19): siRNA sense strand
cagaagcagagaagauaug

SEQ ID NO: 914305 - RNA, 19 nt, Homo sapiens
  misc_RNA (1)...(19): siRNA sense strand
aaaguggauugaugauguc

SEQ ID NO: 914306 - RNA, 19 nt, Homo sapiens
  misc_RNA (1)...(19): siRNA sense strand
gaaagccaaagagcugaau

SEQ ID NO: 914307 - RNA, 19 nt, Homo sapiens
  misc_RNA (1)...(19): siRNA sense strand
ucaucaugcuaguaggaaa

SEQ ID NO: 914308 - RNA, 19 nt, Homo sapiens
  misc_RNA (1)...(19): siRNA sense strand
aaacuacaaaguggauuga

SEQ ID NO: 914309 - RNA, 19 nt, Homo sapiens
  misc_RNA (1)...(19): siRNA sense strand
ggagagaggaaagccaaag

SEQ ID NO: 914310 - RNA, 19 nt, Homo sapiens
  misc_RNA (1)...(19): siRNA sense strand
acaccuaucaggcaacaau

SEQ ID NO: 914311 - RNA, 19 nt, Homo sapiens
  misc_RNA (1)...(19): siRNA sense strand
caugcuaguaggaaauaaa

SEQ ID NO: 914312 - RNA, 19 nt, Homo sapiens
  misc_RNA (1)...(19): siRNA sense strand
gggagcaaagcguuggaaa

SEQ ID NO: 914313 - RNA, 19 nt, Homo sapiens
  misc_RNA (1)...(19): siRNA sense strand
acaagaggcaagugucaau

SEQ ID NO: 914314 - RNA, 19 nt, Homo sapiens
  misc_RNA (1)...(19): siRNA sense strand
uugaugaugucagaacaga

SEQ ID NO: 914315 - RNA, 19 nt, Homo sapiens
  misc_RNA (1)...(19): siRNA sense strand
cagagaagauaugauugac

SEQ ID NO: 914316 - RNA, 19 nt, Homo sapiens
  misc_RNA (1)...(19): siRNA sense strand
caaagagcugaauguuaug

SEQ ID NO: 914317 - RNA, 19 nt, Homo sapiens
  misc_RNA (1)...(19): siRNA sense strand
gcaaacuacaaaguggauu

SEQ ID NO: 914318 - RNA, 19 nt, Homo sapiens
  misc_RNA (1)...(19): siRNA sense strand
aagaggcaagugucaauug

SEQ ID NO: 914319 - RNA, 19 nt, Homo sapiens
  misc_RNA (1)...(19): siRNA sense strand
ggauugaugaugucagaac

SEQ ID NO: 914320 - RNA, 19 nt, Homo sapiens
  misc_RNA (1)...(19): siRNA sense strand
agaagcagagaagauauga

SEQ ID NO: 914321 - RNA, 19 nt, Homo sapiens
  misc_RNA (1)...(19): siRNA sense strand
ucgggaauccgcugaggaa

SEQ ID NO: 914322 - RNA, 19 nt, Homo sapiens
  misc_RNA (1)...(19): siRNA sense strand
gaagaaacuugaagaggaa

SEQ ID NO: 914323 - RNA, 19 nt, Homo sapiens
  misc_RNA (1)...(19): siRNA sense strand
uaauagaacuucacgauug

SEQ ID NO: 914324 - RNA, 19 nt, Homo sapiens
  misc_RNA (1)...(19): siRNA sense strand
uaaagaagcugcaagaaaa

SEQ ID NO: 914325 - RNA, 19 nt, Homo sapiens
  misc_RNA (1)...(19): siRNA sense strand
uuaaggagauugagaagaa

SEQ ID NO: 914326 - RNA, 19 nt, Homo sapiens
  misc_RNA (1)...(19): siRNA sense strand
ggaggaaagugggucauaa

SEQ ID NO: 914327 - RNA, 19 nt, Homo sapiens
  misc_RNA (1)...(19): siRNA sense strand
guaaagaagcugcaagaaa

SEQ ID NO: 914328 - RNA, 19 nt, Homo sapiens
  misc_RNA (1)...(19): siRNA sense strand
gaaagugggucauaaaucc

SEQ ID NO: 914329 - RNA, 19 nt, Homo sapiens
  misc_RNA (1)...(19): siRNA sense strand
gggaacaguuugugaagaa

SEQ ID NO: 914330 - RNA, 19 nt, Homo sapiens
  misc_RNA (1)...(19): siRNA sense strand
caacaugggucucgcuaug

SEQ ID NO: 914331 - RNA, 19 nt, Homo sapiens
  misc_RNA (1)...(19): siRNA sense strand
gaaaaucacuggcaacaug

SEQ ID NO: 914332 - RNA, 19 nt, Homo sapiens
  misc_RNA (1)...(19): siRNA sense strand
caagaaggcuuuagcugau

SEQ ID NO: 914333 - RNA, 19 nt, Homo sapiens
  misc_RNA (1)...(19): siRNA sense strand
cacaagaaaugaugacuga

SEQ ID NO: 914334 - RNA, 19 nt, Homo sapiens
  misc_RNA (1)...(19): siRNA sense strand
gaaccauucccacugauaa

SEQ ID NO: 914335 - RNA, 19 nt, Homo sapiens
  misc_RNA (1)...(19): siRNA sense strand
gaaugugucuuggcucuug

SEQ ID NO: 914336 - RNA, 19 nt, Homo sapiens
  misc_RNA (1)...(19): siRNA sense strand
gauaauacauauggaggaa

SEQ ID NO: 914337 - RNA, 19 nt, Homo sapiens
  misc_RNA (1)...(19): siRNA sense strand
gaucagugcuuccuaacuc

SEQ ID NO: 914338 - RNA, 19 nt, Homo sapiens
  misc_RNA (1)...(19): siRNA sense strand
ugagaaaucuggccugaca

SEQ ID NO: 914339 - RNA, 19 nt, Homo sapiens
  misc_RNA (1)...(19): siRNA sense strand
caagaaaugaugacugauu

SEQ ID NO: 914340 - RNA, 19 nt, Homo sapiens
  misc_RNA (1)...(19): siRNA sense strand
caagaugaauacaguuuag

SEQ ID NO: 914341 - RNA, 19 nt, Homo sapiens
  misc_RNA (1)...(19): siRNA sense strand
ugucuuggcucuuggguuu

SEQ ID NO: 914342 - RNA, 19 nt, Homo sapiens
  misc_RNA (1)...(19): siRNA sense strand
gcaagaaaaugcuaugaga

SEQ ID NO: 914343 - RNA, 19 nt, Homo sapiens
  misc_RNA (1)...(19): siRNA sense strand
gcacagaucccuuauucag

SEQ ID NO: 914344 - RNA, 19 nt, Homo sapiens
  misc_RNA (1)...(19): siRNA sense strand
gcaaguuccuggugcaaag

SEQ ID NO: 914345 - RNA, 19 nt, Homo sapiens
  misc_RNA (1)...(19): siRNA sense strand
gagcugagaauucaagaga

SEQ ID NO: 914346 - RNA, 19 nt, Homo sapiens
  misc_RNA (1)...(19): siRNA sense strand
gugguggacugauuucaaa

SEQ ID NO: 914347 - RNA, 19 nt, Homo sapiens
  misc_RNA (1)...(19): siRNA sense strand
gaauacaguuuagaugaag

SEQ ID NO: 914348 - RNA, 19 nt, Homo sapiens
  misc_RNA (1)...(19): siRNA sense strand
uggaggagcugugguugua

SEQ ID NO: 914349 - RNA, 19 nt, Homo sapiens
  misc_RNA (1)...(19): siRNA sense strand
cagcauaauuuaggcauug

SEQ ID NO: 914350 - RNA, 19 nt, Homo sapiens
  misc_RNA (1)...(19): siRNA sense strand
uaucacaguuugggaauga

SEQ ID NO: 914351 - RNA, 19 nt, Homo sapiens
  misc_RNA (1)...(19): siRNA sense strand
gaggaaagugggucauaaa

SEQ ID NO: 914352 - RNA, 19 nt, Homo sapiens
  misc_RNA (1)...(19): siRNA sense strand
caguuuagaugaagugaug

SEQ ID NO: 914353 - RNA, 19 nt, Homo sapiens
  misc_RNA (1)...(19): siRNA sense strand
ugacuggaauuccuauaau

SEQ ID NO: 914354 - RNA, 19 nt, Homo sapiens
  misc_RNA (1)...(19): siRNA sense strand
ccaaagcuguggaaauuuu

SEQ ID NO: 914355 - RNA, 19 nt, Homo sapiens
  misc_RNA (1)...(19): siRNA sense strand
guugauagaggagauaaua

SEQ ID NO: 914356 - RNA, 19 nt, Homo sapiens
  misc_RNA (1)...(19): siRNA sense strand
ccaagaugaauacaguuua

SEQ ID NO: 914357 - RNA, 19 nt, Homo sapiens
  misc_RNA (1)...(19): siRNA sense strand
ggaacaguuugugaagaaa

SEQ ID NO: 914358 - RNA, 19 nt, Homo sapiens
  misc_RNA (1)...(19): siRNA sense strand
ggaaagugggucauaaauc

SEQ ID NO: 914359 - RNA, 19 nt, Homo sapiens
  misc_RNA (1)...(19): siRNA sense strand
ggccugacaccaaaugaua

SEQ ID NO: 914360 - RNA, 19 nt, Homo sapiens
  misc_RNA (1)...(19): siRNA sense strand
guaauagaacuucacgauu

SEQ ID NO: 914361 - RNA, 19 nt, Homo sapiens
  misc_RNA (1)...(19): siRNA sense strand
gaagaauggcaaaggauca

SEQ ID NO: 914362 - RNA, 19 nt, Homo sapiens
  misc_RNA (1)...(19): siRNA sense strand
gugaagcauuuguacagaa

SEQ ID NO: 914363 - RNA, 19 nt, Homo sapiens
  misc_RNA (1)...(19): siRNA sense strand
gcagagggcuaucuaucac

SEQ ID NO: 914364 - RNA, 19 nt, Homo sapiens
  misc_RNA (1)...(19): siRNA sense strand
gcagcauaauuuaggcauu

SEQ ID NO: 914365 - RNA, 19 nt, Homo sapiens
  misc_RNA (1)...(19): siRNA sense strand
guuccaagaugaauacagu

SEQ ID NO: 914366 - RNA, 19 nt, Homo sapiens
  misc_RNA (1)...(19): siRNA sense strand
gguuugagaagaugaguaa

SEQ ID NO: 914367 - RNA, 19 nt, Homo sapiens
  misc_RNA (1)...(19): siRNA sense strand
ccaaccagcucugcaagug

SEQ ID NO: 914368 - RNA, 19 nt, Homo sapiens
  misc_RNA (1)...(19): siRNA sense strand
uaauacauauggaggaaag

SEQ ID NO: 914369 - RNA, 19 nt, Homo sapiens
  misc_RNA (1)...(19): siRNA sense strand
gaggagauaauacauaugg

SEQ ID NO: 914370 - RNA, 19 nt, Homo sapiens
  misc_RNA (1)...(19): siRNA sense strand
gaguaaagaagcugcaaga

SEQ ID NO: 914371 - RNA, 19 nt, Homo sapiens
  misc_RNA (1)...(19): siRNA sense strand
aagcauuuguacagaagua

SEQ ID NO: 914372 - RNA, 19 nt, Homo sapiens
  misc_RNA (1)...(19): siRNA sense strand
gggucucgcuaugaaguua

SEQ ID NO: 914373 - RNA, 19 nt, Homo sapiens
  misc_RNA (1)...(19): siRNA sense strand
aaucuggccugacaccaaa

SEQ ID NO: 914374 - RNA, 19 nt, Homo sapiens
  misc_RNA (1)...(19): siRNA sense strand
ggaauuccuauaaucaaug

SEQ ID NO: 914375 - RNA, 19 nt, Homo sapiens
  misc_RNA (1)...(19): siRNA sense strand
auagaaccauucccacuga

SEQ ID NO: 914376 - RNA, 19 nt, Homo sapiens
  misc_RNA (1)...(19): siRNA sense strand
ccacugauaagcauguuga

SEQ ID NO: 914377 - RNA, 19 nt, Homo sapiens
  misc_RNA (1)...(19): siRNA sense strand
uaaggagauugagaagaaa

SEQ ID NO: 914378 - RNA, 19 nt, Homo sapiens
  misc_RNA (1)...(19): siRNA sense strand
gccaagcucguuugaagaa

SEQ ID NO: 914379 - RNA, 19 nt, Homo sapiens
  misc_RNA (1)...(19): siRNA sense strand
ccaggcauguguuggcuau

SEQ ID NO: 914380 - RNA, 19 nt, Homo sapiens
  misc_RNA (1)...(19): siRNA sense strand
gaugaauacaguuuagaug

SEQ ID NO: 914381 - RNA, 19 nt, Homo sapiens
  misc_RNA (1)...(19): siRNA sense strand
gcuaugaaguuacaaaauc

SEQ ID NO: 914382 - RNA, 19 nt, Homo sapiens
  misc_RNA (1)...(19): siRNA sense strand
acucagacuuccuggcuuu

SEQ ID NO: 914383 - RNA, 19 nt, Homo sapiens
  misc_RNA (1)...(19): siRNA sense strand
augcacagaucccuuauuc

SEQ ID NO: 914384 - RNA, 19 nt, Homo sapiens
  misc_RNA (1)...(19): siRNA sense strand
caaggcaaauugaaaauca

SEQ ID NO: 914385 - RNA, 19 nt, Homo sapiens
  misc_RNA (1)...(19): siRNA sense strand
gugauggauuuaaggcaaa

SEQ ID NO: 914386 - RNA, 19 nt, Homo sapiens
  misc_RNA (1)...(19): siRNA sense strand
gacuggaauuccuauaauc

SEQ ID NO: 914387 - RNA, 19 nt, Homo sapiens
  misc_RNA (1)...(19): siRNA sense strand
gagcugugguuguaacacu

SEQ ID NO: 914388 - RNA, 19 nt, Homo sapiens
  misc_RNA (1)...(19): siRNA sense strand
uaacugugcuacugguucu

SEQ ID NO: 914389 - RNA, 19 nt, Homo sapiens
  misc_RNA (1)...(19): siRNA sense strand
gggaagccuuggaauaaaa

SEQ ID NO: 914390 - RNA, 19 nt, Homo sapiens
  misc_RNA (1)...(19): siRNA sense strand
gcugagaauucaagagacu

SEQ ID NO: 914391 - RNA, 19 nt, Homo sapiens
  misc_RNA (1)...(19): siRNA sense strand
aacaauaacugugcuacug

SEQ ID NO: 914392 - RNA, 19 nt, Homo sapiens
  misc_RNA (1)...(19): siRNA sense strand
cuuccuaacucagauaaga

SEQ ID NO: 914393 - RNA, 19 nt, Homo sapiens
  misc_RNA (1)...(19): siRNA sense strand
acagaaguauggccugcaa

SEQ ID NO: 914394 - RNA, 19 nt, Homo sapiens
  misc_RNA (1)...(19): siRNA sense strand
uaacccguauucccaguuc

SEQ ID NO: 914395 - RNA, 19 nt, Homo sapiens
  misc_RNA (1)...(19): siRNA sense strand
gcuacugguucuacugcuu

SEQ ID NO: 914396 - RNA, 19 nt, Homo sapiens
  misc_RNA (1)...(19): siRNA sense strand
acaugggucucgcuaugaa

SEQ ID NO: 914397 - RNA, 19 nt, Homo sapiens
  misc_RNA (1)...(19): siRNA sense strand
ggcuaucuaucacaguuug

SEQ ID NO: 914398 - RNA, 19 nt, Homo sapiens
  misc_RNA (1)...(19): siRNA sense strand
ggugguggaugugaagaau

SEQ ID NO: 914399 - RNA, 19 nt, Homo sapiens
  misc_RNA (1)...(19): siRNA sense strand
gaagaaaaucggugguauu

SEQ ID NO: 914400 - RNA, 19 nt, Homo sapiens
  misc_RNA (1)...(19): siRNA sense strand
gccuggagcugagaauuca

SEQ ID NO: 914401 - RNA, 19 nt, Homo sapiens
  misc_RNA (1)...(19): siRNA sense strand
gagauugagaagaaacuug

SEQ ID NO: 914402 - RNA, 19 nt, Homo sapiens
  misc_RNA (1)...(19): siRNA sense strand
ugaagcauuuguacagaag

SEQ ID NO: 914403 - RNA, 19 nt, Homo sapiens
  misc_RNA (1)...(19): siRNA sense strand
ccucagauguuuggguaug

SEQ ID NO: 914404 - RNA, 19 nt, Homo sapiens
  misc_RNA (1)...(19): siRNA sense strand
ugugaagaauggcaaagga

SEQ ID NO: 914405 - RNA, 19 nt, Homo sapiens
  misc_RNA (1)...(19): siRNA sense strand
ggcagagggcuaucuauca

SEQ ID NO: 914406 - RNA, 19 nt, Homo sapiens
  misc_RNA (1)...(19): siRNA sense strand
gaacuucacgauugcuuuu

SEQ ID NO: 914407 - RNA, 19 nt, Homo sapiens
  misc_RNA (1)...(19): siRNA sense strand
ugacaccaaaugauauuga

SEQ ID NO: 914408 - RNA, 19 nt, Homo sapiens
  misc_RNA (1)...(19): siRNA sense strand
agaagaagcaggcaagaag

SEQ ID NO: 914409 - RNA, 19 nt, Homo sapiens
  misc_RNA (1)...(19): siRNA sense strand
guucuacugcuuuguuuau

SEQ ID NO: 914410 - RNA, 19 nt, Homo sapiens
  misc_RNA (1)...(19): siRNA sense strand
aggcaacgcuaagcucuga

SEQ ID NO: 914411 - RNA, 19 nt, Homo sapiens
  misc_RNA (1)...(19): siRNA sense strand
gaggagcugugguuguaac

SEQ ID NO: 914412 - RNA, 19 nt, Homo sapiens
  misc_RNA (1)...(19): siRNA sense strand
ggcaugaccaaguuuguga

SEQ ID NO: 914413 - RNA, 19 nt, Homo sapiens
  misc_RNA (1)...(19): siRNA sense strand
ugacuaucuuacaauguug

SEQ ID NO: 914414 - RNA, 19 nt, Homo sapiens
  misc_RNA (1)...(19): siRNA sense strand
gcauguguuggcuauguuu

SEQ ID NO: 914415 - RNA, 19 nt, Homo sapiens
  misc_RNA (1)...(19): siRNA sense strand
uggcuuuaaugacugguaa

SEQ ID NO: 914416 - RNA, 19 nt, Homo sapiens
  misc_RNA (1)...(19): siRNA sense strand
cagacuuccuggcuuuaau

SEQ ID NO: 914417 - RNA, 19 nt, Homo sapiens
  misc_RNA (1)...(19): siRNA sense strand
gggcagagggcuaucuauc

SEQ ID NO: 914418 - RNA, 19 nt, Homo sapiens
  misc_RNA (1)...(19): siRNA sense strand
ugacuuggcagaagaagca

SEQ ID NO: 914419 - RNA, 19 nt, Homo sapiens
  misc_RNA (1)...(19): siRNA sense strand
cguaauagaacuucacgau

SEQ ID NO: 914420 - RNA, 19 nt, Homo sapiens
  misc_RNA (1)...(19): siRNA sense strand
uaaaaugguuggcuuugau

SEQ ID NO: 914421 - RNA, 19 nt, Homo sapiens
  misc_RNA (1)...(19): siRNA sense strand
augguuggcuuugauauga

SEQ ID NO: 914422 - RNA, 19 nt, Homo sapiens
  misc_RNA (1)...(19): siRNA sense strand
caaauugccucuccaagaa

SEQ ID NO: 914423 - RNA, 19 nt, Homo sapiens
  misc_RNA (1)...(19): siRNA sense strand
ccaggcaucugacauaaua

SEQ ID NO: 914424 - RNA, 19 nt, Homo sapiens
  misc_RNA (1)...(19): siRNA sense strand
ggaagaagaugaagaggau

SEQ ID NO: 914425 - RNA, 19 nt, Homo sapiens
  misc_RNA (1)...(19): siRNA sense strand
ggacaaggcccauuaugaa

SEQ ID NO: 914426 - RNA, 19 nt, Homo sapiens
  misc_RNA (1)...(19): siRNA sense strand
ccaagaaagugaagaagaa

SEQ ID NO: 914427 - RNA, 19 nt, Homo sapiens
  misc_RNA (1)...(19): siRNA sense strand
ugacaacccuuuagaauca

SEQ ID NO: 914428 - RNA, 19 nt, Homo sapiens
  misc_RNA (1)...(19): siRNA sense strand
ucaaagaaguguauacaga

SEQ ID NO: 914429 - RNA, 19 nt, Homo sapiens
  misc_RNA (1)...(19): siRNA sense strand
gaagugagccugugaucaa

SEQ ID NO: 914430 - RNA, 19 nt, Homo sapiens
  misc_RNA (1)...(19): siRNA sense strand
aggcauagaucuaaaguaa

SEQ ID NO: 914431 - RNA, 19 nt, Homo sapiens
  misc_RNA (1)...(19): siRNA sense strand
gaagggcacucuauauaag

SEQ ID NO: 914432 - RNA, 19 nt, Homo sapiens
  misc_RNA (1)...(19): siRNA sense strand
gcagggauguggaauaaca

SEQ ID NO: 914433 - RNA, 19 nt, Homo sapiens
  misc_RNA (1)...(19): siRNA sense strand
gaacuggagaagacauuua

SEQ ID NO: 914434 - RNA, 19 nt, Homo sapiens
  misc_RNA (1)...(19): siRNA sense strand
caaggaaccucaaagaagu

SEQ ID NO: 914435 - RNA, 19 nt, Homo sapiens
  misc_RNA (1)...(19): siRNA sense strand
uaaaguaaauggucuccaa

SEQ ID NO: 914436 - RNA, 19 nt, Homo sapiens
  misc_RNA (1)...(19): siRNA sense strand
gaacuggaagcuaaguaua

SEQ ID NO: 914437 - RNA, 19 nt, Homo sapiens
  misc_RNA (1)...(19): siRNA sense strand
gaauguauuucaccaguag

SEQ ID NO: 914438 - RNA, 19 nt, Homo sapiens
  misc_RNA (1)...(19): siRNA sense strand
aaaccuauaucccuccuaa

SEQ ID NO: 914439 - RNA, 19 nt, Homo sapiens
  misc_RNA (1)...(19): siRNA sense strand
ccaggaggcugaaugaaug

SEQ ID NO: 914440 - RNA, 19 nt, Homo sapiens
  misc_RNA (1)...(19): siRNA sense strand
gagaaggcauagaucuaaa

SEQ ID NO: 914441 - RNA, 19 nt, Homo sapiens
  misc_RNA (1)...(19): siRNA sense strand
gaacaaggaacuggugaaa

SEQ ID NO: 914442 - RNA, 19 nt, Homo sapiens
  misc_RNA (1)...(19): siRNA sense strand
cagaacagauaaaugcaaa

SEQ ID NO: 914443 - RNA, 19 nt, Homo sapiens
  misc_RNA (1)...(19): siRNA sense strand
uuaaagaagugcucagaga

SEQ ID NO: 914444 - RNA, 19 nt, Homo sapiens
  misc_RNA (1)...(19): siRNA sense strand
acagauaaaugcaaagaga

SEQ ID NO: 914445 - RNA, 19 nt, Homo sapiens
  misc_RNA (1)...(19): siRNA sense strand
ccaacuaagucuugaacaa

SEQ ID NO: 914446 - RNA, 19 nt, Homo sapiens
  misc_RNA (1)...(19): siRNA sense strand
gaaggaagaggaagaagau

SEQ ID NO: 914447 - RNA, 19 nt, Homo sapiens
  misc_RNA (1)...(19): siRNA sense strand
ucacaacaauaccuuaguu

SEQ ID NO: 914448 - RNA, 19 nt, Homo sapiens
  misc_RNA (1)...(19): siRNA sense strand
acaaauugcuguccaagug

SEQ ID NO: 914449 - RNA, 19 nt, Homo sapiens
  misc_RNA (1)...(19): siRNA sense strand
uguaauccaugacaaauug

SEQ ID NO: 914450 - RNA, 19 nt, Homo sapiens
  misc_RNA (1)...(19): siRNA sense strand
gugaagggcacucuauaua

SEQ ID NO: 914451 - RNA, 19 nt, Homo sapiens
  misc_RNA (1)...(19): siRNA sense strand
uaccagagcccauggauuu

SEQ ID NO: 914452 - RNA, 19 nt, Homo sapiens
  misc_RNA (1)...(19): siRNA sense strand
gaacagauaaaugcaaaga

SEQ ID NO: 914453 - RNA, 19 nt, Homo sapiens
  misc_RNA (1)...(19): siRNA sense strand
caaauuaauuccuguucug

SEQ ID NO: 914454 - RNA, 19 nt, Homo sapiens
  misc_RNA (1)...(19): siRNA sense strand
ugaaaguccugauggagaa

SEQ ID NO: 914455 - RNA, 19 nt, Homo sapiens
  misc_RNA (1)...(19): siRNA sense strand
gaagugcuccugugucaug

SEQ ID NO: 914456 - RNA, 19 nt, Homo sapiens
  misc_RNA (1)...(19): siRNA sense strand
caagcaagaacucaucaua

SEQ ID NO: 914457 - RNA, 19 nt, Homo sapiens
  misc_RNA (1)...(19): siRNA sense strand
guacaauguucuuagugaa

SEQ ID NO: 914458 - RNA, 19 nt, Homo sapiens
  misc_RNA (1)...(19): siRNA sense strand
uaaccaggcaucugacaua

SEQ ID NO: 914459 - RNA, 19 nt, Homo sapiens
  misc_RNA (1)...(19): siRNA sense strand
gaagcaaggacugaaagua

SEQ ID NO: 914460 - RNA, 19 nt, Homo sapiens
  misc_RNA (1)...(19): siRNA sense strand
caagaauucccaaagauga

SEQ ID NO: 914461 - RNA, 19 nt, Homo sapiens
  misc_RNA (1)...(19): siRNA sense strand
gcuccugugucauguguuu

SEQ ID NO: 914462 - RNA, 19 nt, Homo sapiens
  misc_RNA (1)...(19): siRNA sense strand
caaggcccauuaugaaaga

SEQ ID NO: 914463 - RNA, 19 nt, Homo sapiens
  misc_RNA (1)...(19): siRNA sense strand
ugaagggcacucuauauaa

SEQ ID NO: 914464 - RNA, 19 nt, Homo sapiens
  misc_RNA (1)...(19): siRNA sense strand
ccaaagagggagaaagaaa

SEQ ID NO: 914465 - RNA, 19 nt, Homo sapiens
  misc_RNA (1)...(19): siRNA sense strand
gaaacagaacagauaaaug

SEQ ID NO: 914466 - RNA, 19 nt, Homo sapiens
  misc_RNA (1)...(19): siRNA sense strand
ggaagaggaagaagaugaa

SEQ ID NO: 914467 - RNA, 19 nt, Homo sapiens
  misc_RNA (1)...(19): siRNA sense strand
gugagccugugaucaauaa

SEQ ID NO: 914468 - RNA, 19 nt, Homo sapiens
  misc_RNA (1)...(19): siRNA sense strand
gaagccaacaaacaaauga

SEQ ID NO: 914469 - RNA, 19 nt, Homo sapiens
  misc_RNA (1)...(19): siRNA sense strand
uggcagggauguggaauaa

SEQ ID NO: 914470 - RNA, 19 nt, Homo sapiens
  misc_RNA (1)...(19): siRNA sense strand
gugaggagcauaagaagaa

SEQ ID NO: 914471 - RNA, 19 nt, Homo sapiens
  misc_RNA (1)...(19): siRNA sense strand
gaaaagauggcaacaaaga

SEQ ID NO: 914472 - RNA, 19 nt, Homo sapiens
  misc_RNA (1)...(19): siRNA sense strand
aaacaaggaaccucaaaga

SEQ ID NO: 914473 - RNA, 19 nt, Homo sapiens
  misc_RNA (1)...(19): siRNA sense strand
gaaaagauacaaccaguga

SEQ ID NO: 914474 - RNA, 19 nt, Homo sapiens
  misc_RNA (1)...(19): siRNA sense strand
guauacagagugaggauaa

SEQ ID NO: 914475 - RNA, 19 nt, Homo sapiens
  misc_RNA (1)...(19): siRNA sense strand
ggaauaccccgauuuaauu

SEQ ID NO: 914476 - RNA, 19 nt, Homo sapiens
  misc_RNA (1)...(19): siRNA sense strand
ugaagaggaugaacaagag

SEQ ID NO: 914477 - RNA, 19 nt, Homo sapiens
  misc_RNA (1)...(19): siRNA sense strand
aaaaggauauugcugcaua

SEQ ID NO: 914478 - RNA, 19 nt, Homo sapiens
  misc_RNA (1)...(19): siRNA sense strand
gacaaggcccauuaugaaa

SEQ ID NO: 914479 - RNA, 19 nt, Homo sapiens
  misc_RNA (1)...(19): siRNA sense strand
gcaccaggaggcugaauga

SEQ ID NO: 914480 - RNA, 19 nt, Homo sapiens
  misc_RNA (1)...(19): siRNA sense strand
caaagaugauucgcuagga

SEQ ID NO: 914481 - RNA, 19 nt, Homo sapiens
  misc_RNA (1)...(19): siRNA sense strand
aaacagaacagauaaaugc

SEQ ID NO: 914482 - RNA, 19 nt, Homo sapiens
  misc_RNA (1)...(19): siRNA sense strand
ugacguugaugagcccuua

SEQ ID NO: 914483 - RNA, 19 nt, Homo sapiens
  misc_RNA (1)...(19): siRNA sense strand
gcuaaaggaaagccuaauu

SEQ ID NO: 914484 - RNA, 19 nt, Homo sapiens
  misc_RNA (1)...(19): siRNA sense strand
gaaccucaaagaaguguau

SEQ ID NO: 914485 - RNA, 19 nt, Homo sapiens
  misc_RNA (1)...(19): siRNA sense strand
guccaagaauucccaaaga

SEQ ID NO: 914486 - RNA, 19 nt, Homo sapiens
  misc_RNA (1)...(19): siRNA sense strand
gaagcaagcauggugagaa

SEQ ID NO: 914487 - RNA, 19 nt, Homo sapiens
  misc_RNA (1)...(19): siRNA sense strand
aaagaugauucgcuaggaa

SEQ ID NO: 914488 - RNA, 19 nt, Homo sapiens
  misc_RNA (1)...(19): siRNA sense strand
uguacaauguucuuaguga

SEQ ID NO: 914489 - RNA, 19 nt, Homo sapiens
  misc_RNA (1)...(19): siRNA sense strand
gaaagccuaauucagcaaa

SEQ ID NO: 914490 - RNA, 19 nt, Homo sapiens
  misc_RNA (1)...(19): siRNA sense strand
gaggcugaaugaauguauu

SEQ ID NO: 914491 - RNA, 19 nt, Homo sapiens
  misc_RNA (1)...(19): siRNA sense strand
gaaccaccaagcacaagaa

SEQ ID NO: 914492 - RNA, 19 nt, Homo sapiens
  misc_RNA (1)...(19): siRNA sense strand
aagaagugcuccuguguca

SEQ ID NO: 914493 - RNA, 19 nt, Homo sapiens
  misc_RNA (1)...(19): siRNA sense strand
caauaaugacaacccuuua

SEQ ID NO: 914494 - RNA, 19 nt, Homo sapiens
  misc_RNA (1)...(19): siRNA sense strand
gcugcucuaugacauugua

SEQ ID NO: 914495 - RNA, 19 nt, Homo sapiens
  misc_RNA (1)...(19): siRNA sense strand
gcaggaauaccccgauuua

SEQ ID NO: 914496 - RNA, 19 nt, Homo sapiens
  misc_RNA (1)...(19): siRNA sense strand
uaaaggaaagccuaauuca

SEQ ID NO: 914497 - RNA, 19 nt, Homo sapiens
  misc_RNA (1)...(19): siRNA sense strand
gcauaucgagcuaaaggaa

SEQ ID NO: 914498 - RNA, 19 nt, Homo sapiens
  misc_RNA (1)...(19): siRNA sense strand
agaaguguauacagaguga

SEQ ID NO: 914499 - RNA, 19 nt, Homo sapiens
  misc_RNA (1)...(19): siRNA sense strand
gaaaacaauucuacuuugg

SEQ ID NO: 914500 - RNA, 19 nt, Homo sapiens
  misc_RNA (1)...(19): siRNA sense strand
aagagacguuucagcagua

SEQ ID NO: 914501 - RNA, 19 nt, Homo sapiens
  misc_RNA (1)...(19): siRNA sense strand
ucaauaaugacaacccuuu

SEQ ID NO: 914502 - RNA, 19 nt, Homo sapiens
  misc_RNA (1)...(19): siRNA sense strand
agagagugguguacaaugu

SEQ ID NO: 914503 - RNA, 19 nt, Homo sapiens
  misc_RNA (1)...(19): siRNA sense strand
uugaugauguugugaagaa

SEQ ID NO: 914504 - RNA, 19 nt, Homo sapiens
  misc_RNA (1)...(19): siRNA sense strand
aagaaaagauggcaacaaa

SEQ ID NO: 914505 - RNA, 19 nt, Homo sapiens
  misc_RNA (1)...(19): siRNA sense strand
caagaagcaaggacugaaa

SEQ ID NO: 914506 - RNA, 19 nt, Homo sapiens
  misc_RNA (1)...(19): siRNA sense strand
gaugagcccuuagaagucu

SEQ ID NO: 914507 - RNA, 19 nt, Homo sapiens
  misc_RNA (1)...(19): siRNA sense strand
aagcaagaacucaucauaa

SEQ ID NO: 914508 - RNA, 19 nt, Homo sapiens
  misc_RNA (1)...(19): siRNA sense strand
ggaggaaaaugaagaagau

SEQ ID NO: 914509 - RNA, 19 nt, Homo sapiens
  misc_RNA (1)...(19): siRNA sense strand
gagcuaaaggaaagccuaa

SEQ ID NO: 914510 - RNA, 19 nt, Homo sapiens
  misc_RNA (1)...(19): siRNA sense strand
cugcaaagcugaaggaaaa

SEQ ID NO: 914511 - RNA, 19 nt, Homo sapiens
  misc_RNA (1)...(19): siRNA sense strand
gacaagcaguuuuaugaaa

SEQ ID NO: 914512 - RNA, 19 nt, Homo sapiens
  misc_RNA (1)...(19): siRNA sense strand
cacaagaaccugaaaauaa

SEQ ID NO: 914513 - RNA, 19 nt, Homo sapiens
  misc_RNA (1)...(19): siRNA sense strand
acaaauugccucuccaaga

SEQ ID NO: 914514 - RNA, 19 nt, Homo sapiens
  misc_RNA (1)...(19): siRNA sense strand
guucaaggaucccaaugca

SEQ ID NO: 914515 - RNA, 19 nt, Homo sapiens
  misc_RNA (1)...(19): siRNA sense strand
uaaacaaucugaacuuccu

SEQ ID NO: 914516 - RNA, 19 nt, Homo sapiens
  misc_RNA (1)...(19): siRNA sense strand
ugaagauucucaagauucu

SEQ ID NO: 914517 - RNA, 19 nt, Homo sapiens
  misc_RNA (1)...(19): siRNA sense strand
cgaacaaauugcuguccaa

SEQ ID NO: 914518 - RNA, 19 nt, Homo sapiens
  misc_RNA (1)...(19): siRNA sense strand
aguaaauggucuccaaaga

SEQ ID NO: 914519 - RNA, 19 nt, Homo sapiens
  misc_RNA (1)...(19): siRNA sense strand
ccaaauuaauuccuguucu

SEQ ID NO: 914520 - RNA, 19 nt, Homo sapiens
  misc_RNA (1)...(19): siRNA sense strand
ggugaagggcacucuauau

SEQ ID NO: 914521 - RNA, 19 nt, Homo sapiens
  misc_RNA (1)...(19): siRNA sense strand
guaaauggucuccaaagag

SEQ ID NO: 914522 - RNA, 19 nt, Homo sapiens
  misc_RNA (1)...(19): siRNA sense strand
ccucaagccuuaacauuua

SEQ ID NO: 914523 - RNA, 19 nt, Homo sapiens
  misc_RNA (1)...(19): siRNA sense strand
caaggcaucugaucugaaa

SEQ ID NO: 914524 - RNA, 19 nt, Homo sapiens
  misc_RNA (1)...(19): siRNA sense strand
gauaaacuguguucucaga

SEQ ID NO: 914525 - RNA, 19 nt, Homo sapiens
  misc_RNA (1)...(19): siRNA sense strand
cagcaaagauuuccgugaa

SEQ ID NO: 914526 - RNA, 19 nt, Homo sapiens
  misc_RNA (1)...(19): siRNA sense strand
ccagugacaugaaguuuga

SEQ ID NO: 914527 - RNA, 19 nt, Homo sapiens
  misc_RNA (1)...(19): siRNA sense strand
gaaggagaauuuugugaua

SEQ ID NO: 914528 - RNA, 19 nt, Homo sapiens
  misc_RNA (1)...(19): siRNA sense strand
ugagugaagugaaagauga

SEQ ID NO: 914529 - RNA, 19 nt, Homo sapiens
  misc_RNA (1)...(19): siRNA sense strand
ccucaaggaucaugaaaga

SEQ ID NO: 914530 - RNA, 19 nt, Homo sapiens
  misc_RNA (1)...(19): siRNA sense strand
gacaaagccuucaaacaca

SEQ ID NO: 914531 - RNA, 19 nt, Homo sapiens
  misc_RNA (1)...(19): siRNA sense strand
uugaagagguccugaacua

SEQ ID NO: 914532 - RNA, 19 nt, Homo sapiens
  misc_RNA (1)...(19): siRNA sense strand
ggacaacagccgccaguga

SEQ ID NO: 914533 - RNA, 19 nt, Homo sapiens
  misc_RNA (1)...(19): siRNA sense strand
ggacaggccauuuguuugu

SEQ ID NO: 914534 - RNA, 19 nt, Homo sapiens
  misc_RNA (1)...(19): siRNA sense strand
agaacaauaugcacaguga

SEQ ID NO: 914535 - RNA, 19 nt, Homo sapiens
  misc_RNA (1)...(19): siRNA sense strand
gaagagguccugaacuaca

SEQ ID NO: 914536 - RNA, 19 nt, Homo sapiens
  misc_RNA (1)...(19): siRNA sense strand
ccacaacgcucaggguuca

SEQ ID NO: 914537 - RNA, 19 nt, Homo sapiens
  misc_RNA (1)...(19): siRNA sense strand
gaaauucagagcacacaga

SEQ ID NO: 914538 - RNA, 19 nt, Homo sapiens
  misc_RNA (1)...(19): siRNA sense strand
uaaagaagcaugagagagu

SEQ ID NO: 914539 - RNA, 19 nt, Homo sapiens
  misc_RNA (1)...(19): siRNA sense strand
gacaugaaguuugaguauu

SEQ ID NO: 914540 - RNA, 19 nt, Homo sapiens
  misc_RNA (1)...(19): siRNA sense strand
uaaaauaaaucgccccauu

SEQ ID NO: 914541 - RNA, 19 nt, Homo sapiens
  misc_RNA (1)...(19): siRNA sense strand
ugagagaguucacaguaau

SEQ ID NO: 914542 - RNA, 19 nt, Homo sapiens
  misc_RNA (1)...(19): siRNA sense strand
ggaugaugauguagaggaa

SEQ ID NO: 914543 - RNA, 19 nt, Homo sapiens
  misc_RNA (1)...(19): siRNA sense strand
caguaugucugaaaccauu

SEQ ID NO: 914544 - RNA, 19 nt, Homo sapiens
  misc_RNA (1)...(19): siRNA sense strand
gcggacaggccauuuguuu

SEQ ID NO: 914545 - RNA, 19 nt, Homo sapiens
  misc_RNA (1)...(19): siRNA sense strand
ggaagacguuuucugauga

SEQ ID NO: 914546 - RNA, 19 nt, Homo sapiens
  misc_RNA (1)...(19): siRNA sense strand
acacaagucucaccucaag

SEQ ID NO: 914547 - RNA, 19 nt, Homo sapiens
  misc_RNA (1)...(19): siRNA sense strand
caugagagaguucacagua

SEQ ID NO: 914548 - RNA, 19 nt, Homo sapiens
  misc_RNA (1)...(19): siRNA sense strand
caaggaucaugaaagaaga

SEQ ID NO: 914549 - RNA, 19 nt, Homo sapiens
  misc_RNA (1)...(19): siRNA sense strand
aaacaauggucaguccaaa

SEQ ID NO: 914550 - RNA, 19 nt, Homo sapiens
  misc_RNA (1)...(19): siRNA sense strand
gcagauugaggaagcauga

SEQ ID NO: 914551 - RNA, 19 nt, Homo sapiens
  misc_RNA (1)...(19): siRNA sense strand
ugaaagagcuggggaguga

SEQ ID NO: 914552 - RNA, 19 nt, Homo sapiens
  misc_RNA (1)...(19): siRNA sense strand
gagcgagacagaacaguug

SEQ ID NO: 914553 - RNA, 19 nt, Homo sapiens
  misc_RNA (1)...(19): siRNA sense strand
gcugugagguguguggaaa

SEQ ID NO: 914554 - RNA, 19 nt, Homo sapiens
  misc_RNA (1)...(19): siRNA sense strand
ugauaguucuucggucaua

SEQ ID NO: 914555 - RNA, 19 nt, Homo sapiens
  misc_RNA (1)...(19): siRNA sense strand
ugacaaagccuucaaacac

SEQ ID NO: 914556 - RNA, 19 nt, Homo sapiens
  misc_RNA (1)...(19): siRNA sense strand
gcaagucgcccaccacaac

SEQ ID NO: 914557 - RNA, 19 nt, Homo sapiens
  misc_RNA (1)...(19): siRNA sense strand
ugauauugcuauugugguu

SEQ ID NO: 914558 - RNA, 19 nt, Homo sapiens
  misc_RNA (1)...(19): siRNA sense strand
cacccaggaugaugaugua

SEQ ID NO: 914559 - RNA, 19 nt, Homo sapiens
  misc_RNA (1)...(19): siRNA sense strand
uggauaaacuguguucuca

SEQ ID NO: 914560 - RNA, 19 nt, Homo sapiens
  misc_RNA (1)...(19): siRNA sense strand
aaagaagcaugagagaguu

SEQ ID NO: 914561 - RNA, 19 nt, Homo sapiens
  misc_RNA (1)...(19): siRNA sense strand
gaaguuugaguauuugcuu

SEQ ID NO: 914562 - RNA, 19 nt, Homo sapiens
  misc_RNA (1)...(19): siRNA sense strand
gaugacaguccuucugaug

SEQ ID NO: 914563 - RNA, 19 nt, Homo sapiens
  misc_RNA (1)...(19): siRNA sense strand
gccaaggcaucugaucuga

SEQ ID NO: 914564 - RNA, 19 nt, Homo sapiens
  misc_RNA (1)...(19): siRNA sense strand
acaaagccuucaaacacaa

SEQ ID NO: 914565 - RNA, 19 nt, Homo sapiens
  misc_RNA (1)...(19): siRNA sense strand
ugacaugaaguuugaguau

SEQ ID NO: 914566 - RNA, 19 nt, Homo sapiens
  misc_RNA (1)...(19): siRNA sense strand
agugaaagaugaacagaca

SEQ ID NO: 914567 - RNA, 19 nt, Homo sapiens
  misc_RNA (1)...(19): siRNA sense strand
ugggaugagugaagugaaa

SEQ ID NO: 914568 - RNA, 19 nt, Homo sapiens
  misc_RNA (1)...(19): siRNA sense strand
gggaagacguuuucugaug

SEQ ID NO: 914569 - RNA, 19 nt, Homo sapiens
  misc_RNA (1)...(19): siRNA sense strand
gauucuugguauccgauuu

SEQ ID NO: 914570 - RNA, 19 nt, Homo sapiens
  misc_RNA (1)...(19): siRNA sense strand
gaacaauaugcacagugaa

SEQ ID NO: 914571 - RNA, 19 nt, Homo sapiens
  misc_RNA (1)...(19): siRNA sense strand
gaucaugaaagaagacaca

SEQ ID NO: 914572 - RNA, 19 nt, Homo sapiens
  misc_RNA (1)...(19): siRNA sense strand
ccagaccccucaagccuua

SEQ ID NO: 914573 - RNA, 19 nt, Homo sapiens
  misc_RNA (1)...(19): siRNA sense strand
gguugaggaugugaaauuc

SEQ ID NO: 914574 - RNA, 19 nt, Homo sapiens
  misc_RNA (1)...(19): siRNA sense strand
caugaaguuugaguauuug

SEQ ID NO: 914575 - RNA, 19 nt, Homo sapiens
  misc_RNA (1)...(19): siRNA sense strand
ucaaggaucaugaaagaag

SEQ ID NO: 914576 - RNA, 19 nt, Homo sapiens
  misc_RNA (1)...(19): siRNA sense strand
gaaguucggaaggucaauu

SEQ ID NO: 914577 - RNA, 19 nt, Homo sapiens
  misc_RNA (1)...(19): siRNA sense strand
gaagugaaagaugaacaga

SEQ ID NO: 914578 - RNA, 19 nt, Homo sapiens
  misc_RNA (1)...(19): siRNA sense strand
cgggucagauucuugguau

SEQ ID NO: 914579 - RNA, 19 nt, Homo sapiens
  misc_RNA (1)...(19): siRNA sense strand
gaagacguuuucugaugaa

SEQ ID NO: 914580 - RNA, 19 nt, Homo sapiens
  misc_RNA (1)...(19): siRNA sense strand
ggaugacaguccuucugau

SEQ ID NO: 914581 - RNA, 19 nt, Homo sapiens
  misc_RNA (1)...(19): siRNA sense strand
ccaggaugaugauguagag

SEQ ID NO: 914582 - RNA, 19 nt, Homo sapiens
  misc_RNA (1)...(19): siRNA sense strand
agucucaccucaaggauca

SEQ ID NO: 914583 - RNA, 19 nt, Homo sapiens
  misc_RNA (1)...(19): siRNA sense strand
gaaaugugcacaaaagguu

SEQ ID NO: 914584 - RNA, 19 nt, Homo sapiens
  misc_RNA (1)...(19): siRNA sense strand
uuaaugaugggaugaguga

SEQ ID NO: 914585 - RNA, 19 nt, Homo sapiens
  misc_RNA (1)...(19): siRNA sense strand
augagagaguucacaguaa

SEQ ID NO: 914586 - RNA, 19 nt, Homo sapiens
  misc_RNA (1)...(19): siRNA sense strand
cauguacacagcaaagauu

SEQ ID NO: 914587 - RNA, 19 nt, Homo sapiens
  misc_RNA (1)...(19): siRNA sense strand
gaggaagcaugagaaacuc

SEQ ID NO: 914588 - RNA, 19 nt, Homo sapiens
  misc_RNA (1)...(19): siRNA sense strand
ugaggaagcaugagaaacu

SEQ ID NO: 914589 - RNA, 19 nt, Homo sapiens
  misc_RNA (1)...(19): siRNA sense strand
ugacaguccuucugaugac

SEQ ID NO: 914590 - RNA, 19 nt, Homo sapiens
  misc_RNA (1)...(19): siRNA sense strand
gagagaguucacaguaaug

SEQ ID NO: 914591 - RNA, 19 nt, Homo sapiens
  misc_RNA (1)...(19): siRNA sense strand
guccugaacuacauguaca

SEQ ID NO: 914592 - RNA, 19 nt, Homo sapiens
  misc_RNA (1)...(19): siRNA sense strand
gacaggccauuuguuugug

SEQ ID NO: 914593 - RNA, 19 nt, Homo sapiens
  misc_RNA (1)...(19): siRNA sense strand
aaaggcacgagaacaauau

SEQ ID NO: 914594 - RNA, 19 nt, Homo sapiens
  misc_RNA (1)...(19): siRNA sense strand
gaugggaugagugaaguga

SEQ ID NO: 914595 - RNA, 19 nt, Homo sapiens
  misc_RNA (1)...(19): siRNA sense strand
uucggaaggucaauugcua

SEQ ID NO: 914596 - RNA, 19 nt, Homo sapiens
  misc_RNA (1)...(19): siRNA sense strand
aacaauaugcacagugaaa

SEQ ID NO: 914597 - RNA, 19 nt, Homo sapiens
  misc_RNA (1)...(19): siRNA sense strand
caaaagguuucaccacaca

SEQ ID NO: 914598 - RNA, 19 nt, Homo sapiens
  misc_RNA (1)...(19): siRNA sense strand
ggagaauuuugugauauug

SEQ ID NO: 914599 - RNA, 19 nt, Homo sapiens
  misc_RNA (1)...(19): siRNA sense strand
gauugaggaagcaugagaa

SEQ ID NO: 914600 - RNA, 19 nt, Homo sapiens
  misc_RNA (1)...(19): siRNA sense strand
cccucaagccuuaacauuu

SEQ ID NO: 914601 - RNA, 19 nt, Homo sapiens
  misc_RNA (1)...(19): siRNA sense strand
agugaaaggaagcagguua

SEQ ID NO: 914602 - RNA, 19 nt, Homo sapiens
  misc_RNA (1)...(19): siRNA sense strand
acaagucucaccucaagga

SEQ ID NO: 914603 - RNA, 19 nt, Homo sapiens
  misc_RNA (1)...(19): siRNA sense strand
acaggccauuuguuuguga

SEQ ID NO: 914604 - RNA, 19 nt, Homo sapiens
  misc_RNA (1)...(19): siRNA sense strand
uugaguauuugcuuuaugg

SEQ ID NO: 914605 - RNA, 19 nt, Homo sapiens
  misc_RNA (1)...(19): siRNA sense strand
guaugucugaaaccauuaa

SEQ ID NO: 914606 - RNA, 19 nt, Homo sapiens
  misc_RNA (1)...(19): siRNA sense strand
gccagugacaugaaguuug

SEQ ID NO: 914607 - RNA, 19 nt, Homo sapiens
  misc_RNA (1)...(19): siRNA sense strand
gccaggaaguagaauccau

SEQ ID NO: 914608 - RNA, 19 nt, Homo sapiens
  misc_RNA (1)...(19): siRNA sense strand
gauaguucuucggucauag

SEQ ID NO: 914609 - RNA, 19 nt, Homo sapiens
  misc_RNA (1)...(19): siRNA sense strand
gugaggaaguucggaaggu

SEQ ID NO: 914610 - RNA, 19 nt, Homo sapiens
  misc_RNA (1)...(19): siRNA sense strand
cgagaacaauaugcacagu

SEQ ID NO: 914611 - RNA, 19 nt, Homo sapiens
  misc_RNA (1)...(19): siRNA sense strand
ggaugagugaagugaaaga

SEQ ID NO: 914612 - RNA, 19 nt, Homo sapiens
  misc_RNA (1)...(19): siRNA sense strand
caauugcuacggccaggaa

SEQ ID NO: 914613 - RNA, 19 nt, Homo sapiens
  misc_RNA (1)...(19): siRNA sense strand
auucagagcacacagaugu

SEQ ID NO: 914614 - RNA, 19 nt, Homo sapiens
  misc_RNA (1)...(19): siRNA sense strand
uggagacgauagccuguag

SEQ ID NO: 914615 - RNA, 19 nt, Homo sapiens
  misc_RNA (1)...(19): siRNA sense strand
gugacaaagccuucaaaca

SEQ ID NO: 914616 - RNA, 19 nt, Homo sapiens
  misc_RNA (1)...(19): siRNA sense strand
auauugcuauugugguuga

SEQ ID NO: 914617 - RNA, 19 nt, Homo sapiens
  misc_RNA (1)...(19): siRNA sense strand
aagagguccugaacuacau

SEQ ID NO: 914618 - RNA, 19 nt, Homo sapiens
  misc_RNA (1)...(19): siRNA sense strand
cuauugugguugaggaugu

SEQ ID NO: 914619 - RNA, 19 nt, Homo sapiens
  misc_RNA (1)...(19): siRNA sense strand
gaagcuugagguugauagu

SEQ ID NO: 914620 - RNA, 19 nt, Homo sapiens
  misc_RNA (1)...(19): siRNA sense strand
gaaaaggcacgagaacaau

SEQ ID NO: 914621 - RNA, 19 nt, Homo sapiens
  misc_RNA (1)...(19): siRNA sense strand
ugaaaaggcacgagaacaa

SEQ ID NO: 914622 - RNA, 19 nt, Homo sapiens
  misc_RNA (1)...(19): siRNA sense strand
gccaagugcucaaauauga

SEQ ID NO: 914623 - RNA, 19 nt, Homo sapiens
  misc_RNA (1)...(19): siRNA sense strand
ucucagagcugcaggauga

SEQ ID NO: 914624 - RNA, 19 nt, Homo sapiens
  misc_RNA (1)...(19): siRNA sense strand
gcucaaauaugacgacuuc

SEQ ID NO: 914625 - RNA, 19 nt, Homo sapiens
  misc_RNA (1)...(19): siRNA sense strand
ggagacuguugccuacuua

SEQ ID NO: 914626 - RNA, 19 nt, Homo sapiens
  misc_RNA (1)...(19): siRNA sense strand
ggcaggagaugacaaguau

SEQ ID NO: 914627 - RNA, 19 nt, Homo sapiens
  misc_RNA (1)...(19): siRNA sense strand
ggaagaucauuguguuuag

SEQ ID NO: 914628 - RNA, 19 nt, Homo sapiens
  misc_RNA (1)...(19): siRNA sense strand
gaucugaccuuggaugaca

SEQ ID NO: 914629 - RNA, 19 nt, Homo sapiens
  misc_RNA (1)...(19): siRNA sense strand
gggaagugcagcagaagua

SEQ ID NO: 914630 - RNA, 19 nt, Homo sapiens
  misc_RNA (1)...(19): siRNA sense strand
gaagaucauuguguuuagu

SEQ ID NO: 914631 - RNA, 19 nt, Homo sapiens
  misc_RNA (1)...(19): siRNA sense strand
ccaaguuccuucuggauca

SEQ ID NO: 914632 - RNA, 19 nt, Homo sapiens
  misc_RNA (1)...(19): siRNA sense strand
acacuaaccuggcuguugu

SEQ ID NO: 914633 - RNA, 19 nt, Homo sapiens
  misc_RNA (1)...(19): siRNA sense strand
gaacuggcccucggaugaa

SEQ ID NO: 914634 - RNA, 19 nt, Homo sapiens
  misc_RNA (1)...(19): siRNA sense strand
gggagacuguugccuacuu

SEQ ID NO: 914635 - RNA, 19 nt, Homo sapiens
  misc_RNA (1)...(19): siRNA sense strand
cggaagaucauuguguuua

SEQ ID NO: 914636 - RNA, 19 nt, Homo sapiens
  misc_RNA (1)...(19): siRNA sense strand
gcaaguacaagaagaacau

SEQ ID NO: 914637 - RNA, 19 nt, Homo sapiens
  misc_RNA (1)...(19): siRNA sense strand
ggcggaagaucauuguguu

SEQ ID NO: 914638 - RNA, 19 nt, Homo sapiens
  misc_RNA (1)...(19): siRNA sense strand
gaagcuggccuccaucgau

SEQ ID NO: 914639 - RNA, 19 nt, Homo sapiens
  misc_RNA (1)...(19): siRNA sense strand
gaucuucuaugugaauuac

SEQ ID NO: 914640 - RNA, 19 nt, Homo sapiens
  misc_RNA (1)...(19): siRNA sense strand
gaccgcaaguacaagaaga

SEQ ID NO: 914641 - RNA, 19 nt, Homo sapiens
  misc_RNA (1)...(19): siRNA sense strand
uaugacgacuuccugaaau

SEQ ID NO: 914642 - RNA, 19 nt, Homo sapiens
  misc_RNA (1)...(19): siRNA sense strand
cggaugaaaugccugacuu

SEQ ID NO: 914643 - RNA, 19 nt, Homo sapiens
  misc_RNA (1)...(19): siRNA sense strand
acaagaugaccaacacuaa

SEQ ID NO: 914644 - RNA, 19 nt, Homo sapiens
  misc_RNA (1)...(19): siRNA sense strand
ggagcccauucccauugua

SEQ ID NO: 914645 - RNA, 19 nt, Homo sapiens
  misc_RNA (1)...(19): siRNA sense strand
aggaugaucugaccuugga

SEQ ID NO: 914646 - RNA, 19 nt, Homo sapiens
  misc_RNA (1)...(19): siRNA sense strand
guggugggcuuccucaaca

SEQ ID NO: 914647 - RNA, 19 nt, Homo sapiens
  misc_RNA (1)...(19): siRNA sense strand
gcaggagcccauucccauu

SEQ ID NO: 914648 - RNA, 19 nt, Homo sapiens
  misc_RNA (1)...(19): siRNA sense strand
ucaacaccuucaccaaguu

SEQ ID NO: 914649 - RNA, 19 nt, Homo sapiens
  misc_RNA (1)...(19): siRNA sense strand
uaaccuggcuguuguuuuc

SEQ ID NO: 914650 - RNA, 19 nt, Homo sapiens
  misc_RNA (1)...(19): siRNA sense strand
aaacucugcucauccucuu

SEQ ID NO: 914651 - RNA, 19 nt, Homo sapiens
  misc_RNA (1)...(19): siRNA sense strand
agaacuggcccucggauga

SEQ ID NO: 914652 - RNA, 19 nt, Homo sapiens
  misc_RNA (1)...(19): siRNA sense strand
guacucagggagacuguug

SEQ ID NO: 914653 - RNA, 19 nt, Homo sapiens
  misc_RNA (1)...(19): siRNA sense strand
gcggaagaucauuguguuu

SEQ ID NO: 914654 - RNA, 19 nt, Homo sapiens
  misc_RNA (1)...(19): siRNA sense strand
agaacaagaugaccaacac

SEQ ID NO: 914655 - RNA, 19 nt, Homo sapiens
  misc_RNA (1)...(19): siRNA sense strand
gcacacagugaccagaaca

SEQ ID NO: 914656 - RNA, 19 nt, Homo sapiens
  misc_RNA (1)...(19): siRNA sense strand
acuaccaggugcuucguuu

SEQ ID NO: 914657 - RNA, 19 nt, Homo sapiens
  misc_RNA (1)...(19): siRNA sense strand
cauccaaccauguucauca

SEQ ID NO: 914658 - RNA, 19 nt, Homo sapiens
  misc_RNA (1)...(19): siRNA sense strand
accaguacguggagaguga

SEQ ID NO: 914659 - RNA, 19 nt, Homo sapiens
  misc_RNA (1)...(19): siRNA sense strand
caggagcccauucccauug

SEQ ID NO: 914660 - RNA, 19 nt, Homo sapiens
  misc_RNA (1)...(19): siRNA sense strand
gggcggaagaucauugugu

SEQ ID NO: 914661 - RNA, 19 nt, Homo sapiens
  misc_RNA (1)...(19): siRNA sense strand
gcucaccuuugaccucuac

SEQ ID NO: 914662 - RNA, 19 nt, Homo sapiens
  misc_RNA (1)...(19): siRNA sense strand
ccaaccauguucaucaaaa

SEQ ID NO: 914663 - RNA, 19 nt, Homo sapiens
  misc_RNA (1)...(19): siRNA sense strand
uggcaggagaugacaagua

SEQ ID NO: 914664 - RNA, 19 nt, Homo sapiens
  misc_RNA (1)...(19): siRNA sense strand
ggagaacuaccaggugcuu

SEQ ID NO: 914665 - RNA, 19 nt, Homo sapiens
  misc_RNA (1)...(19): siRNA sense strand
ggauuucgaccaguacaau

SEQ ID NO: 914666 - RNA, 19 nt, Homo sapiens
  misc_RNA (1)...(19): siRNA sense strand
ggaguuugaccgcaaguac

SEQ ID NO: 914667 - RNA, 19 nt, Homo sapiens
  misc_RNA (1)...(19): siRNA sense strand
guacaagaagaacaucaag

SEQ ID NO: 914668 - RNA, 19 nt, Homo sapiens
  misc_RNA (1)...(19): siRNA sense strand
uuaaucccaucaacaccuu

SEQ ID NO: 914669 - RNA, 19 nt, Homo sapiens
  misc_RNA (1)...(19): siRNA sense strand
acagugaccagaacaagau

SEQ ID NO: 914670 - RNA, 19 nt, Homo sapiens
  misc_RNA (1)...(19): siRNA sense strand
ggaugaaaugccugacuuc

SEQ ID NO: 914671 - RNA, 19 nt, Homo sapiens
  misc_RNA (1)...(19): siRNA sense strand
gaagugcagcagaaguaca

SEQ ID NO: 914672 - RNA, 19 nt, Homo sapiens
  misc_RNA (1)...(19): siRNA sense strand
ccucaucagcuucaaguuc

SEQ ID NO: 914673 - RNA, 19 nt, Homo sapiens
  misc_RNA (1)...(19): siRNA sense strand
caucaaaacucugcucauc

SEQ ID NO: 914674 - RNA, 19 nt, Homo sapiens
  misc_RNA (1)...(19): siRNA sense strand
gcagcagaaguacaacaug

SEQ ID NO: 914675 - RNA, 19 nt, Homo sapiens
  misc_RNA (1)...(19): siRNA sense strand
caggagaugacaaguaugg

SEQ ID NO: 914676 - RNA, 19 nt, Homo sapiens
  misc_RNA (1)...(19): siRNA sense strand
caagaugaccaacacuaac

SEQ ID NO: 914677 - RNA, 19 nt, Homo sapiens
  misc_RNA (1)...(19): siRNA sense strand
gaacaagaugaccaacacu

SEQ ID NO: 914678 - RNA, 19 nt, Homo sapiens
  misc_RNA (1)...(19): siRNA sense strand
ucagaugacuccaaaagca

SEQ ID NO: 914679 - RNA, 19 nt, Homo sapiens
  misc_RNA (1)...(19): siRNA sense strand
uuccugaaauccacacaga

SEQ ID NO: 914680 - RNA, 19 nt, Homo sapiens
  misc_RNA (1)...(19): siRNA sense strand
caacaccuucaccaaguuc

SEQ ID NO: 914681 - RNA, 19 nt, Homo sapiens
  misc_RNA (1)...(19): siRNA sense strand
aacaagaugaccaacacua

SEQ ID NO: 914682 - RNA, 19 nt, Homo sapiens
  misc_RNA (1)...(19): siRNA sense strand
cucgccaagugcucaaaua

SEQ ID NO: 914683 - RNA, 19 nt, Homo sapiens
  misc_RNA (1)...(19): siRNA sense strand
ggagguggcaggagaugac

SEQ ID NO: 914684 - RNA, 19 nt, Homo sapiens
  misc_RNA (1)...(19): siRNA sense strand
ggccauuaaucccaucaac

SEQ ID NO: 914685 - RNA, 19 nt, Homo sapiens
  misc_RNA (1)...(19): siRNA sense strand
cagcagucauccucaagac

SEQ ID NO: 914686 - RNA, 19 nt, Homo sapiens
  misc_RNA (1)...(19): siRNA sense strand
guuuagugccugucgaaug

SEQ ID NO: 914687 - RNA, 19 nt, Homo sapiens
  misc_RNA (1)...(19): siRNA sense strand
cagaacaagaugaccaaca

SEQ ID NO: 914688 - RNA, 19 nt, Homo sapiens
  misc_RNA (1)...(19): siRNA sense strand
cuguggauuucgaccagua

SEQ ID NO: 914689 - RNA, 19 nt, Homo sapiens
  misc_RNA (1)...(19): siRNA sense strand
ugaaauccacacagaagag

SEQ ID NO: 914690 - RNA, 19 nt, Homo sapiens
  misc_RNA (1)...(19): siRNA sense strand
uuuagugccugucgaaugc

SEQ ID NO: 914691 - RNA, 19 nt, Homo sapiens
  misc_RNA (1)...(19): siRNA sense strand
gaguuugaccgcaaguaca

SEQ ID NO: 914692 - RNA, 19 nt, Homo sapiens
  misc_RNA (1)...(19): siRNA sense strand
gccauuaaucccaucaaca

SEQ ID NO: 914693 - RNA, 19 nt, Homo sapiens
  misc_RNA (1)...(19): siRNA sense strand
ggugggcuuccucaacauu

SEQ ID NO: 914694 - RNA, 19 nt, Homo sapiens
  misc_RNA (1)...(19): siRNA sense strand
ccugaaauccacacagaag

SEQ ID NO: 914695 - RNA, 19 nt, Homo sapiens
  misc_RNA (1)...(19): siRNA sense strand
gcugaucaauuucaucuuc

SEQ ID NO: 914696 - RNA, 19 nt, Homo sapiens
  misc_RNA (1)...(19): siRNA sense strand
aaugagaagugcugguuug

SEQ ID NO: 914697 - RNA, 19 nt, Homo sapiens
  misc_RNA (1)...(19): siRNA sense strand
gcaaggugcacuaccaugu

SEQ ID NO: 914698 - RNA, 19 nt, Homo sapiens
  misc_RNA (1)...(19): siRNA sense strand
ugacagccgccuacaacua

SEQ ID NO: 914699 - RNA, 19 nt, Homo sapiens
  misc_RNA (1)...(19): siRNA sense strand
ucaccuacaugcuguucuu

SEQ ID NO: 914700 - RNA, 19 nt, Homo sapiens
  misc_RNA (1)...(19): siRNA sense strand
guucuacuguuuccucaau

SEQ ID NO: 914701 - RNA, 19 nt, Homo sapiens
  misc_RNA (1)...(19): siRNA sense strand
uaugguguccgcuacaaua

SEQ ID NO: 914702 - RNA, 19 nt, Homo sapiens
  misc_RNA (1)...(19): siRNA sense strand
gaagcuguacuacgacaau

SEQ ID NO: 914703 - RNA, 19 nt, Homo sapiens
  misc_RNA (1)...(19): siRNA sense strand
gggcauccaccacgucuga

SEQ ID NO: 914704 - RNA, 19 nt, Homo sapiens
  misc_RNA (1)...(19): siRNA sense strand
gcuacaauaccacaaacaa

SEQ ID NO: 914705 - RNA, 19 nt, Homo sapiens
  misc_RNA (1)...(19): siRNA sense strand
uacaacuacuuccauguga

SEQ ID NO: 914706 - RNA, 19 nt, Homo sapiens
  misc_RNA (1)...(19): siRNA sense strand
ucgcagucaucaucaacua

SEQ ID NO: 914707 - RNA, 19 nt, Homo sapiens
  misc_RNA (1)...(19): siRNA sense strand
uacaauaccacaaacaaug

SEQ ID NO: 914708 - RNA, 19 nt, Homo sapiens
  misc_RNA (1)...(19): siRNA sense strand
guacaccgacuacaucuac

SEQ ID NO: 914709 - RNA, 19 nt, Homo sapiens
  misc_RNA (1)...(19): siRNA sense strand
gcaguccacagcagucuga

SEQ ID NO: 914710 - RNA, 19 nt, Homo sapiens
  misc_RNA (1)...(19): siRNA sense strand
ugucuguguucuacuguuu

SEQ ID NO: 914711 - RNA, 19 nt, Homo sapiens
  misc_RNA (1)...(19): siRNA sense strand
aaagcaaggugcacuacca

SEQ ID NO: 914712 - RNA, 19 nt, Homo sapiens
  misc_RNA (1)...(19): siRNA sense strand
gguggccuuuguccucuuu

SEQ ID NO: 914713 - RNA, 19 nt, Homo sapiens
  misc_RNA (1)...(19): siRNA sense strand
uugggaagcuguacuacga

SEQ ID NO: 914714 - RNA, 19 nt, Homo sapiens
  misc_RNA (1)...(19): siRNA sense strand
uuccagggcuucuuugugu

SEQ ID NO: 914715 - RNA, 19 nt, Homo sapiens
  misc_RNA (1)...(19): siRNA sense strand
gcagcuccgucucgucaag

SEQ ID NO: 914716 - RNA, 19 nt, Homo sapiens
  misc_RNA (1)...(19): siRNA sense strand
gcaaaaggccuggggugua

SEQ ID NO: 914717 - RNA, 19 nt, Homo sapiens
  misc_RNA (1)...(19): siRNA sense strand
ugaccaacuucuucuggau

SEQ ID NO: 914718 - RNA, 19 nt, Homo sapiens
  misc_RNA (1)...(19): siRNA sense strand
guacuacgacaaugagaag

SEQ ID NO: 914719 - RNA, 19 nt, Homo sapiens
  misc_RNA (1)...(19): siRNA sense strand
cuacaacuacuuccaugug

SEQ ID NO: 914720 - RNA, 19 nt, Homo sapiens
  misc_RNA (1)...(19): siRNA sense strand
acuguuuccucaauaguga

SEQ ID NO: 914721 - RNA, 19 nt, Homo sapiens
  misc_RNA (1)...(19): siRNA sense strand
ccauugggaagcuguacua

SEQ ID NO: 914722 - RNA, 19 nt, Homo sapiens
  misc_RNA (1)...(19): siRNA sense strand
caaugagaagugcugguuu

SEQ ID NO: 914723 - RNA, 19 nt, Homo sapiens
  misc_RNA (1)...(19): siRNA sense strand
ggugacagccgccuacaac

SEQ ID NO: 914724 - RNA, 19 nt, Homo sapiens
  misc_RNA (1)...(19): siRNA sense strand
cuacaauaccacaaacaau

SEQ ID NO: 914725 - RNA, 19 nt, Homo sapiens
  misc_RNA (1)...(19): siRNA sense strand
gguguccgcuacaauacca

SEQ ID NO: 914726 - RNA, 19 nt, Homo sapiens
  misc_RNA (1)...(19): siRNA sense strand
cccaacccgugucagcuuu

SEQ ID NO: 914727 - RNA, 19 nt, Homo sapiens
  misc_RNA (1)...(19): siRNA sense strand
gacagccgccuacaacuac

SEQ ID NO: 914728 - RNA, 19 nt, Homo sapiens
  misc_RNA (1)...(19): siRNA sense strand
ccucaucuccgccuucauc

SEQ ID NO: 914729 - RNA, 19 nt, Homo sapiens
  misc_RNA (1)...(19): siRNA sense strand
caacccgugucagcuuuca

SEQ ID NO: 914730 - RNA, 19 nt, Homo sapiens
  misc_RNA (1)...(19): siRNA sense strand
caacuucuucuggauguuc

SEQ ID NO: 914731 - RNA, 19 nt, Homo sapiens
  misc_RNA (1)...(19): siRNA sense strand
acaaugagaagugcugguu

SEQ ID NO: 914732 - RNA, 19 nt, Homo sapiens
  misc_RNA (1)...(19): siRNA sense strand
ugguccugcugaucaauuu

SEQ ID NO: 914733 - RNA, 19 nt, Homo sapiens
  misc_RNA (1)...(19): siRNA sense strand
caaaaggccugggguguac

SEQ ID NO: 914734 - RNA, 19 nt, Homo sapiens
  misc_RNA (1)...(19): siRNA sense strand
cagccaucgugcucaccua

SEQ ID NO: 914735 - RNA, 19 nt, Homo sapiens
  misc_RNA (1)...(19): siRNA sense strand
gaucaauuucaucuuccuu

SEQ ID NO: 914736 - RNA, 19 nt, Homo sapiens
  misc_RNA (1)...(19): siRNA sense strand
ucuacuguuuccucaauag

SEQ ID NO: 914737 - RNA, 19 nt, Homo sapiens
  misc_RNA (1)...(19): siRNA sense strand
ucaucuacuucaacuccuu

SEQ ID NO: 914738 - RNA, 19 nt, Homo sapiens
  misc_RNA (1)...(19): siRNA sense strand
gcauccaccacgucugaga

SEQ ID NO: 914739 - RNA, 19 nt, Homo sapiens
  misc_RNA (1)...(19): siRNA sense strand
caaggugcacuaccauguc

SEQ ID NO: 914740 - RNA, 19 nt, Homo sapiens
  misc_RNA (1)...(19): siRNA sense strand
ccaugucgcagucaucauc

SEQ ID NO: 914741 - RNA, 19 nt, Homo sapiens
  misc_RNA (1)...(19): siRNA sense strand
ccaugugaccaacuucuuc

SEQ ID NO: 914742 - RNA, 19 nt, Homo sapiens
  misc_RNA (1)...(19): siRNA sense strand
ggaaagacgacaacgauaa

SEQ ID NO: 914743 - RNA, 19 nt, Homo sapiens
  misc_RNA (1)...(19): siRNA sense strand
gggcagcacuucuacauga

SEQ ID NO: 914744 - RNA, 19 nt, Homo sapiens
  misc_RNA (1)...(19): siRNA sense strand
ggaaagcucucuauaccau

SEQ ID NO: 914745 - RNA, 19 nt, Homo sapiens
  misc_RNA (1)...(19): siRNA sense strand
gaacagagagaccagcaaa

SEQ ID NO: 914746 - RNA, 19 nt, Homo sapiens
  misc_RNA (1)...(19): siRNA sense strand
uguccuagcccauauauua

SEQ ID NO: 914747 - RNA, 19 nt, Homo sapiens
  misc_RNA (1)...(19): siRNA sense strand
ggacgacauugcccaagaa

SEQ ID NO: 914748 - RNA, 19 nt, Homo sapiens
  misc_RNA (1)...(19): siRNA sense strand
gcaagacgcugggcaucaa

SEQ ID NO: 914749 - RNA, 19 nt, Homo sapiens
  misc_RNA (1)...(19): siRNA sense strand
caacaaugguggcuuugga

SEQ ID NO: 914750 - RNA, 19 nt, Homo sapiens
  misc_RNA (1)...(19): siRNA sense strand
gcacacacuucagcaagaa

SEQ ID NO: 914751 - RNA, 19 nt, Homo sapiens
  misc_RNA (1)...(19): siRNA sense strand
gcaauucuaacagcaauaa

SEQ ID NO: 914752 - RNA, 19 nt, Homo sapiens
  misc_RNA (1)...(19): siRNA sense strand
gauccuaugacucuugaua

SEQ ID NO: 914753 - RNA, 19 nt, Homo sapiens
  misc_RNA (1)...(19): siRNA sense strand
cagauacaauguuaagaga

SEQ ID NO: 914754 - RNA, 19 nt, Homo sapiens
  misc_RNA (1)...(19): siRNA sense strand
ccacgcagcuggugcucaa

SEQ ID NO: 914755 - RNA, 19 nt, Homo sapiens
  misc_RNA (1)...(19): siRNA sense strand
uguggcagauacaauguua

SEQ ID NO: 914756 - RNA, 19 nt, Homo sapiens
  misc_RNA (1)...(19): siRNA sense strand
ggaucuaccugcccuugga

SEQ ID NO: 914757 - RNA, 19 nt, Homo sapiens
  misc_RNA (1)...(19): siRNA sense strand
cagccaaucugccacaugu

SEQ ID NO: 914758 - RNA, 19 nt, Homo sapiens
  misc_RNA (1)...(19): siRNA sense strand
gcaaggacaaggagaagga

SEQ ID NO: 914759 - RNA, 19 nt, Homo sapiens
  misc_RNA (1)...(19): siRNA sense strand
gauacaauguuaagagacu

SEQ ID NO: 914760 - RNA, 19 nt, Homo sapiens
  misc_RNA (1)...(19): siRNA sense strand
ccacguacccgcagcagaa

SEQ ID NO: 914761 - RNA, 19 nt, Homo sapiens
  misc_RNA (1)...(19): siRNA sense strand
cagcagacgcagcagaaua

SEQ ID NO: 914762 - RNA, 19 nt, Homo sapiens
  misc_RNA (1)...(19): siRNA sense strand
gcagauacaauguuaagag

SEQ ID NO: 914763 - RNA, 19 nt, Homo sapiens
  misc_RNA (1)...(19): siRNA sense strand
aaagcucucuauaccauga

SEQ ID NO: 914764 - RNA, 19 nt, Homo sapiens
  misc_RNA (1)...(19): siRNA sense strand
ggaaguacagcacggaugu

SEQ ID NO: 914765 - RNA, 19 nt, Homo sapiens
  misc_RNA (1)...(19): siRNA sense strand
gaaggcccaucguuguugu

SEQ ID NO: 914766 - RNA, 19 nt, Homo sapiens
  misc_RNA (1)...(19): siRNA sense strand
uaagaaggcccaucguugu

SEQ ID NO: 914767 - RNA, 19 nt, Homo sapiens
  misc_RNA (1)...(19): siRNA sense strand
ugccacauguguucaauga

SEQ ID NO: 914768 - RNA, 19 nt, Homo sapiens
  misc_RNA (1)...(19): siRNA sense strand
gggaaagacgacaacgaua

SEQ ID NO: 914769 - RNA, 19 nt, Homo sapiens
  misc_RNA (1)...(19): siRNA sense strand
gcaagaacggcaaggacaa

SEQ ID NO: 914770 - RNA, 19 nt, Homo sapiens
  misc_RNA (1)...(19): siRNA sense strand
gcagaggcaggacgacauu

SEQ ID NO: 914771 - RNA, 19 nt, Homo sapiens
  misc_RNA (1)...(19): siRNA sense strand
gaaagacgacaacgauaac

SEQ ID NO: 914772 - RNA, 19 nt, Homo sapiens
  misc_RNA (1)...(19): siRNA sense strand
ggucccacguggcaaguga

SEQ ID NO: 914773 - RNA, 19 nt, Homo sapiens
  misc_RNA (1)...(19): siRNA sense strand
gcaaggagaaggacaagac

SEQ ID NO: 914774 - RNA, 19 nt, Homo sapiens
  misc_RNA (1)...(19): siRNA sense strand
aggcaacaaugguggcuuu

SEQ ID NO: 914775 - RNA, 19 nt, Homo sapiens
  misc_RNA (1)...(19): siRNA sense strand
gcacgucgccgucggaaaa

SEQ ID NO: 914776 - RNA, 19 nt, Homo sapiens
  misc_RNA (1)...(19): siRNA sense strand
ccauuucucugcccuugug

SEQ ID NO: 914777 - RNA, 19 nt, Homo sapiens
  misc_RNA (1)...(19): siRNA sense strand
guacagcacggaugugaag

SEQ ID NO: 914778 - RNA, 19 nt, Homo sapiens
  misc_RNA (1)...(19): siRNA sense strand
cagcaauucuaacagcaau

SEQ ID NO: 914779 - RNA, 19 nt, Homo sapiens
  misc_RNA (1)...(19): siRNA sense strand
gauucggugugcagcaauu

SEQ ID NO: 914780 - RNA, 19 nt, Homo sapiens
  misc_RNA (1)...(19): siRNA sense strand
gcugcugccucugcacuuu

SEQ ID NO: 914781 - RNA, 19 nt, Homo sapiens
  misc_RNA (1)...(19): siRNA sense strand
gaccugguguuacggaaag

SEQ ID NO: 914782 - RNA, 19 nt, Homo sapiens
  misc_RNA (1)...(19): siRNA sense strand
cuaugacucuugauaugga

SEQ ID NO: 914783 - RNA, 19 nt, Homo sapiens
  misc_RNA (1)...(19): siRNA sense strand
cgaccgggaccugguguua

SEQ ID NO: 914784 - RNA, 19 nt, Homo sapiens
  misc_RNA (1)...(19): siRNA sense strand
agagagaccagcaaagaga

SEQ ID NO: 914785 - RNA, 19 nt, Homo sapiens
  misc_RNA (1)...(19): siRNA sense strand
ccuaugaucaagcccauuu

SEQ ID NO: 914786 - RNA, 19 nt, Homo sapiens
  misc_RNA (1)...(19): siRNA sense strand
uuacggaaagcucucuaua

SEQ ID NO: 914787 - RNA, 19 nt, Homo sapiens
  misc_RNA (1)...(19): siRNA sense strand
agacgcagcagaauaagga

SEQ ID NO: 914788 - RNA, 19 nt, Homo sapiens
  misc_RNA (1)...(19): siRNA sense strand
gcgauucggugugcagcaa

SEQ ID NO: 914789 - RNA, 19 nt, Homo sapiens
  misc_RNA (1)...(19): siRNA sense strand
acagagagaccagcaaaga

SEQ ID NO: 914790 - RNA, 19 nt, Homo sapiens
  misc_RNA (1)...(19): siRNA sense strand
gcacuucuacaugauccua

SEQ ID NO: 914791 - RNA, 19 nt, Homo sapiens
  misc_RNA (1)...(19): siRNA sense strand
gagagaccagcaaagagaa

SEQ ID NO: 914792 - RNA, 19 nt, Homo sapiens
  misc_RNA (1)...(19): siRNA sense strand
ugccagaccugagcgugua

SEQ ID NO: 914793 - RNA, 19 nt, Homo sapiens
  misc_RNA (1)...(19): siRNA sense strand
cugggcagcuucagcaaga

SEQ ID NO: 914794 - RNA, 19 nt, Homo sapiens
  misc_RNA (1)...(19): siRNA sense strand
agaagcagcgcaaggagaa

SEQ ID NO: 914795 - RNA, 19 nt, Homo sapiens
  misc_RNA (1)...(19): siRNA sense strand
aagccaagcugaaccuucu

SEQ ID NO: 914796 - RNA, 19 nt, Homo sapiens
  misc_RNA (1)...(19): siRNA sense strand
ccaccucggcugaguguug

SEQ ID NO: 914797 - RNA, 19 nt, Homo sapiens
  misc_RNA (1)...(19): siRNA sense strand
gaugggaacugccuuuuac

SEQ ID NO: 914798 - RNA, 19 nt, Homo sapiens
  misc_RNA (1)...(19): siRNA sense strand
guccuagcccauauauuaa

SEQ ID NO: 914799 - RNA, 19 nt, Homo sapiens
  misc_RNA (1)...(19): siRNA sense strand
acgagagccuggaagaguu

SEQ ID NO: 914800 - RNA, 19 nt, Homo sapiens
  misc_RNA (1)...(19): siRNA sense strand
ggaccugguguuacggaaa

SEQ ID NO: 914801 - RNA, 19 nt, Homo sapiens
  misc_RNA (1)...(19): siRNA sense strand
gcagcaauucuaacagcaa

SEQ ID NO: 914802 - RNA, 19 nt, Homo sapiens
  misc_RNA (1)...(19): siRNA sense strand
ugaaccuucugcacagcua

SEQ ID NO: 914803 - RNA, 19 nt, Homo sapiens
  misc_RNA (1)...(19): siRNA sense strand
gaucgagcaggcaacaaug

SEQ ID NO: 914804 - RNA, 19 nt, Homo sapiens
  misc_RNA (1)...(19): siRNA sense strand
ccacugcucgccucugguu

SEQ ID NO: 914805 - RNA, 19 nt, Homo sapiens
  misc_RNA (1)...(19): siRNA sense strand
ccuagcccauauauuaaga

SEQ ID NO: 914806 - RNA, 19 nt, Homo sapiens
  misc_RNA (1)...(19): siRNA sense strand
gcgaggauuucaggagcuu

SEQ ID NO: 914807 - RNA, 19 nt, Homo sapiens
  misc_RNA (1)...(19): siRNA sense strand
ggagaugaucggcuacuac

SEQ ID NO: 914808 - RNA, 19 nt, Homo sapiens
  misc_RNA (1)...(19): siRNA sense strand
aaucuacacauuccaguug

SEQ ID NO: 914809 - RNA, 19 nt, Homo sapiens
  misc_RNA (1)...(19): siRNA sense strand
gcguguacagcgaggauuu

SEQ ID NO: 914810 - RNA, 19 nt, Homo sapiens
  misc_RNA (1)...(19): siRNA sense strand
caagugaaugcaacaacga

SEQ ID NO: 914811 - RNA, 19 nt, Homo sapiens
  misc_RNA (1)...(19): siRNA sense strand
gggcaucaagcugaagaaa

SEQ ID NO: 914812 - RNA, 19 nt, Homo sapiens
  misc_RNA (1)...(19): siRNA sense strand
uccuaugacucuugauaug

SEQ ID NO: 914813 - RNA, 19 nt, Homo sapiens
  misc_RNA (1)...(19): siRNA sense strand
cgcacacacuucagcaaga

SEQ ID NO: 914814 - RNA, 19 nt, Homo sapiens
  misc_RNA (1)...(19): siRNA sense strand
agcagacgcagcagaauaa

SEQ ID NO: 914815 - RNA, 19 nt, Homo sapiens
  misc_RNA (1)...(19): siRNA sense strand
uuucuagugugcuuccaaa

SEQ ID NO: 914816 - RNA, 19 nt, Homo sapiens
  misc_RNA (1)...(19): siRNA sense strand
ggaugggaacugccuuuua

SEQ ID NO: 914817 - RNA, 19 nt, Homo sapiens
  misc_RNA (1)...(19): siRNA sense strand
gccaaucugccacaugugu

SEQ ID NO: 914818 - RNA, 19 nt, Homo sapiens
  misc_RNA (1)...(19): siRNA sense strand
acaaggagaaggagaagca

SEQ ID NO: 914819 - RNA, 19 nt, Homo sapiens
  misc_RNA (1)...(19): siRNA sense strand
ggcagcagacgcagcagaa

SEQ ID NO: 914820 - RNA, 19 nt, Homo sapiens
  misc_RNA (1)...(19): siRNA sense strand
ugacggauucugagcacaa

SEQ ID NO: 914821 - RNA, 19 nt, Homo sapiens
  misc_RNA (1)...(19): siRNA sense strand
uacaugauccuaugacucu

SEQ ID NO: 914822 - RNA, 19 nt, Homo sapiens
  misc_RNA (1)...(19): siRNA sense strand
gaggauuucaggagcuuca

SEQ ID NO: 914823 - RNA, 19 nt, Homo sapiens
  misc_RNA (1)...(19): siRNA sense strand
ggacaaggagaaggagaag

SEQ ID NO: 914824 - RNA, 19 nt, Homo sapiens
  misc_RNA (1)...(19): siRNA sense strand
ggaacagagagaccagcaa

SEQ ID NO: 914825 - RNA, 19 nt, Homo sapiens
  misc_RNA (1)...(19): siRNA sense strand
aggacgacauugcccaaga

SEQ ID NO: 914826 - RNA, 19 nt, Homo sapiens
  misc_RNA (1)...(19): siRNA sense strand
ggagcgcaaguucaucuuc

SEQ ID NO: 914827 - RNA, 19 nt, Homo sapiens
  misc_RNA (1)...(19): siRNA sense strand
caaucuacacauuccaguu

SEQ ID NO: 914828 - RNA, 19 nt, Homo sapiens
  misc_RNA (1)...(19): siRNA sense strand
ugaucaagcccauuucucu

SEQ ID NO: 914829 - RNA, 19 nt, Homo sapiens
  misc_RNA (1)...(19): siRNA sense strand
ggcagcacuucuacaugau

SEQ ID NO: 914830 - RNA, 19 nt, Homo sapiens
  misc_RNA (1)...(19): siRNA sense strand
acggaaagcucucuauacc

SEQ ID NO: 914831 - RNA, 19 nt, Homo sapiens
  misc_RNA (1)...(19): siRNA sense strand
ccacguggcaagugaaugc

SEQ ID NO: 914832 - RNA, 19 nt, Homo sapiens
  misc_RNA (1)...(19): siRNA sense strand
gacgacauugcccaagaaa

SEQ ID NO: 914833 - RNA, 19 nt, Homo sapiens
  misc_RNA (1)...(19): siRNA sense strand
ucucugcccuuguguccau

SEQ ID NO: 914834 - RNA, 19 nt, Homo sapiens
  misc_RNA (1)...(19): siRNA sense strand
aagaaggcccaucguuguu

SEQ ID NO: 914835 - RNA, 19 nt, Homo sapiens
  misc_RNA (1)...(19): siRNA sense strand
aaagagaacaagccgugau

SEQ ID NO: 914836 - RNA, 19 nt, Homo sapiens
  misc_RNA (1)...(19): siRNA sense strand
gcuagaagccaagcugaac

SEQ ID NO: 914837 - RNA, 19 nt, Homo sapiens
  misc_RNA (1)...(19): siRNA sense strand
gcacuaagcagucucaaga

SEQ ID NO: 914838 - RNA, 19 nt, Homo sapiens
  misc_RNA (1)...(19): siRNA sense strand
guaaaacacucaccagauu

SEQ ID NO: 914839 - RNA, 19 nt, Homo sapiens
  misc_RNA (1)...(19): siRNA sense strand
ggaacugcuuucuguguug

SEQ ID NO: 914840 - RNA, 19 nt, Homo sapiens
  misc_RNA (1)...(19): siRNA sense strand
gaaaugcacuaagcagucu

SEQ ID NO: 914841 - RNA, 19 nt, Homo sapiens
  misc_RNA (1)...(19): siRNA sense strand
caaagcauggcaagacaua

SEQ ID NO: 914842 - RNA, 19 nt, Homo sapiens
  misc_RNA (1)...(19): siRNA sense strand
uaagcagucucaagauuca

SEQ ID NO: 914843 - RNA, 19 nt, Homo sapiens
  misc_RNA (1)...(19): siRNA sense strand
ccacucagauuggaauaga

SEQ ID NO: 914844 - RNA, 19 nt, Homo sapiens
  misc_RNA (1)...(19): siRNA sense strand
acuaagcagucucaagauu

SEQ ID NO: 914845 - RNA, 19 nt, Homo sapiens
  misc_RNA (1)...(19): siRNA sense strand
ggccagaaaugcacuaagc

SEQ ID NO: 914846 - RNA, 19 nt, Homo sapiens
  misc_RNA (1)...(19): siRNA sense strand
guugcuacauggguguuua

SEQ ID NO: 914847 - RNA, 19 nt, Homo sapiens
  misc_RNA (1)...(19): siRNA sense strand
ucucaagauucaaagcauu

SEQ ID NO: 914848 - RNA, 19 nt, Homo sapiens
  misc_RNA (1)...(19): siRNA sense strand
caccagauuuucaugauaa

SEQ ID NO: 914849 - RNA, 19 nt, Homo sapiens
  misc_RNA (1)...(19): siRNA sense strand
auucaaagcauucugcaaa

SEQ ID NO: 914850 - RNA, 19 nt, Homo sapiens
  misc_RNA (1)...(19): siRNA sense strand
uggaacugcuuucuguguu

SEQ ID NO: 914851 - RNA, 19 nt, Homo sapiens
  misc_RNA (1)...(19): siRNA sense strand
guuuacagccacucagauu

SEQ ID NO: 914852 - RNA, 19 nt, Homo sapiens
  misc_RNA (1)...(19): siRNA sense strand
caaagcauucugcaaagca

SEQ ID NO: 914853 - RNA, 19 nt, Homo sapiens
  misc_RNA (1)...(19): siRNA sense strand
ccaaaagaguggaaacauc

SEQ ID NO: 914854 - RNA, 19 nt, Homo sapiens
  misc_RNA (1)...(19): siRNA sense strand
caaaagaguggaaacauca

SEQ ID NO: 914855 - RNA, 19 nt, Homo sapiens
  misc_RNA (1)...(19): siRNA sense strand
cuaagcagucucaagauuc

SEQ ID NO: 914856 - RNA, 19 nt, Homo sapiens
  misc_RNA (1)...(19): siRNA sense strand
agaguggaaacaucaguaa

SEQ ID NO: 914857 - RNA, 19 nt, Homo sapiens
  misc_RNA (1)...(19): siRNA sense strand
gcaaagcauggcaagacau

SEQ ID NO: 914858 - RNA, 19 nt, Homo sapiens
  misc_RNA (1)...(19): siRNA sense strand
uggaauagaauggaaccua

SEQ ID NO: 914859 - RNA, 19 nt, Homo sapiens
  misc_RNA (1)...(19): siRNA sense strand
ucaccagauuuucaugaua

SEQ ID NO: 914860 - RNA, 19 nt, Homo sapiens
  misc_RNA (1)...(19): siRNA sense strand
agauuggaauagaauggaa

SEQ ID NO: 914861 - RNA, 19 nt, Homo sapiens
  misc_RNA (1)...(19): siRNA sense strand
aaagcauucugcaaagcau

SEQ ID NO: 914862 - RNA, 19 nt, Homo sapiens
  misc_RNA (1)...(19): siRNA sense strand
aagaguggaaacaucagua

SEQ ID NO: 914863 - RNA, 19 nt, Homo sapiens
  misc_RNA (1)...(19): siRNA sense strand
ugcaaagcauggcaagaca

SEQ ID NO: 914864 - RNA, 19 nt, Homo sapiens
  misc_RNA (1)...(19): siRNA sense strand
ucaaagcauucugcaaagc

SEQ ID NO: 914865 - RNA, 19 nt, Homo sapiens
  misc_RNA (1)...(19): siRNA sense strand
guggaacugcuuucugugu

SEQ ID NO: 914866 - RNA, 19 nt, Homo sapiens
  misc_RNA (1)...(19): siRNA sense strand
ccaaauggcugcaaacuaa

SEQ ID NO: 914867 - RNA, 19 nt, Homo sapiens
  misc_RNA (1)...(19): siRNA sense strand
ggaaaggacuguagagcua

SEQ ID NO: 914868 - RNA, 19 nt, Homo sapiens
  misc_RNA (1)...(19): siRNA sense strand
gcaauucacuaacaagaaa

SEQ ID NO: 914869 - RNA, 19 nt, Homo sapiens
  misc_RNA (1)...(19): siRNA sense strand
gaugagaaaugggauguua

SEQ ID NO: 914870 - RNA, 19 nt, Homo sapiens
  misc_RNA (1)...(19): siRNA sense strand
gaugauagccguaauaaau

SEQ ID NO: 914871 - RNA, 19 nt, Homo sapiens
  misc_RNA (1)...(19): siRNA sense strand
gcuaggauuucaaguauuu

SEQ ID NO: 914872 - RNA, 19 nt, Homo sapiens
  misc_RNA (1)...(19): siRNA sense strand
gaagaggaaaguagaauaa

SEQ ID NO: 914873 - RNA, 19 nt, Homo sapiens
  misc_RNA (1)...(19): siRNA sense strand
gaaaguagaauaagcaguu

SEQ ID NO: 914874 - RNA, 19 nt, Homo sapiens
  misc_RNA (1)...(19): siRNA sense strand
ccagagaucuaguuucuau

SEQ ID NO: 914875 - RNA, 19 nt, Homo sapiens
  misc_RNA (1)...(19): siRNA sense strand
aaucagagcuguagcagaa

SEQ ID NO: 914876 - RNA, 19 nt, Homo sapiens
  misc_RNA (1)...(19): siRNA sense strand
gauugcaacuggacagaua

SEQ ID NO: 914877 - RNA, 19 nt, Homo sapiens
  misc_RNA (1)...(19): siRNA sense strand
acacaucccuucaaagauu

SEQ ID NO: 914878 - RNA, 19 nt, Homo sapiens
  misc_RNA (1)...(19): siRNA sense strand
gaucaaaguccacaaauuc

SEQ ID NO: 914879 - RNA, 19 nt, Homo sapiens
  misc_RNA (1)...(19): siRNA sense strand
gggagacuaugaaauauug

SEQ ID NO: 914880 - RNA, 19 nt, Homo sapiens
  misc_RNA (1)...(19): siRNA sense strand
gaaagugucauccaaucua

SEQ ID NO: 914881 - RNA, 19 nt, Homo sapiens
  misc_RNA (1)...(19): siRNA sense strand
ugagacagcugaagaggaa

SEQ ID NO: 914882 - RNA, 19 nt, Homo sapiens
  misc_RNA (1)...(19): siRNA sense strand
ggaguaggaugccuggauu

SEQ ID NO: 914883 - RNA, 19 nt, Homo sapiens
  misc_RNA (1)...(19): siRNA sense strand
gguguucauuuauguguua

SEQ ID NO: 914884 - RNA, 19 nt, Homo sapiens
  misc_RNA (1)...(19): siRNA sense strand
ucacauaauucuugggaaa

SEQ ID NO: 914885 - RNA, 19 nt, Homo sapiens
  misc_RNA (1)...(19): siRNA sense strand
agauucagguguucauuua

SEQ ID NO: 914886 - RNA, 19 nt, Homo sapiens
  misc_RNA (1)...(19): siRNA sense strand
gaauggagauguucuuacu

SEQ ID NO: 914887 - RNA, 19 nt, Homo sapiens
  misc_RNA (1)...(19): siRNA sense strand
ugaaaugccuugcuauaca

SEQ ID NO: 914888 - RNA, 19 nt, Homo sapiens
  misc_RNA (1)...(19): siRNA sense strand
aaauagagguuccugauca

SEQ ID NO: 914889 - RNA, 19 nt, Homo sapiens
  misc_RNA (1)...(19): siRNA sense strand
gaaaugccuugcuauacau

SEQ ID NO: 914890 - RNA, 19 nt, Homo sapiens
  misc_RNA (1)...(19): siRNA sense strand
ccacacaucccuucaaaga

SEQ ID NO: 914891 - RNA, 19 nt, Homo sapiens
  misc_RNA (1)...(19): siRNA sense strand
gagaacagccuggaacaaa

SEQ ID NO: 914892 - RNA, 19 nt, Homo sapiens
  misc_RNA (1)...(19): siRNA sense strand
aaugauggcuuccaaauag

SEQ ID NO: 914893 - RNA, 19 nt, Homo sapiens
  misc_RNA (1)...(19): siRNA sense strand
ccaagaaggagaauauauu

SEQ ID NO: 914894 - RNA, 19 nt, Homo sapiens
  misc_RNA (1)...(19): siRNA sense strand
gcaaguacuucugauguuc

SEQ ID NO: 914895 - RNA, 19 nt, Homo sapiens
  misc_RNA (1)...(19): siRNA sense strand
gcacaucacgaaacuuuau

SEQ ID NO: 914896 - RNA, 19 nt, Homo sapiens
  misc_RNA (1)...(19): siRNA sense strand
caaccaagaaggagaauau

SEQ ID NO: 914897 - RNA, 19 nt, Homo sapiens
  misc_RNA (1)...(19): siRNA sense strand
gugcuaggauuucaaguau

SEQ ID NO: 914898 - RNA, 19 nt, Homo sapiens
  misc_RNA (1)...(19): siRNA sense strand
caaaucagcaaacaaauca

SEQ ID NO: 914899 - RNA, 19 nt, Homo sapiens
  misc_RNA (1)...(19): siRNA sense strand
acagauagcuggcguggau

SEQ ID NO: 914900 - RNA, 19 nt, Homo sapiens
  misc_RNA (1)...(19): siRNA sense strand
gagcggcaauucacuaaca

SEQ ID NO: 914901 - RNA, 19 nt, Homo sapiens
  misc_RNA (1)...(19): siRNA sense strand
gagcuaauguuuaccuucu

SEQ ID NO: 914902 - RNA, 19 nt, Homo sapiens
  misc_RNA (1)...(19): siRNA sense strand
ccagacaacaaguauauaa

SEQ ID NO: 914903 - RNA, 19 nt, Homo sapiens
  misc_RNA (1)...(19): siRNA sense strand
gagcagaaauaaagacaac

SEQ ID NO: 914904 - RNA, 19 nt, Homo sapiens
  misc_RNA (1)...(19): siRNA sense strand
gcaacaagaagaugaaauc

SEQ ID NO: 914905 - RNA, 19 nt, Homo sapiens
  misc_RNA (1)...(19): siRNA sense strand
gcaacgagauaagcaagga

SEQ ID NO: 914906 - RNA, 19 nt, Homo sapiens
  misc_RNA (1)...(19): siRNA sense strand
ggauacuacucuaaccaaa

SEQ ID NO: 914907 - RNA, 19 nt, Homo sapiens
  misc_RNA (1)...(19): siRNA sense strand
ugaaaucacugugcuaaag

SEQ ID NO: 914908 - RNA, 19 nt, Homo sapiens
  misc_RNA (1)...(19): siRNA sense strand
ggaacugccuccugagaag

SEQ ID NO: 914909 - RNA, 19 nt, Homo sapiens
  misc_RNA (1)...(19): siRNA sense strand
ccaauuaccauguucauuc

SEQ ID NO: 914910 - RNA, 19 nt, Homo sapiens
  misc_RNA (1)...(19): siRNA sense strand
gauaucaacugguggaaaa

SEQ ID NO: 914911 - RNA, 19 nt, Homo sapiens
  misc_RNA (1)...(19): siRNA sense strand
gugaugcgcuacucaauag

SEQ ID NO: 914912 - RNA, 19 nt, Homo sapiens
  misc_RNA (1)...(19): siRNA sense strand
gcauaugguuaucgaggaa

SEQ ID NO: 914913 - RNA, 19 nt, Homo sapiens
  misc_RNA (1)...(19): siRNA sense strand
gaugaaaucacugugcuaa

SEQ ID NO: 914914 - RNA, 19 nt, Homo sapiens
  misc_RNA (1)...(19): siRNA sense strand
uaaaugagacagcugaaga

SEQ ID NO: 914915 - RNA, 19 nt, Homo sapiens
  misc_RNA (1)...(19): siRNA sense strand
aaagugucauccaaucuaa

SEQ ID NO: 914916 - RNA, 19 nt, Homo sapiens
  misc_RNA (1)...(19): siRNA sense strand
gaacacaggcuggaaugga

SEQ ID NO: 914917 - RNA, 19 nt, Homo sapiens
  misc_RNA (1)...(19): siRNA sense strand
gagaaaugggauguuauua

SEQ ID NO: 914918 - RNA, 19 nt, Homo sapiens
  misc_RNA (1)...(19): siRNA sense strand
gcugaaaagucacauaauu

SEQ ID NO: 914919 - RNA, 19 nt, Homo sapiens
  misc_RNA (1)...(19): siRNA sense strand
uaccagugcugucucaauu

SEQ ID NO: 914920 - RNA, 19 nt, Homo sapiens
  misc_RNA (1)...(19): siRNA sense strand
gcagccaugucaccaaugu

SEQ ID NO: 914921 - RNA, 19 nt, Homo sapiens
  misc_RNA (1)...(19): siRNA sense strand
acaagaagaugaaaucacu

SEQ ID NO: 914922 - RNA, 19 nt, Homo sapiens
  misc_RNA (1)...(19): siRNA sense strand
gcagaaauaaagacaacaa

SEQ ID NO: 914923 - RNA, 19 nt, Homo sapiens
  misc_RNA (1)...(19): siRNA sense strand
ugaucaaaguccacaaauu

SEQ ID NO: 914924 - RNA, 19 nt, Homo sapiens
  misc_RNA (1)...(19): siRNA sense strand
gaaguggugcaaacagaaa

SEQ ID NO: 914925 - RNA, 19 nt, Homo sapiens
  misc_RNA (1)...(19): siRNA sense strand
ccacaaggacagagagaaa

SEQ ID NO: 914926 - RNA, 19 nt, Homo sapiens
  misc_RNA (1)...(19): siRNA sense strand
guaugggacuggcagaaga

SEQ ID NO: 914927 - RNA, 19 nt, Homo sapiens
  misc_RNA (1)...(19): siRNA sense strand
ggagugggcauaugguuau

SEQ ID NO: 914928 - RNA, 19 nt, Homo sapiens
  misc_RNA (1)...(19): siRNA sense strand
guucauuccuuccgauguu

SEQ ID NO: 914929 - RNA, 19 nt, Homo sapiens
  misc_RNA (1)...(19): siRNA sense strand
ugauagccguaauaaauug

SEQ ID NO: 914930 - RNA, 19 nt, Homo sapiens
  misc_RNA (1)...(19): siRNA sense strand
gaaugcuacucccaccaaa

SEQ ID NO: 914931 - RNA, 19 nt, Homo sapiens
  misc_RNA (1)...(19): siRNA sense strand
uucacaaccucuccaaaua

SEQ ID NO: 914932 - RNA, 19 nt, Homo sapiens
  misc_RNA (1)...(19): siRNA sense strand
gcucuugagucacgaguuc

SEQ ID NO: 914933 - RNA, 19 nt, Homo sapiens
  misc_RNA (1)...(19): siRNA sense strand
gagcaucauucaguggaaa

SEQ ID NO: 914934 - RNA, 19 nt, Homo sapiens
  misc_RNA (1)...(19): siRNA sense strand
gcugcaaacuaaucaggaa

SEQ ID NO: 914935 - RNA, 19 nt, Homo sapiens
  misc_RNA (1)...(19): siRNA sense strand
gcacagugguggccauagg

SEQ ID NO: 914936 - RNA, 19 nt, Homo sapiens
  misc_RNA (1)...(19): siRNA sense strand
gauuugcucuugacaugug

SEQ ID NO: 914937 - RNA, 19 nt, Homo sapiens
  misc_RNA (1)...(19): siRNA sense strand
aggaaaggcagaucaauuu

SEQ ID NO: 914938 - RNA, 19 nt, Homo sapiens
  misc_RNA (1)...(19): siRNA sense strand
gaaaggacuguagagcuaa

SEQ ID NO: 914939 - RNA, 19 nt, Homo sapiens
  misc_RNA (1)...(19): siRNA sense strand
uaaugauggcuuccaaaua

SEQ ID NO: 914940 - RNA, 19 nt, Homo sapiens
  misc_RNA (1)...(19): siRNA sense strand
ggacauuccagcuacauca

SEQ ID NO: 914941 - RNA, 19 nt, Homo sapiens
  misc_RNA (1)...(19): siRNA sense strand
gcuaauguuuaccuucuuc

SEQ ID NO: 914942 - RNA, 19 nt, Homo sapiens
  misc_RNA (1)...(19): siRNA sense strand
uaucuuugccucagaauga

SEQ ID NO: 914943 - RNA, 19 nt, Homo sapiens
  misc_RNA (1)...(19): siRNA sense strand
ccaggacacugugcagauu

SEQ ID NO: 914944 - RNA, 19 nt, Homo sapiens
  misc_RNA (1)...(19): siRNA sense strand
gauaguauuucugcugcaa

SEQ ID NO: 914945 - RNA, 19 nt, Homo sapiens
  misc_RNA (1)...(19): siRNA sense strand
gaaauagagguuccugauc

SEQ ID NO: 914946 - RNA, 19 nt, Homo sapiens
  misc_RNA (1)...(19): siRNA sense strand
uauccacacugcagauuau

SEQ ID NO: 914947 - RNA, 19 nt, Homo sapiens
  misc_RNA (1)...(19): siRNA sense strand
gaucauguggccucaguga

SEQ ID NO: 914948 - RNA, 19 nt, Homo sapiens
  misc_RNA (1)...(19): siRNA sense strand
gcaaggagcaggccaaagc

SEQ ID NO: 914949 - RNA, 19 nt, Homo sapiens
  misc_RNA (1)...(19): siRNA sense strand
ugauagcuguugccgauga

SEQ ID NO: 914950 - RNA, 19 nt, Homo sapiens
  misc_RNA (1)...(19): siRNA sense strand
gcagaaaccagagaucuag

SEQ ID NO: 914951 - RNA, 19 nt, Homo sapiens
  misc_RNA (1)...(19): siRNA sense strand
ucaggcaggugguuuguuc

SEQ ID NO: 914952 - RNA, 19 nt, Homo sapiens
  misc_RNA (1)...(19): siRNA sense strand
ugaaagagaaauagagguu

SEQ ID NO: 914953 - RNA, 19 nt, Homo sapiens
  misc_RNA (1)...(19): siRNA sense strand
ccugucagcucuugaguca

SEQ ID NO: 914954 - RNA, 19 nt, Homo sapiens
  misc_RNA (1)...(19): siRNA sense strand
ugaagaggaaaguagaaua

SEQ ID NO: 914955 - RNA, 19 nt, Homo sapiens
  misc_RNA (1)...(19): siRNA sense strand
gcuguaggaucucaugaca

SEQ ID NO: 914956 - RNA, 19 nt, Homo sapiens
  misc_RNA (1)...(19): siRNA sense strand
ugagaaaugggauguuauu

SEQ ID NO: 914957 - RNA, 19 nt, Homo sapiens
  misc_RNA (1)...(19): siRNA sense strand
gggaauggagauguucuua

SEQ ID NO: 914958 - RNA, 19 nt, Homo sapiens
  misc_RNA (1)...(19): siRNA sense strand
uagcuggcguggauaaaga

SEQ ID NO: 914959 - RNA, 19 nt, Homo sapiens
  misc_RNA (1)...(19): siRNA sense strand
ggaaguggugcaaacagaa

SEQ ID NO: 914960 - RNA, 19 nt, Homo sapiens
  misc_RNA (1)...(19): siRNA sense strand
cuucucagcccuuaaauga

SEQ ID NO: 914961 - RNA, 19 nt, Homo sapiens
  misc_RNA (1)...(19): siRNA sense strand
ccacaccgccuccuucuca

SEQ ID NO: 914962 - RNA, 19 nt, Homo sapiens
  misc_RNA (1)...(19): siRNA sense strand
gcagacaagcauaaagaug

SEQ ID NO: 914963 - RNA, 19 nt, Homo sapiens
  misc_RNA (1)...(19): siRNA sense strand
gacuguagagcuaauguuu

SEQ ID NO: 914964 - RNA, 19 nt, Homo sapiens
  misc_RNA (1)...(19): siRNA sense strand
gaucucaugacaacuuuau

SEQ ID NO: 914965 - RNA, 19 nt, Homo sapiens
  misc_RNA (1)...(19): siRNA sense strand
guucacacuuugucagaug

SEQ ID NO: 914966 - RNA, 19 nt, Homo sapiens
  misc_RNA (1)...(19): siRNA sense strand
aggaagagguggugaauua

SEQ ID NO: 914967 - RNA, 19 nt, Homo sapiens
  misc_RNA (1)...(19): siRNA sense strand
gaugaaaucuacacaguac

SEQ ID NO: 914968 - RNA, 19 nt, Homo sapiens
  misc_RNA (1)...(19): siRNA sense strand
gaaagugcccuucuucauc

SEQ ID NO: 914969 - RNA, 19 nt, Homo sapiens
  misc_RNA (1)...(19): siRNA sense strand
gaagucaacucugcuugga

SEQ ID NO: 914970 - RNA, 19 nt, Homo sapiens
  misc_RNA (1)...(19): siRNA sense strand
gcaaagagcaggaggaacu

SEQ ID NO: 914971 - RNA, 19 nt, Homo sapiens
  misc_RNA (1)...(19): siRNA sense strand
gcuccaagaugaucaccuu

SEQ ID NO: 914972 - RNA, 19 nt, Homo sapiens
  misc_RNA (1)...(19): siRNA sense strand
ggccgaaccuccagcauca

SEQ ID NO: 914973 - RNA, 19 nt, Homo sapiens
  misc_RNA (1)...(19): siRNA sense strand
gcagagauagucuuacugu

SEQ ID NO: 914974 - RNA, 19 nt, Homo sapiens
  misc_RNA (1)...(19): siRNA sense strand
ggaugaaaucuacacagua

SEQ ID NO: 914975 - RNA, 19 nt, Homo sapiens
  misc_RNA (1)...(19): siRNA sense strand
ccaugucacugauguacaa

SEQ ID NO: 914976 - RNA, 19 nt, Homo sapiens
  misc_RNA (1)...(19): siRNA sense strand
aaaggucccugacaaccaa

SEQ ID NO: 914977 - RNA, 19 nt, Homo sapiens
  misc_RNA (1)...(19): siRNA sense strand
gcaagggcauggugauggu

SEQ ID NO: 914978 - RNA, 19 nt, Homo sapiens
  misc_RNA (1)...(19): siRNA sense strand
ccagguggaugaaaucuac

SEQ ID NO: 914979 - RNA, 19 nt, Homo sapiens
  misc_RNA (1)...(19): siRNA sense strand
agggagagcuggacaaugg

SEQ ID NO: 914980 - RNA, 19 nt, Homo sapiens
  misc_RNA (1)...(19): siRNA sense strand
gaagagguggugaauuaca

SEQ ID NO: 914981 - RNA, 19 nt, Homo sapiens
  misc_RNA (1)...(19): siRNA sense strand
gcaaggaagagguggugaa

SEQ ID NO: 914982 - RNA, 19 nt, Homo sapiens
  misc_RNA (1)...(19): siRNA sense strand
ucuuuggccucacaucaua

SEQ ID NO: 914983 - RNA, 19 nt, Homo sapiens
  misc_RNA (1)...(19): siRNA sense strand
agacauaaccguucuucga

SEQ ID NO: 914984 - RNA, 19 nt, Homo sapiens
  misc_RNA (1)...(19): siRNA sense strand
ucagcaagaucgaccuaug

SEQ ID NO: 914985 - RNA, 19 nt, Homo sapiens
  misc_RNA (1)...(19): siRNA sense strand
ggauuaugauagcgacaug

SEQ ID NO: 914986 - RNA, 19 nt, Homo sapiens
  misc_RNA (1)...(19): siRNA sense strand
agcgagaaguggauuauga

SEQ ID NO: 914987 - RNA, 19 nt, Homo sapiens
  misc_RNA (1)...(19): siRNA sense strand
uacgaaaggucccugacaa

SEQ ID NO: 914988 - RNA, 19 nt, Homo sapiens
  misc_RNA (1)...(19): siRNA sense strand
cgagaaguggauuaugaua

SEQ ID NO: 914989 - RNA, 19 nt, Homo sapiens
  misc_RNA (1)...(19): siRNA sense strand
gagaaguggauuaugauag

SEQ ID NO: 914990 - RNA, 19 nt, Homo sapiens
  misc_RNA (1)...(19): siRNA sense strand
gaaaggucccugacaacca

SEQ ID NO: 914991 - RNA, 19 nt, Homo sapiens
  misc_RNA (1)...(19): siRNA sense strand
ugaggcagagauagucuua

SEQ ID NO: 914992 - RNA, 19 nt, Homo sapiens
  misc_RNA (1)...(19): siRNA sense strand
agagauagucuuacuguuc

SEQ ID NO: 914993 - RNA, 19 nt, Homo sapiens
  misc_RNA (1)...(19): siRNA sense strand
gggcagacauaaccguucu

SEQ ID NO: 914994 - RNA, 19 nt, Homo sapiens
  misc_RNA (1)...(19): siRNA sense strand
caccauaaguaccuacaca

SEQ ID NO: 914995 - RNA, 19 nt, Homo sapiens
  misc_RNA (1)...(19): siRNA sense strand
gagagcgagaaguggauua

SEQ ID NO: 914996 - RNA, 19 nt, Homo sapiens
  misc_RNA (1)...(19): siRNA sense strand
uggaugaaaucuacacagu

SEQ ID NO: 914997 - RNA, 19 nt, Homo sapiens
  misc_RNA (1)...(19): siRNA sense strand
cuacacaccaccaucuuug

SEQ ID NO: 914998 - RNA, 19 nt, Homo sapiens
  misc_RNA (1)...(19): siRNA sense strand
gaggccgucuaccagauug

SEQ ID NO: 914999 - RNA, 19 nt, Homo sapiens
  misc_RNA (1)...(19): siRNA sense strand
agaaguggauuaugauagc

SEQ ID NO: 915000 - RNA, 19 nt, Homo sapiens
  misc_RNA (1)...(19): siRNA sense strand
ccgaggugcuaguacgaaa

SEQ ID NO: 915001 - RNA, 19 nt, Homo sapiens
  misc_RNA (1)...(19): siRNA sense strand
gggcucggcucaaccuuuu

SEQ ID NO: 915002 - RNA, 19 nt, Homo sapiens
  misc_RNA (1)...(19): siRNA sense strand
cagagauagucuuacuguu

SEQ ID NO: 915003 - RNA, 19 nt, Homo sapiens
  misc_RNA (1)...(19): siRNA sense strand
guacgaaaggucccugaca

SEQ ID NO: 915004 - RNA, 19 nt, Homo sapiens
  misc_RNA (1)...(19): siRNA sense strand
gguguuugaggcagagaua

SEQ ID NO: 915005 - RNA, 19 nt, Homo sapiens
  misc_RNA (1)...(19): siRNA sense strand
gaaccuccagcaucagcuu

SEQ ID NO: 915006 - RNA, 19 nt, Homo sapiens
  misc_RNA (1)...(19): siRNA sense strand
aaaaggcagugguacguuu

SEQ ID NO: 915007 - RNA, 19 nt, Homo sapiens
  misc_RNA (1)...(19): siRNA sense strand
caaggaagagguggugaau

SEQ ID NO: 915008 - RNA, 19 nt, Homo sapiens
  misc_RNA (1)...(19): siRNA sense strand
ccaagggcaucggccaugu

SEQ ID NO: 915009 - RNA, 19 nt, Homo sapiens
  misc_RNA (1)...(19): siRNA sense strand
cagcaaagagcaggaggaa

SEQ ID NO: 915010 - RNA, 19 nt, Homo sapiens
  misc_RNA (1)...(19): siRNA sense strand
gcagacauaaccguucuuc

SEQ ID NO: 915011 - RNA, 19 nt, Homo sapiens
  misc_RNA (1)...(19): siRNA sense strand
cagcaagaucgaccuaugu

SEQ ID NO: 915012 - RNA, 19 nt, Homo sapiens
  misc_RNA (1)...(19): siRNA sense strand
ucgagauccugggcuuuaa

SEQ ID NO: 915013 - RNA, 19 nt, Homo sapiens
  misc_RNA (1)...(19): siRNA sense strand
gcgagaaguggauuaugau

SEQ ID NO: 915014 - RNA, 19 nt, Homo sapiens
  misc_RNA (1)...(19): siRNA sense strand
gcaucggccaugucacuga

SEQ ID NO: 915015 - RNA, 19 nt, Homo sapiens
  misc_RNA (1)...(19): siRNA sense strand
gucuggaccuccucaaagu

SEQ ID NO: 915016 - RNA, 19 nt, Homo sapiens
  misc_RNA (1)...(19): siRNA sense strand
ccaugcuggucaccucuga

SEQ ID NO: 915017 - RNA, 19 nt, Homo sapiens
  misc_RNA (1)...(19): siRNA sense strand
gauuccaggugacaguaca

SEQ ID NO: 915018 - RNA, 19 nt, Homo sapiens
  misc_RNA (1)...(19): siRNA sense strand
gagucuggaccuccucaaa

SEQ ID NO: 915019 - RNA, 19 nt, Homo sapiens
  misc_RNA (1)...(19): siRNA sense strand
gcucagucacccaauguca

SEQ ID NO: 915020 - RNA, 19 nt, Homo sapiens
  misc_RNA (1)...(19): siRNA sense strand
caucggccaugucacugau

SEQ ID NO: 915021 - RNA, 19 nt, Homo sapiens
  misc_RNA (1)...(19): siRNA sense strand
gugaggccgucuaccagau

SEQ ID NO: 915022 - RNA, 19 nt, Homo sapiens
  misc_RNA (1)...(19): siRNA sense strand
cagugugucuggagagagu

SEQ ID NO: 915023 - RNA, 19 nt, Homo sapiens
  misc_RNA (1)...(19): siRNA sense strand
gaagguuggggcagacaua

SEQ ID NO: 915024 - RNA, 19 nt, Homo sapiens
  misc_RNA (1)...(19): siRNA sense strand
aggcagagauagucuuacu

SEQ ID NO: 915025 - RNA, 19 nt, Homo sapiens
  misc_RNA (1)...(19): siRNA sense strand
cagcaucagcuucgagauc

SEQ ID NO: 915026 - RNA, 19 nt, Homo sapiens
  misc_RNA (1)...(19): siRNA sense strand
caccaucuuuggccucaca

SEQ ID NO: 915027 - RNA, 19 nt, Homo sapiens
  misc_RNA (1)...(19): siRNA sense strand
gaggaggaaaugcgagcuu

SEQ ID NO: 915028 - RNA, 19 nt, Homo sapiens
  misc_RNA (1)...(19): siRNA sense strand
gggcaucggccaugucacu

SEQ ID NO: 915029 - RNA, 19 nt, Homo sapiens
  misc_RNA (1)...(19): siRNA sense strand
gauccaugccaaggacaaa

SEQ ID NO: 915030 - RNA, 19 nt, Homo sapiens
  misc_RNA (1)...(19): siRNA sense strand
caucuuuggccucacauca

SEQ ID NO: 915031 - RNA, 19 nt, Homo sapiens
  misc_RNA (1)...(19): siRNA sense strand
ccuacacaccaccaucuuu

SEQ ID NO: 915032 - RNA, 19 nt, Homo sapiens
  misc_RNA (1)...(19): siRNA sense strand
gagauccugggcuuuaaca

SEQ ID NO: 915033 - RNA, 19 nt, Homo sapiens
  misc_RNA (1)...(19): siRNA sense strand
ugacaaccaacaguuccua

SEQ ID NO: 915034 - RNA, 19 nt, Homo sapiens
  misc_RNA (1)...(19): siRNA sense strand
gcuuuaacagcaaggaaga

SEQ ID NO: 915035 - RNA, 19 nt, Homo sapiens
  misc_RNA (1)...(19): siRNA sense strand
caaccaacaguuccuagac

SEQ ID NO: 915036 - RNA, 19 nt, Homo sapiens
  misc_RNA (1)...(19): siRNA sense strand
ggagagagcugauccuuua

SEQ ID NO: 915037 - RNA, 19 nt, Homo sapiens
  misc_RNA (1)...(19): siRNA sense strand
ucaaacagcagcaauauuu

SEQ ID NO: 915038 - RNA, 19 nt, Homo sapiens
  misc_RNA (1)...(19): siRNA sense strand
ggacagcugugacuuaugg

SEQ ID NO: 915039 - RNA, 19 nt, Homo sapiens
  misc_RNA (1)...(19): siRNA sense strand
guaaauugauguucaguag

SEQ ID NO: 915040 - RNA, 19 nt, Homo sapiens
  misc_RNA (1)...(19): siRNA sense strand
gacagaaguugcuggguuu

SEQ ID NO: 915041 - RNA, 19 nt, Homo sapiens
  misc_RNA (1)...(19): siRNA sense strand
gguuguaggucauaaagaa

SEQ ID NO: 915042 - RNA, 19 nt, Homo sapiens
  misc_RNA (1)...(19): siRNA sense strand
uaaagaaggucuggauguu

SEQ ID NO: 915043 - RNA, 19 nt, Homo sapiens
  misc_RNA (1)...(19): siRNA sense strand
gugcaaugcugaauaccua

SEQ ID NO: 915044 - RNA, 19 nt, Homo sapiens
  misc_RNA (1)...(19): siRNA sense strand
gcccuugucuuuccuacua

SEQ ID NO: 915045 - RNA, 19 nt, Homo sapiens
  misc_RNA (1)...(19): siRNA sense strand
ucaguaguguuaacucuaa

SEQ ID NO: 915046 - RNA, 19 nt, Homo sapiens
  misc_RNA (1)...(19): siRNA sense strand
uaauuggacuuccuacuau

SEQ ID NO: 915047 - RNA, 19 nt, Homo sapiens
  misc_RNA (1)...(19): siRNA sense strand
caaacagcagcaauauuua

SEQ ID NO: 915048 - RNA, 19 nt, Homo sapiens
  misc_RNA (1)...(19): siRNA sense strand
gaauaauggucggcucuau

SEQ ID NO: 915049 - RNA, 19 nt, Homo sapiens
  misc_RNA (1)...(19): siRNA sense strand
gagagcugauccuuuauuc

SEQ ID NO: 915050 - RNA, 19 nt, Homo sapiens
  misc_RNA (1)...(19): siRNA sense strand
gcaaauacucgaauaaacu

SEQ ID NO: 915051 - RNA, 19 nt, Homo sapiens
  misc_RNA (1)...(19): siRNA sense strand
gcugauccuuuauuccuuu

SEQ ID NO: 915052 - RNA, 19 nt, Homo sapiens
  misc_RNA (1)...(19): siRNA sense strand
gcugaauaccuaauaguuu

SEQ ID NO: 915053 - RNA, 19 nt, Homo sapiens
  misc_RNA (1)...(19): siRNA sense strand
aagaaggucuggauguuau

SEQ ID NO: 915054 - RNA, 19 nt, Homo sapiens
  misc_RNA (1)...(19): siRNA sense strand
gauauuaggcaagaugauu

SEQ ID NO: 915055 - RNA, 19 nt, Homo sapiens
  misc_RNA (1)...(19): siRNA sense strand
aaauugauguucaguagug

SEQ ID NO: 915056 - RNA, 19 nt, Homo sapiens
  misc_RNA (1)...(19): siRNA sense strand
gaucaugucucugcuacuc

SEQ ID NO: 915057 - RNA, 19 nt, Homo sapiens
  misc_RNA (1)...(19): siRNA sense strand
ugaugaagaugauagaaca

SEQ ID NO: 915058 - RNA, 19 nt, Homo sapiens
  misc_RNA (1)...(19): siRNA sense strand
ugaauuauccagaacaaga

SEQ ID NO: 915059 - RNA, 19 nt, Homo sapiens
  misc_RNA (1)...(19): siRNA sense strand
gaaguugcuggguuuguuu

SEQ ID NO: 915060 - RNA, 19 nt, Homo sapiens
  misc_RNA (1)...(19): siRNA sense strand
gcgcaaauacucgaauaaa

SEQ ID NO: 915061 - RNA, 19 nt, Homo sapiens
  misc_RNA (1)...(19): siRNA sense strand
cagcugaggccaauccuuu

SEQ ID NO: 915062 - RNA, 19 nt, Homo sapiens
  misc_RNA (1)...(19): siRNA sense strand
gggauagguuguccuguuc

SEQ ID NO: 915063 - RNA, 19 nt, Homo sapiens
  misc_RNA (1)...(19): siRNA sense strand
uaguauauuuccagggaua

SEQ ID NO: 915064 - RNA, 19 nt, Homo sapiens
  misc_RNA (1)...(19): siRNA sense strand
ggaggacuaugugcuuaga

SEQ ID NO: 915065 - RNA, 19 nt, Homo sapiens
  misc_RNA (1)...(19): siRNA sense strand
aaagaaggucuggauguua

SEQ ID NO: 915066 - RNA, 19 nt, Homo sapiens
  misc_RNA (1)...(19): siRNA sense strand
gaauuauccagaacaagaa

SEQ ID NO: 915067 - RNA, 19 nt, Homo sapiens
  misc_RNA (1)...(19): siRNA sense strand
uuaauuggacuuccuacua

SEQ ID NO: 915068 - RNA, 19 nt, Homo sapiens
  misc_RNA (1)...(19): siRNA sense strand
agaacaagaagaagcauaa

SEQ ID NO: 915069 - RNA, 19 nt, Homo sapiens
  misc_RNA (1)...(19): siRNA sense strand
guguggagcccuugucuuu

SEQ ID NO: 915070 - RNA, 19 nt, Homo sapiens
  misc_RNA (1)...(19): siRNA sense strand
guugguaaauugauguuca

SEQ ID NO: 915071 - RNA, 19 nt, Homo sapiens
  misc_RNA (1)...(19): siRNA sense strand
ugacagugaugcagguugu

SEQ ID NO: 915072 - RNA, 19 nt, Homo sapiens
  misc_RNA (1)...(19): siRNA sense strand
ggucggcucuaucuauugg

SEQ ID NO: 915073 - RNA, 19 nt, Homo sapiens
  misc_RNA (1)...(19): siRNA sense strand
gguaaauugauguucagua

SEQ ID NO: 915074 - RNA, 19 nt, Homo sapiens
  misc_RNA (1)...(19): siRNA sense strand
uggcgcaaauacucgaaua

SEQ ID NO: 915075 - RNA, 19 nt, Homo sapiens
  misc_RNA (1)...(19): siRNA sense strand
gaugauagaacagcugaau

SEQ ID NO: 915076 - RNA, 19 nt, Homo sapiens
  misc_RNA (1)...(19): siRNA sense strand
ggccaauccuuuagcagau

SEQ ID NO: 915077 - RNA, 19 nt, Homo sapiens
  misc_RNA (1)...(19): siRNA sense strand
agaaguugcuggguuuguu

SEQ ID NO: 915078 - RNA, 19 nt, Homo sapiens
  misc_RNA (1)...(19): siRNA sense strand
ucaccaggccugucuacaa

SEQ ID NO: 915079 - RNA, 19 nt, Homo sapiens
  misc_RNA (1)...(19): siRNA sense strand
agggauagguuguccuguu

SEQ ID NO: 915080 - RNA, 19 nt, Homo sapiens
  misc_RNA (1)...(19): siRNA sense strand
ggaauaauggucggcucua

SEQ ID NO: 915081 - RNA, 19 nt, Homo sapiens
  misc_RNA (1)...(19): siRNA sense strand
caaugcugaauaccuaaua

SEQ ID NO: 915082 - RNA, 19 nt, Homo sapiens
  misc_RNA (1)...(19): siRNA sense strand
ugggaggacuaugugcuua

SEQ ID NO: 915083 - RNA, 19 nt, Homo sapiens
  misc_RNA (1)...(19): siRNA sense strand
ggacaaucuuggguggaau

SEQ ID NO: 915084 - RNA, 19 nt, Homo sapiens
  misc_RNA (1)...(19): siRNA sense strand
aaaauuggguccagugguu

SEQ ID NO: 915085 - RNA, 19 nt, Homo sapiens
  misc_RNA (1)...(19): siRNA sense strand
cagaacaagaagaagcaua

SEQ ID NO: 915086 - RNA, 19 nt, Homo sapiens
  misc_RNA (1)...(19): siRNA sense strand
gagcugauccuuuauuccu

SEQ ID NO: 915087 - RNA, 19 nt, Homo sapiens
  misc_RNA (1)...(19): siRNA sense strand
caccaggccugucuacaac

SEQ ID NO: 915088 - RNA, 19 nt, Homo sapiens
  misc_RNA (1)...(19): siRNA sense strand
gacaaucuuggguggaauu

SEQ ID NO: 915089 - RNA, 19 nt, Homo sapiens
  misc_RNA (1)...(19): siRNA sense strand
guucaguaguguuaacucu

SEQ ID NO: 915090 - RNA, 19 nt, Homo sapiens
  misc_RNA (1)...(19): siRNA sense strand
ugauagaacagcugaaugg

SEQ ID NO: 915091 - RNA, 19 nt, Homo sapiens
  misc_RNA (1)...(19): siRNA sense strand
gcagguuguaggucauaaa

SEQ ID NO: 915092 - RNA, 19 nt, Homo sapiens
  misc_RNA (1)...(19): siRNA sense strand
gauguucaguaguguuaac

SEQ ID NO: 915093 - RNA, 19 nt, Homo sapiens
  misc_RNA (1)...(19): siRNA sense strand
gaaacaguacagccagagu

SEQ ID NO: 915094 - RNA, 19 nt, Homo sapiens
  misc_RNA (1)...(19): siRNA sense strand
cgcaaauacucgaauaaac

SEQ ID NO: 915095 - RNA, 19 nt, Homo sapiens
  misc_RNA (1)...(19): siRNA sense strand
guuuacgucuuggaucuug

SEQ ID NO: 915096 - RNA, 19 nt, Homo sapiens
  misc_RNA (1)...(19): siRNA sense strand
gcacaccgcaaaauucuga

SEQ ID NO: 915097 - RNA, 19 nt, Homo sapiens
  misc_RNA (1)...(19): siRNA sense strand
ccaauccuuuagcagauca

SEQ ID NO: 915098 - RNA, 19 nt, Homo sapiens
  misc_RNA (1)...(19): siRNA sense strand
gcugauauuaggcaagaug

SEQ ID NO: 915099 - RNA, 19 nt, Homo sapiens
  misc_RNA (1)...(19): siRNA sense strand
gcaaugcugaauaccuaau

SEQ ID NO: 915100 - RNA, 19 nt, Homo sapiens
  misc_RNA (1)...(19): siRNA sense strand
aaacagcagcaauauuuac

SEQ ID NO: 915101 - RNA, 19 nt, Homo sapiens
  misc_RNA (1)...(19): siRNA sense strand
uccagugguuuacgucuug

SEQ ID NO: 915102 - RNA, 19 nt, Homo sapiens
  misc_RNA (1)...(19): siRNA sense strand
uugcuacaauaguugguaa

SEQ ID NO: 915103 - RNA, 19 nt, Homo sapiens
  misc_RNA (1)...(19): siRNA sense strand
cagaggaucuacaaaaugg

SEQ ID NO: 915104 - RNA, 19 nt, Homo sapiens
  misc_RNA (1)...(19): siRNA sense strand
ucauaaagaaggucuggau

SEQ ID NO: 915105 - RNA, 19 nt, Homo sapiens
  misc_RNA (1)...(19): siRNA sense strand
gguggaauugcguuuguug

SEQ ID NO: 915106 - RNA, 19 nt, Homo sapiens
  misc_RNA (1)...(19): siRNA sense strand
agagagcugauccuuuauu

SEQ ID NO: 915107 - RNA, 19 nt, Homo sapiens
  misc_RNA (1)...(19): siRNA sense strand
auaaagaaggucuggaugu

SEQ ID NO: 915108 - RNA, 19 nt, Homo sapiens
  misc_RNA (1)...(19): siRNA sense strand
uuggacagcugugacuuau

SEQ ID NO: 915109 - RNA, 19 nt, Homo sapiens
  misc_RNA (1)...(19): siRNA sense strand
aauuggacuuccuacuauu

SEQ ID NO: 915110 - RNA, 19 nt, Homo sapiens
  misc_RNA (1)...(19): siRNA sense strand
uugauguucaguaguguua

SEQ ID NO: 915111 - RNA, 19 nt, Homo sapiens
  misc_RNA (1)...(19): siRNA sense strand
guccagugguuuacgucuu

SEQ ID NO: 915112 - RNA, 19 nt, Homo sapiens
  misc_RNA (1)...(19): siRNA sense strand
aggacaaucuuggguggaa

SEQ ID NO: 915113 - RNA, 19 nt, Homo sapiens
  misc_RNA (1)...(19): siRNA sense strand
gcuacaauaguugguaaau

SEQ ID NO: 915114 - RNA, 19 nt, Homo sapiens
  misc_RNA (1)...(19): siRNA sense strand
uuuagcagaucaugucucu

SEQ ID NO: 915115 - RNA, 19 nt, Homo sapiens
  misc_RNA (1)...(19): siRNA sense strand
ugaggccaauccuuuagca

SEQ ID NO: 915116 - RNA, 19 nt, Homo sapiens
  misc_RNA (1)...(19): siRNA sense strand
cuuagacuguggcgcaaau

SEQ ID NO: 915117 - RNA, 19 nt, Homo sapiens
  misc_RNA (1)...(19): siRNA sense strand
cucaaaagccuguccauuu

SEQ ID NO: 915118 - RNA, 19 nt, Homo sapiens
  misc_RNA (1)...(19): siRNA sense strand
agaguggcauguccucagu

SEQ ID NO: 915119 - RNA, 19 nt, Homo sapiens
  misc_RNA (1)...(19): siRNA sense strand
gcagaggaucuacaaaaug

SEQ ID NO: 915120 - RNA, 19 nt, Homo sapiens
  misc_RNA (1)...(19): siRNA sense strand
gacuaugugcuuagacugu

SEQ ID NO: 915121 - RNA, 19 nt, Homo sapiens
  misc_RNA (1)...(19): siRNA sense strand
uggcauguccucagugcaa

SEQ ID NO: 915122 - RNA, 19 nt, Homo sapiens
  misc_RNA (1)...(19): siRNA sense strand
gcagaugcuggacagaagu

SEQ ID NO: 915123 - RNA, 19 nt, Homo sapiens
  misc_RNA (1)...(19): siRNA sense strand
aauggucggcucuaucuau

SEQ ID NO: 915124 - RNA, 19 nt, Homo sapiens
  misc_RNA (1)...(19): siRNA sense strand
ggguggaauugcguuuguu

SEQ ID NO: 915125 - RNA, 19 nt, Homo sapiens
  misc_RNA (1)...(19): siRNA sense strand
gugcagaggaucuacaaaa

SEQ ID NO: 915126 - RNA, 19 nt, Homo sapiens
  misc_RNA (1)...(19): siRNA sense strand
guggagcccuugucuuucc

SEQ ID NO: 915127 - RNA, 19 nt, Homo sapiens
  misc_RNA (1)...(19): siRNA sense strand
gccaauccuuuagcagauc

SEQ ID NO: 915128 - RNA, 19 nt, Homo sapiens
  misc_RNA (1)...(19): siRNA sense strand
ggcgcaaauacucgaauaa

SEQ ID NO: 915129 - RNA, 19 nt, Homo sapiens
  misc_RNA (1)...(19): siRNA sense strand
cuacugaugaagaugauag

SEQ ID NO: 915130 - RNA, 19 nt, Homo sapiens
  misc_RNA (1)...(19): siRNA sense strand
uugcguuuguugccauaaa

SEQ ID NO: 915131 - RNA, 19 nt, Homo sapiens
  misc_RNA (1)...(19): siRNA sense strand
gagagagcugauccuuuau

SEQ ID NO: 915132 - RNA, 19 nt, Homo sapiens
  misc_RNA (1)...(19): siRNA sense strand
gcaaacagcuggagaagac

SEQ ID NO: 915133 - RNA, 19 nt, Homo sapiens
  misc_RNA (1)...(19): siRNA sense strand
cagcaaauccacagcauua

SEQ ID NO: 915134 - RNA, 19 nt, Homo sapiens
  misc_RNA (1)...(19): siRNA sense strand
gaaggaagaauugagguua

SEQ ID NO: 915135 - RNA, 19 nt, Homo sapiens
  misc_RNA (1)...(19): siRNA sense strand
ucaagcagcugaaggaaga

SEQ ID NO: 915136 - RNA, 19 nt, Homo sapiens
  misc_RNA (1)...(19): siRNA sense strand
gaauugagguuagaagaag

SEQ ID NO: 915137 - RNA, 19 nt, Homo sapiens
  misc_RNA (1)...(19): siRNA sense strand
gagaguaccuccuggacau

SEQ ID NO: 915138 - RNA, 19 nt, Homo sapiens
  misc_RNA (1)...(19): siRNA sense strand
ugugagaacugcaugacaa

SEQ ID NO: 915139 - RNA, 19 nt, Homo sapiens
  misc_RNA (1)...(19): siRNA sense strand
caacaacgaguucaucuac

SEQ ID NO: 915140 - RNA, 19 nt, Homo sapiens
  misc_RNA (1)...(19): siRNA sense strand
uggaggagguggugcagaa

SEQ ID NO: 915141 - RNA, 19 nt, Homo sapiens
  misc_RNA (1)...(19): siRNA sense strand
agaagacgcuacucgagau

SEQ ID NO: 915142 - RNA, 19 nt, Homo sapiens
  misc_RNA (1)...(19): siRNA sense strand
gcgggacccuugcguuugu

SEQ ID NO: 915143 - RNA, 19 nt, Homo sapiens
  misc_RNA (1)...(19): siRNA sense strand
ggucaccucugccgagucu

SEQ ID NO: 915144 - RNA, 19 nt, Homo sapiens
  misc_RNA (1)...(19): siRNA sense strand
gcagcugaaggaagaauug

SEQ ID NO: 915145 - RNA, 19 nt, Homo sapiens
  misc_RNA (1)...(19): siRNA sense strand
ugacaaccaaccagaagaa

SEQ ID NO: 915146 - RNA, 19 nt, Homo sapiens
  misc_RNA (1)...(19): siRNA sense strand
aagcaaaacucguguuguu

SEQ ID NO: 915147 - RNA, 19 nt, Homo sapiens
  misc_RNA (1)...(19): siRNA sense strand
cggcagagucaaauacaaa

SEQ ID NO: 915148 - RNA, 19 nt, Homo sapiens
  misc_RNA (1)...(19): siRNA sense strand
gcaaaacucguguuguuga

SEQ ID NO: 915149 - RNA, 19 nt, Homo sapiens
  misc_RNA (1)...(19): siRNA sense strand
gaagaauugagguuagaag

SEQ ID NO: 915150 - RNA, 19 nt, Homo sapiens
  misc_RNA (1)...(19): siRNA sense strand
gcaugacaaccaaccagaa

SEQ ID NO: 915151 - RNA, 19 nt, Homo sapiens
  misc_RNA (1)...(19): siRNA sense strand
gcggcagagucaaauacaa

SEQ ID NO: 915152 - RNA, 19 nt, Homo sapiens
  misc_RNA (1)...(19): siRNA sense strand
ccaacaacgaguucaucua

SEQ ID NO: 915153 - RNA, 19 nt, Homo sapiens
  misc_RNA (1)...(19): siRNA sense strand
ggaagaauugagguuagaa

SEQ ID NO: 915154 - RNA, 19 nt, Homo sapiens
  misc_RNA (1)...(19): siRNA sense strand
gcccagaagcccacagguu

SEQ ID NO: 915155 - RNA, 19 nt, Homo sapiens
  misc_RNA (1)...(19): siRNA sense strand
gcaaauccacagcauuagg

SEQ ID NO: 915156 - RNA, 19 nt, Homo sapiens
  misc_RNA (1)...(19): siRNA sense strand
agaauugagguuagaagaa

SEQ ID NO: 915157 - RNA, 19 nt, Homo sapiens
  misc_RNA (1)...(19): siRNA sense strand
agaacugcaugacaaccaa

SEQ ID NO: 915158 - RNA, 19 nt, Homo sapiens
  misc_RNA (1)...(19): siRNA sense strand
cacccaaacugcagaacuc

SEQ ID NO: 915159 - RNA, 19 nt, Homo sapiens
  misc_RNA (1)...(19): siRNA sense strand
agaagaaggcgcucaaggu

SEQ ID NO: 915160 - RNA, 19 nt, Homo sapiens
  misc_RNA (1)...(19): siRNA sense strand
gaucaagcagcugaaggaa

SEQ ID NO: 915161 - RNA, 19 nt, Homo sapiens
  misc_RNA (1)...(19): siRNA sense strand
aaggaagaauugagguuag

SEQ ID NO: 915162 - RNA, 19 nt, Homo sapiens
  misc_RNA (1)...(19): siRNA sense strand
gagcucacaggucgucaug

SEQ ID NO: 915163 - RNA, 19 nt, Homo sapiens
  misc_RNA (1)...(19): siRNA sense strand
aaacucguguuguugaaaa

SEQ ID NO: 915164 - RNA, 19 nt, Homo sapiens
  misc_RNA (1)...(19): siRNA sense strand
gagguuagaagaagcaaaa

SEQ ID NO: 915165 - RNA, 19 nt, Homo sapiens
  misc_RNA (1)...(19): siRNA sense strand
ugaaggaagaauugagguu

SEQ ID NO: 915166 - RNA, 19 nt, Homo sapiens
  misc_RNA (1)...(19): siRNA sense strand
caaaacucguguuguugaa

SEQ ID NO: 915167 - RNA, 19 nt, Homo sapiens
  misc_RNA (1)...(19): siRNA sense strand
aggaagaauugagguuaga

SEQ ID NO: 915168 - RNA, 19 nt, Homo sapiens
  misc_RNA (1)...(19): siRNA sense strand
acaccagccugcucgucaa

SEQ ID NO: 915169 - RNA, 19 nt, Homo sapiens
  misc_RNA (1)...(19): siRNA sense strand
gagaacugcaugacaacca

SEQ ID NO: 915170 - RNA, 19 nt, Homo sapiens
  misc_RNA (1)...(19): siRNA sense strand
gaguaccuccuggacauga

SEQ ID NO: 915171 - RNA, 19 nt, Homo sapiens
  misc_RNA (1)...(19): siRNA sense strand
gaaccuacuggagacacaa

SEQ ID NO: 915172 - RNA, 19 nt, Homo sapiens
  misc_RNA (1)...(19): siRNA sense strand
agucagccacguggaaaua

SEQ ID NO: 915173 - RNA, 19 nt, Homo sapiens
  misc_RNA (1)...(19): siRNA sense strand
gcagcaggaacaggagauu

SEQ ID NO: 915174 - RNA, 19 nt, Homo sapiens
  misc_RNA (1)...(19): siRNA sense strand
gaagacgcuacucgagauc

SEQ ID NO: 915175 - RNA, 19 nt, Homo sapiens
  misc_RNA (1)...(19): siRNA sense strand
aagaauugagguuagaaga

SEQ ID NO: 915176 - RNA, 19 nt, Homo sapiens
  misc_RNA (1)...(19): siRNA sense strand
ccacagcauuaggcaacau

SEQ ID NO: 915177 - RNA, 19 nt, Homo sapiens
  misc_RNA (1)...(19): siRNA sense strand
ccagucagccacguggaaa

SEQ ID NO: 915178 - RNA, 19 nt, Homo sapiens
  misc_RNA (1)...(19): siRNA sense strand
cagcaggaccggcagacau

SEQ ID NO: 915179 - RNA, 19 nt, Homo sapiens
  misc_RNA (1)...(19): siRNA sense strand
guucaguccgucacccaaa

SEQ ID NO: 915180 - RNA, 19 nt, Homo sapiens
  misc_RNA (1)...(19): siRNA sense strand
acaacgaguucaucuaccu

SEQ ID NO: 915181 - RNA, 19 nt, Homo sapiens
  misc_RNA (1)...(19): siRNA sense strand
cauauuaccuccagacuuu

SEQ ID NO: 915182 - RNA, 19 nt, Homo sapiens
  misc_RNA (1)...(19): siRNA sense strand
gcccaggugucccauauua

SEQ ID NO: 915183 - RNA, 19 nt, Homo sapiens
  misc_RNA (1)...(19): siRNA sense strand
gaagagcaauagccacuug

SEQ ID NO: 915184 - RNA, 19 nt, Homo sapiens
  misc_RNA (1)...(19): siRNA sense strand
gaacagcauugacuucauc

SEQ ID NO: 915185 - RNA, 19 nt, Homo sapiens
  misc_RNA (1)...(19): siRNA sense strand
ucaaagcaguccacggaua

SEQ ID NO: 915186 - RNA, 19 nt, Homo sapiens
  misc_RNA (1)...(19): siRNA sense strand
ccacaggucugguucugaa

SEQ ID NO: 915187 - RNA, 19 nt, Homo sapiens
  misc_RNA (1)...(19): siRNA sense strand
gaugaaauccacccucaaa

SEQ ID NO: 915188 - RNA, 19 nt, Homo sapiens
  misc_RNA (1)...(19): siRNA sense strand
ucaaagagcaguuccaguu

SEQ ID NO: 915189 - RNA, 19 nt, Homo sapiens
  misc_RNA (1)...(19): siRNA sense strand
cagaugaaauggagaacuu

SEQ ID NO: 915190 - RNA, 19 nt, Homo sapiens
  misc_RNA (1)...(19): siRNA sense strand
uaucaucagcuccuucuua

SEQ ID NO: 915191 - RNA, 19 nt, Homo sapiens
  misc_RNA (1)...(19): siRNA sense strand
cugcagagguuacugaaga

SEQ ID NO: 915192 - RNA, 19 nt, Homo sapiens
  misc_RNA (1)...(19): siRNA sense strand
gagaugguggauaaacuua

SEQ ID NO: 915193 - RNA, 19 nt, Homo sapiens
  misc_RNA (1)...(19): siRNA sense strand
aaagagcaguuccaguuug

SEQ ID NO: 915194 - RNA, 19 nt, Homo sapiens
  misc_RNA (1)...(19): siRNA sense strand
caaagagcaguuccaguuu

SEQ ID NO: 915195 - RNA, 19 nt, Homo sapiens
  misc_RNA (1)...(19): siRNA sense strand
gaaauccacccucaaagag

SEQ ID NO: 915196 - RNA, 19 nt, Homo sapiens
  misc_RNA (1)...(19): siRNA sense strand
gcacguggccaguaucauc

SEQ ID NO: 915197 - RNA, 19 nt, Homo sapiens
  misc_RNA (1)...(19): siRNA sense strand
caaagcaguccacggauau

SEQ ID NO: 915198 - RNA, 19 nt, Homo sapiens
  misc_RNA (1)...(19): siRNA sense strand
ugaaauccacccucaaaga

SEQ ID NO: 915199 - RNA, 19 nt, Homo sapiens
  misc_RNA (1)...(19): siRNA sense strand
gcagagaacagcauugacu

SEQ ID NO: 915200 - RNA, 19 nt, Homo sapiens
  misc_RNA (1)...(19): siRNA sense strand
agaacuugcugaccuacaa

SEQ ID NO: 915201 - RNA, 19 nt, Homo sapiens
  misc_RNA (1)...(19): siRNA sense strand
cagcccaggugucccauau

SEQ ID NO: 915202 - RNA, 19 nt, Homo sapiens
  misc_RNA (1)...(19): siRNA sense strand
gagaacagcauugacuuca

SEQ ID NO: 915203 - RNA, 19 nt, Homo sapiens
  misc_RNA (1)...(19): siRNA sense strand
gggcagagaacagcauuga

SEQ ID NO: 915204 - RNA, 19 nt, Homo sapiens
  misc_RNA (1)...(19): siRNA sense strand
gcaagacuuuuauuacguu

SEQ ID NO: 915205 - RNA, 19 nt, Homo sapiens
  misc_RNA (1)...(19): siRNA sense strand
gagcuucuccugcaaagag

SEQ ID NO: 915206 - RNA, 19 nt, Homo sapiens
  misc_RNA (1)...(19): siRNA sense strand
ccacggauauuuugauuca

SEQ ID NO: 915207 - RNA, 19 nt, Homo sapiens
  misc_RNA (1)...(19): siRNA sense strand
gcccauguccuguugauca

SEQ ID NO: 915208 - RNA, 19 nt, Homo sapiens
  misc_RNA (1)...(19): siRNA sense strand
ugagugagauccgaagagu

SEQ ID NO: 915209 - RNA, 19 nt, Homo sapiens
  misc_RNA (1)...(19): siRNA sense strand
uggagaacuugcugaccua

SEQ ID NO: 915210 - RNA, 19 nt, Homo sapiens
  misc_RNA (1)...(19): siRNA sense strand
cgucgugggcggaauguuu

SEQ ID NO: 915211 - RNA, 19 nt, Homo sapiens
  misc_RNA (1)...(19): siRNA sense strand
ugauagacacgaugaaauc

SEQ ID NO: 915212 - RNA, 19 nt, Homo sapiens
  misc_RNA (1)...(19): siRNA sense strand
caugauagacacgaugaaa

SEQ ID NO: 915213 - RNA, 19 nt, Homo sapiens
  misc_RNA (1)...(19): siRNA sense strand
agugagauccgaagaguug

SEQ ID NO: 915214 - RNA, 19 nt, Homo sapiens
  misc_RNA (1)...(19): siRNA sense strand
ccuggaaucagaugaaaug

SEQ ID NO: 915215 - RNA, 19 nt, Homo sapiens
  misc_RNA (1)...(19): siRNA sense strand
aagagcaguuccaguuugu

SEQ ID NO: 915216 - RNA, 19 nt, Homo sapiens
  misc_RNA (1)...(19): siRNA sense strand
agaauuacucugagaagga

SEQ ID NO: 915217 - RNA, 19 nt, Homo sapiens
  misc_RNA (1)...(19): siRNA sense strand
gacagacucaucccucuuc

SEQ ID NO: 915218 - RNA, 19 nt, Homo sapiens
  misc_RNA (1)...(19): siRNA sense strand
agaaggagucccugucguu

SEQ ID NO: 915219 - RNA, 19 nt, Homo sapiens
  misc_RNA (1)...(19): siRNA sense strand
agagguuacugaagagcaa

SEQ ID NO: 915220 - RNA, 19 nt, Homo sapiens
  misc_RNA (1)...(19): siRNA sense strand
cgagaugguggauaaacuu

SEQ ID NO: 915221 - RNA, 19 nt, Homo sapiens
  misc_RNA (1)...(19): siRNA sense strand
uggcagccuugaaauggaa

SEQ ID NO: 915222 - RNA, 19 nt, Homo sapiens
  misc_RNA (1)...(19): siRNA sense strand
uuuauuacguugccaugga

SEQ ID NO: 915223 - RNA, 19 nt, Homo sapiens
  misc_RNA (1)...(19): siRNA sense strand
ggaagcugcaggcccaugu

SEQ ID NO: 915224 - RNA, 19 nt, Homo sapiens
  misc_RNA (1)...(19): siRNA sense strand
caucagcuccuucuuacag

SEQ ID NO: 915225 - RNA, 19 nt, Homo sapiens
  misc_RNA (1)...(19): siRNA sense strand
gccuugaaauggaaucgau

SEQ ID NO: 915226 - RNA, 19 nt, Homo sapiens
  misc_RNA (1)...(19): siRNA sense strand
gagucccugucguucauga

SEQ ID NO: 915227 - RNA, 19 nt, Homo sapiens
  misc_RNA (1)...(19): siRNA sense strand
gagcaauagccacuugagu

SEQ ID NO: 915228 - RNA, 19 nt, Homo sapiens
  misc_RNA (1)...(19): siRNA sense strand
guggcagccuugaaaugga

SEQ ID NO: 915229 - RNA, 19 nt, Homo sapiens
  misc_RNA (1)...(19): siRNA sense strand
cagagaacagcauugacuu

SEQ ID NO: 915230 - RNA, 19 nt, Homo sapiens
  misc_RNA (1)...(19): siRNA sense strand
cuacaagcggagagccaua

SEQ ID NO: 915231 - RNA, 19 nt, Homo sapiens
  misc_RNA (1)...(19): siRNA sense strand
ggacacgccgcucuuucuc

SEQ ID NO: 915232 - RNA, 19 nt, Homo sapiens
  misc_RNA (1)...(19): siRNA sense strand
gucccugucguucaugaua

SEQ ID NO: 915233 - RNA, 19 nt, Homo sapiens
  misc_RNA (1)...(19): siRNA sense strand
ggccacaggucugguucug

SEQ ID NO: 915234 - RNA, 19 nt, Homo sapiens
  misc_RNA (1)...(19): siRNA sense strand
aaucagaugaaauggagaa

SEQ ID NO: 915235 - RNA, 19 nt, Homo sapiens
  misc_RNA (1)...(19): siRNA sense strand
ccgagaugguggauaaacu

SEQ ID NO: 915236 - RNA, 19 nt, Homo sapiens
  misc_RNA (1)...(19): siRNA sense strand
cccagcacguggccaguau

SEQ ID NO: 915237 - RNA, 19 nt, Homo sapiens
  misc_RNA (1)...(19): siRNA sense strand
ccauauuaccuccagacuu

SEQ ID NO: 915238 - RNA, 19 nt, Homo sapiens
  misc_RNA (1)...(19): siRNA sense strand
aaagaggaaccacgaaggu

SEQ ID NO: 915239 - RNA, 19 nt, Homo sapiens
  misc_RNA (1)...(19): siRNA sense strand
agaacagcauugacuucau

SEQ ID NO: 915240 - RNA, 19 nt, Homo sapiens
  misc_RNA (1)...(19): siRNA sense strand
cauguccuguugaucaaag

SEQ ID NO: 915241 - RNA, 19 nt, Homo sapiens
  misc_RNA (1)...(19): siRNA sense strand
cccauguccuguugaucaa

SEQ ID NO: 915242 - RNA, 19 nt, Homo sapiens
  misc_RNA (1)...(19): siRNA sense strand
aagcaguccacggauauuu

SEQ ID NO: 915243 - RNA, 19 nt, Homo sapiens
  misc_RNA (1)...(19): siRNA sense strand
gcaagucgcuggaugguuu

SEQ ID NO: 915244 - RNA, 19 nt, Homo sapiens
  misc_RNA (1)...(19): siRNA sense strand
ccaaagcuguccaaauuua

SEQ ID NO: 915245 - RNA, 19 nt, Homo sapiens
  misc_RNA (1)...(19): siRNA sense strand
aaccaaagcuguccaaauu

SEQ ID NO: 915246 - RNA, 19 nt, Homo sapiens
  misc_RNA (1)...(19): siRNA sense strand
gcaaggaggagcagcagaa

SEQ ID NO: 915247 - RNA, 19 nt, Homo sapiens
  misc_RNA (1)...(19): siRNA sense strand
gaugguuuauuaccugaaa

SEQ ID NO: 915248 - RNA, 19 nt, Homo sapiens
  misc_RNA (1)...(19): siRNA sense strand
ggaccaaccugacuuucca

SEQ ID NO: 915249 - RNA, 19 nt, Homo sapiens
  misc_RNA (1)...(19): siRNA sense strand
caacuaccuucuccaggaa

SEQ ID NO: 915250 - RNA, 19 nt, Homo sapiens
  misc_RNA (1)...(19): siRNA sense strand
gucgcuggaugguuuauua

SEQ ID NO: 915251 - RNA, 19 nt, Homo sapiens
  misc_RNA (1)...(19): siRNA sense strand
caaccugacuuuccacuac

SEQ ID NO: 915252 - RNA, 19 nt, Homo sapiens
  misc_RNA (1)...(19): siRNA sense strand
gauggugucucuccuccuu

SEQ ID NO: 915253 - RNA, 19 nt, Homo sapiens
  misc_RNA (1)...(19): siRNA sense strand
gcagaaggaguacagauuc

SEQ ID NO: 915254 - RNA, 19 nt, Homo sapiens
  misc_RNA (1)...(19): siRNA sense strand
gacauggaaugccagcaaa

SEQ ID NO: 915255 - RNA, 19 nt, Homo sapiens
  misc_RNA (1)...(19): siRNA sense strand
cgagaaguguuacucuuuc

SEQ ID NO: 915256 - RNA, 19 nt, Homo sapiens
  misc_RNA (1)...(19): siRNA sense strand
gaguacagauucagaucau

SEQ ID NO: 915257 - RNA, 19 nt, Homo sapiens
  misc_RNA (1)...(19): siRNA sense strand
gaaggaguacagauucaga

SEQ ID NO: 915258 - RNA, 19 nt, Homo sapiens
  misc_RNA (1)...(19): siRNA sense strand
ugaaggcuauggaggaugu

SEQ ID NO: 915259 - RNA, 19 nt, Homo sapiens
  misc_RNA (1)...(19): siRNA sense strand
cagaaggaguacagauuca

SEQ ID NO: 915260 - RNA, 19 nt, Homo sapiens
  misc_RNA (1)...(19): siRNA sense strand
caacgccucccaaaccaaa

SEQ ID NO: 915261 - RNA, 19 nt, Homo sapiens
  misc_RNA (1)...(19): siRNA sense strand
cauggaaugccagcaaaua

SEQ ID NO: 915262 - RNA, 19 nt, Homo sapiens
  misc_RNA (1)...(19): siRNA sense strand
caacggugaugaggccuau

SEQ ID NO: 915263 - RNA, 19 nt, Homo sapiens
  misc_RNA (1)...(19): siRNA sense strand
gcaaauacuccaggaccaa

SEQ ID NO: 915264 - RNA, 19 nt, Homo sapiens
  misc_RNA (1)...(19): siRNA sense strand
agacgacauucucuauuuc

SEQ ID NO: 915265 - RNA, 19 nt, Homo sapiens
  misc_RNA (1)...(19): siRNA sense strand
gccgagaaguguuacucuu

SEQ ID NO: 915266 - RNA, 19 nt, Homo sapiens
  misc_RNA (1)...(19): siRNA sense strand
guggggagcugccgucuuu

SEQ ID NO: 915267 - RNA, 19 nt, Homo sapiens
  misc_RNA (1)...(19): siRNA sense strand
ggaguacagauucagauca

SEQ ID NO: 915268 - RNA, 19 nt, Homo sapiens
  misc_RNA (1)...(19): siRNA sense strand
ccgagaaguguuacucuuu

SEQ ID NO: 915269 - RNA, 19 nt, Homo sapiens
  misc_RNA (1)...(19): siRNA sense strand
ggugaaggcuauggaggau

SEQ ID NO: 915270 - RNA, 19 nt, Homo sapiens
  misc_RNA (1)...(19): siRNA sense strand
aaaccaaagcuguccaaau

SEQ ID NO: 915271 - RNA, 19 nt, Homo sapiens
  misc_RNA (1)...(19): siRNA sense strand
caaagcuguccaaauuuau

SEQ ID NO: 915272 - RNA, 19 nt, Homo sapiens
  misc_RNA (1)...(19): siRNA sense strand
gcagugacggugacguguu

SEQ ID NO: 915273 - RNA, 19 nt, Homo sapiens
  misc_RNA (1)...(19): siRNA sense strand
ugacauggaaugccagcaa

SEQ ID NO: 915274 - RNA, 19 nt, Homo sapiens
  misc_RNA (1)...(19): siRNA sense strand
ugacuuuccacuacagauu

SEQ ID NO: 915275 - RNA, 19 nt, Homo sapiens
  misc_RNA (1)...(19): siRNA sense strand
cagugacggugacguguuc

SEQ ID NO: 915276 - RNA, 19 nt, Homo sapiens
  misc_RNA (1)...(19): siRNA sense strand
ggaaugccagcaaauacuc

SEQ ID NO: 915277 - RNA, 19 nt, Homo sapiens
  misc_RNA (1)...(19): siRNA sense strand
ggaugccugugcagagaca

SEQ ID NO: 915278 - RNA, 19 nt, Homo sapiens
  misc_RNA (1)...(19): siRNA sense strand
cuacuucaauuuagaaacc

SEQ ID NO: 915279 - RNA, 19 nt, Homo sapiens
  misc_RNA (1)...(19): siRNA sense strand
ccuucugucuuuauggaaa

SEQ ID NO: 915280 - RNA, 19 nt, Homo sapiens
  misc_RNA (1)...(19): siRNA sense strand
caagucgcuggaugguuua

SEQ ID NO: 915281 - RNA, 19 nt, Homo sapiens
  misc_RNA (1)...(19): siRNA sense strand
cgggaugccugugcagaga

SEQ ID NO: 915282 - RNA, 19 nt, Homo sapiens
  misc_RNA (1)...(19): siRNA sense strand
ggcuauggaggauguauau

SEQ ID NO: 915283 - RNA, 19 nt, Homo sapiens
  misc_RNA (1)...(19): siRNA sense strand
uggaugccgagaaguguua

SEQ ID NO: 915284 - RNA, 19 nt, Homo sapiens
  misc_RNA (1)...(19): siRNA sense strand
ccugcaacgucaccauaga

SEQ ID NO: 915285 - RNA, 19 nt, Homo sapiens
  misc_RNA (1)...(19): siRNA sense strand
caccauagaaggcuuggau

SEQ ID NO: 915286 - RNA, 19 nt, Homo sapiens
  misc_RNA (1)...(19): siRNA sense strand
aggagcagcagaaggagua

SEQ ID NO: 915287 - RNA, 19 nt, Homo sapiens
  misc_RNA (1)...(19): siRNA sense strand
gggucagggugaaggcuau

SEQ ID NO: 915288 - RNA, 19 nt, Homo sapiens
  misc_RNA (1)...(19): siRNA sense strand
cuacggggaucuccucuau

SEQ ID NO: 915289 - RNA, 19 nt, Homo sapiens
  misc_RNA (1)...(19): siRNA sense strand
ccgugcaggugacauggaa

SEQ ID NO: 915290 - RNA, 19 nt, Homo sapiens
  misc_RNA (1)...(19): siRNA sense strand
ccgaguggcaguccaaaca

SEQ ID NO: 915291 - RNA, 19 nt, Homo sapiens
  misc_RNA (1)...(19): siRNA sense strand
aggaggagcagcagaagga

SEQ ID NO: 915292 - RNA, 19 nt, Homo sapiens
  misc_RNA (1)...(19): siRNA sense strand
gagcagcgagacgacauuc

SEQ ID NO: 915293 - RNA, 19 nt, Homo sapiens
  misc_RNA (1)...(19): siRNA sense strand
uaccugcaacgucaccaua

SEQ ID NO: 915294 - RNA, 19 nt, Homo sapiens
  misc_RNA (1)...(19): siRNA sense strand
ccagugcaccaacuaccuu

SEQ ID NO: 915295 - RNA, 19 nt, Homo sapiens
  misc_RNA (1)...(19): siRNA sense strand
ccaaaccaaagcuguccaa

SEQ ID NO: 915296 - RNA, 19 nt, Homo sapiens
  misc_RNA (1)...(19): siRNA sense strand
gacaccaacgccucccaaa

SEQ ID NO: 915297 - RNA, 19 nt, Homo sapiens
  misc_RNA (1)...(19): siRNA sense strand
gcuuggaugccgagaagug

SEQ ID NO: 915298 - RNA, 19 nt, Homo sapiens
  misc_RNA (1)...(19): siRNA sense strand
gcaagucgcuggaugguuu

SEQ ID NO: 915299 - RNA, 19 nt, Homo sapiens
  misc_RNA (1)...(19): siRNA sense strand
ccaaagcuguccaaauuua

SEQ ID NO: 915300 - RNA, 19 nt, Homo sapiens
  misc_RNA (1)...(19): siRNA sense strand
aaccaaagcuguccaaauu

SEQ ID NO: 915301 - RNA, 19 nt, Homo sapiens
  misc_RNA (1)...(19): siRNA sense strand
gcaaggaggagcagcagaa

SEQ ID NO: 915302 - RNA, 19 nt, Homo sapiens
  misc_RNA (1)...(19): siRNA sense strand
gaugguuuauuaccugaaa

SEQ ID NO: 915303 - RNA, 19 nt, Homo sapiens
  misc_RNA (1)...(19): siRNA sense strand
ggaccaaccugacuuucca

SEQ ID NO: 915304 - RNA, 19 nt, Homo sapiens
  misc_RNA (1)...(19): siRNA sense strand
caacuaccuucuccaggaa

SEQ ID NO: 915305 - RNA, 19 nt, Homo sapiens
  misc_RNA (1)...(19): siRNA sense strand
gucgcuggaugguuuauua

SEQ ID NO: 915306 - RNA, 19 nt, Homo sapiens
  misc_RNA (1)...(19): siRNA sense strand
caaccugacuuuccacuac

SEQ ID NO: 915307 - RNA, 19 nt, Homo sapiens
  misc_RNA (1)...(19): siRNA sense strand
gauggugucucuccuccuu

SEQ ID NO: 915308 - RNA, 19 nt, Homo sapiens
  misc_RNA (1)...(19): siRNA sense strand
gcagaaggaguacagauuc

SEQ ID NO: 915309 - RNA, 19 nt, Homo sapiens
  misc_RNA (1)...(19): siRNA sense strand
gacauggaaugccagcaaa

SEQ ID NO: 915310 - RNA, 19 nt, Homo sapiens
  misc_RNA (1)...(19): siRNA sense strand
cgagaaguguuacucuuuc

SEQ ID NO: 915311 - RNA, 19 nt, Homo sapiens
  misc_RNA (1)...(19): siRNA sense strand
gaguacagauucagaucau

SEQ ID NO: 915312 - RNA, 19 nt, Homo sapiens
  misc_RNA (1)...(19): siRNA sense strand
gaaggaguacagauucaga

SEQ ID NO: 915313 - RNA, 19 nt, Homo sapiens
  misc_RNA (1)...(19): siRNA sense strand
ugaaggcuauggaggaugu

SEQ ID NO: 915314 - RNA, 19 nt, Homo sapiens
  misc_RNA (1)...(19): siRNA sense strand
cagaaggaguacagauuca

SEQ ID NO: 915315 - RNA, 19 nt, Homo sapiens
  misc_RNA (1)...(19): siRNA sense strand
caacgccucccaaaccaaa

SEQ ID NO: 915316 - RNA, 19 nt, Homo sapiens
  misc_RNA (1)...(19): siRNA sense strand
cauggaaugccagcaaaua

SEQ ID NO: 915317 - RNA, 19 nt, Homo sapiens
  misc_RNA (1)...(19): siRNA sense strand
caacggugaugaggccuau

SEQ ID NO: 915318 - RNA, 19 nt, Homo sapiens
  misc_RNA (1)...(19): siRNA sense strand
gcaaauacuccaggaccaa

SEQ ID NO: 915319 - RNA, 19 nt, Homo sapiens
  misc_RNA (1)...(19): siRNA sense strand
agacgacauucucuauuuc

SEQ ID NO: 915320 - RNA, 19 nt, Homo sapiens
  misc_RNA (1)...(19): siRNA sense strand
gccgagaaguguuacucuu

SEQ ID NO: 915321 - RNA, 19 nt, Homo sapiens
  misc_RNA (1)...(19): siRNA sense strand
guggggagcugccgucuuu

SEQ ID NO: 915322 - RNA, 19 nt, Homo sapiens
  misc_RNA (1)...(19): siRNA sense strand
ggaguacagauucagauca

SEQ ID NO: 915323 - RNA, 19 nt, Homo sapiens
  misc_RNA (1)...(19): siRNA sense strand
ccgagaaguguuacucuuu

SEQ ID NO: 915324 - RNA, 19 nt, Homo sapiens
  misc_RNA (1)...(19): siRNA sense strand
ggugaaggcuauggaggau

SEQ ID NO: 915325 - RNA, 19 nt, Homo sapiens
  misc_RNA (1)...(19): siRNA sense strand
aaaccaaagcuguccaaau

SEQ ID NO: 915326 - RNA, 19 nt, Homo sapiens
  misc_RNA (1)...(19): siRNA sense strand
caaagcuguccaaauuuau

SEQ ID NO: 915327 - RNA, 19 nt, Homo sapiens
  misc_RNA (1)...(19): siRNA sense strand
gcagugacggugacguguu

SEQ ID NO: 915328 - RNA, 19 nt, Homo sapiens
  misc_RNA (1)...(19): siRNA sense strand
ugacauggaaugccagcaa

SEQ ID NO: 915329 - RNA, 19 nt, Homo sapiens
  misc_RNA (1)...(19): siRNA sense strand
ugacuuuccacuacagauu

SEQ ID NO: 915330 - RNA, 19 nt, Homo sapiens
  misc_RNA (1)...(19): siRNA sense strand
cagugacggugacguguuc

SEQ ID NO: 915331 - RNA, 19 nt, Homo sapiens
  misc_RNA (1)...(19): siRNA sense strand
ggaaugccagcaaauacuc

SEQ ID NO: 915332 - RNA, 19 nt, Homo sapiens
  misc_RNA (1)...(19): siRNA sense strand
ggaugccugugcagagaca

SEQ ID NO: 915333 - RNA, 19 nt, Homo sapiens
  misc_RNA (1)...(19): siRNA sense strand
cuacuucaauuuagaaacc

SEQ ID NO: 915334 - RNA, 19 nt, Homo sapiens
  misc_RNA (1)...(19): siRNA sense strand
ccuucugucuuuauggaaa

SEQ ID NO: 915335 - RNA, 19 nt, Homo sapiens
  misc_RNA (1)...(19): siRNA sense strand
caagucgcuggaugguuua

SEQ ID NO: 915336 - RNA, 19 nt, Homo sapiens
  misc_RNA (1)...(19): siRNA sense strand
cgggaugccugugcagaga

SEQ ID NO: 915337 - RNA, 19 nt, Homo sapiens
  misc_RNA (1)...(19): siRNA sense strand
ggcuauggaggauguauau

SEQ ID NO: 915338 - RNA, 19 nt, Homo sapiens
  misc_RNA (1)...(19): siRNA sense strand
uggaugccgagaaguguua

SEQ ID NO: 915339 - RNA, 19 nt, Homo sapiens
  misc_RNA (1)...(19): siRNA sense strand
ccugcaacgucaccauaga

SEQ ID NO: 915340 - RNA, 19 nt, Homo sapiens
  misc_RNA (1)...(19): siRNA sense strand
caccauagaaggcuuggau

SEQ ID NO: 915341 - RNA, 19 nt, Homo sapiens
  misc_RNA (1)...(19): siRNA sense strand
aggagcagcagaaggagua

SEQ ID NO: 915342 - RNA, 19 nt, Homo sapiens
  misc_RNA (1)...(19): siRNA sense strand
gggucagggugaaggcuau

SEQ ID NO: 915343 - RNA, 19 nt, Homo sapiens
  misc_RNA (1)...(19): siRNA sense strand
cuacggggaucuccucuau

SEQ ID NO: 915344 - RNA, 19 nt, Homo sapiens
  misc_RNA (1)...(19): siRNA sense strand
ccgugcaggugacauggaa

SEQ ID NO: 915345 - RNA, 19 nt, Homo sapiens
  misc_RNA (1)...(19): siRNA sense strand
ccgaguggcaguccaaaca

SEQ ID NO: 915346 - RNA, 19 nt, Homo sapiens
  misc_RNA (1)...(19): siRNA sense strand
aggaggagcagcagaagga

SEQ ID NO: 915347 - RNA, 19 nt, Homo sapiens
  misc_RNA (1)...(19): siRNA sense strand
gagcagcgagacgacauuc

SEQ ID NO: 915348 - RNA, 19 nt, Homo sapiens
  misc_RNA (1)...(19): siRNA sense strand
uaccugcaacgucaccaua

SEQ ID NO: 915349 - RNA, 19 nt, Homo sapiens
  misc_RNA (1)...(19): siRNA sense strand
ccagugcaccaacuaccuu

SEQ ID NO: 915350 - RNA, 19 nt, Homo sapiens
  misc_RNA (1)...(19): siRNA sense strand
ccaaaccaaagcuguccaa

SEQ ID NO: 915351 - RNA, 19 nt, Homo sapiens
  misc_RNA (1)...(19): siRNA sense strand
gacaccaacgccucccaaa

SEQ ID NO: 915352 - RNA, 19 nt, Homo sapiens
  misc_RNA (1)...(19): siRNA sense strand
gcuuggaugccgagaagug

SEQ ID NO: 915353 - RNA, 19 nt, Homo sapiens
  misc_RNA (1)...(19): siRNA sense strand
gcaaaggccuccacgaguu

SEQ ID NO: 915354 - RNA, 19 nt, Homo sapiens
  misc_RNA (1)...(19): siRNA sense strand
ccaaggagcugaugcacuu

SEQ ID NO: 915355 - RNA, 19 nt, Homo sapiens
  misc_RNA (1)...(19): siRNA sense strand
gcaacgagaugcugugcaa

SEQ ID NO: 915356 - RNA, 19 nt, Homo sapiens
  misc_RNA (1)...(19): siRNA sense strand
ccaaagacauccaguaucu

SEQ ID NO: 915357 - RNA, 19 nt, Homo sapiens
  misc_RNA (1)...(19): siRNA sense strand
ugaagaagcucaucaacuc

SEQ ID NO: 915358 - RNA, 19 nt, Homo sapiens
  misc_RNA (1)...(19): siRNA sense strand
gaacaagcaugaggaugug

SEQ ID NO: 915359 - RNA, 19 nt, Homo sapiens
  misc_RNA (1)...(19): siRNA sense strand
acgaugagcuguuccagua

SEQ ID NO: 915360 - RNA, 19 nt, Homo sapiens
  misc_RNA (1)...(19): siRNA sense strand
agaaggaccugguguggaa

SEQ ID NO: 915361 - RNA, 19 nt, Homo sapiens
  misc_RNA (1)...(19): siRNA sense strand
gggcagcuguuccacauug

SEQ ID NO: 915362 - RNA, 19 nt, Homo sapiens
  misc_RNA (1)...(19): siRNA sense strand
ggaacaagcaugaggaugu

SEQ ID NO: 915363 - RNA, 19 nt, Homo sapiens
  misc_RNA (1)...(19): siRNA sense strand
ccaagaagaaguccaagaa

SEQ ID NO: 915364 - RNA, 19 nt, Homo sapiens
  misc_RNA (1)...(19): siRNA sense strand
gcacagcgacaacaucaug

SEQ ID NO: 915365 - RNA, 19 nt, Homo sapiens
  misc_RNA (1)...(19): siRNA sense strand
ggaccaaggaggagaauca

SEQ ID NO: 915366 - RNA, 19 nt, Homo sapiens
  misc_RNA (1)...(19): siRNA sense strand
ugaaggcccugaaugacuu

SEQ ID NO: 915367 - RNA, 19 nt, Homo sapiens
  misc_RNA (1)...(19): siRNA sense strand
ucaacuggcugaaguccaa

SEQ ID NO: 915368 - RNA, 19 nt, Homo sapiens
  misc_RNA (1)...(19): siRNA sense strand
gaacgcugccucuacaugu

SEQ ID NO: 915369 - RNA, 19 nt, Homo sapiens
  misc_RNA (1)...(19): siRNA sense strand
ggaaacugacggacgauga

SEQ ID NO: 915370 - RNA, 19 nt, Homo sapiens
  misc_RNA (1)...(19): siRNA sense strand
gcgccaagaugugccaauu

SEQ ID NO: 915371 - RNA, 19 nt, Homo sapiens
  misc_RNA (1)...(19): siRNA sense strand
gggccaaccucaugcuguu

SEQ ID NO: 915372 - RNA, 19 nt, Homo sapiens
  misc_RNA (1)...(19): siRNA sense strand
acugcgagcugaccaaauu

SEQ ID NO: 915373 - RNA, 19 nt, Homo sapiens
  misc_RNA (1)...(19): siRNA sense strand
gccaagaugugccaauucu

SEQ ID NO: 915374 - RNA, 19 nt, Homo sapiens
  misc_RNA (1)...(19): siRNA sense strand
gcgugggcaucaucuuuaa

SEQ ID NO: 915375 - RNA, 19 nt, Homo sapiens
  misc_RNA (1)...(19): siRNA sense strand
uaccugaacuucccugugu

SEQ ID NO: 915376 - RNA, 19 nt, Homo sapiens
  misc_RNA (1)...(19): siRNA sense strand
ugaacuggcuggcccacaa

SEQ ID NO: 915377 - RNA, 19 nt, Homo sapiens
  misc_RNA (1)...(19): siRNA sense strand
acaugaaggugcugaugaa

SEQ ID NO: 915378 - RNA, 19 nt, Homo sapiens
  misc_RNA (1)...(19): siRNA sense strand
caaaggccuccacgaguuu

SEQ ID NO: 915379 - RNA, 19 nt, Homo sapiens
  misc_RNA (1)...(19): siRNA sense strand
gaauuucaagaccaaguuu

SEQ ID NO: 915380 - RNA, 19 nt, Homo sapiens
  misc_RNA (1)...(19): siRNA sense strand
ccagaaaccgcgugccaaa

SEQ ID NO: 915381 - RNA, 19 nt, Homo sapiens
  misc_RNA (1)...(19): siRNA sense strand
gcaggaggccuaccuagag

SEQ ID NO: 915382 - RNA, 19 nt, Homo sapiens
  misc_RNA (1)...(19): siRNA sense strand
ccaaguggaacaagcauga

SEQ ID NO: 915383 - RNA, 19 nt, Homo sapiens
  misc_RNA (1)...(19): siRNA sense strand
caagaucggccacuuccuu

SEQ ID NO: 915384 - RNA, 19 nt, Homo sapiens
  misc_RNA (1)...(19): siRNA sense strand
cauccucaccuaugacuuu

SEQ ID NO: 915385 - RNA, 19 nt, Homo sapiens
  misc_RNA (1)...(19): siRNA sense strand
gggcuggaccugaggauga

SEQ ID NO: 915386 - RNA, 19 nt, Homo sapiens
  misc_RNA (1)...(19): siRNA sense strand
gaagaagcucaucaacuca

SEQ ID NO: 915387 - RNA, 19 nt, Homo sapiens
  misc_RNA (1)...(19): siRNA sense strand
ccaaagacaacaggcagua

SEQ ID NO: 915388 - RNA, 19 nt, Homo sapiens
  misc_RNA (1)...(19): siRNA sense strand
ggaauuucaagaccaaguu

SEQ ID NO: 915389 - RNA, 19 nt, Homo sapiens
  misc_RNA (1)...(19): siRNA sense strand
gggaagcacugagcaaacu

SEQ ID NO: 915390 - RNA, 19 nt, Homo sapiens
  misc_RNA (1)...(19): siRNA sense strand
uguggaagcugcggcauga

SEQ ID NO: 915391 - RNA, 19 nt, Homo sapiens
  misc_RNA (1)...(19): siRNA sense strand
ggaccgcacaggccucauu

SEQ ID NO: 915392 - RNA, 19 nt, Homo sapiens
  misc_RNA (1)...(19): siRNA sense strand
gaagcacugagcaaacuga

SEQ ID NO: 915393 - RNA, 19 nt, Homo sapiens
  misc_RNA (1)...(19): siRNA sense strand
guaccuguauggcaacuac

SEQ ID NO: 915394 - RNA, 19 nt, Homo sapiens
  misc_RNA (1)...(19): siRNA sense strand
gcacccugcuggcugaagu

SEQ ID NO: 915395 - RNA, 19 nt, Homo sapiens
  misc_RNA (1)...(19): siRNA sense strand
ucaagucgcugcggaaacu

SEQ ID NO: 915396 - RNA, 19 nt, Homo sapiens
  misc_RNA (1)...(19): siRNA sense strand
ccuaugacuuuguccaugu

SEQ ID NO: 915397 - RNA, 19 nt, Homo sapiens
  misc_RNA (1)...(19): siRNA sense strand
ccacagccgccuucaacaa

SEQ ID NO: 915398 - RNA, 19 nt, Homo sapiens
  misc_RNA (1)...(19): siRNA sense strand
ucauggacguccuguggaa

SEQ ID NO: 915399 - RNA, 19 nt, Homo sapiens
  misc_RNA (1)...(19): siRNA sense strand
gaaaccgcgugccaaacca

SEQ ID NO: 915400 - RNA, 19 nt, Homo sapiens
  misc_RNA (1)...(19): siRNA sense strand
aaagacauccaguaucuca

SEQ ID NO: 915401 - RNA, 19 nt, Homo sapiens
  misc_RNA (1)...(19): siRNA sense strand
caacauccaacucaacaag

SEQ ID NO: 915402 - RNA, 19 nt, Homo sapiens
  misc_RNA (1)...(19): siRNA sense strand
gaacggcaggcaugaguac

SEQ ID NO: 915403 - RNA, 19 nt, Homo sapiens
  misc_RNA (1)...(19): siRNA sense strand
gcuccaaagacauccagua

SEQ ID NO: 915404 - RNA, 19 nt, Homo sapiens
  misc_RNA (1)...(19): siRNA sense strand
cagcgugggcaucaucuuu

SEQ ID NO: 915405 - RNA, 19 nt, Homo sapiens
  misc_RNA (1)...(19): siRNA sense strand
uggugcaggugcucaagua

SEQ ID NO: 915406 - RNA, 19 nt, Homo sapiens
  misc_RNA (1)...(19): siRNA sense strand
ggaacgcugccucuacaug

SEQ ID NO: 915407 - RNA, 19 nt, Homo sapiens
  misc_RNA (1)...(19): siRNA sense strand
ggaguucgacaucaacauc

SEQ ID NO: 915408 - RNA, 19 nt, Homo sapiens
  misc_RNA (1)...(19): siRNA sense strand
gcucaucaacucacagauc

SEQ ID NO: 915409 - RNA, 19 nt, Homo sapiens
  misc_RNA (1)...(19): siRNA sense strand
uguaugagcacgagaagga

SEQ ID NO: 915410 - RNA, 19 nt, Homo sapiens
  misc_RNA (1)...(19): siRNA sense strand
aaacugaaggcccugaaug

SEQ ID NO: 915411 - RNA, 19 nt, Homo sapiens
  misc_RNA (1)...(19): siRNA sense strand
ggacugcgagcugaccaaa

SEQ ID NO: 915412 - RNA, 19 nt, Homo sapiens
  misc_RNA (1)...(19): siRNA sense strand
gaaacugacggacgaugag

SEQ ID NO: 915413 - RNA, 19 nt, Homo sapiens
  misc_RNA (1)...(19): siRNA sense strand
ggcccuggaucgagccauu

SEQ ID NO: 915414 - RNA, 19 nt, Homo sapiens
  misc_RNA (1)...(19): siRNA sense strand
gcgaggagagcuucaccuu

SEQ ID NO: 915415 - RNA, 19 nt, Homo sapiens
  misc_RNA (1)...(19): siRNA sense strand
cccacaacguguccaaaga

SEQ ID NO: 915416 - RNA, 19 nt, Homo sapiens
  misc_RNA (1)...(19): siRNA sense strand
caacucaacaagagcaaca

SEQ ID NO: 915417 - RNA, 19 nt, Homo sapiens
  misc_RNA (1)...(19): siRNA sense strand
gacggacgaugagcuguuc

SEQ ID NO: 915418 - RNA, 19 nt, Homo sapiens
  misc_RNA (1)...(19): siRNA sense strand
gaaucagagcguugugguu

SEQ ID NO: 915419 - RNA, 19 nt, Homo sapiens
  misc_RNA (1)...(19): siRNA sense strand
gcccuucuggucaacguua

SEQ ID NO: 915420 - RNA, 19 nt, Homo sapiens
  misc_RNA (1)...(19): siRNA sense strand
ccaccucuuugcccugaug

SEQ ID NO: 915421 - RNA, 19 nt, Homo sapiens
  misc_RNA (1)...(19): siRNA sense strand
ccaaccucaugcuguuuga

SEQ ID NO: 915422 - RNA, 19 nt, Homo sapiens
  misc_RNA (1)...(19): siRNA sense strand
ccaccaagaagaaguccaa

SEQ ID NO: 915423 - RNA, 19 nt, Homo sapiens
  misc_RNA (1)...(19): siRNA sense strand
cucaucaacucacagauca

SEQ ID NO: 915424 - RNA, 19 nt, Homo sapiens
  misc_RNA (1)...(19): siRNA sense strand
ugacuuuguccaugugauu

SEQ ID NO: 915425 - RNA, 19 nt, Homo sapiens
  misc_RNA (1)...(19): siRNA sense strand
caagaagaaguccaagaag

SEQ ID NO: 915426 - RNA, 19 nt, Homo sapiens
  misc_RNA (1)...(19): siRNA sense strand
aaggcucgcuccaccaaga

SEQ ID NO: 915427 - RNA, 19 nt, Homo sapiens
  misc_RNA (1)...(19): siRNA sense strand
uggagcagccggaagacua

SEQ ID NO: 915428 - RNA, 19 nt, Homo sapiens
  misc_RNA (1)...(19): siRNA sense strand
caaaccaccucccauuccu

SEQ ID NO: 915429 - RNA, 19 nt, Homo sapiens
  misc_RNA (1)...(19): siRNA sense strand
gcaaacugaaggcccugaa

SEQ ID NO: 915430 - RNA, 19 nt, Homo sapiens
  misc_RNA (1)...(19): siRNA sense strand
uacaaggaccagcuuaaga

SEQ ID NO: 915431 - RNA, 19 nt, Homo sapiens
  misc_RNA (1)...(19): siRNA sense strand
cauggcccgucucugcuuu

SEQ ID NO: 915432 - RNA, 19 nt, Homo sapiens
  misc_RNA (1)...(19): siRNA sense strand
gcucauccagggcagcaaa

SEQ ID NO: 915433 - RNA, 19 nt, Homo sapiens
  misc_RNA (1)...(19): siRNA sense strand
ggcaggaggccuaccuaga

SEQ ID NO: 915434 - RNA, 19 nt, Homo sapiens
  misc_RNA (1)...(19): siRNA sense strand
guggagcagugcaccuuca

SEQ ID NO: 915435 - RNA, 19 nt, Homo sapiens
  misc_RNA (1)...(19): siRNA sense strand
cccuggagcugcuagacuu

SEQ ID NO: 915436 - RNA, 19 nt, Homo sapiens
  misc_RNA (1)...(19): siRNA sense strand
agacagcggagcagcaaga

SEQ ID NO: 915437 - RNA, 19 nt, Homo sapiens
  misc_RNA (1)...(19): siRNA sense strand
cauaugugcugggcauugg

SEQ ID NO: 915438 - RNA, 19 nt, Homo sapiens
  misc_RNA (1)...(19): siRNA sense strand
cacaugaaggugcugauga

SEQ ID NO: 915439 - RNA, 19 nt, Homo sapiens
  misc_RNA (1)...(19): siRNA sense strand
acuacacgcugcaggugaa

SEQ ID NO: 915440 - RNA, 19 nt, Homo sapiens
  misc_RNA (1)...(19): siRNA sense strand
aggaggcacugaagcacuu

SEQ ID NO: 915441 - RNA, 19 nt, Homo sapiens
  misc_RNA (1)...(19): siRNA sense strand
caccaucgccaacauccaa

SEQ ID NO: 915442 - RNA, 19 nt, Homo sapiens
  misc_RNA (1)...(19): siRNA sense strand
ggaagcugcggcaugaagu

SEQ ID NO: 915443 - RNA, 19 nt, Homo sapiens
  misc_RNA (1)...(19): siRNA sense strand
gccaaaccaccucccauuc

SEQ ID NO: 915444 - RNA, 19 nt, Homo sapiens
  misc_RNA (1)...(19): siRNA sense strand
ccugugcccugcggaagaa

SEQ ID NO: 915445 - RNA, 19 nt, Homo sapiens
  misc_RNA (1)...(19): siRNA sense strand
cagaggaggaggcacugaa

SEQ ID NO: 915446 - RNA, 19 nt, Homo sapiens
  misc_RNA (1)...(19): siRNA sense strand
cagcuguuccacauugauu

SEQ ID NO: 915447 - RNA, 19 nt, Homo sapiens
  misc_RNA (1)...(19): siRNA sense strand
ggcagcuguuccacauuga

SEQ ID NO: 915448 - RNA, 19 nt, Homo sapiens
  misc_RNA (1)...(19): siRNA sense strand
cugcucaacuggcugaagu

SEQ ID NO: 915449 - RNA, 19 nt, Homo sapiens
  misc_RNA (1)...(19): siRNA sense strand
gugaagaagcucaucaacu

SEQ ID NO: 915450 - RNA, 19 nt, Homo sapiens
  misc_RNA (1)...(19): siRNA sense strand
gccaacauccaacucaaca

SEQ ID NO: 915451 - RNA, 19 nt, Homo sapiens
  misc_RNA (1)...(19): siRNA sense strand
ggcuggaguucgacaucaa

SEQ ID NO: 915452 - RNA, 19 nt, Homo sapiens
  misc_RNA (1)...(19): siRNA sense strand
ccauucauccucaccuaug

SEQ ID NO: 915453 - RNA, 19 nt, Homo sapiens
  misc_RNA (1)...(19): siRNA sense strand
ugaaagagcugggaaagaa

SEQ ID NO: 915454 - RNA, 19 nt, Homo sapiens
  misc_RNA (1)...(19): siRNA sense strand
caagggaacuucaaaggaa

SEQ ID NO: 915455 - RNA, 19 nt, Homo sapiens
  misc_RNA (1)...(19): siRNA sense strand
ggaaagaaaucauggaaaa

SEQ ID NO: 915456 - RNA, 19 nt, Homo sapiens
  misc_RNA (1)...(19): siRNA sense strand
gcaaacaggacgcgugaua

SEQ ID NO: 915457 - RNA, 19 nt, Homo sapiens
  misc_RNA (1)...(19): siRNA sense strand
gacaacagcuggacacuag

SEQ ID NO: 915458 - RNA, 19 nt, Homo sapiens
  misc_RNA (1)...(19): siRNA sense strand
gcggagaucuggccuuuau

SEQ ID NO: 915459 - RNA, 19 nt, Homo sapiens
  misc_RNA (1)...(19): siRNA sense strand
cagaacagaugguuacuug

SEQ ID NO: 915460 - RNA, 19 nt, Homo sapiens
  misc_RNA (1)...(19): siRNA sense strand
caaauucucugaccugauc

SEQ ID NO: 915461 - RNA, 19 nt, Homo sapiens
  misc_RNA (1)...(19): siRNA sense strand
caaacaaagucaggaauga

SEQ ID NO: 915462 - RNA, 19 nt, Homo sapiens
  misc_RNA (1)...(19): siRNA sense strand
ccagagaccugugccaauu

SEQ ID NO: 915463 - RNA, 19 nt, Homo sapiens
  misc_RNA (1)...(19): siRNA sense strand
gcauaaagccaaacaaagu

SEQ ID NO: 915464 - RNA, 19 nt, Homo sapiens
  misc_RNA (1)...(19): siRNA sense strand
gcagacaccucgcagucaa

SEQ ID NO: 915465 - RNA, 19 nt, Homo sapiens
  misc_RNA (1)...(19): siRNA sense strand
gcaaagugguggagauucu

SEQ ID NO: 915466 - RNA, 19 nt, Homo sapiens
  misc_RNA (1)...(19): siRNA sense strand
gccaauugcugguuuacaa

SEQ ID NO: 915467 - RNA, 19 nt, Homo sapiens
  misc_RNA (1)...(19): siRNA sense strand
gaggaagaccagcaguuua

SEQ ID NO: 915468 - RNA, 19 nt, Homo sapiens
  misc_RNA (1)...(19): siRNA sense strand
ggaggaagaccagcaguuu

SEQ ID NO: 915469 - RNA, 19 nt, Homo sapiens
  misc_RNA (1)...(19): siRNA sense strand
ggagaucuggccuuuauug

SEQ ID NO: 915470 - RNA, 19 nt, Homo sapiens
  misc_RNA (1)...(19): siRNA sense strand
gaacagaugguuacuuggu

SEQ ID NO: 915471 - RNA, 19 nt, Homo sapiens
  misc_RNA (1)...(19): siRNA sense strand
ccgcaaagcaggauguuaa

SEQ ID NO: 915472 - RNA, 19 nt, Homo sapiens
  misc_RNA (1)...(19): siRNA sense strand
gaaugcuccuuuaccagaa

SEQ ID NO: 915473 - RNA, 19 nt, Homo sapiens
  misc_RNA (1)...(19): siRNA sense strand
gaaagagcugggaaagaaa

SEQ ID NO: 915474 - RNA, 19 nt, Homo sapiens
  misc_RNA (1)...(19): siRNA sense strand
ggacacagcacugguuuca

SEQ ID NO: 915475 - RNA, 19 nt, Homo sapiens
  misc_RNA (1)...(19): siRNA sense strand
gaagaccagcaguuuagaa

SEQ ID NO: 915476 - RNA, 19 nt, Homo sapiens
  misc_RNA (1)...(19): siRNA sense strand
gcagucaaauggcagucaa

SEQ ID NO: 915477 - RNA, 19 nt, Homo sapiens
  misc_RNA (1)...(19): siRNA sense strand
gaagaugggacaagcaaag

SEQ ID NO: 915478 - RNA, 19 nt, Homo sapiens
  misc_RNA (1)...(19): siRNA sense strand
aguauggaaugcuccuuua

SEQ ID NO: 915479 - RNA, 19 nt, Homo sapiens
  misc_RNA (1)...(19): siRNA sense strand
caaagcaggauguuaaagu

SEQ ID NO: 915480 - RNA, 19 nt, Homo sapiens
  misc_RNA (1)...(19): siRNA sense strand
gaccacgggcucugcauaa

SEQ ID NO: 915481 - RNA, 19 nt, Homo sapiens
  misc_RNA (1)...(19): siRNA sense strand
caagcaaagugguggagau

SEQ ID NO: 915482 - RNA, 19 nt, Homo sapiens
  misc_RNA (1)...(19): siRNA sense strand
cgaaucaccaggaggauga

SEQ ID NO: 915483 - RNA, 19 nt, Homo sapiens
  misc_RNA (1)...(19): siRNA sense strand
ggcccucuguuccguagua

SEQ ID NO: 915484 - RNA, 19 nt, Homo sapiens
  misc_RNA (1)...(19): siRNA sense strand
cuaaagagcugagguugcu

SEQ ID NO: 915485 - RNA, 19 nt, Homo sapiens
  misc_RNA (1)...(19): siRNA sense strand
aaacaggacgcgugauaga

SEQ ID NO: 915486 - RNA, 19 nt, Homo sapiens
  misc_RNA (1)...(19): siRNA sense strand
caguaguuguccugaaauu

SEQ ID NO: 915487 - RNA, 19 nt, Homo sapiens
  misc_RNA (1)...(19): siRNA sense strand
agucaggaaugaaacuaaa

SEQ ID NO: 915488 - RNA, 19 nt, Homo sapiens
  misc_RNA (1)...(19): siRNA sense strand
aaagcaggauguuaaaguc

SEQ ID NO: 915489 - RNA, 19 nt, Homo sapiens
  misc_RNA (1)...(19): siRNA sense strand
cauccuagguagccaaagu

SEQ ID NO: 915490 - RNA, 19 nt, Homo sapiens
  misc_RNA (1)...(19): siRNA sense strand
uccaguaguuguccugaaa

SEQ ID NO: 915491 - RNA, 19 nt, Homo sapiens
  misc_RNA (1)...(19): siRNA sense strand
agaguaccauggccaguga

SEQ ID NO: 915492 - RNA, 19 nt, Homo sapiens
  misc_RNA (1)...(19): siRNA sense strand
aagcgaagcacacggauga

SEQ ID NO: 915493 - RNA, 19 nt, Homo sapiens
  misc_RNA (1)...(19): siRNA sense strand
ccaaacaaagucaggaaug

SEQ ID NO: 915494 - RNA, 19 nt, Homo sapiens
  misc_RNA (1)...(19): siRNA sense strand
gggaaagaaaucauggaaa

SEQ ID NO: 915495 - RNA, 19 nt, Homo sapiens
  misc_RNA (1)...(19): siRNA sense strand
aaacuaaagagcugagguu

SEQ ID NO: 915496 - RNA, 19 nt, Homo sapiens
  misc_RNA (1)...(19): siRNA sense strand
uggaagcccuggugaacga

SEQ ID NO: 915497 - RNA, 19 nt, Homo sapiens
  misc_RNA (1)...(19): siRNA sense strand
guucagacuccucaaguau

SEQ ID NO: 915498 - RNA, 19 nt, Homo sapiens
  misc_RNA (1)...(19): siRNA sense strand
cguucagacuccucaagua

SEQ ID NO: 915499 - RNA, 19 nt, Homo sapiens
  misc_RNA (1)...(19): siRNA sense strand
ccaagggaacuucaaagga

SEQ ID NO: 915500 - RNA, 19 nt, Homo sapiens
  misc_RNA (1)...(19): siRNA sense strand
gcaaaauacgaguucuuua

SEQ ID NO: 915501 - RNA, 19 nt, Homo sapiens
  misc_RNA (1)...(19): siRNA sense strand
caacaucuucucccugauc

SEQ ID NO: 915502 - RNA, 19 nt, Homo sapiens
  misc_RNA (1)...(19): siRNA sense strand
ccacccgcaccuaggauua

SEQ ID NO: 915503 - RNA, 19 nt, Homo sapiens
  misc_RNA (1)...(19): siRNA sense strand
ucagacuccucaaguaugg

SEQ ID NO: 915504 - RNA, 19 nt, Homo sapiens
  misc_RNA (1)...(19): siRNA sense strand
aaacaaagucaggaaugaa

SEQ ID NO: 915505 - RNA, 19 nt, Homo sapiens
  misc_RNA (1)...(19): siRNA sense strand
ccaccaagggaacuucaaa

SEQ ID NO: 915506 - RNA, 19 nt, Homo sapiens
  misc_RNA (1)...(19): siRNA sense strand
aaacccagcuuuugcagaa

SEQ ID NO: 915507 - RNA, 19 nt, Homo sapiens
  misc_RNA (1)...(19): siRNA sense strand
caggacgcgugauagagaa

SEQ ID NO: 915508 - RNA, 19 nt, Homo sapiens
  misc_RNA (1)...(19): siRNA sense strand
ugauccagcugguugacuu

SEQ ID NO: 915509 - RNA, 19 nt, Homo sapiens
  misc_RNA (1)...(19): siRNA sense strand
ggaacaccaaauucucuga

SEQ ID NO: 915510 - RNA, 19 nt, Homo sapiens
  misc_RNA (1)...(19): siRNA sense strand
gcauuuguacucacacugu

SEQ ID NO: 915511 - RNA, 19 nt, Homo sapiens
  misc_RNA (1)...(19): siRNA sense strand
gaagcacacggaugaacau

SEQ ID NO: 915512 - RNA, 19 nt, Homo sapiens
  misc_RNA (1)...(19): siRNA sense strand
gaccagcaguuuagaaccu

SEQ ID NO: 915513 - RNA, 19 nt, Homo sapiens
  misc_RNA (1)...(19): siRNA sense strand
agaguaauccaaaggcauu

SEQ ID NO: 915514 - RNA, 19 nt, Homo sapiens
  misc_RNA (1)...(19): siRNA sense strand
ccagugagaguaaauuucu

SEQ ID NO: 915515 - RNA, 19 nt, Homo sapiens
  misc_RNA (1)...(19): siRNA sense strand
ggccagugagaguaaauuu

SEQ ID NO: 915516 - RNA, 19 nt, Homo sapiens
  misc_RNA (1)...(19): siRNA sense strand
ccaauugcugguuuacaaa

SEQ ID NO: 915517 - RNA, 19 nt, Homo sapiens
  misc_RNA (1)...(19): siRNA sense strand
gaagcccuggugaacgaua

SEQ ID NO: 915518 - RNA, 19 nt, Homo sapiens
  misc_RNA (1)...(19): siRNA sense strand
aaaggcauuuguacucaca

SEQ ID NO: 915519 - RNA, 19 nt, Homo sapiens
  misc_RNA (1)...(19): siRNA sense strand
caacagcuggacacuagug

SEQ ID NO: 915520 - RNA, 19 nt, Homo sapiens
  misc_RNA (1)...(19): siRNA sense strand
gagauucuagcagacauga

SEQ ID NO: 915521 - RNA, 19 nt, Homo sapiens
  misc_RNA (1)...(19): siRNA sense strand
uacccuaaguacagugauu

SEQ ID NO: 915522 - RNA, 19 nt, Homo sapiens
  misc_RNA (1)...(19): siRNA sense strand
agaacucccucguggcaau

SEQ ID NO: 915523 - RNA, 19 nt, Homo sapiens
  misc_RNA (1)...(19): siRNA sense strand
cugcauaaagccaaacaaa

SEQ ID NO: 915524 - RNA, 19 nt, Homo sapiens
  misc_RNA (1)...(19): siRNA sense strand
ggaggacagcaacaucuuc

SEQ ID NO: 915525 - RNA, 19 nt, Homo sapiens
  misc_RNA (1)...(19): siRNA sense strand
gauucuagcagacaugaca

SEQ ID NO: 915526 - RNA, 19 nt, Homo sapiens
  misc_RNA (1)...(19): siRNA sense strand
cauccgaguggccuuauga

SEQ ID NO: 915527 - RNA, 19 nt, Homo sapiens
  misc_RNA (1)...(19): siRNA sense strand
ugucaucaccagaaaauua

SEQ ID NO: 915528 - RNA, 19 nt, Homo sapiens
  misc_RNA (1)...(19): siRNA sense strand
ggaagaccagcaguuuaga

SEQ ID NO: 915529 - RNA, 19 nt, Homo sapiens
  misc_RNA (1)...(19): siRNA sense strand
aacaaagucaggaaugaaa

SEQ ID NO: 915530 - RNA, 19 nt, Homo sapiens
  misc_RNA (1)...(19): siRNA sense strand
cagugagaguaaauuucua

SEQ ID NO: 915531 - RNA, 19 nt, Homo sapiens
  misc_RNA (1)...(19): siRNA sense strand
caaagugguggagauucua

SEQ ID NO: 915532 - RNA, 19 nt, Homo sapiens
  misc_RNA (1)...(19): siRNA sense strand
ucaggaaugaaacuaaaga

SEQ ID NO: 915533 - RNA, 19 nt, Homo sapiens
  misc_RNA (1)...(19): siRNA sense strand
uugcggagaucuggccuuu

SEQ ID NO: 915534 - RNA, 19 nt, Homo sapiens
  misc_RNA (1)...(19): siRNA sense strand
ugacaacagcuggacacua

SEQ ID NO: 915535 - RNA, 19 nt, Homo sapiens
  misc_RNA (1)...(19): siRNA sense strand
gauccagcugguugacuuu

SEQ ID NO: 915536 - RNA, 19 nt, Homo sapiens
  misc_RNA (1)...(19): siRNA sense strand
cccacaggaucauuaaaca

SEQ ID NO: 915537 - RNA, 19 nt, Homo sapiens
  misc_RNA (1)...(19): siRNA sense strand
gugaagaugggacaagcaa

SEQ ID NO: 915538 - RNA, 19 nt, Homo sapiens
  misc_RNA (1)...(19): siRNA sense strand
caggaucauuaaacagcaa

SEQ ID NO: 915539 - RNA, 19 nt, Homo sapiens
  misc_RNA (1)...(19): siRNA sense strand
gcaaagcaggauguuaaag

SEQ ID NO: 915540 - RNA, 19 nt, Homo sapiens
  misc_RNA (1)...(19): siRNA sense strand
uuaccagaauuaccgaauc

SEQ ID NO: 915541 - RNA, 19 nt, Homo sapiens
  misc_RNA (1)...(19): siRNA sense strand
aaagagcugggaaagaaau

SEQ ID NO: 915542 - RNA, 19 nt, Homo sapiens
  misc_RNA (1)...(19): siRNA sense strand
gcauccgaguggccuuaug

SEQ ID NO: 915543 - RNA, 19 nt, Homo sapiens
  misc_RNA (1)...(19): siRNA sense strand
ugacgggaacaccaaauuc

SEQ ID NO: 915544 - RNA, 19 nt, Homo sapiens
  misc_RNA (1)...(19): siRNA sense strand
cgaagcacacggaugaaca

SEQ ID NO: 915545 - RNA, 19 nt, Homo sapiens
  misc_RNA (1)...(19): siRNA sense strand
ggugaacgauaugaaugca

SEQ ID NO: 915546 - RNA, 19 nt, Homo sapiens
  misc_RNA (1)...(19): siRNA sense strand
acaggacgcgugauagaga

SEQ ID NO: 915547 - RNA, 19 nt, Homo sapiens
  misc_RNA (1)...(19): siRNA sense strand
cauaaagccaaacaaaguc

SEQ ID NO: 915548 - RNA, 19 nt, Homo sapiens
  misc_RNA (1)...(19): siRNA sense strand
aaagcuguauguguguuug

SEQ ID NO: 915549 - RNA, 19 nt, Homo sapiens
  misc_RNA (1)...(19): siRNA sense strand
cgugacagccagaguaauc

SEQ ID NO: 915550 - RNA, 19 nt, Homo sapiens
  misc_RNA (1)...(19): siRNA sense strand
gaggacagcaacaucuucu

SEQ ID NO: 915551 - RNA, 19 nt, Homo sapiens
  misc_RNA (1)...(19): siRNA sense strand
caaacaggacgcgugauag

SEQ ID NO: 915552 - RNA, 19 nt, Homo sapiens
  misc_RNA (1)...(19): siRNA sense strand
gcagaggacgagcaaacca

SEQ ID NO: 915553 - RNA, 19 nt, Homo sapiens
  misc_RNA (1)...(19): siRNA sense strand
gggacuacuuggcuacuua

SEQ ID NO: 915554 - RNA, 19 nt, Homo sapiens
  misc_RNA (1)...(19): siRNA sense strand
ccgagaugcugaaguuuaa

SEQ ID NO: 915555 - RNA, 19 nt, Homo sapiens
  misc_RNA (1)...(19): siRNA sense strand
gacauuggcucagguccua

SEQ ID NO: 915556 - RNA, 19 nt, Homo sapiens
  misc_RNA (1)...(19): siRNA sense strand
ccugugagcuggaaggaaa

SEQ ID NO: 915557 - RNA, 19 nt, Homo sapiens
  misc_RNA (1)...(19): siRNA sense strand
gaugcuggcuuugacauug

SEQ ID NO: 915558 - RNA, 19 nt, Homo sapiens
  misc_RNA (1)...(19): siRNA sense strand
gcucagguccuaccaucua

SEQ ID NO: 915559 - RNA, 19 nt, Homo sapiens
  misc_RNA (1)...(19): siRNA sense strand
gccgagaugcugaaguuua

SEQ ID NO: 915560 - RNA, 19 nt, Homo sapiens
  misc_RNA (1)...(19): siRNA sense strand
cuacuuggcuacuuacuac

SEQ ID NO: 915561 - RNA, 19 nt, Homo sapiens
  misc_RNA (1)...(19): siRNA sense strand
gggaggagcuggaaaagug

SEQ ID NO: 915562 - RNA, 19 nt, Homo sapiens
  misc_RNA (1)...(19): siRNA sense strand
aaaaguggcugaagaagga

SEQ ID NO: 915563 - RNA, 19 nt, Homo sapiens
  misc_RNA (1)...(19): siRNA sense strand
gggacacgcugauugacau

SEQ ID NO: 915564 - RNA, 19 nt, Homo sapiens
  misc_RNA (1)...(19): siRNA sense strand
ugaagcgggugcucaagug

SEQ ID NO: 915565 - RNA, 19 nt, Homo sapiens
  misc_RNA (1)...(19): siRNA sense strand
gggaggagaaggaggagaa

SEQ ID NO: 915566 - RNA, 19 nt, Homo sapiens
  misc_RNA (1)...(19): siRNA sense strand
aggccgagaugcugaaguu

SEQ ID NO: 915567 - RNA, 19 nt, Homo sapiens
  misc_RNA (1)...(19): siRNA sense strand
uguccuggaugcuggcuuu

SEQ ID NO: 915568 - RNA, 19 nt, Homo sapiens
  misc_RNA (1)...(19): siRNA sense strand
ggacacgcugauugacauu

SEQ ID NO: 915569 - RNA, 19 nt, Homo sapiens
  misc_RNA (1)...(19): siRNA sense strand
ccuaccaucuaccaaguuc

SEQ ID NO: 915570 - RNA, 19 nt, Homo sapiens
  misc_RNA (1)...(19): siRNA sense strand
ggaugcuggcuuugacauu

SEQ ID NO: 915571 - RNA, 19 nt, Homo sapiens
  misc_RNA (1)...(19): siRNA sense strand
cggugaaauucgccuguga

SEQ ID NO: 915572 - RNA, 19 nt, Homo sapiens
  misc_RNA (1)...(19): siRNA sense strand
ugugauuccuuccaagaca

SEQ ID NO: 915573 - RNA, 19 nt, Homo sapiens
  misc_RNA (1)...(19): siRNA sense strand
guccuaccaucuaccaagu

SEQ ID NO: 915574 - RNA, 19 nt, Homo sapiens
  misc_RNA (1)...(19): siRNA sense strand
ucacccugcuggccaugga

SEQ ID NO: 915575 - RNA, 19 nt, Homo sapiens
  misc_RNA (1)...(19): siRNA sense strand
acacgcugauugacauugg

SEQ ID NO: 915576 - RNA, 19 nt, Homo sapiens
  misc_RNA (1)...(19): siRNA sense strand
uaaagaagaugcucagaaa

SEQ ID NO: 915577 - RNA, 19 nt, Homo sapiens
  misc_RNA (1)...(19): siRNA sense strand
agaaauggcucagauguua

SEQ ID NO: 915578 - RNA, 19 nt, Homo sapiens
  misc_RNA (1)...(19): siRNA sense strand
ugaaauggcucuacccuuu

SEQ ID NO: 915579 - RNA, 19 nt, Homo sapiens
  misc_RNA (1)...(19): siRNA sense strand
gcucuacccuuuauaaauu

SEQ ID NO: 915580 - RNA, 19 nt, Homo sapiens
  misc_RNA (1)...(19): siRNA sense strand
gggaaugucuucuagcuaa

SEQ ID NO: 915581 - RNA, 19 nt, Homo sapiens
  misc_RNA (1)...(19): siRNA sense strand
ggcaauagcuuggauguuu

SEQ ID NO: 915582 - RNA, 19 nt, Homo sapiens
  misc_RNA (1)...(19): siRNA sense strand
gaacugggcaagaugauaa

SEQ ID NO: 915583 - RNA, 19 nt, Homo sapiens
  misc_RNA (1)...(19): siRNA sense strand
gguaucaucuguugaagaa

SEQ ID NO: 915584 - RNA, 19 nt, Homo sapiens
  misc_RNA (1)...(19): siRNA sense strand
ggaagaaguuuauauuguc

SEQ ID NO: 915585 - RNA, 19 nt, Homo sapiens
  misc_RNA (1)...(19): siRNA sense strand
gaaagcaacaggaucaauu

SEQ ID NO: 915586 - RNA, 19 nt, Homo sapiens
  misc_RNA (1)...(19): siRNA sense strand
gcaacaggaucaauuaaca

SEQ ID NO: 915587 - RNA, 19 nt, Homo sapiens
  misc_RNA (1)...(19): siRNA sense strand
agacagaacuaccagauga

SEQ ID NO: 915588 - RNA, 19 nt, Homo sapiens
  misc_RNA (1)...(19): siRNA sense strand
gaagaagacuuggagacaa

SEQ ID NO: 915589 - RNA, 19 nt, Homo sapiens
  misc_RNA (1)...(19): siRNA sense strand
caagguggauucagcguuu

SEQ ID NO: 915590 - RNA, 19 nt, Homo sapiens
  misc_RNA (1)...(19): siRNA sense strand
gaaauggcucuacccuuua

SEQ ID NO: 915591 - RNA, 19 nt, Homo sapiens
  misc_RNA (1)...(19): siRNA sense strand
uaacagaacgggauaaguu

SEQ ID NO: 915592 - RNA, 19 nt, Homo sapiens
  misc_RNA (1)...(19): siRNA sense strand
ugacauacauugaugacaa

SEQ ID NO: 915593 - RNA, 19 nt, Homo sapiens
  misc_RNA (1)...(19): siRNA sense strand
uagacuggauuccuauuua

SEQ ID NO: 915594 - RNA, 19 nt, Homo sapiens
  misc_RNA (1)...(19): siRNA sense strand
ugaaagguaucaucuguug

SEQ ID NO: 915595 - RNA, 19 nt, Homo sapiens
  misc_RNA (1)...(19): siRNA sense strand
ucaaguacaugauauggaa

SEQ ID NO: 915596 - RNA, 19 nt, Homo sapiens
  misc_RNA (1)...(19): siRNA sense strand
ugaggaaacugaauuggaa

SEQ ID NO: 915597 - RNA, 19 nt, Homo sapiens
  misc_RNA (1)...(19): siRNA sense strand
uggaaucacugaauaugua

SEQ ID NO: 915598 - RNA, 19 nt, Homo sapiens
  misc_RNA (1)...(19): siRNA sense strand
gggauaaguuucagauuuc

SEQ ID NO: 915599 - RNA, 19 nt, Homo sapiens
  misc_RNA (1)...(19): siRNA sense strand
gauauuacauggacacaag

SEQ ID NO: 915600 - RNA, 19 nt, Homo sapiens
  misc_RNA (1)...(19): siRNA sense strand
cgggauaaguuucagauuu

SEQ ID NO: 915601 - RNA, 19 nt, Homo sapiens
  misc_RNA (1)...(19): siRNA sense strand
ggaaacagcuuuugaugga

SEQ ID NO: 915602 - RNA, 19 nt, Homo sapiens
  misc_RNA (1)...(19): siRNA sense strand
gaaaauggaugaaguugga

SEQ ID NO: 915603 - RNA, 19 nt, Homo sapiens
  misc_RNA (1)...(19): siRNA sense strand
caagaaaggugcuacaaaa

SEQ ID NO: 915604 - RNA, 19 nt, Homo sapiens
  misc_RNA (1)...(19): siRNA sense strand
uaaaugaacugggcaagau

SEQ ID NO: 915605 - RNA, 19 nt, Homo sapiens
  misc_RNA (1)...(19): siRNA sense strand
gaaacaauuuggaggaagu

SEQ ID NO: 915606 - RNA, 19 nt, Homo sapiens
  misc_RNA (1)...(19): siRNA sense strand
cgagaacuguauacuguuu

SEQ ID NO: 915607 - RNA, 19 nt, Homo sapiens
  misc_RNA (1)...(19): siRNA sense strand
gaaaauaggccccucauga

SEQ ID NO: 915608 - RNA, 19 nt, Homo sapiens
  misc_RNA (1)...(19): siRNA sense strand
gagcuuaagguucaaauga

SEQ ID NO: 915609 - RNA, 19 nt, Homo sapiens
  misc_RNA (1)...(19): siRNA sense strand
gaacugauacagacugaga

SEQ ID NO: 915610 - RNA, 19 nt, Homo sapiens
  misc_RNA (1)...(19): siRNA sense strand
cguacuaaaugaacugaua

SEQ ID NO: 915611 - RNA, 19 nt, Homo sapiens
  misc_RNA (1)...(19): siRNA sense strand
ugaaagaaauggcucagau

SEQ ID NO: 915612 - RNA, 19 nt, Homo sapiens
  misc_RNA (1)...(19): siRNA sense strand
cugaaacacugcaguauga

SEQ ID NO: 915613 - RNA, 19 nt, Homo sapiens
  misc_RNA (1)...(19): siRNA sense strand
gacuauagcucaaguaaaa

SEQ ID NO: 915614 - RNA, 19 nt, Homo sapiens
  misc_RNA (1)...(19): siRNA sense strand
gcugaaagguaucaucugu

SEQ ID NO: 915615 - RNA, 19 nt, Homo sapiens
  misc_RNA (1)...(19): siRNA sense strand
ugaaggauuuggcuagauu

SEQ ID NO: 915616 - RNA, 19 nt, Homo sapiens
  misc_RNA (1)...(19): siRNA sense strand
gaaacauggcagaaauaua

SEQ ID NO: 915617 - RNA, 19 nt, Homo sapiens
  misc_RNA (1)...(19): siRNA sense strand
ucagaaagcucuccaagac

SEQ ID NO: 915618 - RNA, 19 nt, Homo sapiens
  misc_RNA (1)...(19): siRNA sense strand
gaauggaucaucuucagaa

SEQ ID NO: 915619 - RNA, 19 nt, Homo sapiens
  misc_RNA (1)...(19): siRNA sense strand
cuucagaaaugcuauagaa

SEQ ID NO: 915620 - RNA, 19 nt, Homo sapiens
  misc_RNA (1)...(19): siRNA sense strand
gagcucaguuagugauuug

SEQ ID NO: 915621 - RNA, 19 nt, Homo sapiens
  misc_RNA (1)...(19): siRNA sense strand
gaaugucaucggcaaauaa

SEQ ID NO: 915622 - RNA, 19 nt, Homo sapiens
  misc_RNA (1)...(19): siRNA sense strand
ggauuccuauuuacucaaa

SEQ ID NO: 915623 - RNA, 19 nt, Homo sapiens
  misc_RNA (1)...(19): siRNA sense strand
uaaagaaccacguacuaaa

SEQ ID NO: 915624 - RNA, 19 nt, Homo sapiens
  misc_RNA (1)...(19): siRNA sense strand
aagcagaacuggcugaugu

SEQ ID NO: 915625 - RNA, 19 nt, Homo sapiens
  misc_RNA (1)...(19): siRNA sense strand
cagaugauauucccucaau

SEQ ID NO: 915626 - RNA, 19 nt, Homo sapiens
  misc_RNA (1)...(19): siRNA sense strand
ugaagucaguuaaugauuc

SEQ ID NO: 915627 - RNA, 19 nt, Homo sapiens
  misc_RNA (1)...(19): siRNA sense strand
caacgaaucacuaaauauc

SEQ ID NO: 915628 - RNA, 19 nt, Homo sapiens
  misc_RNA (1)...(19): siRNA sense strand
uuagugauuugcugacaua

SEQ ID NO: 915629 - RNA, 19 nt, Homo sapiens
  misc_RNA (1)...(19): siRNA sense strand
gaagucaguuaaugauucu

SEQ ID NO: 915630 - RNA, 19 nt, Homo sapiens
  misc_RNA (1)...(19): siRNA sense strand
gaaagaaauggcucagaug

SEQ ID NO: 915631 - RNA, 19 nt, Homo sapiens
  misc_RNA (1)...(19): siRNA sense strand
gcacuugguuuugguuuua

SEQ ID NO: 915632 - RNA, 19 nt, Homo sapiens
  misc_RNA (1)...(19): siRNA sense strand
gagaguuuauguucgagaa

SEQ ID NO: 915633 - RNA, 19 nt, Homo sapiens
  misc_RNA (1)...(19): siRNA sense strand
aagaugagguucagaagga

SEQ ID NO: 915634 - RNA, 19 nt, Homo sapiens
  misc_RNA (1)...(19): siRNA sense strand
aauauuaucuccugagcuu

SEQ ID NO: 915635 - RNA, 19 nt, Homo sapiens
  misc_RNA (1)...(19): siRNA sense strand
gacauuggauuuugguuua

SEQ ID NO: 915636 - RNA, 19 nt, Homo sapiens
  misc_RNA (1)...(19): siRNA sense strand
uuaauaaguugcugacuca

SEQ ID NO: 915637 - RNA, 19 nt, Homo sapiens
  misc_RNA (1)...(19): siRNA sense strand
guucaagacuagaauguca

SEQ ID NO: 915638 - RNA, 19 nt, Homo sapiens
  misc_RNA (1)...(19): siRNA sense strand
uaucaucuguugaagaaug

SEQ ID NO: 915639 - RNA, 19 nt, Homo sapiens
  misc_RNA (1)...(19): siRNA sense strand
ugacugaaguugaauuucu

SEQ ID NO: 915640 - RNA, 19 nt, Homo sapiens
  misc_RNA (1)...(19): siRNA sense strand
aaagcaacaggaucaauua

SEQ ID NO: 915641 - RNA, 19 nt, Homo sapiens
  misc_RNA (1)...(19): siRNA sense strand
gaaaucugguauggugaaa

SEQ ID NO: 915642 - RNA, 19 nt, Homo sapiens
  misc_RNA (1)...(19): siRNA sense strand
ggugauaaccgcaaguuug

SEQ ID NO: 915643 - RNA, 19 nt, Homo sapiens
  misc_RNA (1)...(19): siRNA sense strand
gaauaagcccagaucagaa

SEQ ID NO: 915644 - RNA, 19 nt, Homo sapiens
  misc_RNA (1)...(19): siRNA sense strand
aagaagacuuggagacaaa

SEQ ID NO: 915645 - RNA, 19 nt, Homo sapiens
  misc_RNA (1)...(19): siRNA sense strand
gacugaaguugaauuucua

SEQ ID NO: 915646 - RNA, 19 nt, Homo sapiens
  misc_RNA (1)...(19): siRNA sense strand
uggaucaucuucagaaaug

SEQ ID NO: 915647 - RNA, 19 nt, Homo sapiens
  misc_RNA (1)...(19): siRNA sense strand
uguccaggcuucuaaugua

SEQ ID NO: 915648 - RNA, 19 nt, Homo sapiens
  misc_RNA (1)...(19): siRNA sense strand
gauaaccgcaaguuugaaa

SEQ ID NO: 915649 - RNA, 19 nt, Homo sapiens
  misc_RNA (1)...(19): siRNA sense strand
gaaguuggaaucacugaau

SEQ ID NO: 915650 - RNA, 19 nt, Homo sapiens
  misc_RNA (1)...(19): siRNA sense strand
ggaaugucaaagaaaguua

SEQ ID NO: 915651 - RNA, 19 nt, Homo sapiens
  misc_RNA (1)...(19): siRNA sense strand
ugaauuccauaacgacauu

SEQ ID NO: 915652 - RNA, 19 nt, Homo sapiens
  misc_RNA (1)...(19): siRNA sense strand
uacguuaccuuucugauau

SEQ ID NO: 915653 - RNA, 19 nt, Homo sapiens
  misc_RNA (1)...(19): siRNA sense strand
agaacuggcugauguaaca

SEQ ID NO: 915654 - RNA, 19 nt, Homo sapiens
  misc_RNA (1)...(19): siRNA sense strand
ggaaacauggcagaaauau

SEQ ID NO: 915655 - RNA, 19 nt, Homo sapiens
  misc_RNA (1)...(19): siRNA sense strand
gaaacugaauuggaacaca

SEQ ID NO: 915656 - RNA, 19 nt, Homo sapiens
  misc_RNA (1)...(19): siRNA sense strand
guacugaggaaacugaauu

SEQ ID NO: 915657 - RNA, 19 nt, Homo sapiens
  misc_RNA (1)...(19): siRNA sense strand
uaauguagaugugaagaug

SEQ ID NO: 915658 - RNA, 19 nt, Homo sapiens
  misc_RNA (1)...(19): siRNA sense strand
gaagaaggcacucgaugca

SEQ ID NO: 915659 - RNA, 19 nt, Homo sapiens
  misc_RNA (1)...(19): siRNA sense strand
gcccagaucagaaacaauu

SEQ ID NO: 915660 - RNA, 19 nt, Homo sapiens
  misc_RNA (1)...(19): siRNA sense strand
ugagagaguuuauguucga

SEQ ID NO: 915661 - RNA, 19 nt, Homo sapiens
  misc_RNA (1)...(19): siRNA sense strand
agauggcucuccuauauug

SEQ ID NO: 915662 - RNA, 19 nt, Homo sapiens
  misc_RNA (1)...(19): siRNA sense strand
gcagaagcaaauacaguuu

SEQ ID NO: 915663 - RNA, 19 nt, Homo sapiens
  misc_RNA (1)...(19): siRNA sense strand
ggaggucugugaggcaauu

SEQ ID NO: 915664 - RNA, 19 nt, Homo sapiens
  misc_RNA (1)...(19): siRNA sense strand
gacauucucuuuggaaaca

SEQ ID NO: 915665 - RNA, 19 nt, Homo sapiens
  misc_RNA (1)...(19): siRNA sense strand
ugacucaaguacaugauau

SEQ ID NO: 915666 - RNA, 19 nt, Homo sapiens
  misc_RNA (1)...(19): siRNA sense strand
ggacugaggcaucacaauc

SEQ ID NO: 915667 - RNA, 19 nt, Homo sapiens
  misc_RNA (1)...(19): siRNA sense strand
gcaacgaaucacuaaauau

SEQ ID NO: 915668 - RNA, 19 nt, Homo sapiens
  misc_RNA (1)...(19): siRNA sense strand
ugcaacgaaucacuaaaua

SEQ ID NO: 915669 - RNA, 19 nt, Homo sapiens
  misc_RNA (1)...(19): siRNA sense strand
gacuuagacuggauuccua

SEQ ID NO: 915670 - RNA, 19 nt, Homo sapiens
  misc_RNA (1)...(19): siRNA sense strand
ccaggaaugucaaagaaag

SEQ ID NO: 915671 - RNA, 19 nt, Homo sapiens
  misc_RNA (1)...(19): siRNA sense strand
gaaagagugggaccuuguu

SEQ ID NO: 915672 - RNA, 19 nt, Homo sapiens
  misc_RNA (1)...(19): siRNA sense strand
gauacagacugagagaguu

SEQ ID NO: 915673 - RNA, 19 nt, Homo sapiens
  misc_RNA (1)...(19): siRNA sense strand
gcaguaugaauuugaugua

SEQ ID NO: 915674 - RNA, 19 nt, Homo sapiens
  misc_RNA (1)...(19): siRNA sense strand
gauaaaagcaaaacggaua

SEQ ID NO: 915675 - RNA, 19 nt, Homo sapiens
  misc_RNA (1)...(19): siRNA sense strand
gcaaugagcuacguuaccu

SEQ ID NO: 915676 - RNA, 19 nt, Homo sapiens
  misc_RNA (1)...(19): siRNA sense strand
gaacccagaccucgaguuu

SEQ ID NO: 915677 - RNA, 19 nt, Homo sapiens
  misc_RNA (1)...(19): siRNA sense strand
ucacggagaugcugcuuga

SEQ ID NO: 915678 - RNA, 19 nt, Homo sapiens
  misc_RNA (1)...(19): siRNA sense strand
gaggacaucuggaagaagu

SEQ ID NO: 915679 - RNA, 19 nt, Homo sapiens
  misc_RNA (1)...(19): siRNA sense strand
ccaaggcugucaccacauu

SEQ ID NO: 915680 - RNA, 19 nt, Homo sapiens
  misc_RNA (1)...(19): siRNA sense strand
agaggaagaugaagaggaa

SEQ ID NO: 915681 - RNA, 19 nt, Homo sapiens
  misc_RNA (1)...(19): siRNA sense strand
gggaggacaucuggaagaa

SEQ ID NO: 915682 - RNA, 19 nt, Homo sapiens
  misc_RNA (1)...(19): siRNA sense strand
gagcugauccucaaacgau

SEQ ID NO: 915683 - RNA, 19 nt, Homo sapiens
  misc_RNA (1)...(19): siRNA sense strand
ugaagaugaugaagaggaa

SEQ ID NO: 915684 - RNA, 19 nt, Homo sapiens
  misc_RNA (1)...(19): siRNA sense strand
ccacagaagaagauaaaga

SEQ ID NO: 915685 - RNA, 19 nt, Homo sapiens
  misc_RNA (1)...(19): siRNA sense strand
acccagaccucgaguuuga

SEQ ID NO: 915686 - RNA, 19 nt, Homo sapiens
  misc_RNA (1)...(19): siRNA sense strand
gaggacacccugagcgauu

SEQ ID NO: 915687 - RNA, 19 nt, Homo sapiens
  misc_RNA (1)...(19): siRNA sense strand
ugaugaagaugaugaagag

SEQ ID NO: 915688 - RNA, 19 nt, Homo sapiens
  misc_RNA (1)...(19): siRNA sense strand
ggacaucuggaagaaguuu

SEQ ID NO: 915689 - RNA, 19 nt, Homo sapiens
  misc_RNA (1)...(19): siRNA sense strand
cggagaugcugcuugagaa

SEQ ID NO: 915690 - RNA, 19 nt, Homo sapiens
  misc_RNA (1)...(19): siRNA sense strand
cggaguugguaaagaauga

SEQ ID NO: 915691 - RNA, 19 nt, Homo sapiens
  misc_RNA (1)...(19): siRNA sense strand
gaagaugaagaggaagaaa

SEQ ID NO: 915692 - RNA, 19 nt, Homo sapiens
  misc_RNA (1)...(19): siRNA sense strand
ugccggaguugguaaagaa

SEQ ID NO: 915693 - RNA, 19 nt, Homo sapiens
  misc_RNA (1)...(19): siRNA sense strand
gaccacaaggcccucagua

SEQ ID NO: 915694 - RNA, 19 nt, Homo sapiens
  misc_RNA (1)...(19): siRNA sense strand
ggaagaugaagaggaagaa

SEQ ID NO: 915695 - RNA, 19 nt, Homo sapiens
  misc_RNA (1)...(19): siRNA sense strand
ucacugugcgucccaagaa

SEQ ID NO: 915696 - RNA, 19 nt, Homo sapiens
  misc_RNA (1)...(19): siRNA sense strand
cagaugaugaagaugauga

SEQ ID NO: 915697 - RNA, 19 nt, Homo sapiens
  misc_RNA (1)...(19): siRNA sense strand
gcagaaaccacaacauccu

SEQ ID NO: 915698 - RNA, 19 nt, Homo sapiens
  misc_RNA (1)...(19): siRNA sense strand
aaaucgacguggucacugu

SEQ ID NO: 915699 - RNA, 19 nt, Homo sapiens
  misc_RNA (1)...(19): siRNA sense strand
ccacauucaccaucacugu

SEQ ID NO: 915700 - RNA, 19 nt, Homo sapiens
  misc_RNA (1)...(19): siRNA sense strand
ugaugaagaggaagaugaa

SEQ ID NO: 915701 - RNA, 19 nt, Homo sapiens
  misc_RNA (1)...(19): siRNA sense strand
cacguccgcucaagagugu

SEQ ID NO: 915702 - RNA, 19 nt, Homo sapiens
  misc_RNA (1)...(19): siRNA sense strand
cgagcugggucacggagau

SEQ ID NO: 915703 - RNA, 19 nt, Homo sapiens
  misc_RNA (1)...(19): siRNA sense strand
ccacgugccggaguuggua

SEQ ID NO: 915704 - RNA, 19 nt, Homo sapiens
  misc_RNA (1)...(19): siRNA sense strand
acagugagcgucgcagaaa

SEQ ID NO: 915705 - RNA, 19 nt, Homo sapiens
  misc_RNA (1)...(19): siRNA sense strand
gacagugagcgucgcagaa

SEQ ID NO: 915706 - RNA, 19 nt, Homo sapiens
  misc_RNA (1)...(19): siRNA sense strand
ccgccaagguggucauuuu

SEQ ID NO: 915707 - RNA, 19 nt, Homo sapiens
  misc_RNA (1)...(19): siRNA sense strand
ccaagguggucauuuugaa

SEQ ID NO: 915708 - RNA, 19 nt, Homo sapiens
  misc_RNA (1)...(19): siRNA sense strand
ugaagaggaagaugaagag

SEQ ID NO: 915709 - RNA, 19 nt, Homo sapiens
  misc_RNA (1)...(19): siRNA sense strand
ucgcagaaaccacaacauc

SEQ ID NO: 915710 - RNA, 19 nt, Homo sapiens
  misc_RNA (1)...(19): siRNA sense strand
cacagaagaagauaaagag

SEQ ID NO: 915711 - RNA, 19 nt, Homo sapiens
  misc_RNA (1)...(19): siRNA sense strand
agaugaagaggaagaaauc

SEQ ID NO: 915712 - RNA, 19 nt, Homo sapiens
  misc_RNA (1)...(19): siRNA sense strand
gugccggaguugguaaaga

SEQ ID NO: 915713 - RNA, 19 nt, Homo sapiens
  misc_RNA (1)...(19): siRNA sense strand
gucaccacauucaccauca

SEQ ID NO: 915714 - RNA, 19 nt, Homo sapiens
  misc_RNA (1)...(19): siRNA sense strand
ggcaagacagcagcaguug

SEQ ID NO: 915715 - RNA, 19 nt, Homo sapiens
  misc_RNA (1)...(19): siRNA sense strand
aagaugaagaggaagaaau

SEQ ID NO: 915716 - RNA, 19 nt, Homo sapiens
  misc_RNA (1)...(19): siRNA sense strand
cggcguuccuccuccaaca

SEQ ID NO: 915717 - RNA, 19 nt, Homo sapiens
  misc_RNA (1)...(19): siRNA sense strand
gaaauuggauggguugauu

SEQ ID NO: 915718 - RNA, 19 nt, Homo sapiens
  misc_RNA (1)...(19): siRNA sense strand
ggaagacuaucccugagua

SEQ ID NO: 915719 - RNA, 19 nt, Homo sapiens
  misc_RNA (1)...(19): siRNA sense strand
gagcucagguacccuuuaa

SEQ ID NO: 915720 - RNA, 19 nt, Homo sapiens
  misc_RNA (1)...(19): siRNA sense strand
uuagguagaugaucaguuu

SEQ ID NO: 915721 - RNA, 19 nt, Homo sapiens
  misc_RNA (1)...(19): siRNA sense strand
gcaguuggcuagcugaaug

SEQ ID NO: 915722 - RNA, 19 nt, Homo sapiens
  misc_RNA (1)...(19): siRNA sense strand
ccauaucaaucacaaauga

SEQ ID NO: 915723 - RNA, 19 nt, Homo sapiens
  misc_RNA (1)...(19): siRNA sense strand
gcaggaacauguuacuaug

SEQ ID NO: 915724 - RNA, 19 nt, Homo sapiens
  misc_RNA (1)...(19): siRNA sense strand
gaacagaaagaacuuggaa

SEQ ID NO: 915725 - RNA, 19 nt, Homo sapiens
  misc_RNA (1)...(19): siRNA sense strand
gaagugcucagcuauuaaa

SEQ ID NO: 915726 - RNA, 19 nt, Homo sapiens
  misc_RNA (1)...(19): siRNA sense strand
cuaguuauuugguugguua

SEQ ID NO: 915727 - RNA, 19 nt, Homo sapiens
  misc_RNA (1)...(19): siRNA sense strand
ggaaugagugaacuaauga

SEQ ID NO: 915728 - RNA, 19 nt, Homo sapiens
  misc_RNA (1)...(19): siRNA sense strand
cagauaagcuagaugaaag

SEQ ID NO: 915729 - RNA, 19 nt, Homo sapiens
  misc_RNA (1)...(19): siRNA sense strand
caaaugaguaguuguaaga

SEQ ID NO: 915730 - RNA, 19 nt, Homo sapiens
  misc_RNA (1)...(19): siRNA sense strand
gaugaucaguuugaagauu

SEQ ID NO: 915731 - RNA, 19 nt, Homo sapiens
  misc_RNA (1)...(19): siRNA sense strand
gcagauaagcuagaugaaa

SEQ ID NO: 915732 - RNA, 19 nt, Homo sapiens
  misc_RNA (1)...(19): siRNA sense strand
gaaaggauaguuggaagaa

SEQ ID NO: 915733 - RNA, 19 nt, Homo sapiens
  misc_RNA (1)...(19): siRNA sense strand
acagagagaagaauagaua

SEQ ID NO: 915734 - RNA, 19 nt, Homo sapiens
  misc_RNA (1)...(19): siRNA sense strand
gcuuguaccuggaagacua

SEQ ID NO: 915735 - RNA, 19 nt, Homo sapiens
  misc_RNA (1)...(19): siRNA sense strand
ggaagagggagaagagaaa

SEQ ID NO: 915736 - RNA, 19 nt, Homo sapiens
  misc_RNA (1)...(19): siRNA sense strand
gggaaagaaauguugaaua

SEQ ID NO: 915737 - RNA, 19 nt, Homo sapiens
  misc_RNA (1)...(19): siRNA sense strand
gaauaaacagagagaagaa

SEQ ID NO: 915738 - RNA, 19 nt, Homo sapiens
  misc_RNA (1)...(19): siRNA sense strand
ggaaauccaacuaaugaga

SEQ ID NO: 915739 - RNA, 19 nt, Homo sapiens
  misc_RNA (1)...(19): siRNA sense strand
acacucagcuccauagcaa

SEQ ID NO: 915740 - RNA, 19 nt, Homo sapiens
  misc_RNA (1)...(19): siRNA sense strand
gcagccaggucacaaagga

SEQ ID NO: 915741 - RNA, 19 nt, Homo sapiens
  misc_RNA (1)...(19): siRNA sense strand
uaugauacguugacggaaa

SEQ ID NO: 915742 - RNA, 19 nt, Homo sapiens
  misc_RNA (1)...(19): siRNA sense strand
auggaaagauggacagaua

SEQ ID NO: 915743 - RNA, 19 nt, Homo sapiens
  misc_RNA (1)...(19): siRNA sense strand
ugagugaacuaaugaaugg

SEQ ID NO: 915744 - RNA, 19 nt, Homo sapiens
  misc_RNA (1)...(19): siRNA sense strand
ccucaaacguggccuccua

SEQ ID NO: 915745 - RNA, 19 nt, Homo sapiens
  misc_RNA (1)...(19): siRNA sense strand
ugaauggaguugagagguu

SEQ ID NO: 915746 - RNA, 19 nt, Homo sapiens
  misc_RNA (1)...(19): siRNA sense strand
augaagugcucagcuauua

SEQ ID NO: 915747 - RNA, 19 nt, Homo sapiens
  misc_RNA (1)...(19): siRNA sense strand
agggauaaauggauggaua

SEQ ID NO: 915748 - RNA, 19 nt, Homo sapiens
  misc_RNA (1)...(19): siRNA sense strand
ugcacuggcuggcuaguua

SEQ ID NO: 915749 - RNA, 19 nt, Homo sapiens
  misc_RNA (1)...(19): siRNA sense strand
ggaaguuuggauacgauua

SEQ ID NO: 915750 - RNA, 19 nt, Homo sapiens
  misc_RNA (1)...(19): siRNA sense strand
gauugugguugguggauga

SEQ ID NO: 915751 - RNA, 19 nt, Homo sapiens
  misc_RNA (1)...(19): siRNA sense strand
uggaaugagugaacuaaug

SEQ ID NO: 915752 - RNA, 19 nt, Homo sapiens
  misc_RNA (1)...(19): siRNA sense strand
gaaggaagagggagaagag

SEQ ID NO: 915753 - RNA, 19 nt, Homo sapiens
  misc_RNA (1)...(19): siRNA sense strand
aaggauaguuggaagaaug

SEQ ID NO: 915754 - RNA, 19 nt, Homo sapiens
  misc_RNA (1)...(19): siRNA sense strand
caaauggaagggauaaaug

SEQ ID NO: 915755 - RNA, 19 nt, Homo sapiens
  misc_RNA (1)...(19): siRNA sense strand
gauagaaugggaaagaaau

SEQ ID NO: 915756 - RNA, 19 nt, Homo sapiens
  misc_RNA (1)...(19): siRNA sense strand
gggauagaaugggaaagaa

SEQ ID NO: 915757 - RNA, 19 nt, Homo sapiens
  misc_RNA (1)...(19): siRNA sense strand
uggaugaauugguuagaaa

SEQ ID NO: 915758 - RNA, 19 nt, Homo sapiens
  misc_RNA (1)...(19): siRNA sense strand
agucuaaacucuaucuaug

SEQ ID NO: 915759 - RNA, 19 nt, Homo sapiens
  misc_RNA (1)...(19): siRNA sense strand
ggauagaaugggaaagaaa

SEQ ID NO: 915760 - RNA, 19 nt, Homo sapiens
  misc_RNA (1)...(19): siRNA sense strand
guugguggaugaauugguu

SEQ ID NO: 915761 - RNA, 19 nt, Homo sapiens
  misc_RNA (1)...(19): siRNA sense strand
gaaugggaaagaaauguug

SEQ ID NO: 915762 - RNA, 19 nt, Homo sapiens
  misc_RNA (1)...(19): siRNA sense strand
gcugaaugauaggaaguuu

SEQ ID NO: 915763 - RNA, 19 nt, Homo sapiens
  misc_RNA (1)...(19): siRNA sense strand
gugcucagcuauuaaaggu

SEQ ID NO: 915764 - RNA, 19 nt, Homo sapiens
  misc_RNA (1)...(19): siRNA sense strand
cuggauggauggauaaaug

SEQ ID NO: 915765 - RNA, 19 nt, Homo sapiens
  misc_RNA (1)...(19): siRNA sense strand
aaacguggccuccuaugga

SEQ ID NO: 915766 - RNA, 19 nt, Homo sapiens
  misc_RNA (1)...(19): siRNA sense strand
cuacgcaacacuaauuaaa

SEQ ID NO: 915767 - RNA, 19 nt, Homo sapiens
  misc_RNA (1)...(19): siRNA sense strand
aaucacaaaugaguaguug

SEQ ID NO: 915768 - RNA, 19 nt, Homo sapiens
  misc_RNA (1)...(19): siRNA sense strand
uuagcuggauggauggaua

SEQ ID NO: 915769 - RNA, 19 nt, Homo sapiens
  misc_RNA (1)...(19): siRNA sense strand
uuaggaggauggaaagaug

SEQ ID NO: 915770 - RNA, 19 nt, Homo sapiens
  misc_RNA (1)...(19): siRNA sense strand
uagaugaucaguuugaaga

SEQ ID NO: 915771 - RNA, 19 nt, Homo sapiens
  misc_RNA (1)...(19): siRNA sense strand
gguagaugaucaguuugaa

SEQ ID NO: 915772 - RNA, 19 nt, Homo sapiens
  misc_RNA (1)...(19): siRNA sense strand
gaaguuuggauacgauuag

SEQ ID NO: 915773 - RNA, 19 nt, Homo sapiens
  misc_RNA (1)...(19): siRNA sense strand
gaagaaugcauuggcugaa

SEQ ID NO: 915774 - RNA, 19 nt, Homo sapiens
  misc_RNA (1)...(19): siRNA sense strand
cuggguggguaaacaauaa

SEQ ID NO: 915775 - RNA, 19 nt, Homo sapiens
  misc_RNA (1)...(19): siRNA sense strand
ggacacugacgguagucua

SEQ ID NO: 915776 - RNA, 19 nt, Homo sapiens
  misc_RNA (1)...(19): siRNA sense strand
gaauggaaugagugaacua

SEQ ID NO: 915777 - RNA, 19 nt, Homo sapiens
  misc_RNA (1)...(19): siRNA sense strand
gagagaagaauagauaucu

SEQ ID NO: 915778 - RNA, 19 nt, Homo sapiens
  misc_RNA (1)...(19): siRNA sense strand
guggaugaauugguuagaa

SEQ ID NO: 915779 - RNA, 19 nt, Homo sapiens
  misc_RNA (1)...(19): siRNA sense strand
ggagcucagguacccuuua

SEQ ID NO: 915780 - RNA, 19 nt, Homo sapiens
  misc_RNA (1)...(19): siRNA sense strand
cagggccucuguaaagcua

SEQ ID NO: 915781 - RNA, 19 nt, Homo sapiens
  misc_RNA (1)...(19): siRNA sense strand
uuauuugguugguuaggua

SEQ ID NO: 915782 - RNA, 19 nt, Homo sapiens
  misc_RNA (1)...(19): siRNA sense strand
gaaccacaggcaagaagga

SEQ ID NO: 915783 - RNA, 19 nt, Homo sapiens
  misc_RNA (1)...(19): siRNA sense strand
acucacagccuuccuauca

SEQ ID NO: 915784 - RNA, 19 nt, Homo sapiens
  misc_RNA (1)...(19): siRNA sense strand
gacacugacgguagucuaa

SEQ ID NO: 915785 - RNA, 19 nt, Homo sapiens
  misc_RNA (1)...(19): siRNA sense strand
ugaauaaacagagagaaga

SEQ ID NO: 915786 - RNA, 19 nt, Homo sapiens
  misc_RNA (1)...(19): siRNA sense strand
gaaagcaugaauggaguug

SEQ ID NO: 915787 - RNA, 19 nt, Homo sapiens
  misc_RNA (1)...(19): siRNA sense strand
aaaggacacugacgguagu

SEQ ID NO: 915788 - RNA, 19 nt, Homo sapiens
  misc_RNA (1)...(19): siRNA sense strand
ggccugggcaucauaauca

SEQ ID NO: 915789 - RNA, 19 nt, Homo sapiens
  misc_RNA (1)...(19): siRNA sense strand
gguggguaaacaauaaaua

SEQ ID NO: 915790 - RNA, 19 nt, Homo sapiens
  misc_RNA (1)...(19): siRNA sense strand
cuccuacccugaaccagua

SEQ ID NO: 915791 - RNA, 19 nt, Homo sapiens
  misc_RNA (1)...(19): siRNA sense strand
ugacaaauggaagggauaa

SEQ ID NO: 915792 - RNA, 19 nt, Homo sapiens
  misc_RNA (1)...(19): siRNA sense strand
aaacagagagaagaauaga

SEQ ID NO: 915793 - RNA, 19 nt, Homo sapiens
  misc_RNA (1)...(19): siRNA sense strand
gcuagcugaauguaugaua

SEQ ID NO: 915794 - RNA, 19 nt, Homo sapiens
  misc_RNA (1)...(19): siRNA sense strand
gcaacacuaauuaaagcuu

SEQ ID NO: 915795 - RNA, 19 nt, Homo sapiens
  misc_RNA (1)...(19): siRNA sense strand
ccacucuuaucccuuagga

SEQ ID NO: 915796 - RNA, 19 nt, Homo sapiens
  misc_RNA (1)...(19): siRNA sense strand
ucuaaacucuaucuauguc

SEQ ID NO: 915797 - RNA, 19 nt, Homo sapiens
  misc_RNA (1)...(19): siRNA sense strand
ccaagaacagaaagaacuu

SEQ ID NO: 915798 - RNA, 19 nt, Homo sapiens
  misc_RNA (1)...(19): siRNA sense strand
uuacuauggugauuucuac

SEQ ID NO: 915799 - RNA, 19 nt, Homo sapiens
  misc_RNA (1)...(19): siRNA sense strand
gacgguagucuaaacucua

SEQ ID NO: 915800 - RNA, 19 nt, Homo sapiens
  misc_RNA (1)...(19): siRNA sense strand
ggauaccuggauucacaua

SEQ ID NO: 915801 - RNA, 19 nt, Homo sapiens
  misc_RNA (1)...(19): siRNA sense strand
gauaggaaguuuggauacg

SEQ ID NO: 915802 - RNA, 19 nt, Homo sapiens
  misc_RNA (1)...(19): siRNA sense strand
ccacaggcaagaaggaaga

SEQ ID NO: 915803 - RNA, 19 nt, Homo sapiens
  misc_RNA (1)...(19): siRNA sense strand
uuggauggguugauuagga

SEQ ID NO: 915804 - RNA, 19 nt, Homo sapiens
  misc_RNA (1)...(19): siRNA sense strand
auggauaaauggaugaaug

SEQ ID NO: 915805 - RNA, 19 nt, Homo sapiens
  misc_RNA (1)...(19): siRNA sense strand
auggacagauagcagauaa

SEQ ID NO: 915806 - RNA, 19 nt, Homo sapiens
  misc_RNA (1)...(19): siRNA sense strand
ggauccagcagguguacaa

SEQ ID NO: 915807 - RNA, 19 nt, Homo sapiens
  misc_RNA (1)...(19): siRNA sense strand
uucccacucuuaucccuua

SEQ ID NO: 915808 - RNA, 19 nt, Homo sapiens
  misc_RNA (1)...(19): siRNA sense strand
ugaauggguggaugacaaa

SEQ ID NO: 915809 - RNA, 19 nt, Homo sapiens
  misc_RNA (1)...(19): siRNA sense strand
gaaugagugaacuaaugaa

SEQ ID NO: 915810 - RNA, 19 nt, Homo sapiens
  misc_RNA (1)...(19): siRNA sense strand
agacuaaugggauagaaug

SEQ ID NO: 915811 - RNA, 19 nt, Homo sapiens
  misc_RNA (1)...(19): siRNA sense strand
ggaugaauugguuagaaau

SEQ ID NO: 915812 - RNA, 19 nt, Homo sapiens
  misc_RNA (1)...(19): siRNA sense strand
gggagaagagaaacaaugg

SEQ ID NO: 915813 - RNA, 19 nt, Homo sapiens
  misc_RNA (1)...(19): siRNA sense strand
caagaaggaagagggagaa

SEQ ID NO: 915814 - RNA, 19 nt, Homo sapiens
  misc_RNA (1)...(19): siRNA sense strand
ggacagauagcagauaagc

SEQ ID NO: 915815 - RNA, 19 nt, Homo sapiens
  misc_RNA (1)...(19): siRNA sense strand
uaaacagagagaagaauag

SEQ ID NO: 915816 - RNA, 19 nt, Homo sapiens
  misc_RNA (1)...(19): siRNA sense strand
agccagaguugcagacaga

SEQ ID NO: 915817 - RNA, 19 nt, Homo sapiens
  misc_RNA (1)...(19): siRNA sense strand
guacuuugcuuccuaauuu

SEQ ID NO: 915818 - RNA, 19 nt, Homo sapiens
  misc_RNA (1)...(19): siRNA sense strand
gauguucugucauucauua

SEQ ID NO: 915819 - RNA, 19 nt, Homo sapiens
  misc_RNA (1)...(19): siRNA sense strand
gcuaaugacuggcaaugua

SEQ ID NO: 915820 - RNA, 19 nt, Homo sapiens
  misc_RNA (1)...(19): siRNA sense strand
ggaugaagaucuuucuaaa

SEQ ID NO: 915821 - RNA, 19 nt, Homo sapiens
  misc_RNA (1)...(19): siRNA sense strand
gaagaaagacuggaaacua

SEQ ID NO: 915822 - RNA, 19 nt, Homo sapiens
  misc_RNA (1)...(19): siRNA sense strand
ggagagaagugggauauau

SEQ ID NO: 915823 - RNA, 19 nt, Homo sapiens
  misc_RNA (1)...(19): siRNA sense strand
uaagaagcuuugugugaua

SEQ ID NO: 915824 - RNA, 19 nt, Homo sapiens
  misc_RNA (1)...(19): siRNA sense strand
gaaagacacuugcagaaaa

SEQ ID NO: 915825 - RNA, 19 nt, Homo sapiens
  misc_RNA (1)...(19): siRNA sense strand
gaaaugauacuguagacaa

SEQ ID NO: 915826 - RNA, 19 nt, Homo sapiens
  misc_RNA (1)...(19): siRNA sense strand
gaaagucuaccuucuaaau

SEQ ID NO: 915827 - RNA, 19 nt, Homo sapiens
  misc_RNA (1)...(19): siRNA sense strand
caaaauagauguucuguca

SEQ ID NO: 915828 - RNA, 19 nt, Homo sapiens
  misc_RNA (1)...(19): siRNA sense strand
cuaagcaaaugcaagguua

SEQ ID NO: 915829 - RNA, 19 nt, Homo sapiens
  misc_RNA (1)...(19): siRNA sense strand
ggucagaagugcuaaaucu

SEQ ID NO: 915830 - RNA, 19 nt, Homo sapiens
  misc_RNA (1)...(19): siRNA sense strand
cacaugagcuuuaguuugu

SEQ ID NO: 915831 - RNA, 19 nt, Homo sapiens
  misc_RNA (1)...(19): siRNA sense strand
ggaaagacacuugcagaaa

SEQ ID NO: 915832 - RNA, 19 nt, Homo sapiens
  misc_RNA (1)...(19): siRNA sense strand
agaagaaucugauggugaa

SEQ ID NO: 915833 - RNA, 19 nt, Homo sapiens
  misc_RNA (1)...(19): siRNA sense strand
gcaaauugaaguaagcuuu

SEQ ID NO: 915834 - RNA, 19 nt, Homo sapiens
  misc_RNA (1)...(19): siRNA sense strand
gaaauaggaaagacacuug

SEQ ID NO: 915835 - RNA, 19 nt, Homo sapiens
  misc_RNA (1)...(19): siRNA sense strand
uaaacacacugcauacaau

SEQ ID NO: 915836 - RNA, 19 nt, Homo sapiens
  misc_RNA (1)...(19): siRNA sense strand
gguccugcaucuauauuaa

SEQ ID NO: 915837 - RNA, 19 nt, Homo sapiens
  misc_RNA (1)...(19): siRNA sense strand
acagugagcuuucccaugu

SEQ ID NO: 915838 - RNA, 19 nt, Homo sapiens
  misc_RNA (1)...(19): siRNA sense strand
guacagugcaugaagcaua

SEQ ID NO: 915839 - RNA, 19 nt, Homo sapiens
  misc_RNA (1)...(19): siRNA sense strand
gaagaaagaacaggauaug

SEQ ID NO: 915840 - RNA, 19 nt, Homo sapiens
  misc_RNA (1)...(19): siRNA sense strand
ccaaauacauccuguccau

SEQ ID NO: 915841 - RNA, 19 nt, Homo sapiens
  misc_RNA (1)...(19): siRNA sense strand
gcugaucucucaaaauaua

SEQ ID NO: 915842 - RNA, 19 nt, Homo sapiens
  misc_RNA (1)...(19): siRNA sense strand
gaacauuugccucaagaug

SEQ ID NO: 915843 - RNA, 19 nt, Homo sapiens
  misc_RNA (1)...(19): siRNA sense strand
gaaauucccuaugcuaagg

SEQ ID NO: 915844 - RNA, 19 nt, Homo sapiens
  misc_RNA (1)...(19): siRNA sense strand
gagaggaacagaaagagaa

SEQ ID NO: 915845 - RNA, 19 nt, Homo sapiens
  misc_RNA (1)...(19): siRNA sense strand
ggaugaggaugaagaucuu

SEQ ID NO: 915846 - RNA, 19 nt, Homo sapiens
  misc_RNA (1)...(19): siRNA sense strand
aaauaaagccugugaguca

SEQ ID NO: 915847 - RNA, 19 nt, Homo sapiens
  misc_RNA (1)...(19): siRNA sense strand
ggagacauugugaauuuaa

SEQ ID NO: 915848 - RNA, 19 nt, Homo sapiens
  misc_RNA (1)...(19): siRNA sense strand
ggaaguugaagauaaagaa

SEQ ID NO: 915849 - RNA, 19 nt, Homo sapiens
  misc_RNA (1)...(19): siRNA sense strand
cugauacgguugcuugaua

SEQ ID NO: 915850 - RNA, 19 nt, Homo sapiens
  misc_RNA (1)...(19): siRNA sense strand
gaagaucagaguguaauau

SEQ ID NO: 915851 - RNA, 19 nt, Homo sapiens
  misc_RNA (1)...(19): siRNA sense strand
gcaaaugcaagguuauaau

SEQ ID NO: 915852 - RNA, 19 nt, Homo sapiens
  misc_RNA (1)...(19): siRNA sense strand
caagguaaguauaucaaag

SEQ ID NO: 915853 - RNA, 19 nt, Homo sapiens
  misc_RNA (1)...(19): siRNA sense strand
gagagaagugggauauauu

SEQ ID NO: 915854 - RNA, 19 nt, Homo sapiens
  misc_RNA (1)...(19): siRNA sense strand
aagaaagacuggaaacuag

SEQ ID NO: 915855 - RNA, 19 nt, Homo sapiens
  misc_RNA (1)...(19): siRNA sense strand
auacagcuguguuuauuug

SEQ ID NO: 915856 - RNA, 19 nt, Homo sapiens
  misc_RNA (1)...(19): siRNA sense strand
ggaugaagaugacgcugau

SEQ ID NO: 915857 - RNA, 19 nt, Homo sapiens
  misc_RNA (1)...(19): siRNA sense strand
ggaaauguaaacuuugcua

SEQ ID NO: 915858 - RNA, 19 nt, Homo sapiens
  misc_RNA (1)...(19): siRNA sense strand
guaagcagccaacuguaaa

SEQ ID NO: 915859 - RNA, 19 nt, Homo sapiens
  misc_RNA (1)...(19): siRNA sense strand
gaaagacuggaaacuaguu

SEQ ID NO: 915860 - RNA, 19 nt, Homo sapiens
  misc_RNA (1)...(19): siRNA sense strand
caacugaggccaagaugau

SEQ ID NO: 915861 - RNA, 19 nt, Homo sapiens
  misc_RNA (1)...(19): siRNA sense strand
gcuaauaguaguuuacaga

SEQ ID NO: 915862 - RNA, 19 nt, Homo sapiens
  misc_RNA (1)...(19): siRNA sense strand
gugauauucuuccaaaugu

SEQ ID NO: 915863 - RNA, 19 nt, Homo sapiens
  misc_RNA (1)...(19): siRNA sense strand
gccagaagaucagagugua

SEQ ID NO: 915864 - RNA, 19 nt, Homo sapiens
  misc_RNA (1)...(19): siRNA sense strand
gauucuacauguuaccauu

SEQ ID NO: 915865 - RNA, 19 nt, Homo sapiens
  misc_RNA (1)...(19): siRNA sense strand
uugaaagucuaccuucuaa

SEQ ID NO: 915866 - RNA, 19 nt, Homo sapiens
  misc_RNA (1)...(19): siRNA sense strand
auggagacauugugaauuu

SEQ ID NO: 915867 - RNA, 19 nt, Homo sapiens
  misc_RNA (1)...(19): siRNA sense strand
gccauaaugucccaaaaua

SEQ ID NO: 915868 - RNA, 19 nt, Homo sapiens
  misc_RNA (1)...(19): siRNA sense strand
gaauugggccagaagauca

SEQ ID NO: 915869 - RNA, 19 nt, Homo sapiens
  misc_RNA (1)...(19): siRNA sense strand
gcuuauugcugcaugaugu

SEQ ID NO: 915870 - RNA, 19 nt, Homo sapiens
  misc_RNA (1)...(19): siRNA sense strand
gcuaagacaggauuaccua

SEQ ID NO: 915871 - RNA, 19 nt, Homo sapiens
  misc_RNA (1)...(19): siRNA sense strand
gaucagaguguaauaugug

SEQ ID NO: 915872 - RNA, 19 nt, Homo sapiens
  misc_RNA (1)...(19): siRNA sense strand
gaacuuugggcauggaaga

SEQ ID NO: 915873 - RNA, 19 nt, Homo sapiens
  misc_RNA (1)...(19): siRNA sense strand
gcagccaacuguaaauguc

SEQ ID NO: 915874 - RNA, 19 nt, Homo sapiens
  misc_RNA (1)...(19): siRNA sense strand
uaacagaugucagagugau

SEQ ID NO: 915875 - RNA, 19 nt, Homo sapiens
  misc_RNA (1)...(19): siRNA sense strand
ggaaacuaguuggaaacaa

SEQ ID NO: 915876 - RNA, 19 nt, Homo sapiens
  misc_RNA (1)...(19): siRNA sense strand
guuaugggauauugauuuc

SEQ ID NO: 915877 - RNA, 19 nt, Homo sapiens
  misc_RNA (1)...(19): siRNA sense strand
caugagcuuuaguuuguuu

SEQ ID NO: 915878 - RNA, 19 nt, Homo sapiens
  misc_RNA (1)...(19): siRNA sense strand
ugauacgguugcuugauaa

SEQ ID NO: 915879 - RNA, 19 nt, Homo sapiens
  misc_RNA (1)...(19): siRNA sense strand
gaaaagagccgaggccuau

SEQ ID NO: 915880 - RNA, 19 nt, Homo sapiens
  misc_RNA (1)...(19): siRNA sense strand
aagucuaccuucuaaauug

SEQ ID NO: 915881 - RNA, 19 nt, Homo sapiens
  misc_RNA (1)...(19): siRNA sense strand
gcaagguaaguauaucaaa

SEQ ID NO: 915882 - RNA, 19 nt, Homo sapiens
  misc_RNA (1)...(19): siRNA sense strand
cagcuguguuuauuuguga

SEQ ID NO: 915883 - RNA, 19 nt, Homo sapiens
  misc_RNA (1)...(19): siRNA sense strand
caagaucucguuccaguuc

SEQ ID NO: 915884 - RNA, 19 nt, Homo sapiens
  misc_RNA (1)...(19): siRNA sense strand
gcuagaagaaccagcugua

SEQ ID NO: 915885 - RNA, 19 nt, Homo sapiens
  misc_RNA (1)...(19): siRNA sense strand
agaaucugauggugaauau

SEQ ID NO: 915886 - RNA, 19 nt, Homo sapiens
  misc_RNA (1)...(19): siRNA sense strand
gaaagagaagaaucugaug

SEQ ID NO: 915887 - RNA, 19 nt, Homo sapiens
  misc_RNA (1)...(19): siRNA sense strand
gaagcuuugugugauauuc

SEQ ID NO: 915888 - RNA, 19 nt, Homo sapiens
  misc_RNA (1)...(19): siRNA sense strand
guaaauaaagccugugagu

SEQ ID NO: 915889 - RNA, 19 nt, Homo sapiens
  misc_RNA (1)...(19): siRNA sense strand
uaauugugccucagacuuu

SEQ ID NO: 915890 - RNA, 19 nt, Homo sapiens
  misc_RNA (1)...(19): siRNA sense strand
agaaccagcuguaaucgau

SEQ ID NO: 915891 - RNA, 19 nt, Homo sapiens
  misc_RNA (1)...(19): siRNA sense strand
uuauguagguugcacaaga

SEQ ID NO: 915892 - RNA, 19 nt, Homo sapiens
  misc_RNA (1)...(19): siRNA sense strand
uuaagaagcuuugugugau

SEQ ID NO: 915893 - RNA, 19 nt, Homo sapiens
  misc_RNA (1)...(19): siRNA sense strand
aaauacauccuguccauug

SEQ ID NO: 915894 - RNA, 19 nt, Homo sapiens
  misc_RNA (1)...(19): siRNA sense strand
acaaccauuugcuucauuu

SEQ ID NO: 915895 - RNA, 19 nt, Homo sapiens
  misc_RNA (1)...(19): siRNA sense strand
uggugaauaugaugaguuu

SEQ ID NO: 915896 - RNA, 19 nt, Homo sapiens
  misc_RNA (1)...(19): siRNA sense strand
uuaacaguauuuccaguga

SEQ ID NO: 915897 - RNA, 19 nt, Homo sapiens
  misc_RNA (1)...(19): siRNA sense strand
gugaacauuugccucaaga

SEQ ID NO: 915898 - RNA, 19 nt, Homo sapiens
  misc_RNA (1)...(19): siRNA sense strand
gugaagaagaagauaguaa

SEQ ID NO: 915899 - RNA, 19 nt, Homo sapiens
  misc_RNA (1)...(19): siRNA sense strand
acgcugaucucucaaaaua

SEQ ID NO: 915900 - RNA, 19 nt, Homo sapiens
  misc_RNA (1)...(19): siRNA sense strand
gcaugccuuucauugcuuu

SEQ ID NO: 915901 - RNA, 19 nt, Homo sapiens
  misc_RNA (1)...(19): siRNA sense strand
aagcuguacuaguucauuu

SEQ ID NO: 915902 - RNA, 19 nt, Homo sapiens
  misc_RNA (1)...(19): siRNA sense strand
uauguagguugcacaagaa

SEQ ID NO: 915903 - RNA, 19 nt, Homo sapiens
  misc_RNA (1)...(19): siRNA sense strand
ucacaugagcuuuaguuug

SEQ ID NO: 915904 - RNA, 19 nt, Homo sapiens
  misc_RNA (1)...(19): siRNA sense strand
agagaagugggauauauuu

SEQ ID NO: 915905 - RNA, 19 nt, Homo sapiens
  misc_RNA (1)...(19): siRNA sense strand
uaaagaaucagagggagaa

SEQ ID NO: 915906 - RNA, 19 nt, Homo sapiens
  misc_RNA (1)...(19): siRNA sense strand
acaaaugaaugcuuauugc

SEQ ID NO: 915907 - RNA, 19 nt, Homo sapiens
  misc_RNA (1)...(19): siRNA sense strand
gccucaagauguuaacuau

SEQ ID NO: 915908 - RNA, 19 nt, Homo sapiens
  misc_RNA (1)...(19): siRNA sense strand
ugugugauauucuuccaaa

SEQ ID NO: 915909 - RNA, 19 nt, Homo sapiens
  misc_RNA (1)...(19): siRNA sense strand
gcacugaaauaggaaagac

SEQ ID NO: 915910 - RNA, 19 nt, Homo sapiens
  misc_RNA (1)...(19): siRNA sense strand
uaaguuagaugaggaugag

SEQ ID NO: 915911 - RNA, 19 nt, Homo sapiens
  misc_RNA (1)...(19): siRNA sense strand
aagaagaggaugaggauga

SEQ ID NO: 915912 - RNA, 19 nt, Homo sapiens
  misc_RNA (1)...(19): siRNA sense strand
uacgguugcuugauaaaga

SEQ ID NO: 915913 - RNA, 19 nt, Homo sapiens
  misc_RNA (1)...(19): siRNA sense strand
ggucacaugagcuuuaguu

SEQ ID NO: 915914 - RNA, 19 nt, Homo sapiens
  misc_RNA (1)...(19): siRNA sense strand
cgaggccuauuuagugcua

SEQ ID NO: 915915 - RNA, 19 nt, Homo sapiens
  misc_RNA (1)...(19): siRNA sense strand
ccaaauguaguuaccaaau

SEQ ID NO: 915916 - RNA, 19 nt, Homo sapiens
  misc_RNA (1)...(19): siRNA sense strand
aaagagccgaggccuauuu

SEQ ID NO: 915917 - RNA, 19 nt, Homo sapiens
  misc_RNA (1)...(19): siRNA sense strand
guaaaccaguggcagaaua

SEQ ID NO: 915918 - RNA, 19 nt, Homo sapiens
  misc_RNA (1)...(19): siRNA sense strand
gaagccgaauuuccuagua

SEQ ID NO: 915919 - RNA, 19 nt, Homo sapiens
  misc_RNA (1)...(19): siRNA sense strand
cgacaugccucaccagaug

SEQ ID NO: 915920 - RNA, 19 nt, Homo sapiens
  misc_RNA (1)...(19): siRNA sense strand
gaaagccgcucaugugacu

SEQ ID NO: 915921 - RNA, 19 nt, Homo sapiens
  misc_RNA (1)...(19): siRNA sense strand
ggagaaacacaggaaauaa

SEQ ID NO: 915922 - RNA, 19 nt, Homo sapiens
  misc_RNA (1)...(19): siRNA sense strand
gcaacuguguaaagaauuc

SEQ ID NO: 915923 - RNA, 19 nt, Homo sapiens
  misc_RNA (1)...(19): siRNA sense strand
cagaacugcuugucucauu

SEQ ID NO: 915924 - RNA, 19 nt, Homo sapiens
  misc_RNA (1)...(19): siRNA sense strand
cagaagagccaaaucgaaa

SEQ ID NO: 915925 - RNA, 19 nt, Homo sapiens
  misc_RNA (1)...(19): siRNA sense strand
guaaagaauucacagaacu

SEQ ID NO: 915926 - RNA, 19 nt, Homo sapiens
  misc_RNA (1)...(19): siRNA sense strand
gggagaaguuggacaagau

SEQ ID NO: 915927 - RNA, 19 nt, Homo sapiens
  misc_RNA (1)...(19): siRNA sense strand
acacuggagucgccgaaua

SEQ ID NO: 915928 - RNA, 19 nt, Homo sapiens
  misc_RNA (1)...(19): siRNA sense strand
ggacuuugccuaugucugu

SEQ ID NO: 915929 - RNA, 19 nt, Homo sapiens
  misc_RNA (1)...(19): siRNA sense strand
cagcaacuguguaaagaau

SEQ ID NO: 915930 - RNA, 19 nt, Homo sapiens
  misc_RNA (1)...(19): siRNA sense strand
ccaccugaaugcuuaaaug

SEQ ID NO: 915931 - RNA, 19 nt, Homo sapiens
  misc_RNA (1)...(19): siRNA sense strand
gcagaacuacaucaaagaa

SEQ ID NO: 915932 - RNA, 19 nt, Homo sapiens
  misc_RNA (1)...(19): siRNA sense strand
ggacaagauuggguugaau

SEQ ID NO: 915933 - RNA, 19 nt, Homo sapiens
  misc_RNA (1)...(19): siRNA sense strand
uaaccgauaaugucaagua

SEQ ID NO: 915934 - RNA, 19 nt, Homo sapiens
  misc_RNA (1)...(19): siRNA sense strand
gcaaaggucccauuuccau

SEQ ID NO: 915935 - RNA, 19 nt, Homo sapiens
  misc_RNA (1)...(19): siRNA sense strand
gaaaauaaccgauaauguc

SEQ ID NO: 915936 - RNA, 19 nt, Homo sapiens
  misc_RNA (1)...(19): siRNA sense strand
gacaguggcugaaguacag

SEQ ID NO: 915937 - RNA, 19 nt, Homo sapiens
  misc_RNA (1)...(19): siRNA sense strand
auagacaaauccuacauga

SEQ ID NO: 915938 - RNA, 19 nt, Homo sapiens
  misc_RNA (1)...(19): siRNA sense strand
ccauuuccaugaccaagaa

SEQ ID NO: 915939 - RNA, 19 nt, Homo sapiens
  misc_RNA (1)...(19): siRNA sense strand
augcuuaaaugccucguua

SEQ ID NO: 915940 - RNA, 19 nt, Homo sapiens
  misc_RNA (1)...(19): siRNA sense strand
ucaaagaagcccugauugu

SEQ ID NO: 915941 - RNA, 19 nt, Homo sapiens
  misc_RNA (1)...(19): siRNA sense strand
caaagaagcccugauuguc

SEQ ID NO: 915942 - RNA, 19 nt, Homo sapiens
  misc_RNA (1)...(19): siRNA sense strand
aaccagaccucaucuugga

SEQ ID NO: 915943 - RNA, 19 nt, Homo sapiens
  misc_RNA (1)...(19): siRNA sense strand
ccgauaaugucaaguacga

SEQ ID NO: 915944 - RNA, 19 nt, Homo sapiens
  misc_RNA (1)...(19): siRNA sense strand
aaagaagcccugauuguca

SEQ ID NO: 915945 - RNA, 19 nt, Homo sapiens
  misc_RNA (1)...(19): siRNA sense strand
gaacugcuugucucauuuc

SEQ ID NO: 915946 - RNA, 19 nt, Homo sapiens
  misc_RNA (1)...(19): siRNA sense strand
ggagaaguuggacaagauu

SEQ ID NO: 915947 - RNA, 19 nt, Homo sapiens
  misc_RNA (1)...(19): siRNA sense strand
aagccgaauuuccuaguaa

SEQ ID NO: 915948 - RNA, 19 nt, Homo sapiens
  misc_RNA (1)...(19): siRNA sense strand
ucauuuggcuagggacuuu

SEQ ID NO: 915949 - RNA, 19 nt, Homo sapiens
  misc_RNA (1)...(19): siRNA sense strand
agaacugcuugucucauuu

SEQ ID NO: 915950 - RNA, 19 nt, Homo sapiens
  misc_RNA (1)...(19): siRNA sense strand
agacaaauccuacaugaac

SEQ ID NO: 915951 - RNA, 19 nt, Homo sapiens
  misc_RNA (1)...(19): siRNA sense strand
ucagcucuacgucuaaaua

SEQ ID NO: 915952 - RNA, 19 nt, Homo sapiens
  misc_RNA (1)...(19): siRNA sense strand
uggacgaggugcagaaugu

SEQ ID NO: 915953 - RNA, 19 nt, Homo sapiens
  misc_RNA (1)...(19): siRNA sense strand
acaaaacccuggagaaaau

SEQ ID NO: 915954 - RNA, 19 nt, Homo sapiens
  misc_RNA (1)...(19): siRNA sense strand
aguagaaggugaagcuguu

SEQ ID NO: 915955 - RNA, 19 nt, Homo sapiens
  misc_RNA (1)...(19): siRNA sense strand
ccugacauccuuaguagaa

SEQ ID NO: 915956 - RNA, 19 nt, Homo sapiens
  misc_RNA (1)...(19): siRNA sense strand
gcucuacgucuaaauacaa

SEQ ID NO: 915957 - RNA, 19 nt, Homo sapiens
  misc_RNA (1)...(19): siRNA sense strand
agacgaacauacagaacug

SEQ ID NO: 915958 - RNA, 19 nt, Homo sapiens
  misc_RNA (1)...(19): siRNA sense strand
uggagaaacacaggaaaua

SEQ ID NO: 915959 - RNA, 19 nt, Homo sapiens
  misc_RNA (1)...(19): siRNA sense strand
gaccagaguccagcugauu

SEQ ID NO: 915960 - RNA, 19 nt, Homo sapiens
  misc_RNA (1)...(19): siRNA sense strand
cugcagaacuacaucaaag

SEQ ID NO: 915961 - RNA, 19 nt, Homo sapiens
  misc_RNA (1)...(19): siRNA sense strand
aaaggucccauuuccauga

SEQ ID NO: 915962 - RNA, 19 nt, Homo sapiens
  misc_RNA (1)...(19): siRNA sense strand
cgaauuuccuaguaaacca

SEQ ID NO: 915963 - RNA, 19 nt, Homo sapiens
  misc_RNA (1)...(19): siRNA sense strand
uaacaaaacccuggagaaa

SEQ ID NO: 915964 - RNA, 19 nt, Homo sapiens
  misc_RNA (1)...(19): siRNA sense strand
accaguggcagaauauuua

SEQ ID NO: 915965 - RNA, 19 nt, Homo sapiens
  misc_RNA (1)...(19): siRNA sense strand
uaaaccaguggcagaauau

SEQ ID NO: 915966 - RNA, 19 nt, Homo sapiens
  misc_RNA (1)...(19): siRNA sense strand
acugggagguguucucaga

SEQ ID NO: 915967 - RNA, 19 nt, Homo sapiens
  misc_RNA (1)...(19): siRNA sense strand
caucuuggaggacgaaaug

SEQ ID NO: 915968 - RNA, 19 nt, Homo sapiens
  misc_RNA (1)...(19): siRNA sense strand
ucaugugacucuccugaca

SEQ ID NO: 915969 - RNA, 19 nt, Homo sapiens
  misc_RNA (1)...(19): siRNA sense strand
ucagaagagccaaaucgaa

SEQ ID NO: 915970 - RNA, 19 nt, Homo sapiens
  misc_RNA (1)...(19): siRNA sense strand
ccucagcucuacgucuaaa

SEQ ID NO: 915971 - RNA, 19 nt, Homo sapiens
  misc_RNA (1)...(19): siRNA sense strand
guguaaagaauucacagaa

SEQ ID NO: 915972 - RNA, 19 nt, Homo sapiens
  misc_RNA (1)...(19): siRNA sense strand
cuaggaagaacaugcuauu

SEQ ID NO: 915973 - RNA, 19 nt, Homo sapiens
  misc_RNA (1)...(19): siRNA sense strand
cucagucccuggaagauug

SEQ ID NO: 915974 - RNA, 19 nt, Homo sapiens
  misc_RNA (1)...(19): siRNA sense strand
cccagcaacuguguaaaga

SEQ ID NO: 915975 - RNA, 19 nt, Homo sapiens
  misc_RNA (1)...(19): siRNA sense strand
gagauggcagcuaggaaga

SEQ ID NO: 915976 - RNA, 19 nt, Homo sapiens
  misc_RNA (1)...(19): siRNA sense strand
cggaaagccgcucauguga

SEQ ID NO: 915977 - RNA, 19 nt, Homo sapiens
  misc_RNA (1)...(19): siRNA sense strand
cgggagaaguuggacaaga

SEQ ID NO: 915978 - RNA, 19 nt, Homo sapiens
  misc_RNA (1)...(19): siRNA sense strand
gacagucauucgcaaaggu

SEQ ID NO: 915979 - RNA, 19 nt, Homo sapiens
  misc_RNA (1)...(19): siRNA sense strand
cuccucagcucuacgucua

SEQ ID NO: 915980 - RNA, 19 nt, Homo sapiens
  misc_RNA (1)...(19): siRNA sense strand
aagaagcccugauugucau

SEQ ID NO: 915981 - RNA, 19 nt, Homo sapiens
  misc_RNA (1)...(19): siRNA sense strand
uguaaagaauucacagaac

SEQ ID NO: 915982 - RNA, 19 nt, Homo sapiens
  misc_RNA (1)...(19): siRNA sense strand
ugacucuccugacauccuu

SEQ ID NO: 915983 - RNA, 19 nt, Homo sapiens
  misc_RNA (1)...(19): siRNA sense strand
gcucagucccuggaagauu

SEQ ID NO: 915984 - RNA, 19 nt, Homo sapiens
  misc_RNA (1)...(19): siRNA sense strand
ggaaaauaaccgauaaugu

SEQ ID NO: 915985 - RNA, 19 nt, Homo sapiens
  misc_RNA (1)...(19): siRNA sense strand
ccaguggcagaauauuuaa

SEQ ID NO: 915986 - RNA, 19 nt, Homo sapiens
  misc_RNA (1)...(19): siRNA sense strand
cgaagaggacugcgaggau

SEQ ID NO: 915987 - RNA, 19 nt, Homo sapiens
  misc_RNA (1)...(19): siRNA sense strand
gagaaguuggacaagauug

SEQ ID NO: 915988 - RNA, 19 nt, Homo sapiens
  misc_RNA (1)...(19): siRNA sense strand
ccaagaacccucugaaccu

SEQ ID NO: 915989 - RNA, 19 nt, Homo sapiens
  misc_RNA (1)...(19): siRNA sense strand
gaguccagcugauucuaac

SEQ ID NO: 915990 - RNA, 19 nt, Homo sapiens
  misc_RNA (1)...(19): siRNA sense strand
aauaaccgauaaugucaag

SEQ ID NO: 915991 - RNA, 19 nt, Homo sapiens
  misc_RNA (1)...(19): siRNA sense strand
ucgcaaaggucccauuucc

SEQ ID NO: 915992 - RNA, 19 nt, Homo sapiens
  misc_RNA (1)...(19): siRNA sense strand
gauggcagcuaggaagaac

SEQ ID NO: 915993 - RNA, 19 nt, Homo sapiens
  misc_RNA (1)...(19): siRNA sense strand
uggacaagauuggguugaa

SEQ ID NO: 915994 - RNA, 19 nt, Homo sapiens
  misc_RNA (1)...(19): siRNA sense strand
uuaaccagaccucaucuug

SEQ ID NO: 915995 - RNA, 19 nt, Homo sapiens
  misc_RNA (1)...(19): siRNA sense strand
gagacgaacauacagaacu

SEQ ID NO: 915996 - RNA, 19 nt, Homo sapiens
  misc_RNA (1)...(19): siRNA sense strand
gcacgaucagacagucauu

SEQ ID NO: 915997 - RNA, 19 nt, Homo sapiens
  misc_RNA (1)...(19): siRNA sense strand
caaagugacaguggcugaa

SEQ ID NO: 915998 - RNA, 19 nt, Homo sapiens
  misc_RNA (1)...(19): siRNA sense strand
cgacgaccagcaccuguug

SEQ ID NO: 915999 - RNA, 19 nt, Homo sapiens
  misc_RNA (1)...(19): siRNA sense strand
cgaaaugagauggcagcua

SEQ ID NO: 916000 - RNA, 19 nt, Homo sapiens
  misc_RNA (1)...(19): siRNA sense strand
gcuaggaagaacaugcuau

SEQ ID NO: 916001 - RNA, 19 nt, Homo sapiens
  misc_RNA (1)...(19): siRNA sense strand
gcccagcaacuguguaaag

SEQ ID NO: 916002 - RNA, 19 nt, Homo sapiens
  misc_RNA (1)...(19): siRNA sense strand
cuaaauacaaagugacagu

SEQ ID NO: 916003 - RNA, 19 nt, Homo sapiens
  misc_RNA (1)...(19): siRNA sense strand
cauagacaaauccuacaug

SEQ ID NO: 916004 - RNA, 19 nt, Homo sapiens
  misc_RNA (1)...(19): siRNA sense strand
ugaccaagaacccucugaa

SEQ ID NO: 916005 - RNA, 19 nt, Homo sapiens
  misc_RNA (1)...(19): siRNA sense strand
ucagacagucauucgcaaa

SEQ ID NO: 916006 - RNA, 19 nt, Homo sapiens
  misc_RNA (1)...(19): siRNA sense strand
aaccaguggcagaauauuu

SEQ ID NO: 916007 - RNA, 19 nt, Homo sapiens
  misc_RNA (1)...(19): siRNA sense strand
cuccugacauccuuaguag

SEQ ID NO: 916008 - RNA, 19 nt, Homo sapiens
  misc_RNA (1)...(19): siRNA sense strand
ucuccugacauccuuagua

SEQ ID NO: 916009 - RNA, 19 nt, Homo sapiens
  misc_RNA (1)...(19): siRNA sense strand
gguccuugcgggagaaguu

SEQ ID NO: 916010 - RNA, 19 nt, Homo sapiens
  misc_RNA (1)...(19): siRNA sense strand
agaguccagcugauucuaa

SEQ ID NO: 916011 - RNA, 19 nt, Homo sapiens
  misc_RNA (1)...(19): siRNA sense strand
ugucugugaagccgaauuu

SEQ ID NO: 916012 - RNA, 19 nt, Homo sapiens
  misc_RNA (1)...(19): siRNA sense strand
ccagcaacuguguaaagaa

SEQ ID NO: 916013 - RNA, 19 nt, Homo sapiens
  misc_RNA (1)...(19): siRNA sense strand
agccgaauuuccuaguaaa

SEQ ID NO: 916014 - RNA, 19 nt, Homo sapiens
  misc_RNA (1)...(19): siRNA sense strand
uccagcugauucuaacaaa

SEQ ID NO: 916015 - RNA, 19 nt, Homo sapiens
  misc_RNA (1)...(19): siRNA sense strand
aaauggagaaacacaggaa

SEQ ID NO: 916016 - RNA, 19 nt, Homo sapiens
  misc_RNA (1)...(19): siRNA sense strand
uagacaaauccuacaugaa

SEQ ID NO: 916017 - RNA, 19 nt, Homo sapiens
  misc_RNA (1)...(19): siRNA sense strand
cgacaaagcuuauguauga

SEQ ID NO: 916018 - RNA, 19 nt, Homo sapiens
  misc_RNA (1)...(19): siRNA sense strand
ggaaauauguucaaguuug

SEQ ID NO: 916019 - RNA, 19 nt, Homo sapiens
  misc_RNA (1)...(19): siRNA sense strand
gaaaggaccuaacucagaa

SEQ ID NO: 916020 - RNA, 19 nt, Homo sapiens
  misc_RNA (1)...(19): siRNA sense strand
gagagaagcccaucugaua

SEQ ID NO: 916021 - RNA, 19 nt, Homo sapiens
  misc_RNA (1)...(19): siRNA sense strand
ggaguuguaugaaauguuu

SEQ ID NO: 916022 - RNA, 19 nt, Homo sapiens
  misc_RNA (1)...(19): siRNA sense strand
ggagacagccugcagcuua

SEQ ID NO: 916023 - RNA, 19 nt, Homo sapiens
  misc_RNA (1)...(19): siRNA sense strand
ggaagcagcuggccgaaug

SEQ ID NO: 916024 - RNA, 19 nt, Homo sapiens
  misc_RNA (1)...(19): siRNA sense strand
ggaagucaguguaacauga

SEQ ID NO: 916025 - RNA, 19 nt, Homo sapiens
  misc_RNA (1)...(19): siRNA sense strand
gaaguucucucuuuaccuu

SEQ ID NO: 916026 - RNA, 19 nt, Homo sapiens
  misc_RNA (1)...(19): siRNA sense strand
gcagaaaucuaucuucaag

SEQ ID NO: 916027 - RNA, 19 nt, Homo sapiens
  misc_RNA (1)...(19): siRNA sense strand
gggcacagaucgacucaaa

SEQ ID NO: 916028 - RNA, 19 nt, Homo sapiens
  misc_RNA (1)...(19): siRNA sense strand
caaggaaccuggaacguau

SEQ ID NO: 916029 - RNA, 19 nt, Homo sapiens
  misc_RNA (1)...(19): siRNA sense strand
gaaacugaaagaagcauua

SEQ ID NO: 916030 - RNA, 19 nt, Homo sapiens
  misc_RNA (1)...(19): siRNA sense strand
gauucgaucugcuaaguuu

SEQ ID NO: 916031 - RNA, 19 nt, Homo sapiens
  misc_RNA (1)...(19): siRNA sense strand
gcgagaagccacccuguua

SEQ ID NO: 916032 - RNA, 19 nt, Homo sapiens
  misc_RNA (1)...(19): siRNA sense strand
gaucgaauuugaacuggaa

SEQ ID NO: 916033 - RNA, 19 nt, Homo sapiens
  misc_RNA (1)...(19): siRNA sense strand
ccuuaaagccguauacuua

SEQ ID NO: 916034 - RNA, 19 nt, Homo sapiens
  misc_RNA (1)...(19): siRNA sense strand
gaacucaaguggacagaag

SEQ ID NO: 916035 - RNA, 19 nt, Homo sapiens
  misc_RNA (1)...(19): siRNA sense strand
gaacacgacugggauuauc

SEQ ID NO: 916036 - RNA, 19 nt, Homo sapiens
  misc_RNA (1)...(19): siRNA sense strand
ggaauggaguauugcagaa

SEQ ID NO: 916037 - RNA, 19 nt, Homo sapiens
  misc_RNA (1)...(19): siRNA sense strand
ggagguggauaaagaugaa

SEQ ID NO: 916038 - RNA, 19 nt, Homo sapiens
  misc_RNA (1)...(19): siRNA sense strand
ucagaguccuuauaagaaa

SEQ ID NO: 916039 - RNA, 19 nt, Homo sapiens
  misc_RNA (1)...(19): siRNA sense strand
gaagaugauucaccuagag

SEQ ID NO: 916040 - RNA, 19 nt, Homo sapiens
  misc_RNA (1)...(19): siRNA sense strand
gaacugaagcucuuagaag

SEQ ID NO: 916041 - RNA, 19 nt, Homo sapiens
  misc_RNA (1)...(19): siRNA sense strand
acaaagcucugcucacguu

SEQ ID NO: 916042 - RNA, 19 nt, Homo sapiens
  misc_RNA (1)...(19): siRNA sense strand
gccguauacuuaugaauuu

SEQ ID NO: 916043 - RNA, 19 nt, Homo sapiens
  misc_RNA (1)...(19): siRNA sense strand
cagcccaggucauaagaua

SEQ ID NO: 916044 - RNA, 19 nt, Homo sapiens
  misc_RNA (1)...(19): siRNA sense strand
gcucagaguccuuauaaga

SEQ ID NO: 916045 - RNA, 19 nt, Homo sapiens
  misc_RNA (1)...(19): siRNA sense strand
gcacagaucgacucaaaca

SEQ ID NO: 916046 - RNA, 19 nt, Homo sapiens
  misc_RNA (1)...(19): siRNA sense strand
agaaaucuaucuucaagga

SEQ ID NO: 916047 - RNA, 19 nt, Homo sapiens
  misc_RNA (1)...(19): siRNA sense strand
ggaccuaacucagaagauc

SEQ ID NO: 916048 - RNA, 19 nt, Homo sapiens
  misc_RNA (1)...(19): siRNA sense strand
gaccgcaccuuucccugua

SEQ ID NO: 916049 - RNA, 19 nt, Homo sapiens
  misc_RNA (1)...(19): siRNA sense strand
guagauaccggugauagua

SEQ ID NO: 916050 - RNA, 19 nt, Homo sapiens
  misc_RNA (1)...(19): siRNA sense strand
gcgcuggaguuguaugaaa

SEQ ID NO: 916051 - RNA, 19 nt, Homo sapiens
  misc_RNA (1)...(19): siRNA sense strand
caagagaaccaauggaaug

SEQ ID NO: 916052 - RNA, 19 nt, Homo sapiens
  misc_RNA (1)...(19): siRNA sense strand
cagaucgacucaaacauug

SEQ ID NO: 916053 - RNA, 19 nt, Homo sapiens
  misc_RNA (1)...(19): siRNA sense strand
cgugaaggcugagaucuuu

SEQ ID NO: 916054 - RNA, 19 nt, Homo sapiens
  misc_RNA (1)...(19): siRNA sense strand
gcguugagauaaccaugua

SEQ ID NO: 916055 - RNA, 19 nt, Homo sapiens
  misc_RNA (1)...(19): siRNA sense strand
ugaccaaacucaggacauu

SEQ ID NO: 916056 - RNA, 19 nt, Homo sapiens
  misc_RNA (1)...(19): siRNA sense strand
gggauuaucugcagaaacg

SEQ ID NO: 916057 - RNA, 19 nt, Homo sapiens
  misc_RNA (1)...(19): siRNA sense strand
uguuagaucugcgcaguua

SEQ ID NO: 916058 - RNA, 19 nt, Homo sapiens
  misc_RNA (1)...(19): siRNA sense strand
aagaugaccucaccaagug

SEQ ID NO: 916059 - RNA, 19 nt, Homo sapiens
  misc_RNA (1)...(19): siRNA sense strand
ccgguucucuguuggauuu

SEQ ID NO: 916060 - RNA, 19 nt, Homo sapiens
  misc_RNA (1)...(19): siRNA sense strand
cucaggacauugcuucuua

SEQ ID NO: 916061 - RNA, 19 nt, Homo sapiens
  misc_RNA (1)...(19): siRNA sense strand
gcccaaagaaggaaacaaa

SEQ ID NO: 916062 - RNA, 19 nt, Homo sapiens
  misc_RNA (1)...(19): siRNA sense strand
gcacacaaguccuggucau

SEQ ID NO: 916063 - RNA, 19 nt, Homo sapiens
  misc_RNA (1)...(19): siRNA sense strand
gcauaaggaccaacagaga

SEQ ID NO: 916064 - RNA, 19 nt, Homo sapiens
  misc_RNA (1)...(19): siRNA sense strand
ccaaggaaccuggaacgua

SEQ ID NO: 916065 - RNA, 19 nt, Homo sapiens
  misc_RNA (1)...(19): siRNA sense strand
gcagaaacguccacaugcu

SEQ ID NO: 916066 - RNA, 19 nt, Homo sapiens
  misc_RNA (1)...(19): siRNA sense strand
gcacuucugccaggagaua

SEQ ID NO: 916067 - RNA, 19 nt, Homo sapiens
  misc_RNA (1)...(19): siRNA sense strand
cagcucagaguccuuauaa

SEQ ID NO: 916068 - RNA, 19 nt, Homo sapiens
  misc_RNA (1)...(19): siRNA sense strand
guaccgaccugcaacuagu

SEQ ID NO: 916069 - RNA, 19 nt, Homo sapiens
  misc_RNA (1)...(19): siRNA sense strand
ggaggagcuugccuuuguu

SEQ ID NO: 916070 - RNA, 19 nt, Homo sapiens
  misc_RNA (1)...(19): siRNA sense strand
acggaaauauguucaaguu

SEQ ID NO: 916071 - RNA, 19 nt, Homo sapiens
  misc_RNA (1)...(19): siRNA sense strand
cgaagaugauucaccuaga

SEQ ID NO: 916072 - RNA, 19 nt, Homo sapiens
  misc_RNA (1)...(19): siRNA sense strand
acuggaaguucucucuuua

SEQ ID NO: 916073 - RNA, 19 nt, Homo sapiens
  misc_RNA (1)...(19): siRNA sense strand
ucugauaacuccuugaaca

SEQ ID NO: 916074 - RNA, 19 nt, Homo sapiens
  misc_RNA (1)...(19): siRNA sense strand
ucagacagcccaggucaua

SEQ ID NO: 916075 - RNA, 19 nt, Homo sapiens
  misc_RNA (1)...(19): siRNA sense strand
gcagaccagcagccucuua

SEQ ID NO: 916076 - RNA, 19 nt, Homo sapiens
  misc_RNA (1)...(19): siRNA sense strand
uaucgucaguggaagcuuu

SEQ ID NO: 916077 - RNA, 19 nt, Homo sapiens
  misc_RNA (1)...(19): siRNA sense strand
aggaggagcuugccuuugu

SEQ ID NO: 916078 - RNA, 19 nt, Homo sapiens
  misc_RNA (1)...(19): siRNA sense strand
ggacugguuaauagugaua

SEQ ID NO: 916079 - RNA, 19 nt, Homo sapiens
  misc_RNA (1)...(19): siRNA sense strand
acagcugucuaucuccuua

SEQ ID NO: 916080 - RNA, 19 nt, Homo sapiens
  misc_RNA (1)...(19): siRNA sense strand
agaaaggaccuaacucaga

SEQ ID NO: 916081 - RNA, 19 nt, Homo sapiens
  misc_RNA (1)...(19): siRNA sense strand
ggacuugugucagagaaag

SEQ ID NO: 916082 - RNA, 19 nt, Homo sapiens
  misc_RNA (1)...(19): siRNA sense strand
gagaagccacccuguuaga

SEQ ID NO: 916083 - RNA, 19 nt, Homo sapiens
  misc_RNA (1)...(19): siRNA sense strand
gaaccaauggaauggagaa

SEQ ID NO: 916084 - RNA, 19 nt, Homo sapiens
  misc_RNA (1)...(19): siRNA sense strand
gagacagccugcagcuuag

SEQ ID NO: 916085 - RNA, 19 nt, Homo sapiens
  misc_RNA (1)...(19): siRNA sense strand
uauguggacuugugucaga

SEQ ID NO: 916086 - RNA, 19 nt, Homo sapiens
  misc_RNA (1)...(19): siRNA sense strand
gaagagcuggaacggauug

SEQ ID NO: 916087 - RNA, 19 nt, Homo sapiens
  misc_RNA (1)...(19): siRNA sense strand
ccaauggaauggagaaggu

SEQ ID NO: 916088 - RNA, 19 nt, Homo sapiens
  misc_RNA (1)...(19): siRNA sense strand
acagaucgacucaaacauu

SEQ ID NO: 916089 - RNA, 19 nt, Homo sapiens
  misc_RNA (1)...(19): siRNA sense strand
gaauggagaagguccuaug

SEQ ID NO: 916090 - RNA, 19 nt, Homo sapiens
  misc_RNA (1)...(19): siRNA sense strand
gagcaucagucugccuguu

SEQ ID NO: 916091 - RNA, 19 nt, Homo sapiens
  misc_RNA (1)...(19): siRNA sense strand
gccaggagauacuugacuu

SEQ ID NO: 916092 - RNA, 19 nt, Homo sapiens
  misc_RNA (1)...(19): siRNA sense strand
gagucuaacuuuguucaau

SEQ ID NO: 916093 - RNA, 19 nt, Homo sapiens
  misc_RNA (1)...(19): siRNA sense strand
ggaacugaagcucuuagaa

SEQ ID NO: 916094 - RNA, 19 nt, Homo sapiens
  misc_RNA (1)...(19): siRNA sense strand
uuaaagccguauacuuaug

SEQ ID NO: 916095 - RNA, 19 nt, Homo sapiens
  misc_RNA (1)...(19): siRNA sense strand
cugcuaaguuuguuggaaa

SEQ ID NO: 916096 - RNA, 19 nt, Homo sapiens
  misc_RNA (1)...(19): siRNA sense strand
gaagccacccuguuagauc

SEQ ID NO: 916097 - RNA, 19 nt, Homo sapiens
  misc_RNA (1)...(19): siRNA sense strand
aaguuuguguccagaauuu

SEQ ID NO: 916098 - RNA, 19 nt, Homo sapiens
  misc_RNA (1)...(19): siRNA sense strand
uaggcaaguuugaggauga

SEQ ID NO: 916099 - RNA, 19 nt, Homo sapiens
  misc_RNA (1)...(19): siRNA sense strand
uaaagccguauacuuauga

SEQ ID NO: 916100 - RNA, 19 nt, Homo sapiens
  misc_RNA (1)...(19): siRNA sense strand
gggccaaccagauaacauu

SEQ ID NO: 916101 - RNA, 19 nt, Homo sapiens
  misc_RNA (1)...(19): siRNA sense strand
agagaagcccaucugauaa

SEQ ID NO: 916102 - RNA, 19 nt, Homo sapiens
  misc_RNA (1)...(19): siRNA sense strand
aaagcaccuuggacaaauu

SEQ ID NO: 916103 - RNA, 19 nt, Homo sapiens
  misc_RNA (1)...(19): siRNA sense strand
gguuaauagugauaguuga

SEQ ID NO: 916104 - RNA, 19 nt, Homo sapiens
  misc_RNA (1)...(19): siRNA sense strand
caaagcuuauguaugaagu

SEQ ID NO: 916105 - RNA, 19 nt, Homo sapiens
  misc_RNA (1)...(19): siRNA sense strand
gaugaagcacugacugaau

SEQ ID NO: 916106 - RNA, 19 nt, Homo sapiens
  misc_RNA (1)...(19): siRNA sense strand
gcaagcagucgguguucuu

SEQ ID NO: 916107 - RNA, 19 nt, Homo sapiens
  misc_RNA (1)...(19): siRNA sense strand
cauauuuacuggacagagu

SEQ ID NO: 916108 - RNA, 19 nt, Homo sapiens
  misc_RNA (1)...(19): siRNA sense strand
cagaauuugucagaacuug

SEQ ID NO: 916109 - RNA, 19 nt, Homo sapiens
  misc_RNA (1)...(19): siRNA sense strand
aggcagaaaucuaucuuca

SEQ ID NO: 916110 - RNA, 19 nt, Homo sapiens
  misc_RNA (1)...(19): siRNA sense strand
gcugugauaccgaagugua

SEQ ID NO: 916111 - RNA, 19 nt, Homo sapiens
  misc_RNA (1)...(19): siRNA sense strand
gacugaaucugaugagcau

SEQ ID NO: 916112 - RNA, 19 nt, Homo sapiens
  misc_RNA (1)...(19): siRNA sense strand
cuucgggaauggaguauug

SEQ ID NO: 916113 - RNA, 19 nt, Homo sapiens
  misc_RNA (1)...(19): siRNA sense strand
caacuaguaccacugaaca

SEQ ID NO: 916114 - RNA, 19 nt, Homo sapiens
  misc_RNA (1)...(19): siRNA sense strand
cauaaggaccaacagagaa

SEQ ID NO: 916115 - RNA, 19 nt, Homo sapiens
  misc_RNA (1)...(19): siRNA sense strand
ccagaugccugugccuguu

SEQ ID NO: 916116 - RNA, 19 nt, Homo sapiens
  misc_RNA (1)...(19): siRNA sense strand
ugaaaaugaugccaagaaa

SEQ ID NO: 916117 - RNA, 19 nt, Homo sapiens
  misc_RNA (1)...(19): siRNA sense strand
gcagaaagauguugucaua

SEQ ID NO: 916118 - RNA, 19 nt, Homo sapiens
  misc_RNA (1)...(19): siRNA sense strand
ggagaacgguuaaguauuu

SEQ ID NO: 916119 - RNA, 19 nt, Homo sapiens
  misc_RNA (1)...(19): siRNA sense strand
gagcagagauucaguguga

SEQ ID NO: 916120 - RNA, 19 nt, Homo sapiens
  misc_RNA (1)...(19): siRNA sense strand
ggaaacagcucaucaaagg

SEQ ID NO: 916121 - RNA, 19 nt, Homo sapiens
  misc_RNA (1)...(19): siRNA sense strand
gaaaggaggagaacgguua

SEQ ID NO: 916122 - RNA, 19 nt, Homo sapiens
  misc_RNA (1)...(19): siRNA sense strand
gcacgggacuuucugcuuu

SEQ ID NO: 916123 - RNA, 19 nt, Homo sapiens
  misc_RNA (1)...(19): siRNA sense strand
ggaugaagcucacaauguu

SEQ ID NO: 916124 - RNA, 19 nt, Homo sapiens
  misc_RNA (1)...(19): siRNA sense strand
ggaggaagaugauguuguu

SEQ ID NO: 916125 - RNA, 19 nt, Homo sapiens
  misc_RNA (1)...(19): siRNA sense strand
ggaagaagcccuaauaauc

SEQ ID NO: 916126 - RNA, 19 nt, Homo sapiens
  misc_RNA (1)...(19): siRNA sense strand
gaacuaaugagaagaguaa

SEQ ID NO: 916127 - RNA, 19 nt, Homo sapiens
  misc_RNA (1)...(19): siRNA sense strand
ccaaggagauucccacaaa

SEQ ID NO: 916128 - RNA, 19 nt, Homo sapiens
  misc_RNA (1)...(19): siRNA sense strand
gaacagaagccugaaauga

SEQ ID NO: 916129 - RNA, 19 nt, Homo sapiens
  misc_RNA (1)...(19): siRNA sense strand
gggaaacgcugguguggaa

SEQ ID NO: 916130 - RNA, 19 nt, Homo sapiens
  misc_RNA (1)...(19): siRNA sense strand
gaaaucaagugguaagagu

SEQ ID NO: 916131 - RNA, 19 nt, Homo sapiens
  misc_RNA (1)...(19): siRNA sense strand
gcaaggaacuaaugagaag

SEQ ID NO: 916132 - RNA, 19 nt, Homo sapiens
  misc_RNA (1)...(19): siRNA sense strand
ugacguggcucuccaaaga

SEQ ID NO: 916133 - RNA, 19 nt, Homo sapiens
  misc_RNA (1)...(19): siRNA sense strand
gcugaaaguuguagcauug

SEQ ID NO: 916134 - RNA, 19 nt, Homo sapiens
  misc_RNA (1)...(19): siRNA sense strand
ggucagcucugcaauccua

SEQ ID NO: 916135 - RNA, 19 nt, Homo sapiens
  misc_RNA (1)...(19): siRNA sense strand
gacaauggcucaaagaaag

SEQ ID NO: 916136 - RNA, 19 nt, Homo sapiens
  misc_RNA (1)...(19): siRNA sense strand
caagaaagaauacagauug

SEQ ID NO: 916137 - RNA, 19 nt, Homo sapiens
  misc_RNA (1)...(19): siRNA sense strand
cgagagagcaccaagauuu

SEQ ID NO: 916138 - RNA, 19 nt, Homo sapiens
  misc_RNA (1)...(19): siRNA sense strand
gaacagcaacaaacuaaga

SEQ ID NO: 916139 - RNA, 19 nt, Homo sapiens
  misc_RNA (1)...(19): siRNA sense strand
caggagaaaucaaguggua

SEQ ID NO: 916140 - RNA, 19 nt, Homo sapiens
  misc_RNA (1)...(19): siRNA sense strand
gcucugcaauccuaucuaa

SEQ ID NO: 916141 - RNA, 19 nt, Homo sapiens
  misc_RNA (1)...(19): siRNA sense strand
gaaagaauacagauuguuc

SEQ ID NO: 916142 - RNA, 19 nt, Homo sapiens
  misc_RNA (1)...(19): siRNA sense strand
gggacuuucugcuuucuua

SEQ ID NO: 916143 - RNA, 19 nt, Homo sapiens
  misc_RNA (1)...(19): siRNA sense strand
ccagaagaaucaagagaaa

SEQ ID NO: 916144 - RNA, 19 nt, Homo sapiens
  misc_RNA (1)...(19): siRNA sense strand
caacacaacugaaacaaaa

SEQ ID NO: 916145 - RNA, 19 nt, Homo sapiens
  misc_RNA (1)...(19): siRNA sense strand
gaacugggaggcuaaagaa

SEQ ID NO: 916146 - RNA, 19 nt, Homo sapiens
  misc_RNA (1)...(19): siRNA sense strand
aaagaaggcugauaagaag

SEQ ID NO: 916147 - RNA, 19 nt, Homo sapiens
  misc_RNA (1)...(19): siRNA sense strand
ggaccaacaugcugaaagu

SEQ ID NO: 916148 - RNA, 19 nt, Homo sapiens
  misc_RNA (1)...(19): siRNA sense strand
gaaguacucaguggucuua

SEQ ID NO: 916149 - RNA, 19 nt, Homo sapiens
  misc_RNA (1)...(19): siRNA sense strand
gcaugcaucugagacauuu

SEQ ID NO: 916150 - RNA, 19 nt, Homo sapiens
  misc_RNA (1)...(19): siRNA sense strand
gauaagaagcaaagagaaa

SEQ ID NO: 916151 - RNA, 19 nt, Homo sapiens
  misc_RNA (1)...(19): siRNA sense strand
gagaaacccauucaaggua

SEQ ID NO: 916152 - RNA, 19 nt, Homo sapiens
  misc_RNA (1)...(19): siRNA sense strand
gaacauucuguauccaaua

SEQ ID NO: 916153 - RNA, 19 nt, Homo sapiens
  misc_RNA (1)...(19): siRNA sense strand
ugaagagacuguuuacaau

SEQ ID NO: 916154 - RNA, 19 nt, Homo sapiens
  misc_RNA (1)...(19): siRNA sense strand
gaaaguagaggcaaccaau

SEQ ID NO: 916155 - RNA, 19 nt, Homo sapiens
  misc_RNA (1)...(19): siRNA sense strand
uggcagaccuuuggugaua

SEQ ID NO: 916156 - RNA, 19 nt, Homo sapiens
  misc_RNA (1)...(19): siRNA sense strand
gaacagcucagugcuuuga

SEQ ID NO: 916157 - RNA, 19 nt, Homo sapiens
  misc_RNA (1)...(19): siRNA sense strand
gagucaagauguccaaaga

SEQ ID NO: 916158 - RNA, 19 nt, Homo sapiens
  misc_RNA (1)...(19): siRNA sense strand
gaagaguaacagucaagua

SEQ ID NO: 916159 - RNA, 19 nt, Homo sapiens
  misc_RNA (1)...(19): siRNA sense strand
agaaagauguugucauaca

SEQ ID NO: 916160 - RNA, 19 nt, Homo sapiens
  misc_RNA (1)...(19): siRNA sense strand
gaagaugaagagacuguuu

SEQ ID NO: 916161 - RNA, 19 nt, Homo sapiens
  misc_RNA (1)...(19): siRNA sense strand
gaggagaacgguuaaguau

SEQ ID NO: 916162 - RNA, 19 nt, Homo sapiens
  misc_RNA (1)...(19): siRNA sense strand
ggaggagaacgguuaagua

SEQ ID NO: 916163 - RNA, 19 nt, Homo sapiens
  misc_RNA (1)...(19): siRNA sense strand
gcaacaaacuaagagucua

SEQ ID NO: 916164 - RNA, 19 nt, Homo sapiens
  misc_RNA (1)...(19): siRNA sense strand
ugacucgacucuggacuua

SEQ ID NO: 916165 - RNA, 19 nt, Homo sapiens
  misc_RNA (1)...(19): siRNA sense strand
gaagaagcauggacugacu

SEQ ID NO: 916166 - RNA, 19 nt, Homo sapiens
  misc_RNA (1)...(19): siRNA sense strand
uguauucgcugcugaaguu

SEQ ID NO: 916167 - RNA, 19 nt, Homo sapiens
  misc_RNA (1)...(19): siRNA sense strand
ggcauuggcuugguuacua

SEQ ID NO: 916168 - RNA, 19 nt, Homo sapiens
  misc_RNA (1)...(19): siRNA sense strand
gaagagacuguuuacaaug

SEQ ID NO: 916169 - RNA, 19 nt, Homo sapiens
  misc_RNA (1)...(19): siRNA sense strand
ugguagagcuucaggguuu

SEQ ID NO: 916170 - RNA, 19 nt, Homo sapiens
  misc_RNA (1)...(19): siRNA sense strand
ggacaagaaagaauacaga

SEQ ID NO: 916171 - RNA, 19 nt, Homo sapiens
  misc_RNA (1)...(19): siRNA sense strand
acagaagccugaaaugaug

SEQ ID NO: 916172 - RNA, 19 nt, Homo sapiens
  misc_RNA (1)...(19): siRNA sense strand
aagaacagcucagugcuuu

SEQ ID NO: 916173 - RNA, 19 nt, Homo sapiens
  misc_RNA (1)...(19): siRNA sense strand
ggucagaaguugaucaaac

SEQ ID NO: 916174 - RNA, 19 nt, Homo sapiens
  misc_RNA (1)...(19): siRNA sense strand
ccaauucccugaucgaagu

SEQ ID NO: 916175 - RNA, 19 nt, Homo sapiens
  misc_RNA (1)...(19): siRNA sense strand
ucugagacauuucaucauu

SEQ ID NO: 916176 - RNA, 19 nt, Homo sapiens
  misc_RNA (1)...(19): siRNA sense strand
gcagagaauggacuuggua

SEQ ID NO: 916177 - RNA, 19 nt, Homo sapiens
  misc_RNA (1)...(19): siRNA sense strand
ggaggcaauucaaagaaau

SEQ ID NO: 916178 - RNA, 19 nt, Homo sapiens
  misc_RNA (1)...(19): siRNA sense strand
caucuggccugguaccaaa

SEQ ID NO: 916179 - RNA, 19 nt, Homo sapiens
  misc_RNA (1)...(19): siRNA sense strand
gaagaagcccuaauaaucc

SEQ ID NO: 916180 - RNA, 19 nt, Homo sapiens
  misc_RNA (1)...(19): siRNA sense strand
agaugacucuugugacuuu

SEQ ID NO: 916181 - RNA, 19 nt, Homo sapiens
  misc_RNA (1)...(19): siRNA sense strand
gcaugaggacuuuguggua

SEQ ID NO: 916182 - RNA, 19 nt, Homo sapiens
  misc_RNA (1)...(19): siRNA sense strand
ugaccgaauuuaccgagua

SEQ ID NO: 916183 - RNA, 19 nt, Homo sapiens
  misc_RNA (1)...(19): siRNA sense strand
gagcaaggaacuaaugaga

SEQ ID NO: 916184 - RNA, 19 nt, Homo sapiens
  misc_RNA (1)...(19): siRNA sense strand
gaucgaagugugcaaagaa

SEQ ID NO: 916185 - RNA, 19 nt, Homo sapiens
  misc_RNA (1)...(19): siRNA sense strand
gucaagauguccaaagaga

SEQ ID NO: 916186 - RNA, 19 nt, Homo sapiens
  misc_RNA (1)...(19): siRNA sense strand
ccucucaucuggccuggua

SEQ ID NO: 916187 - RNA, 19 nt, Homo sapiens
  misc_RNA (1)...(19): siRNA sense strand
ccucagguguuuccaagaa

SEQ ID NO: 916188 - RNA, 19 nt, Homo sapiens
  misc_RNA (1)...(19): siRNA sense strand
gaagaacagcucagugcuu

SEQ ID NO: 916189 - RNA, 19 nt, Homo sapiens
  misc_RNA (1)...(19): siRNA sense strand
gaugaagcucacaauguua

SEQ ID NO: 916190 - RNA, 19 nt, Homo sapiens
  misc_RNA (1)...(19): siRNA sense strand
agacaagggucagaaguug

SEQ ID NO: 916191 - RNA, 19 nt, Homo sapiens
  misc_RNA (1)...(19): siRNA sense strand
gugaacagcaacaaacuaa

SEQ ID NO: 916192 - RNA, 19 nt, Homo sapiens
  misc_RNA (1)...(19): siRNA sense strand
caguguugcugucaucuuu

SEQ ID NO: 916193 - RNA, 19 nt, Homo sapiens
  misc_RNA (1)...(19): siRNA sense strand
aaaccugacuggaggaaau

SEQ ID NO: 916194 - RNA, 19 nt, Homo sapiens
  misc_RNA (1)...(19): siRNA sense strand
caccuuggcucaccucaga

SEQ ID NO: 916195 - RNA, 19 nt, Homo sapiens
  misc_RNA (1)...(19): siRNA sense strand
ucucaacagugccaaggua

SEQ ID NO: 916196 - RNA, 19 nt, Homo sapiens
  misc_RNA (1)...(19): siRNA sense strand
gagaaucugucaccaagcu

SEQ ID NO: 916197 - RNA, 19 nt, Homo sapiens
  misc_RNA (1)...(19): siRNA sense strand
gcauuggcuugguuacuau

SEQ ID NO: 916198 - RNA, 19 nt, Homo sapiens
  misc_RNA (1)...(19): siRNA sense strand
gaaagauguugucauacac

SEQ ID NO: 916199 - RNA, 19 nt, Homo sapiens
  misc_RNA (1)...(19): siRNA sense strand
ugacaagaaucaagaacca

SEQ ID NO: 916200 - RNA, 19 nt, Homo sapiens
  misc_RNA (1)...(19): siRNA sense strand
gcagcagacucaccgagau

SEQ ID NO: 916201 - RNA, 19 nt, Homo sapiens
  misc_RNA (1)...(19): siRNA sense strand
ccuaauaauccauucagua

SEQ ID NO: 916202 - RNA, 19 nt, Homo sapiens
  misc_RNA (1)...(19): siRNA sense strand
ugacaauggcucaaagaaa

SEQ ID NO: 916203 - RNA, 19 nt, Homo sapiens
  misc_RNA (1)...(19): siRNA sense strand
gaugauaugggcuuaggaa

SEQ ID NO: 916204 - RNA, 19 nt, Homo sapiens
  misc_RNA (1)...(19): siRNA sense strand
aaaccaagaucacguucau

SEQ ID NO: 916205 - RNA, 19 nt, Homo sapiens
  misc_RNA (1)...(19): siRNA sense strand
caagauguccaaagagaau

SEQ ID NO: 916206 - RNA, 19 nt, Homo sapiens
  misc_RNA (1)...(19): siRNA sense strand
caacaaacuaagagucuau

SEQ ID NO: 916207 - RNA, 19 nt, Homo sapiens
  misc_RNA (1)...(19): siRNA sense strand
gaguagggcagcagaaaga

SEQ ID NO: 916208 - RNA, 19 nt, Homo sapiens
  misc_RNA (1)...(19): siRNA sense strand
ugucaucuuucuuuacuga

SEQ ID NO: 916209 - RNA, 19 nt, Homo sapiens
  misc_RNA (1)...(19): siRNA sense strand
gcagagaucccaggugcaa

SEQ ID NO: 916210 - RNA, 19 nt, Homo sapiens
  misc_RNA (1)...(19): siRNA sense strand
ccaccgacauuccuguuuc

SEQ ID NO: 916211 - RNA, 19 nt, Homo sapiens
  misc_RNA (1)...(19): siRNA sense strand
caacaccuuugcuucgaau

SEQ ID NO: 916212 - RNA, 19 nt, Homo sapiens
  misc_RNA (1)...(19): siRNA sense strand
gucagaaguugaucaaaca

SEQ ID NO: 916213 - RNA, 19 nt, Homo sapiens
  misc_RNA (1)...(19): siRNA sense strand
gcauacaggccacccagaa

SEQ ID NO: 916214 - RNA, 19 nt, Homo sapiens
  misc_RNA (1)...(19): siRNA sense strand
ucaguggucuuacccuuuc

SEQ ID NO: 916215 - RNA, 19 nt, Homo sapiens
  misc_RNA (1)...(19): siRNA sense strand
aagagacuguuuacaaugu

SEQ ID NO: 916216 - RNA, 19 nt, Homo sapiens
  misc_RNA (1)...(19): siRNA sense strand
ugacuuuacuucccaugga

SEQ ID NO: 916217 - RNA, 19 nt, Homo sapiens
  misc_RNA (1)...(19): siRNA sense strand
agacagaaaugaccucuua

SEQ ID NO: 916218 - RNA, 19 nt, Homo sapiens
  misc_RNA (1)...(19): siRNA sense strand
ggaagucucuugcaaauuc

SEQ ID NO: 916219 - RNA, 19 nt, Homo sapiens
  misc_RNA (1)...(19): siRNA sense strand
ggagaaacauaugcauuua

SEQ ID NO: 916220 - RNA, 19 nt, Homo sapiens
  misc_RNA (1)...(19): siRNA sense strand
ggaaauggaugaacugugu

SEQ ID NO: 916221 - RNA, 19 nt, Homo sapiens
  misc_RNA (1)...(19): siRNA sense strand
gaacacaaauugaagaaag

SEQ ID NO: 916222 - RNA, 19 nt, Homo sapiens
  misc_RNA (1)...(19): siRNA sense strand
gagagaggguggaucauaa

SEQ ID NO: 916223 - RNA, 19 nt, Homo sapiens
  misc_RNA (1)...(19): siRNA sense strand
gauagcuucuggccaauua

SEQ ID NO: 916224 - RNA, 19 nt, Homo sapiens
  misc_RNA (1)...(19): siRNA sense strand
gaacagucaugcuggauau

SEQ ID NO: 916225 - RNA, 19 nt, Homo sapiens
  misc_RNA (1)...(19): siRNA sense strand
gaaaggaacacaaauugaa

SEQ ID NO: 916226 - RNA, 19 nt, Homo sapiens
  misc_RNA (1)...(19): siRNA sense strand
uggagaagcucuuugauuu

SEQ ID NO: 916227 - RNA, 19 nt, Homo sapiens
  misc_RNA (1)...(19): siRNA sense strand
ugaaauagcagauauggua

SEQ ID NO: 916228 - RNA, 19 nt, Homo sapiens
  misc_RNA (1)...(19): siRNA sense strand
gagaaagauuccuguguuu

SEQ ID NO: 916229 - RNA, 19 nt, Homo sapiens
  misc_RNA (1)...(19): siRNA sense strand
uuacagagauggagaagaa

SEQ ID NO: 916230 - RNA, 19 nt, Homo sapiens
  misc_RNA (1)...(19): siRNA sense strand
gagcacagguccaguucua

SEQ ID NO: 916231 - RNA, 19 nt, Homo sapiens
  misc_RNA (1)...(19): siRNA sense strand
cuagauggcugaaauuuga

SEQ ID NO: 916232 - RNA, 19 nt, Homo sapiens
  misc_RNA (1)...(19): siRNA sense strand
caugaugguucuugcauua

SEQ ID NO: 916233 - RNA, 19 nt, Homo sapiens
  misc_RNA (1)...(19): siRNA sense strand
gaaguuaccugguccugau

SEQ ID NO: 916234 - RNA, 19 nt, Homo sapiens
  misc_RNA (1)...(19): siRNA sense strand
gaaaggagcuggcuaucac

SEQ ID NO: 916235 - RNA, 19 nt, Homo sapiens
  misc_RNA (1)...(19): siRNA sense strand
gcacaacaacuuagauaaa

SEQ ID NO: 916236 - RNA, 19 nt, Homo sapiens
  misc_RNA (1)...(19): siRNA sense strand
uaacugggauugccuauuc

SEQ ID NO: 916237 - RNA, 19 nt, Homo sapiens
  misc_RNA (1)...(19): siRNA sense strand
ugacuuaacuccagguauu

SEQ ID NO: 916238 - RNA, 19 nt, Homo sapiens
  misc_RNA (1)...(19): siRNA sense strand
ggaaagaaacugcuagaug

SEQ ID NO: 916239 - RNA, 19 nt, Homo sapiens
  misc_RNA (1)...(19): siRNA sense strand
gaagaugaaccaagaaaga

SEQ ID NO: 916240 - RNA, 19 nt, Homo sapiens
  misc_RNA (1)...(19): siRNA sense strand
ugaagaagcuguuguggau

SEQ ID NO: 916241 - RNA, 19 nt, Homo sapiens
  misc_RNA (1)...(19): siRNA sense strand
ggagaagcucuuugauuua

SEQ ID NO: 916242 - RNA, 19 nt, Homo sapiens
  misc_RNA (1)...(19): siRNA sense strand
gagaggagaaucaccuuua

SEQ ID NO: 916243 - RNA, 19 nt, Homo sapiens
  misc_RNA (1)...(19): siRNA sense strand
caacaaaucacagcuguaa

SEQ ID NO: 916244 - RNA, 19 nt, Homo sapiens
  misc_RNA (1)...(19): siRNA sense strand
uaugggaguuuccucauua

SEQ ID NO: 916245 - RNA, 19 nt, Homo sapiens
  misc_RNA (1)...(19): siRNA sense strand
gggaaucuccuucuuauga

SEQ ID NO: 916246 - RNA, 19 nt, Homo sapiens
  misc_RNA (1)...(19): siRNA sense strand
uagauaaacugaccagcua

SEQ ID NO: 916247 - RNA, 19 nt, Homo sapiens
  misc_RNA (1)...(19): siRNA sense strand
gguauuagacaacaugaua

SEQ ID NO: 916248 - RNA, 19 nt, Homo sapiens
  misc_RNA (1)...(19): siRNA sense strand
guggagaaauuaaagguaa

SEQ ID NO: 916249 - RNA, 19 nt, Homo sapiens
  misc_RNA (1)...(19): siRNA sense strand
gaagaacuagaaagucaua

SEQ ID NO: 916250 - RNA, 19 nt, Homo sapiens
  misc_RNA (1)...(19): siRNA sense strand
gagaagcucuuugauuuag

SEQ ID NO: 916251 - RNA, 19 nt, Homo sapiens
  misc_RNA (1)...(19): siRNA sense strand
gaagagacaucaucaucag

SEQ ID NO: 916252 - RNA, 19 nt, Homo sapiens
  misc_RNA (1)...(19): siRNA sense strand
gaaucuccuucuuaugaua

SEQ ID NO: 916253 - RNA, 19 nt, Homo sapiens
  misc_RNA (1)...(19): siRNA sense strand
caaugaaacucuagcacaa

SEQ ID NO: 916254 - RNA, 19 nt, Homo sapiens
  misc_RNA (1)...(19): siRNA sense strand
gaagaaaggagcuggcuau

SEQ ID NO: 916255 - RNA, 19 nt, Homo sapiens
  misc_RNA (1)...(19): siRNA sense strand
uagcagauaugguauuaga

SEQ ID NO: 916256 - RNA, 19 nt, Homo sapiens
  misc_RNA (1)...(19): siRNA sense strand
gcgaggagcagaagaauga

SEQ ID NO: 916257 - RNA, 19 nt, Homo sapiens
  misc_RNA (1)...(19): siRNA sense strand
gaccuuauauuccagaugu

SEQ ID NO: 916258 - RNA, 19 nt, Homo sapiens
  misc_RNA (1)...(19): siRNA sense strand
ugaagaugaugaugaagaa

SEQ ID NO: 916259 - RNA, 19 nt, Homo sapiens
  misc_RNA (1)...(19): siRNA sense strand
caaaucacagcuguaauua

SEQ ID NO: 916260 - RNA, 19 nt, Homo sapiens
  misc_RNA (1)...(19): siRNA sense strand
caugaucucuucacggaaa

SEQ ID NO: 916261 - RNA, 19 nt, Homo sapiens
  misc_RNA (1)...(19): siRNA sense strand
gaucuuaugccagaaagua

SEQ ID NO: 916262 - RNA, 19 nt, Homo sapiens
  misc_RNA (1)...(19): siRNA sense strand
gcacaauggaagaaagaua

SEQ ID NO: 916263 - RNA, 19 nt, Homo sapiens
  misc_RNA (1)...(19): siRNA sense strand
agagaaagauuccuguguu

SEQ ID NO: 916264 - RNA, 19 nt, Homo sapiens
  misc_RNA (1)...(19): siRNA sense strand
gaaacuuggacaauaguaa

SEQ ID NO: 916265 - RNA, 19 nt, Homo sapiens
  misc_RNA (1)...(19): siRNA sense strand
aagaagaacuagaaaguca

SEQ ID NO: 916266 - RNA, 19 nt, Homo sapiens
  misc_RNA (1)...(19): siRNA sense strand
guaccauucucaucuuuau

SEQ ID NO: 916267 - RNA, 19 nt, Homo sapiens
  misc_RNA (1)...(19): siRNA sense strand
cagaauaagugcaauagag

SEQ ID NO: 916268 - RNA, 19 nt, Homo sapiens
  misc_RNA (1)...(19): siRNA sense strand
ugaagaggauguugaagau

SEQ ID NO: 916269 - RNA, 19 nt, Homo sapiens
  misc_RNA (1)...(19): siRNA sense strand
ggacgggaaucuccuucuu

SEQ ID NO: 916270 - RNA, 19 nt, Homo sapiens
  misc_RNA (1)...(19): siRNA sense strand
gacccucacuugcuugaaa

SEQ ID NO: 916271 - RNA, 19 nt, Homo sapiens
  misc_RNA (1)...(19): siRNA sense strand
gaagcucuuugauuuagga

SEQ ID NO: 916272 - RNA, 19 nt, Homo sapiens
  misc_RNA (1)...(19): siRNA sense strand
cugcagagauuaucaacuu

SEQ ID NO: 916273 - RNA, 19 nt, Homo sapiens
  misc_RNA (1)...(19): siRNA sense strand
gcaagguugauaugaauuu

SEQ ID NO: 916274 - RNA, 19 nt, Homo sapiens
  misc_RNA (1)...(19): siRNA sense strand
gagcaagcacucuagauga

SEQ ID NO: 916275 - RNA, 19 nt, Homo sapiens
  misc_RNA (1)...(19): siRNA sense strand
aaacagaaaggaacacaaa

SEQ ID NO: 916276 - RNA, 19 nt, Homo sapiens
  misc_RNA (1)...(19): siRNA sense strand
gcaccacaguaccaugaaa

SEQ ID NO: 916277 - RNA, 19 nt, Homo sapiens
  misc_RNA (1)...(19): siRNA sense strand
gauauaggcaagaaacauu

SEQ ID NO: 916278 - RNA, 19 nt, Homo sapiens
  misc_RNA (1)...(19): siRNA sense strand
ggaguugcauccucaaugg

SEQ ID NO: 916279 - RNA, 19 nt, Homo sapiens
  misc_RNA (1)...(19): siRNA sense strand
gcucaugguuggcguuaug

SEQ ID NO: 916280 - RNA, 19 nt, Homo sapiens
  misc_RNA (1)...(19): siRNA sense strand
ccaaaucccagcaaugaaa

SEQ ID NO: 916281 - RNA, 19 nt, Homo sapiens
  misc_RNA (1)...(19): siRNA sense strand
gcucuuugauuuaggagaa

SEQ ID NO: 916282 - RNA, 19 nt, Homo sapiens
  misc_RNA (1)...(19): siRNA sense strand
agagugggauccuucuaua

SEQ ID NO: 916283 - RNA, 19 nt, Homo sapiens
  misc_RNA (1)...(19): siRNA sense strand
ccuggaaacuuggacaaua

SEQ ID NO: 916284 - RNA, 19 nt, Homo sapiens
  misc_RNA (1)...(19): siRNA sense strand
guacugaagaugaugauga

SEQ ID NO: 916285 - RNA, 19 nt, Homo sapiens
  misc_RNA (1)...(19): siRNA sense strand
caucauggaccuuauauuc

SEQ ID NO: 916286 - RNA, 19 nt, Homo sapiens
  misc_RNA (1)...(19): siRNA sense strand
uaacagcacacaauauuuc

SEQ ID NO: 916287 - RNA, 19 nt, Homo sapiens
  misc_RNA (1)...(19): siRNA sense strand
cagcaagguugauaugaau

SEQ ID NO: 916288 - RNA, 19 nt, Homo sapiens
  misc_RNA (1)...(19): siRNA sense strand
ucagcaagguugauaugaa

SEQ ID NO: 916289 - RNA, 19 nt, Homo sapiens
  misc_RNA (1)...(19): siRNA sense strand
ccaauuagacgaguccaua

SEQ ID NO: 916290 - RNA, 19 nt, Homo sapiens
  misc_RNA (1)...(19): siRNA sense strand
ggaaucuccuucuuaugau

SEQ ID NO: 916291 - RNA, 19 nt, Homo sapiens
  misc_RNA (1)...(19): siRNA sense strand
acaaaucacagcuguaauu

SEQ ID NO: 916292 - RNA, 19 nt, Homo sapiens
  misc_RNA (1)...(19): siRNA sense strand
aaaacuagcucaacuguga

SEQ ID NO: 916293 - RNA, 19 nt, Homo sapiens
  misc_RNA (1)...(19): siRNA sense strand
gauugccuauucauuguuu

SEQ ID NO: 916294 - RNA, 19 nt, Homo sapiens
  misc_RNA (1)...(19): siRNA sense strand
gcucaacugugaacaccaa

SEQ ID NO: 916295 - RNA, 19 nt, Homo sapiens
  misc_RNA (1)...(19): siRNA sense strand
ggaacagucaugcuggaua

SEQ ID NO: 916296 - RNA, 19 nt, Homo sapiens
  misc_RNA (1)...(19): siRNA sense strand
gauuucgucuggagaagaa

SEQ ID NO: 916297 - RNA, 19 nt, Homo sapiens
  misc_RNA (1)...(19): siRNA sense strand
cagaaaggaacacaaauug

SEQ ID NO: 916298 - RNA, 19 nt, Homo sapiens
  misc_RNA (1)...(19): siRNA sense strand
agccuuguguguuauauua

SEQ ID NO: 916299 - RNA, 19 nt, Homo sapiens
  misc_RNA (1)...(19): siRNA sense strand
ugggcaaccucuaacaaua

SEQ ID NO: 916300 - RNA, 19 nt, Homo sapiens
  misc_RNA (1)...(19): siRNA sense strand
ccucuuaucuggaauugau

SEQ ID NO: 916301 - RNA, 19 nt, Homo sapiens
  misc_RNA (1)...(19): siRNA sense strand
ugaggaaaauguugacuua

SEQ ID NO: 916302 - RNA, 19 nt, Homo sapiens
  misc_RNA (1)...(19): siRNA sense strand
gggauugccuauucauugu

SEQ ID NO: 916303 - RNA, 19 nt, Homo sapiens
  misc_RNA (1)...(19): siRNA sense strand
gagagucgucggcgucaua

SEQ ID NO: 916304 - RNA, 19 nt, Homo sapiens
  misc_RNA (1)...(19): siRNA sense strand
gcccuuauuugcaucauau

SEQ ID NO: 916305 - RNA, 19 nt, Homo sapiens
  misc_RNA (1)...(19): siRNA sense strand
ggcaaccucuaacaauauu

SEQ ID NO: 916306 - RNA, 19 nt, Homo sapiens
  misc_RNA (1)...(19): siRNA sense strand
gagaagaauaugaauggaa

SEQ ID NO: 916307 - RNA, 19 nt, Homo sapiens
  misc_RNA (1)...(19): siRNA sense strand
cacaauauuuccuggagaa

SEQ ID NO: 916308 - RNA, 19 nt, Homo sapiens
  misc_RNA (1)...(19): siRNA sense strand
ugacuucaaggaugcauua

SEQ ID NO: 916309 - RNA, 19 nt, Homo sapiens
  misc_RNA (1)...(19): siRNA sense strand
gcagauaugguauuagaca

SEQ ID NO: 916310 - RNA, 19 nt, Homo sapiens
  misc_RNA (1)...(19): siRNA sense strand
gcugaaauuugaagaggau

SEQ ID NO: 916311 - RNA, 19 nt, Homo sapiens
  misc_RNA (1)...(19): siRNA sense strand
aaaggaauccaguuauuug

SEQ ID NO: 916312 - RNA, 19 nt, Homo sapiens
  misc_RNA (1)...(19): siRNA sense strand
uccaugauguagcuuauaa

SEQ ID NO: 916313 - RNA, 19 nt, Homo sapiens
  misc_RNA (1)...(19): siRNA sense strand
gauauucccacaguaguaa

SEQ ID NO: 916314 - RNA, 19 nt, Homo sapiens
  misc_RNA (1)...(19): siRNA sense strand
gccuguaugucuccuguaa

SEQ ID NO: 916315 - RNA, 19 nt, Homo sapiens
  misc_RNA (1)...(19): siRNA sense strand
gaaauacguggaugcugaa

SEQ ID NO: 916316 - RNA, 19 nt, Homo sapiens
  misc_RNA (1)...(19): siRNA sense strand
gaaggcagaauaagugcaa

SEQ ID NO: 916317 - RNA, 19 nt, Homo sapiens
  misc_RNA (1)...(19): siRNA sense strand
uaaagaagcuuaaccgauu

SEQ ID NO: 916318 - RNA, 19 nt, Homo sapiens
  misc_RNA (1)...(19): siRNA sense strand
gaaaguagaugccuaucau

SEQ ID NO: 916319 - RNA, 19 nt, Homo sapiens
  misc_RNA (1)...(19): siRNA sense strand
ggaugaagccauuuaaaua

SEQ ID NO: 916320 - RNA, 19 nt, Homo sapiens
  misc_RNA (1)...(19): siRNA sense strand
gcaaggauguggcaauaga

SEQ ID NO: 916321 - RNA, 19 nt, Homo sapiens
  misc_RNA (1)...(19): siRNA sense strand
gcaaggagaugcugaagag

SEQ ID NO: 916322 - RNA, 19 nt, Homo sapiens
  misc_RNA (1)...(19): siRNA sense strand
aaauugaucuggucaguuu

SEQ ID NO: 916323 - RNA, 19 nt, Homo sapiens
  misc_RNA (1)...(19): siRNA sense strand
cagcaacgaugacaacauu

SEQ ID NO: 916324 - RNA, 19 nt, Homo sapiens
  misc_RNA (1)...(19): siRNA sense strand
agaaggagaucaccaaaug

SEQ ID NO: 916325 - RNA, 19 nt, Homo sapiens
  misc_RNA (1)...(19): siRNA sense strand
ggaaaaggcuggcagagaa

SEQ ID NO: 916326 - RNA, 19 nt, Homo sapiens
  misc_RNA (1)...(19): siRNA sense strand
uggcagagacuaugaguua

SEQ ID NO: 916327 - RNA, 19 nt, Homo sapiens
  misc_RNA (1)...(19): siRNA sense strand
gcagagacuaugaguuaua

SEQ ID NO: 916328 - RNA, 19 nt, Homo sapiens
  misc_RNA (1)...(19): siRNA sense strand
gcaggaagguaaauacuac

SEQ ID NO: 916329 - RNA, 19 nt, Homo sapiens
  misc_RNA (1)...(19): siRNA sense strand
gagagugccuaucuaacaa

SEQ ID NO: 916330 - RNA, 19 nt, Homo sapiens
  misc_RNA (1)...(19): siRNA sense strand
aaagaagcuuaaccgauua

SEQ ID NO: 916331 - RNA, 19 nt, Homo sapiens
  misc_RNA (1)...(19): siRNA sense strand
ggauguggcaauagaaaua

SEQ ID NO: 916332 - RNA, 19 nt, Homo sapiens
  misc_RNA (1)...(19): siRNA sense strand
gcacuucaccaaagacauu

SEQ ID NO: 916333 - RNA, 19 nt, Homo sapiens
  misc_RNA (1)...(19): siRNA sense strand
gucaaagcaugaagaaauu

SEQ ID NO: 916334 - RNA, 19 nt, Homo sapiens
  misc_RNA (1)...(19): siRNA sense strand
gaccugaagugcaaagaug

SEQ ID NO: 916335 - RNA, 19 nt, Homo sapiens
  misc_RNA (1)...(19): siRNA sense strand
ccagaggacucccaagaug

SEQ ID NO: 916336 - RNA, 19 nt, Homo sapiens
  misc_RNA (1)...(19): siRNA sense strand
uccagaaccuguuguauga

SEQ ID NO: 916337 - RNA, 19 nt, Homo sapiens
  misc_RNA (1)...(19): siRNA sense strand
ggacaccaaucucuacuac

SEQ ID NO: 916338 - RNA, 19 nt, Homo sapiens
  misc_RNA (1)...(19): siRNA sense strand
gagcugcacuucaccaaag

SEQ ID NO: 916339 - RNA, 19 nt, Homo sapiens
  misc_RNA (1)...(19): siRNA sense strand
gggcaggccugugauaaga

SEQ ID NO: 916340 - RNA, 19 nt, Homo sapiens
  misc_RNA (1)...(19): siRNA sense strand
gcagagaaguaccgagagu

SEQ ID NO: 916341 - RNA, 19 nt, Homo sapiens
  misc_RNA (1)...(19): siRNA sense strand
ccacgaggcuaagcagaaa

SEQ ID NO: 916342 - RNA, 19 nt, Homo sapiens
  misc_RNA (1)...(19): siRNA sense strand
gcagaaaguagaugccuau

SEQ ID NO: 916343 - RNA, 19 nt, Homo sapiens
  misc_RNA (1)...(19): siRNA sense strand
gaaggaaagcggaaucgau

SEQ ID NO: 916344 - RNA, 19 nt, Homo sapiens
  misc_RNA (1)...(19): siRNA sense strand
uggcaaggauguggcaaua

SEQ ID NO: 916345 - RNA, 19 nt, Homo sapiens
  misc_RNA (1)...(19): siRNA sense strand
gcugauggcugagauccaa

SEQ ID NO: 916346 - RNA, 19 nt, Homo sapiens
  misc_RNA (1)...(19): siRNA sense strand
aaacggaagcccaaaguga

SEQ ID NO: 916347 - RNA, 19 nt, Homo sapiens
  misc_RNA (1)...(19): siRNA sense strand
gggagacccucaccagcaa

SEQ ID NO: 916348 - RNA, 19 nt, Homo sapiens
  misc_RNA (1)...(19): siRNA sense strand
gaugaagccauuuaaauac

SEQ ID NO: 916349 - RNA, 19 nt, Homo sapiens
  misc_RNA (1)...(19): siRNA sense strand
acaccaaucucuacuacau

SEQ ID NO: 916350 - RNA, 19 nt, Homo sapiens
  misc_RNA (1)...(19): siRNA sense strand
ggcaauagaaauagaagaa

SEQ ID NO: 916351 - RNA, 19 nt, Homo sapiens
  misc_RNA (1)...(19): siRNA sense strand
gcaggaugaagccauuuaa

SEQ ID NO: 916352 - RNA, 19 nt, Homo sapiens
  misc_RNA (1)...(19): siRNA sense strand
gaauccagccaaucaguau

SEQ ID NO: 916353 - RNA, 19 nt, Homo sapiens
  misc_RNA (1)...(19): siRNA sense strand
agauugaggugaagaagga

SEQ ID NO: 916354 - RNA, 19 nt, Homo sapiens
  misc_RNA (1)...(19): siRNA sense strand
gaaagcggaaucgaucuga

SEQ ID NO: 916355 - RNA, 19 nt, Homo sapiens
  misc_RNA (1)...(19): siRNA sense strand
cuacauggcgcucaucgaa

SEQ ID NO: 916356 - RNA, 19 nt, Homo sapiens
  misc_RNA (1)...(19): siRNA sense strand
gagcgacuauguacuugag

SEQ ID NO: 916357 - RNA, 19 nt, Homo sapiens
  misc_RNA (1)...(19): siRNA sense strand
gccaaucaguaucaguuug

SEQ ID NO: 916358 - RNA, 19 nt, Homo sapiens
  misc_RNA (1)...(19): siRNA sense strand
caacugccauggagcugau

SEQ ID NO: 916359 - RNA, 19 nt, Homo sapiens
  misc_RNA (1)...(19): siRNA sense strand
gaaauugaucuggucaguu

SEQ ID NO: 916360 - RNA, 19 nt, Homo sapiens
  misc_RNA (1)...(19): siRNA sense strand
ccucuucccugccaagguu

SEQ ID NO: 916361 - RNA, 19 nt, Homo sapiens
  misc_RNA (1)...(19): siRNA sense strand
ucaccugacuuucuacuac

SEQ ID NO: 916362 - RNA, 19 nt, Homo sapiens
  misc_RNA (1)...(19): siRNA sense strand
gacguuaucuguggcaauc

SEQ ID NO: 916363 - RNA, 19 nt, Homo sapiens
  misc_RNA (1)...(19): siRNA sense strand
cgagagugccuaucuaaca

SEQ ID NO: 916364 - RNA, 19 nt, Homo sapiens
  misc_RNA (1)...(19): siRNA sense strand
gagacuaugaguuauacaa

SEQ ID NO: 916365 - RNA, 19 nt, Homo sapiens
  misc_RNA (1)...(19): siRNA sense strand
gaagaggcacccacugucu

SEQ ID NO: 916366 - RNA, 19 nt, Homo sapiens
  misc_RNA (1)...(19): siRNA sense strand
caaagcaugaagaaauuga

SEQ ID NO: 916367 - RNA, 19 nt, Homo sapiens
  misc_RNA (1)...(19): siRNA sense strand
gugcauuucaugacucuaa

SEQ ID NO: 916368 - RNA, 19 nt, Homo sapiens
  misc_RNA (1)...(19): siRNA sense strand
gccaccagcuguugaccaa

SEQ ID NO: 916369 - RNA, 19 nt, Homo sapiens
  misc_RNA (1)...(19): siRNA sense strand
ccuagaacauggcauugug

SEQ ID NO: 916370 - RNA, 19 nt, Homo sapiens
  misc_RNA (1)...(19): siRNA sense strand
ccaaucaguaucaguuuga

SEQ ID NO: 916371 - RNA, 19 nt, Homo sapiens
  misc_RNA (1)...(19): siRNA sense strand
agucaaagcaugaagaaau

SEQ ID NO: 916372 - RNA, 19 nt, Homo sapiens
  misc_RNA (1)...(19): siRNA sense strand
cgagagccaugacgacagu

SEQ ID NO: 916373 - RNA, 19 nt, Homo sapiens
  misc_RNA (1)...(19): siRNA sense strand
gacuaugaguuauacaagu

SEQ ID NO: 916374 - RNA, 19 nt, Homo sapiens
  misc_RNA (1)...(19): siRNA sense strand
acaccgagcaggaagguaa

SEQ ID NO: 916375 - RNA, 19 nt, Homo sapiens
  misc_RNA (1)...(19): siRNA sense strand
gaagaaaggaagagaucag

SEQ ID NO: 916376 - RNA, 19 nt, Homo sapiens
  misc_RNA (1)...(19): siRNA sense strand
gugugcugcuggauguuua

SEQ ID NO: 916377 - RNA, 19 nt, Homo sapiens
  misc_RNA (1)...(19): siRNA sense strand
cgaaggcaguguggaugaa

SEQ ID NO: 916378 - RNA, 19 nt, Homo sapiens
  misc_RNA (1)...(19): siRNA sense strand
gaaggagaucaccaaaugu

SEQ ID NO: 916379 - RNA, 19 nt, Homo sapiens
  misc_RNA (1)...(19): siRNA sense strand
ccagagcugugugcauuuc

SEQ ID NO: 916380 - RNA, 19 nt, Homo sapiens
  misc_RNA (1)...(19): siRNA sense strand
cgaauccagccaaucagua

SEQ ID NO: 916381 - RNA, 19 nt, Homo sapiens
  misc_RNA (1)...(19): siRNA sense strand
caucagugcaggugacuug

SEQ ID NO: 916382 - RNA, 19 nt, Homo sapiens
  misc_RNA (1)...(19): siRNA sense strand
ccaaggcucuguucaaacc

SEQ ID NO: 916383 - RNA, 19 nt, Homo sapiens
  misc_RNA (1)...(19): siRNA sense strand
uaagucaaagcaugaagaa

SEQ ID NO: 916384 - RNA, 19 nt, Homo sapiens
  misc_RNA (1)...(19): siRNA sense strand
cacaucagguugaagaaag

SEQ ID NO: 916385 - RNA, 19 nt, Homo sapiens
  misc_RNA (1)...(19): siRNA sense strand
uuucaugacucuaaagaag

SEQ ID NO: 916386 - RNA, 19 nt, Homo sapiens
  misc_RNA (1)...(19): siRNA sense strand
gaagugcaaagaugacagu

SEQ ID NO: 916387 - RNA, 19 nt, Homo sapiens
  misc_RNA (1)...(19): siRNA sense strand
cuagcaggaugaagccauu

SEQ ID NO: 916388 - RNA, 19 nt, Homo sapiens
  misc_RNA (1)...(19): siRNA sense strand
caacagcaacgaugacaac

SEQ ID NO: 916389 - RNA, 19 nt, Homo sapiens
  misc_RNA (1)...(19): siRNA sense strand
ucaacaucaugacaguaaa

SEQ ID NO: 916390 - RNA, 19 nt, Homo sapiens
  misc_RNA (1)...(19): siRNA sense strand
gaaccucaacaucaugaca

SEQ ID NO: 916391 - RNA, 19 nt, Homo sapiens
  misc_RNA (1)...(19): siRNA sense strand
aaaccaacagcaacgauga

SEQ ID NO: 916392 - RNA, 19 nt, Homo sapiens
  misc_RNA (1)...(19): siRNA sense strand
ucucucgccuggugaaaug

SEQ ID NO: 916393 - RNA, 19 nt, Homo sapiens
  misc_RNA (1)...(19): siRNA sense strand
gauuagcccacaucagguu

SEQ ID NO: 916394 - RNA, 19 nt, Homo sapiens
  misc_RNA (1)...(19): siRNA sense strand
gaagccauuuaaauacaac

SEQ ID NO: 916395 - RNA, 19 nt, Homo sapiens
  misc_RNA (1)...(19): siRNA sense strand
cagagacuaugaguuauac

SEQ ID NO: 916396 - RNA, 19 nt, Homo sapiens
  misc_RNA (1)...(19): siRNA sense strand
gagaccaccaugaaacuuc

SEQ ID NO: 916397 - RNA, 19 nt, Homo sapiens
  misc_RNA (1)...(19): siRNA sense strand
ggccugugauaagacguua

SEQ ID NO: 916398 - RNA, 19 nt, Homo sapiens
  misc_RNA (1)...(19): siRNA sense strand
ccacaucagguugaagaaa

SEQ ID NO: 916399 - RNA, 19 nt, Homo sapiens
  misc_RNA (1)...(19): siRNA sense strand
ggaaagcggaaucgaucug

SEQ ID NO: 916400 - RNA, 19 nt, Homo sapiens
  misc_RNA (1)...(19): siRNA sense strand
guuggcauccugacuuuga

SEQ ID NO: 916401 - RNA, 19 nt, Homo sapiens
  misc_RNA (1)...(19): siRNA sense strand
cagaggacucccaagauga

SEQ ID NO: 916402 - RNA, 19 nt, Homo sapiens
  misc_RNA (1)...(19): siRNA sense strand
guaccgagagugccuaucu

SEQ ID NO: 916403 - RNA, 19 nt, Homo sapiens
  misc_RNA (1)...(19): siRNA sense strand
ugaugcaccuacagaagga

SEQ ID NO: 916404 - RNA, 19 nt, Homo sapiens
  misc_RNA (1)...(19): siRNA sense strand
gcccacaucagguugaaga

SEQ ID NO: 916405 - RNA, 19 nt, Homo sapiens
  misc_RNA (1)...(19): siRNA sense strand
acauggcgcucaucgaaag

SEQ ID NO: 916406 - RNA, 19 nt, Homo sapiens
  misc_RNA (1)...(19): siRNA sense strand
ggagcugcacuucaccaaa

SEQ ID NO: 916407 - RNA, 19 nt, Homo sapiens
  misc_RNA (1)...(19): siRNA sense strand
cagccaaucaguaucaguu

SEQ ID NO: 916408 - RNA, 19 nt, Homo sapiens
  misc_RNA (1)...(19): siRNA sense strand
uaccgagagugccuaucua

SEQ ID NO: 916409 - RNA, 19 nt, Homo sapiens
  misc_RNA (1)...(19): siRNA sense strand
aaggagaucaccaaauguu

SEQ ID NO: 916410 - RNA, 19 nt, Homo sapiens
  misc_RNA (1)...(19): siRNA sense strand
caggaugaagccauuuaaa

SEQ ID NO: 916411 - RNA, 19 nt, Homo sapiens
  misc_RNA (1)...(19): siRNA sense strand
ggagggcgaagucaaugug

SEQ ID NO: 916412 - RNA, 19 nt, Homo sapiens
  misc_RNA (1)...(19): siRNA sense strand
agaaauugaucuggucagu

SEQ ID NO: 916413 - RNA, 19 nt, Homo sapiens
  misc_RNA (1)...(19): siRNA sense strand
ggcagagacuaugaguuau

SEQ ID NO: 916414 - RNA, 19 nt, Homo sapiens
  misc_RNA (1)...(19): siRNA sense strand
gagcagggguggcaaggau

SEQ ID NO: 916415 - RNA, 19 nt, Homo sapiens
  misc_RNA (1)...(19): siRNA sense strand
cguaugggcaggccuguga

SEQ ID NO: 916416 - RNA, 19 nt, Homo sapiens
  misc_RNA (1)...(19): siRNA sense strand
uagaggaguuuuauaagga

SEQ ID NO: 916417 - RNA, 19 nt, Homo sapiens
  misc_RNA (1)...(19): siRNA sense strand
ugaggaagcuccggaaaua

SEQ ID NO: 916418 - RNA, 19 nt, Homo sapiens
  misc_RNA (1)...(19): siRNA sense strand
ggaaaggacuguuuuauug

SEQ ID NO: 916419 - RNA, 19 nt, Homo sapiens
  misc_RNA (1)...(19): siRNA sense strand
gaaagcgucucuacaaagu

SEQ ID NO: 916420 - RNA, 19 nt, Homo sapiens
  misc_RNA (1)...(19): siRNA sense strand
gaauuaggaaggacuauuu

SEQ ID NO: 916421 - RNA, 19 nt, Homo sapiens
  misc_RNA (1)...(19): siRNA sense strand
uugaagaccuccugaauga

SEQ ID NO: 916422 - RNA, 19 nt, Homo sapiens
  misc_RNA (1)...(19): siRNA sense strand
ugaaugaacuggacacaca

SEQ ID NO: 916423 - RNA, 19 nt, Homo sapiens
  misc_RNA (1)...(19): siRNA sense strand
cagaaagcgucucuacaaa

SEQ ID NO: 916424 - RNA, 19 nt, Homo sapiens
  misc_RNA (1)...(19): siRNA sense strand
gagacgcgcugucccagaa

SEQ ID NO: 916425 - RNA, 19 nt, Homo sapiens
  misc_RNA (1)...(19): siRNA sense strand
gaagggaggcggcagaaga

SEQ ID NO: 916426 - RNA, 19 nt, Homo sapiens
  misc_RNA (1)...(19): siRNA sense strand
gaacagaaagcgucucuac

SEQ ID NO: 916427 - RNA, 19 nt, Homo sapiens
  misc_RNA (1)...(19): siRNA sense strand
aagaugagaucccagagaa

SEQ ID NO: 916428 - RNA, 19 nt, Homo sapiens
  misc_RNA (1)...(19): siRNA sense strand
uggaggagcugaccaaagu

SEQ ID NO: 916429 - RNA, 19 nt, Homo sapiens
  misc_RNA (1)...(19): siRNA sense strand
gaagaugagaucccagaga

SEQ ID NO: 916430 - RNA, 19 nt, Homo sapiens
  misc_RNA (1)...(19): siRNA sense strand
gaagaaacgcagggaguga

SEQ ID NO: 916431 - RNA, 19 nt, Homo sapiens
  misc_RNA (1)...(19): siRNA sense strand
gaagaauuaggaaggacua

SEQ ID NO: 916432 - RNA, 19 nt, Homo sapiens
  misc_RNA (1)...(19): siRNA sense strand
acagaaagcgucucuacaa

SEQ ID NO: 916433 - RNA, 19 nt, Homo sapiens
  misc_RNA (1)...(19): siRNA sense strand
gcaaggcugggaagaaaga

SEQ ID NO: 916434 - RNA, 19 nt, Homo sapiens
  misc_RNA (1)...(19): siRNA sense strand
cgaggcaguugcuaacaga

SEQ ID NO: 916435 - RNA, 19 nt, Homo sapiens
  misc_RNA (1)...(19): siRNA sense strand
uagagcugcugaugacuga

SEQ ID NO: 916436 - RNA, 19 nt, Homo sapiens
  misc_RNA (1)...(19): siRNA sense strand
aagcgucucuacaaaguga

SEQ ID NO: 916437 - RNA, 19 nt, Homo sapiens
  misc_RNA (1)...(19): siRNA sense strand
gaagaccuccugaaugaac

SEQ ID NO: 916438 - RNA, 19 nt, Homo sapiens
  misc_RNA (1)...(19): siRNA sense strand
ggcagaagaagacgaagaa

SEQ ID NO: 916439 - RNA, 19 nt, Homo sapiens
  misc_RNA (1)...(19): siRNA sense strand
agaagcgucugcucagguu

SEQ ID NO: 916440 - RNA, 19 nt, Homo sapiens
  misc_RNA (1)...(19): siRNA sense strand
agaagaagacgaagaagca

SEQ ID NO: 916441 - RNA, 19 nt, Homo sapiens
  misc_RNA (1)...(19): siRNA sense strand
caggaagaauuaggaagga

SEQ ID NO: 916442 - RNA, 19 nt, Homo sapiens
  misc_RNA (1)...(19): siRNA sense strand
ugaagguucugaagaugca

SEQ ID NO: 916443 - RNA, 19 nt, Homo sapiens
  misc_RNA (1)...(19): siRNA sense strand
ggcugcgccuggauaaauu

SEQ ID NO: 916444 - RNA, 19 nt, Homo sapiens
  misc_RNA (1)...(19): siRNA sense strand
augcaaggcugggaagaaa

SEQ ID NO: 916445 - RNA, 19 nt, Homo sapiens
  misc_RNA (1)...(19): siRNA sense strand
gagggaaaggugagaagga

SEQ ID NO: 916446 - RNA, 19 nt, Homo sapiens
  misc_RNA (1)...(19): siRNA sense strand
gaugcaaggcugggaagaa

SEQ ID NO: 916447 - RNA, 19 nt, Homo sapiens
  misc_RNA (1)...(19): siRNA sense strand
uccaggagccggagaagaa

SEQ ID NO: 916448 - RNA, 19 nt, Homo sapiens
  misc_RNA (1)...(19): siRNA sense strand
gcgccuggauaaauucuac

SEQ ID NO: 916449 - RNA, 19 nt, Homo sapiens
  misc_RNA (1)...(19): siRNA sense strand
gagcugcugaugacugaga

SEQ ID NO: 916450 - RNA, 19 nt, Homo sapiens
  misc_RNA (1)...(19): siRNA sense strand
gguguggaaaggacuguuu

SEQ ID NO: 916451 - RNA, 19 nt, Homo sapiens
  misc_RNA (1)...(19): siRNA sense strand
acgacgagcugcugaaggu

SEQ ID NO: 916452 - RNA, 19 nt, Homo sapiens
  misc_RNA (1)...(19): siRNA sense strand
gaccagugcccgagcaaag

SEQ ID NO: 916453 - RNA, 19 nt, Homo sapiens
  misc_RNA (1)...(19): siRNA sense strand
agaagacgaagaagcagaa

SEQ ID NO: 916454 - RNA, 19 nt, Homo sapiens
  misc_RNA (1)...(19): siRNA sense strand
gcgaguggacgggcauuga

SEQ ID NO: 916455 - RNA, 19 nt, Homo sapiens
  misc_RNA (1)...(19): siRNA sense strand
cauugaagaccuccugaau

SEQ ID NO: 916456 - RNA, 19 nt, Homo sapiens
  misc_RNA (1)...(19): siRNA sense strand
cggcagaccagaaccugaa

SEQ ID NO: 916457 - RNA, 19 nt, Homo sapiens
  misc_RNA (1)...(19): siRNA sense strand
gugaggaagcuccggaaau

SEQ ID NO: 916458 - RNA, 19 nt, Homo sapiens
  misc_RNA (1)...(19): siRNA sense strand
cgcagcaccuguuccuuca

SEQ ID NO: 916459 - RNA, 19 nt, Homo sapiens
  misc_RNA (1)...(19): siRNA sense strand
gggaggcggcagaagaaga

SEQ ID NO: 916460 - RNA, 19 nt, Homo sapiens
  misc_RNA (1)...(19): siRNA sense strand
agaaagcgucucuacaaag

SEQ ID NO: 916461 - RNA, 19 nt, Homo sapiens
  misc_RNA (1)...(19): siRNA sense strand
gacgcgcugucccagaaga

SEQ ID NO: 916462 - RNA, 19 nt, Homo sapiens
  misc_RNA (1)...(19): siRNA sense strand
acagugaugaguccucuga

SEQ ID NO: 916463 - RNA, 19 nt, Homo sapiens
  misc_RNA (1)...(19): siRNA sense strand
cagaccagaaccugaaguu

SEQ ID NO: 916464 - RNA, 19 nt, Homo sapiens
  misc_RNA (1)...(19): siRNA sense strand
ggaagcuccggaaauacau

SEQ ID NO: 916465 - RNA, 19 nt, Homo sapiens
  misc_RNA (1)...(19): siRNA sense strand
ggugaggaagcuccggaaa

SEQ ID NO: 916466 - RNA, 19 nt, Homo sapiens
  misc_RNA (1)...(19): siRNA sense strand
gggaagaaagacagaucga

SEQ ID NO: 916467 - RNA, 19 nt, Homo sapiens
  misc_RNA (1)...(19): siRNA sense strand
ucaugcggaugguccugaa

SEQ ID NO: 916468 - RNA, 19 nt, Homo sapiens
  misc_RNA (1)...(19): siRNA sense strand
gcagcaggagagagggaaa

SEQ ID NO: 916469 - RNA, 19 nt, Homo sapiens
  misc_RNA (1)...(19): siRNA sense strand
gcacgacgagcugcugaag

SEQ ID NO: 916470 - RNA, 19 nt, Homo sapiens
  misc_RNA (1)...(19): siRNA sense strand
gagagggaaaggugagaag

SEQ ID NO: 916471 - RNA, 19 nt, Homo sapiens
  misc_RNA (1)...(19): siRNA sense strand
gagggaccgugaaauguuu

SEQ ID NO: 916472 - RNA, 19 nt, Homo sapiens
  misc_RNA (1)...(19): siRNA sense strand
gcuccggccugauugauaa

SEQ ID NO: 916473 - RNA, 19 nt, Homo sapiens
  misc_RNA (1)...(19): siRNA sense strand
cgugaaauguuuggauaua

SEQ ID NO: 916474 - RNA, 19 nt, Homo sapiens
  misc_RNA (1)...(19): siRNA sense strand
gcggaacccagaacccuua

SEQ ID NO: 916475 - RNA, 19 nt, Homo sapiens
  misc_RNA (1)...(19): siRNA sense strand
cgccagcuucuauauauua

SEQ ID NO: 916476 - RNA, 19 nt, Homo sapiens
  misc_RNA (1)...(19): siRNA sense strand
cuacugcuccggccugauu

SEQ ID NO: 916477 - RNA, 19 nt, Homo sapiens
  misc_RNA (1)...(19): siRNA sense strand
caucgccagcuucuauaua

SEQ ID NO: 916478 - RNA, 19 nt, Homo sapiens
  misc_RNA (1)...(19): siRNA sense strand
ugagggaccgugaaauguu

SEQ ID NO: 916479 - RNA, 19 nt, Homo sapiens
  misc_RNA (1)...(19): siRNA sense strand
accgugaaauguuuggaua

SEQ ID NO: 916480 - RNA, 19 nt, Homo sapiens
  misc_RNA (1)...(19): siRNA sense strand
cgugaagacuaccuguaug

SEQ ID NO: 916481 - RNA, 19 nt, Homo sapiens
  misc_RNA (1)...(19): siRNA sense strand
gcugugagggaccgugaaa

SEQ ID NO: 916482 - RNA, 19 nt, Homo sapiens
  misc_RNA (1)...(19): siRNA sense strand
gaucgcgacggcugguuug

SEQ ID NO: 916483 - RNA, 19 nt, Homo sapiens
  misc_RNA (1)...(19): siRNA sense strand
gcaucgccagcuucuauau

SEQ ID NO: 916484 - RNA, 19 nt, Homo sapiens
  misc_RNA (1)...(19): siRNA sense strand
uacgguuucugccggauga

SEQ ID NO: 916485 - RNA, 19 nt, Homo sapiens
  misc_RNA (1)...(19): siRNA sense strand
ugugagggaccgugaaaug

SEQ ID NO: 916486 - RNA, 19 nt, Homo sapiens
  misc_RNA (1)...(19): siRNA sense strand
ggauuuuccugaagaagau

SEQ ID NO: 916487 - RNA, 19 nt, Homo sapiens
  misc_RNA (1)...(19): siRNA sense strand
ucgccagcuucuauauauu

SEQ ID NO: 916488 - RNA, 19 nt, Homo sapiens
  misc_RNA (1)...(19): siRNA sense strand
uugcaucgccagcuucuau

SEQ ID NO: 916489 - RNA, 19 nt, Homo sapiens
  misc_RNA (1)...(19): siRNA sense strand
ccugauugauaaccugauc

SEQ ID NO: 916490 - RNA, 19 nt, Homo sapiens
  misc_RNA (1)...(19): siRNA sense strand
aucgccagcuucuauauau

SEQ ID NO: 916491 - RNA, 19 nt, Homo sapiens
  misc_RNA (1)...(19): siRNA sense strand
gugagggaccgugaaaugu

SEQ ID NO: 916492 - RNA, 19 nt, Homo sapiens
  misc_RNA (1)...(19): siRNA sense strand
gaaugcagcugacagauuu

SEQ ID NO: 916493 - RNA, 19 nt, Homo sapiens
  misc_RNA (1)...(19): siRNA sense strand
gauaugggcugaauguaaa

SEQ ID NO: 916494 - RNA, 19 nt, Homo sapiens
  misc_RNA (1)...(19): siRNA sense strand
agaaagaguucaagaauga

SEQ ID NO: 916495 - RNA, 19 nt, Homo sapiens
  misc_RNA (1)...(19): siRNA sense strand
gcacaaaacuccuuccuaa

SEQ ID NO: 916496 - RNA, 19 nt, Homo sapiens
  misc_RNA (1)...(19): siRNA sense strand
gagacaaugugaaauacua

SEQ ID NO: 916497 - RNA, 19 nt, Homo sapiens
  misc_RNA (1)...(19): siRNA sense strand
cagcauacauguuuaguga

SEQ ID NO: 916498 - RNA, 19 nt, Homo sapiens
  misc_RNA (1)...(19): siRNA sense strand
uagcagaacuuauuagaga

SEQ ID NO: 916499 - RNA, 19 nt, Homo sapiens
  misc_RNA (1)...(19): siRNA sense strand
gcuaugaacuccuugaaga

SEQ ID NO: 916500 - RNA, 19 nt, Homo sapiens
  misc_RNA (1)...(19): siRNA sense strand
ggauggagaugcucauuau

SEQ ID NO: 916501 - RNA, 19 nt, Homo sapiens
  misc_RNA (1)...(19): siRNA sense strand
gagaaagaguucaagaaug

SEQ ID NO: 916502 - RNA, 19 nt, Homo sapiens
  misc_RNA (1)...(19): siRNA sense strand
ggaccagcauacauguuua

SEQ ID NO: 916503 - RNA, 19 nt, Homo sapiens
  misc_RNA (1)...(19): siRNA sense strand
ggacacgguucucccauga

SEQ ID NO: 916504 - RNA, 19 nt, Homo sapiens
  misc_RNA (1)...(19): siRNA sense strand
guaaagaaaucuggacuca

SEQ ID NO: 916505 - RNA, 19 nt, Homo sapiens
  misc_RNA (1)...(19): siRNA sense strand
gcagauaucacuuggaaga

SEQ ID NO: 916506 - RNA, 19 nt, Homo sapiens
  misc_RNA (1)...(19): siRNA sense strand
gaagaacagucaaagacau

SEQ ID NO: 916507 - RNA, 19 nt, Homo sapiens
  misc_RNA (1)...(19): siRNA sense strand
guucaagaaugacuacaaa

SEQ ID NO: 916508 - RNA, 19 nt, Homo sapiens
  misc_RNA (1)...(19): siRNA sense strand
gaaaaccucucucgaguug

SEQ ID NO: 916509 - RNA, 19 nt, Homo sapiens
  misc_RNA (1)...(19): siRNA sense strand
ggaaccaaaucaagaggaa

SEQ ID NO: 916510 - RNA, 19 nt, Homo sapiens
  misc_RNA (1)...(19): siRNA sense strand
ccaggaagaugcagagaug

SEQ ID NO: 916511 - RNA, 19 nt, Homo sapiens
  misc_RNA (1)...(19): siRNA sense strand
ccaaaucucagccguuuaa

SEQ ID NO: 916512 - RNA, 19 nt, Homo sapiens
  misc_RNA (1)...(19): siRNA sense strand
gcagagaugaacaagauaa

SEQ ID NO: 916513 - RNA, 19 nt, Homo sapiens
  misc_RNA (1)...(19): siRNA sense strand
gcccaaaucucagccguuu

SEQ ID NO: 916514 - RNA, 19 nt, Homo sapiens
  misc_RNA (1)...(19): siRNA sense strand
gaacuuggagagaaauuau

SEQ ID NO: 916515 - RNA, 19 nt, Homo sapiens
  misc_RNA (1)...(19): siRNA sense strand
gauguggaguggaaauuug

SEQ ID NO: 916516 - RNA, 19 nt, Homo sapiens
  misc_RNA (1)...(19): siRNA sense strand
cagaaacacugaagaaguc

SEQ ID NO: 916517 - RNA, 19 nt, Homo sapiens
  misc_RNA (1)...(19): siRNA sense strand
caacuucucuccauuuggu

SEQ ID NO: 916518 - RNA, 19 nt, Homo sapiens
  misc_RNA (1)...(19): siRNA sense strand
gcauacauguuuagugauc

SEQ ID NO: 916519 - RNA, 19 nt, Homo sapiens
  misc_RNA (1)...(19): siRNA sense strand
auaaggagcucagaagauu

SEQ ID NO: 916520 - RNA, 19 nt, Homo sapiens
  misc_RNA (1)...(19): siRNA sense strand
caucaacuauaaccacaaa

SEQ ID NO: 916521 - RNA, 19 nt, Homo sapiens
  misc_RNA (1)...(19): siRNA sense strand
gagcaucauugacgcaaau

SEQ ID NO: 916522 - RNA, 19 nt, Homo sapiens
  misc_RNA (1)...(19): siRNA sense strand
gagaugaacaagauaaaug

SEQ ID NO: 916523 - RNA, 19 nt, Homo sapiens
  misc_RNA (1)...(19): siRNA sense strand
caugacggcuuuagaacuu

SEQ ID NO: 916524 - RNA, 19 nt, Homo sapiens
  misc_RNA (1)...(19): siRNA sense strand
gaagaaugccacucacuca

SEQ ID NO: 916525 - RNA, 19 nt, Homo sapiens
  misc_RNA (1)...(19): siRNA sense strand
aaacauugguuacguucuu

SEQ ID NO: 916526 - RNA, 19 nt, Homo sapiens
  misc_RNA (1)...(19): siRNA sense strand
gggagaagguuagcuaauc

SEQ ID NO: 916527 - RNA, 19 nt, Homo sapiens
  misc_RNA (1)...(19): siRNA sense strand
gaaggucuuuaugcaauug

SEQ ID NO: 916528 - RNA, 19 nt, Homo sapiens
  misc_RNA (1)...(19): siRNA sense strand
ccaggaauaugaaauugug

SEQ ID NO: 916529 - RNA, 19 nt, Homo sapiens
  misc_RNA (1)...(19): siRNA sense strand
ccaaugagcaucuggaaau

SEQ ID NO: 916530 - RNA, 19 nt, Homo sapiens
  misc_RNA (1)...(19): siRNA sense strand
ggaugcagcugaauauggu

SEQ ID NO: 916531 - RNA, 19 nt, Homo sapiens
  misc_RNA (1)...(19): siRNA sense strand
ugaaaucaguggucaucaa

SEQ ID NO: 916532 - RNA, 19 nt, Homo sapiens
  misc_RNA (1)...(19): siRNA sense strand
gaaaccagcacagauaaug

SEQ ID NO: 916533 - RNA, 19 nt, Homo sapiens
  misc_RNA (1)...(19): siRNA sense strand
gcggaagggugcuaggauu

SEQ ID NO: 916534 - RNA, 19 nt, Homo sapiens
  misc_RNA (1)...(19): siRNA sense strand
ggaagauguuagaagaaug

SEQ ID NO: 916535 - RNA, 19 nt, Homo sapiens
  misc_RNA (1)...(19): siRNA sense strand
gaagaccuagcagaacuua

SEQ ID NO: 916536 - RNA, 19 nt, Homo sapiens
  misc_RNA (1)...(19): siRNA sense strand
gggcagaacacuuccugua

SEQ ID NO: 916537 - RNA, 19 nt, Homo sapiens
  misc_RNA (1)...(19): siRNA sense strand
gcagaaacacugaagaagu

SEQ ID NO: 916538 - RNA, 19 nt, Homo sapiens
  misc_RNA (1)...(19): siRNA sense strand
ugaacggccucaugauuau

SEQ ID NO: 916539 - RNA, 19 nt, Homo sapiens
  misc_RNA (1)...(19): siRNA sense strand
gaagggugcuaggauugaa

SEQ ID NO: 916540 - RNA, 19 nt, Homo sapiens
  misc_RNA (1)...(19): siRNA sense strand
gcuucuagcuauuaguaaa

SEQ ID NO: 916541 - RNA, 19 nt, Homo sapiens
  misc_RNA (1)...(19): siRNA sense strand
gaacuuauuagagaacuug

SEQ ID NO: 916542 - RNA, 19 nt, Homo sapiens
  misc_RNA (1)...(19): siRNA sense strand
aaucaguggucaucaacua

SEQ ID NO: 916543 - RNA, 19 nt, Homo sapiens
  misc_RNA (1)...(19): siRNA sense strand
caucauucauugcgagauu

SEQ ID NO: 916544 - RNA, 19 nt, Homo sapiens
  misc_RNA (1)...(19): siRNA sense strand
uaaagguuauguucggauu

SEQ ID NO: 916545 - RNA, 19 nt, Homo sapiens
  misc_RNA (1)...(19): siRNA sense strand
acagaagcaugacucguuu

SEQ ID NO: 916546 - RNA, 19 nt, Homo sapiens
  misc_RNA (1)...(19): siRNA sense strand
uagagaacuuggagagaaa

SEQ ID NO: 916547 - RNA, 19 nt, Homo sapiens
  misc_RNA (1)...(19): siRNA sense strand
caauaauccuccaagacaa

SEQ ID NO: 916548 - RNA, 19 nt, Homo sapiens
  misc_RNA (1)...(19): siRNA sense strand
ggauugaacggccucauga

SEQ ID NO: 916549 - RNA, 19 nt, Homo sapiens
  misc_RNA (1)...(19): siRNA sense strand
gagagaaauuauccaugga

SEQ ID NO: 916550 - RNA, 19 nt, Homo sapiens
  misc_RNA (1)...(19): siRNA sense strand
uuagagaacuuggagagaa

SEQ ID NO: 916551 - RNA, 19 nt, Homo sapiens
  misc_RNA (1)...(19): siRNA sense strand
uaaggagagugaugaagug

SEQ ID NO: 916552 - RNA, 19 nt, Homo sapiens
  misc_RNA (1)...(19): siRNA sense strand
ugaaaaggcucauuaaaag

SEQ ID NO: 916553 - RNA, 19 nt, Homo sapiens
  misc_RNA (1)...(19): siRNA sense strand
uguggaacaugcuugauuu

SEQ ID NO: 916554 - RNA, 19 nt, Homo sapiens
  misc_RNA (1)...(19): siRNA sense strand
gcagccuccuucaccauuu

SEQ ID NO: 916555 - RNA, 19 nt, Homo sapiens
  misc_RNA (1)...(19): siRNA sense strand
gccacucacucaacguuaa

SEQ ID NO: 916556 - RNA, 19 nt, Homo sapiens
  misc_RNA (1)...(19): siRNA sense strand
ggagagugaugaagugaac

SEQ ID NO: 916557 - RNA, 19 nt, Homo sapiens
  misc_RNA (1)...(19): siRNA sense strand
cacaauaaacaaccaagua

SEQ ID NO: 916558 - RNA, 19 nt, Homo sapiens
  misc_RNA (1)...(19): siRNA sense strand
ucaaguucauggucauauu

SEQ ID NO: 916559 - RNA, 19 nt, Homo sapiens
  misc_RNA (1)...(19): siRNA sense strand
gaaaacauccugcuucuca

SEQ ID NO: 916560 - RNA, 19 nt, Homo sapiens
  misc_RNA (1)...(19): siRNA sense strand
caaaacuccuuccuaauga

SEQ ID NO: 916561 - RNA, 19 nt, Homo sapiens
  misc_RNA (1)...(19): siRNA sense strand
gcaacgagagccaggacua

SEQ ID NO: 916562 - RNA, 19 nt, Homo sapiens
  misc_RNA (1)...(19): siRNA sense strand
caaugagcaucuggaaauu

SEQ ID NO: 916563 - RNA, 19 nt, Homo sapiens
  misc_RNA (1)...(19): siRNA sense strand
agaggaaaccaauagauaa

SEQ ID NO: 916564 - RNA, 19 nt, Homo sapiens
  misc_RNA (1)...(19): siRNA sense strand
aagaggaaaccaauagaua

SEQ ID NO: 916565 - RNA, 19 nt, Homo sapiens
  misc_RNA (1)...(19): siRNA sense strand
gaccuagcagaacuuauua

SEQ ID NO: 916566 - RNA, 19 nt, Homo sapiens
  misc_RNA (1)...(19): siRNA sense strand
ucucaagucuccgcuauga

SEQ ID NO: 916567 - RNA, 19 nt, Homo sapiens
  misc_RNA (1)...(19): siRNA sense strand
gauaucacuuggaagaaca

SEQ ID NO: 916568 - RNA, 19 nt, Homo sapiens
  misc_RNA (1)...(19): siRNA sense strand
gaaucuuucugguuuacga

SEQ ID NO: 916569 - RNA, 19 nt, Homo sapiens
  misc_RNA (1)...(19): siRNA sense strand
ccagaaugcccuacaguug

SEQ ID NO: 916570 - RNA, 19 nt, Homo sapiens
  misc_RNA (1)...(19): siRNA sense strand
ucaauaauccuccaagaca

SEQ ID NO: 916571 - RNA, 19 nt, Homo sapiens
  misc_RNA (1)...(19): siRNA sense strand
ggagaagguuagcuaaucg

SEQ ID NO: 916572 - RNA, 19 nt, Homo sapiens
  misc_RNA (1)...(19): siRNA sense strand
guucugggcuauauuugga

SEQ ID NO: 916573 - RNA, 19 nt, Homo sapiens
  misc_RNA (1)...(19): siRNA sense strand
ggaagaacagucaaagaca

SEQ ID NO: 916574 - RNA, 19 nt, Homo sapiens
  misc_RNA (1)...(19): siRNA sense strand
cugcagauaucacuuggaa

SEQ ID NO: 916575 - RNA, 19 nt, Homo sapiens
  misc_RNA (1)...(19): siRNA sense strand
ugauaugggcugaauguaa

SEQ ID NO: 916576 - RNA, 19 nt, Homo sapiens
  misc_RNA (1)...(19): siRNA sense strand
aaugaaaccagcacagaua

SEQ ID NO: 916577 - RNA, 19 nt, Homo sapiens
  misc_RNA (1)...(19): siRNA sense strand
gaccauucaugaaguuugu

SEQ ID NO: 916578 - RNA, 19 nt, Homo sapiens
  misc_RNA (1)...(19): siRNA sense strand
gacaauggcggucaaguuc

SEQ ID NO: 916579 - RNA, 19 nt, Homo sapiens
  misc_RNA (1)...(19): siRNA sense strand
gcaguucuggccaauauug

SEQ ID NO: 916580 - RNA, 19 nt, Homo sapiens
  misc_RNA (1)...(19): siRNA sense strand
gguccuugcuguugccauu

SEQ ID NO: 916581 - RNA, 19 nt, Homo sapiens
  misc_RNA (1)...(19): siRNA sense strand
gaaauuauccauggaacca

SEQ ID NO: 916582 - RNA, 19 nt, Homo sapiens
  misc_RNA (1)...(19): siRNA sense strand
caacuauaaccacaaauuc

SEQ ID NO: 916583 - RNA, 19 nt, Homo sapiens
  misc_RNA (1)...(19): siRNA sense strand
ucucuaggauagcuuauau

SEQ ID NO: 916584 - RNA, 19 nt, Homo sapiens
  misc_RNA (1)...(19): siRNA sense strand
agucugaacuccagcaaga

SEQ ID NO: 916585 - RNA, 19 nt, Homo sapiens
  misc_RNA (1)...(19): siRNA sense strand
gaggagggcagaacacuuc

SEQ ID NO: 916586 - RNA, 19 nt, Homo sapiens
  misc_RNA (1)...(19): siRNA sense strand
cuuuagaacuuagcaauga

SEQ ID NO: 916587 - RNA, 19 nt, Homo sapiens
  misc_RNA (1)...(19): siRNA sense strand
uugaacggccucaugauua

SEQ ID NO: 916588 - RNA, 19 nt, Homo sapiens
  misc_RNA (1)...(19): siRNA sense strand
agaccuagcagaacuuauu

SEQ ID NO: 916589 - RNA, 19 nt, Homo sapiens
  misc_RNA (1)...(19): siRNA sense strand
cagaagaccuagcagaacu

SEQ ID NO: 916590 - RNA, 19 nt, Homo sapiens
  misc_RNA (1)...(19): siRNA sense strand
ugagaaagaguucaagaau

SEQ ID NO: 916591 - RNA, 19 nt, Homo sapiens
  misc_RNA (1)...(19): siRNA sense strand
gcaaugacugcaaccagaa

SEQ ID NO: 916592 - RNA, 19 nt, Homo sapiens
  misc_RNA (1)...(19): siRNA sense strand
ccaagaagcugacucgaua

SEQ ID NO: 916593 - RNA, 19 nt, Homo sapiens
  misc_RNA (1)...(19): siRNA sense strand
gagcgaccaucuuuaauuu

SEQ ID NO: 916594 - RNA, 19 nt, Homo sapiens
  misc_RNA (1)...(19): siRNA sense strand
ggucauagcugccaacauc

SEQ ID NO: 916595 - RNA, 19 nt, Homo sapiens
  misc_RNA (1)...(19): siRNA sense strand
gaaaugaccuacgaggaaa

SEQ ID NO: 916596 - RNA, 19 nt, Homo sapiens
  misc_RNA (1)...(19): siRNA sense strand
gaacguggcugcugugaac

SEQ ID NO: 916597 - RNA, 19 nt, Homo sapiens
  misc_RNA (1)...(19): siRNA sense strand
ggagagcgaccaucuuuaa

SEQ ID NO: 916598 - RNA, 19 nt, Homo sapiens
  misc_RNA (1)...(19): siRNA sense strand
ggaaaugaccuacgaggaa

SEQ ID NO: 916599 - RNA, 19 nt, Homo sapiens
  misc_RNA (1)...(19): siRNA sense strand
gaacagaauggcuacaaga

SEQ ID NO: 916600 - RNA, 19 nt, Homo sapiens
  misc_RNA (1)...(19): siRNA sense strand
caucguauauuaccucaug

SEQ ID NO: 916601 - RNA, 19 nt, Homo sapiens
  misc_RNA (1)...(19): siRNA sense strand
gaacguggacaucucaaga

SEQ ID NO: 916602 - RNA, 19 nt, Homo sapiens
  misc_RNA (1)...(19): siRNA sense strand
gcagggaguuugccaagag

SEQ ID NO: 916603 - RNA, 19 nt, Homo sapiens
  misc_RNA (1)...(19): siRNA sense strand
ggaagguccucaacgagau

SEQ ID NO: 916604 - RNA, 19 nt, Homo sapiens
  misc_RNA (1)...(19): siRNA sense strand
gaagagggccugaaaauca

SEQ ID NO: 916605 - RNA, 19 nt, Homo sapiens
  misc_RNA (1)...(19): siRNA sense strand
acgaggaaauucaggauaa

SEQ ID NO: 916606 - RNA, 19 nt, Homo sapiens
  misc_RNA (1)...(19): siRNA sense strand
caacaucgugcaagugaaa

SEQ ID NO: 916607 - RNA, 19 nt, Homo sapiens
  misc_RNA (1)...(19): siRNA sense strand
ccacgggaauugacacaga

SEQ ID NO: 916608 - RNA, 19 nt, Homo sapiens
  misc_RNA (1)...(19): siRNA sense strand
ccaagagucuagcccaguu

SEQ ID NO: 916609 - RNA, 19 nt, Homo sapiens
  misc_RNA (1)...(19): siRNA sense strand
agaccuacaucuccaagaa

SEQ ID NO: 916610 - RNA, 19 nt, Homo sapiens
  misc_RNA (1)...(19): siRNA sense strand
gaacggagagcgaccaucu

SEQ ID NO: 916611 - RNA, 19 nt, Homo sapiens
  misc_RNA (1)...(19): siRNA sense strand
ggacaagccagaugaagag

SEQ ID NO: 916612 - RNA, 19 nt, Homo sapiens
  misc_RNA (1)...(19): siRNA sense strand
agagccgcaucguauauua

SEQ ID NO: 916613 - RNA, 19 nt, Homo sapiens
  misc_RNA (1)...(19): siRNA sense strand
gugaggaaaugaccuacga

SEQ ID NO: 916614 - RNA, 19 nt, Homo sapiens
  misc_RNA (1)...(19): siRNA sense strand
caaugaagagggccugaaa

SEQ ID NO: 916615 - RNA, 19 nt, Homo sapiens
  misc_RNA (1)...(19): siRNA sense strand
guucaauguuggccaguau

SEQ ID NO: 916616 - RNA, 19 nt, Homo sapiens
  misc_RNA (1)...(19): siRNA sense strand
gaccuguccuauaucaaga

SEQ ID NO: 916617 - RNA, 19 nt, Homo sapiens
  misc_RNA (1)...(19): siRNA sense strand
caacugcccaacucucauu

SEQ ID NO: 916618 - RNA, 19 nt, Homo sapiens
  misc_RNA (1)...(19): siRNA sense strand
ggcauaugguuguaaagug

SEQ ID NO: 916619 - RNA, 19 nt, Homo sapiens
  misc_RNA (1)...(19): siRNA sense strand
cagaacagcugcccuaccu

SEQ ID NO: 916620 - RNA, 19 nt, Homo sapiens
  misc_RNA (1)...(19): siRNA sense strand
gccaacaucgugcaaguga

SEQ ID NO: 916621 - RNA, 19 nt, Homo sapiens
  misc_RNA (1)...(19): siRNA sense strand
gcauugagugcuaugagaa

SEQ ID NO: 916622 - RNA, 19 nt, Homo sapiens
  misc_RNA (1)...(19): siRNA sense strand
gagaacagaauggcuacaa

SEQ ID NO: 916623 - RNA, 19 nt, Homo sapiens
  misc_RNA (1)...(19): siRNA sense strand
gggcgucugugaggaaaug

SEQ ID NO: 916624 - RNA, 19 nt, Homo sapiens
  misc_RNA (1)...(19): siRNA sense strand
gcuaugagaacuccuacga

SEQ ID NO: 916625 - RNA, 19 nt, Homo sapiens
  misc_RNA (1)...(19): siRNA sense strand
gcccaacucucauugucau

SEQ ID NO: 916626 - RNA, 19 nt, Homo sapiens
  misc_RNA (1)...(19): siRNA sense strand
gaucugaaggucuggacaa

SEQ ID NO: 916627 - RNA, 19 nt, Homo sapiens
  misc_RNA (1)...(19): siRNA sense strand
uagcccaguucaucaguga

SEQ ID NO: 916628 - RNA, 19 nt, Homo sapiens
  misc_RNA (1)...(19): siRNA sense strand
agaaugugcuggucaucug

SEQ ID NO: 916629 - RNA, 19 nt, Homo sapiens
  misc_RNA (1)...(19): siRNA sense strand
agagcgaccaucuuuaauu

SEQ ID NO: 916630 - RNA, 19 nt, Homo sapiens
  misc_RNA (1)...(19): siRNA sense strand
cgaggaaauucaggauaau

SEQ ID NO: 916631 - RNA, 19 nt, Homo sapiens
  misc_RNA (1)...(19): siRNA sense strand
gcgaccaucuuuaauuuug

SEQ ID NO: 916632 - RNA, 19 nt, Homo sapiens
  misc_RNA (1)...(19): siRNA sense strand
ccagagccgcaucguauau

SEQ ID NO: 916633 - RNA, 19 nt, Homo sapiens
  misc_RNA (1)...(19): siRNA sense strand
ugacuccuguggcauaugg

SEQ ID NO: 916634 - RNA, 19 nt, Homo sapiens
  misc_RNA (1)...(19): siRNA sense strand
cgacaaggcagcagaacag

SEQ ID NO: 916635 - RNA, 19 nt, Homo sapiens
  misc_RNA (1)...(19): siRNA sense strand
ugaggcgcauugagugcua

SEQ ID NO: 916636 - RNA, 19 nt, Homo sapiens
  misc_RNA (1)...(19): siRNA sense strand
gagagcgaccaucuuuaau

SEQ ID NO: 916637 - RNA, 19 nt, Homo sapiens
  misc_RNA (1)...(19): siRNA sense strand
cagcugcccuaccucaagu

SEQ ID NO: 916638 - RNA, 19 nt, Homo sapiens
  misc_RNA (1)...(19): siRNA sense strand
guauauuaccucaugaaca

SEQ ID NO: 916639 - RNA, 19 nt, Homo sapiens
  misc_RNA (1)...(19): siRNA sense strand
cacgggaauugacacagaa

SEQ ID NO: 916640 - RNA, 19 nt, Homo sapiens
  misc_RNA (1)...(19): siRNA sense strand
cgcauugagugcuaugaga

SEQ ID NO: 916641 - RNA, 19 nt, Homo sapiens
  misc_RNA (1)...(19): siRNA sense strand
uguggcauaugguuguaaa

SEQ ID NO: 916642 - RNA, 19 nt, Homo sapiens
  misc_RNA (1)...(19): siRNA sense strand
auaucaagaucauggaugu

SEQ ID NO: 916643 - RNA, 19 nt, Homo sapiens
  misc_RNA (1)...(19): siRNA sense strand
acggagagcgaccaucuuu

SEQ ID NO: 916644 - RNA, 19 nt, Homo sapiens
  misc_RNA (1)...(19): siRNA sense strand
gcugacuccuguggcauau

SEQ ID NO: 916645 - RNA, 19 nt, Homo sapiens
  misc_RNA (1)...(19): siRNA sense strand
gcaagaccuacaucuccaa

SEQ ID NO: 916646 - RNA, 19 nt, Homo sapiens
  misc_RNA (1)...(19): siRNA sense strand
gagcuggagaggcaagaga

SEQ ID NO: 916647 - RNA, 19 nt, Homo sapiens
  misc_RNA (1)...(19): siRNA sense strand
caaaauaucaaggaucuga

SEQ ID NO: 916648 - RNA, 19 nt, Homo sapiens
  misc_RNA (1)...(19): siRNA sense strand
guucaucagugaccaaaau

SEQ ID NO: 916649 - RNA, 19 nt, Homo sapiens
  misc_RNA (1)...(19): siRNA sense strand
cucgauaccugaacuggau

SEQ ID NO: 916650 - RNA, 19 nt, Homo sapiens
  misc_RNA (1)...(19): siRNA sense strand
ccaacaucgugcaagugaa

SEQ ID NO: 916651 - RNA, 19 nt, Homo sapiens
  misc_RNA (1)...(19): siRNA sense strand
caacucucauugucauggu

SEQ ID NO: 916652 - RNA, 19 nt, Homo sapiens
  misc_RNA (1)...(19): siRNA sense strand
gaauggcuacaagaccuuu

SEQ ID NO: 916653 - RNA, 19 nt, Homo sapiens
  misc_RNA (1)...(19): siRNA sense strand
uagaugaggaccuggauag

SEQ ID NO: 916654 - RNA, 19 nt, Homo sapiens
  misc_RNA (1)...(19): siRNA sense strand
aguggaagguccucaacga

SEQ ID NO: 916655 - RNA, 19 nt, Homo sapiens
  misc_RNA (1)...(19): siRNA sense strand
agaacagaauggcuacaag

SEQ ID NO: 916656 - RNA, 19 nt, Homo sapiens
  misc_RNA (1)...(19): siRNA sense strand
cacugggugugcccuauga

SEQ ID NO: 916657 - RNA, 19 nt, Homo sapiens
  misc_RNA (1)...(19): siRNA sense strand
uguggauccugaggucaua

SEQ ID NO: 916658 - RNA, 19 nt, Homo sapiens
  misc_RNA (1)...(19): siRNA sense strand
acuggagccugucaucaug

SEQ ID NO: 916659 - RNA, 19 nt, Homo sapiens
  misc_RNA (1)...(19): siRNA sense strand
ggaguuugccaagagucua

SEQ ID NO: 916660 - RNA, 19 nt, Homo sapiens
  misc_RNA (1)...(19): siRNA sense strand
cacaaacaccacccgagaa

SEQ ID NO: 916661 - RNA, 19 nt, Homo sapiens
  misc_RNA (1)...(19): siRNA sense strand
gagaaugugcuggucaucu

SEQ ID NO: 916662 - RNA, 19 nt, Homo sapiens
  misc_RNA (1)...(19): siRNA sense strand
ccuacgagucgcuagauga

SEQ ID NO: 916663 - RNA, 19 nt, Homo sapiens
  misc_RNA (1)...(19): siRNA sense strand
cggagagcgaccaucuuua

SEQ ID NO: 916664 - RNA, 19 nt, Homo sapiens
  misc_RNA (1)...(19): siRNA sense strand
ggggacauguggcgguuuu

SEQ ID NO: 916665 - RNA, 19 nt, Homo sapiens
  misc_RNA (1)...(19): siRNA sense strand
gcugccugcuggccuacuu

SEQ ID NO: 916666 - RNA, 19 nt, Homo sapiens
  misc_RNA (1)...(19): siRNA sense strand
gacuggagccugucaucau

SEQ ID NO: 916667 - RNA, 19 nt, Homo sapiens
  misc_RNA (1)...(19): siRNA sense strand
gaagguccucaacgagauc

SEQ ID NO: 916668 - RNA, 19 nt, Homo sapiens
  misc_RNA (1)...(19): siRNA sense strand
uggacaagccagaugaaga

SEQ ID NO: 916669 - RNA, 19 nt, Homo sapiens
  misc_RNA (1)...(19): siRNA sense strand
uguccuauaucaagaucau

SEQ ID NO: 916670 - RNA, 19 nt, Homo sapiens
  misc_RNA (1)...(19): siRNA sense strand
ccagaggaagcccuuguca

SEQ ID NO: 916671 - RNA, 19 nt, Homo sapiens
  misc_RNA (1)...(19): siRNA sense strand
aagagaaugugcuggucau

SEQ ID NO: 916672 - RNA, 19 nt, Homo sapiens
  misc_RNA (1)...(19): siRNA sense strand
ugaccuacgaggaaauuca

SEQ ID NO: 916673 - RNA, 19 nt, Homo sapiens
  misc_RNA (1)...(19): siRNA sense strand
cauccagagccgcaucgua

SEQ ID NO: 916674 - RNA, 19 nt, Homo sapiens
  misc_RNA (1)...(19): siRNA sense strand
uggaugccauacagcaaug

SEQ ID NO: 916675 - RNA, 19 nt, Homo sapiens
  misc_RNA (1)...(19): siRNA sense strand
ucagaacguggacaucuca

SEQ ID NO: 916676 - RNA, 19 nt, Homo sapiens
  misc_RNA (1)...(19): siRNA sense strand
gagucuagcccaguucauc

SEQ ID NO: 916677 - RNA, 19 nt, Homo sapiens
  misc_RNA (1)...(19): siRNA sense strand
gagacuggagccugucauc

SEQ ID NO: 916678 - RNA, 19 nt, Homo sapiens
  misc_RNA (1)...(19): siRNA sense strand
gcacaaaguaugccaauua

SEQ ID NO: 916679 - RNA, 19 nt, Homo sapiens
  misc_RNA (1)...(19): siRNA sense strand
guaaaugggucaagaagaa

SEQ ID NO: 916680 - RNA, 19 nt, Homo sapiens
  misc_RNA (1)...(19): siRNA sense strand
uagcagagcugaaucauga

SEQ ID NO: 916681 - RNA, 19 nt, Homo sapiens
  misc_RNA (1)...(19): siRNA sense strand
gagauugaaugcaagaaua

SEQ ID NO: 916682 - RNA, 19 nt, Homo sapiens
  misc_RNA (1)...(19): siRNA sense strand
ggaaacagguggcgacaga

SEQ ID NO: 916683 - RNA, 19 nt, Homo sapiens
  misc_RNA (1)...(19): siRNA sense strand
aaugaaggcuuacucuuua

SEQ ID NO: 916684 - RNA, 19 nt, Homo sapiens
  misc_RNA (1)...(19): siRNA sense strand
gaacuuacccugaacacaa

SEQ ID NO: 916685 - RNA, 19 nt, Homo sapiens
  misc_RNA (1)...(19): siRNA sense strand
gauaaagucuuggauauag

SEQ ID NO: 916686 - RNA, 19 nt, Homo sapiens
  misc_RNA (1)...(19): siRNA sense strand
gcaacaaggauauuugaua

SEQ ID NO: 916687 - RNA, 19 nt, Homo sapiens
  misc_RNA (1)...(19): siRNA sense strand
gaagagcaaguugaaauua

SEQ ID NO: 916688 - RNA, 19 nt, Homo sapiens
  misc_RNA (1)...(19): siRNA sense strand
uaaaagagaugcaggauaa

SEQ ID NO: 916689 - RNA, 19 nt, Homo sapiens
  misc_RNA (1)...(19): siRNA sense strand
ggaaagacccacccaagaa

SEQ ID NO: 916690 - RNA, 19 nt, Homo sapiens
  misc_RNA (1)...(19): siRNA sense strand
gggaagaauuguuaaugaa

SEQ ID NO: 916691 - RNA, 19 nt, Homo sapiens
  misc_RNA (1)...(19): siRNA sense strand
gaaagaacuuagacagcaa

SEQ ID NO: 916692 - RNA, 19 nt, Homo sapiens
  misc_RNA (1)...(19): siRNA sense strand
gaaagacccacccaagaaa

SEQ ID NO: 916693 - RNA, 19 nt, Homo sapiens
  misc_RNA (1)...(19): siRNA sense strand
gaaagaagaaggaaagcuu

SEQ ID NO: 916694 - RNA, 19 nt, Homo sapiens
  misc_RNA (1)...(19): siRNA sense strand
gaacuacgacaacacauug

SEQ ID NO: 916695 - RNA, 19 nt, Homo sapiens
  misc_RNA (1)...(19): siRNA sense strand
uagagaagcugaaacacaa

SEQ ID NO: 916696 - RNA, 19 nt, Homo sapiens
  misc_RNA (1)...(19): siRNA sense strand
gaauugggccuuuguaugu

SEQ ID NO: 916697 - RNA, 19 nt, Homo sapiens
  misc_RNA (1)...(19): siRNA sense strand
gacagcaagucaaggauuu

SEQ ID NO: 916698 - RNA, 19 nt, Homo sapiens
  misc_RNA (1)...(19): siRNA sense strand
ggaagaacagaauauauug

SEQ ID NO: 916699 - RNA, 19 nt, Homo sapiens
  misc_RNA (1)...(19): siRNA sense strand
acacagaaccagaucaaua

SEQ ID NO: 916700 - RNA, 19 nt, Homo sapiens
  misc_RNA (1)...(19): siRNA sense strand
cacaaaguaugccaauuaa

SEQ ID NO: 916701 - RNA, 19 nt, Homo sapiens
  misc_RNA (1)...(19): siRNA sense strand
agaaccagaucaauaguaa

SEQ ID NO: 916702 - RNA, 19 nt, Homo sapiens
  misc_RNA (1)...(19): siRNA sense strand
gaagggacauugcuagaac

SEQ ID NO: 916703 - RNA, 19 nt, Homo sapiens
  misc_RNA (1)...(19): siRNA sense strand
caaaaugacugcugccuuu

SEQ ID NO: 916704 - RNA, 19 nt, Homo sapiens
  misc_RNA (1)...(19): siRNA sense strand
ugaaugaguuacaggauga

SEQ ID NO: 916705 - RNA, 19 nt, Homo sapiens
  misc_RNA (1)...(19): siRNA sense strand
ggauaaagucuuggauaua

SEQ ID NO: 916706 - RNA, 19 nt, Homo sapiens
  misc_RNA (1)...(19): siRNA sense strand
caacgaagauuuugugcua

SEQ ID NO: 916707 - RNA, 19 nt, Homo sapiens
  misc_RNA (1)...(19): siRNA sense strand
ggacauugcuagaacuuac

SEQ ID NO: 916708 - RNA, 19 nt, Homo sapiens
  misc_RNA (1)...(19): siRNA sense strand
gacaggagguuuuauuuaa

SEQ ID NO: 916709 - RNA, 19 nt, Homo sapiens
  misc_RNA (1)...(19): siRNA sense strand
ccagagcucuuuguacauu

SEQ ID NO: 916710 - RNA, 19 nt, Homo sapiens
  misc_RNA (1)...(19): siRNA sense strand
uaaugaaggcuuacucuuu

SEQ ID NO: 916711 - RNA, 19 nt, Homo sapiens
  misc_RNA (1)...(19): siRNA sense strand
uaacaagucugauucuaac

SEQ ID NO: 916712 - RNA, 19 nt, Homo sapiens
  misc_RNA (1)...(19): siRNA sense strand
ugaaacacaagcagaaaua

SEQ ID NO: 916713 - RNA, 19 nt, Homo sapiens
  misc_RNA (1)...(19): siRNA sense strand
ggaagagcaaguugaaauu

SEQ ID NO: 916714 - RNA, 19 nt, Homo sapiens
  misc_RNA (1)...(19): siRNA sense strand
gcagaugccagaagaagaa

SEQ ID NO: 916715 - RNA, 19 nt, Homo sapiens
  misc_RNA (1)...(19): siRNA sense strand
auaguuggauuguugcuua

SEQ ID NO: 916716 - RNA, 19 nt, Homo sapiens
  misc_RNA (1)...(19): siRNA sense strand
gaagaagagagucguauuc

SEQ ID NO: 916717 - RNA, 19 nt, Homo sapiens
  misc_RNA (1)...(19): siRNA sense strand
aagcagagauugaaugcaa

SEQ ID NO: 916718 - RNA, 19 nt, Homo sapiens
  misc_RNA (1)...(19): siRNA sense strand
aaacaaaggaugauggaaa

SEQ ID NO: 916719 - RNA, 19 nt, Homo sapiens
  misc_RNA (1)...(19): siRNA sense strand
ccacuuagcucguacuacu

SEQ ID NO: 916720 - RNA, 19 nt, Homo sapiens
  misc_RNA (1)...(19): siRNA sense strand
gaagaacucauugcuguga

SEQ ID NO: 916721 - RNA, 19 nt, Homo sapiens
  misc_RNA (1)...(19): siRNA sense strand
gaagcuuucuguguauuug

SEQ ID NO: 916722 - RNA, 19 nt, Homo sapiens
  misc_RNA (1)...(19): siRNA sense strand
ucaauuaagugaagcaaag

SEQ ID NO: 916723 - RNA, 19 nt, Homo sapiens
  misc_RNA (1)...(19): siRNA sense strand
gauuagcacuucuucagau

SEQ ID NO: 916724 - RNA, 19 nt, Homo sapiens
  misc_RNA (1)...(19): siRNA sense strand
gaaacacaagcagaaauaa

SEQ ID NO: 916725 - RNA, 19 nt, Homo sapiens
  misc_RNA (1)...(19): siRNA sense strand
aaacggauaguaagucuuu

SEQ ID NO: 916726 - RNA, 19 nt, Homo sapiens
  misc_RNA (1)...(19): siRNA sense strand
gaagagagucguauucaac

SEQ ID NO: 916727 - RNA, 19 nt, Homo sapiens
  misc_RNA (1)...(19): siRNA sense strand
gaauaaggaagaagugaug

SEQ ID NO: 916728 - RNA, 19 nt, Homo sapiens
  misc_RNA (1)...(19): siRNA sense strand
aaacauaaaugcaguucca

SEQ ID NO: 916729 - RNA, 19 nt, Homo sapiens
  misc_RNA (1)...(19): siRNA sense strand
gaaaaggaauacacuacaa

SEQ ID NO: 916730 - RNA, 19 nt, Homo sapiens
  misc_RNA (1)...(19): siRNA sense strand
ucagucaccuugaagaaga

SEQ ID NO: 916731 - RNA, 19 nt, Homo sapiens
  misc_RNA (1)...(19): siRNA sense strand
ccaucuacuucauuacaua

SEQ ID NO: 916732 - RNA, 19 nt, Homo sapiens
  misc_RNA (1)...(19): siRNA sense strand
gaacugaugcaacuugaca

SEQ ID NO: 916733 - RNA, 19 nt, Homo sapiens
  misc_RNA (1)...(19): siRNA sense strand
caaccucagucaccuugaa

SEQ ID NO: 916734 - RNA, 19 nt, Homo sapiens
  misc_RNA (1)...(19): siRNA sense strand
ucaaggaagugcuuuuaua

SEQ ID NO: 916735 - RNA, 19 nt, Homo sapiens
  misc_RNA (1)...(19): siRNA sense strand
gaaagaaauggaagagcaa

SEQ ID NO: 916736 - RNA, 19 nt, Homo sapiens
  misc_RNA (1)...(19): siRNA sense strand
caauuaaggaucaguauuc

SEQ ID NO: 916737 - RNA, 19 nt, Homo sapiens
  misc_RNA (1)...(19): siRNA sense strand
ccacauugucaaccauuua

SEQ ID NO: 916738 - RNA, 19 nt, Homo sapiens
  misc_RNA (1)...(19): siRNA sense strand
guaaacaagcagagauuga

SEQ ID NO: 916739 - RNA, 19 nt, Homo sapiens
  misc_RNA (1)...(19): siRNA sense strand
uagaaacccuagugggaaa

SEQ ID NO: 916740 - RNA, 19 nt, Homo sapiens
  misc_RNA (1)...(19): siRNA sense strand
gaugcaggauaaagucuug

SEQ ID NO: 916741 - RNA, 19 nt, Homo sapiens
  misc_RNA (1)...(19): siRNA sense strand
gaaauggaagagcaaguug

SEQ ID NO: 916742 - RNA, 19 nt, Homo sapiens
  misc_RNA (1)...(19): siRNA sense strand
gucugaggguuuagaaaua

SEQ ID NO: 916743 - RNA, 19 nt, Homo sapiens
  misc_RNA (1)...(19): siRNA sense strand
caaaguaugccaauuaagg

SEQ ID NO: 916744 - RNA, 19 nt, Homo sapiens
  misc_RNA (1)...(19): siRNA sense strand
ggaagcagauagcauagcu

SEQ ID NO: 916745 - RNA, 19 nt, Homo sapiens
  misc_RNA (1)...(19): siRNA sense strand
ggacaggagguuuuauuua

SEQ ID NO: 916746 - RNA, 19 nt, Homo sapiens
  misc_RNA (1)...(19): siRNA sense strand
aacaguggcucuucucuug

SEQ ID NO: 916747 - RNA, 19 nt, Homo sapiens
  misc_RNA (1)...(19): siRNA sense strand
gcagaacugaugcaacuug

SEQ ID NO: 916748 - RNA, 19 nt, Homo sapiens
  misc_RNA (1)...(19): siRNA sense strand
gcaucauccugguuucuga

SEQ ID NO: 916749 - RNA, 19 nt, Homo sapiens
  misc_RNA (1)...(19): siRNA sense strand
cagcuuaccaaguccaaua

SEQ ID NO: 916750 - RNA, 19 nt, Homo sapiens
  misc_RNA (1)...(19): siRNA sense strand
ugucaaccauuuaauagga

SEQ ID NO: 916751 - RNA, 19 nt, Homo sapiens
  misc_RNA (1)...(19): siRNA sense strand
aaggacagcuuaacaaguc

SEQ ID NO: 916752 - RNA, 19 nt, Homo sapiens
  misc_RNA (1)...(19): siRNA sense strand
gcaagaauaaggaagaagu

SEQ ID NO: 916753 - RNA, 19 nt, Homo sapiens
  misc_RNA (1)...(19): siRNA sense strand
agucaaggauuuagaggaa

SEQ ID NO: 916754 - RNA, 19 nt, Homo sapiens
  misc_RNA (1)...(19): siRNA sense strand
gauauagagaagaggaaua

SEQ ID NO: 916755 - RNA, 19 nt, Homo sapiens
  misc_RNA (1)...(19): siRNA sense strand
gaugcaacuugacauggaa

SEQ ID NO: 916756 - RNA, 19 nt, Homo sapiens
  misc_RNA (1)...(19): siRNA sense strand
acacauugcugagcuugaa

SEQ ID NO: 916757 - RNA, 19 nt, Homo sapiens
  misc_RNA (1)...(19): siRNA sense strand
gaucaauaguaaccaucuu

SEQ ID NO: 916758 - RNA, 19 nt, Homo sapiens
  misc_RNA (1)...(19): siRNA sense strand
ggucauuccacaucaguuu

SEQ ID NO: 916759 - RNA, 19 nt, Homo sapiens
  misc_RNA (1)...(19): siRNA sense strand
uggcuaaacuggaagaaca

SEQ ID NO: 916760 - RNA, 19 nt, Homo sapiens
  misc_RNA (1)...(19): siRNA sense strand
gauucuaaccaguauauug

SEQ ID NO: 916761 - RNA, 19 nt, Homo sapiens
  misc_RNA (1)...(19): siRNA sense strand
gcagaacaagaggugauua

SEQ ID NO: 916762 - RNA, 19 nt, Homo sapiens
  misc_RNA (1)...(19): siRNA sense strand
cugaugaccauucgacuua

SEQ ID NO: 916763 - RNA, 19 nt, Homo sapiens
  misc_RNA (1)...(19): siRNA sense strand
cauuauggguuugaaagaa

SEQ ID NO: 916764 - RNA, 19 nt, Homo sapiens
  misc_RNA (1)...(19): siRNA sense strand
gaauaacucccuuccugau

SEQ ID NO: 916765 - RNA, 19 nt, Homo sapiens
  misc_RNA (1)...(19): siRNA sense strand
aggauaaagucuuggauau

SEQ ID NO: 916766 - RNA, 19 nt, Homo sapiens
  misc_RNA (1)...(19): siRNA sense strand
ccaacuacaacgaagauuu

SEQ ID NO: 916767 - RNA, 19 nt, Homo sapiens
  misc_RNA (1)...(19): siRNA sense strand
cugacuaucuuucuuacaa

SEQ ID NO: 916768 - RNA, 19 nt, Homo sapiens
  misc_RNA (1)...(19): siRNA sense strand
gauuguugcuuaugcagau

SEQ ID NO: 916769 - RNA, 19 nt, Homo sapiens
  misc_RNA (1)...(19): siRNA sense strand
caggauaaagucuuggaua

SEQ ID NO: 916770 - RNA, 19 nt, Homo sapiens
  misc_RNA (1)...(19): siRNA sense strand
ucagucagauggccaguca

SEQ ID NO: 916771 - RNA, 19 nt, Homo sapiens
  misc_RNA (1)...(19): siRNA sense strand
ggaagugcuuuuauaguug

SEQ ID NO: 916772 - RNA, 19 nt, Homo sapiens
  misc_RNA (1)...(19): siRNA sense strand
guagugagagcgaaacaga

SEQ ID NO: 916773 - RNA, 19 nt, Homo sapiens
  misc_RNA (1)...(19): siRNA sense strand
gaagaagugauggcuguga

SEQ ID NO: 916774 - RNA, 19 nt, Homo sapiens
  misc_RNA (1)...(19): siRNA sense strand
gaagcaaagcguaaacaag

SEQ ID NO: 916775 - RNA, 19 nt, Homo sapiens
  misc_RNA (1)...(19): siRNA sense strand
aacaaaggaugauggaaau

SEQ ID NO: 916776 - RNA, 19 nt, Homo sapiens
  misc_RNA (1)...(19): siRNA sense strand
gaugaccauucgacuuaga

SEQ ID NO: 916777 - RNA, 19 nt, Homo sapiens
  misc_RNA (1)...(19): siRNA sense strand
cagaacugaugcaacuuga

SEQ ID NO: 916778 - RNA, 19 nt, Homo sapiens
  misc_RNA (1)...(19): siRNA sense strand
caaauacccuuuacuguua

SEQ ID NO: 916779 - RNA, 19 nt, Homo sapiens
  misc_RNA (1)...(19): siRNA sense strand
gaagucgccuagucaaaua

SEQ ID NO: 916780 - RNA, 19 nt, Homo sapiens
  misc_RNA (1)...(19): siRNA sense strand
ggaggaugcuauauugaua

SEQ ID NO: 916781 - RNA, 19 nt, Homo sapiens
  misc_RNA (1)...(19): siRNA sense strand
gaagaggaacucacacaua

SEQ ID NO: 916782 - RNA, 19 nt, Homo sapiens
  misc_RNA (1)...(19): siRNA sense strand
gagcaagaguggacauaaa

SEQ ID NO: 916783 - RNA, 19 nt, Homo sapiens
  misc_RNA (1)...(19): siRNA sense strand
ccaaagcucuucuugauca

SEQ ID NO: 916784 - RNA, 19 nt, Homo sapiens
  misc_RNA (1)...(19): siRNA sense strand
ggaacgaacggcacucuua

SEQ ID NO: 916785 - RNA, 19 nt, Homo sapiens
  misc_RNA (1)...(19): siRNA sense strand
caagaaaggccuaccauga

SEQ ID NO: 916786 - RNA, 19 nt, Homo sapiens
  misc_RNA (1)...(19): siRNA sense strand
ggaacucacacauauauuu

SEQ ID NO: 916787 - RNA, 19 nt, Homo sapiens
  misc_RNA (1)...(19): siRNA sense strand
gaacucacacauauauuug

SEQ ID NO: 916788 - RNA, 19 nt, Homo sapiens
  misc_RNA (1)...(19): siRNA sense strand
gaucuggacucuuacauac

SEQ ID NO: 916789 - RNA, 19 nt, Homo sapiens
  misc_RNA (1)...(19): siRNA sense strand
aagaggaacucacacauau

SEQ ID NO: 916790 - RNA, 19 nt, Homo sapiens
  misc_RNA (1)...(19): siRNA sense strand
caagaggagccaagcaaua

SEQ ID NO: 916791 - RNA, 19 nt, Homo sapiens
  misc_RNA (1)...(19): siRNA sense strand
ucacguccuuggcaaauuu

SEQ ID NO: 916792 - RNA, 19 nt, Homo sapiens
  misc_RNA (1)...(19): siRNA sense strand
ucaaauacccuuuacuguu

SEQ ID NO: 916793 - RNA, 19 nt, Homo sapiens
  misc_RNA (1)...(19): siRNA sense strand
ggucagagaugcuggacau

SEQ ID NO: 916794 - RNA, 19 nt, Homo sapiens
  misc_RNA (1)...(19): siRNA sense strand
ccaaugacguguuccacaa

SEQ ID NO: 916795 - RNA, 19 nt, Homo sapiens
  misc_RNA (1)...(19): siRNA sense strand
uuggugaucuggacucuua

SEQ ID NO: 916796 - RNA, 19 nt, Homo sapiens
  misc_RNA (1)...(19): siRNA sense strand
gaggaacucacacauauau

SEQ ID NO: 916797 - RNA, 19 nt, Homo sapiens
  misc_RNA (1)...(19): siRNA sense strand
uuacauaccucugcaugaa

SEQ ID NO: 916798 - RNA, 19 nt, Homo sapiens
  misc_RNA (1)...(19): siRNA sense strand
ggauggagaugugagaaug

SEQ ID NO: 916799 - RNA, 19 nt, Homo sapiens
  misc_RNA (1)...(19): siRNA sense strand
gcaagccaaugacguguuc

SEQ ID NO: 916800 - RNA, 19 nt, Homo sapiens
  misc_RNA (1)...(19): siRNA sense strand
gcaugaagauuuguugaca

SEQ ID NO: 916801 - RNA, 19 nt, Homo sapiens
  misc_RNA (1)...(19): siRNA sense strand
uuuaaucucuccuguaaga

SEQ ID NO: 916802 - RNA, 19 nt, Homo sapiens
  misc_RNA (1)...(19): siRNA sense strand
ggaguccucucugauauca

SEQ ID NO: 916803 - RNA, 19 nt, Homo sapiens
  misc_RNA (1)...(19): siRNA sense strand
gcgcuugaaugccuacaga

SEQ ID NO: 916804 - RNA, 19 nt, Homo sapiens
  misc_RNA (1)...(19): siRNA sense strand
ggagcagauuggucacauu

SEQ ID NO: 916805 - RNA, 19 nt, Homo sapiens
  misc_RNA (1)...(19): siRNA sense strand
gaggacagcaagagcuuaa

SEQ ID NO: 916806 - RNA, 19 nt, Homo sapiens
  misc_RNA (1)...(19): siRNA sense strand
ugaaaacgcuuacagaugu

SEQ ID NO: 916807 - RNA, 19 nt, Homo sapiens
  misc_RNA (1)...(19): siRNA sense strand
acacauauauuuggugauc

SEQ ID NO: 916808 - RNA, 19 nt, Homo sapiens
  misc_RNA (1)...(19): siRNA sense strand
gcaggaggcaauauaugaa

SEQ ID NO: 916809 - RNA, 19 nt, Homo sapiens
  misc_RNA (1)...(19): siRNA sense strand
ucuggaggaugcuauauug

SEQ ID NO: 916810 - RNA, 19 nt, Homo sapiens
  misc_RNA (1)...(19): siRNA sense strand
ggcaggaggcaauauauga

SEQ ID NO: 916811 - RNA, 19 nt, Homo sapiens
  misc_RNA (1)...(19): siRNA sense strand
gcaagagcuuaaagacaca

SEQ ID NO: 916812 - RNA, 19 nt, Homo sapiens
  misc_RNA (1)...(19): siRNA sense strand
gaggagggcauccacaguu

SEQ ID NO: 916813 - RNA, 19 nt, Homo sapiens
  misc_RNA (1)...(19): siRNA sense strand
gaggaugcuauauugauaa

SEQ ID NO: 916814 - RNA, 19 nt, Homo sapiens
  misc_RNA (1)...(19): siRNA sense strand
gcagauuggucacauucuc

SEQ ID NO: 916815 - RNA, 19 nt, Homo sapiens
  misc_RNA (1)...(19): siRNA sense strand
gugaacaggauuuaauuga

SEQ ID NO: 916816 - RNA, 19 nt, Homo sapiens
  misc_RNA (1)...(19): siRNA sense strand
gaggugaacaggauuuaau

SEQ ID NO: 916817 - RNA, 19 nt, Homo sapiens
  misc_RNA (1)...(19): siRNA sense strand
gucaaacaauacagucauu

SEQ ID NO: 916818 - RNA, 19 nt, Homo sapiens
  misc_RNA (1)...(19): siRNA sense strand
ggagcaagaguggacauaa

SEQ ID NO: 916819 - RNA, 19 nt, Homo sapiens
  misc_RNA (1)...(19): siRNA sense strand
agccaaagcucuucuugau

SEQ ID NO: 916820 - RNA, 19 nt, Homo sapiens
  misc_RNA (1)...(19): siRNA sense strand
cagggaguccucucugaua

SEQ ID NO: 916821 - RNA, 19 nt, Homo sapiens
  misc_RNA (1)...(19): siRNA sense strand
uuacucagguagaaguuga

SEQ ID NO: 916822 - RNA, 19 nt, Homo sapiens
  misc_RNA (1)...(19): siRNA sense strand
ugaaaugucccgaggugaa

SEQ ID NO: 916823 - RNA, 19 nt, Homo sapiens
  misc_RNA (1)...(19): siRNA sense strand
uaaccaguccuucagagaa

SEQ ID NO: 916824 - RNA, 19 nt, Homo sapiens
  misc_RNA (1)...(19): siRNA sense strand
ugccggagcugcacgaaga

SEQ ID NO: 916825 - RNA, 19 nt, Homo sapiens
  misc_RNA (1)...(19): siRNA sense strand
gagcagauuggucacauuc

SEQ ID NO: 916826 - RNA, 19 nt, Homo sapiens
  misc_RNA (1)...(19): siRNA sense strand
gaacaguggagcagauugg

SEQ ID NO: 916827 - RNA, 19 nt, Homo sapiens
  misc_RNA (1)...(19): siRNA sense strand
aagaggagccaagcaauaa

SEQ ID NO: 916828 - RNA, 19 nt, Homo sapiens
  misc_RNA (1)...(19): siRNA sense strand
gagucucccuucagucgaa

SEQ ID NO: 916829 - RNA, 19 nt, Homo sapiens
  misc_RNA (1)...(19): siRNA sense strand
gaacgaacggcacucuuac

SEQ ID NO: 916830 - RNA, 19 nt, Homo sapiens
  misc_RNA (1)...(19): siRNA sense strand
cuuuggaguuuccuagaua

SEQ ID NO: 916831 - RNA, 19 nt, Homo sapiens
  misc_RNA (1)...(19): siRNA sense strand
gaggcaauauaugaaaugu

SEQ ID NO: 916832 - RNA, 19 nt, Homo sapiens
  misc_RNA (1)...(19): siRNA sense strand
caaaagagcacccugaugu

SEQ ID NO: 916833 - RNA, 19 nt, Homo sapiens
  misc_RNA (1)...(19): siRNA sense strand
aaagaaacaggauccaaga

SEQ ID NO: 916834 - RNA, 19 nt, Homo sapiens
  misc_RNA (1)...(19): siRNA sense strand
gaagcaaccaagccugaug

SEQ ID NO: 916835 - RNA, 19 nt, Homo sapiens
  misc_RNA (1)...(19): siRNA sense strand
caucaugucagaagaggaa

SEQ ID NO: 916836 - RNA, 19 nt, Homo sapiens
  misc_RNA (1)...(19): siRNA sense strand
gaucucaaacuugcaagaa

SEQ ID NO: 916837 - RNA, 19 nt, Homo sapiens
  misc_RNA (1)...(19): siRNA sense strand
ugaacaggauuuaauugag

SEQ ID NO: 916838 - RNA, 19 nt, Homo sapiens
  misc_RNA (1)...(19): siRNA sense strand
gaauccgagugccaguauu

SEQ ID NO: 916839 - RNA, 19 nt, Homo sapiens
  misc_RNA (1)...(19): siRNA sense strand
cuagauaucccucgaaguc

SEQ ID NO: 916840 - RNA, 19 nt, Homo sapiens
  misc_RNA (1)...(19): siRNA sense strand
uuaaaguuguccaucaugu

SEQ ID NO: 916841 - RNA, 19 nt, Homo sapiens
  misc_RNA (1)...(19): siRNA sense strand
cgaagucgccuagucaaau

SEQ ID NO: 916842 - RNA, 19 nt, Homo sapiens
  misc_RNA (1)...(19): siRNA sense strand
gaacaagaggagccaagca

SEQ ID NO: 916843 - RNA, 19 nt, Homo sapiens
  misc_RNA (1)...(19): siRNA sense strand
aauccgagugccaguauua

SEQ ID NO: 916844 - RNA, 19 nt, Homo sapiens
  misc_RNA (1)...(19): siRNA sense strand
ggaggcaauauaugaaaug

SEQ ID NO: 916845 - RNA, 19 nt, Homo sapiens
  misc_RNA (1)...(19): siRNA sense strand
gaagagcgagggacaaagc

SEQ ID NO: 916846 - RNA, 19 nt, Homo sapiens
  misc_RNA (1)...(19): siRNA sense strand
ggacagcaagagcuuaaag

SEQ ID NO: 916847 - RNA, 19 nt, Homo sapiens
  misc_RNA (1)...(19): siRNA sense strand
ucagguagaaguugaugaa

SEQ ID NO: 916848 - RNA, 19 nt, Homo sapiens
  misc_RNA (1)...(19): siRNA sense strand
uaacucagagaaagcuaaa

SEQ ID NO: 916849 - RNA, 19 nt, Homo sapiens
  misc_RNA (1)...(19): siRNA sense strand
caagaguggacauaaacuu

SEQ ID NO: 916850 - RNA, 19 nt, Homo sapiens
  misc_RNA (1)...(19): siRNA sense strand
acauaccucugcaugaaga

SEQ ID NO: 916851 - RNA, 19 nt, Homo sapiens
  misc_RNA (1)...(19): siRNA sense strand
gacggcaggaggcaauaua

SEQ ID NO: 916852 - RNA, 19 nt, Homo sapiens
  misc_RNA (1)...(19): siRNA sense strand
ucgaggagcuuucaguaac

SEQ ID NO: 916853 - RNA, 19 nt, Homo sapiens
  misc_RNA (1)...(19): siRNA sense strand
gaccauacgaguccuagau

SEQ ID NO: 916854 - RNA, 19 nt, Homo sapiens
  misc_RNA (1)...(19): siRNA sense strand
uaaucucuccuguaagaaa

SEQ ID NO: 916855 - RNA, 19 nt, Homo sapiens
  misc_RNA (1)...(19): siRNA sense strand
ucucaaacuugcaagaaag

SEQ ID NO: 916856 - RNA, 19 nt, Homo sapiens
  misc_RNA (1)...(19): siRNA sense strand
guaacucagagaaagcuaa

SEQ ID NO: 916857 - RNA, 19 nt, Homo sapiens
  misc_RNA (1)...(19): siRNA sense strand
ggugaacaggauuuaauug

SEQ ID NO: 916858 - RNA, 19 nt, Homo sapiens
  misc_RNA (1)...(19): siRNA sense strand
uaaagacacaccagacaca

SEQ ID NO: 916859 - RNA, 19 nt, Homo sapiens
  misc_RNA (1)...(19): siRNA sense strand
aggagggcauccacaguuu

SEQ ID NO: 916860 - RNA, 19 nt, Homo sapiens
  misc_RNA (1)...(19): siRNA sense strand
aagaguggacauaaacuuu

SEQ ID NO: 916861 - RNA, 19 nt, Homo sapiens
  misc_RNA (1)...(19): siRNA sense strand
ugaucuggacucuuacaua

SEQ ID NO: 916862 - RNA, 19 nt, Homo sapiens
  misc_RNA (1)...(19): siRNA sense strand
uacagggaguccucucuga

SEQ ID NO: 916863 - RNA, 19 nt, Homo sapiens
  misc_RNA (1)...(19): siRNA sense strand
aaccaagccugauggaaca

SEQ ID NO: 916864 - RNA, 19 nt, Homo sapiens
  misc_RNA (1)...(19): siRNA sense strand
ccauacgaguccuagaugu

SEQ ID NO: 916865 - RNA, 19 nt, Homo sapiens
  misc_RNA (1)...(19): siRNA sense strand
gacagcaagagcuuaaaga

SEQ ID NO: 916866 - RNA, 19 nt, Homo sapiens
  misc_RNA (1)...(19): siRNA sense strand
cauccacaguuuccagugu

SEQ ID NO: 916867 - RNA, 19 nt, Homo sapiens
  misc_RNA (1)...(19): siRNA sense strand
ccuagucaaauacccuuua

SEQ ID NO: 916868 - RNA, 19 nt, Homo sapiens
  misc_RNA (1)...(19): siRNA sense strand
uugaaugccuacagagguu

SEQ ID NO: 916869 - RNA, 19 nt, Homo sapiens
  misc_RNA (1)...(19): siRNA sense strand
uggaguaccuggaugaaaa

SEQ ID NO: 916870 - RNA, 19 nt, Homo sapiens
  misc_RNA (1)...(19): siRNA sense strand
caaagcucuucuugaucaa

SEQ ID NO: 916871 - RNA, 19 nt, Homo sapiens
  misc_RNA (1)...(19): siRNA sense strand
caggaggcaauauaugaaa

SEQ ID NO: 916872 - RNA, 19 nt, Homo sapiens
  misc_RNA (1)...(19): siRNA sense strand
caauaaccaguccuucaga

SEQ ID NO: 916873 - RNA, 19 nt, Homo sapiens
  misc_RNA (1)...(19): siRNA sense strand
gaggaucucaaacuugcaa

SEQ ID NO: 916874 - RNA, 19 nt, Homo sapiens
  misc_RNA (1)...(19): siRNA sense strand
gcagccaaagcucuucuug

SEQ ID NO: 916875 - RNA, 19 nt, Homo sapiens
  misc_RNA (1)...(19): siRNA sense strand
cagcaagagcuuaaagaca

SEQ ID NO: 916876 - RNA, 19 nt, Homo sapiens
  misc_RNA (1)...(19): siRNA sense strand
gcaggauggagaugugaga

SEQ ID NO: 916877 - RNA, 19 nt, Homo sapiens
  misc_RNA (1)...(19): siRNA sense strand
ccagcgaugucucgagucu

SEQ ID NO: 916878 - RNA, 19 nt, Homo sapiens
  misc_RNA (1)...(19): siRNA sense strand
ggaaagaccugcagcaucu

SEQ ID NO: 916879 - RNA, 19 nt, Homo sapiens
  misc_RNA (1)...(19): siRNA sense strand
acaagaagcucuccaagau

SEQ ID NO: 916880 - RNA, 19 nt, Homo sapiens
  misc_RNA (1)...(19): siRNA sense strand
aagaagcucuccaagauug

SEQ ID NO: 916881 - RNA, 19 nt, Homo sapiens
  misc_RNA (1)...(19): siRNA sense strand
gacaagaagcucuccaaga

SEQ ID NO: 916882 - RNA, 19 nt, Homo sapiens
  misc_RNA (1)...(19): siRNA sense strand
caagaagcucuccaagauu

SEQ ID NO: 916883 - RNA, 19 nt, Homo sapiens
  misc_RNA (1)...(19): siRNA sense strand
gcgccuggccaucugcuau

SEQ ID NO: 916884 - RNA, 19 nt, Homo sapiens
  misc_RNA (1)...(19): siRNA sense strand
aaagaccugcagcaucuga

SEQ ID NO: 916885 - RNA, 19 nt, Homo sapiens
  misc_RNA (1)...(19): siRNA sense strand
gaacugugcugaugugaaa

SEQ ID NO: 916886 - RNA, 19 nt, Homo sapiens
  misc_RNA (1)...(19): siRNA sense strand
ugaaauaguugcugugaaa

SEQ ID NO: 916887 - RNA, 19 nt, Homo sapiens
  misc_RNA (1)...(19): siRNA sense strand
gaaaugaugcagucaauga

SEQ ID NO: 916888 - RNA, 19 nt, Homo sapiens
  misc_RNA (1)...(19): siRNA sense strand
gagaaaugaugcagucaau

SEQ ID NO: 916889 - RNA, 19 nt, Homo sapiens
  misc_RNA (1)...(19): siRNA sense strand
gauagaaauuguucagugu

SEQ ID NO: 916890 - RNA, 19 nt, Homo sapiens
  misc_RNA (1)...(19): siRNA sense strand
gaaaagugcuccagaggaa

SEQ ID NO: 916891 - RNA, 19 nt, Homo sapiens
  misc_RNA (1)...(19): siRNA sense strand
cuaaagaacugugcugaug

SEQ ID NO: 916892 - RNA, 19 nt, Homo sapiens
  misc_RNA (1)...(19): siRNA sense strand
gccaugaccugugcaauga

SEQ ID NO: 916893 - RNA, 19 nt, Homo sapiens
  misc_RNA (1)...(19): siRNA sense strand
ggcauuaucuggaucacuu

SEQ ID NO: 916894 - RNA, 19 nt, Homo sapiens
  misc_RNA (1)...(19): siRNA sense strand
uaagguggagugucuauuu

SEQ ID NO: 916895 - RNA, 19 nt, Homo sapiens
  misc_RNA (1)...(19): siRNA sense strand
gcacagcaacaacagaaga

SEQ ID NO: 916896 - RNA, 19 nt, Homo sapiens
  misc_RNA (1)...(19): siRNA sense strand
gaaauuguucaguguagga

SEQ ID NO: 916897 - RNA, 19 nt, Homo sapiens
  misc_RNA (1)...(19): siRNA sense strand
aaagaacugugcugaugug

SEQ ID NO: 916898 - RNA, 19 nt, Homo sapiens
  misc_RNA (1)...(19): siRNA sense strand
ggcauaagguggagugucu

SEQ ID NO: 916899 - RNA, 19 nt, Homo sapiens
  misc_RNA (1)...(19): siRNA sense strand
gguaaucccugguuaaccu

SEQ ID NO: 916900 - RNA, 19 nt, Homo sapiens
  misc_RNA (1)...(19): siRNA sense strand
gaugguaaucccugguuaa

SEQ ID NO: 916901 - RNA, 19 nt, Homo sapiens
  misc_RNA (1)...(19): siRNA sense strand
agaggaauaugcacagcaa

SEQ ID NO: 916902 - RNA, 19 nt, Homo sapiens
  misc_RNA (1)...(19): siRNA sense strand
ggaucacuuucaaugagaa

SEQ ID NO: 916903 - RNA, 19 nt, Homo sapiens
  misc_RNA (1)...(19): siRNA sense strand
agaagaggccugcaugguu

SEQ ID NO: 916904 - RNA, 19 nt, Homo sapiens
  misc_RNA (1)...(19): siRNA sense strand
uagaaauuguucaguguag

SEQ ID NO: 916905 - RNA, 19 nt, Homo sapiens
  misc_RNA (1)...(19): siRNA sense strand
ggaauaugcacagcaacaa

SEQ ID NO: 916906 - RNA, 19 nt, Homo sapiens
  misc_RNA (1)...(19): siRNA sense strand
uucaugggcugccuaaaga

SEQ ID NO: 916907 - RNA, 19 nt, Homo sapiens
  misc_RNA (1)...(19): siRNA sense strand
ugcagucaaugaaauaguu

SEQ ID NO: 916908 - RNA, 19 nt, Homo sapiens
  misc_RNA (1)...(19): siRNA sense strand
ugaugcagucaaugaaaua

SEQ ID NO: 916909 - RNA, 19 nt, Homo sapiens
  misc_RNA (1)...(19): siRNA sense strand
aagguggagugucuauuug

SEQ ID NO: 916910 - RNA, 19 nt, Homo sapiens
  misc_RNA (1)...(19): siRNA sense strand
uaaagaacugugcugaugu

SEQ ID NO: 916911 - RNA, 19 nt, Homo sapiens
  misc_RNA (1)...(19): siRNA sense strand
caacagaagaggccugcau

SEQ ID NO: 916912 - RNA, 19 nt, Homo sapiens
  misc_RNA (1)...(19): siRNA sense strand
auccugcucugcugcuuua

SEQ ID NO: 916913 - RNA, 19 nt, Homo sapiens
  misc_RNA (1)...(19): siRNA sense strand
gcagucaaugaaauaguug

SEQ ID NO: 916914 - RNA, 19 nt, Homo sapiens
  misc_RNA (1)...(19): siRNA sense strand
ggaugugccaccuccaguu

SEQ ID NO: 916915 - RNA, 19 nt, Homo sapiens
  misc_RNA (1)...(19): siRNA sense strand
uggaucacuuucaaugaga

SEQ ID NO: 916916 - RNA, 19 nt, Homo sapiens
  misc_RNA (1)...(19): siRNA sense strand
gaugugaaaggcauaaggu

SEQ ID NO: 916917 - RNA, 19 nt, Homo sapiens
  misc_RNA (1)...(19): siRNA sense strand
gaugugccaccuccaguuc

SEQ ID NO: 916918 - RNA, 19 nt, Homo sapiens
  misc_RNA (1)...(19): siRNA sense strand
gguggagugucuauuuggu

SEQ ID NO: 916919 - RNA, 19 nt, Homo sapiens
  misc_RNA (1)...(19): siRNA sense strand
aaagugcuccagaggaaga

SEQ ID NO: 916920 - RNA, 19 nt, Homo sapiens
  misc_RNA (1)...(19): siRNA sense strand
caugaccugugcaaugaag

SEQ ID NO: 916921 - RNA, 19 nt, Homo sapiens
  misc_RNA (1)...(19): siRNA sense strand
gaauaugcacagcaacaac

SEQ ID NO: 916922 - RNA, 19 nt, Homo sapiens
  misc_RNA (1)...(19): siRNA sense strand
cuggaucacuuucaaugag

SEQ ID NO: 916923 - RNA, 19 nt, Homo sapiens
  misc_RNA (1)...(19): siRNA sense strand
ugagaaaugaugcagucaa

SEQ ID NO: 916924 - RNA, 19 nt, Homo sapiens
  misc_RNA (1)...(19): siRNA sense strand
gcauuaucuggaucacuuu

SEQ ID NO: 916925 - RNA, 19 nt, Homo sapiens
  misc_RNA (1)...(19): siRNA sense strand
cuccagaggaagaggaaua

SEQ ID NO: 916926 - RNA, 19 nt, Homo sapiens
  misc_RNA (1)...(19): siRNA sense strand
ccugugcaaugaagaccuu

SEQ ID NO: 916927 - RNA, 19 nt, Homo sapiens
  misc_RNA (1)...(19): siRNA sense strand
cauaagguggagugucuau

SEQ ID NO: 916928 - RNA, 19 nt, Homo sapiens
  misc_RNA (1)...(19): siRNA sense strand
aaugaugcagucaaugaaa

SEQ ID NO: 916929 - RNA, 19 nt, Homo sapiens
  misc_RNA (1)...(19): siRNA sense strand
aaaugaugcagucaaugaa

SEQ ID NO: 916930 - RNA, 19 nt, Homo sapiens
  misc_RNA (1)...(19): siRNA sense strand
uuaucuggaucacuuucaa

SEQ ID NO: 916931 - RNA, 19 nt, Homo sapiens
  misc_RNA (1)...(19): siRNA sense strand
gugucuauuuggugaacuu

SEQ ID NO: 916932 - RNA, 19 nt, Homo sapiens
  misc_RNA (1)...(19): siRNA sense strand
ggaaaguccuguuugauca

SEQ ID NO: 916933 - RNA, 19 nt, Homo sapiens
  misc_RNA (1)...(19): siRNA sense strand
gaauugggcuugucuacgu

SEQ ID NO: 916934 - RNA, 19 nt, Homo sapiens
  misc_RNA (1)...(19): siRNA sense strand
uugaagaacucccugguuu

SEQ ID NO: 916935 - RNA, 19 nt, Homo sapiens
  misc_RNA (1)...(19): siRNA sense strand
gggaacacaggcuacauua

SEQ ID NO: 916936 - RNA, 19 nt, Homo sapiens
  misc_RNA (1)...(19): siRNA sense strand
ugacauacaucuucaugca

SEQ ID NO: 916937 - RNA, 19 nt, Homo sapiens
  misc_RNA (1)...(19): siRNA sense strand
gucacuaggucaauuugua

SEQ ID NO: 916938 - RNA, 19 nt, Homo sapiens
  misc_RNA (1)...(19): siRNA sense strand
gcauggagccacccgaauu

SEQ ID NO: 916939 - RNA, 19 nt, Homo sapiens
  misc_RNA (1)...(19): siRNA sense strand
ugaagaacucccugguuua

SEQ ID NO: 916940 - RNA, 19 nt, Homo sapiens
  misc_RNA (1)...(19): siRNA sense strand
gaacuggucaggcaugaag

SEQ ID NO: 916941 - RNA, 19 nt, Homo sapiens
  misc_RNA (1)...(19): siRNA sense strand
gaacaccugggacucaaug

SEQ ID NO: 916942 - RNA, 19 nt, Homo sapiens
  misc_RNA (1)...(19): siRNA sense strand
gaagaacucccugguuuac

SEQ ID NO: 916943 - RNA, 19 nt, Homo sapiens
  misc_RNA (1)...(19): siRNA sense strand
cuucaugcaugcagggaua

SEQ ID NO: 916944 - RNA, 19 nt, Homo sapiens
  misc_RNA (1)...(19): siRNA sense strand
gcagaucggcuaccaggau

SEQ ID NO: 916945 - RNA, 19 nt, Homo sapiens
  misc_RNA (1)...(19): siRNA sense strand
gcaacaagcguuccaacag

SEQ ID NO: 916946 - RNA, 19 nt, Homo sapiens
  misc_RNA (1)...(19): siRNA sense strand
cagaucggcuaccaggauu

SEQ ID NO: 916947 - RNA, 19 nt, Homo sapiens
  misc_RNA (1)...(19): siRNA sense strand
ggauggcuguggcccuuau

SEQ ID NO: 916948 - RNA, 19 nt, Homo sapiens
  misc_RNA (1)...(19): siRNA sense strand
aaauugaccgcaaguggua

SEQ ID NO: 916949 - RNA, 19 nt, Homo sapiens
  misc_RNA (1)...(19): siRNA sense strand
ccacuggaaaguccuguuu

SEQ ID NO: 916950 - RNA, 19 nt, Homo sapiens
  misc_RNA (1)...(19): siRNA sense strand
caauuuguacugcagguaa

SEQ ID NO: 916951 - RNA, 19 nt, Homo sapiens
  misc_RNA (1)...(19): siRNA sense strand
gaccgcaagugguacuaug

SEQ ID NO: 916952 - RNA, 19 nt, Homo sapiens
  misc_RNA (1)...(19): siRNA sense strand
ccacguuacuugaagaacu

SEQ ID NO: 916953 - RNA, 19 nt, Homo sapiens
  misc_RNA (1)...(19): siRNA sense strand
gguguaugcucucgucucu

SEQ ID NO: 916954 - RNA, 19 nt, Homo sapiens
  misc_RNA (1)...(19): siRNA sense strand
gcuguggcccuuaucugua

SEQ ID NO: 916955 - RNA, 19 nt, Homo sapiens
  misc_RNA (1)...(19): siRNA sense strand
acuggaaaguccuguuuga

SEQ ID NO: 916956 - RNA, 19 nt, Homo sapiens
  misc_RNA (1)...(19): siRNA sense strand
acacccugcuggacuuaaa

SEQ ID NO: 916957 - RNA, 19 nt, Homo sapiens
  misc_RNA (1)...(19): siRNA sense strand
gcaggguccuuggcagugu

SEQ ID NO: 916958 - RNA, 19 nt, Homo sapiens
  misc_RNA (1)...(19): siRNA sense strand
uggccaacauugucaugaa

SEQ ID NO: 916959 - RNA, 19 nt, Homo sapiens
  misc_RNA (1)...(19): siRNA sense strand
ggcgcuaccugacauacau

SEQ ID NO: 916960 - RNA, 19 nt, Homo sapiens
  misc_RNA (1)...(19): siRNA sense strand
guaugagcauggaguuugg

SEQ ID NO: 916961 - RNA, 19 nt, Homo sapiens
  misc_RNA (1)...(19): siRNA sense strand
uagaacaccugggacucaa

SEQ ID NO: 916962 - RNA, 19 nt, Homo sapiens
  misc_RNA (1)...(19): siRNA sense strand
ggugucacuaggucaauuu

SEQ ID NO: 916963 - RNA, 19 nt, Homo sapiens
  misc_RNA (1)...(19): siRNA sense strand
ccaacauugucaugaacug

SEQ ID NO: 916964 - RNA, 19 nt, Homo sapiens
  misc_RNA (1)...(19): siRNA sense strand
ggaacacaggcuacauuag

SEQ ID NO: 916965 - RNA, 19 nt, Homo sapiens
  misc_RNA (1)...(19): siRNA sense strand
cuacguggccgguguugug

SEQ ID NO: 916966 - RNA, 19 nt, Homo sapiens
  misc_RNA (1)...(19): siRNA sense strand
cauccacguuacuugaaga

SEQ ID NO: 916967 - RNA, 19 nt, Homo sapiens
  misc_RNA (1)...(19): siRNA sense strand
cagggcaaccgcaggcuaa

SEQ ID NO: 916968 - RNA, 19 nt, Homo sapiens
  misc_RNA (1)...(19): siRNA sense strand
cagcugcgagcacagguuu

SEQ ID NO: 916969 - RNA, 19 nt, Homo sapiens
  misc_RNA (1)...(19): siRNA sense strand
ccacccugguucaugauca

SEQ ID NO: 916970 - RNA, 19 nt, Homo sapiens
  misc_RNA (1)...(19): siRNA sense strand
gggugucacuaggucaauu

SEQ ID NO: 916971 - RNA, 19 nt, Homo sapiens
  misc_RNA (1)...(19): siRNA sense strand
cauggagccacccgaauug

SEQ ID NO: 916972 - RNA, 19 nt, Homo sapiens
  misc_RNA (1)...(19): siRNA sense strand
uaccugacauacaucuuca

SEQ ID NO: 916973 - RNA, 19 nt, Homo sapiens
  misc_RNA (1)...(19): siRNA sense strand
uggaaaguccuguuugauc

SEQ ID NO: 916974 - RNA, 19 nt, Homo sapiens
  misc_RNA (1)...(19): siRNA sense strand
guacugcagguaacucauc

SEQ ID NO: 916975 - RNA, 19 nt, Homo sapiens
  misc_RNA (1)...(19): siRNA sense strand
ccuacacccugcuggacuu

SEQ ID NO: 916976 - RNA, 19 nt, Homo sapiens
  misc_RNA (1)...(19): siRNA sense strand
aguccuguuugaucaguuu

SEQ ID NO: 916977 - RNA, 19 nt, Homo sapiens
  misc_RNA (1)...(19): siRNA sense strand
ggccaacauugucaugaac

SEQ ID NO: 916978 - RNA, 19 nt, Homo sapiens
  misc_RNA (1)...(19): siRNA sense strand
gcccaucuggccaacauug

SEQ ID NO: 916979 - RNA, 19 nt, Homo sapiens
  misc_RNA (1)...(19): siRNA sense strand
ggcaaguuccggagucuuc

SEQ ID NO: 916980 - RNA, 19 nt, Homo sapiens
  misc_RNA (1)...(19): siRNA sense strand
caagcuuuguggcgcacuu

SEQ ID NO: 916981 - RNA, 19 nt, Homo sapiens
  misc_RNA (1)...(19): siRNA sense strand
uggaacaucuuugccuaca

SEQ ID NO: 916982 - RNA, 19 nt, Homo sapiens
  misc_RNA (1)...(19): siRNA sense strand
caagcuggacccgcacaaa

SEQ ID NO: 916983 - RNA, 19 nt, Homo sapiens
  misc_RNA (1)...(19): siRNA sense strand
cuguggcccuuaucuguau

SEQ ID NO: 916984 - RNA, 19 nt, Homo sapiens
  misc_RNA (1)...(19): siRNA sense strand
gaaaguccuguuugaucag

SEQ ID NO: 916985 - RNA, 19 nt, Homo sapiens
  misc_RNA (1)...(19): siRNA sense strand
gcugucuucuggaacaucu

SEQ ID NO: 916986 - RNA, 19 nt, Homo sapiens
  misc_RNA (1)...(19): siRNA sense strand
uguaugagcauggaguuug

SEQ ID NO: 916987 - RNA, 19 nt, Homo sapiens
  misc_RNA (1)...(19): siRNA sense strand
ucucgucucugcccaucug

SEQ ID NO: 916988 - RNA, 19 nt, Homo sapiens
  misc_RNA (1)...(19): siRNA sense strand
gcgcaucgaggagcuggaa

SEQ ID NO: 916989 - RNA, 19 nt, Homo sapiens
  misc_RNA (1)...(19): siRNA sense strand
cuaccugacauacaucuuc

SEQ ID NO: 916990 - RNA, 19 nt, Homo sapiens
  misc_RNA (1)...(19): siRNA sense strand
ugggaacacaggcuacauu

SEQ ID NO: 916991 - RNA, 19 nt, Homo sapiens
  misc_RNA (1)...(19): siRNA sense strand
gauaagaaaugccaaaguu

SEQ ID NO: 916992 - RNA, 19 nt, Homo sapiens
  misc_RNA (1)...(19): siRNA sense strand
gcaaugaaccuaacaguuu

SEQ ID NO: 916993 - RNA, 19 nt, Homo sapiens
  misc_RNA (1)...(19): siRNA sense strand
gaaacaagcucugcauaug

SEQ ID NO: 916994 - RNA, 19 nt, Homo sapiens
  misc_RNA (1)...(19): siRNA sense strand
gaaccuaacaguuuccuua

SEQ ID NO: 916995 - RNA, 19 nt, Homo sapiens
  misc_RNA (1)...(19): siRNA sense strand
gaucaaaccuugccaccuu

SEQ ID NO: 916996 - RNA, 19 nt, Homo sapiens
  misc_RNA (1)...(19): siRNA sense strand
ggacuggacuugaucuuug

SEQ ID NO: 916997 - RNA, 19 nt, Homo sapiens
  misc_RNA (1)...(19): siRNA sense strand
gaacagcaccuacucaaga

SEQ ID NO: 916998 - RNA, 19 nt, Homo sapiens
  misc_RNA (1)...(19): siRNA sense strand
gaagaaagacggcuaagau

SEQ ID NO: 916999 - RNA, 19 nt, Homo sapiens
  misc_RNA (1)...(19): siRNA sense strand
ccauaaaccuccauaaugu

SEQ ID NO: 917000 - RNA, 19 nt, Homo sapiens
  misc_RNA (1)...(19): siRNA sense strand
acaagcaaguggauaaaua

SEQ ID NO: 917001 - RNA, 19 nt, Homo sapiens
  misc_RNA (1)...(19): siRNA sense strand
gcaggaaacuaccauuuag

SEQ ID NO: 917002 - RNA, 19 nt, Homo sapiens
  misc_RNA (1)...(19): siRNA sense strand
caagacagacuuccuaauu

SEQ ID NO: 917003 - RNA, 19 nt, Homo sapiens
  misc_RNA (1)...(19): siRNA sense strand
uaacauuucuugggaacua

SEQ ID NO: 917004 - RNA, 19 nt, Homo sapiens
  misc_RNA (1)...(19): siRNA sense strand
gcaaguggauaaauaccuu

SEQ ID NO: 917005 - RNA, 19 nt, Homo sapiens
  misc_RNA (1)...(19): siRNA sense strand
ucuaaacccugauguauug

SEQ ID NO: 917006 - RNA, 19 nt, Homo sapiens
  misc_RNA (1)...(19): siRNA sense strand
ucaagaagcucuguagaug

SEQ ID NO: 917007 - RNA, 19 nt, Homo sapiens
  misc_RNA (1)...(19): siRNA sense strand
ggauaaauaccuucuaaga

SEQ ID NO: 917008 - RNA, 19 nt, Homo sapiens
  misc_RNA (1)...(19): siRNA sense strand
gaagugauugauucaguua

SEQ ID NO: 917009 - RNA, 19 nt, Homo sapiens
  misc_RNA (1)...(19): siRNA sense strand
gaauagaaguggugaugag

SEQ ID NO: 917010 - RNA, 19 nt, Homo sapiens
  misc_RNA (1)...(19): siRNA sense strand
guggauaaauaccuucuaa

SEQ ID NO: 917011 - RNA, 19 nt, Homo sapiens
  misc_RNA (1)...(19): siRNA sense strand
gaaggagauuuaacucugu

SEQ ID NO: 917012 - RNA, 19 nt, Homo sapiens
  misc_RNA (1)...(19): siRNA sense strand
aagacagacuuccuaauuu

SEQ ID NO: 917013 - RNA, 19 nt, Homo sapiens
  misc_RNA (1)...(19): siRNA sense strand
gagaagugauugauucagu

SEQ ID NO: 917014 - RNA, 19 nt, Homo sapiens
  misc_RNA (1)...(19): siRNA sense strand
caaccaggauauuugcaaa

SEQ ID NO: 917015 - RNA, 19 nt, Homo sapiens
  misc_RNA (1)...(19): siRNA sense strand
uuugggaccucauggauua

SEQ ID NO: 917016 - RNA, 19 nt, Homo sapiens
  misc_RNA (1)...(19): siRNA sense strand
uagaugugcuauacacuuu

SEQ ID NO: 917017 - RNA, 19 nt, Homo sapiens
  misc_RNA (1)...(19): siRNA sense strand
uaaagaugguggaugauca

SEQ ID NO: 917018 - RNA, 19 nt, Homo sapiens
  misc_RNA (1)...(19): siRNA sense strand
ucaauggucuaacucuaaa

SEQ ID NO: 917019 - RNA, 19 nt, Homo sapiens
  misc_RNA (1)...(19): siRNA sense strand
ccuaacaguuuccuuaaga

SEQ ID NO: 917020 - RNA, 19 nt, Homo sapiens
  misc_RNA (1)...(19): siRNA sense strand
gcucaggacuggacuugau

SEQ ID NO: 917021 - RNA, 19 nt, Homo sapiens
  misc_RNA (1)...(19): siRNA sense strand
gagcaggaaacuaccauuu

SEQ ID NO: 917022 - RNA, 19 nt, Homo sapiens
  misc_RNA (1)...(19): siRNA sense strand
cagcagauuugcaguggaa

SEQ ID NO: 917023 - RNA, 19 nt, Homo sapiens
  misc_RNA (1)...(19): siRNA sense strand
gagaaacaagcucugcaua

SEQ ID NO: 917024 - RNA, 19 nt, Homo sapiens
  misc_RNA (1)...(19): siRNA sense strand
gcaagaaggucugguuagg

SEQ ID NO: 917025 - RNA, 19 nt, Homo sapiens
  misc_RNA (1)...(19): siRNA sense strand
caaugaaccuaacaguuuc

SEQ ID NO: 917026 - RNA, 19 nt, Homo sapiens
  misc_RNA (1)...(19): siRNA sense strand
uaagaaggcugauauuuuc

SEQ ID NO: 917027 - RNA, 19 nt, Homo sapiens
  misc_RNA (1)...(19): siRNA sense strand
guggagaagugauugauuc

SEQ ID NO: 917028 - RNA, 19 nt, Homo sapiens
  misc_RNA (1)...(19): siRNA sense strand
gagagaaguuacuggcaau

SEQ ID NO: 917029 - RNA, 19 nt, Homo sapiens
  misc_RNA (1)...(19): siRNA sense strand
ccaaaucuguccaacucaa

SEQ ID NO: 917030 - RNA, 19 nt, Homo sapiens
  misc_RNA (1)...(19): siRNA sense strand
uccauaaugucaccaagua

SEQ ID NO: 917031 - RNA, 19 nt, Homo sapiens
  misc_RNA (1)...(19): siRNA sense strand
gccauaaaccuccauaaug

SEQ ID NO: 917032 - RNA, 19 nt, Homo sapiens
  misc_RNA (1)...(19): siRNA sense strand
gugcaagguucaaagagaa

SEQ ID NO: 917033 - RNA, 19 nt, Homo sapiens
  misc_RNA (1)...(19): siRNA sense strand
uuacauggcaucacuacua

SEQ ID NO: 917034 - RNA, 19 nt, Homo sapiens
  misc_RNA (1)...(19): siRNA sense strand
uggccuaaaugcguuauua

SEQ ID NO: 917035 - RNA, 19 nt, Homo sapiens
  misc_RNA (1)...(19): siRNA sense strand
uggcaucacuacuauuuga

SEQ ID NO: 917036 - RNA, 19 nt, Homo sapiens
  misc_RNA (1)...(19): siRNA sense strand
ccugaaggcugguggagaa

SEQ ID NO: 917037 - RNA, 19 nt, Homo sapiens
  misc_RNA (1)...(19): siRNA sense strand
gaaggcugguggagaagug

SEQ ID NO: 917038 - RNA, 19 nt, Homo sapiens
  misc_RNA (1)...(19): siRNA sense strand
gaugaggcaaguauucuuu

SEQ ID NO: 917039 - RNA, 19 nt, Homo sapiens
  misc_RNA (1)...(19): siRNA sense strand
gacuugaucuuuggccuaa

SEQ ID NO: 917040 - RNA, 19 nt, Homo sapiens
  misc_RNA (1)...(19): siRNA sense strand
gcacaaacacugacaaucc

SEQ ID NO: 917041 - RNA, 19 nt, Homo sapiens
  misc_RNA (1)...(19): siRNA sense strand
cuaagaaaguccaccuuca

SEQ ID NO: 917042 - RNA, 19 nt, Homo sapiens
  misc_RNA (1)...(19): siRNA sense strand
caagucaaccaggauauuu

SEQ ID NO: 917043 - RNA, 19 nt, Homo sapiens
  misc_RNA (1)...(19): siRNA sense strand
ccagcuuucucauauaguu

SEQ ID NO: 917044 - RNA, 19 nt, Homo sapiens
  misc_RNA (1)...(19): siRNA sense strand
cuaagaugcugaagagcuu

SEQ ID NO: 917045 - RNA, 19 nt, Homo sapiens
  misc_RNA (1)...(19): siRNA sense strand
aagaagcucuguagaugug

SEQ ID NO: 917046 - RNA, 19 nt, Homo sapiens
  misc_RNA (1)...(19): siRNA sense strand
gaaguuacuggcaaucuca

SEQ ID NO: 917047 - RNA, 19 nt, Homo sapiens
  misc_RNA (1)...(19): siRNA sense strand
cuaacaagcaaguggauaa

SEQ ID NO: 917048 - RNA, 19 nt, Homo sapiens
  misc_RNA (1)...(19): siRNA sense strand
uaagaaaguccaccuucaa

SEQ ID NO: 917049 - RNA, 19 nt, Homo sapiens
  misc_RNA (1)...(19): siRNA sense strand
gauuugcaguggaacaguu

SEQ ID NO: 917050 - RNA, 19 nt, Homo sapiens
  misc_RNA (1)...(19): siRNA sense strand
ggcuuuauguggcuggaua

SEQ ID NO: 917051 - RNA, 19 nt, Homo sapiens
  misc_RNA (1)...(19): siRNA sense strand
cauggcaucacuacuauuu

SEQ ID NO: 917052 - RNA, 19 nt, Homo sapiens
  misc_RNA (1)...(19): siRNA sense strand
gaaggucugguuaggagaa

SEQ ID NO: 917053 - RNA, 19 nt, Homo sapiens
  misc_RNA (1)...(19): siRNA sense strand
cggcuaagaugcugaagag

SEQ ID NO: 917054 - RNA, 19 nt, Homo sapiens
  misc_RNA (1)...(19): siRNA sense strand
ccuaaaugcguuauuaaga

SEQ ID NO: 917055 - RNA, 19 nt, Homo sapiens
  misc_RNA (1)...(19): siRNA sense strand
agacagacuuccuaauuuu

SEQ ID NO: 917056 - RNA, 19 nt, Homo sapiens
  misc_RNA (1)...(19): siRNA sense strand
agaagugauugauucaguu

SEQ ID NO: 917057 - RNA, 19 nt, Homo sapiens
  misc_RNA (1)...(19): siRNA sense strand
gaaagacggcuaagaugcu

SEQ ID NO: 917058 - RNA, 19 nt, Homo sapiens
  misc_RNA (1)...(19): siRNA sense strand
cuaacaguuuccuuaagaa

SEQ ID NO: 917059 - RNA, 19 nt, Homo sapiens
  misc_RNA (1)...(19): siRNA sense strand
caucacuacuauuugaaug

SEQ ID NO: 917060 - RNA, 19 nt, Homo sapiens
  misc_RNA (1)...(19): siRNA sense strand
gcaguuaggagaagauuuu

SEQ ID NO: 917061 - RNA, 19 nt, Homo sapiens
  misc_RNA (1)...(19): siRNA sense strand
agaaacaagcucugcauau

SEQ ID NO: 917062 - RNA, 19 nt, Homo sapiens
  misc_RNA (1)...(19): siRNA sense strand
ggaccucauggauuacuuu

SEQ ID NO: 917063 - RNA, 19 nt, Homo sapiens
  misc_RNA (1)...(19): siRNA sense strand
gauaaauaccuucuaagac

SEQ ID NO: 917064 - RNA, 19 nt, Homo sapiens
  misc_RNA (1)...(19): siRNA sense strand
ggaauagaaguggugauga

SEQ ID NO: 917065 - RNA, 19 nt, Homo sapiens
  misc_RNA (1)...(19): siRNA sense strand
guagaugugcuauacacuu

SEQ ID NO: 917066 - RNA, 19 nt, Homo sapiens
  misc_RNA (1)...(19): siRNA sense strand
cgugcaagguucaaagaga

SEQ ID NO: 917067 - RNA, 19 nt, Homo sapiens
  misc_RNA (1)...(19): siRNA sense strand
ggcuaucucuucuguucaa

SEQ ID NO: 917068 - RNA, 19 nt, Homo sapiens
  misc_RNA (1)...(19): siRNA sense strand
aaacuucgauccuuuaccu

SEQ ID NO: 917069 - RNA, 19 nt, Homo sapiens
  misc_RNA (1)...(19): siRNA sense strand
aacaagcucugcauaugga

SEQ ID NO: 917070 - RNA, 19 nt, Homo sapiens
  misc_RNA (1)...(19): siRNA sense strand
acacugacaauccaaggua

SEQ ID NO: 917071 - RNA, 19 nt, Homo sapiens
  misc_RNA (1)...(19): siRNA sense strand
uacauggcaucacuacuau

SEQ ID NO: 917072 - RNA, 19 nt, Homo sapiens
  misc_RNA (1)...(19): siRNA sense strand
uaacaagcaaguggauaaa

SEQ ID NO: 917073 - RNA, 19 nt, Homo sapiens
  misc_RNA (1)...(19): siRNA sense strand
gggaauagaaguggugaug

SEQ ID NO: 917074 - RNA, 19 nt, Homo sapiens
  misc_RNA (1)...(19): siRNA sense strand
ucacuacuauuugaaugga

SEQ ID NO: 917075 - RNA, 19 nt, Homo sapiens
  misc_RNA (1)...(19): siRNA sense strand
gaaguuacgguuggaaugg

SEQ ID NO: 917076 - RNA, 19 nt, Homo sapiens
  misc_RNA (1)...(19): siRNA sense strand
cucuaaagaugguggauga

SEQ ID NO: 917077 - RNA, 19 nt, Homo sapiens
  misc_RNA (1)...(19): siRNA sense strand
aaggagauuuaacucugua

SEQ ID NO: 917078 - RNA, 19 nt, Homo sapiens
  misc_RNA (1)...(19): siRNA sense strand
gaugaaaacuucgauccuu

SEQ ID NO: 917079 - RNA, 19 nt, Homo sapiens
  misc_RNA (1)...(19): siRNA sense strand
ggucagccucgaagaaaga

SEQ ID NO: 917080 - RNA, 19 nt, Homo sapiens
  misc_RNA (1)...(19): siRNA sense strand
cgagaacacuaccagaaaa

SEQ ID NO: 917081 - RNA, 19 nt, Homo sapiens
  misc_RNA (1)...(19): siRNA sense strand
ccgagaacacuaccagaaa

SEQ ID NO: 917082 - RNA, 19 nt, Homo sapiens
  misc_RNA (1)...(19): siRNA sense strand
gaugguggaugaucaaacc

SEQ ID NO: 917083 - RNA, 19 nt, Homo sapiens
  misc_RNA (1)...(19): siRNA sense strand
ccaacucaauggucuaacu

SEQ ID NO: 917084 - RNA, 19 nt, Homo sapiens
  misc_RNA (1)...(19): siRNA sense strand
cacaaacacugacaaucca

SEQ ID NO: 917085 - RNA, 19 nt, Homo sapiens
  misc_RNA (1)...(19): siRNA sense strand
ggagaaacaagcucugcau

SEQ ID NO: 917086 - RNA, 19 nt, Homo sapiens
  misc_RNA (1)...(19): siRNA sense strand
aagaaaguccaccuucaaa

SEQ ID NO: 917087 - RNA, 19 nt, Homo sapiens
  misc_RNA (1)...(19): siRNA sense strand
ggccuaaaugcguuauuaa

SEQ ID NO: 917088 - RNA, 19 nt, Homo sapiens
  misc_RNA (1)...(19): siRNA sense strand
caagaagcucuguagaugu

SEQ ID NO: 917089 - RNA, 19 nt, Homo sapiens
  misc_RNA (1)...(19): siRNA sense strand
gauuauuggcuaucucuuc

SEQ ID NO: 917090 - RNA, 19 nt, Homo sapiens
  misc_RNA (1)...(19): siRNA sense strand
cuugccagcuuucucauau

SEQ ID NO: 917091 - RNA, 19 nt, Homo sapiens
  misc_RNA (1)...(19): siRNA sense strand
gcacugagcuguccauuga

SEQ ID NO: 917092 - RNA, 19 nt, Homo sapiens
  misc_RNA (1)...(19): siRNA sense strand
ggacaucgaguuuaugaaa

SEQ ID NO: 917093 - RNA, 19 nt, Homo sapiens
  misc_RNA (1)...(19): siRNA sense strand
ggaugaagcugacagugau

SEQ ID NO: 917094 - RNA, 19 nt, Homo sapiens
  misc_RNA (1)...(19): siRNA sense strand
gagaaaggcguccggauga

SEQ ID NO: 917095 - RNA, 19 nt, Homo sapiens
  misc_RNA (1)...(19): siRNA sense strand
gcccagaccuuggagaauu

SEQ ID NO: 917096 - RNA, 19 nt, Homo sapiens
  misc_RNA (1)...(19): siRNA sense strand
ggacggagaucaccaucgu

SEQ ID NO: 917097 - RNA, 19 nt, Homo sapiens
  misc_RNA (1)...(19): siRNA sense strand
ggagaucaccaucgucaaa

SEQ ID NO: 917098 - RNA, 19 nt, Homo sapiens
  misc_RNA (1)...(19): siRNA sense strand
ggacgcacaugcagaacau

SEQ ID NO: 917099 - RNA, 19 nt, Homo sapiens
  misc_RNA (1)...(19): siRNA sense strand
ggagaggguccacuucaaa

SEQ ID NO: 917100 - RNA, 19 nt, Homo sapiens
  misc_RNA (1)...(19): siRNA sense strand
gaccggaucucagccuuga

SEQ ID NO: 917101 - RNA, 19 nt, Homo sapiens
  misc_RNA (1)...(19): siRNA sense strand
ucaacacccucuucaaauc

SEQ ID NO: 917102 - RNA, 19 nt, Homo sapiens
  misc_RNA (1)...(19): siRNA sense strand
guaaauccaccuuaaucaa

SEQ ID NO: 917103 - RNA, 19 nt, Homo sapiens
  misc_RNA (1)...(19): siRNA sense strand
caagagggccgagguguug

SEQ ID NO: 917104 - RNA, 19 nt, Homo sapiens
  misc_RNA (1)...(19): siRNA sense strand
ccaagaccaucgagaucaa

SEQ ID NO: 917105 - RNA, 19 nt, Homo sapiens
  misc_RNA (1)...(19): siRNA sense strand
aaucaacacccucuucaaa

SEQ ID NO: 917106 - RNA, 19 nt, Homo sapiens
  misc_RNA (1)...(19): siRNA sense strand
ucaaugaccaguacgagaa

SEQ ID NO: 917107 - RNA, 19 nt, Homo sapiens
  misc_RNA (1)...(19): siRNA sense strand
gcacgauauugaggagaaa

SEQ ID NO: 917108 - RNA, 19 nt, Homo sapiens
  misc_RNA (1)...(19): siRNA sense strand
ccaacggcaucgacgugua

SEQ ID NO: 917109 - RNA, 19 nt, Homo sapiens
  misc_RNA (1)...(19): siRNA sense strand
gguaaauccaccuuaauca

SEQ ID NO: 917110 - RNA, 19 nt, Homo sapiens
  misc_RNA (1)...(19): siRNA sense strand
caacaucgucccugucauc

SEQ ID NO: 917111 - RNA, 19 nt, Homo sapiens
  misc_RNA (1)...(19): siRNA sense strand
caacaucaaccgcaagaag

SEQ ID NO: 917112 - RNA, 19 nt, Homo sapiens
  misc_RNA (1)...(19): siRNA sense strand
ccauugacaucucguccaa

SEQ ID NO: 917113 - RNA, 19 nt, Homo sapiens
  misc_RNA (1)...(19): siRNA sense strand
gcagagcggcuuggguaaa

SEQ ID NO: 917114 - RNA, 19 nt, Homo sapiens
  misc_RNA (1)...(19): siRNA sense strand
gcaagguggucaacaucgu

SEQ ID NO: 917115 - RNA, 19 nt, Homo sapiens
  misc_RNA (1)...(19): siRNA sense strand
cagagcggcuuggguaaau

SEQ ID NO: 917116 - RNA, 19 nt, Homo sapiens
  misc_RNA (1)...(19): siRNA sense strand
gagaaguuccgggagauga

SEQ ID NO: 917117 - RNA, 19 nt, Homo sapiens
  misc_RNA (1)...(19): siRNA sense strand
ugagcaagguggucaacau

SEQ ID NO: 917118 - RNA, 19 nt, Homo sapiens
  misc_RNA (1)...(19): siRNA sense strand
gaggagaggguccacuuca

SEQ ID NO: 917119 - RNA, 19 nt, Homo sapiens
  misc_RNA (1)...(19): siRNA sense strand
ccaacggcguggaggagaa

SEQ ID NO: 917120 - RNA, 19 nt, Homo sapiens
  misc_RNA (1)...(19): siRNA sense strand
cagcugcguuggcgacaug

SEQ ID NO: 917121 - RNA, 19 nt, Homo sapiens
  misc_RNA (1)...(19): siRNA sense strand
aggaggaggucaacaucaa

SEQ ID NO: 917122 - RNA, 19 nt, Homo sapiens
  misc_RNA (1)...(19): siRNA sense strand
ggguaaauccaccuuaauc

SEQ ID NO: 917123 - RNA, 19 nt, Homo sapiens
  misc_RNA (1)...(19): siRNA sense strand
ggcagcccaucaugaaguu

SEQ ID NO: 917124 - RNA, 19 nt, Homo sapiens
  misc_RNA (1)...(19): siRNA sense strand
uuggguaaauccaccuuaa

SEQ ID NO: 917125 - RNA, 19 nt, Homo sapiens
  misc_RNA (1)...(19): siRNA sense strand
gcagugaccacgaguacca

SEQ ID NO: 917126 - RNA, 19 nt, Homo sapiens
  misc_RNA (1)...(19): siRNA sense strand
aaauccaccuuaaucaaca

SEQ ID NO: 917127 - RNA, 19 nt, Homo sapiens
  misc_RNA (1)...(19): siRNA sense strand
agaaaggcguccggaugaa

SEQ ID NO: 917128 - RNA, 19 nt, Homo sapiens
  misc_RNA (1)...(19): siRNA sense strand
gggaccacaucaacaacga

SEQ ID NO: 917129 - RNA, 19 nt, Homo sapiens
  misc_RNA (1)...(19): siRNA sense strand
cggaugaagcugacaguga

SEQ ID NO: 917130 - RNA, 19 nt, Homo sapiens
  misc_RNA (1)...(19): siRNA sense strand
gcaggaggaggucaacauc

SEQ ID NO: 917131 - RNA, 19 nt, Homo sapiens
  misc_RNA (1)...(19): siRNA sense strand
gcacaugcagaacaucaag

SEQ ID NO: 917132 - RNA, 19 nt, Homo sapiens
  misc_RNA (1)...(19): siRNA sense strand
gagcaagguggucaacauc

SEQ ID NO: 917133 - RNA, 19 nt, Homo sapiens
  misc_RNA (1)...(19): siRNA sense strand
uaaauccaccuuaaucaac

SEQ ID NO: 917134 - RNA, 19 nt, Homo sapiens
  misc_RNA (1)...(19): siRNA sense strand
ucaggacgcacaugcagaa

SEQ ID NO: 917135 - RNA, 19 nt, Homo sapiens
  misc_RNA (1)...(19): siRNA sense strand
ugaaacgccugagcaaggu

SEQ ID NO: 917136 - RNA, 19 nt, Homo sapiens
  misc_RNA (1)...(19): siRNA sense strand
ccacugcugccucuacuuc

SEQ ID NO: 917137 - RNA, 19 nt, Homo sapiens
  misc_RNA (1)...(19): siRNA sense strand
ggccagcuccacccagaaa

SEQ ID NO: 917138 - RNA, 19 nt, Homo sapiens
  misc_RNA (1)...(19): siRNA sense strand
ccaucgagaucaaguccau

SEQ ID NO: 917139 - RNA, 19 nt, Homo sapiens
  misc_RNA (1)...(19): siRNA sense strand
gaaaggcguccggaugaag

SEQ ID NO: 917140 - RNA, 19 nt, Homo sapiens
  misc_RNA (1)...(19): siRNA sense strand
guccaucacgcacgauauu

SEQ ID NO: 917141 - RNA, 19 nt, Homo sapiens
  misc_RNA (1)...(19): siRNA sense strand
caaugaccaguacgagaaa

SEQ ID NO: 917142 - RNA, 19 nt, Homo sapiens
  misc_RNA (1)...(19): siRNA sense strand
cgcacgauauugaggagaa

SEQ ID NO: 917143 - RNA, 19 nt, Homo sapiens
  misc_RNA (1)...(19): siRNA sense strand
gaucucagccuugaaaaga

SEQ ID NO: 917144 - RNA, 19 nt, Homo sapiens
  misc_RNA (1)...(19): siRNA sense strand
ccagcuccacccagaaauu

SEQ ID NO: 917145 - RNA, 19 nt, Homo sapiens
  misc_RNA (1)...(19): siRNA sense strand
ccaucacgcacgauauuga

SEQ ID NO: 917146 - RNA, 19 nt, Homo sapiens
  misc_RNA (1)...(19): siRNA sense strand
ggaggagaggguccacuuc

SEQ ID NO: 917147 - RNA, 19 nt, Homo sapiens
  misc_RNA (1)...(19): siRNA sense strand
ucaagagggccgagguguu

SEQ ID NO: 917148 - RNA, 19 nt, Homo sapiens
  misc_RNA (1)...(19): siRNA sense strand
gggcuucgaguucaacauc

SEQ ID NO: 917149 - RNA, 19 nt, Homo sapiens
  misc_RNA (1)...(19): siRNA sense strand
ccggaucucagccuugaaa

SEQ ID NO: 917150 - RNA, 19 nt, Homo sapiens
  misc_RNA (1)...(19): siRNA sense strand
gaugaagcugacagugauu

SEQ ID NO: 917151 - RNA, 19 nt, Homo sapiens
  misc_RNA (1)...(19): siRNA sense strand
aggagaggguccacuucaa

SEQ ID NO: 917152 - RNA, 19 nt, Homo sapiens
  misc_RNA (1)...(19): siRNA sense strand
gagaggguccacuucaaac

SEQ ID NO: 917153 - RNA, 19 nt, Homo sapiens
  misc_RNA (1)...(19): siRNA sense strand
caagugggguaccaucgaa

SEQ ID NO: 917154 - RNA, 19 nt, Homo sapiens
  misc_RNA (1)...(19): siRNA sense strand
ccagaaggaauuugaugag

SEQ ID NO: 917155 - RNA, 19 nt, Homo sapiens
  misc_RNA (1)...(19): siRNA sense strand
cccagaccuuggagaauuc

SEQ ID NO: 917156 - RNA, 19 nt, Homo sapiens
  misc_RNA (1)...(19): siRNA sense strand
cccuggacaucgaguuuau

SEQ ID NO: 917157 - RNA, 19 nt, Homo sapiens
  misc_RNA (1)...(19): siRNA sense strand
ggaggacggagaucaccau

SEQ ID NO: 917158 - RNA, 19 nt, Homo sapiens
  misc_RNA (1)...(19): siRNA sense strand
cagcccagaccuuggagaa

SEQ ID NO: 917159 - RNA, 19 nt, Homo sapiens
  misc_RNA (1)...(19): siRNA sense strand
gcuucgaguucaacaucau

SEQ ID NO: 917160 - RNA, 19 nt, Homo sapiens
  misc_RNA (1)...(19): siRNA sense strand
gggcagugaccacgaguac

SEQ ID NO: 917161 - RNA, 19 nt, Homo sapiens
  misc_RNA (1)...(19): siRNA sense strand
gaaguuccgggagaugauc

SEQ ID NO: 917162 - RNA, 19 nt, Homo sapiens
  misc_RNA (1)...(19): siRNA sense strand
cccagaaggaauuugauga

SEQ ID NO: 917163 - RNA, 19 nt, Homo sapiens
  misc_RNA (1)...(19): siRNA sense strand
caacggcaucgacguguac

SEQ ID NO: 917164 - RNA, 19 nt, Homo sapiens
  misc_RNA (1)...(19): siRNA sense strand
gucaacaucgucccuguca

SEQ ID NO: 917165 - RNA, 19 nt, Homo sapiens
  misc_RNA (1)...(19): siRNA sense strand
ggagagagcuuuaacugaa

SEQ ID NO: 917166 - RNA, 19 nt, Homo sapiens
  misc_RNA (1)...(19): siRNA sense strand
ccacagagcuuguugagaa

SEQ ID NO: 917167 - RNA, 19 nt, Homo sapiens
  misc_RNA (1)...(19): siRNA sense strand
gaaagaaugugcuguuaau

SEQ ID NO: 917168 - RNA, 19 nt, Homo sapiens
  misc_RNA (1)...(19): siRNA sense strand
gauaguggcuggaauuuga

SEQ ID NO: 917169 - RNA, 19 nt, Homo sapiens
  misc_RNA (1)...(19): siRNA sense strand
ccaaggacaugaacaauuu

SEQ ID NO: 917170 - RNA, 19 nt, Homo sapiens
  misc_RNA (1)...(19): siRNA sense strand
ugagaaagcuuuaagagaa

SEQ ID NO: 917171 - RNA, 19 nt, Homo sapiens
  misc_RNA (1)...(19): siRNA sense strand
gcagaggccaugaauauua

SEQ ID NO: 917172 - RNA, 19 nt, Homo sapiens
  misc_RNA (1)...(19): siRNA sense strand
caacagaaccucauauuug

SEQ ID NO: 917173 - RNA, 19 nt, Homo sapiens
  misc_RNA (1)...(19): siRNA sense strand
gcagugggcucacauauca

SEQ ID NO: 917174 - RNA, 19 nt, Homo sapiens
  misc_RNA (1)...(19): siRNA sense strand
gaaacuagcuccagaacuc

SEQ ID NO: 917175 - RNA, 19 nt, Homo sapiens
  misc_RNA (1)...(19): siRNA sense strand
gcacuucgauauaugauug

SEQ ID NO: 917176 - RNA, 19 nt, Homo sapiens
  misc_RNA (1)...(19): siRNA sense strand
gaaagaagacuacaucugu

SEQ ID NO: 917177 - RNA, 19 nt, Homo sapiens
  misc_RNA (1)...(19): siRNA sense strand
gaaugggccuugaauguga

SEQ ID NO: 917178 - RNA, 19 nt, Homo sapiens
  misc_RNA (1)...(19): siRNA sense strand
gaacucugauacauaguaa

SEQ ID NO: 917179 - RNA, 19 nt, Homo sapiens
  misc_RNA (1)...(19): siRNA sense strand
gaugaucucuacccuauga

SEQ ID NO: 917180 - RNA, 19 nt, Homo sapiens
  misc_RNA (1)...(19): siRNA sense strand
gaagaccacuggagcuauu

SEQ ID NO: 917181 - RNA, 19 nt, Homo sapiens
  misc_RNA (1)...(19): siRNA sense strand
gagcagaggccaugaauau

SEQ ID NO: 917182 - RNA, 19 nt, Homo sapiens
  misc_RNA (1)...(19): siRNA sense strand
gcucaggacuguuauauag

SEQ ID NO: 917183 - RNA, 19 nt, Homo sapiens
  misc_RNA (1)...(19): siRNA sense strand
gagcugacauugccucaaa

SEQ ID NO: 917184 - RNA, 19 nt, Homo sapiens
  misc_RNA (1)...(19): siRNA sense strand
gcaugaaacuuccuugguu

SEQ ID NO: 917185 - RNA, 19 nt, Homo sapiens
  misc_RNA (1)...(19): siRNA sense strand
gagaaagcuuuaagagaaa

SEQ ID NO: 917186 - RNA, 19 nt, Homo sapiens
  misc_RNA (1)...(19): siRNA sense strand
gcaaagaucaccaagaaga

SEQ ID NO: 917187 - RNA, 19 nt, Homo sapiens
  misc_RNA (1)...(19): siRNA sense strand
uaaguuaguugcagaagaa

SEQ ID NO: 917188 - RNA, 19 nt, Homo sapiens
  misc_RNA (1)...(19): siRNA sense strand
gacaguguguggagcauua

SEQ ID NO: 917189 - RNA, 19 nt, Homo sapiens
  misc_RNA (1)...(19): siRNA sense strand
cacuggagcuauucaauua

SEQ ID NO: 917190 - RNA, 19 nt, Homo sapiens
  misc_RNA (1)...(19): siRNA sense strand
uuccaaggcugauguauua

SEQ ID NO: 917191 - RNA, 19 nt, Homo sapiens
  misc_RNA (1)...(19): siRNA sense strand
gaagguggauuugcaguug

SEQ ID NO: 917192 - RNA, 19 nt, Homo sapiens
  misc_RNA (1)...(19): siRNA sense strand
gagaugcacuucgauauau

SEQ ID NO: 917193 - RNA, 19 nt, Homo sapiens
  misc_RNA (1)...(19): siRNA sense strand
gagaaacuguccguaaauu

SEQ ID NO: 917194 - RNA, 19 nt, Homo sapiens
  misc_RNA (1)...(19): siRNA sense strand
uaaaggaucucuugaaucg

SEQ ID NO: 917195 - RNA, 19 nt, Homo sapiens
  misc_RNA (1)...(19): siRNA sense strand
gaagaucuuggacuuauuu

SEQ ID NO: 917196 - RNA, 19 nt, Homo sapiens
  misc_RNA (1)...(19): siRNA sense strand
ggaauuaacagucuugaga

SEQ ID NO: 917197 - RNA, 19 nt, Homo sapiens
  misc_RNA (1)...(19): siRNA sense strand
ggagaugcacuucgauaua

SEQ ID NO: 917198 - RNA, 19 nt, Homo sapiens
  misc_RNA (1)...(19): siRNA sense strand
gaugucagcuuugaauuug

SEQ ID NO: 917199 - RNA, 19 nt, Homo sapiens
  misc_RNA (1)...(19): siRNA sense strand
agaaagacauggccauuau

SEQ ID NO: 917200 - RNA, 19 nt, Homo sapiens
  misc_RNA (1)...(19): siRNA sense strand
ucgaagagaucccugcaua

SEQ ID NO: 917201 - RNA, 19 nt, Homo sapiens
  misc_RNA (1)...(19): siRNA sense strand
ugaagaaucugaaaugaag

SEQ ID NO: 917202 - RNA, 19 nt, Homo sapiens
  misc_RNA (1)...(19): siRNA sense strand
gcaguuguuugcaaggaua

SEQ ID NO: 917203 - RNA, 19 nt, Homo sapiens
  misc_RNA (1)...(19): siRNA sense strand
ggaagacucugaggaugaa

SEQ ID NO: 917204 - RNA, 19 nt, Homo sapiens
  misc_RNA (1)...(19): siRNA sense strand
ggagguguccuaaguguuu

SEQ ID NO: 917205 - RNA, 19 nt, Homo sapiens
  misc_RNA (1)...(19): siRNA sense strand
agaaagaaaugaagaguag

SEQ ID NO: 917206 - RNA, 19 nt, Homo sapiens
  misc_RNA (1)...(19): siRNA sense strand
gaaugugaaugaagcuuug

SEQ ID NO: 917207 - RNA, 19 nt, Homo sapiens
  misc_RNA (1)...(19): siRNA sense strand
gaaaugaagaguagcauca

SEQ ID NO: 917208 - RNA, 19 nt, Homo sapiens
  misc_RNA (1)...(19): siRNA sense strand
gagcguagcuaugaauuag

SEQ ID NO: 917209 - RNA, 19 nt, Homo sapiens
  misc_RNA (1)...(19): siRNA sense strand
ggaaagaaugugcuguuaa

SEQ ID NO: 917210 - RNA, 19 nt, Homo sapiens
  misc_RNA (1)...(19): siRNA sense strand
uaaaggaaaucgaagagau

SEQ ID NO: 917211 - RNA, 19 nt, Homo sapiens
  misc_RNA (1)...(19): siRNA sense strand
ccaauacccugaugacuca

SEQ ID NO: 917212 - RNA, 19 nt, Homo sapiens
  misc_RNA (1)...(19): siRNA sense strand
cagaggccaugaauauuaa

SEQ ID NO: 917213 - RNA, 19 nt, Homo sapiens
  misc_RNA (1)...(19): siRNA sense strand
gaagcgagauggaauuaac

SEQ ID NO: 917214 - RNA, 19 nt, Homo sapiens
  misc_RNA (1)...(19): siRNA sense strand
agaagugaaugaacuauug

SEQ ID NO: 917215 - RNA, 19 nt, Homo sapiens
  misc_RNA (1)...(19): siRNA sense strand
gagagagcuuuaacugaaa

SEQ ID NO: 917216 - RNA, 19 nt, Homo sapiens
  misc_RNA (1)...(19): siRNA sense strand
gagacuggcuucaggaugu

SEQ ID NO: 917217 - RNA, 19 nt, Homo sapiens
  misc_RNA (1)...(19): siRNA sense strand
gcaggaacucugauacaua

SEQ ID NO: 917218 - RNA, 19 nt, Homo sapiens
  misc_RNA (1)...(19): siRNA sense strand
ugauauauguggcaugaaa

SEQ ID NO: 917219 - RNA, 19 nt, Homo sapiens
  misc_RNA (1)...(19): siRNA sense strand
cagggaaucuuaaauuugu

SEQ ID NO: 917220 - RNA, 19 nt, Homo sapiens
  misc_RNA (1)...(19): siRNA sense strand
gaaacuuccuugguuguau

SEQ ID NO: 917221 - RNA, 19 nt, Homo sapiens
  misc_RNA (1)...(19): siRNA sense strand
ugaaugaacuauugaugga

SEQ ID NO: 917222 - RNA, 19 nt, Homo sapiens
  misc_RNA (1)...(19): siRNA sense strand
gaagaaauucccagacaau

SEQ ID NO: 917223 - RNA, 19 nt, Homo sapiens
  misc_RNA (1)...(19): siRNA sense strand
ggacuuauuucagcuuaau

SEQ ID NO: 917224 - RNA, 19 nt, Homo sapiens
  misc_RNA (1)...(19): siRNA sense strand
ugaaugagcuccggcaguu

SEQ ID NO: 917225 - RNA, 19 nt, Homo sapiens
  misc_RNA (1)...(19): siRNA sense strand
aggcaaagaucaccaagaa

SEQ ID NO: 917226 - RNA, 19 nt, Homo sapiens
  misc_RNA (1)...(19): siRNA sense strand
uaagagaaacuguccguaa

SEQ ID NO: 917227 - RNA, 19 nt, Homo sapiens
  misc_RNA (1)...(19): siRNA sense strand
ggagacagccuaagguguu

SEQ ID NO: 917228 - RNA, 19 nt, Homo sapiens
  misc_RNA (1)...(19): siRNA sense strand
ggaagaucuuggacuuauu

SEQ ID NO: 917229 - RNA, 19 nt, Homo sapiens
  misc_RNA (1)...(19): siRNA sense strand
gcacauauuacugcugaua

SEQ ID NO: 917230 - RNA, 19 nt, Homo sapiens
  misc_RNA (1)...(19): siRNA sense strand
gagaaagaaaugaagagua

SEQ ID NO: 917231 - RNA, 19 nt, Homo sapiens
  misc_RNA (1)...(19): siRNA sense strand
gcugauauauguggcauga

SEQ ID NO: 917232 - RNA, 19 nt, Homo sapiens
  misc_RNA (1)...(19): siRNA sense strand
gauggcagcugcaaucagu

SEQ ID NO: 917233 - RNA, 19 nt, Homo sapiens
  misc_RNA (1)...(19): siRNA sense strand
gaagagacgccuggaaaga

SEQ ID NO: 917234 - RNA, 19 nt, Homo sapiens
  misc_RNA (1)...(19): siRNA sense strand
gucagggaaucuuaaauuu

SEQ ID NO: 917235 - RNA, 19 nt, Homo sapiens
  misc_RNA (1)...(19): siRNA sense strand
gcacagagcccagcaacug

SEQ ID NO: 917236 - RNA, 19 nt, Homo sapiens
  misc_RNA (1)...(19): siRNA sense strand
gaagcucgccuaagggaaa

SEQ ID NO: 917237 - RNA, 19 nt, Homo sapiens
  misc_RNA (1)...(19): siRNA sense strand
aagagaaacuguccguaaa

SEQ ID NO: 917238 - RNA, 19 nt, Homo sapiens
  misc_RNA (1)...(19): siRNA sense strand
uguauuagauguuguagug

SEQ ID NO: 917239 - RNA, 19 nt, Homo sapiens
  misc_RNA (1)...(19): siRNA sense strand
ggagacugcuucagcuaug

SEQ ID NO: 917240 - RNA, 19 nt, Homo sapiens
  misc_RNA (1)...(19): siRNA sense strand
gaagagaucccugcauauc

SEQ ID NO: 917241 - RNA, 19 nt, Homo sapiens
  misc_RNA (1)...(19): siRNA sense strand
ggacugauccuuucuacca

SEQ ID NO: 917242 - RNA, 19 nt, Homo sapiens
  misc_RNA (1)...(19): siRNA sense strand
caggaacucugauacauag

SEQ ID NO: 917243 - RNA, 19 nt, Homo sapiens
  misc_RNA (1)...(19): siRNA sense strand
agagaaaccuccauuagag

SEQ ID NO: 917244 - RNA, 19 nt, Homo sapiens
  misc_RNA (1)...(19): siRNA sense strand
gaaauucccagacaaugau

SEQ ID NO: 917245 - RNA, 19 nt, Homo sapiens
  misc_RNA (1)...(19): siRNA sense strand
ccaaugcuguggaccugua

SEQ ID NO: 917246 - RNA, 19 nt, Homo sapiens
  misc_RNA (1)...(19): siRNA sense strand
gauagaaaauggaccaaaa

SEQ ID NO: 917247 - RNA, 19 nt, Homo sapiens
  misc_RNA (1)...(19): siRNA sense strand
gagaggaaagauuauauug

SEQ ID NO: 917248 - RNA, 19 nt, Homo sapiens
  misc_RNA (1)...(19): siRNA sense strand
caaaaucaguugacaguga

SEQ ID NO: 917249 - RNA, 19 nt, Homo sapiens
  misc_RNA (1)...(19): siRNA sense strand
gaagaaacuagcuccagaa

SEQ ID NO: 917250 - RNA, 19 nt, Homo sapiens
  misc_RNA (1)...(19): siRNA sense strand
ggaacucugauacauagua

SEQ ID NO: 917251 - RNA, 19 nt, Homo sapiens
  misc_RNA (1)...(19): siRNA sense strand
gacauugccucaaaggaau

SEQ ID NO: 917252 - RNA, 19 nt, Homo sapiens
  misc_RNA (1)...(19): siRNA sense strand
gcguagcuaugaauuaguu

SEQ ID NO: 917253 - RNA, 19 nt, Homo sapiens
  misc_RNA (1)...(19): siRNA sense strand
uuaacagucuugagagaaa

SEQ ID NO: 917254 - RNA, 19 nt, Homo sapiens
  misc_RNA (1)...(19): siRNA sense strand
gagauggaauuaacagucu

SEQ ID NO: 917255 - RNA, 19 nt, Homo sapiens
  misc_RNA (1)...(19): siRNA sense strand
ggaagcagagaaaguuaaa

SEQ ID NO: 917256 - RNA, 19 nt, Homo sapiens
  misc_RNA (1)...(19): siRNA sense strand
uggaaagaaugugcuguua

SEQ ID NO: 917257 - RNA, 19 nt, Homo sapiens
  misc_RNA (1)...(19): siRNA sense strand
aaacuacucucugaggaaa

SEQ ID NO: 917258 - RNA, 19 nt, Homo sapiens
  misc_RNA (1)...(19): siRNA sense strand
gaaacuacucucugaggaa

SEQ ID NO: 917259 - RNA, 19 nt, Homo sapiens
  misc_RNA (1)...(19): siRNA sense strand
caacaugccaguccauaug

SEQ ID NO: 917260 - RNA, 19 nt, Homo sapiens
  misc_RNA (1)...(19): siRNA sense strand
gcaaaaggcaaacuagaua

SEQ ID NO: 917261 - RNA, 19 nt, Homo sapiens
  misc_RNA (1)...(19): siRNA sense strand
gaaacuguccguaaauugg

SEQ ID NO: 917262 - RNA, 19 nt, Homo sapiens
  misc_RNA (1)...(19): siRNA sense strand
agacauggccauuaugauu

SEQ ID NO: 917263 - RNA, 19 nt, Homo sapiens
  misc_RNA (1)...(19): siRNA sense strand
ucaucgauauuguguguuu

SEQ ID NO: 917264 - RNA, 19 nt, Homo sapiens
  misc_RNA (1)...(19): siRNA sense strand
ccacguauccagagacuga

SEQ ID NO: 917265 - RNA, 19 nt, Homo sapiens
  misc_RNA (1)...(19): siRNA sense strand
gaacagcucuucccaggau

SEQ ID NO: 917266 - RNA, 19 nt, Homo sapiens
  misc_RNA (1)...(19): siRNA sense strand
gcaagaaugugaccugcaa

SEQ ID NO: 917267 - RNA, 19 nt, Homo sapiens
  misc_RNA (1)...(19): siRNA sense strand
gaucgggauuuauuucuau

SEQ ID NO: 917268 - RNA, 19 nt, Homo sapiens
  misc_RNA (1)...(19): siRNA sense strand
ccaaucaacacaacuuuaa

SEQ ID NO: 917269 - RNA, 19 nt, Homo sapiens
  misc_RNA (1)...(19): siRNA sense strand
ggaucgggauuuauuucua

SEQ ID NO: 917270 - RNA, 19 nt, Homo sapiens
  misc_RNA (1)...(19): siRNA sense strand
ggacaaaccaaucaacaca

SEQ ID NO: 917271 - RNA, 19 nt, Homo sapiens
  misc_RNA (1)...(19): siRNA sense strand
caacuacaccugccuguuc

SEQ ID NO: 917272 - RNA, 19 nt, Homo sapiens
  misc_RNA (1)...(19): siRNA sense strand
gcuaugauaacaacuggua

SEQ ID NO: 917273 - RNA, 19 nt, Homo sapiens
  misc_RNA (1)...(19): siRNA sense strand
ccaaacggcuggaauucgu

SEQ ID NO: 917274 - RNA, 19 nt, Homo sapiens
  misc_RNA (1)...(19): siRNA sense strand
ggauauuggugcccucaag

SEQ ID NO: 917275 - RNA, 19 nt, Homo sapiens
  misc_RNA (1)...(19): siRNA sense strand
gggcaugucuccuauucag

SEQ ID NO: 917276 - RNA, 19 nt, Homo sapiens
  misc_RNA (1)...(19): siRNA sense strand
gcaggagcguggauaucug

SEQ ID NO: 917277 - RNA, 19 nt, Homo sapiens
  misc_RNA (1)...(19): siRNA sense strand
cuaaugggcaugucuccua

SEQ ID NO: 917278 - RNA, 19 nt, Homo sapiens
  misc_RNA (1)...(19): siRNA sense strand
gcacgagagcuuugagaag

SEQ ID NO: 917279 - RNA, 19 nt, Homo sapiens
  misc_RNA (1)...(19): siRNA sense strand
uaaugggcaugucuccuau

SEQ ID NO: 917280 - RNA, 19 nt, Homo sapiens
  misc_RNA (1)...(19): siRNA sense strand
ccaaaucaccuggcacuca

SEQ ID NO: 917281 - RNA, 19 nt, Homo sapiens
  misc_RNA (1)...(19): siRNA sense strand
ccagaacacagcugagguu

SEQ ID NO: 917282 - RNA, 19 nt, Homo sapiens
  misc_RNA (1)...(19): siRNA sense strand
acacaacuuuaaucugcaa

SEQ ID NO: 917283 - RNA, 19 nt, Homo sapiens
  misc_RNA (1)...(19): siRNA sense strand
gaaccucaccguguacuac

SEQ ID NO: 917284 - RNA, 19 nt, Homo sapiens
  misc_RNA (1)...(19): siRNA sense strand
gcagcaggagcguggauau

SEQ ID NO: 917285 - RNA, 19 nt, Homo sapiens
  misc_RNA (1)...(19): siRNA sense strand
aaaccaaucaacacaacuu

SEQ ID NO: 917286 - RNA, 19 nt, Homo sapiens
  misc_RNA (1)...(19): siRNA sense strand
gacaaaccaaucaacacaa

SEQ ID NO: 917287 - RNA, 19 nt, Homo sapiens
  misc_RNA (1)...(19): siRNA sense strand
acaaaccaaucaacacaac

SEQ ID NO: 917288 - RNA, 19 nt, Homo sapiens
  misc_RNA (1)...(19): siRNA sense strand
guucugggaauccugguuu

SEQ ID NO: 917289 - RNA, 19 nt, Homo sapiens
  misc_RNA (1)...(19): siRNA sense strand
gagcacgagagcuuugaga

SEQ ID NO: 917290 - RNA, 19 nt, Homo sapiens
  misc_RNA (1)...(19): siRNA sense strand
gcaacuacaccugccuguu

SEQ ID NO: 917291 - RNA, 19 nt, Homo sapiens
  misc_RNA (1)...(19): siRNA sense strand
gcccacaggcuauaauugg

SEQ ID NO: 917292 - RNA, 19 nt, Homo sapiens
  misc_RNA (1)...(19): siRNA sense strand
ccagguggacggcaagaau

SEQ ID NO: 917293 - RNA, 19 nt, Homo sapiens
  misc_RNA (1)...(19): siRNA sense strand
caacuuuaaucugcaacgu

SEQ ID NO: 917294 - RNA, 19 nt, Homo sapiens
  misc_RNA (1)...(19): siRNA sense strand
gccagcgccucagcuaaug

SEQ ID NO: 917295 - RNA, 19 nt, Homo sapiens
  misc_RNA (1)...(19): siRNA sense strand
gggauuuauuucuauuggu

SEQ ID NO: 917296 - RNA, 19 nt, Homo sapiens
  misc_RNA (1)...(19): siRNA sense strand
caucugugucccucgagua

SEQ ID NO: 917297 - RNA, 19 nt, Homo sapiens
  misc_RNA (1)...(19): siRNA sense strand
guauccaucucuggcuaug

SEQ ID NO: 917298 - RNA, 19 nt, Homo sapiens
  misc_RNA (1)...(19): siRNA sense strand
gcugugagcagagagaaca

SEQ ID NO: 917299 - RNA, 19 nt, Homo sapiens
  misc_RNA (1)...(19): siRNA sense strand
cgggauuuauuucuauugg

SEQ ID NO: 917300 - RNA, 19 nt, Homo sapiens
  misc_RNA (1)...(19): siRNA sense strand
cccacaggcuauaauugga

SEQ ID NO: 917301 - RNA, 19 nt, Homo sapiens
  misc_RNA (1)...(19): siRNA sense strand
accaaucaacacaacuuua

SEQ ID NO: 917302 - RNA, 19 nt, Homo sapiens
  misc_RNA (1)...(19): siRNA sense strand
gacgcugcccugcuaccua

SEQ ID NO: 917303 - RNA, 19 nt, Homo sapiens
  misc_RNA (1)...(19): siRNA sense strand
gaaagaaaccugcugagua

SEQ ID NO: 917304 - RNA, 19 nt, Homo sapiens
  misc_RNA (1)...(19): siRNA sense strand
gaagauacaugaccacaau

SEQ ID NO: 917305 - RNA, 19 nt, Homo sapiens
  misc_RNA (1)...(19): siRNA sense strand
ggacacagcucuaggacaa

SEQ ID NO: 917306 - RNA, 19 nt, Homo sapiens
  misc_RNA (1)...(19): siRNA sense strand
gaaaggagauauucaugga

SEQ ID NO: 917307 - RNA, 19 nt, Homo sapiens
  misc_RNA (1)...(19): siRNA sense strand
gaagagagaugucccaaag

SEQ ID NO: 917308 - RNA, 19 nt, Homo sapiens
  misc_RNA (1)...(19): siRNA sense strand
gagaggaagucacucauuu

SEQ ID NO: 917309 - RNA, 19 nt, Homo sapiens
  misc_RNA (1)...(19): siRNA sense strand
ggaagucacucauuugaug

SEQ ID NO: 917310 - RNA, 19 nt, Homo sapiens
  misc_RNA (1)...(19): siRNA sense strand
gcaaagauccuucaucaga

SEQ ID NO: 917311 - RNA, 19 nt, Homo sapiens
  misc_RNA (1)...(19): siRNA sense strand
gaaaguacauuugugaaga

SEQ ID NO: 917312 - RNA, 19 nt, Homo sapiens
  misc_RNA (1)...(19): siRNA sense strand
gaagaaaccaguaagcuuu

SEQ ID NO: 917313 - RNA, 19 nt, Homo sapiens
  misc_RNA (1)...(19): siRNA sense strand
caaccaacauccuauauga

SEQ ID NO: 917314 - RNA, 19 nt, Homo sapiens
  misc_RNA (1)...(19): siRNA sense strand
gaggagaguucuuuauuug

SEQ ID NO: 917315 - RNA, 19 nt, Homo sapiens
  misc_RNA (1)...(19): siRNA sense strand
aaugaaagcucucaguaua

SEQ ID NO: 917316 - RNA, 19 nt, Homo sapiens
  misc_RNA (1)...(19): siRNA sense strand
aaagaaaccugcugaguau

SEQ ID NO: 917317 - RNA, 19 nt, Homo sapiens
  misc_RNA (1)...(19): siRNA sense strand
caucauggcuuccgauuau

SEQ ID NO: 917318 - RNA, 19 nt, Homo sapiens
  misc_RNA (1)...(19): siRNA sense strand
cgaagcauaugaaaucuaa

SEQ ID NO: 917319 - RNA, 19 nt, Homo sapiens
  misc_RNA (1)...(19): siRNA sense strand
ccaagaaggugcuuaugaa

SEQ ID NO: 917320 - RNA, 19 nt, Homo sapiens
  misc_RNA (1)...(19): siRNA sense strand
aaaggaagcugcauugaga

SEQ ID NO: 917321 - RNA, 19 nt, Homo sapiens
  misc_RNA (1)...(19): siRNA sense strand
gagcagaccuacccauguu

SEQ ID NO: 917322 - RNA, 19 nt, Homo sapiens
  misc_RNA (1)...(19): siRNA sense strand
agaagaggcucacaagaaa

SEQ ID NO: 917323 - RNA, 19 nt, Homo sapiens
  misc_RNA (1)...(19): siRNA sense strand
gcacuaagacugucagaga

SEQ ID NO: 917324 - RNA, 19 nt, Homo sapiens
  misc_RNA (1)...(19): siRNA sense strand
ucacggacauggcagauuu

SEQ ID NO: 917325 - RNA, 19 nt, Homo sapiens
  misc_RNA (1)...(19): siRNA sense strand
gggauaggauucaacauug

SEQ ID NO: 917326 - RNA, 19 nt, Homo sapiens
  misc_RNA (1)...(19): siRNA sense strand
ggagucaccuucagccauu

SEQ ID NO: 917327 - RNA, 19 nt, Homo sapiens
  misc_RNA (1)...(19): siRNA sense strand
ggaaucagauggugaggau

SEQ ID NO: 917328 - RNA, 19 nt, Homo sapiens
  misc_RNA (1)...(19): siRNA sense strand
caaagauccuucaucagaa

SEQ ID NO: 917329 - RNA, 19 nt, Homo sapiens
  misc_RNA (1)...(19): siRNA sense strand
cgagauaauucaccaaaga

SEQ ID NO: 917330 - RNA, 19 nt, Homo sapiens
  misc_RNA (1)...(19): siRNA sense strand
ugaggagaguucuuuauuu

SEQ ID NO: 917331 - RNA, 19 nt, Homo sapiens
  misc_RNA (1)...(19): siRNA sense strand
ggaaaauacugucggcuua

SEQ ID NO: 917332 - RNA, 19 nt, Homo sapiens
  misc_RNA (1)...(19): siRNA sense strand
ggauuccucucccuaauga

SEQ ID NO: 917333 - RNA, 19 nt, Homo sapiens
  misc_RNA (1)...(19): siRNA sense strand
gcacaaagcagcagagaag

SEQ ID NO: 917334 - RNA, 19 nt, Homo sapiens
  misc_RNA (1)...(19): siRNA sense strand
gcagcaaacuagaaaggaa

SEQ ID NO: 917335 - RNA, 19 nt, Homo sapiens
  misc_RNA (1)...(19): siRNA sense strand
ggaaguccaucucuugugu

SEQ ID NO: 917336 - RNA, 19 nt, Homo sapiens
  misc_RNA (1)...(19): siRNA sense strand
ugaaagcucucaguauauu

SEQ ID NO: 917337 - RNA, 19 nt, Homo sapiens
  misc_RNA (1)...(19): siRNA sense strand
caaauaagcccucccaaca

SEQ ID NO: 917338 - RNA, 19 nt, Homo sapiens
  misc_RNA (1)...(19): siRNA sense strand
ggauggagaugauaaugau

SEQ ID NO: 917339 - RNA, 19 nt, Homo sapiens
  misc_RNA (1)...(19): siRNA sense strand
uaacgaagcauaugaaauc

SEQ ID NO: 917340 - RNA, 19 nt, Homo sapiens
  misc_RNA (1)...(19): siRNA sense strand
gaaccuucuuccaaaguuu

SEQ ID NO: 917341 - RNA, 19 nt, Homo sapiens
  misc_RNA (1)...(19): siRNA sense strand
gaagacaagcggcauuuga

SEQ ID NO: 917342 - RNA, 19 nt, Homo sapiens
  misc_RNA (1)...(19): siRNA sense strand
gcuaccaaauccaucuuua

SEQ ID NO: 917343 - RNA, 19 nt, Homo sapiens
  misc_RNA (1)...(19): siRNA sense strand
ccacagaguucuucauuac

SEQ ID NO: 917344 - RNA, 19 nt, Homo sapiens
  misc_RNA (1)...(19): siRNA sense strand
gaaggaagcccagagcaaa

SEQ ID NO: 917345 - RNA, 19 nt, Homo sapiens
  misc_RNA (1)...(19): siRNA sense strand
caacacaaaugcaaagucu

SEQ ID NO: 917346 - RNA, 19 nt, Homo sapiens
  misc_RNA (1)...(19): siRNA sense strand
acacaaaugcaaagucuua

SEQ ID NO: 917347 - RNA, 19 nt, Homo sapiens
  misc_RNA (1)...(19): siRNA sense strand
aagcaaagauccuucauca

SEQ ID NO: 917348 - RNA, 19 nt, Homo sapiens
  misc_RNA (1)...(19): siRNA sense strand
aaacacauccguacccaua

SEQ ID NO: 917349 - RNA, 19 nt, Homo sapiens
  misc_RNA (1)...(19): siRNA sense strand
gaagaggacacgcccauga

SEQ ID NO: 917350 - RNA, 19 nt, Homo sapiens
  misc_RNA (1)...(19): siRNA sense strand
ggaagcaguuuacucagau

SEQ ID NO: 917351 - RNA, 19 nt, Homo sapiens
  misc_RNA (1)...(19): siRNA sense strand
caaagucgaugagaauaug

SEQ ID NO: 917352 - RNA, 19 nt, Homo sapiens
  misc_RNA (1)...(19): siRNA sense strand
ucacugagccgacccaauu

SEQ ID NO: 917353 - RNA, 19 nt, Homo sapiens
  misc_RNA (1)...(19): siRNA sense strand
gcaagcagagccaauugua

SEQ ID NO: 917354 - RNA, 19 nt, Homo sapiens
  misc_RNA (1)...(19): siRNA sense strand
gaauagcccugccauuguc

SEQ ID NO: 917355 - RNA, 19 nt, Homo sapiens
  misc_RNA (1)...(19): siRNA sense strand
caucagggcuacacccaaa

SEQ ID NO: 917356 - RNA, 19 nt, Homo sapiens
  misc_RNA (1)...(19): siRNA sense strand
cauagcauguccagcauuu

SEQ ID NO: 917357 - RNA, 19 nt, Homo sapiens
  misc_RNA (1)...(19): siRNA sense strand
acaaucagcuguuauuaag

SEQ ID NO: 917358 - RNA, 19 nt, Homo sapiens
  misc_RNA (1)...(19): siRNA sense strand
aaaggaaacuagugggaaa

SEQ ID NO: 917359 - RNA, 19 nt, Homo sapiens
  misc_RNA (1)...(19): siRNA sense strand
gcaguuuacucagaugaaa

SEQ ID NO: 917360 - RNA, 19 nt, Homo sapiens
  misc_RNA (1)...(19): siRNA sense strand
guuggugcuucuugaauua

SEQ ID NO: 917361 - RNA, 19 nt, Homo sapiens
  misc_RNA (1)...(19): siRNA sense strand
agagucagcuguaucuaaa

SEQ ID NO: 917362 - RNA, 19 nt, Homo sapiens
  misc_RNA (1)...(19): siRNA sense strand
cagaagaggcucacaagaa

SEQ ID NO: 917363 - RNA, 19 nt, Homo sapiens
  misc_RNA (1)...(19): siRNA sense strand
ggacagcggcaaccacaaa

SEQ ID NO: 917364 - RNA, 19 nt, Homo sapiens
  misc_RNA (1)...(19): siRNA sense strand
cagaagggcuuuauaccau

SEQ ID NO: 917365 - RNA, 19 nt, Homo sapiens
  misc_RNA (1)...(19): siRNA sense strand
ggacauucuucguugauca

SEQ ID NO: 917366 - RNA, 19 nt, Homo sapiens
  misc_RNA (1)...(19): siRNA sense strand
gagaugauaaugaugauga

SEQ ID NO: 917367 - RNA, 19 nt, Homo sapiens
  misc_RNA (1)...(19): siRNA sense strand
gcacuuaagaccuugugua

SEQ ID NO: 917368 - RNA, 19 nt, Homo sapiens
  misc_RNA (1)...(19): siRNA sense strand
caacugaaacgcccucuga

SEQ ID NO: 917369 - RNA, 19 nt, Homo sapiens
  misc_RNA (1)...(19): siRNA sense strand
cuuaagaccuuguguaaca

SEQ ID NO: 917370 - RNA, 19 nt, Homo sapiens
  misc_RNA (1)...(19): siRNA sense strand
gaacagccacacuuauuuc

SEQ ID NO: 917371 - RNA, 19 nt, Homo sapiens
  misc_RNA (1)...(19): siRNA sense strand
cagguuagaugucaagaug

SEQ ID NO: 917372 - RNA, 19 nt, Homo sapiens
  misc_RNA (1)...(19): siRNA sense strand
gcacacagucaaacagaaa

SEQ ID NO: 917373 - RNA, 19 nt, Homo sapiens
  misc_RNA (1)...(19): siRNA sense strand
aaacagaaacuugcacuaa

SEQ ID NO: 917374 - RNA, 19 nt, Homo sapiens
  misc_RNA (1)...(19): siRNA sense strand
ggacucagaaccagacaaa

SEQ ID NO: 917375 - RNA, 19 nt, Homo sapiens
  misc_RNA (1)...(19): siRNA sense strand
gaaagagaagaaaccagua

SEQ ID NO: 917376 - RNA, 19 nt, Homo sapiens
  misc_RNA (1)...(19): siRNA sense strand
uaacuauuccuccuucuuu

SEQ ID NO: 917377 - RNA, 19 nt, Homo sapiens
  misc_RNA (1)...(19): siRNA sense strand
gaaccauuaccucacguua

SEQ ID NO: 917378 - RNA, 19 nt, Homo sapiens
  misc_RNA (1)...(19): siRNA sense strand
caaaugcaaagucuuauga

SEQ ID NO: 917379 - RNA, 19 nt, Homo sapiens
  misc_RNA (1)...(19): siRNA sense strand
gagcggccauauccaugua

SEQ ID NO: 917380 - RNA, 19 nt, Homo sapiens
  misc_RNA (1)...(19): siRNA sense strand
aaagauccuucaucagaaa

SEQ ID NO: 917381 - RNA, 19 nt, Homo sapiens
  misc_RNA (1)...(19): siRNA sense strand
gcaaggaauuaucuucaag

SEQ ID NO: 917382 - RNA, 19 nt, Homo sapiens
  misc_RNA (1)...(19): siRNA sense strand
ggaaacuagugggaaauau

SEQ ID NO: 917383 - RNA, 19 nt, Homo sapiens
  misc_RNA (1)...(19): siRNA sense strand
cacaagcauuucucagaua

SEQ ID NO: 917384 - RNA, 19 nt, Homo sapiens
  misc_RNA (1)...(19): siRNA sense strand
cagaaugccuuguuucagu

SEQ ID NO: 917385 - RNA, 19 nt, Homo sapiens
  misc_RNA (1)...(19): siRNA sense strand
caacuaaucuaacuauucc

SEQ ID NO: 917386 - RNA, 19 nt, Homo sapiens
  misc_RNA (1)...(19): siRNA sense strand
gcaacuaaucuaacuauuc

SEQ ID NO: 917387 - RNA, 19 nt, Homo sapiens
  misc_RNA (1)...(19): siRNA sense strand
gcaacucagugccaacuuc

SEQ ID NO: 917388 - RNA, 19 nt, Homo sapiens
  misc_RNA (1)...(19): siRNA sense strand
gguuagaugucaagauguu

SEQ ID NO: 917389 - RNA, 19 nt, Homo sapiens
  misc_RNA (1)...(19): siRNA sense strand
gcagaaauacauucagaug

SEQ ID NO: 917390 - RNA, 19 nt, Homo sapiens
  misc_RNA (1)...(19): siRNA sense strand
acagaaacuugcacuaaga

SEQ ID NO: 917391 - RNA, 19 nt, Homo sapiens
  misc_RNA (1)...(19): siRNA sense strand
uugaucagcuauuugguua

SEQ ID NO: 917392 - RNA, 19 nt, Homo sapiens
  misc_RNA (1)...(19): siRNA sense strand
guacaaaucgaaugaagau

SEQ ID NO: 917393 - RNA, 19 nt, Homo sapiens
  misc_RNA (1)...(19): siRNA sense strand
gaaggaggguacaaaucga

SEQ ID NO: 917394 - RNA, 19 nt, Homo sapiens
  misc_RNA (1)...(19): siRNA sense strand
caaacaaacugagccaauc

SEQ ID NO: 917395 - RNA, 19 nt, Homo sapiens
  misc_RNA (1)...(19): siRNA sense strand
gcacauggacagucaggaa

SEQ ID NO: 917396 - RNA, 19 nt, Homo sapiens
  misc_RNA (1)...(19): siRNA sense strand
gauaaagcaucagguagau

SEQ ID NO: 917397 - RNA, 19 nt, Homo sapiens
  misc_RNA (1)...(19): siRNA sense strand
aaacacaucaggucccaua

SEQ ID NO: 917398 - RNA, 19 nt, Homo sapiens
  misc_RNA (1)...(19): siRNA sense strand
caacaaaggaagcugcauu

SEQ ID NO: 917399 - RNA, 19 nt, Homo sapiens
  misc_RNA (1)...(19): siRNA sense strand
gaaagagggaaaggagaua

SEQ ID NO: 917400 - RNA, 19 nt, Homo sapiens
  misc_RNA (1)...(19): siRNA sense strand
gcaacaggccaccuucaaa

SEQ ID NO: 917401 - RNA, 19 nt, Homo sapiens
  misc_RNA (1)...(19): siRNA sense strand
gcuuggagcucuucaugga

SEQ ID NO: 917402 - RNA, 19 nt, Homo sapiens
  misc_RNA (1)...(19): siRNA sense strand
gagccgacccaauucauuu

SEQ ID NO: 917403 - RNA, 19 nt, Homo sapiens
  misc_RNA (1)...(19): siRNA sense strand
gaugaugugugccgaauau

SEQ ID NO: 917404 - RNA, 19 nt, Homo sapiens
  misc_RNA (1)...(19): siRNA sense strand
gacggaagaugccuacaaa

SEQ ID NO: 917405 - RNA, 19 nt, Homo sapiens
  misc_RNA (1)...(19): siRNA sense strand
ggaagaugccuacaaauuc

SEQ ID NO: 917406 - RNA, 19 nt, Homo sapiens
  misc_RNA (1)...(19): siRNA sense strand
gaagaacaguaaacgaaag

SEQ ID NO: 917407 - RNA, 19 nt, Homo sapiens
  misc_RNA (1)...(19): siRNA sense strand
gaagaugccuacaaauucg

SEQ ID NO: 917408 - RNA, 19 nt, Homo sapiens
  misc_RNA (1)...(19): siRNA sense strand
gaacaguaaacgaaagaaa

SEQ ID NO: 917409 - RNA, 19 nt, Homo sapiens
  misc_RNA (1)...(19): siRNA sense strand
gaaagaaacgcugcugcua

SEQ ID NO: 917410 - RNA, 19 nt, Homo sapiens
  misc_RNA (1)...(19): siRNA sense strand
ggacuacgaccaccucuuc

SEQ ID NO: 917411 - RNA, 19 nt, Homo sapiens
  misc_RNA (1)...(19): siRNA sense strand
uggaagagauguucaacug

SEQ ID NO: 917412 - RNA, 19 nt, Homo sapiens
  misc_RNA (1)...(19): siRNA sense strand
aaagaaacgcugcugcuaa

SEQ ID NO: 917413 - RNA, 19 nt, Homo sapiens
  misc_RNA (1)...(19): siRNA sense strand
cggaagaugccuacaaauu

SEQ ID NO: 917414 - RNA, 19 nt, Homo sapiens
  misc_RNA (1)...(19): siRNA sense strand
gcagcuacaucaccacgau

SEQ ID NO: 917415 - RNA, 19 nt, Homo sapiens
  misc_RNA (1)...(19): siRNA sense strand
ccagaacugugaugaugug

SEQ ID NO: 917416 - RNA, 19 nt, Homo sapiens
  misc_RNA (1)...(19): siRNA sense strand
ugaugugugccgaauauua

SEQ ID NO: 917417 - RNA, 19 nt, Homo sapiens
  misc_RNA (1)...(19): siRNA sense strand
cgaagaacaguaaacgaaa

SEQ ID NO: 917418 - RNA, 19 nt, Homo sapiens
  misc_RNA (1)...(19): siRNA sense strand
aaccagaacugugaugaug

SEQ ID NO: 917419 - RNA, 19 nt, Homo sapiens
  misc_RNA (1)...(19): siRNA sense strand
gaugugugccgaauauuag

SEQ ID NO: 917420 - RNA, 19 nt, Homo sapiens
  misc_RNA (1)...(19): siRNA sense strand
cggaguggauuucaagauc

SEQ ID NO: 917421 - RNA, 19 nt, Homo sapiens
  misc_RNA (1)...(19): siRNA sense strand
gagcugguccuccgagcaa

SEQ ID NO: 917422 - RNA, 19 nt, Homo sapiens
  misc_RNA (1)...(19): siRNA sense strand
agaaagacaaccuggcaaa

SEQ ID NO: 917423 - RNA, 19 nt, Homo sapiens
  misc_RNA (1)...(19): siRNA sense strand
gcaccaucaccuccacgua

SEQ ID NO: 917424 - RNA, 19 nt, Homo sapiens
  misc_RNA (1)...(19): siRNA sense strand
gaucggaguggauuucaag

SEQ ID NO: 917425 - RNA, 19 nt, Homo sapiens
  misc_RNA (1)...(19): siRNA sense strand
acgaagaacaguaaacgaa

SEQ ID NO: 917426 - RNA, 19 nt, Homo sapiens
  misc_RNA (1)...(19): siRNA sense strand
cgaaaucaaccagaacugu

SEQ ID NO: 917427 - RNA, 19 nt, Homo sapiens
  misc_RNA (1)...(19): siRNA sense strand
caacguggaagagauguuc

SEQ ID NO: 917428 - RNA, 19 nt, Homo sapiens
  misc_RNA (1)...(19): siRNA sense strand
ggagaaugucaacguggaa

SEQ ID NO: 917429 - RNA, 19 nt, Homo sapiens
  misc_RNA (1)...(19): siRNA sense strand
caccaucaccuccacguau

SEQ ID NO: 917430 - RNA, 19 nt, Homo sapiens
  misc_RNA (1)...(19): siRNA sense strand
ccaaggagaaugucaacgu

SEQ ID NO: 917431 - RNA, 19 nt, Homo sapiens
  misc_RNA (1)...(19): siRNA sense strand
aaaucaaccagaacuguga

SEQ ID NO: 917432 - RNA, 19 nt, Homo sapiens
  misc_RNA (1)...(19): siRNA sense strand
ccaucaccuccacguauua

SEQ ID NO: 917433 - RNA, 19 nt, Homo sapiens
  misc_RNA (1)...(19): siRNA sense strand
gcgguggcuucacgaaauc

SEQ ID NO: 917434 - RNA, 19 nt, Homo sapiens
  misc_RNA (1)...(19): siRNA sense strand
gugaugaugugugccgaau

SEQ ID NO: 917435 - RNA, 19 nt, Homo sapiens
  misc_RNA (1)...(19): siRNA sense strand
acagaacgauguggugaag

SEQ ID NO: 917436 - RNA, 19 nt, Homo sapiens
  misc_RNA (1)...(19): siRNA sense strand
caaccagaacugugaugau

SEQ ID NO: 917437 - RNA, 19 nt, Homo sapiens
  misc_RNA (1)...(19): siRNA sense strand
gcaacaacagaacgaugug

SEQ ID NO: 917438 - RNA, 19 nt, Homo sapiens
  misc_RNA (1)...(19): siRNA sense strand
gagcaaagaaagacaaccu

SEQ ID NO: 917439 - RNA, 19 nt, Homo sapiens
  misc_RNA (1)...(19): siRNA sense strand
gaccagcgccaaggagaau

SEQ ID NO: 917440 - RNA, 19 nt, Homo sapiens
  misc_RNA (1)...(19): siRNA sense strand
caaaacagcagcagcaaca

SEQ ID NO: 917441 - RNA, 19 nt, Homo sapiens
  misc_RNA (1)...(19): siRNA sense strand
gaaagacaaccuggcaaaa

SEQ ID NO: 917442 - RNA, 19 nt, Homo sapiens
  misc_RNA (1)...(19): siRNA sense strand
accaucaccuccacguauu

SEQ ID NO: 917443 - RNA, 19 nt, Homo sapiens
  misc_RNA (1)...(19): siRNA sense strand
agacggaagaugccuacaa

SEQ ID NO: 917444 - RNA, 19 nt, Homo sapiens
  misc_RNA (1)...(19): siRNA sense strand
agaacgauguggugaagcu

SEQ ID NO: 917445 - RNA, 19 nt, Homo sapiens
  misc_RNA (1)...(19): siRNA sense strand
gccgaauauuaguggguaa

SEQ ID NO: 917446 - RNA, 19 nt, Homo sapiens
  misc_RNA (1)...(19): siRNA sense strand
cagcagcagcaacaacaga

SEQ ID NO: 917447 - RNA, 19 nt, Homo sapiens
  misc_RNA (1)...(19): siRNA sense strand
gagcgcuuccgcaccauca

SEQ ID NO: 917448 - RNA, 19 nt, Homo sapiens
  misc_RNA (1)...(19): siRNA sense strand
cgaucggaguggauuucaa

SEQ ID NO: 917449 - RNA, 19 nt, Homo sapiens
  misc_RNA (1)...(19): siRNA sense strand
ggugugggcaagagcaguu

SEQ ID NO: 917450 - RNA, 19 nt, Homo sapiens
  misc_RNA (1)...(19): siRNA sense strand
gaaggugaagcugcagauc

SEQ ID NO: 917451 - RNA, 19 nt, Homo sapiens
  misc_RNA (1)...(19): siRNA sense strand
agcgguggcuucacgaaau

SEQ ID NO: 917452 - RNA, 19 nt, Homo sapiens
  misc_RNA (1)...(19): siRNA sense strand
caccagugccgaguccuuu

SEQ ID NO: 917453 - RNA, 19 nt, Homo sapiens
  misc_RNA (1)...(19): siRNA sense strand
aggugaagcugcagaucug

SEQ ID NO: 917454 - RNA, 19 nt, Homo sapiens
  misc_RNA (1)...(19): siRNA sense strand
gcaaagagcucaaaugaag

SEQ ID NO: 917455 - RNA, 19 nt, Homo sapiens
  misc_RNA (1)...(19): siRNA sense strand
gaagcuaaaugcagugaua

SEQ ID NO: 917456 - RNA, 19 nt, Homo sapiens
  misc_RNA (1)...(19): siRNA sense strand
ggaaguauguccucaguga

SEQ ID NO: 917457 - RNA, 19 nt, Homo sapiens
  misc_RNA (1)...(19): siRNA sense strand
ggaagauccugaagaaauu

SEQ ID NO: 917458 - RNA, 19 nt, Homo sapiens
  misc_RNA (1)...(19): siRNA sense strand
ccaaagggauagauauuaa

SEQ ID NO: 917459 - RNA, 19 nt, Homo sapiens
  misc_RNA (1)...(19): siRNA sense strand
gcagacaccuccagauuug

SEQ ID NO: 917460 - RNA, 19 nt, Homo sapiens
  misc_RNA (1)...(19): siRNA sense strand
gaagaagucucugguaguu

SEQ ID NO: 917461 - RNA, 19 nt, Homo sapiens
  misc_RNA (1)...(19): siRNA sense strand
gauggucagucuuuaguua

SEQ ID NO: 917462 - RNA, 19 nt, Homo sapiens
  misc_RNA (1)...(19): siRNA sense strand
cgaagaguauuacaugaua

SEQ ID NO: 917463 - RNA, 19 nt, Homo sapiens
  misc_RNA (1)...(19): siRNA sense strand
gagagaagauuacaguuuc

SEQ ID NO: 917464 - RNA, 19 nt, Homo sapiens
  misc_RNA (1)...(19): siRNA sense strand
gauaugagcucugaaaaua

SEQ ID NO: 917465 - RNA, 19 nt, Homo sapiens
  misc_RNA (1)...(19): siRNA sense strand
ugaggaaucugguauugua

SEQ ID NO: 917466 - RNA, 19 nt, Homo sapiens
  misc_RNA (1)...(19): siRNA sense strand
gaaagugaauuuacucagu

SEQ ID NO: 917467 - RNA, 19 nt, Homo sapiens
  misc_RNA (1)...(19): siRNA sense strand
gaaacucacugcagaaucu

SEQ ID NO: 917468 - RNA, 19 nt, Homo sapiens
  misc_RNA (1)...(19): siRNA sense strand
ugaaagugaugcucaaauu

SEQ ID NO: 917469 - RNA, 19 nt, Homo sapiens
  misc_RNA (1)...(19): siRNA sense strand
ugaagaaaguggcaauaaa

SEQ ID NO: 917470 - RNA, 19 nt, Homo sapiens
  misc_RNA (1)...(19): siRNA sense strand
gaggagagguuugaaguug

SEQ ID NO: 917471 - RNA, 19 nt, Homo sapiens
  misc_RNA (1)...(19): siRNA sense strand
ggaaaguucugaggaaguu

SEQ ID NO: 917472 - RNA, 19 nt, Homo sapiens
  misc_RNA (1)...(19): siRNA sense strand
gaaaucaucuguucuaccu

SEQ ID NO: 917473 - RNA, 19 nt, Homo sapiens
  misc_RNA (1)...(19): siRNA sense strand
gaaaugcaguugcgaagag

SEQ ID NO: 917474 - RNA, 19 nt, Homo sapiens
  misc_RNA (1)...(19): siRNA sense strand
gaacaaagcaguaguacac

SEQ ID NO: 917475 - RNA, 19 nt, Homo sapiens
  misc_RNA (1)...(19): siRNA sense strand
gcagagaauuggaaguaug

SEQ ID NO: 917476 - RNA, 19 nt, Homo sapiens
  misc_RNA (1)...(19): siRNA sense strand
cagaauuguuggaacuuua

SEQ ID NO: 917477 - RNA, 19 nt, Homo sapiens
  misc_RNA (1)...(19): siRNA sense strand
guaaagaaacucaaaguca

SEQ ID NO: 917478 - RNA, 19 nt, Homo sapiens
  misc_RNA (1)...(19): siRNA sense strand
caucaucugugaagaaaga

SEQ ID NO: 917479 - RNA, 19 nt, Homo sapiens
  misc_RNA (1)...(19): siRNA sense strand
gcagugauaugagcucuga

SEQ ID NO: 917480 - RNA, 19 nt, Homo sapiens
  misc_RNA (1)...(19): siRNA sense strand
gcacaagaccagccuuauu

SEQ ID NO: 917481 - RNA, 19 nt, Homo sapiens
  misc_RNA (1)...(19): siRNA sense strand
ugaaauuacugaaguggaa

SEQ ID NO: 917482 - RNA, 19 nt, Homo sapiens
  misc_RNA (1)...(19): siRNA sense strand
ggagaaugcugauagugau

SEQ ID NO: 917483 - RNA, 19 nt, Homo sapiens
  misc_RNA (1)...(19): siRNA sense strand
agucauaccugaagucuga

SEQ ID NO: 917484 - RNA, 19 nt, Homo sapiens
  misc_RNA (1)...(19): siRNA sense strand
gaucaucuguuacguacug

SEQ ID NO: 917485 - RNA, 19 nt, Homo sapiens
  misc_RNA (1)...(19): siRNA sense strand
gacaauaccauccauaaga

SEQ ID NO: 917486 - RNA, 19 nt, Homo sapiens
  misc_RNA (1)...(19): siRNA sense strand
aaccagauauugcuucuaa

SEQ ID NO: 917487 - RNA, 19 nt, Homo sapiens
  misc_RNA (1)...(19): siRNA sense strand
gagaaaggagaaaguagua

SEQ ID NO: 917488 - RNA, 19 nt, Homo sapiens
  misc_RNA (1)...(19): siRNA sense strand
gaaagugaugcucaaauug

SEQ ID NO: 917489 - RNA, 19 nt, Homo sapiens
  misc_RNA (1)...(19): siRNA sense strand
ggaaguugaugcagcugaa

SEQ ID NO: 917490 - RNA, 19 nt, Homo sapiens
  misc_RNA (1)...(19): siRNA sense strand
gccaacagcuccuucuaga

SEQ ID NO: 917491 - RNA, 19 nt, Homo sapiens
  misc_RNA (1)...(19): siRNA sense strand
gauuacaguuucaucagaa

SEQ ID NO: 917492 - RNA, 19 nt, Homo sapiens
  misc_RNA (1)...(19): siRNA sense strand
ggaaucugguauuguagaa

SEQ ID NO: 917493 - RNA, 19 nt, Homo sapiens
  misc_RNA (1)...(19): siRNA sense strand
ggccaaagagagaagauua

SEQ ID NO: 917494 - RNA, 19 nt, Homo sapiens
  misc_RNA (1)...(19): siRNA sense strand
aaagcuggcuauccucuaa

SEQ ID NO: 917495 - RNA, 19 nt, Homo sapiens
  misc_RNA (1)...(19): siRNA sense strand
ugaaaucauuggcuucuau

SEQ ID NO: 917496 - RNA, 19 nt, Homo sapiens
  misc_RNA (1)...(19): siRNA sense strand
gcaacaccauugagaauac

SEQ ID NO: 917497 - RNA, 19 nt, Homo sapiens
  misc_RNA (1)...(19): siRNA sense strand
gcagugagcugaaaagugu

SEQ ID NO: 917498 - RNA, 19 nt, Homo sapiens
  misc_RNA (1)...(19): siRNA sense strand
agagucaucuucuauguug

SEQ ID NO: 917499 - RNA, 19 nt, Homo sapiens
  misc_RNA (1)...(19): siRNA sense strand
gaggaaacgugcccaacga

SEQ ID NO: 917500 - RNA, 19 nt, Homo sapiens
  misc_RNA (1)...(19): siRNA sense strand
gaacuggaguaccuucuac

SEQ ID NO: 917501 - RNA, 19 nt, Homo sapiens
  misc_RNA (1)...(19): siRNA sense strand
ugcagaaucuuucacagua

SEQ ID NO: 917502 - RNA, 19 nt, Homo sapiens
  misc_RNA (1)...(19): siRNA sense strand
cacaagaccagccuuauuu

SEQ ID NO: 917503 - RNA, 19 nt, Homo sapiens
  misc_RNA (1)...(19): siRNA sense strand
acaauaccauccauaagaa

SEQ ID NO: 917504 - RNA, 19 nt, Homo sapiens
  misc_RNA (1)...(19): siRNA sense strand
gaagauuacaguuucauca

SEQ ID NO: 917505 - RNA, 19 nt, Homo sapiens
  misc_RNA (1)...(19): siRNA sense strand
caucuguucuaccucuuua

SEQ ID NO: 917506 - RNA, 19 nt, Homo sapiens
  misc_RNA (1)...(19): siRNA sense strand
gcaguugcgaagaguauua

SEQ ID NO: 917507 - RNA, 19 nt, Homo sapiens
  misc_RNA (1)...(19): siRNA sense strand
gggaucauaucauugaaau

SEQ ID NO: 917508 - RNA, 19 nt, Homo sapiens
  misc_RNA (1)...(19): siRNA sense strand
agacccaccuccaccuuua

SEQ ID NO: 917509 - RNA, 19 nt, Homo sapiens
  misc_RNA (1)...(19): siRNA sense strand
caucagaaagggagaagua

SEQ ID NO: 917510 - RNA, 19 nt, Homo sapiens
  misc_RNA (1)...(19): siRNA sense strand
gaugaacaaagcaguagua

SEQ ID NO: 917511 - RNA, 19 nt, Homo sapiens
  misc_RNA (1)...(19): siRNA sense strand
caacugggccucccucuuc

SEQ ID NO: 917512 - RNA, 19 nt, Homo sapiens
  misc_RNA (1)...(19): siRNA sense strand
gaaacgugcccaacgagaa

SEQ ID NO: 917513 - RNA, 19 nt, Homo sapiens
  misc_RNA (1)...(19): siRNA sense strand
uauguuggcuacaguuaaa

SEQ ID NO: 917514 - RNA, 19 nt, Homo sapiens
  misc_RNA (1)...(19): siRNA sense strand
caaauugaagugcuuacua

SEQ ID NO: 917515 - RNA, 19 nt, Homo sapiens
  misc_RNA (1)...(19): siRNA sense strand
ggacugccguacaccuuug

SEQ ID NO: 917516 - RNA, 19 nt, Homo sapiens
  misc_RNA (1)...(19): siRNA sense strand
ccaccuuccuucaccuaua

SEQ ID NO: 917517 - RNA, 19 nt, Homo sapiens
  misc_RNA (1)...(19): siRNA sense strand
gcugaaaaguguccauaua

SEQ ID NO: 917518 - RNA, 19 nt, Homo sapiens
  misc_RNA (1)...(19): siRNA sense strand
gccaaagggauagauauua

SEQ ID NO: 917519 - RNA, 19 nt, Homo sapiens
  misc_RNA (1)...(19): siRNA sense strand
uaacagaagaacuggagua

SEQ ID NO: 917520 - RNA, 19 nt, Homo sapiens
  misc_RNA (1)...(19): siRNA sense strand
ggagagguuugaaguugau

SEQ ID NO: 917521 - RNA, 19 nt, Homo sapiens
  misc_RNA (1)...(19): siRNA sense strand
caacauauccagccacagu

SEQ ID NO: 917522 - RNA, 19 nt, Homo sapiens
  misc_RNA (1)...(19): siRNA sense strand
gcugauagugauagaauuu

SEQ ID NO: 917523 - RNA, 19 nt, Homo sapiens
  misc_RNA (1)...(19): siRNA sense strand
gaagaaaguggcaauaaaa

SEQ ID NO: 917524 - RNA, 19 nt, Homo sapiens
  misc_RNA (1)...(19): siRNA sense strand
gaaguaacacugcaaaucg

SEQ ID NO: 917525 - RNA, 19 nt, Homo sapiens
  misc_RNA (1)...(19): siRNA sense strand
ccaccaaugucucagucua

SEQ ID NO: 917526 - RNA, 19 nt, Homo sapiens
  misc_RNA (1)...(19): siRNA sense strand
gcaagucagcauuccgaua

SEQ ID NO: 917527 - RNA, 19 nt, Homo sapiens
  misc_RNA (1)...(19): siRNA sense strand
ccaaggaacugaaaaugaa

SEQ ID NO: 917528 - RNA, 19 nt, Homo sapiens
  misc_RNA (1)...(19): siRNA sense strand
cagaaagggagaaguauga

SEQ ID NO: 917529 - RNA, 19 nt, Homo sapiens
  misc_RNA (1)...(19): siRNA sense strand
gggaauguguggcaguaga

SEQ ID NO: 917530 - RNA, 19 nt, Homo sapiens
  misc_RNA (1)...(19): siRNA sense strand
gaguagugcugauaguugu

SEQ ID NO: 917531 - RNA, 19 nt, Homo sapiens
  misc_RNA (1)...(19): siRNA sense strand
ggugaggaaucugguauug

SEQ ID NO: 917532 - RNA, 19 nt, Homo sapiens
  misc_RNA (1)...(19): siRNA sense strand
uaacacugcaaaucguuua

SEQ ID NO: 917533 - RNA, 19 nt, Homo sapiens
  misc_RNA (1)...(19): siRNA sense strand
gaauccuccuucagccaua

SEQ ID NO: 917534 - RNA, 19 nt, Homo sapiens
  misc_RNA (1)...(19): siRNA sense strand
gaaaucauuggcuucuauu

SEQ ID NO: 917535 - RNA, 19 nt, Homo sapiens
  misc_RNA (1)...(19): siRNA sense strand
gagccucacuggaugaaca

SEQ ID NO: 917536 - RNA, 19 nt, Homo sapiens
  misc_RNA (1)...(19): siRNA sense strand
ggaguagugcugauaguug

SEQ ID NO: 917537 - RNA, 19 nt, Homo sapiens
  misc_RNA (1)...(19): siRNA sense strand
uggaagagguucaaaguac

SEQ ID NO: 917538 - RNA, 19 nt, Homo sapiens
  misc_RNA (1)...(19): siRNA sense strand
gggacaguuucaaguguuu

SEQ ID NO: 917539 - RNA, 19 nt, Homo sapiens
  misc_RNA (1)...(19): siRNA sense strand
caccuuccuucaccuauaa

SEQ ID NO: 917540 - RNA, 19 nt, Homo sapiens
  misc_RNA (1)...(19): siRNA sense strand
gacagugagacaacaguua

SEQ ID NO: 917541 - RNA, 19 nt, Homo sapiens
  misc_RNA (1)...(19): siRNA sense strand
uuaaucaucuucagguuca

SEQ ID NO: 917542 - RNA, 19 nt, Homo sapiens
  misc_RNA (1)...(19): siRNA sense strand
aaagggagaaguaugaauu

SEQ ID NO: 917543 - RNA, 19 nt, Homo sapiens
  misc_RNA (1)...(19): siRNA sense strand
agaagauacuugcuguuga

SEQ ID NO: 917544 - RNA, 19 nt, Homo sapiens
  misc_RNA (1)...(19): siRNA sense strand
cagaagaacuggaguaccu

SEQ ID NO: 917545 - RNA, 19 nt, Homo sapiens
  misc_RNA (1)...(19): siRNA sense strand
gaauugggccugggacuug

SEQ ID NO: 917546 - RNA, 19 nt, Homo sapiens
  misc_RNA (1)...(19): siRNA sense strand
gagcacacaagaacucuga

SEQ ID NO: 917547 - RNA, 19 nt, Homo sapiens
  misc_RNA (1)...(19): siRNA sense strand
agaagucucugguaguuca

SEQ ID NO: 917548 - RNA, 19 nt, Homo sapiens
  misc_RNA (1)...(19): siRNA sense strand
ggagaaaguaguaguccuu

SEQ ID NO: 917549 - RNA, 19 nt, Homo sapiens
  misc_RNA (1)...(19): siRNA sense strand
gaaaggagaaaguaguagu

SEQ ID NO: 917550 - RNA, 19 nt, Homo sapiens
  misc_RNA (1)...(19): siRNA sense strand
ucacaguacccuaugauga

SEQ ID NO: 917551 - RNA, 19 nt, Homo sapiens
  misc_RNA (1)...(19): siRNA sense strand
gucaugcccuucuccauug

SEQ ID NO: 917552 - RNA, 19 nt, Homo sapiens
  misc_RNA (1)...(19): siRNA sense strand
caacagcuccuucuagaac

SEQ ID NO: 917553 - RNA, 19 nt, Homo sapiens
  misc_RNA (1)...(19): siRNA sense strand
ccaagcaacaucagaauca

SEQ ID NO: 917554 - RNA, 19 nt, Homo sapiens
  misc_RNA (1)...(19): siRNA sense strand
caaaggcgcugaagagaua

SEQ ID NO: 917555 - RNA, 19 nt, Homo sapiens
  misc_RNA (1)...(19): siRNA sense strand
gaacaggcaagauuaauua

SEQ ID NO: 917556 - RNA, 19 nt, Homo sapiens
  misc_RNA (1)...(19): siRNA sense strand
caaauuggcucauucauuc

SEQ ID NO: 917557 - RNA, 19 nt, Homo sapiens
  misc_RNA (1)...(19): siRNA sense strand
ggaaagcugugaagacauu

SEQ ID NO: 917558 - RNA, 19 nt, Homo sapiens
  misc_RNA (1)...(19): siRNA sense strand
caaauuggauuggaaauga

SEQ ID NO: 917559 - RNA, 19 nt, Homo sapiens
  misc_RNA (1)...(19): siRNA sense strand
guacugaccuuuaugacuu

SEQ ID NO: 917560 - RNA, 19 nt, Homo sapiens
  misc_RNA (1)...(19): siRNA sense strand
uaaagaacaggcaagauua

SEQ ID NO: 917561 - RNA, 19 nt, Homo sapiens
  misc_RNA (1)...(19): siRNA sense strand
gcgcugaagagauauauua

SEQ ID NO: 917562 - RNA, 19 nt, Homo sapiens
  misc_RNA (1)...(19): siRNA sense strand
gugcuucccuguacaguuu

SEQ ID NO: 917563 - RNA, 19 nt, Homo sapiens
  misc_RNA (1)...(19): siRNA sense strand
ggucaugccuuacaguaug

SEQ ID NO: 917564 - RNA, 19 nt, Homo sapiens
  misc_RNA (1)...(19): siRNA sense strand
gcugagcacuguugguauu

SEQ ID NO: 917565 - RNA, 19 nt, Homo sapiens
  misc_RNA (1)...(19): siRNA sense strand
guacagucauggacccuuu

SEQ ID NO: 917566 - RNA, 19 nt, Homo sapiens
  misc_RNA (1)...(19): siRNA sense strand
gaugggaguuuuccuaaua

SEQ ID NO: 917567 - RNA, 19 nt, Homo sapiens
  misc_RNA (1)...(19): siRNA sense strand
gauauaaagccaagaugaa

SEQ ID NO: 917568 - RNA, 19 nt, Homo sapiens
  misc_RNA (1)...(19): siRNA sense strand
cuaaagaacaggcaagauu

SEQ ID NO: 917569 - RNA, 19 nt, Homo sapiens
  misc_RNA (1)...(19): siRNA sense strand
gugauccacugagauauaa

SEQ ID NO: 917570 - RNA, 19 nt, Homo sapiens
  misc_RNA (1)...(19): siRNA sense strand
caggcaagauuaauuagug

SEQ ID NO: 917571 - RNA, 19 nt, Homo sapiens
  misc_RNA (1)...(19): siRNA sense strand
gaaaggaaagcugugaaga

SEQ ID NO: 917572 - RNA, 19 nt, Homo sapiens
  misc_RNA (1)...(19): siRNA sense strand
aaucagaagcuccaaauug

SEQ ID NO: 917573 - RNA, 19 nt, Homo sapiens
  misc_RNA (1)...(19): siRNA sense strand
caacaaauuggcucauuca

SEQ ID NO: 917574 - RNA, 19 nt, Homo sapiens
  misc_RNA (1)...(19): siRNA sense strand
ccaccuacuuugaaugaug

SEQ ID NO: 917575 - RNA, 19 nt, Homo sapiens
  misc_RNA (1)...(19): siRNA sense strand
ugaccuuuaugacuucuuu

SEQ ID NO: 917576 - RNA, 19 nt, Homo sapiens
  misc_RNA (1)...(19): siRNA sense strand
aaagauucauccaggugua

SEQ ID NO: 917577 - RNA, 19 nt, Homo sapiens
  misc_RNA (1)...(19): siRNA sense strand
cuacuugaacucuacauuu

SEQ ID NO: 917578 - RNA, 19 nt, Homo sapiens
  misc_RNA (1)...(19): siRNA sense strand
ggugucuggucaugccuua

SEQ ID NO: 917579 - RNA, 19 nt, Homo sapiens
  misc_RNA (1)...(19): siRNA sense strand
agaugaugcuguuugguaa

SEQ ID NO: 917580 - RNA, 19 nt, Homo sapiens
  misc_RNA (1)...(19): siRNA sense strand
aaagaacaggcaagauuaa

SEQ ID NO: 917581 - RNA, 19 nt, Homo sapiens
  misc_RNA (1)...(19): siRNA sense strand
caaaauaucugggguacug

SEQ ID NO: 917582 - RNA, 19 nt, Homo sapiens
  misc_RNA (1)...(19): siRNA sense strand
acaaauuggcucauucauu

SEQ ID NO: 917583 - RNA, 19 nt, Homo sapiens
  misc_RNA (1)...(19): siRNA sense strand
gauuugguuuggcuacuug

SEQ ID NO: 917584 - RNA, 19 nt, Homo sapiens
  misc_RNA (1)...(19): siRNA sense strand
aaggaaagcugugaagaca

SEQ ID NO: 917585 - RNA, 19 nt, Homo sapiens
  misc_RNA (1)...(19): siRNA sense strand
auaccuggaucuauuaugu

SEQ ID NO: 917586 - RNA, 19 nt, Homo sapiens
  misc_RNA (1)...(19): siRNA sense strand
uaauggugcucauaauucu

SEQ ID NO: 917587 - RNA, 19 nt, Homo sapiens
  misc_RNA (1)...(19): siRNA sense strand
gcuacuaugcuguguguga

SEQ ID NO: 917588 - RNA, 19 nt, Homo sapiens
  misc_RNA (1)...(19): siRNA sense strand
ucacaaagcaaagaaagga

SEQ ID NO: 917589 - RNA, 19 nt, Homo sapiens
  misc_RNA (1)...(19): siRNA sense strand
accuggaucuauuauguua

SEQ ID NO: 917590 - RNA, 19 nt, Homo sapiens
  misc_RNA (1)...(19): siRNA sense strand
ucauccagguguaaauuau

SEQ ID NO: 917591 - RNA, 19 nt, Homo sapiens
  misc_RNA (1)...(19): siRNA sense strand
aagaugaugcuguuuggua

SEQ ID NO: 917592 - RNA, 19 nt, Homo sapiens
  misc_RNA (1)...(19): siRNA sense strand
gcaagauuaauuagugaug

SEQ ID NO: 917593 - RNA, 19 nt, Homo sapiens
  misc_RNA (1)...(19): siRNA sense strand
ugaagaugaugcuguuugg

SEQ ID NO: 917594 - RNA, 19 nt, Homo sapiens
  misc_RNA (1)...(19): siRNA sense strand
cacacaagcaccgacauua

SEQ ID NO: 917595 - RNA, 19 nt, Homo sapiens
  misc_RNA (1)...(19): siRNA sense strand
acacaagcaccgacauuau

SEQ ID NO: 917596 - RNA, 19 nt, Homo sapiens
  misc_RNA (1)...(19): siRNA sense strand
agaacaggcaagauuaauu

SEQ ID NO: 917597 - RNA, 19 nt, Homo sapiens
  misc_RNA (1)...(19): siRNA sense strand
gaauuucacaaagcaaaga

SEQ ID NO: 917598 - RNA, 19 nt, Homo sapiens
  misc_RNA (1)...(19): siRNA sense strand
ccaaucagaagcuccaaau

SEQ ID NO: 917599 - RNA, 19 nt, Homo sapiens
  misc_RNA (1)...(19): siRNA sense strand
guuggcaaucugauaguua

SEQ ID NO: 917600 - RNA, 19 nt, Homo sapiens
  misc_RNA (1)...(19): siRNA sense strand
cacaagcaccgacauuaug

SEQ ID NO: 917601 - RNA, 19 nt, Homo sapiens
  misc_RNA (1)...(19): siRNA sense strand
cuggaucuauuauguuaug

SEQ ID NO: 917602 - RNA, 19 nt, Homo sapiens
  misc_RNA (1)...(19): siRNA sense strand
ggagguugcucugucuucu

SEQ ID NO: 917603 - RNA, 19 nt, Homo sapiens
  misc_RNA (1)...(19): siRNA sense strand
ugugugauccacugagaua

SEQ ID NO: 917604 - RNA, 19 nt, Homo sapiens
  misc_RNA (1)...(19): siRNA sense strand
ucacacaagcaccgacauu

SEQ ID NO: 917605 - RNA, 19 nt, Homo sapiens
  misc_RNA (1)...(19): siRNA sense strand
uuaauggugcucauaauuc

SEQ ID NO: 917606 - RNA, 19 nt, Homo sapiens
  misc_RNA (1)...(19): siRNA sense strand
agguugcucugucuucuuu

SEQ ID NO: 917607 - RNA, 19 nt, Homo sapiens
  misc_RNA (1)...(19): siRNA sense strand
ugugauccacugagauaua

SEQ ID NO: 917608 - RNA, 19 nt, Homo sapiens
  misc_RNA (1)...(19): siRNA sense strand
agauauaaagccaagauga

SEQ ID NO: 917609 - RNA, 19 nt, Homo sapiens
  misc_RNA (1)...(19): siRNA sense strand
guuuaauggugcucauaau

SEQ ID NO: 917610 - RNA, 19 nt, Homo sapiens
  misc_RNA (1)...(19): siRNA sense strand
cacugaagaugaugcuguu

SEQ ID NO: 917611 - RNA, 19 nt, Homo sapiens
  misc_RNA (1)...(19): siRNA sense strand
acaaagcaaagaaaggaaa

SEQ ID NO: 917612 - RNA, 19 nt, Homo sapiens
  misc_RNA (1)...(19): siRNA sense strand
ugucuuucaucuccauuga

SEQ ID NO: 917613 - RNA, 19 nt, Homo sapiens
  misc_RNA (1)...(19): siRNA sense strand
aaagaaaggaaagcuguga

SEQ ID NO: 917614 - RNA, 19 nt, Homo sapiens
  misc_RNA (1)...(19): siRNA sense strand
ccgcuacuaugcugugugu

SEQ ID NO: 917615 - RNA, 19 nt, Homo sapiens
  misc_RNA (1)...(19): siRNA sense strand
aggcaagauuaauuaguga

SEQ ID NO: 917616 - RNA, 19 nt, Homo sapiens
  misc_RNA (1)...(19): siRNA sense strand
gaugaugcuguuugguaaa

SEQ ID NO: 917617 - RNA, 19 nt, Homo sapiens
  misc_RNA (1)...(19): siRNA sense strand
aaacaacuggucaaaugau

SEQ ID NO: 917618 - RNA, 19 nt, Homo sapiens
  misc_RNA (1)...(19): siRNA sense strand
caccuacuuugaaugaugu

SEQ ID NO: 917619 - RNA, 19 nt, Homo sapiens
  misc_RNA (1)...(19): siRNA sense strand
gcucugucuucuuuagcaa

SEQ ID NO: 917620 - RNA, 19 nt, Homo sapiens
  misc_RNA (1)...(19): siRNA sense strand
gagcucagccuccauuuuc

SEQ ID NO: 917621 - RNA, 19 nt, Homo sapiens
  misc_RNA (1)...(19): siRNA sense strand
uuggcaaucugauaguuau

SEQ ID NO: 917622 - RNA, 19 nt, Homo sapiens
  misc_RNA (1)...(19): siRNA sense strand
uaucacacuucaaacaacu

SEQ ID NO: 917623 - RNA, 19 nt, Homo sapiens
  misc_RNA (1)...(19): siRNA sense strand
ucaaaggcgcugaagagau

SEQ ID NO: 917624 - RNA, 19 nt, Homo sapiens
  misc_RNA (1)...(19): siRNA sense strand
gagauauaaagccaagaug

SEQ ID NO: 917625 - RNA, 19 nt, Homo sapiens
  misc_RNA (1)...(19): siRNA sense strand
uuaauccaaugguuuaugc

SEQ ID NO: 917626 - RNA, 19 nt, Homo sapiens
  misc_RNA (1)...(19): siRNA sense strand
gaacucuacauuuaaucca

SEQ ID NO: 917627 - RNA, 19 nt, Homo sapiens
  misc_RNA (1)...(19): siRNA sense strand
aauggaauuucacaaagca

SEQ ID NO: 917628 - RNA, 19 nt, Homo sapiens
  misc_RNA (1)...(19): siRNA sense strand
caaucagaagcuccaaauu

SEQ ID NO: 917629 - RNA, 19 nt, Homo sapiens
  misc_RNA (1)...(19): siRNA sense strand
gagcacuguugguauuuug

SEQ ID NO: 917630 - RNA, 19 nt, Homo sapiens
  misc_RNA (1)...(19): siRNA sense strand
caacuggucaaaugauguc

SEQ ID NO: 917631 - RNA, 19 nt, Homo sapiens
  misc_RNA (1)...(19): siRNA sense strand
ggaauuucacaaagcaaag

SEQ ID NO: 917632 - RNA, 19 nt, Homo sapiens
  misc_RNA (1)...(19): siRNA sense strand
ugaucuuucuggagcuaaa

SEQ ID NO: 917633 - RNA, 19 nt, Homo sapiens
  misc_RNA (1)...(19): siRNA sense strand
ugagauauaaagccaagau

SEQ ID NO: 917634 - RNA, 19 nt, Homo sapiens
  misc_RNA (1)...(19): siRNA sense strand
cuacuaugcugugugugau

SEQ ID NO: 917635 - RNA, 19 nt, Homo sapiens
  misc_RNA (1)...(19): siRNA sense strand
gaugcuguuugguaaaauu

SEQ ID NO: 917636 - RNA, 19 nt, Homo sapiens
  misc_RNA (1)...(19): siRNA sense strand
cuucauaccccaacaaauu

SEQ ID NO: 917637 - RNA, 19 nt, Homo sapiens
  misc_RNA (1)...(19): siRNA sense strand
guuucuauaucacacuuca

SEQ ID NO: 917638 - RNA, 19 nt, Homo sapiens
  misc_RNA (1)...(19): siRNA sense strand
cuauaucacacuucaaaca

SEQ ID NO: 917639 - RNA, 19 nt, Homo sapiens
  misc_RNA (1)...(19): siRNA sense strand
ucauaauucugaccacacu

SEQ ID NO: 917640 - RNA, 19 nt, Homo sapiens
  misc_RNA (1)...(19): siRNA sense strand
gcugaagagauauauuaca

SEQ ID NO: 917641 - RNA, 19 nt, Homo sapiens
  misc_RNA (1)...(19): siRNA sense strand
gauccacugagauauaaag

SEQ ID NO: 917642 - RNA, 19 nt, Homo sapiens
  misc_RNA (1)...(19): siRNA sense strand
aacaacuggucaaaugaug

SEQ ID NO: 917643 - RNA, 19 nt, Homo sapiens
  misc_RNA (1)...(19): siRNA sense strand
gcuacuugaacucuacauu

SEQ ID NO: 917644 - RNA, 19 nt, Homo sapiens
  misc_RNA (1)...(19): siRNA sense strand
gggauugugaugggaguuu

SEQ ID NO: 917645 - RNA, 19 nt, Homo sapiens
  misc_RNA (1)...(19): siRNA sense strand
guugcucugucuucuuuag

SEQ ID NO: 917646 - RNA, 19 nt, Homo sapiens
  misc_RNA (1)...(19): siRNA sense strand
cauccagguguaaauuauu

SEQ ID NO: 917647 - RNA, 19 nt, Homo sapiens
  misc_RNA (1)...(19): siRNA sense strand
gugaagacauuggggauug

SEQ ID NO: 917648 - RNA, 19 nt, Homo sapiens
  misc_RNA (1)...(19): siRNA sense strand
caaagcaaagaaaggaaag

SEQ ID NO: 917649 - RNA, 19 nt, Homo sapiens
  misc_RNA (1)...(19): siRNA sense strand
cagccuccauuuuccauuu

SEQ ID NO: 917650 - RNA, 19 nt, Homo sapiens
  misc_RNA (1)...(19): siRNA sense strand
ugauuugguuuggcuacuu

SEQ ID NO: 917651 - RNA, 19 nt, Homo sapiens
  misc_RNA (1)...(19): siRNA sense strand
gcuucccuguacaguuuaa

SEQ ID NO: 917652 - RNA, 19 nt, Homo sapiens
  misc_RNA (1)...(19): siRNA sense strand
uucuuuaucuguacaguca

SEQ ID NO: 917653 - RNA, 19 nt, Homo sapiens
  misc_RNA (1)...(19): siRNA sense strand
guuaugugucuauuacaga

SEQ ID NO: 917654 - RNA, 19 nt, Homo sapiens
  misc_RNA (1)...(19): siRNA sense strand
acacugacauccagaauaa

SEQ ID NO: 917655 - RNA, 19 nt, Homo sapiens
  misc_RNA (1)...(19): siRNA sense strand
gagaaacucuggaaacauc

SEQ ID NO: 917656 - RNA, 19 nt, Homo sapiens
  misc_RNA (1)...(19): siRNA sense strand
uagcagaaaugauguuuga

SEQ ID NO: 917657 - RNA, 19 nt, Homo sapiens
  misc_RNA (1)...(19): siRNA sense strand
aagaagcccuguacaagua

SEQ ID NO: 917658 - RNA, 19 nt, Homo sapiens
  misc_RNA (1)...(19): siRNA sense strand
gggaugagcuguaccaagu

SEQ ID NO: 917659 - RNA, 19 nt, Homo sapiens
  misc_RNA (1)...(19): siRNA sense strand
ggacaucugugguucaaag

SEQ ID NO: 917660 - RNA, 19 nt, Homo sapiens
  misc_RNA (1)...(19): siRNA sense strand
uagcaagacuuaaucagaa

SEQ ID NO: 917661 - RNA, 19 nt, Homo sapiens
  misc_RNA (1)...(19): siRNA sense strand
acaaggccgugguaaauaa

SEQ ID NO: 917662 - RNA, 19 nt, Homo sapiens
  misc_RNA (1)...(19): siRNA sense strand
ggacaugucauccacuuug

SEQ ID NO: 917663 - RNA, 19 nt, Homo sapiens
  misc_RNA (1)...(19): siRNA sense strand
caaugugccuuuagcaaga

SEQ ID NO: 917664 - RNA, 19 nt, Homo sapiens
  misc_RNA (1)...(19): siRNA sense strand
caacaaggccgugguaaau

SEQ ID NO: 917665 - RNA, 19 nt, Homo sapiens
  misc_RNA (1)...(19): siRNA sense strand
gagaaaagcuagcagaaau

SEQ ID NO: 917666 - RNA, 19 nt, Homo sapiens
  misc_RNA (1)...(19): siRNA sense strand
gcagaaaugauguuugaga

SEQ ID NO: 917667 - RNA, 19 nt, Homo sapiens
  misc_RNA (1)...(19): siRNA sense strand
ucaaagagaaguugugcua

SEQ ID NO: 917668 - RNA, 19 nt, Homo sapiens
  misc_RNA (1)...(19): siRNA sense strand
uaacuucccuugcauacuc

SEQ ID NO: 917669 - RNA, 19 nt, Homo sapiens
  misc_RNA (1)...(19): siRNA sense strand
gcaagaagcccuguacaag

SEQ ID NO: 917670 - RNA, 19 nt, Homo sapiens
  misc_RNA (1)...(19): siRNA sense strand
cggcagacuucaaggagua

SEQ ID NO: 917671 - RNA, 19 nt, Homo sapiens
  misc_RNA (1)...(19): siRNA sense strand
aggaaaggcucaugaagga

SEQ ID NO: 917672 - RNA, 19 nt, Homo sapiens
  misc_RNA (1)...(19): siRNA sense strand
caaagguacucccaucaag

SEQ ID NO: 917673 - RNA, 19 nt, Homo sapiens
  misc_RNA (1)...(19): siRNA sense strand
aaagagaaguugugcuaca

SEQ ID NO: 917674 - RNA, 19 nt, Homo sapiens
  misc_RNA (1)...(19): siRNA sense strand
gagaaagagcuacgcaaga

SEQ ID NO: 917675 - RNA, 19 nt, Homo sapiens
  misc_RNA (1)...(19): siRNA sense strand
gagagguccugggagcaua

SEQ ID NO: 917676 - RNA, 19 nt, Homo sapiens
  misc_RNA (1)...(19): siRNA sense strand
gggaugacauggagaaacu

SEQ ID NO: 917677 - RNA, 19 nt, Homo sapiens
  misc_RNA (1)...(19): siRNA sense strand
guaugaggcccuacauuug

SEQ ID NO: 917678 - RNA, 19 nt, Homo sapiens
  misc_RNA (1)...(19): siRNA sense strand
gcagcaucaugaaguguga

SEQ ID NO: 917679 - RNA, 19 nt, Homo sapiens
  misc_RNA (1)...(19): siRNA sense strand
gcauacagacugccagaug

SEQ ID NO: 917680 - RNA, 19 nt, Homo sapiens
  misc_RNA (1)...(19): siRNA sense strand
ugaccgagcccucuuugaa

SEQ ID NO: 917681 - RNA, 19 nt, Homo sapiens
  misc_RNA (1)...(19): siRNA sense strand
gaacagcuggcuuccaaag

SEQ ID NO: 917682 - RNA, 19 nt, Homo sapiens
  misc_RNA (1)...(19): siRNA sense strand
agaaagagcuacgcaagag

SEQ ID NO: 917683 - RNA, 19 nt, Homo sapiens
  misc_RNA (1)...(19): siRNA sense strand
caagaagcccuguacaagu

SEQ ID NO: 917684 - RNA, 19 nt, Homo sapiens
  misc_RNA (1)...(19): siRNA sense strand
cgugguaaauaacaucaaa

SEQ ID NO: 917685 - RNA, 19 nt, Homo sapiens
  misc_RNA (1)...(19): siRNA sense strand
guuucuaccugucuaauca

SEQ ID NO: 917686 - RNA, 19 nt, Homo sapiens
  misc_RNA (1)...(19): siRNA sense strand
cagcuggcuuccaaaggua

SEQ ID NO: 917687 - RNA, 19 nt, Homo sapiens
  misc_RNA (1)...(19): siRNA sense strand
guaaauucaaugugccuuu

SEQ ID NO: 917688 - RNA, 19 nt, Homo sapiens
  misc_RNA (1)...(19): siRNA sense strand
gacacugacauccagaaua

SEQ ID NO: 917689 - RNA, 19 nt, Homo sapiens
  misc_RNA (1)...(19): siRNA sense strand
agauguuccugcuguaauu

SEQ ID NO: 917690 - RNA, 19 nt, Homo sapiens
  misc_RNA (1)...(19): siRNA sense strand
aguaugaggcccuacauuu

SEQ ID NO: 917691 - RNA, 19 nt, Homo sapiens
  misc_RNA (1)...(19): siRNA sense strand
ugaccucuaugagcaguuu

SEQ ID NO: 917692 - RNA, 19 nt, Homo sapiens
  misc_RNA (1)...(19): siRNA sense strand
ggguuuaacuucccuugca

SEQ ID NO: 917693 - RNA, 19 nt, Homo sapiens
  misc_RNA (1)...(19): siRNA sense strand
cuugggacauuguaaauuc

SEQ ID NO: 917694 - RNA, 19 nt, Homo sapiens
  misc_RNA (1)...(19): siRNA sense strand
aaagcuagcagaaaugaug

SEQ ID NO: 917695 - RNA, 19 nt, Homo sapiens
  misc_RNA (1)...(19): siRNA sense strand
gcagucaccaaacucugua

SEQ ID NO: 917696 - RNA, 19 nt, Homo sapiens
  misc_RNA (1)...(19): siRNA sense strand
ccucuuugcuagcggguuu

SEQ ID NO: 917697 - RNA, 19 nt, Homo sapiens
  misc_RNA (1)...(19): siRNA sense strand
ggcaagaagcccuguacaa

SEQ ID NO: 917698 - RNA, 19 nt, Homo sapiens
  misc_RNA (1)...(19): siRNA sense strand
uaacaucaaagagaaguug

SEQ ID NO: 917699 - RNA, 19 nt, Homo sapiens
  misc_RNA (1)...(19): siRNA sense strand
ucaacaaggccgugguaaa

SEQ ID NO: 917700 - RNA, 19 nt, Homo sapiens
  misc_RNA (1)...(19): siRNA sense strand
uggagaaacucuggaaaca

SEQ ID NO: 917701 - RNA, 19 nt, Homo sapiens
  misc_RNA (1)...(19): siRNA sense strand
ccaaagguacucccaucaa

SEQ ID NO: 917702 - RNA, 19 nt, Homo sapiens
  misc_RNA (1)...(19): siRNA sense strand
cagcuucuccugauagaug

SEQ ID NO: 917703 - RNA, 19 nt, Homo sapiens
  misc_RNA (1)...(19): siRNA sense strand
guaacaggaugggaugaca

SEQ ID NO: 917704 - RNA, 19 nt, Homo sapiens
  misc_RNA (1)...(19): siRNA sense strand
ccacagcccaggacucuca

SEQ ID NO: 917705 - RNA, 19 nt, Homo sapiens
  misc_RNA (1)...(19): siRNA sense strand
cauugagcguggacuggua

SEQ ID NO: 917706 - RNA, 19 nt, Homo sapiens
  misc_RNA (1)...(19): siRNA sense strand
caucugugguucaaagaag

SEQ ID NO: 917707 - RNA, 19 nt, Homo sapiens
  misc_RNA (1)...(19): siRNA sense strand
gaaaagcuagcagaaauga

SEQ ID NO: 917708 - RNA, 19 nt, Homo sapiens
  misc_RNA (1)...(19): siRNA sense strand
gaccgagcccucuuugaau

SEQ ID NO: 917709 - RNA, 19 nt, Homo sapiens
  misc_RNA (1)...(19): siRNA sense strand
gagcgggagcuuggaguaa

SEQ ID NO: 917710 - RNA, 19 nt, Homo sapiens
  misc_RNA (1)...(19): siRNA sense strand
gaugggaugacauggagaa

SEQ ID NO: 917711 - RNA, 19 nt, Homo sapiens
  misc_RNA (1)...(19): siRNA sense strand
ccagcagcaucaugaagug

SEQ ID NO: 917712 - RNA, 19 nt, Homo sapiens
  misc_RNA (1)...(19): siRNA sense strand
gcucaugaaggaaguggaa

SEQ ID NO: 917713 - RNA, 19 nt, Homo sapiens
  misc_RNA (1)...(19): siRNA sense strand
gaagcccuguacaaguaug

SEQ ID NO: 917714 - RNA, 19 nt, Homo sapiens
  misc_RNA (1)...(19): siRNA sense strand
gacaaugguucaggacucu

SEQ ID NO: 917715 - RNA, 19 nt, Homo sapiens
  misc_RNA (1)...(19): siRNA sense strand
ggaggaaaggcucaugaag

SEQ ID NO: 917716 - RNA, 19 nt, Homo sapiens
  misc_RNA (1)...(19): siRNA sense strand
acagcuggcuuccaaaggu

SEQ ID NO: 917717 - RNA, 19 nt, Homo sapiens
  misc_RNA (1)...(19): siRNA sense strand
ggagaaacucuggaaacau

SEQ ID NO: 917718 - RNA, 19 nt, Homo sapiens
  misc_RNA (1)...(19): siRNA sense strand
gcaggccugucuggagaga

SEQ ID NO: 917719 - RNA, 19 nt, Homo sapiens
  misc_RNA (1)...(19): siRNA sense strand
uuagcaagacuuaaucaga

SEQ ID NO: 917720 - RNA, 19 nt, Homo sapiens
  misc_RNA (1)...(19): siRNA sense strand
caaggaguaugggacaucu

SEQ ID NO: 917721 - RNA, 19 nt, Homo sapiens
  misc_RNA (1)...(19): siRNA sense strand
cauccaucaugaccucuau

SEQ ID NO: 917722 - RNA, 19 nt, Homo sapiens
  misc_RNA (1)...(19): siRNA sense strand
ucuggaaacaucucuuuga

SEQ ID NO: 917723 - RNA, 19 nt, Homo sapiens
  misc_RNA (1)...(19): siRNA sense strand
aggccugucuggagagauu

SEQ ID NO: 917724 - RNA, 19 nt, Homo sapiens
  misc_RNA (1)...(19): siRNA sense strand
aaagguacucccaucaaga

SEQ ID NO: 917725 - RNA, 19 nt, Homo sapiens
  misc_RNA (1)...(19): siRNA sense strand
gacaugucauccacuuugg

SEQ ID NO: 917726 - RNA, 19 nt, Homo sapiens
  misc_RNA (1)...(19): siRNA sense strand
gcuagcagaaaugauguuu

SEQ ID NO: 917727 - RNA, 19 nt, Homo sapiens
  misc_RNA (1)...(19): siRNA sense strand
ugacauccagaauaaacuu

SEQ ID NO: 917728 - RNA, 19 nt, Homo sapiens
  misc_RNA (1)...(19): siRNA sense strand
gauguuccugcuguaauuu

SEQ ID NO: 917729 - RNA, 19 nt, Homo sapiens
  misc_RNA (1)...(19): siRNA sense strand
ggaaaggcucaugaaggaa

SEQ ID NO: 917730 - RNA, 19 nt, Homo sapiens
  misc_RNA (1)...(19): siRNA sense strand
guucaggacucugcaaagc

SEQ ID NO: 917731 - RNA, 19 nt, Homo sapiens
  misc_RNA (1)...(19): siRNA sense strand
guaccaagugcccgagguu

SEQ ID NO: 917732 - RNA, 19 nt, Homo sapiens
  misc_RNA (1)...(19): siRNA sense strand
aacaaggccgugguaaaua

SEQ ID NO: 917733 - RNA, 19 nt, Homo sapiens
  misc_RNA (1)...(19): siRNA sense strand
cagugugccugguuucuac

SEQ ID NO: 917734 - RNA, 19 nt, Homo sapiens
  misc_RNA (1)...(19): siRNA sense strand
ggucaccucggcagacuuc

SEQ ID NO: 917735 - RNA, 19 nt, Homo sapiens
  misc_RNA (1)...(19): siRNA sense strand
ucacagcuucuccugauag

SEQ ID NO: 917736 - RNA, 19 nt, Homo sapiens
  misc_RNA (1)...(19): siRNA sense strand
caagugcccgagguucuuu

SEQ ID NO: 917737 - RNA, 19 nt, Homo sapiens
  misc_RNA (1)...(19): siRNA sense strand
ggagccagagaaagagcua

SEQ ID NO: 917738 - RNA, 19 nt, Homo sapiens
  misc_RNA (1)...(19): siRNA sense strand
gcacuguccccaucuuuga

SEQ ID NO: 917739 - RNA, 19 nt, Homo sapiens
  misc_RNA (1)...(19): siRNA sense strand
guaugggacaucugugguu

SEQ ID NO: 917740 - RNA, 19 nt, Homo sapiens
  misc_RNA (1)...(19): siRNA sense strand
cacagcuucuccugauaga

SEQ ID NO: 917741 - RNA, 19 nt, Homo sapiens
  misc_RNA (1)...(19): siRNA sense strand
gguacucccaucaagauca

SEQ ID NO: 917742 - RNA, 19 nt, Homo sapiens
  misc_RNA (1)...(19): siRNA sense strand
gacauccagaauaaacuuu

SEQ ID NO: 917743 - RNA, 19 nt, Homo sapiens
  misc_RNA (1)...(19): siRNA sense strand
ccuuggagccagagaaaga

SEQ ID NO: 917744 - RNA, 19 nt, Homo sapiens
  misc_RNA (1)...(19): siRNA sense strand
gagcccucuuugaauccua

SEQ ID NO: 917745 - RNA, 19 nt, Homo sapiens
  misc_RNA (1)...(19): siRNA sense strand
ugucaucagcuccgucuug

SEQ ID NO: 917746 - RNA, 19 nt, Homo sapiens
  misc_RNA (1)...(19): siRNA sense strand
aagagaaguugugcuacau

SEQ ID NO: 917747 - RNA, 19 nt, Homo sapiens
  misc_RNA (1)...(19): siRNA sense strand
cuggaaacaucucuuugag

SEQ ID NO: 917748 - RNA, 19 nt, Homo sapiens
  misc_RNA (1)...(19): siRNA sense strand
gcauccaucaugaccucua

SEQ ID NO: 917749 - RNA, 19 nt, Homo sapiens
  misc_RNA (1)...(19): siRNA sense strand
gauuggugcauccaucaug

SEQ ID NO: 917750 - RNA, 19 nt, Homo sapiens
  misc_RNA (1)...(19): siRNA sense strand
ggagagguccugggagcau

SEQ ID NO: 917751 - RNA, 19 nt, Homo sapiens
  misc_RNA (1)...(19): siRNA sense strand
ucacccggcuccucuuugc

SEQ ID NO: 917752 - RNA, 19 nt, Homo sapiens
  misc_RNA (1)...(19): siRNA sense strand
aaaugauguuugagaccuu

SEQ ID NO: 917753 - RNA, 19 nt, Homo sapiens
  misc_RNA (1)...(19): siRNA sense strand
ucccugggcuggaggaaag

SEQ ID NO: 917754 - RNA, 19 nt, Homo sapiens
  misc_RNA (1)...(19): siRNA sense strand
gcaaagagcuuaauuaucu

SEQ ID NO: 917755 - RNA, 19 nt, Homo sapiens
  misc_RNA (1)...(19): siRNA sense strand
gaaagaaccuuccauuuau

SEQ ID NO: 917756 - RNA, 19 nt, Homo sapiens
  misc_RNA (1)...(19): siRNA sense strand
gcaauucccucuaucauga

SEQ ID NO: 917757 - RNA, 19 nt, Homo sapiens
  misc_RNA (1)...(19): siRNA sense strand
caacaccacuuccuacuuu

SEQ ID NO: 917758 - RNA, 19 nt, Homo sapiens
  misc_RNA (1)...(19): siRNA sense strand
ggacaaagaauguagagua

SEQ ID NO: 917759 - RNA, 19 nt, Homo sapiens
  misc_RNA (1)...(19): siRNA sense strand
ggaagaagcucaggcaguu

SEQ ID NO: 917760 - RNA, 19 nt, Homo sapiens
  misc_RNA (1)...(19): siRNA sense strand
gcaaagagccgugagcaua

SEQ ID NO: 917761 - RNA, 19 nt, Homo sapiens
  misc_RNA (1)...(19): siRNA sense strand
gguaagagcuacaaagaau

SEQ ID NO: 917762 - RNA, 19 nt, Homo sapiens
  misc_RNA (1)...(19): siRNA sense strand
caagaaggcuggaauaucu

SEQ ID NO: 917763 - RNA, 19 nt, Homo sapiens
  misc_RNA (1)...(19): siRNA sense strand
gagcacaacugguuugaga

SEQ ID NO: 917764 - RNA, 19 nt, Homo sapiens
  misc_RNA (1)...(19): siRNA sense strand
gcaugcagcucuuugguaa

SEQ ID NO: 917765 - RNA, 19 nt, Homo sapiens
  misc_RNA (1)...(19): siRNA sense strand
gaacaucuuugacuuugug

SEQ ID NO: 917766 - RNA, 19 nt, Homo sapiens
  misc_RNA (1)...(19): siRNA sense strand
ugaagaaucuagacagaaa

SEQ ID NO: 917767 - RNA, 19 nt, Homo sapiens
  misc_RNA (1)...(19): siRNA sense strand
gcuagaauaugcugacaaa

SEQ ID NO: 917768 - RNA, 19 nt, Homo sapiens
  misc_RNA (1)...(19): siRNA sense strand
gcaaauacaugacccuagu

SEQ ID NO: 917769 - RNA, 19 nt, Homo sapiens
  misc_RNA (1)...(19): siRNA sense strand
gaaaagaggucagagaaaa

SEQ ID NO: 917770 - RNA, 19 nt, Homo sapiens
  misc_RNA (1)...(19): siRNA sense strand
gaaugugucugcaagauca

SEQ ID NO: 917771 - RNA, 19 nt, Homo sapiens
  misc_RNA (1)...(19): siRNA sense strand
ucucuaaacucucugauuu

SEQ ID NO: 917772 - RNA, 19 nt, Homo sapiens
  misc_RNA (1)...(19): siRNA sense strand
gggaauugauuaugugaaa

SEQ ID NO: 917773 - RNA, 19 nt, Homo sapiens
  misc_RNA (1)...(19): siRNA sense strand
gcacgcugcucuuugcuuu

SEQ ID NO: 917774 - RNA, 19 nt, Homo sapiens
  misc_RNA (1)...(19): siRNA sense strand
gaacacagcacauuugaag

SEQ ID NO: 917775 - RNA, 19 nt, Homo sapiens
  misc_RNA (1)...(19): siRNA sense strand
gggaagaucugguggaauc

SEQ ID NO: 917776 - RNA, 19 nt, Homo sapiens
  misc_RNA (1)...(19): siRNA sense strand
ggaagaacuugaagaaucu

SEQ ID NO: 917777 - RNA, 19 nt, Homo sapiens
  misc_RNA (1)...(19): siRNA sense strand
caaaggauguuggaucuga

SEQ ID NO: 917778 - RNA, 19 nt, Homo sapiens
  misc_RNA (1)...(19): siRNA sense strand
gcaauucaguaguguguug

SEQ ID NO: 917779 - RNA, 19 nt, Homo sapiens
  misc_RNA (1)...(19): siRNA sense strand
ggaccuggaucccuacuau

SEQ ID NO: 917780 - RNA, 19 nt, Homo sapiens
  misc_RNA (1)...(19): siRNA sense strand
ggaaaugcuucucaaaugg

SEQ ID NO: 917781 - RNA, 19 nt, Homo sapiens
  misc_RNA (1)...(19): siRNA sense strand
gcauuggccuuugaagaua

SEQ ID NO: 917782 - RNA, 19 nt, Homo sapiens
  misc_RNA (1)...(19): siRNA sense strand
caaaccaugugccuuauug

SEQ ID NO: 917783 - RNA, 19 nt, Homo sapiens
  misc_RNA (1)...(19): siRNA sense strand
gaucuugccaucacuauuu

SEQ ID NO: 917784 - RNA, 19 nt, Homo sapiens
  misc_RNA (1)...(19): siRNA sense strand
ugaacaagcugaaacugaa

SEQ ID NO: 917785 - RNA, 19 nt, Homo sapiens
  misc_RNA (1)...(19): siRNA sense strand
gcaaccagcucaucugaag

SEQ ID NO: 917786 - RNA, 19 nt, Homo sapiens
  misc_RNA (1)...(19): siRNA sense strand
aaaggaagcuggaauugau

SEQ ID NO: 917787 - RNA, 19 nt, Homo sapiens
  misc_RNA (1)...(19): siRNA sense strand
caacuuugccuauguuaaa

SEQ ID NO: 917788 - RNA, 19 nt, Homo sapiens
  misc_RNA (1)...(19): siRNA sense strand
ggaacaagauaaugaugau

SEQ ID NO: 917789 - RNA, 19 nt, Homo sapiens
  misc_RNA (1)...(19): siRNA sense strand
gaugacauguucaacuuug

SEQ ID NO: 917790 - RNA, 19 nt, Homo sapiens
  misc_RNA (1)...(19): siRNA sense strand
ggagagcgacgcaacagua

SEQ ID NO: 917791 - RNA, 19 nt, Homo sapiens
  misc_RNA (1)...(19): siRNA sense strand
ucaaauggguugcuuaugg

SEQ ID NO: 917792 - RNA, 19 nt, Homo sapiens
  misc_RNA (1)...(19): siRNA sense strand
gaacagcgaaagacuauca

SEQ ID NO: 917793 - RNA, 19 nt, Homo sapiens
  misc_RNA (1)...(19): siRNA sense strand
ucaaguaaguacagaagaa

SEQ ID NO: 917794 - RNA, 19 nt, Homo sapiens
  misc_RNA (1)...(19): siRNA sense strand
aggauugacuuaccuauaa

SEQ ID NO: 917795 - RNA, 19 nt, Homo sapiens
  misc_RNA (1)...(19): siRNA sense strand
uuuaaaggcuggauggaua

SEQ ID NO: 917796 - RNA, 19 nt, Homo sapiens
  misc_RNA (1)...(19): siRNA sense strand
gaccaacuguguauuuaug

SEQ ID NO: 917797 - RNA, 19 nt, Homo sapiens
  misc_RNA (1)...(19): siRNA sense strand
gacaacggguaacauguuu

SEQ ID NO: 917798 - RNA, 19 nt, Homo sapiens
  misc_RNA (1)...(19): siRNA sense strand
gaucguugauguuucuuug

SEQ ID NO: 917799 - RNA, 19 nt, Homo sapiens
  misc_RNA (1)...(19): siRNA sense strand
gaaccucuuucuggccuua

SEQ ID NO: 917800 - RNA, 19 nt, Homo sapiens
  misc_RNA (1)...(19): siRNA sense strand
gcaauggugugguuuccuu

SEQ ID NO: 917801 - RNA, 19 nt, Homo sapiens
  misc_RNA (1)...(19): siRNA sense strand
gaagcuuucugaugugaug

SEQ ID NO: 917802 - RNA, 19 nt, Homo sapiens
  misc_RNA (1)...(19): siRNA sense strand
guaugcagcuguugauuca

SEQ ID NO: 917803 - RNA, 19 nt, Homo sapiens
  misc_RNA (1)...(19): siRNA sense strand
ugacuuugcugaugaugaa

SEQ ID NO: 917804 - RNA, 19 nt, Homo sapiens
  misc_RNA (1)...(19): siRNA sense strand
ggagagcuguuggaaaguu

SEQ ID NO: 917805 - RNA, 19 nt, Homo sapiens
  misc_RNA (1)...(19): siRNA sense strand
caaaggugcuaaagaaugg

SEQ ID NO: 917806 - RNA, 19 nt, Homo sapiens
  misc_RNA (1)...(19): siRNA sense strand
gauccacugucuugauauu

SEQ ID NO: 917807 - RNA, 19 nt, Homo sapiens
  misc_RNA (1)...(19): siRNA sense strand
gaagaaagcaaagagaaau

SEQ ID NO: 917808 - RNA, 19 nt, Homo sapiens
  misc_RNA (1)...(19): siRNA sense strand
agagacagcuuucccaaau

SEQ ID NO: 917809 - RNA, 19 nt, Homo sapiens
  misc_RNA (1)...(19): siRNA sense strand
caaauggguugcuuaugga

SEQ ID NO: 917810 - RNA, 19 nt, Homo sapiens
  misc_RNA (1)...(19): siRNA sense strand
gaaaaugacuuugcugaug

SEQ ID NO: 917811 - RNA, 19 nt, Homo sapiens
  misc_RNA (1)...(19): siRNA sense strand
caacaaaguccagcuuauu

SEQ ID NO: 917812 - RNA, 19 nt, Homo sapiens
  misc_RNA (1)...(19): siRNA sense strand
caagcaagcucgguggaaa

SEQ ID NO: 917813 - RNA, 19 nt, Homo sapiens
  misc_RNA (1)...(19): siRNA sense strand
guugauguuucuuugguua

SEQ ID NO: 917814 - RNA, 19 nt, Homo sapiens
  misc_RNA (1)...(19): siRNA sense strand
gcacaugaacgacuucuuc

SEQ ID NO: 917815 - RNA, 19 nt, Homo sapiens
  misc_RNA (1)...(19): siRNA sense strand
guaggaaaccuggucuuua

SEQ ID NO: 917816 - RNA, 19 nt, Homo sapiens
  misc_RNA (1)...(19): siRNA sense strand
uaggagagcuguuggaaag

SEQ ID NO: 917817 - RNA, 19 nt, Homo sapiens
  misc_RNA (1)...(19): siRNA sense strand
ggauugacuuaccuauaaa

SEQ ID NO: 917818 - RNA, 19 nt, Homo sapiens
  misc_RNA (1)...(19): siRNA sense strand
caaccacuuugaaacguaa

SEQ ID NO: 917819 - RNA, 19 nt, Homo sapiens
  misc_RNA (1)...(19): siRNA sense strand
gauggaugcccuucgaaua

SEQ ID NO: 917820 - RNA, 19 nt, Homo sapiens
  misc_RNA (1)...(19): siRNA sense strand
caucauauccuuccugguu

SEQ ID NO: 917821 - RNA, 19 nt, Homo sapiens
  misc_RNA (1)...(19): siRNA sense strand
gaagcucguuucccucaga

SEQ ID NO: 917822 - RNA, 19 nt, Homo sapiens
  misc_RNA (1)...(19): siRNA sense strand
ucuguucacuggagaauuu

SEQ ID NO: 917823 - RNA, 19 nt, Homo sapiens
  misc_RNA (1)...(19): siRNA sense strand
ggauggauauuauguaugc

SEQ ID NO: 917824 - RNA, 19 nt, Homo sapiens
  misc_RNA (1)...(19): siRNA sense strand
uggaaaugcuucucaaaug

SEQ ID NO: 917825 - RNA, 19 nt, Homo sapiens
  misc_RNA (1)...(19): siRNA sense strand
gaaggaagcacaguugaug

SEQ ID NO: 917826 - RNA, 19 nt, Homo sapiens
  misc_RNA (1)...(19): siRNA sense strand
gcaaagagaaauuaaaugc

SEQ ID NO: 917827 - RNA, 19 nt, Homo sapiens
  misc_RNA (1)...(19): siRNA sense strand
ggccaaaccaugugccuua

SEQ ID NO: 917828 - RNA, 19 nt, Homo sapiens
  misc_RNA (1)...(19): siRNA sense strand
uggaagaacuugaagaauc

SEQ ID NO: 917829 - RNA, 19 nt, Homo sapiens
  misc_RNA (1)...(19): siRNA sense strand
caggagagacucacuguuu

SEQ ID NO: 917830 - RNA, 19 nt, Homo sapiens
  misc_RNA (1)...(19): siRNA sense strand
gggaaaaucuuuaccaguu

SEQ ID NO: 917831 - RNA, 19 nt, Homo sapiens
  misc_RNA (1)...(19): siRNA sense strand
gaggaugacuuugagaugu

SEQ ID NO: 917832 - RNA, 19 nt, Homo sapiens
  misc_RNA (1)...(19): siRNA sense strand
gaacaaaccaaagccaaau

SEQ ID NO: 917833 - RNA, 19 nt, Homo sapiens
  misc_RNA (1)...(19): siRNA sense strand
caucaugggugugaauuug

SEQ ID NO: 917834 - RNA, 19 nt, Homo sapiens
  misc_RNA (1)...(19): siRNA sense strand
cgacgcaacaguaacguua

SEQ ID NO: 917835 - RNA, 19 nt, Homo sapiens
  misc_RNA (1)...(19): siRNA sense strand
aaacugaacccgaagaaga

SEQ ID NO: 917836 - RNA, 19 nt, Homo sapiens
  misc_RNA (1)...(19): siRNA sense strand
ccauggaacuggcuggauu

SEQ ID NO: 917837 - RNA, 19 nt, Homo sapiens
  misc_RNA (1)...(19): siRNA sense strand
cggauccacugucuugaua

SEQ ID NO: 917838 - RNA, 19 nt, Homo sapiens
  misc_RNA (1)...(19): siRNA sense strand
gaacuucaguguugcuacu

SEQ ID NO: 917839 - RNA, 19 nt, Homo sapiens
  misc_RNA (1)...(19): siRNA sense strand
gaucccuacuauaucaaua

SEQ ID NO: 917840 - RNA, 19 nt, Homo sapiens
  misc_RNA (1)...(19): siRNA sense strand
uggaauaucuuugauggaa

SEQ ID NO: 917841 - RNA, 19 nt, Homo sapiens
  misc_RNA (1)...(19): siRNA sense strand
ccauggauccuuauuacua

SEQ ID NO: 917842 - RNA, 19 nt, Homo sapiens
  misc_RNA (1)...(19): siRNA sense strand
gaaaugguucucaagauca

SEQ ID NO: 917843 - RNA, 19 nt, Homo sapiens
  misc_RNA (1)...(19): siRNA sense strand
cuuaucaugugcacuauuu

SEQ ID NO: 917844 - RNA, 19 nt, Homo sapiens
  misc_RNA (1)...(19): siRNA sense strand
gagaaagacaaaccagaaa

SEQ ID NO: 917845 - RNA, 19 nt, Homo sapiens
  misc_RNA (1)...(19): siRNA sense strand
gaggauugacuuaccuaua

SEQ ID NO: 917846 - RNA, 19 nt, Homo sapiens
  misc_RNA (1)...(19): siRNA sense strand
ccuccaaagucucuuauga

SEQ ID NO: 917847 - RNA, 19 nt, Homo sapiens
  misc_RNA (1)...(19): siRNA sense strand
ccaacaaaguccagcuuau

SEQ ID NO: 917848 - RNA, 19 nt, Homo sapiens
  misc_RNA (1)...(19): siRNA sense strand
cuggagaacuucaguguug

SEQ ID NO: 917849 - RNA, 19 nt, Homo sapiens
  misc_RNA (1)...(19): siRNA sense strand
gcuagcaccuauucuuaau

SEQ ID NO: 917850 - RNA, 19 nt, Homo sapiens
  misc_RNA (1)...(19): siRNA sense strand
caucauagauaacuucaac

SEQ ID NO: 917851 - RNA, 19 nt, Homo sapiens
  misc_RNA (1)...(19): siRNA sense strand
acauuuaacuggaaggauu

SEQ ID NO: 917852 - RNA, 19 nt, Homo sapiens
  misc_RNA (1)...(19): siRNA sense strand
gaguacacauucacuggaa

SEQ ID NO: 917853 - RNA, 19 nt, Homo sapiens
  misc_RNA (1)...(19): siRNA sense strand
gacaaagaauguagaguac

SEQ ID NO: 917854 - RNA, 19 nt, Homo sapiens
  misc_RNA (1)...(19): siRNA sense strand
gaacaaaucuaugaacucu

SEQ ID NO: 917855 - RNA, 19 nt, Homo sapiens
  misc_RNA (1)...(19): siRNA sense strand
uuacacaacugaagaacaa

SEQ ID NO: 917856 - RNA, 19 nt, Homo sapiens
  misc_RNA (1)...(19): siRNA sense strand
gaagaaaagcuguacguua

SEQ ID NO: 917857 - RNA, 19 nt, Homo sapiens
  misc_RNA (1)...(19): siRNA sense strand
acaaaucuaugaacucuuc

SEQ ID NO: 917858 - RNA, 19 nt, Homo sapiens
  misc_RNA (1)...(19): siRNA sense strand
cagcaaaaguggugacaua

SEQ ID NO: 917859 - RNA, 19 nt, Homo sapiens
  misc_RNA (1)...(19): siRNA sense strand
gaaaacagcauguggauuc

SEQ ID NO: 917860 - RNA, 19 nt, Homo sapiens
  misc_RNA (1)...(19): siRNA sense strand
gaaaagcuguacguuauau

SEQ ID NO: 917861 - RNA, 19 nt, Homo sapiens
  misc_RNA (1)...(19): siRNA sense strand
caacugaagaacaaaucua

SEQ ID NO: 917862 - RNA, 19 nt, Homo sapiens
  misc_RNA (1)...(19): siRNA sense strand
gccaugcgguacauaaaug

SEQ ID NO: 917863 - RNA, 19 nt, Homo sapiens
  misc_RNA (1)...(19): siRNA sense strand
aagaaaagcuguacguuau

SEQ ID NO: 917864 - RNA, 19 nt, Homo sapiens
  misc_RNA (1)...(19): siRNA sense strand
gaagaacaaaucuaugaac

SEQ ID NO: 917865 - RNA, 19 nt, Homo sapiens
  misc_RNA (1)...(19): siRNA sense strand
ugacaaugaagaacaagaa

SEQ ID NO: 917866 - RNA, 19 nt, Homo sapiens
  misc_RNA (1)...(19): siRNA sense strand
ggagaggaggcuauggaaa

SEQ ID NO: 917867 - RNA, 19 nt, Homo sapiens
  misc_RNA (1)...(19): siRNA sense strand
cugaagaacaaaucuauga

SEQ ID NO: 917868 - RNA, 19 nt, Homo sapiens
  misc_RNA (1)...(19): siRNA sense strand
gcauguggauucuguuuug

SEQ ID NO: 917869 - RNA, 19 nt, Homo sapiens
  misc_RNA (1)...(19): siRNA sense strand
caaaaguggugacauaaag

SEQ ID NO: 917870 - RNA, 19 nt, Homo sapiens
  misc_RNA (1)...(19): siRNA sense strand
gacaaugaagaacaagaaa

SEQ ID NO: 917871 - RNA, 19 nt, Homo sapiens
  misc_RNA (1)...(19): siRNA sense strand
gagaggaggcuauggaaaa

SEQ ID NO: 917872 - RNA, 19 nt, Homo sapiens
  misc_RNA (1)...(19): siRNA sense strand
gggugacaaugaagaacaa

SEQ ID NO: 917873 - RNA, 19 nt, Homo sapiens
  misc_RNA (1)...(19): siRNA sense strand
gcaaaaguggugacauaaa

SEQ ID NO: 917874 - RNA, 19 nt, Homo sapiens
  misc_RNA (1)...(19): siRNA sense strand
agacugggacgcaggcuuu

SEQ ID NO: 917875 - RNA, 19 nt, Homo sapiens
  misc_RNA (1)...(19): siRNA sense strand
cagcauguggauucuguuu

SEQ ID NO: 917876 - RNA, 19 nt, Homo sapiens
  misc_RNA (1)...(19): siRNA sense strand
uuaaggagggcaggcaaua

SEQ ID NO: 917877 - RNA, 19 nt, Homo sapiens
  misc_RNA (1)...(19): siRNA sense strand
aaaguggugacauaaagaa

SEQ ID NO: 917878 - RNA, 19 nt, Homo sapiens
  misc_RNA (1)...(19): siRNA sense strand
gggagaggaggcuauggaa

SEQ ID NO: 917879 - RNA, 19 nt, Homo sapiens
  misc_RNA (1)...(19): siRNA sense strand
acguggagcugagccagua

SEQ ID NO: 917880 - RNA, 19 nt, Homo sapiens
  misc_RNA (1)...(19): siRNA sense strand
cguuauauguuggaaaucu

SEQ ID NO: 917881 - RNA, 19 nt, Homo sapiens
  misc_RNA (1)...(19): siRNA sense strand
aaagcuguacguuauaugu

SEQ ID NO: 917882 - RNA, 19 nt, Homo sapiens
  misc_RNA (1)...(19): siRNA sense strand
guacguuauauguuggaaa

SEQ ID NO: 917883 - RNA, 19 nt, Homo sapiens
  misc_RNA (1)...(19): siRNA sense strand
gcgucuggaugaccgaauc

SEQ ID NO: 917884 - RNA, 19 nt, Homo sapiens
  misc_RNA (1)...(19): siRNA sense strand
agcuguacguuauauguug

SEQ ID NO: 917885 - RNA, 19 nt, Homo sapiens
  misc_RNA (1)...(19): siRNA sense strand
gccagguucgggaugagua

SEQ ID NO: 917886 - RNA, 19 nt, Homo sapiens
  misc_RNA (1)...(19): siRNA sense strand
gagagaagcugaagcauuu

SEQ ID NO: 917887 - RNA, 19 nt, Homo sapiens
  misc_RNA (1)...(19): siRNA sense strand
ccacauugaucaugaaaua

SEQ ID NO: 917888 - RNA, 19 nt, Homo sapiens
  misc_RNA (1)...(19): siRNA sense strand
ggaaguauauucauaagug

SEQ ID NO: 917889 - RNA, 19 nt, Homo sapiens
  misc_RNA (1)...(19): siRNA sense strand
uagaagagcuguuugcuuu

SEQ ID NO: 917890 - RNA, 19 nt, Homo sapiens
  misc_RNA (1)...(19): siRNA sense strand
gaagagagauggcccuuuc

SEQ ID NO: 917891 - RNA, 19 nt, Homo sapiens
  misc_RNA (1)...(19): siRNA sense strand
gcaaggagguacgcuguua

SEQ ID NO: 917892 - RNA, 19 nt, Homo sapiens
  misc_RNA (1)...(19): siRNA sense strand
gaaaggcaguucuggauug

SEQ ID NO: 917893 - RNA, 19 nt, Homo sapiens
  misc_RNA (1)...(19): siRNA sense strand
gaauuucgcuggagagaug

SEQ ID NO: 917894 - RNA, 19 nt, Homo sapiens
  misc_RNA (1)...(19): siRNA sense strand
gaacgccgcucaacuaucu

SEQ ID NO: 917895 - RNA, 19 nt, Homo sapiens
  misc_RNA (1)...(19): siRNA sense strand
gagguacgcuguuaaguau

SEQ ID NO: 917896 - RNA, 19 nt, Homo sapiens
  misc_RNA (1)...(19): siRNA sense strand
aaacauggcuaaauggaaa

SEQ ID NO: 917897 - RNA, 19 nt, Homo sapiens
  misc_RNA (1)...(19): siRNA sense strand
gagaaagaacugugaauaa

SEQ ID NO: 917898 - RNA, 19 nt, Homo sapiens
  misc_RNA (1)...(19): siRNA sense strand
gguacgcuguuaaguauua

SEQ ID NO: 917899 - RNA, 19 nt, Homo sapiens
  misc_RNA (1)...(19): siRNA sense strand
gugaauaucuacacaaaga

SEQ ID NO: 917900 - RNA, 19 nt, Homo sapiens
  misc_RNA (1)...(19): siRNA sense strand
gcuacaaacuucagaaaga

SEQ ID NO: 917901 - RNA, 19 nt, Homo sapiens
  misc_RNA (1)...(19): siRNA sense strand
gagcaagcuuucauuacua

SEQ ID NO: 917902 - RNA, 19 nt, Homo sapiens
  misc_RNA (1)...(19): siRNA sense strand
ucacggaaguauauucaua

SEQ ID NO: 917903 - RNA, 19 nt, Homo sapiens
  misc_RNA (1)...(19): siRNA sense strand
ugagaagagugaccaauaa

SEQ ID NO: 917904 - RNA, 19 nt, Homo sapiens
  misc_RNA (1)...(19): siRNA sense strand
gaagaaagagccaaugaug

SEQ ID NO: 917905 - RNA, 19 nt, Homo sapiens
  misc_RNA (1)...(19): siRNA sense strand
ccagagauguggcuuuauu

SEQ ID NO: 917906 - RNA, 19 nt, Homo sapiens
  misc_RNA (1)...(19): siRNA sense strand
ggagguacgcuguuaagua

SEQ ID NO: 917907 - RNA, 19 nt, Homo sapiens
  misc_RNA (1)...(19): siRNA sense strand
ggaccucaauucacacauu

SEQ ID NO: 917908 - RNA, 19 nt, Homo sapiens
  misc_RNA (1)...(19): siRNA sense strand
gagguggaguuucuuguaa

SEQ ID NO: 917909 - RNA, 19 nt, Homo sapiens
  misc_RNA (1)...(19): siRNA sense strand
gacaagccguuaugaaaga

SEQ ID NO: 917910 - RNA, 19 nt, Homo sapiens
  misc_RNA (1)...(19): siRNA sense strand
gaacuccuguugucucuuc

SEQ ID NO: 917911 - RNA, 19 nt, Homo sapiens
  misc_RNA (1)...(19): siRNA sense strand
gagcagccauuaagcuuau

SEQ ID NO: 917912 - RNA, 19 nt, Homo sapiens
  misc_RNA (1)...(19): siRNA sense strand
uaaaagcgcuauccaagua

SEQ ID NO: 917913 - RNA, 19 nt, Homo sapiens
  misc_RNA (1)...(19): siRNA sense strand
ggagacauguggauucugu

SEQ ID NO: 917914 - RNA, 19 nt, Homo sapiens
  misc_RNA (1)...(19): siRNA sense strand
gaagaucacuguggaacau

SEQ ID NO: 917915 - RNA, 19 nt, Homo sapiens
  misc_RNA (1)...(19): siRNA sense strand
gcagguaaaucgguucuga

SEQ ID NO: 917916 - RNA, 19 nt, Homo sapiens
  misc_RNA (1)...(19): siRNA sense strand
gcauaacgguggcuucuuc

SEQ ID NO: 917917 - RNA, 19 nt, Homo sapiens
  misc_RNA (1)...(19): siRNA sense strand
cagaaugguugaacuuuga

SEQ ID NO: 917918 - RNA, 19 nt, Homo sapiens
  misc_RNA (1)...(19): siRNA sense strand
ggagcaagcuuucauuacu

SEQ ID NO: 917919 - RNA, 19 nt, Homo sapiens
  misc_RNA (1)...(19): siRNA sense strand
aaagaugcguggaaauauu

SEQ ID NO: 917920 - RNA, 19 nt, Homo sapiens
  misc_RNA (1)...(19): siRNA sense strand
gaacaccagugauauacca

SEQ ID NO: 917921 - RNA, 19 nt, Homo sapiens
  misc_RNA (1)...(19): siRNA sense strand
ucagaaacauggauugguu

SEQ ID NO: 917922 - RNA, 19 nt, Homo sapiens
  misc_RNA (1)...(19): siRNA sense strand
gcagaaguagguugugaua

SEQ ID NO: 917923 - RNA, 19 nt, Homo sapiens
  misc_RNA (1)...(19): siRNA sense strand
gcuauggguuuguuuguga

SEQ ID NO: 917924 - RNA, 19 nt, Homo sapiens
  misc_RNA (1)...(19): siRNA sense strand
uaugaaacauggcuaaaug

SEQ ID NO: 917925 - RNA, 19 nt, Homo sapiens
  misc_RNA (1)...(19): siRNA sense strand
guagcuggcugcacaguga

SEQ ID NO: 917926 - RNA, 19 nt, Homo sapiens
  misc_RNA (1)...(19): siRNA sense strand
uaaaccacauugaucauga

SEQ ID NO: 917927 - RNA, 19 nt, Homo sapiens
  misc_RNA (1)...(19): siRNA sense strand
uaacuggucuccauuugau

SEQ ID NO: 917928 - RNA, 19 nt, Homo sapiens
  misc_RNA (1)...(19): siRNA sense strand
aaaggaagguucuaaucuu

SEQ ID NO: 917929 - RNA, 19 nt, Homo sapiens
  misc_RNA (1)...(19): siRNA sense strand
ggagagaagcugaagcauu

SEQ ID NO: 917930 - RNA, 19 nt, Homo sapiens
  misc_RNA (1)...(19): siRNA sense strand
ggaagguucuaaucuuuua

SEQ ID NO: 917931 - RNA, 19 nt, Homo sapiens
  misc_RNA (1)...(19): siRNA sense strand
gaagaguguucaguuucua

SEQ ID NO: 917932 - RNA, 19 nt, Homo sapiens
  misc_RNA (1)...(19): siRNA sense strand
guggagacauuugugaaua

SEQ ID NO: 917933 - RNA, 19 nt, Homo sapiens
  misc_RNA (1)...(19): siRNA sense strand
gaaagaacugugaauaauc

SEQ ID NO: 917934 - RNA, 19 nt, Homo sapiens
  misc_RNA (1)...(19): siRNA sense strand
aaacauugcugcccuuaca

SEQ ID NO: 917935 - RNA, 19 nt, Homo sapiens
  misc_RNA (1)...(19): siRNA sense strand
gaccucaauucacacauuu

SEQ ID NO: 917936 - RNA, 19 nt, Homo sapiens
  misc_RNA (1)...(19): siRNA sense strand
gaguccaccuugccauaua

SEQ ID NO: 917937 - RNA, 19 nt, Homo sapiens
  misc_RNA (1)...(19): siRNA sense strand
gcaaauaugacuugguaug

SEQ ID NO: 917938 - RNA, 19 nt, Homo sapiens
  misc_RNA (1)...(19): siRNA sense strand
gaaacacauuccucucugu

SEQ ID NO: 917939 - RNA, 19 nt, Homo sapiens
  misc_RNA (1)...(19): siRNA sense strand
gagggacacuggaaaguca

SEQ ID NO: 917940 - RNA, 19 nt, Homo sapiens
  misc_RNA (1)...(19): siRNA sense strand
ggagaaggaccucaauuca

SEQ ID NO: 917941 - RNA, 19 nt, Homo sapiens
  misc_RNA (1)...(19): siRNA sense strand
gaaggauuauggcagcuau

SEQ ID NO: 917942 - RNA, 19 nt, Homo sapiens
  misc_RNA (1)...(19): siRNA sense strand
gaaaaccugugguauauuc

SEQ ID NO: 917943 - RNA, 19 nt, Homo sapiens
  misc_RNA (1)...(19): siRNA sense strand
gaucuucucacaauucauu

SEQ ID NO: 917944 - RNA, 19 nt, Homo sapiens
  misc_RNA (1)...(19): siRNA sense strand
agaaggaccucaauucaca

SEQ ID NO: 917945 - RNA, 19 nt, Homo sapiens
  misc_RNA (1)...(19): siRNA sense strand
agaaagagccaaugaugaa

SEQ ID NO: 917946 - RNA, 19 nt, Homo sapiens
  misc_RNA (1)...(19): siRNA sense strand
gcaaccaacuuuaguacag

SEQ ID NO: 917947 - RNA, 19 nt, Homo sapiens
  misc_RNA (1)...(19): siRNA sense strand
ccaaaucuucuuucacuuu

SEQ ID NO: 917948 - RNA, 19 nt, Homo sapiens
  misc_RNA (1)...(19): siRNA sense strand
gaagcacugucggcacuuu

SEQ ID NO: 917949 - RNA, 19 nt, Homo sapiens
  misc_RNA (1)...(19): siRNA sense strand
ggacacaggaagagaaaga

SEQ ID NO: 917950 - RNA, 19 nt, Homo sapiens
  misc_RNA (1)...(19): siRNA sense strand
gaacugggacacaggaaga

SEQ ID NO: 917951 - RNA, 19 nt, Homo sapiens
  misc_RNA (1)...(19): siRNA sense strand
cuacaaacuucagaaagaa

SEQ ID NO: 917952 - RNA, 19 nt, Homo sapiens
  misc_RNA (1)...(19): siRNA sense strand
gaagcaagcaagcaaacaa

SEQ ID NO: 917953 - RNA, 19 nt, Homo sapiens
  misc_RNA (1)...(19): siRNA sense strand
ggaaggcuauggguuuguu

SEQ ID NO: 917954 - RNA, 19 nt, Homo sapiens
  misc_RNA (1)...(19): siRNA sense strand
ggaguggucugauagaacu

SEQ ID NO: 917955 - RNA, 19 nt, Homo sapiens
  misc_RNA (1)...(19): siRNA sense strand
aaggaagguucuaaucuuu

SEQ ID NO: 917956 - RNA, 19 nt, Homo sapiens
  misc_RNA (1)...(19): siRNA sense strand
aaacaucuauucccuggau

SEQ ID NO: 917957 - RNA, 19 nt, Homo sapiens
  misc_RNA (1)...(19): siRNA sense strand
uggaaucccuacaaucgua

SEQ ID NO: 917958 - RNA, 19 nt, Homo sapiens
  misc_RNA (1)...(19): siRNA sense strand
gaaacauggcuaaauggaa

SEQ ID NO: 917959 - RNA, 19 nt, Homo sapiens
  misc_RNA (1)...(19): siRNA sense strand
ggaagagaaagaacuguga

SEQ ID NO: 917960 - RNA, 19 nt, Homo sapiens
  misc_RNA (1)...(19): siRNA sense strand
gauaacagugcauuaauag

SEQ ID NO: 917961 - RNA, 19 nt, Homo sapiens
  misc_RNA (1)...(19): siRNA sense strand
uagcagagguggaguuucu

SEQ ID NO: 917962 - RNA, 19 nt, Homo sapiens
  misc_RNA (1)...(19): siRNA sense strand
gacuugguaugcagcaaua

SEQ ID NO: 917963 - RNA, 19 nt, Homo sapiens
  misc_RNA (1)...(19): siRNA sense strand
aaaggaaggcuauggguuu

SEQ ID NO: 917964 - RNA, 19 nt, Homo sapiens
  misc_RNA (1)...(19): siRNA sense strand
ugaagacuguggaaaggaa

SEQ ID NO: 917965 - RNA, 19 nt, Homo sapiens
  misc_RNA (1)...(19): siRNA sense strand
ccaaaggauggcuauauuu

SEQ ID NO: 917966 - RNA, 19 nt, Homo sapiens
  misc_RNA (1)...(19): siRNA sense strand
cccaaaggauggcuauauu

SEQ ID NO: 917967 - RNA, 19 nt, Homo sapiens
  misc_RNA (1)...(19): siRNA sense strand
gaauuuggagcucaucuug

SEQ ID NO: 917968 - RNA, 19 nt, Homo sapiens
  misc_RNA (1)...(19): siRNA sense strand
gcaauaaaauuccaguuuc

SEQ ID NO: 917969 - RNA, 19 nt, Homo sapiens
  misc_RNA (1)...(19): siRNA sense strand
ucagaaugguugaacuuug

SEQ ID NO: 917970 - RNA, 19 nt, Homo sapiens
  misc_RNA (1)...(19): siRNA sense strand
caccaaaucuucuuucacu

SEQ ID NO: 917971 - RNA, 19 nt, Homo sapiens
  misc_RNA (1)...(19): siRNA sense strand
augcaaauaugacuuggua

SEQ ID NO: 917972 - RNA, 19 nt, Homo sapiens
  misc_RNA (1)...(19): siRNA sense strand
gaagagaaagaacugugaa

SEQ ID NO: 917973 - RNA, 19 nt, Homo sapiens
  misc_RNA (1)...(19): siRNA sense strand
gcaggauaaaggaauauuu

SEQ ID NO: 917974 - RNA, 19 nt, Homo sapiens
  misc_RNA (1)...(19): siRNA sense strand
caggagacuugcaggguuu

SEQ ID NO: 917975 - RNA, 19 nt, Homo sapiens
  misc_RNA (1)...(19): siRNA sense strand
acacuuuccuucugcauau

SEQ ID NO: 917976 - RNA, 19 nt, Homo sapiens
  misc_RNA (1)...(19): siRNA sense strand
ccagaguugugcucagaaa

SEQ ID NO: 917977 - RNA, 19 nt, Homo sapiens
  misc_RNA (1)...(19): siRNA sense strand
aagagccaaugaugaauuu

SEQ ID NO: 917978 - RNA, 19 nt, Homo sapiens
  misc_RNA (1)...(19): siRNA sense strand
agacauaaccucauuagca

SEQ ID NO: 917979 - RNA, 19 nt, Homo sapiens
  misc_RNA (1)...(19): siRNA sense strand
gcugauaacagugcauuaa

SEQ ID NO: 917980 - RNA, 19 nt, Homo sapiens
  misc_RNA (1)...(19): siRNA sense strand
ggagugaggcacauucuuc

SEQ ID NO: 917981 - RNA, 19 nt, Homo sapiens
  misc_RNA (1)...(19): siRNA sense strand
caacauuucugugcugaag

SEQ ID NO: 917982 - RNA, 19 nt, Homo sapiens
  misc_RNA (1)...(19): siRNA sense strand
gauguggcuuuauuucuuc

SEQ ID NO: 917983 - RNA, 19 nt, Homo sapiens
  misc_RNA (1)...(19): siRNA sense strand
cguaauugcuacaaacuuc

SEQ ID NO: 917984 - RNA, 19 nt, Homo sapiens
  misc_RNA (1)...(19): siRNA sense strand
gaauuggagcccagaggua

SEQ ID NO: 917985 - RNA, 19 nt, Homo sapiens
  misc_RNA (1)...(19): siRNA sense strand
gggagcacaugagcaguaa

SEQ ID NO: 917986 - RNA, 19 nt, Homo sapiens
  misc_RNA (1)...(19): siRNA sense strand
gcaaagagcacccugaaga

SEQ ID NO: 917987 - RNA, 19 nt, Homo sapiens
  misc_RNA (1)...(19): siRNA sense strand
gagcaacagugacaucuug

SEQ ID NO: 917988 - RNA, 19 nt, Homo sapiens
  misc_RNA (1)...(19): siRNA sense strand
ggaaagggccagggauuua

SEQ ID NO: 917989 - RNA, 19 nt, Homo sapiens
  misc_RNA (1)...(19): siRNA sense strand
ugaacaugcuuuagaagua

SEQ ID NO: 917990 - RNA, 19 nt, Homo sapiens
  misc_RNA (1)...(19): siRNA sense strand
ggccagggauuuaucauga

SEQ ID NO: 917991 - RNA, 19 nt, Homo sapiens
  misc_RNA (1)...(19): siRNA sense strand
ggacaaaggugagaaugag

SEQ ID NO: 917992 - RNA, 19 nt, Homo sapiens
  misc_RNA (1)...(19): siRNA sense strand
gaacaugcuuuagaaguag

SEQ ID NO: 917993 - RNA, 19 nt, Homo sapiens
  misc_RNA (1)...(19): siRNA sense strand
caagucagcucuucucuac

SEQ ID NO: 917994 - RNA, 19 nt, Homo sapiens
  misc_RNA (1)...(19): siRNA sense strand
guaugagguuucuaucuaa

SEQ ID NO: 917995 - RNA, 19 nt, Homo sapiens
  misc_RNA (1)...(19): siRNA sense strand
cacaagaugucgcuacuau

SEQ ID NO: 917996 - RNA, 19 nt, Homo sapiens
  misc_RNA (1)...(19): siRNA sense strand
gacccgaccuauaacauug

SEQ ID NO: 917997 - RNA, 19 nt, Homo sapiens
  misc_RNA (1)...(19): siRNA sense strand
gauaccaaauccuguacaa

SEQ ID NO: 917998 - RNA, 19 nt, Homo sapiens
  misc_RNA (1)...(19): siRNA sense strand
caagaugucgcuacuauuc

SEQ ID NO: 917999 - RNA, 19 nt, Homo sapiens
  misc_RNA (1)...(19): siRNA sense strand
aguaugagguuucuaucua

SEQ ID NO: 918000 - RNA, 19 nt, Homo sapiens
  misc_RNA (1)...(19): siRNA sense strand
gagaggcaguccuggcaaa

SEQ ID NO: 918001 - RNA, 19 nt, Homo sapiens
  misc_RNA (1)...(19): siRNA sense strand
cauccgacccgaccuauaa

SEQ ID NO: 918002 - RNA, 19 nt, Homo sapiens
  misc_RNA (1)...(19): siRNA sense strand
ggaggagccuacauuuaca

SEQ ID NO: 918003 - RNA, 19 nt, Homo sapiens
  misc_RNA (1)...(19): siRNA sense strand
gaacauggcccuggcuauc

SEQ ID NO: 918004 - RNA, 19 nt, Homo sapiens
  misc_RNA (1)...(19): siRNA sense strand
gaaacugccuucgcucaag

SEQ ID NO: 918005 - RNA, 19 nt, Homo sapiens
  misc_RNA (1)...(19): siRNA sense strand
gagaguaugagguuucuau

SEQ ID NO: 918006 - RNA, 19 nt, Homo sapiens
  misc_RNA (1)...(19): siRNA sense strand
ccagcucucugcaguguga

SEQ ID NO: 918007 - RNA, 19 nt, Homo sapiens
  misc_RNA (1)...(19): siRNA sense strand
gagagucccucaccuucau

SEQ ID NO: 918008 - RNA, 19 nt, Homo sapiens
  misc_RNA (1)...(19): siRNA sense strand
gcacauacaacgugacagu

SEQ ID NO: 918009 - RNA, 19 nt, Homo sapiens
  misc_RNA (1)...(19): siRNA sense strand
accacuaccuccaccauua

SEQ ID NO: 918010 - RNA, 19 nt, Homo sapiens
  misc_RNA (1)...(19): siRNA sense strand
gggaggagccuacauuuac

SEQ ID NO: 918011 - RNA, 19 nt, Homo sapiens
  misc_RNA (1)...(19): siRNA sense strand
gaaagggccagggauuuau

SEQ ID NO: 918012 - RNA, 19 nt, Homo sapiens
  misc_RNA (1)...(19): siRNA sense strand
gagaaaggccacugcuaug

SEQ ID NO: 918013 - RNA, 19 nt, Homo sapiens
  misc_RNA (1)...(19): siRNA sense strand
acauagagguaucaaggaa

SEQ ID NO: 918014 - RNA, 19 nt, Homo sapiens
  misc_RNA (1)...(19): siRNA sense strand
cauccgauuugaagcguuu

SEQ ID NO: 918015 - RNA, 19 nt, Homo sapiens
  misc_RNA (1)...(19): siRNA sense strand
cauacaacgugacagucua

SEQ ID NO: 918016 - RNA, 19 nt, Homo sapiens
  misc_RNA (1)...(19): siRNA sense strand
ugagaaaggccacugcuau

SEQ ID NO: 918017 - RNA, 19 nt, Homo sapiens
  misc_RNA (1)...(19): siRNA sense strand
cguggaaggugaagauugu

SEQ ID NO: 918018 - RNA, 19 nt, Homo sapiens
  misc_RNA (1)...(19): siRNA sense strand
gggagaugcuagcccuuug

SEQ ID NO: 918019 - RNA, 19 nt, Homo sapiens
  misc_RNA (1)...(19): siRNA sense strand
gaagauccacgugggagaa

SEQ ID NO: 918020 - RNA, 19 nt, Homo sapiens
  misc_RNA (1)...(19): siRNA sense strand
ccuauaacauugggacuau

SEQ ID NO: 918021 - RNA, 19 nt, Homo sapiens
  misc_RNA (1)...(19): siRNA sense strand
ucacucgacccgcuuaauu

SEQ ID NO: 918022 - RNA, 19 nt, Homo sapiens
  misc_RNA (1)...(19): siRNA sense strand
cagaaucaccuaccagugu

SEQ ID NO: 918023 - RNA, 19 nt, Homo sapiens
  misc_RNA (1)...(19): siRNA sense strand
ucacuucgcagcccuaugu

SEQ ID NO: 918024 - RNA, 19 nt, Homo sapiens
  misc_RNA (1)...(19): siRNA sense strand
ccacgugggagaagagaaa

SEQ ID NO: 918025 - RNA, 19 nt, Homo sapiens
  misc_RNA (1)...(19): siRNA sense strand
aaugggaacuucacuacau

SEQ ID NO: 918026 - RNA, 19 nt, Homo sapiens
  misc_RNA (1)...(19): siRNA sense strand
gauuugaagcguuugagaa

SEQ ID NO: 918027 - RNA, 19 nt, Homo sapiens
  misc_RNA (1)...(19): siRNA sense strand
agugugagcuucuccaauc

SEQ ID NO: 918028 - RNA, 19 nt, Homo sapiens
  misc_RNA (1)...(19): siRNA sense strand
gaagagagagugguaacag

SEQ ID NO: 918029 - RNA, 19 nt, Homo sapiens
  misc_RNA (1)...(19): siRNA sense strand
ggauuuaucaugaacuaca

SEQ ID NO: 918030 - RNA, 19 nt, Homo sapiens
  misc_RNA (1)...(19): siRNA sense strand
gaaaggccacugcuaugag

SEQ ID NO: 918031 - RNA, 19 nt, Homo sapiens
  misc_RNA (1)...(19): siRNA sense strand
aaaccgagagugucccuuu

SEQ ID NO: 918032 - RNA, 19 nt, Homo sapiens
  misc_RNA (1)...(19): siRNA sense strand
ccaacaccaucuccgucua

SEQ ID NO: 918033 - RNA, 19 nt, Homo sapiens
  misc_RNA (1)...(19): siRNA sense strand
gcuaugagcccuacaucca

SEQ ID NO: 918034 - RNA, 19 nt, Homo sapiens
  misc_RNA (1)...(19): siRNA sense strand
gaacuacauagagguauca

SEQ ID NO: 918035 - RNA, 19 nt, Homo sapiens
  misc_RNA (1)...(19): siRNA sense strand
agucagcucuucucuacga

SEQ ID NO: 918036 - RNA, 19 nt, Homo sapiens
  misc_RNA (1)...(19): siRNA sense strand
gggaaaccagagaguauga

SEQ ID NO: 918037 - RNA, 19 nt, Homo sapiens
  misc_RNA (1)...(19): siRNA sense strand
aggagucccuggcauguga

SEQ ID NO: 918038 - RNA, 19 nt, Homo sapiens
  misc_RNA (1)...(19): siRNA sense strand
auagagguaucaaggaaug

SEQ ID NO: 918039 - RNA, 19 nt, Homo sapiens
  misc_RNA (1)...(19): siRNA sense strand
agacuuaaccauccaguuc

SEQ ID NO: 918040 - RNA, 19 nt, Homo sapiens
  misc_RNA (1)...(19): siRNA sense strand
ucaaugugcgggacccaua

SEQ ID NO: 918041 - RNA, 19 nt, Homo sapiens
  misc_RNA (1)...(19): siRNA sense strand
augcugagcugcaacuuuc

SEQ ID NO: 918042 - RNA, 19 nt, Homo sapiens
  misc_RNA (1)...(19): siRNA sense strand
ggagagucccucaccuuca

SEQ ID NO: 918043 - RNA, 19 nt, Homo sapiens
  misc_RNA (1)...(19): siRNA sense strand
gccagggauuuaucaugaa

SEQ ID NO: 918044 - RNA, 19 nt, Homo sapiens
  misc_RNA (1)...(19): siRNA sense strand
caucaucgaaugcaucaau

SEQ ID NO: 918045 - RNA, 19 nt, Homo sapiens
  misc_RNA (1)...(19): siRNA sense strand
ccacuucucacacggaguu

SEQ ID NO: 918046 - RNA, 19 nt, Homo sapiens
  misc_RNA (1)...(19): siRNA sense strand
gcugggaggagccuacauu

SEQ ID NO: 918047 - RNA, 19 nt, Homo sapiens
  misc_RNA (1)...(19): siRNA sense strand
guucucuucugaccugcua

SEQ ID NO: 918048 - RNA, 19 nt, Homo sapiens
  misc_RNA (1)...(19): siRNA sense strand
ugggaggagccuacauuua

SEQ ID NO: 918049 - RNA, 19 nt, Homo sapiens
  misc_RNA (1)...(19): siRNA sense strand
caacaagucagcucuucuc

SEQ ID NO: 918050 - RNA, 19 nt, Homo sapiens
  misc_RNA (1)...(19): siRNA sense strand
agagcacccugaagagaga

SEQ ID NO: 918051 - RNA, 19 nt, Homo sapiens
  misc_RNA (1)...(19): siRNA sense strand
ggaccaccauccaauacac

SEQ ID NO: 918052 - RNA, 19 nt, Homo sapiens
  misc_RNA (1)...(19): siRNA sense strand
caugaacuacauagaggua

SEQ ID NO: 918053 - RNA, 19 nt, Homo sapiens
  misc_RNA (1)...(19): siRNA sense strand
cgaggaggcaucagaagug

SEQ ID NO: 918054 - RNA, 19 nt, Homo sapiens
  misc_RNA (1)...(19): siRNA sense strand
cgacccgaccuauaacauu

SEQ ID NO: 918055 - RNA, 19 nt, Homo sapiens
  misc_RNA (1)...(19): siRNA sense strand
agaaaggccacugcuauga

SEQ ID NO: 918056 - RNA, 19 nt, Homo sapiens
  misc_RNA (1)...(19): siRNA sense strand
caccaucuccgucuacuuc

SEQ ID NO: 918057 - RNA, 19 nt, Homo sapiens
  misc_RNA (1)...(19): siRNA sense strand
gagccuacauuuacaucac

SEQ ID NO: 918058 - RNA, 19 nt, Homo sapiens
  misc_RNA (1)...(19): siRNA sense strand
gagccagaaucaccuacca

SEQ ID NO: 918059 - RNA, 19 nt, Homo sapiens
  misc_RNA (1)...(19): siRNA sense strand
ggaccuuccagcuucacua

SEQ ID NO: 918060 - RNA, 19 nt, Homo sapiens
  misc_RNA (1)...(19): siRNA sense strand
caccagcucucugcagugu

SEQ ID NO: 918061 - RNA, 19 nt, Homo sapiens
  misc_RNA (1)...(19): siRNA sense strand
caaagagcacccugaagag

SEQ ID NO: 918062 - RNA, 19 nt, Homo sapiens
  misc_RNA (1)...(19): siRNA sense strand
uacccgagauccagaaugg

SEQ ID NO: 918063 - RNA, 19 nt, Homo sapiens
  misc_RNA (1)...(19): siRNA sense strand
agggauuuaucaugaacua

SEQ ID NO: 918064 - RNA, 19 nt, Homo sapiens
  misc_RNA (1)...(19): siRNA sense strand
gacccauacuggaaugaca

SEQ ID NO: 918065 - RNA, 19 nt, Homo sapiens
  misc_RNA (1)...(19): siRNA sense strand
cagaaugggaacuucacua

SEQ ID NO: 918066 - RNA, 19 nt, Homo sapiens
  misc_RNA (1)...(19): siRNA sense strand
caaaugggagccaauucug

SEQ ID NO: 918067 - RNA, 19 nt, Homo sapiens
  misc_RNA (1)...(19): siRNA sense strand
uaacauugggacuauagug

SEQ ID NO: 918068 - RNA, 19 nt, Homo sapiens
  misc_RNA (1)...(19): siRNA sense strand
ccagagaguaugagguuuc

SEQ ID NO: 918069 - RNA, 19 nt, Homo sapiens
  misc_RNA (1)...(19): siRNA sense strand
gcccguguguaaaguuaau

SEQ ID NO: 918070 - RNA, 19 nt, Homo sapiens
  misc_RNA (1)...(19): siRNA sense strand
cugcccguguguaaaguua

SEQ ID NO: 918071 - RNA, 19 nt, Homo sapiens
  misc_RNA (1)...(19): siRNA sense strand
ugaacuacauagagguauc

SEQ ID NO: 918072 - RNA, 19 nt, Homo sapiens
  misc_RNA (1)...(19): siRNA sense strand
acagugacaucuugaccau

SEQ ID NO: 918073 - RNA, 19 nt, Homo sapiens
  misc_RNA (1)...(19): siRNA sense strand
gaaugggaacuucacuaca

SEQ ID NO: 918074 - RNA, 19 nt, Homo sapiens
  misc_RNA (1)...(19): siRNA sense strand
ggcccuggcuaucuucauc

SEQ ID NO: 918075 - RNA, 19 nt, Homo sapiens
  misc_RNA (1)...(19): siRNA sense strand
ggaacauggcccuggcuau

SEQ ID NO: 918076 - RNA, 19 nt, Homo sapiens
  misc_RNA (1)...(19): siRNA sense strand
ccacuaccuccaccauuau

SEQ ID NO: 918077 - RNA, 19 nt, Homo sapiens
  misc_RNA (1)...(19): siRNA sense strand
cgaaggcuuugagcucaug

SEQ ID NO: 918078 - RNA, 19 nt, Homo sapiens
  misc_RNA (1)...(19): siRNA sense strand
aaagagcacccugaagaga

SEQ ID NO: 918079 - RNA, 19 nt, Homo sapiens
  misc_RNA (1)...(19): siRNA sense strand
acacaaaugggagccaauu

SEQ ID NO: 918080 - RNA, 19 nt, Homo sapiens
  misc_RNA (1)...(19): siRNA sense strand
ggaggagucccuggcaugu

SEQ ID NO: 918081 - RNA, 19 nt, Homo sapiens
  misc_RNA (1)...(19): siRNA sense strand
cacucgacccgcuuaauuu

SEQ ID NO: 918082 - RNA, 19 nt, Homo sapiens
  misc_RNA (1)...(19): siRNA sense strand
ggaucacucgacccgcuua

SEQ ID NO: 918083 - RNA, 19 nt, Homo sapiens
  misc_RNA (1)...(19): siRNA sense strand
cagaauggcuggaaaacca

SEQ ID NO: 918084 - RNA, 19 nt, Homo sapiens
  misc_RNA (1)...(19): siRNA sense strand
ugacuccugcucggauuua

SEQ ID NO: 918085 - RNA, 19 nt, Homo sapiens
  misc_RNA (1)...(19): siRNA sense strand
ggaaggugaagauuguauc

SEQ ID NO: 918086 - RNA, 19 nt, Homo sapiens
  misc_RNA (1)...(19): siRNA sense strand
gaagagaacuugucauuac

SEQ ID NO: 918087 - RNA, 19 nt, Homo sapiens
  misc_RNA (1)...(19): siRNA sense strand
ggacaaagacaaagacaaa

SEQ ID NO: 918088 - RNA, 19 nt, Homo sapiens
  misc_RNA (1)...(19): siRNA sense strand
gagauaacauccuacauca

SEQ ID NO: 918089 - RNA, 19 nt, Homo sapiens
  misc_RNA (1)...(19): siRNA sense strand
gguccaagcuggccaagaa

SEQ ID NO: 918090 - RNA, 19 nt, Homo sapiens
  misc_RNA (1)...(19): siRNA sense strand
gggagaagguggccucuga

SEQ ID NO: 918091 - RNA, 19 nt, Homo sapiens
  misc_RNA (1)...(19): siRNA sense strand
gagaugagcuacccugaca

SEQ ID NO: 918092 - RNA, 19 nt, Homo sapiens
  misc_RNA (1)...(19): siRNA sense strand
ggaagagaacuugucauua

SEQ ID NO: 918093 - RNA, 19 nt, Homo sapiens
  misc_RNA (1)...(19): siRNA sense strand
gaaccgagagcucuucauu

SEQ ID NO: 918094 - RNA, 19 nt, Homo sapiens
  misc_RNA (1)...(19): siRNA sense strand
cugauuacguugacacuua

SEQ ID NO: 918095 - RNA, 19 nt, Homo sapiens
  misc_RNA (1)...(19): siRNA sense strand
caagucaggaagauuauua

SEQ ID NO: 918096 - RNA, 19 nt, Homo sapiens
  misc_RNA (1)...(19): siRNA sense strand
caagagagagugagaauuc

SEQ ID NO: 918097 - RNA, 19 nt, Homo sapiens
  misc_RNA (1)...(19): siRNA sense strand
gcaccucacccaucaauga

SEQ ID NO: 918098 - RNA, 19 nt, Homo sapiens
  misc_RNA (1)...(19): siRNA sense strand
cgaagaagaauaagaagaa

SEQ ID NO: 918099 - RNA, 19 nt, Homo sapiens
  misc_RNA (1)...(19): siRNA sense strand
gaagaaagaaggugacaag

SEQ ID NO: 918100 - RNA, 19 nt, Homo sapiens
  misc_RNA (1)...(19): siRNA sense strand
gcauccacuucaagaaaua

SEQ ID NO: 918101 - RNA, 19 nt, Homo sapiens
  misc_RNA (1)...(19): siRNA sense strand
caaggaggcugaacaguac

SEQ ID NO: 918102 - RNA, 19 nt, Homo sapiens
  misc_RNA (1)...(19): siRNA sense strand
ccacgaagaagaauaagaa

SEQ ID NO: 918103 - RNA, 19 nt, Homo sapiens
  misc_RNA (1)...(19): siRNA sense strand
gggagaacauccugcuuug

SEQ ID NO: 918104 - RNA, 19 nt, Homo sapiens
  misc_RNA (1)...(19): siRNA sense strand
ucaggaagauuauuacagu

SEQ ID NO: 918105 - RNA, 19 nt, Homo sapiens
  misc_RNA (1)...(19): siRNA sense strand
ucaugaacgucaaauggua

SEQ ID NO: 918106 - RNA, 19 nt, Homo sapiens
  misc_RNA (1)...(19): siRNA sense strand
gccaguaccuccagcaaug

SEQ ID NO: 918107 - RNA, 19 nt, Homo sapiens
  misc_RNA (1)...(19): siRNA sense strand
ugacauauuugcugcuaga

SEQ ID NO: 918108 - RNA, 19 nt, Homo sapiens
  misc_RNA (1)...(19): siRNA sense strand
gcgcgaggcugagcagaaa

SEQ ID NO: 918109 - RNA, 19 nt, Homo sapiens
  misc_RNA (1)...(19): siRNA sense strand
agacaaagacaaagacaaa

SEQ ID NO: 918110 - RNA, 19 nt, Homo sapiens
  misc_RNA (1)...(19): siRNA sense strand
gauauaacccugagacaag

SEQ ID NO: 918111 - RNA, 19 nt, Homo sapiens
  misc_RNA (1)...(19): siRNA sense strand
ccacaugccuggccucuac

SEQ ID NO: 918112 - RNA, 19 nt, Homo sapiens
  misc_RNA (1)...(19): siRNA sense strand
gcaugaaggucgccucagu

SEQ ID NO: 918113 - RNA, 19 nt, Homo sapiens
  misc_RNA (1)...(19): siRNA sense strand
gagaagguggccucugaua

SEQ ID NO: 918114 - RNA, 19 nt, Homo sapiens
  misc_RNA (1)...(19): siRNA sense strand
gagcugaucaccuucuauu

SEQ ID NO: 918115 - RNA, 19 nt, Homo sapiens
  misc_RNA (1)...(19): siRNA sense strand
ccaggagacuguguguaua

SEQ ID NO: 918116 - RNA, 19 nt, Homo sapiens
  misc_RNA (1)...(19): siRNA sense strand
gagaacuugucauuacaga

SEQ ID NO: 918117 - RNA, 19 nt, Homo sapiens
  misc_RNA (1)...(19): siRNA sense strand
ggucgcaccucacccauca

SEQ ID NO: 918118 - RNA, 19 nt, Homo sapiens
  misc_RNA (1)...(19): siRNA sense strand
gaaaagagacaaagcaaga

SEQ ID NO: 918119 - RNA, 19 nt, Homo sapiens
  misc_RNA (1)...(19): siRNA sense strand
acaaggaggcugaacagua

SEQ ID NO: 918120 - RNA, 19 nt, Homo sapiens
  misc_RNA (1)...(19): siRNA sense strand
cgagagcucuucauuucug

SEQ ID NO: 918121 - RNA, 19 nt, Homo sapiens
  misc_RNA (1)...(19): siRNA sense strand
guucaaacccgucaaggaa

SEQ ID NO: 918122 - RNA, 19 nt, Homo sapiens
  misc_RNA (1)...(19): siRNA sense strand
caccagcacucucacauuc

SEQ ID NO: 918123 - RNA, 19 nt, Homo sapiens
  misc_RNA (1)...(19): siRNA sense strand
ggccaaacacaccguauuu

SEQ ID NO: 918124 - RNA, 19 nt, Homo sapiens
  misc_RNA (1)...(19): siRNA sense strand
acugugaccuccuuaugua

SEQ ID NO: 918125 - RNA, 19 nt, Homo sapiens
  misc_RNA (1)...(19): siRNA sense strand
gggaccaucuccucaugaa

SEQ ID NO: 918126 - RNA, 19 nt, Homo sapiens
  misc_RNA (1)...(19): siRNA sense strand
cauccuacaucacugaaga

SEQ ID NO: 918127 - RNA, 19 nt, Homo sapiens
  misc_RNA (1)...(19): siRNA sense strand
uaccaagucaggaagauua

SEQ ID NO: 918128 - RNA, 19 nt, Homo sapiens
  misc_RNA (1)...(19): siRNA sense strand
gaagaagucggccaagaag

SEQ ID NO: 918129 - RNA, 19 nt, Homo sapiens
  misc_RNA (1)...(19): siRNA sense strand
caaggagcauggcggcauu

SEQ ID NO: 918130 - RNA, 19 nt, Homo sapiens
  misc_RNA (1)...(19): siRNA sense strand
uaacgacugugaccuccuu

SEQ ID NO: 918131 - RNA, 19 nt, Homo sapiens
  misc_RNA (1)...(19): siRNA sense strand
gacagauaccggugagaua

SEQ ID NO: 918132 - RNA, 19 nt, Homo sapiens
  misc_RNA (1)...(19): siRNA sense strand
gggaggaggccauugagaa

SEQ ID NO: 918133 - RNA, 19 nt, Homo sapiens
  misc_RNA (1)...(19): siRNA sense strand
ucaaacccgucaaggaaga

SEQ ID NO: 918134 - RNA, 19 nt, Homo sapiens
  misc_RNA (1)...(19): siRNA sense strand
gauaacauccuacaucacu

SEQ ID NO: 918135 - RNA, 19 nt, Homo sapiens
  misc_RNA (1)...(19): siRNA sense strand
cgaggacaaugacaacaau

SEQ ID NO: 918136 - RNA, 19 nt, Homo sapiens
  misc_RNA (1)...(19): siRNA sense strand
cagcuagguucuacaaaca

SEQ ID NO: 918137 - RNA, 19 nt, Homo sapiens
  misc_RNA (1)...(19): siRNA sense strand
ugaagaagucggccaagaa

SEQ ID NO: 918138 - RNA, 19 nt, Homo sapiens
  misc_RNA (1)...(19): siRNA sense strand
ggaccgagagagagagaaa

SEQ ID NO: 918139 - RNA, 19 nt, Homo sapiens
  misc_RNA (1)...(19): siRNA sense strand
gugaagacgaggacaauga

SEQ ID NO: 918140 - RNA, 19 nt, Homo sapiens
  misc_RNA (1)...(19): siRNA sense strand
gagaacauccugcuuugca

SEQ ID NO: 918141 - RNA, 19 nt, Homo sapiens
  misc_RNA (1)...(19): siRNA sense strand
uuaagggacucaggcagua

SEQ ID NO: 918142 - RNA, 19 nt, Homo sapiens
  misc_RNA (1)...(19): siRNA sense strand
ggauauaacccugagacaa

SEQ ID NO: 918143 - RNA, 19 nt, Homo sapiens
  misc_RNA (1)...(19): siRNA sense strand
aguguaacaucucccauuu

SEQ ID NO: 918144 - RNA, 19 nt, Homo sapiens
  misc_RNA (1)...(19): siRNA sense strand
ccaaacacaccguauuuca

SEQ ID NO: 918145 - RNA, 19 nt, Homo sapiens
  misc_RNA (1)...(19): siRNA sense strand
gaccgaggacgaagugaaa

SEQ ID NO: 918146 - RNA, 19 nt, Homo sapiens
  misc_RNA (1)...(19): siRNA sense strand
aagaugacuucgacaguga

SEQ ID NO: 918147 - RNA, 19 nt, Homo sapiens
  misc_RNA (1)...(19): siRNA sense strand
ggacaaugacaacaaugga

SEQ ID NO: 918148 - RNA, 19 nt, Homo sapiens
  misc_RNA (1)...(19): siRNA sense strand
gugaagaagucggccaaga

SEQ ID NO: 918149 - RNA, 19 nt, Homo sapiens
  misc_RNA (1)...(19): siRNA sense strand
gcagagacagugaagaagu

SEQ ID NO: 918150 - RNA, 19 nt, Homo sapiens
  misc_RNA (1)...(19): siRNA sense strand
ugaaugcacugaacacacu

SEQ ID NO: 918151 - RNA, 19 nt, Homo sapiens
  misc_RNA (1)...(19): siRNA sense strand
gaugacaccacucugaaug

SEQ ID NO: 918152 - RNA, 19 nt, Homo sapiens
  misc_RNA (1)...(19): siRNA sense strand
accgagagcucuucauuuc

SEQ ID NO: 918153 - RNA, 19 nt, Homo sapiens
  misc_RNA (1)...(19): siRNA sense strand
ggacagauaccggugagau

SEQ ID NO: 918154 - RNA, 19 nt, Homo sapiens
  misc_RNA (1)...(19): siRNA sense strand
gaaggugacaagcaguuau

SEQ ID NO: 918155 - RNA, 19 nt, Homo sapiens
  misc_RNA (1)...(19): siRNA sense strand
gaucaccuucuauuacuau

SEQ ID NO: 918156 - RNA, 19 nt, Homo sapiens
  misc_RNA (1)...(19): siRNA sense strand
aggagcugcuucccaauaa

SEQ ID NO: 918157 - RNA, 19 nt, Homo sapiens
  misc_RNA (1)...(19): siRNA sense strand
ugaacacacugcaugaaag

SEQ ID NO: 918158 - RNA, 19 nt, Homo sapiens
  misc_RNA (1)...(19): siRNA sense strand
cuucauuucugauuacguu

SEQ ID NO: 918159 - RNA, 19 nt, Homo sapiens
  misc_RNA (1)...(19): siRNA sense strand
caacuccugcuuuguguga

SEQ ID NO: 918160 - RNA, 19 nt, Homo sapiens
  misc_RNA (1)...(19): siRNA sense strand
ccggugagauaacauccua

SEQ ID NO: 918161 - RNA, 19 nt, Homo sapiens
  misc_RNA (1)...(19): siRNA sense strand
uaacauccuacaucacuga

SEQ ID NO: 918162 - RNA, 19 nt, Homo sapiens
  misc_RNA (1)...(19): siRNA sense strand
gggagaaggagaaggagaa

SEQ ID NO: 918163 - RNA, 19 nt, Homo sapiens
  misc_RNA (1)...(19): siRNA sense strand
uuccagaucugcaaccauu

SEQ ID NO: 918164 - RNA, 19 nt, Homo sapiens
  misc_RNA (1)...(19): siRNA sense strand
uggaagagaacuugucauu

SEQ ID NO: 918165 - RNA, 19 nt, Homo sapiens
  misc_RNA (1)...(19): siRNA sense strand
aaacacaccguauuucauc

SEQ ID NO: 918166 - RNA, 19 nt, Homo sapiens
  misc_RNA (1)...(19): siRNA sense strand
ugagauaacauccuacauc

SEQ ID NO: 918167 - RNA, 19 nt, Homo sapiens
  misc_RNA (1)...(19): siRNA sense strand
gaagagggaggaggccauu

SEQ ID NO: 918168 - RNA, 19 nt, Homo sapiens
  misc_RNA (1)...(19): siRNA sense strand
aagcagagacagugaagaa

SEQ ID NO: 918169 - RNA, 19 nt, Homo sapiens
  misc_RNA (1)...(19): siRNA sense strand
gagcauggcggcauuugca

SEQ ID NO: 918170 - RNA, 19 nt, Homo sapiens
  misc_RNA (1)...(19): siRNA sense strand
gagagcucuucauuucuga

SEQ ID NO: 918171 - RNA, 19 nt, Homo sapiens
  misc_RNA (1)...(19): siRNA sense strand
uauuucaucuguagcauuc

SEQ ID NO: 918172 - RNA, 19 nt, Homo sapiens
  misc_RNA (1)...(19): siRNA sense strand
acagauaccggugagauaa

SEQ ID NO: 918173 - RNA, 19 nt, Homo sapiens
  misc_RNA (1)...(19): siRNA sense strand
gaugagcuacccugacaga

SEQ ID NO: 918174 - RNA, 19 nt, Homo sapiens
  misc_RNA (1)...(19): siRNA sense strand
gggagagaguucagacagu

SEQ ID NO: 918175 - RNA, 19 nt, Homo sapiens
  misc_RNA (1)...(19): siRNA sense strand
gaagguggccucugauacg

SEQ ID NO: 918176 - RNA, 19 nt, Homo sapiens
  misc_RNA (1)...(19): siRNA sense strand
gggagcugaucaccuucua

SEQ ID NO: 918177 - RNA, 19 nt, Homo sapiens
  misc_RNA (1)...(19): siRNA sense strand
ggaccgaggacgaagugaa

SEQ ID NO: 918178 - RNA, 19 nt, Homo sapiens
  misc_RNA (1)...(19): siRNA sense strand
ugaaagcgguuacgaugcu

SEQ ID NO: 918179 - RNA, 19 nt, Homo sapiens
  misc_RNA (1)...(19): siRNA sense strand
ggaguaagagggaccaucu

SEQ ID NO: 918180 - RNA, 19 nt, Homo sapiens
  misc_RNA (1)...(19): siRNA sense strand
acaaagacaaagacaaaga

SEQ ID NO: 918181 - RNA, 19 nt, Homo sapiens
  misc_RNA (1)...(19): siRNA sense strand
gacaggaccagcuccaaga

SEQ ID NO: 918182 - RNA, 19 nt, Homo sapiens
  misc_RNA (1)...(19): siRNA sense strand
cagagacagugaagaaguc

SEQ ID NO: 918183 - RNA, 19 nt, Homo sapiens
  misc_RNA (1)...(19): siRNA sense strand
ccacggaggaguccacgaa

SEQ ID NO: 918184 - RNA, 19 nt, Homo sapiens
  misc_RNA (1)...(19): siRNA sense strand
ugcccaagcucaucgagaa

SEQ ID NO: 918185 - RNA, 19 nt, Homo sapiens
  misc_RNA (1)...(19): siRNA sense strand
gcucuucauuucugauuac

SEQ ID NO: 918186 - RNA, 19 nt, Homo sapiens
  misc_RNA (1)...(19): siRNA sense strand
gcagauaggcucuuacuuu

SEQ ID NO: 918187 - RNA, 19 nt, Homo sapiens
  misc_RNA (1)...(19): siRNA sense strand
ucaaauacaucgccaguga

SEQ ID NO: 918188 - RNA, 19 nt, Homo sapiens
  misc_RNA (1)...(19): siRNA sense strand
gcgaagauguggugcauga

SEQ ID NO: 918189 - RNA, 19 nt, Homo sapiens
  misc_RNA (1)...(19): siRNA sense strand
ccaagaaggugaugauugu

SEQ ID NO: 918190 - RNA, 19 nt, Homo sapiens
  misc_RNA (1)...(19): siRNA sense strand
gagacaacguaacaagaua

SEQ ID NO: 918191 - RNA, 19 nt, Homo sapiens
  misc_RNA (1)...(19): siRNA sense strand
gacaagcacuucuucaaug

SEQ ID NO: 918192 - RNA, 19 nt, Homo sapiens
  misc_RNA (1)...(19): siRNA sense strand
gaauggagcugugcuaaag

SEQ ID NO: 918193 - RNA, 19 nt, Homo sapiens
  misc_RNA (1)...(19): siRNA sense strand
cagauaggcucuuacuuug

SEQ ID NO: 918194 - RNA, 19 nt, Homo sapiens
  misc_RNA (1)...(19): siRNA sense strand
agacagaaccgguuuguuu

SEQ ID NO: 918195 - RNA, 19 nt, Homo sapiens
  misc_RNA (1)...(19): siRNA sense strand
gaagacaccuaagcagaga

SEQ ID NO: 918196 - RNA, 19 nt, Homo sapiens
  misc_RNA (1)...(19): siRNA sense strand
gcaaauccaucuuccuaca

SEQ ID NO: 918197 - RNA, 19 nt, Homo sapiens
  misc_RNA (1)...(19): siRNA sense strand
gacagaaccgguuuguuua

SEQ ID NO: 918198 - RNA, 19 nt, Homo sapiens
  misc_RNA (1)...(19): siRNA sense strand
ccagaaggguggaaggaaa

SEQ ID NO: 918199 - RNA, 19 nt, Homo sapiens
  misc_RNA (1)...(19): siRNA sense strand
gcuaaaggauucacacagu

SEQ ID NO: 918200 - RNA, 19 nt, Homo sapiens
  misc_RNA (1)...(19): siRNA sense strand
uaaaggauucacacaguua

SEQ ID NO: 918201 - RNA, 19 nt, Homo sapiens
  misc_RNA (1)...(19): siRNA sense strand
gaacacguccuguaacauc

SEQ ID NO: 918202 - RNA, 19 nt, Homo sapiens
  misc_RNA (1)...(19): siRNA sense strand
cuaccggccuccaguauuu

SEQ ID NO: 918203 - RNA, 19 nt, Homo sapiens
  misc_RNA (1)...(19): siRNA sense strand
guacaaguguccagugauc

SEQ ID NO: 918204 - RNA, 19 nt, Homo sapiens
  misc_RNA (1)...(19): siRNA sense strand
cagaaccgguuuguuuaua

SEQ ID NO: 918205 - RNA, 19 nt, Homo sapiens
  misc_RNA (1)...(19): siRNA sense strand
guucagcacuuccucauca

SEQ ID NO: 918206 - RNA, 19 nt, Homo sapiens
  misc_RNA (1)...(19): siRNA sense strand
gcucagaggcuuuccagaa

SEQ ID NO: 918207 - RNA, 19 nt, Homo sapiens
  misc_RNA (1)...(19): siRNA sense strand
caagguggcuuuccgucuu

SEQ ID NO: 918208 - RNA, 19 nt, Homo sapiens
  misc_RNA (1)...(19): siRNA sense strand
ggacucagacgguagcauu

SEQ ID NO: 918209 - RNA, 19 nt, Homo sapiens
  misc_RNA (1)...(19): siRNA sense strand
gaggcaagguguacgucua

SEQ ID NO: 918210 - RNA, 19 nt, Homo sapiens
  misc_RNA (1)...(19): siRNA sense strand
gcgaacacguccuguaaca

SEQ ID NO: 918211 - RNA, 19 nt, Homo sapiens
  misc_RNA (1)...(19): siRNA sense strand
cgaaagagacaacguaaca

SEQ ID NO: 918212 - RNA, 19 nt, Homo sapiens
  misc_RNA (1)...(19): siRNA sense strand
uaaaagcacucaaguacaa

SEQ ID NO: 918213 - RNA, 19 nt, Homo sapiens
  misc_RNA (1)...(19): siRNA sense strand
caagaaccauggugcauac

SEQ ID NO: 918214 - RNA, 19 nt, Homo sapiens
  misc_RNA (1)...(19): siRNA sense strand
cgacaucaguggcaauaag

SEQ ID NO: 918215 - RNA, 19 nt, Homo sapiens
  misc_RNA (1)...(19): siRNA sense strand
cagcaaauccaucuuccua

SEQ ID NO: 918216 - RNA, 19 nt, Homo sapiens
  misc_RNA (1)...(19): siRNA sense strand
ggacggcauuuggcauuga

SEQ ID NO: 918217 - RNA, 19 nt, Homo sapiens
  misc_RNA (1)...(19): siRNA sense strand
agaaccgguuuguuuauaa

SEQ ID NO: 918218 - RNA, 19 nt, Homo sapiens
  misc_RNA (1)...(19): siRNA sense strand
ggaauggagcugugcuaaa

SEQ ID NO: 918219 - RNA, 19 nt, Homo sapiens
  misc_RNA (1)...(19): siRNA sense strand
gaaggaaaggagccaagaa

SEQ ID NO: 918220 - RNA, 19 nt, Homo sapiens
  misc_RNA (1)...(19): siRNA sense strand
cgauuuggguccuccauug

SEQ ID NO: 918221 - RNA, 19 nt, Homo sapiens
  misc_RNA (1)...(19): siRNA sense strand
ucuaugagcugagacagaa

SEQ ID NO: 918222 - RNA, 19 nt, Homo sapiens
  misc_RNA (1)...(19): siRNA sense strand
cuaaaggauucacacaguu

SEQ ID NO: 918223 - RNA, 19 nt, Homo sapiens
  misc_RNA (1)...(19): siRNA sense strand
ucacacaguuaccagaaug

SEQ ID NO: 918224 - RNA, 19 nt, Homo sapiens
  misc_RNA (1)...(19): siRNA sense strand
gccagcagauaggcucuua

SEQ ID NO: 918225 - RNA, 19 nt, Homo sapiens
  misc_RNA (1)...(19): siRNA sense strand
gcucuuacuuugggaguga

SEQ ID NO: 918226 - RNA, 19 nt, Homo sapiens
  misc_RNA (1)...(19): siRNA sense strand
gaaccgguuuguuuauaac

SEQ ID NO: 918227 - RNA, 19 nt, Homo sapiens
  misc_RNA (1)...(19): siRNA sense strand
ggaaaggagccaagaaggu

SEQ ID NO: 918228 - RNA, 19 nt, Homo sapiens
  misc_RNA (1)...(19): siRNA sense strand
guacgucuaugagcugaga

SEQ ID NO: 918229 - RNA, 19 nt, Homo sapiens
  misc_RNA (1)...(19): siRNA sense strand
ccgaggagcucaagaacca

SEQ ID NO: 918230 - RNA, 19 nt, Homo sapiens
  misc_RNA (1)...(19): siRNA sense strand
ccacagucuucaucauaga

SEQ ID NO: 918231 - RNA, 19 nt, Homo sapiens
  misc_RNA (1)...(19): siRNA sense strand
acagcacgguccuaaauau

SEQ ID NO: 918232 - RNA, 19 nt, Homo sapiens
  misc_RNA (1)...(19): siRNA sense strand
gcaagguguacgucuauga

SEQ ID NO: 918233 - RNA, 19 nt, Homo sapiens
  misc_RNA (1)...(19): siRNA sense strand
gcagcagccugagccacua

SEQ ID NO: 918234 - RNA, 19 nt, Homo sapiens
  misc_RNA (1)...(19): siRNA sense strand
caccacagucuucaucaua

SEQ ID NO: 918235 - RNA, 19 nt, Homo sapiens
  misc_RNA (1)...(19): siRNA sense strand
gaucaacaucuuccacaga

SEQ ID NO: 918236 - RNA, 19 nt, Homo sapiens
  misc_RNA (1)...(19): siRNA sense strand
gaaagagacaacguaacaa

SEQ ID NO: 918237 - RNA, 19 nt, Homo sapiens
  misc_RNA (1)...(19): siRNA sense strand
caaguacaaauccaugaaa

SEQ ID NO: 918238 - RNA, 19 nt, Homo sapiens
  misc_RNA (1)...(19): siRNA sense strand
uagcgaacacguccuguaa

SEQ ID NO: 918239 - RNA, 19 nt, Homo sapiens
  misc_RNA (1)...(19): siRNA sense strand
gccagagggugcugaggaa

SEQ ID NO: 918240 - RNA, 19 nt, Homo sapiens
  misc_RNA (1)...(19): siRNA sense strand
uuaccagaaugcccgauuu

SEQ ID NO: 918241 - RNA, 19 nt, Homo sapiens
  misc_RNA (1)...(19): siRNA sense strand
gaacugcaccaaacucaac

SEQ ID NO: 918242 - RNA, 19 nt, Homo sapiens
  misc_RNA (1)...(19): siRNA sense strand
uaacggaacgcuaaaggau

SEQ ID NO: 918243 - RNA, 19 nt, Homo sapiens
  misc_RNA (1)...(19): siRNA sense strand
ccucuggucucaugagugu

SEQ ID NO: 918244 - RNA, 19 nt, Homo sapiens
  misc_RNA (1)...(19): siRNA sense strand
cgucagcuaucccuucuuc

SEQ ID NO: 918245 - RNA, 19 nt, Homo sapiens
  misc_RNA (1)...(19): siRNA sense strand
caagaacgagaccuccuuu

SEQ ID NO: 918246 - RNA, 19 nt, Homo sapiens
  misc_RNA (1)...(19): siRNA sense strand
acaagcacuucuucaaugu

SEQ ID NO: 918247 - RNA, 19 nt, Homo sapiens
  misc_RNA (1)...(19): siRNA sense strand
gcauuuggcauugaauuug

SEQ ID NO: 918248 - RNA, 19 nt, Homo sapiens
  misc_RNA (1)...(19): siRNA sense strand
cuacauggacaucgucauu

SEQ ID NO: 918249 - RNA, 19 nt, Homo sapiens
  misc_RNA (1)...(19): siRNA sense strand
gcacucaaguacaaaucca

SEQ ID NO: 918250 - RNA, 19 nt, Homo sapiens
  misc_RNA (1)...(19): siRNA sense strand
cgggagacguguacaagug

SEQ ID NO: 918251 - RNA, 19 nt, Homo sapiens
  misc_RNA (1)...(19): siRNA sense strand
ucaagaaccauggugcaua

SEQ ID NO: 918252 - RNA, 19 nt, Homo sapiens
  misc_RNA (1)...(19): siRNA sense strand
gagaaggugauccagcaaa

SEQ ID NO: 918253 - RNA, 19 nt, Homo sapiens
  misc_RNA (1)...(19): siRNA sense strand
gaagauguggugcaugagu

SEQ ID NO: 918254 - RNA, 19 nt, Homo sapiens
  misc_RNA (1)...(19): siRNA sense strand
ggguggagguucagcacuu

SEQ ID NO: 918255 - RNA, 19 nt, Homo sapiens
  misc_RNA (1)...(19): siRNA sense strand
gcgcacccauguacuucaa

SEQ ID NO: 918256 - RNA, 19 nt, Homo sapiens
  misc_RNA (1)...(19): siRNA sense strand
ccagugacccugaugacaa

SEQ ID NO: 918257 - RNA, 19 nt, Homo sapiens
  misc_RNA (1)...(19): siRNA sense strand
gccaagaaggugaugauug

SEQ ID NO: 918258 - RNA, 19 nt, Homo sapiens
  misc_RNA (1)...(19): siRNA sense strand
gggauguguucaagaguca

SEQ ID NO: 918259 - RNA, 19 nt, Homo sapiens
  misc_RNA (1)...(19): siRNA sense strand
cauacacgcuguccuucga

SEQ ID NO: 918260 - RNA, 19 nt, Homo sapiens
  misc_RNA (1)...(19): siRNA sense strand
ccacggccauggaguacug

SEQ ID NO: 918261 - RNA, 19 nt, Homo sapiens
  misc_RNA (1)...(19): siRNA sense strand
guuuauaacggaacgcuaa

SEQ ID NO: 918262 - RNA, 19 nt, Homo sapiens
  misc_RNA (1)...(19): siRNA sense strand
guguacaaguguccaguga

SEQ ID NO: 918263 - RNA, 19 nt, Homo sapiens
  misc_RNA (1)...(19): siRNA sense strand
ugacaagcacuucuucaau

SEQ ID NO: 918264 - RNA, 19 nt, Homo sapiens
  misc_RNA (1)...(19): siRNA sense strand
cagcaaagcgaaagagaca

SEQ ID NO: 918265 - RNA, 19 nt, Homo sapiens
  misc_RNA (1)...(19): siRNA sense strand
gcacgguccuaaauaucuc

SEQ ID NO: 918266 - RNA, 19 nt, Homo sapiens
  misc_RNA (1)...(19): siRNA sense strand
cuacagcacgguccuaaau

SEQ ID NO: 918267 - RNA, 19 nt, Homo sapiens
  misc_RNA (1)...(19): siRNA sense strand
aguccuaccugaaagaguu

SEQ ID NO: 918268 - RNA, 19 nt, Homo sapiens
  misc_RNA (1)...(19): siRNA sense strand
ggaaggaaaggagccaaga

SEQ ID NO: 918269 - RNA, 19 nt, Homo sapiens
  misc_RNA (1)...(19): siRNA sense strand
caaugaggaugagcacugu

SEQ ID NO: 918270 - RNA, 19 nt, Homo sapiens
  misc_RNA (1)...(19): siRNA sense strand
gcccagugguucagaucaa

SEQ ID NO: 918271 - RNA, 19 nt, Homo sapiens
  misc_RNA (1)...(19): siRNA sense strand
caggagccaucuacaucuu

SEQ ID NO: 918272 - RNA, 19 nt, Homo sapiens
  misc_RNA (1)...(19): siRNA sense strand
gaccuucucagucgaguau

SEQ ID NO: 918273 - RNA, 19 nt, Homo sapiens
  misc_RNA (1)...(19): siRNA sense strand
gaacggcugcaaugaggau

SEQ ID NO: 918274 - RNA, 19 nt, Homo sapiens
  misc_RNA (1)...(19): siRNA sense strand
ggcauuuggcauugaauuu

SEQ ID NO: 918275 - RNA, 19 nt, Homo sapiens
  misc_RNA (1)...(19): siRNA sense strand
guagcgaacacguccugua

SEQ ID NO: 918276 - RNA, 19 nt, Homo sapiens
  misc_RNA (1)...(19): siRNA sense strand
aagcacuucuucaauguca

SEQ ID NO: 918277 - RNA, 19 nt, Homo sapiens
  misc_RNA (1)...(19): siRNA sense strand
gccgccagaucguguuuga

SEQ ID NO: 918278 - RNA, 19 nt, Homo sapiens
  misc_RNA (1)...(19): siRNA sense strand
acagggauguguucaagag

SEQ ID NO: 918279 - RNA, 19 nt, Homo sapiens
  misc_RNA (1)...(19): siRNA sense strand
cgaggcagcauccugaaga

SEQ ID NO: 918280 - RNA, 19 nt, Homo sapiens
  misc_RNA (1)...(19): siRNA sense strand
acggaacgcuaaaggauuc

SEQ ID NO: 918281 - RNA, 19 nt, Homo sapiens
  misc_RNA (1)...(19): siRNA sense strand
ugugggagcuccuacuaca

SEQ ID NO: 918282 - RNA, 19 nt, Homo sapiens
  misc_RNA (1)...(19): siRNA sense strand
accaauggcuaccagaaga

SEQ ID NO: 918283 - RNA, 19 nt, Homo sapiens
  misc_RNA (1)...(19): siRNA sense strand
uccaucaacugcaauauac

SEQ ID NO: 918284 - RNA, 19 nt, Homo sapiens
  misc_RNA (1)...(19): siRNA sense strand
gaugagaggcgguauacac

SEQ ID NO: 918285 - RNA, 19 nt, Homo sapiens
  misc_RNA (1)...(19): siRNA sense strand
gaagacgggagacguguac

SEQ ID NO: 918286 - RNA, 19 nt, Homo sapiens
  misc_RNA (1)...(19): siRNA sense strand
gaauaaagcuccggaauau

SEQ ID NO: 918287 - RNA, 19 nt, Homo sapiens
  misc_RNA (1)...(19): siRNA sense strand
ggaaguacguuuaaaugug

SEQ ID NO: 918288 - RNA, 19 nt, Homo sapiens
  misc_RNA (1)...(19): siRNA sense strand
ggaagaauccucucaugaa

SEQ ID NO: 918289 - RNA, 19 nt, Homo sapiens
  misc_RNA (1)...(19): siRNA sense strand
gaggagauauggaacagaa

SEQ ID NO: 918290 - RNA, 19 nt, Homo sapiens
  misc_RNA (1)...(19): siRNA sense strand
ugaaggaucuguuccaaau

SEQ ID NO: 918291 - RNA, 19 nt, Homo sapiens
  misc_RNA (1)...(19): siRNA sense strand
gaugaucgcagggauauua

SEQ ID NO: 918292 - RNA, 19 nt, Homo sapiens
  misc_RNA (1)...(19): siRNA sense strand
cuaaaggaauucuucauga

SEQ ID NO: 918293 - RNA, 19 nt, Homo sapiens
  misc_RNA (1)...(19): siRNA sense strand
cagagaaucuuaauugcaa

SEQ ID NO: 918294 - RNA, 19 nt, Homo sapiens
  misc_RNA (1)...(19): siRNA sense strand
ugacaaccguagaauaauu

SEQ ID NO: 918295 - RNA, 19 nt, Homo sapiens
  misc_RNA (1)...(19): siRNA sense strand
gaacuuagaagaacuagag

SEQ ID NO: 918296 - RNA, 19 nt, Homo sapiens
  misc_RNA (1)...(19): siRNA sense strand
ggagaagaacuuagaagaa

SEQ ID NO: 918297 - RNA, 19 nt, Homo sapiens
  misc_RNA (1)...(19): siRNA sense strand
uagaagaacuagaggagaa

SEQ ID NO: 918298 - RNA, 19 nt, Homo sapiens
  misc_RNA (1)...(19): siRNA sense strand
gagaagaacuuagaagaac

SEQ ID NO: 918299 - RNA, 19 nt, Homo sapiens
  misc_RNA (1)...(19): siRNA sense strand
gaagaauccucucaugaac

SEQ ID NO: 918300 - RNA, 19 nt, Homo sapiens
  misc_RNA (1)...(19): siRNA sense strand
gggcuucagugaccaguaa

SEQ ID NO: 918301 - RNA, 19 nt, Homo sapiens
  misc_RNA (1)...(19): siRNA sense strand
ugaauaaagcuccggaaua

SEQ ID NO: 918302 - RNA, 19 nt, Homo sapiens
  misc_RNA (1)...(19): siRNA sense strand
guucagagaaucuuaauug

SEQ ID NO: 918303 - RNA, 19 nt, Homo sapiens
  misc_RNA (1)...(19): siRNA sense strand
aaggaucuguuccaaauaa

SEQ ID NO: 918304 - RNA, 19 nt, Homo sapiens
  misc_RNA (1)...(19): siRNA sense strand
gaggcaauauuauacuuug

SEQ ID NO: 918305 - RNA, 19 nt, Homo sapiens
  misc_RNA (1)...(19): siRNA sense strand
cacaaaguauuaucucuga

SEQ ID NO: 918306 - RNA, 19 nt, Homo sapiens
  misc_RNA (1)...(19): siRNA sense strand
gaagaacuuagaagaacua

SEQ ID NO: 918307 - RNA, 19 nt, Homo sapiens
  misc_RNA (1)...(19): siRNA sense strand
auaaagcuccggaauauuu

SEQ ID NO: 918308 - RNA, 19 nt, Homo sapiens
  misc_RNA (1)...(19): siRNA sense strand
gaacaacgaccuagagaac

SEQ ID NO: 918309 - RNA, 19 nt, Homo sapiens
  misc_RNA (1)...(19): siRNA sense strand
gaggagaaaucuacuacuc

SEQ ID NO: 918310 - RNA, 19 nt, Homo sapiens
  misc_RNA (1)...(19): siRNA sense strand
gaugaaguguuuggugauu

SEQ ID NO: 918311 - RNA, 19 nt, Homo sapiens
  misc_RNA (1)...(19): siRNA sense strand
gaacuucgcaucaauacca

SEQ ID NO: 918312 - RNA, 19 nt, Homo sapiens
  misc_RNA (1)...(19): siRNA sense strand
gauauuaggcgcaaugauc

SEQ ID NO: 918313 - RNA, 19 nt, Homo sapiens
  misc_RNA (1)...(19): siRNA sense strand
ugauauacaccacaaagua

SEQ ID NO: 918314 - RNA, 19 nt, Homo sapiens
  misc_RNA (1)...(19): siRNA sense strand
ccagauagucaucaacuuu

SEQ ID NO: 918315 - RNA, 19 nt, Homo sapiens
  misc_RNA (1)...(19): siRNA sense strand
guugguaacuugccacaug

SEQ ID NO: 918316 - RNA, 19 nt, Homo sapiens
  misc_RNA (1)...(19): siRNA sense strand
uaacuugccacaugauauu

SEQ ID NO: 918317 - RNA, 19 nt, Homo sapiens
  misc_RNA (1)...(19): siRNA sense strand
gaugaagaaucagaagaug

SEQ ID NO: 918318 - RNA, 19 nt, Homo sapiens
  misc_RNA (1)...(19): siRNA sense strand
caaccagaaagaaaguuua

SEQ ID NO: 918319 - RNA, 19 nt, Homo sapiens
  misc_RNA (1)...(19): siRNA sense strand
guuuaaauguggaagagaa

SEQ ID NO: 918320 - RNA, 19 nt, Homo sapiens
  misc_RNA (1)...(19): siRNA sense strand
ggaacaagaagaaagacaa

SEQ ID NO: 918321 - RNA, 19 nt, Homo sapiens
  misc_RNA (1)...(19): siRNA sense strand
gaaggaucuguuccaaaua

SEQ ID NO: 918322 - RNA, 19 nt, Homo sapiens
  misc_RNA (1)...(19): siRNA sense strand
ugaagaaucagaagaugaa

SEQ ID NO: 918323 - RNA, 19 nt, Homo sapiens
  misc_RNA (1)...(19): siRNA sense strand
uagaggagccuuuggaaga

SEQ ID NO: 918324 - RNA, 19 nt, Homo sapiens
  misc_RNA (1)...(19): siRNA sense strand
gaagaaagacaaccaucuc

SEQ ID NO: 918325 - RNA, 19 nt, Homo sapiens
  misc_RNA (1)...(19): siRNA sense strand
agaaucagaagaugaagua

SEQ ID NO: 918326 - RNA, 19 nt, Homo sapiens
  misc_RNA (1)...(19): siRNA sense strand
uaaaggaauucuucaugag

SEQ ID NO: 918327 - RNA, 19 nt, Homo sapiens
  misc_RNA (1)...(19): siRNA sense strand
caugcaaccuugagugaug

SEQ ID NO: 918328 - RNA, 19 nt, Homo sapiens
  misc_RNA (1)...(19): siRNA sense strand
ucugacaaccguagaauaa

SEQ ID NO: 918329 - RNA, 19 nt, Homo sapiens
  misc_RNA (1)...(19): siRNA sense strand
agucgaagcuaaaccagaa

SEQ ID NO: 918330 - RNA, 19 nt, Homo sapiens
  misc_RNA (1)...(19): siRNA sense strand
gaagaggaacaagaagaaa

SEQ ID NO: 918331 - RNA, 19 nt, Homo sapiens
  misc_RNA (1)...(19): siRNA sense strand
gcuaaaggaauucuucaug

SEQ ID NO: 918332 - RNA, 19 nt, Homo sapiens
  misc_RNA (1)...(19): siRNA sense strand
gaaacuuggcucuggaaga

SEQ ID NO: 918333 - RNA, 19 nt, Homo sapiens
  misc_RNA (1)...(19): siRNA sense strand
cagugaaugucauacuaaa

SEQ ID NO: 918334 - RNA, 19 nt, Homo sapiens
  misc_RNA (1)...(19): siRNA sense strand
ggagauauggaacagaaug

SEQ ID NO: 918335 - RNA, 19 nt, Homo sapiens
  misc_RNA (1)...(19): siRNA sense strand
gcaagaaaaugcuaacagu

SEQ ID NO: 918336 - RNA, 19 nt, Homo sapiens
  misc_RNA (1)...(19): siRNA sense strand
ggaauuccaccccauguua

SEQ ID NO: 918337 - RNA, 19 nt, Homo sapiens
  misc_RNA (1)...(19): siRNA sense strand
aaccagaaguucaaucuca

SEQ ID NO: 918338 - RNA, 19 nt, Homo sapiens
  misc_RNA (1)...(19): siRNA sense strand
ugaugacucugaaccaguu

SEQ ID NO: 918339 - RNA, 19 nt, Homo sapiens
  misc_RNA (1)...(19): siRNA sense strand
aaacaagagcugcaagaga

SEQ ID NO: 918340 - RNA, 19 nt, Homo sapiens
  misc_RNA (1)...(19): siRNA sense strand
gggaguuugugaggcaaua

SEQ ID NO: 918341 - RNA, 19 nt, Homo sapiens
  misc_RNA (1)...(19): siRNA sense strand
gcauagaggagccuuugga

SEQ ID NO: 918342 - RNA, 19 nt, Homo sapiens
  misc_RNA (1)...(19): siRNA sense strand
cggaauauuuacacagguu

SEQ ID NO: 918343 - RNA, 19 nt, Homo sapiens
  misc_RNA (1)...(19): siRNA sense strand
gccaagagucgaagcuaaa

SEQ ID NO: 918344 - RNA, 19 nt, Homo sapiens
  misc_RNA (1)...(19): siRNA sense strand
gggaaguacguuuaaaugu

SEQ ID NO: 918345 - RNA, 19 nt, Homo sapiens
  misc_RNA (1)...(19): siRNA sense strand
aguauuaucucugaacuuc

SEQ ID NO: 918346 - RNA, 19 nt, Homo sapiens
  misc_RNA (1)...(19): siRNA sense strand
aaggaauucuucaugaguu

SEQ ID NO: 918347 - RNA, 19 nt, Homo sapiens
  misc_RNA (1)...(19): siRNA sense strand
gaagcuaaaccagaaguuc

SEQ ID NO: 918348 - RNA, 19 nt, Homo sapiens
  misc_RNA (1)...(19): siRNA sense strand
ggacaaccagaaagaaagu

SEQ ID NO: 918349 - RNA, 19 nt, Homo sapiens
  misc_RNA (1)...(19): siRNA sense strand
ggucauggguuugcugucu

SEQ ID NO: 918350 - RNA, 19 nt, Homo sapiens
  misc_RNA (1)...(19): siRNA sense strand
agccugaacuugaugaaga

SEQ ID NO: 918351 - RNA, 19 nt, Homo sapiens
  misc_RNA (1)...(19): siRNA sense strand
gguaacuugccacaugaua

SEQ ID NO: 918352 - RNA, 19 nt, Homo sapiens
  misc_RNA (1)...(19): siRNA sense strand
gagauauggaacagaauga

SEQ ID NO: 918353 - RNA, 19 nt, Homo sapiens
  misc_RNA (1)...(19): siRNA sense strand
gugaggcaauauuauacuu

SEQ ID NO: 918354 - RNA, 19 nt, Homo sapiens
  misc_RNA (1)...(19): siRNA sense strand
ucauggguuugcugucuaa

SEQ ID NO: 918355 - RNA, 19 nt, Homo sapiens
  misc_RNA (1)...(19): siRNA sense strand
gaagaggaaccgggcaaau

SEQ ID NO: 918356 - RNA, 19 nt, Homo sapiens
  misc_RNA (1)...(19): siRNA sense strand
agaggagccuuuggaagaa

SEQ ID NO: 918357 - RNA, 19 nt, Homo sapiens
  misc_RNA (1)...(19): siRNA sense strand
gaacaagaagaaagacaac

SEQ ID NO: 918358 - RNA, 19 nt, Homo sapiens
  misc_RNA (1)...(19): siRNA sense strand
aucagaagaugaaguagaa

SEQ ID NO: 918359 - RNA, 19 nt, Homo sapiens
  misc_RNA (1)...(19): siRNA sense strand
uaacaguggacaaccagaa

SEQ ID NO: 918360 - RNA, 19 nt, Homo sapiens
  misc_RNA (1)...(19): siRNA sense strand
guaacuugccacaugauau

SEQ ID NO: 918361 - RNA, 19 nt, Homo sapiens
  misc_RNA (1)...(19): siRNA sense strand
acaacgaccuagagaacga

SEQ ID NO: 918362 - RNA, 19 nt, Homo sapiens
  misc_RNA (1)...(19): siRNA sense strand
ggaauauuuacacagguuu

SEQ ID NO: 918363 - RNA, 19 nt, Homo sapiens
  misc_RNA (1)...(19): siRNA sense strand
ucagugaaugucauacuaa

SEQ ID NO: 918364 - RNA, 19 nt, Homo sapiens
  misc_RNA (1)...(19): siRNA sense strand
aaccuugagugauggagua

SEQ ID NO: 918365 - RNA, 19 nt, Homo sapiens
  misc_RNA (1)...(19): siRNA sense strand
gaaaaugagcuaaaggaau

SEQ ID NO: 918366 - RNA, 19 nt, Homo sapiens
  misc_RNA (1)...(19): siRNA sense strand
agaagaggaacaagaagaa

SEQ ID NO: 918367 - RNA, 19 nt, Homo sapiens
  misc_RNA (1)...(19): siRNA sense strand
gccugaacuugaugaagaa

SEQ ID NO: 918368 - RNA, 19 nt, Homo sapiens
  misc_RNA (1)...(19): siRNA sense strand
cuagagaacgaccugguuu

SEQ ID NO: 918369 - RNA, 19 nt, Homo sapiens
  misc_RNA (1)...(19): siRNA sense strand
ggaggagaagaacuuagaa

SEQ ID NO: 918370 - RNA, 19 nt, Homo sapiens
  misc_RNA (1)...(19): siRNA sense strand
uagaagaggaacaagaaga

SEQ ID NO: 918371 - RNA, 19 nt, Homo sapiens
  misc_RNA (1)...(19): siRNA sense strand
gcagaggagauauggaaca

SEQ ID NO: 918372 - RNA, 19 nt, Homo sapiens
  misc_RNA (1)...(19): siRNA sense strand
guggacaaccagaaagaaa

SEQ ID NO: 918373 - RNA, 19 nt, Homo sapiens
  misc_RNA (1)...(19): siRNA sense strand
guggaacuucgcaucaaua

SEQ ID NO: 918374 - RNA, 19 nt, Homo sapiens
  misc_RNA (1)...(19): siRNA sense strand
aggaauucuucaugaguuu

SEQ ID NO: 918375 - RNA, 19 nt, Homo sapiens
  misc_RNA (1)...(19): siRNA sense strand
gaggagccuuuggaagaau

SEQ ID NO: 918376 - RNA, 19 nt, Homo sapiens
  misc_RNA (1)...(19): siRNA sense strand
agacaaccaucuccugaac

SEQ ID NO: 918377 - RNA, 19 nt, Homo sapiens
  misc_RNA (1)...(19): siRNA sense strand
ccagaaagaaaguuuaugc

SEQ ID NO: 918378 - RNA, 19 nt, Homo sapiens
  misc_RNA (1)...(19): siRNA sense strand
ggaagaggaaccgggcaaa

SEQ ID NO: 918379 - RNA, 19 nt, Homo sapiens
  misc_RNA (1)...(19): siRNA sense strand
cuugagugauggaguaguu

SEQ ID NO: 918380 - RNA, 19 nt, Homo sapiens
  misc_RNA (1)...(19): siRNA sense strand
ggugaugaucgcagggaua

SEQ ID NO: 918381 - RNA, 19 nt, Homo sapiens
  misc_RNA (1)...(19): siRNA sense strand
ccaguucagagaaucuuaa

SEQ ID NO: 918382 - RNA, 19 nt, Homo sapiens
  misc_RNA (1)...(19): siRNA sense strand
cagaagaugaaguagaaga

SEQ ID NO: 918383 - RNA, 19 nt, Homo sapiens
  misc_RNA (1)...(19): siRNA sense strand
ugaaguguuuggugauucu

SEQ ID NO: 918384 - RNA, 19 nt, Homo sapiens
  misc_RNA (1)...(19): siRNA sense strand
gagcuaaaggaauucuuca

SEQ ID NO: 918385 - RNA, 19 nt, Homo sapiens
  misc_RNA (1)...(19): siRNA sense strand
gaguagaugcuaguggaaa

SEQ ID NO: 918386 - RNA, 19 nt, Homo sapiens
  misc_RNA (1)...(19): siRNA sense strand
gaaaucaucuagcaguaaa

SEQ ID NO: 918387 - RNA, 19 nt, Homo sapiens
  misc_RNA (1)...(19): siRNA sense strand
caaguggucuguugauaua

SEQ ID NO: 918388 - RNA, 19 nt, Homo sapiens
  misc_RNA (1)...(19): siRNA sense strand
gacaagugcuguuugauaa

SEQ ID NO: 918389 - RNA, 19 nt, Homo sapiens
  misc_RNA (1)...(19): siRNA sense strand
gcucgaauaucagcaauua

SEQ ID NO: 918390 - RNA, 19 nt, Homo sapiens
  misc_RNA (1)...(19): siRNA sense strand
ggacaagugcuguuugaua

SEQ ID NO: 918391 - RNA, 19 nt, Homo sapiens
  misc_RNA (1)...(19): siRNA sense strand
gaauauaccugugauguag

SEQ ID NO: 918392 - RNA, 19 nt, Homo sapiens
  misc_RNA (1)...(19): siRNA sense strand
gaguaaagcuagaaauuuc

SEQ ID NO: 918393 - RNA, 19 nt, Homo sapiens
  misc_RNA (1)...(19): siRNA sense strand
gaaaguauguguugagcau

SEQ ID NO: 918394 - RNA, 19 nt, Homo sapiens
  misc_RNA (1)...(19): siRNA sense strand
gcaauuagaagacgauaaa

SEQ ID NO: 918395 - RNA, 19 nt, Homo sapiens
  misc_RNA (1)...(19): siRNA sense strand
cuaaagaacuggaagacaa

SEQ ID NO: 918396 - RNA, 19 nt, Homo sapiens
  misc_RNA (1)...(19): siRNA sense strand
caaaacagcucgaauauca

SEQ ID NO: 918397 - RNA, 19 nt, Homo sapiens
  misc_RNA (1)...(19): siRNA sense strand
gggagaguuugaacaauuu

SEQ ID NO: 918398 - RNA, 19 nt, Homo sapiens
  misc_RNA (1)...(19): siRNA sense strand
ccaaaguagugguccauaa

SEQ ID NO: 918399 - RNA, 19 nt, Homo sapiens
  misc_RNA (1)...(19): siRNA sense strand
gaggacaagugcuguuuga

SEQ ID NO: 918400 - RNA, 19 nt, Homo sapiens
  misc_RNA (1)...(19): siRNA sense strand
ggaguaaagcuagaaauuu

SEQ ID NO: 918401 - RNA, 19 nt, Homo sapiens
  misc_RNA (1)...(19): siRNA sense strand
gaaagcaccauuggguuua

SEQ ID NO: 918402 - RNA, 19 nt, Homo sapiens
  misc_RNA (1)...(19): siRNA sense strand
ggauggcucugaaaucuuc

SEQ ID NO: 918403 - RNA, 19 nt, Homo sapiens
  misc_RNA (1)...(19): siRNA sense strand
agaagcaccucccaagaaa

SEQ ID NO: 918404 - RNA, 19 nt, Homo sapiens
  misc_RNA (1)...(19): siRNA sense strand
gcucauggauggcucugaa

SEQ ID NO: 918405 - RNA, 19 nt, Homo sapiens
  misc_RNA (1)...(19): siRNA sense strand
gcccaagguucuaaagauu

SEQ ID NO: 918406 - RNA, 19 nt, Homo sapiens
  misc_RNA (1)...(19): siRNA sense strand
gaaggaagugccaguaguu

SEQ ID NO: 918407 - RNA, 19 nt, Homo sapiens
  misc_RNA (1)...(19): siRNA sense strand
cggaacaacuuuuacauua

SEQ ID NO: 918408 - RNA, 19 nt, Homo sapiens
  misc_RNA (1)...(19): siRNA sense strand
cagaaaucaucuagcagua

SEQ ID NO: 918409 - RNA, 19 nt, Homo sapiens
  misc_RNA (1)...(19): siRNA sense strand
caaaguagugguccauaaa

SEQ ID NO: 918410 - RNA, 19 nt, Homo sapiens
  misc_RNA (1)...(19): siRNA sense strand
ggaccacccuguucuccuu

SEQ ID NO: 918411 - RNA, 19 nt, Homo sapiens
  misc_RNA (1)...(19): siRNA sense strand
cugaagauaucaccaggua

SEQ ID NO: 918412 - RNA, 19 nt, Homo sapiens
  misc_RNA (1)...(19): siRNA sense strand
ggacccugcuaaggaaaua

SEQ ID NO: 918413 - RNA, 19 nt, Homo sapiens
  misc_RNA (1)...(19): siRNA sense strand
aagaugaccugaugaaaca

SEQ ID NO: 918414 - RNA, 19 nt, Homo sapiens
  misc_RNA (1)...(19): siRNA sense strand
gcaaguggucuguugauau

SEQ ID NO: 918415 - RNA, 19 nt, Homo sapiens
  misc_RNA (1)...(19): siRNA sense strand
aagcagagaugcauuucuu

SEQ ID NO: 918416 - RNA, 19 nt, Homo sapiens
  misc_RNA (1)...(19): siRNA sense strand
cgggagaguuugaacaauu

SEQ ID NO: 918417 - RNA, 19 nt, Homo sapiens
  misc_RNA (1)...(19): siRNA sense strand
uuagaaaccucaacagaca

SEQ ID NO: 918418 - RNA, 19 nt, Homo sapiens
  misc_RNA (1)...(19): siRNA sense strand
gaucagaauauaccuguga

SEQ ID NO: 918419 - RNA, 19 nt, Homo sapiens
  misc_RNA (1)...(19): siRNA sense strand
ucucaaagcuggguucaga

SEQ ID NO: 918420 - RNA, 19 nt, Homo sapiens
  misc_RNA (1)...(19): siRNA sense strand
uaaggagaaugacugcaaa

SEQ ID NO: 918421 - RNA, 19 nt, Homo sapiens
  misc_RNA (1)...(19): siRNA sense strand
ccaagaaauuccuaaccuu

SEQ ID NO: 918422 - RNA, 19 nt, Homo sapiens
  misc_RNA (1)...(19): siRNA sense strand
gcgauuacauuagugaguu

SEQ ID NO: 918423 - RNA, 19 nt, Homo sapiens
  misc_RNA (1)...(19): siRNA sense strand
ccaaaaccaucacauauga

SEQ ID NO: 918424 - RNA, 19 nt, Homo sapiens
  misc_RNA (1)...(19): siRNA sense strand
gaacuggaagacaaaguga

SEQ ID NO: 918425 - RNA, 19 nt, Homo sapiens
  misc_RNA (1)...(19): siRNA sense strand
gcucauccagcaaacguua

SEQ ID NO: 918426 - RNA, 19 nt, Homo sapiens
  misc_RNA (1)...(19): siRNA sense strand
gcgccucccuagacaauga

SEQ ID NO: 918427 - RNA, 19 nt, Homo sapiens
  misc_RNA (1)...(19): siRNA sense strand
cagcuuggauggagagguu

SEQ ID NO: 918428 - RNA, 19 nt, Homo sapiens
  misc_RNA (1)...(19): siRNA sense strand
ugaacuugcuagagaaaga

SEQ ID NO: 918429 - RNA, 19 nt, Homo sapiens
  misc_RNA (1)...(19): siRNA sense strand
cagaagcaccucccaagaa

SEQ ID NO: 918430 - RNA, 19 nt, Homo sapiens
  misc_RNA (1)...(19): siRNA sense strand
ccaagguucuaaagauuuc

SEQ ID NO: 918431 - RNA, 19 nt, Homo sapiens
  misc_RNA (1)...(19): siRNA sense strand
agagaugcauuucuuggaa

SEQ ID NO: 918432 - RNA, 19 nt, Homo sapiens
  misc_RNA (1)...(19): siRNA sense strand
gggcuuacguaucgagaug

SEQ ID NO: 918433 - RNA, 19 nt, Homo sapiens
  misc_RNA (1)...(19): siRNA sense strand
gaagauaucaccagguacu

SEQ ID NO: 918434 - RNA, 19 nt, Homo sapiens
  misc_RNA (1)...(19): siRNA sense strand
gaugauggauaccucucuu

SEQ ID NO: 918435 - RNA, 19 nt, Homo sapiens
  misc_RNA (1)...(19): siRNA sense strand
ggagguguaaggagaauga

SEQ ID NO: 918436 - RNA, 19 nt, Homo sapiens
  misc_RNA (1)...(19): siRNA sense strand
ugaaagcaccauuggguuu

SEQ ID NO: 918437 - RNA, 19 nt, Homo sapiens
  misc_RNA (1)...(19): siRNA sense strand
gcaccaaaccacacuaaag

SEQ ID NO: 918438 - RNA, 19 nt, Homo sapiens
  misc_RNA (1)...(19): siRNA sense strand
gacgauaaacuuucucaga

SEQ ID NO: 918439 - RNA, 19 nt, Homo sapiens
  misc_RNA (1)...(19): siRNA sense strand
ggcccaagguucuaaagau

SEQ ID NO: 918440 - RNA, 19 nt, Homo sapiens
  misc_RNA (1)...(19): siRNA sense strand
gcaaacugccagguuauga

SEQ ID NO: 918441 - RNA, 19 nt, Homo sapiens
  misc_RNA (1)...(19): siRNA sense strand
guaaggagaaugacugcaa

SEQ ID NO: 918442 - RNA, 19 nt, Homo sapiens
  misc_RNA (1)...(19): siRNA sense strand
caccaaaccacacuaaaga

SEQ ID NO: 918443 - RNA, 19 nt, Homo sapiens
  misc_RNA (1)...(19): siRNA sense strand
ucucagaaaucaucuagca

SEQ ID NO: 918444 - RNA, 19 nt, Homo sapiens
  misc_RNA (1)...(19): siRNA sense strand
acacugccguaacgaauga

SEQ ID NO: 918445 - RNA, 19 nt, Homo sapiens
  misc_RNA (1)...(19): siRNA sense strand
gaagaagucacgcccaucu

SEQ ID NO: 918446 - RNA, 19 nt, Homo sapiens
  misc_RNA (1)...(19): siRNA sense strand
gcccagcaccuuacuuuga

SEQ ID NO: 918447 - RNA, 19 nt, Homo sapiens
  misc_RNA (1)...(19): siRNA sense strand
gguuccaaguuucguuaua

SEQ ID NO: 918448 - RNA, 19 nt, Homo sapiens
  misc_RNA (1)...(19): siRNA sense strand
uaaagaacuggaagacaaa

SEQ ID NO: 918449 - RNA, 19 nt, Homo sapiens
  misc_RNA (1)...(19): siRNA sense strand
acugcaaacugccagguua

SEQ ID NO: 918450 - RNA, 19 nt, Homo sapiens
  misc_RNA (1)...(19): siRNA sense strand
gaucacaccagaagaugga

SEQ ID NO: 918451 - RNA, 19 nt, Homo sapiens
  misc_RNA (1)...(19): siRNA sense strand
cgaaggaagugccaguagu

SEQ ID NO: 918452 - RNA, 19 nt, Homo sapiens
  misc_RNA (1)...(19): siRNA sense strand
gugcagccauccacauuuc

SEQ ID NO: 918453 - RNA, 19 nt, Homo sapiens
  misc_RNA (1)...(19): siRNA sense strand
cgcuaaagcuguccuggaa

SEQ ID NO: 918454 - RNA, 19 nt, Homo sapiens
  misc_RNA (1)...(19): siRNA sense strand
gggaggaggucgcuaaagc

SEQ ID NO: 918455 - RNA, 19 nt, Homo sapiens
  misc_RNA (1)...(19): siRNA sense strand
gcuuggcacuuuucauuua

SEQ ID NO: 918456 - RNA, 19 nt, Homo sapiens
  misc_RNA (1)...(19): siRNA sense strand
gaucagacucggaauccaa

SEQ ID NO: 918457 - RNA, 19 nt, Homo sapiens
  misc_RNA (1)...(19): siRNA sense strand
cuaaagcuguccuggaaca

SEQ ID NO: 918458 - RNA, 19 nt, Homo sapiens
  misc_RNA (1)...(19): siRNA sense strand
guuaggaguuugugcaagu

SEQ ID NO: 918459 - RNA, 19 nt, Homo sapiens
  misc_RNA (1)...(19): siRNA sense strand
caagugcuguuugauaaag

SEQ ID NO: 918460 - RNA, 19 nt, Homo sapiens
  misc_RNA (1)...(19): siRNA sense strand
gagugacaguucagaggaa

SEQ ID NO: 918461 - RNA, 19 nt, Homo sapiens
  misc_RNA (1)...(19): siRNA sense strand
gcagcucccugagucauuc

SEQ ID NO: 918462 - RNA, 19 nt, Homo sapiens
  misc_RNA (1)...(19): siRNA sense strand
cacuugaacuugcuagaga

SEQ ID NO: 918463 - RNA, 19 nt, Homo sapiens
  misc_RNA (1)...(19): siRNA sense strand
gagccaggcgugcugauga

SEQ ID NO: 918464 - RNA, 19 nt, Homo sapiens
  misc_RNA (1)...(19): siRNA sense strand
cacaagagccacagaggaa

SEQ ID NO: 918465 - RNA, 19 nt, Homo sapiens
  misc_RNA (1)...(19): siRNA sense strand
ugugggagcgauuacauua

SEQ ID NO: 918466 - RNA, 19 nt, Homo sapiens
  misc_RNA (1)...(19): siRNA sense strand
guuggacccugcuaaggaa

SEQ ID NO: 918467 - RNA, 19 nt, Homo sapiens
  misc_RNA (1)...(19): siRNA sense strand
cagaagcagagaugcauuu

SEQ ID NO: 918468 - RNA, 19 nt, Homo sapiens
  misc_RNA (1)...(19): siRNA sense strand
caagaugaccugaugaaac

SEQ ID NO: 918469 - RNA, 19 nt, Homo sapiens
  misc_RNA (1)...(19): siRNA sense strand
agaauauaccugugaugua

SEQ ID NO: 918470 - RNA, 19 nt, Homo sapiens
  misc_RNA (1)...(19): siRNA sense strand
ggagaaugacugcaaacug

SEQ ID NO: 918471 - RNA, 19 nt, Homo sapiens
  misc_RNA (1)...(19): siRNA sense strand
gaaacgcuccagaggacaa

SEQ ID NO: 918472 - RNA, 19 nt, Homo sapiens
  misc_RNA (1)...(19): siRNA sense strand
ggacgaggaagaggacaaa

SEQ ID NO: 918473 - RNA, 19 nt, Homo sapiens
  misc_RNA (1)...(19): siRNA sense strand
ggguagaaauuauguuagg

SEQ ID NO: 918474 - RNA, 19 nt, Homo sapiens
  misc_RNA (1)...(19): siRNA sense strand
ucgaauaucagcaauuaga

SEQ ID NO: 918475 - RNA, 19 nt, Homo sapiens
  misc_RNA (1)...(19): siRNA sense strand
caauuaaagaggccaaaga

SEQ ID NO: 918476 - RNA, 19 nt, Homo sapiens
  misc_RNA (1)...(19): siRNA sense strand
gugcaccaccugccgcuua

SEQ ID NO: 918477 - RNA, 19 nt, Homo sapiens
  misc_RNA (1)...(19): siRNA sense strand
ccuccuagaugaugaugga

SEQ ID NO: 918478 - RNA, 19 nt, Homo sapiens
  misc_RNA (1)...(19): siRNA sense strand
caccugggcuuggcacuga

SEQ ID NO: 918479 - RNA, 19 nt, Homo sapiens
  misc_RNA (1)...(19): siRNA sense strand
gccaagcguuuauggaaag

SEQ ID NO: 918480 - RNA, 19 nt, Homo sapiens
  misc_RNA (1)...(19): siRNA sense strand
aaaccacacuaaagaacug

SEQ ID NO: 918481 - RNA, 19 nt, Homo sapiens
  misc_RNA (1)...(19): siRNA sense strand
gagacuaugacccagauga

SEQ ID NO: 918482 - RNA, 19 nt, Homo sapiens
  misc_RNA (1)...(19): siRNA sense strand
gcuuggcacugacucaugu

SEQ ID NO: 918483 - RNA, 19 nt, Homo sapiens
  misc_RNA (1)...(19): siRNA sense strand
ucaaagcuggguucagaaa

SEQ ID NO: 918484 - RNA, 19 nt, Homo sapiens
  misc_RNA (1)...(19): siRNA sense strand
gacaaugacccgagugaca

SEQ ID NO: 918485 - RNA, 19 nt, Homo sapiens
  misc_RNA (1)...(19): siRNA sense strand
cccagagcuugcagcauua

SEQ ID NO: 918486 - RNA, 19 nt, Homo sapiens
  misc_RNA (1)...(19): siRNA sense strand
ccagauggcucuauuagua

SEQ ID NO: 918487 - RNA, 19 nt, Homo sapiens
  misc_RNA (1)...(19): siRNA sense strand
acgaagagcucaagaauaa

SEQ ID NO: 918488 - RNA, 19 nt, Homo sapiens
  misc_RNA (1)...(19): siRNA sense strand
gaaauaagcaaacucacua

SEQ ID NO: 918489 - RNA, 19 nt, Homo sapiens
  misc_RNA (1)...(19): siRNA sense strand
uaagcaaacucacuaauga

SEQ ID NO: 918490 - RNA, 19 nt, Homo sapiens
  misc_RNA (1)...(19): siRNA sense strand
gaaagucgaaagaagauua

SEQ ID NO: 918491 - RNA, 19 nt, Homo sapiens
  misc_RNA (1)...(19): siRNA sense strand
aaacauaccucuuccuuca

SEQ ID NO: 918492 - RNA, 19 nt, Homo sapiens
  misc_RNA (1)...(19): siRNA sense strand
gaagagaaauuuuggauga

SEQ ID NO: 918493 - RNA, 19 nt, Homo sapiens
  misc_RNA (1)...(19): siRNA sense strand
acacagagccauuccuuua

SEQ ID NO: 918494 - RNA, 19 nt, Homo sapiens
  misc_RNA (1)...(19): siRNA sense strand
ggaggacgguuacgaucua

SEQ ID NO: 918495 - RNA, 19 nt, Homo sapiens
  misc_RNA (1)...(19): siRNA sense strand
ggacagggaguuuaagaaa

SEQ ID NO: 918496 - RNA, 19 nt, Homo sapiens
  misc_RNA (1)...(19): siRNA sense strand
gaacugaacauaaccaaca

SEQ ID NO: 918497 - RNA, 19 nt, Homo sapiens
  misc_RNA (1)...(19): siRNA sense strand
gagcacaaguaaaucugua

SEQ ID NO: 918498 - RNA, 19 nt, Homo sapiens
  misc_RNA (1)...(19): siRNA sense strand
cgacuuggguuugaucuuu

SEQ ID NO: 918499 - RNA, 19 nt, Homo sapiens
  misc_RNA (1)...(19): siRNA sense strand
ugaauaagagcacaaguaa

SEQ ID NO: 918500 - RNA, 19 nt, Homo sapiens
  misc_RNA (1)...(19): siRNA sense strand
gcacucgacuuggguuuga

SEQ ID NO: 918501 - RNA, 19 nt, Homo sapiens
  misc_RNA (1)...(19): siRNA sense strand
ggcauaggcuuuacuguca

SEQ ID NO: 918502 - RNA, 19 nt, Homo sapiens
  misc_RNA (1)...(19): siRNA sense strand
gaacacagaagcaguacau

SEQ ID NO: 918503 - RNA, 19 nt, Homo sapiens
  misc_RNA (1)...(19): siRNA sense strand
gaugaaagucgaaagaaga

SEQ ID NO: 918504 - RNA, 19 nt, Homo sapiens
  misc_RNA (1)...(19): siRNA sense strand
acagggaguuuaagaaaga

SEQ ID NO: 918505 - RNA, 19 nt, Homo sapiens
  misc_RNA (1)...(19): siRNA sense strand
gcaaucaucccuuccuguu

SEQ ID NO: 918506 - RNA, 19 nt, Homo sapiens
  misc_RNA (1)...(19): siRNA sense strand
gaauaaaggcugaagaaaa

SEQ ID NO: 918507 - RNA, 19 nt, Homo sapiens
  misc_RNA (1)...(19): siRNA sense strand
gaagagcucaagaauaaag

SEQ ID NO: 918508 - RNA, 19 nt, Homo sapiens
  misc_RNA (1)...(19): siRNA sense strand
guacagaugaugacacaga

SEQ ID NO: 918509 - RNA, 19 nt, Homo sapiens
  misc_RNA (1)...(19): siRNA sense strand
gacgaagagcucaagaaua

SEQ ID NO: 918510 - RNA, 19 nt, Homo sapiens
  misc_RNA (1)...(19): siRNA sense strand
ucaaagagcugaagaaaac

SEQ ID NO: 918511 - RNA, 19 nt, Homo sapiens
  misc_RNA (1)...(19): siRNA sense strand
uggugaacaugguuuauuu

SEQ ID NO: 918512 - RNA, 19 nt, Homo sapiens
  misc_RNA (1)...(19): siRNA sense strand
guacaucaacaauuccaaa

SEQ ID NO: 918513 - RNA, 19 nt, Homo sapiens
  misc_RNA (1)...(19): siRNA sense strand
gaauaagagcacaaguaaa

SEQ ID NO: 918514 - RNA, 19 nt, Homo sapiens
  misc_RNA (1)...(19): siRNA sense strand
aauaaguccugagaaauug

SEQ ID NO: 918515 - RNA, 19 nt, Homo sapiens
  misc_RNA (1)...(19): siRNA sense strand
acauaccucuuccuucaaa

SEQ ID NO: 918516 - RNA, 19 nt, Homo sapiens
  misc_RNA (1)...(19): siRNA sense strand
gcaaugggacagggaguuu

SEQ ID NO: 918517 - RNA, 19 nt, Homo sapiens
  misc_RNA (1)...(19): siRNA sense strand
ugagaacacagaagcagua

SEQ ID NO: 918518 - RNA, 19 nt, Homo sapiens
  misc_RNA (1)...(19): siRNA sense strand
gaugggcgaugccuucagu

SEQ ID NO: 918519 - RNA, 19 nt, Homo sapiens
  misc_RNA (1)...(19): siRNA sense strand
gaagaaagaaaggugaauc

SEQ ID NO: 918520 - RNA, 19 nt, Homo sapiens
  misc_RNA (1)...(19): siRNA sense strand
gacagggaguuuaagaaag

SEQ ID NO: 918521 - RNA, 19 nt, Homo sapiens
  misc_RNA (1)...(19): siRNA sense strand
caacagcauccucuucuuc

SEQ ID NO: 918522 - RNA, 19 nt, Homo sapiens
  misc_RNA (1)...(19): siRNA sense strand
gaaaggugaaucugcacuu

SEQ ID NO: 918523 - RNA, 19 nt, Homo sapiens
  misc_RNA (1)...(19): siRNA sense strand
agaaguuccugcacaguuc

SEQ ID NO: 918524 - RNA, 19 nt, Homo sapiens
  misc_RNA (1)...(19): siRNA sense strand
cgaugaaagucgaaagaag

SEQ ID NO: 918525 - RNA, 19 nt, Homo sapiens
  misc_RNA (1)...(19): siRNA sense strand
gagacgaagagcucaagaa

SEQ ID NO: 918526 - RNA, 19 nt, Homo sapiens
  misc_RNA (1)...(19): siRNA sense strand
guucccagauggcucuauu

SEQ ID NO: 918527 - RNA, 19 nt, Homo sapiens
  misc_RNA (1)...(19): siRNA sense strand
aagaauaaaggcugaagaa

SEQ ID NO: 918528 - RNA, 19 nt, Homo sapiens
  misc_RNA (1)...(19): siRNA sense strand
cagaagcaguacaucaaca

SEQ ID NO: 918529 - RNA, 19 nt, Homo sapiens
  misc_RNA (1)...(19): siRNA sense strand
aaaggugaaucugcacuug

SEQ ID NO: 918530 - RNA, 19 nt, Homo sapiens
  misc_RNA (1)...(19): siRNA sense strand
gucgaaagaagauuaauuc

SEQ ID NO: 918531 - RNA, 19 nt, Homo sapiens
  misc_RNA (1)...(19): siRNA sense strand
ccaacagcauccucuucuu

SEQ ID NO: 918532 - RNA, 19 nt, Homo sapiens
  misc_RNA (1)...(19): siRNA sense strand
gcauauggaagaaagaaag

SEQ ID NO: 918533 - RNA, 19 nt, Homo sapiens
  misc_RNA (1)...(19): siRNA sense strand
uucuagggauuccauauaa

SEQ ID NO: 918534 - RNA, 19 nt, Homo sapiens
  misc_RNA (1)...(19): siRNA sense strand
agcaguacaucaacaauuc

SEQ ID NO: 918535 - RNA, 19 nt, Homo sapiens
  misc_RNA (1)...(19): siRNA sense strand
ucuagggauuccauauaaa

SEQ ID NO: 918536 - RNA, 19 nt, Homo sapiens
  misc_RNA (1)...(19): siRNA sense strand
guaaaugcagccgaugaaa

SEQ ID NO: 918537 - RNA, 19 nt, Homo sapiens
  misc_RNA (1)...(19): siRNA sense strand
gugggcaucuugacugcaa

SEQ ID NO: 918538 - RNA, 19 nt, Homo sapiens
  misc_RNA (1)...(19): siRNA sense strand
aaucaucccuuccuguucu

SEQ ID NO: 918539 - RNA, 19 nt, Homo sapiens
  misc_RNA (1)...(19): siRNA sense strand
ucgauggccuggagaagau

SEQ ID NO: 918540 - RNA, 19 nt, Homo sapiens
  misc_RNA (1)...(19): siRNA sense strand
aauguucacugcaaucauc

SEQ ID NO: 918541 - RNA, 19 nt, Homo sapiens
  misc_RNA (1)...(19): siRNA sense strand
cuggagaagauaauagaua

SEQ ID NO: 918542 - RNA, 19 nt, Homo sapiens
  misc_RNA (1)...(19): siRNA sense strand
acacagaagcaguacauca

SEQ ID NO: 918543 - RNA, 19 nt, Homo sapiens
  misc_RNA (1)...(19): siRNA sense strand
agacgaagagcucaagaau

SEQ ID NO: 918544 - RNA, 19 nt, Homo sapiens
  misc_RNA (1)...(19): siRNA sense strand
cagaaguuccugcacaguu

SEQ ID NO: 918545 - RNA, 19 nt, Homo sapiens
  misc_RNA (1)...(19): siRNA sense strand
gaagcaguacaucaacaau

SEQ ID NO: 918546 - RNA, 19 nt, Homo sapiens
  misc_RNA (1)...(19): siRNA sense strand
cacagaagcaguacaucaa

SEQ ID NO: 918547 - RNA, 19 nt, Homo sapiens
  misc_RNA (1)...(19): siRNA sense strand
aaaugcagccgaugaaagu

SEQ ID NO: 918548 - RNA, 19 nt, Homo sapiens
  misc_RNA (1)...(19): siRNA sense strand
caacgaccuaagcauguuu

SEQ ID NO: 918549 - RNA, 19 nt, Homo sapiens
  misc_RNA (1)...(19): siRNA sense strand
uaagagcacaaguaaaucu

SEQ ID NO: 918550 - RNA, 19 nt, Homo sapiens
  misc_RNA (1)...(19): siRNA sense strand
ucuggaaccuguugauuuu

SEQ ID NO: 918551 - RNA, 19 nt, Homo sapiens
  misc_RNA (1)...(19): siRNA sense strand
acaacgaccuaagcauguu

SEQ ID NO: 918552 - RNA, 19 nt, Homo sapiens
  misc_RNA (1)...(19): siRNA sense strand
ugacacagagccauuccuu

SEQ ID NO: 918553 - RNA, 19 nt, Homo sapiens
  misc_RNA (1)...(19): siRNA sense strand
gcacaaguaaaucuguaca

SEQ ID NO: 918554 - RNA, 19 nt, Homo sapiens
  misc_RNA (1)...(19): siRNA sense strand
caaugggacagggaguuua

SEQ ID NO: 918555 - RNA, 19 nt, Homo sapiens
  misc_RNA (1)...(19): siRNA sense strand
ugacugaaauaagcaaacu

SEQ ID NO: 918556 - RNA, 19 nt, Homo sapiens
  misc_RNA (1)...(19): siRNA sense strand
cagauuuucuucuccuuaa

SEQ ID NO: 918557 - RNA, 19 nt, Homo sapiens
  misc_RNA (1)...(19): siRNA sense strand
ggaagaaagaaaggugaau

SEQ ID NO: 918558 - RNA, 19 nt, Homo sapiens
  misc_RNA (1)...(19): siRNA sense strand
gauaaaauaaguccugaga

SEQ ID NO: 918559 - RNA, 19 nt, Homo sapiens
  misc_RNA (1)...(19): siRNA sense strand
caagaauaaaggcugaaga

SEQ ID NO: 918560 - RNA, 19 nt, Homo sapiens
  misc_RNA (1)...(19): siRNA sense strand
gggacagggaguuuaagaa

SEQ ID NO: 918561 - RNA, 19 nt, Homo sapiens
  misc_RNA (1)...(19): siRNA sense strand
ccaagcuggugcuggugaa

SEQ ID NO: 918562 - RNA, 19 nt, Homo sapiens
  misc_RNA (1)...(19): siRNA sense strand
agccaccgcuucccaguug

SEQ ID NO: 918563 - RNA, 19 nt, Homo sapiens
  misc_RNA (1)...(19): siRNA sense strand
uaaaugcagccgaugaaag

SEQ ID NO: 918564 - RNA, 19 nt, Homo sapiens
  misc_RNA (1)...(19): siRNA sense strand
augaauaagagcacaagua

SEQ ID NO: 918565 - RNA, 19 nt, Homo sapiens
  misc_RNA (1)...(19): siRNA sense strand
gggcauauggaagaaagaa

SEQ ID NO: 918566 - RNA, 19 nt, Homo sapiens
  misc_RNA (1)...(19): siRNA sense strand
caucaacaauuccaaaagu

SEQ ID NO: 918567 - RNA, 19 nt, Homo sapiens
  misc_RNA (1)...(19): siRNA sense strand
gguuguacgcccagaaguu

SEQ ID NO: 918568 - RNA, 19 nt, Homo sapiens
  misc_RNA (1)...(19): siRNA sense strand
gacacagagccauuccuuu

SEQ ID NO: 918569 - RNA, 19 nt, Homo sapiens
  misc_RNA (1)...(19): siRNA sense strand
ugaaauaagcaaacucacu

SEQ ID NO: 918570 - RNA, 19 nt, Homo sapiens
  misc_RNA (1)...(19): siRNA sense strand
cagggcauauggaagaaag

SEQ ID NO: 918571 - RNA, 19 nt, Homo sapiens
  misc_RNA (1)...(19): siRNA sense strand
agaauaaaggcugaagaaa

SEQ ID NO: 918572 - RNA, 19 nt, Homo sapiens
  misc_RNA (1)...(19): siRNA sense strand
auaagcaaacucacuaaug

SEQ ID NO: 918573 - RNA, 19 nt, Homo sapiens
  misc_RNA (1)...(19): siRNA sense strand
aagcaguacaucaacaauu

SEQ ID NO: 918574 - RNA, 19 nt, Homo sapiens
  misc_RNA (1)...(19): siRNA sense strand
ggacgguuacgaucuagag

SEQ ID NO: 918575 - RNA, 19 nt, Homo sapiens
  misc_RNA (1)...(19): siRNA sense strand
ccugagaaauugguagagu

SEQ ID NO: 918576 - RNA, 19 nt, Homo sapiens
  misc_RNA (1)...(19): siRNA sense strand
ggacuugcaggccaaaauu

SEQ ID NO: 918577 - RNA, 19 nt, Homo sapiens
  misc_RNA (1)...(19): siRNA sense strand
ccaguuggaggagguguuu

SEQ ID NO: 918578 - RNA, 19 nt, Homo sapiens
  misc_RNA (1)...(19): siRNA sense strand
ggaaccuguugauuuugua

SEQ ID NO: 918579 - RNA, 19 nt, Homo sapiens
  misc_RNA (1)...(19): siRNA sense strand
gcagauuuucuucuccuua

SEQ ID NO: 918580 - RNA, 19 nt, Homo sapiens
  misc_RNA (1)...(19): siRNA sense strand
gccgucagcacucgacuug

SEQ ID NO: 918581 - RNA, 19 nt, Homo sapiens
  misc_RNA (1)...(19): siRNA sense strand
ggccaaaauucuagggauu

SEQ ID NO: 918582 - RNA, 19 nt, Homo sapiens
  misc_RNA (1)...(19): siRNA sense strand
aaacaaaugauggcaacau

SEQ ID NO: 918583 - RNA, 19 nt, Homo sapiens
  misc_RNA (1)...(19): siRNA sense strand
aaugggacagggaguuuaa

SEQ ID NO: 918584 - RNA, 19 nt, Homo sapiens
  misc_RNA (1)...(19): siRNA sense strand
auuaauuccuggguugaaa

SEQ ID NO: 918585 - RNA, 19 nt, Homo sapiens
  misc_RNA (1)...(19): siRNA sense strand
ccucuucuucggcagauuu

SEQ ID NO: 918586 - RNA, 19 nt, Homo sapiens
  misc_RNA (1)...(19): siRNA sense strand
gcagugcuuuggcucauuu

SEQ ID NO: 918587 - RNA, 19 nt, Homo sapiens
  misc_RNA (1)...(19): siRNA sense strand
gguuagcgcuuauuucuuc

SEQ ID NO: 918588 - RNA, 19 nt, Homo sapiens
  misc_RNA (1)...(19): siRNA sense strand
agucagagcucucccacua

SEQ ID NO: 918589 - RNA, 19 nt, Homo sapiens
  misc_RNA (1)...(19): siRNA sense strand
ccacuacaccuucuacuuu

SEQ ID NO: 918590 - RNA, 19 nt, Homo sapiens
  misc_RNA (1)...(19): siRNA sense strand
caucagaucuuccaugcau

SEQ ID NO: 918591 - RNA, 19 nt, Homo sapiens
  misc_RNA (1)...(19): siRNA sense strand
gcauuucuguccaucugua

SEQ ID NO: 918592 - RNA, 19 nt, Homo sapiens
  misc_RNA (1)...(19): siRNA sense strand
gcgugagcguuuaccaaua

SEQ ID NO: 918593 - RNA, 19 nt, Homo sapiens
  misc_RNA (1)...(19): siRNA sense strand
caacgucuggacccauuua

SEQ ID NO: 918594 - RNA, 19 nt, Homo sapiens
  misc_RNA (1)...(19): siRNA sense strand
gaucuuccaugcauuucug

SEQ ID NO: 918595 - RNA, 19 nt, Homo sapiens
  misc_RNA (1)...(19): siRNA sense strand
cgugagcguuuaccaauau

SEQ ID NO: 918596 - RNA, 19 nt, Homo sapiens
  misc_RNA (1)...(19): siRNA sense strand
uaugaccgguucuggcuuu

SEQ ID NO: 918597 - RNA, 19 nt, Homo sapiens
  misc_RNA (1)...(19): siRNA sense strand
ucagagcucucccacuaca

SEQ ID NO: 918598 - RNA, 19 nt, Homo sapiens
  misc_RNA (1)...(19): siRNA sense strand
cacuacaccuucuacuuug

SEQ ID NO: 918599 - RNA, 19 nt, Homo sapiens
  misc_RNA (1)...(19): siRNA sense strand
ucagaucuuccaugcauuu

SEQ ID NO: 918600 - RNA, 19 nt, Homo sapiens
  misc_RNA (1)...(19): siRNA sense strand
gcuaugccaaauaucguua

SEQ ID NO: 918601 - RNA, 19 nt, Homo sapiens
  misc_RNA (1)...(19): siRNA sense strand
ugaggaagaucugucaagu

SEQ ID NO: 918602 - RNA, 19 nt, Homo sapiens
  misc_RNA (1)...(19): siRNA sense strand
gucaacgucuggacccauu

SEQ ID NO: 918603 - RNA, 19 nt, Homo sapiens
  misc_RNA (1)...(19): siRNA sense strand
agacugaccaagaaagauu

SEQ ID NO: 918604 - RNA, 19 nt, Homo sapiens
  misc_RNA (1)...(19): siRNA sense strand
cagcaggucuggcuuuuau

SEQ ID NO: 918605 - RNA, 19 nt, Homo sapiens
  misc_RNA (1)...(19): siRNA sense strand
ugccuucuguggcugguua

SEQ ID NO: 918606 - RNA, 19 nt, Homo sapiens
  misc_RNA (1)...(19): siRNA sense strand
gcuguugcuaugccaaaua

SEQ ID NO: 918607 - RNA, 19 nt, Homo sapiens
  misc_RNA (1)...(19): siRNA sense strand
gaggaagaucugucaagug

SEQ ID NO: 918608 - RNA, 19 nt, Homo sapiens
  misc_RNA (1)...(19): siRNA sense strand
acaacgagguggucaacgu

SEQ ID NO: 918609 - RNA, 19 nt, Homo sapiens
  misc_RNA (1)...(19): siRNA sense strand
uauguuggcgugagcguuu

SEQ ID NO: 918610 - RNA, 19 nt, Homo sapiens
  misc_RNA (1)...(19): siRNA sense strand
gaguggcgcuacuacuucu

SEQ ID NO: 918611 - RNA, 19 nt, Homo sapiens
  misc_RNA (1)...(19): siRNA sense strand
ccagacugaccaagaaaga

SEQ ID NO: 918612 - RNA, 19 nt, Homo sapiens
  misc_RNA (1)...(19): siRNA sense strand
gccuugcacugucccagaa

SEQ ID NO: 918613 - RNA, 19 nt, Homo sapiens
  misc_RNA (1)...(19): siRNA sense strand
aggccagacugaccaagaa

SEQ ID NO: 918614 - RNA, 19 nt, Homo sapiens
  misc_RNA (1)...(19): siRNA sense strand
guaccacacccuccagauc

SEQ ID NO: 918615 - RNA, 19 nt, Homo sapiens
  misc_RNA (1)...(19): siRNA sense strand
ugcuuuggcucauuucuuc

SEQ ID NO: 918616 - RNA, 19 nt, Homo sapiens
  misc_RNA (1)...(19): siRNA sense strand
ggcgugagcguuuaccaau

SEQ ID NO: 918617 - RNA, 19 nt, Homo sapiens
  misc_RNA (1)...(19): siRNA sense strand
gcacgaguggcgcuacuac

SEQ ID NO: 918618 - RNA, 19 nt, Homo sapiens
  misc_RNA (1)...(19): siRNA sense strand
ccaauauggcagugcuuug

SEQ ID NO: 918619 - RNA, 19 nt, Homo sapiens
  misc_RNA (1)...(19): siRNA sense strand
gccaugggcaucagaucuu

SEQ ID NO: 918620 - RNA, 19 nt, Homo sapiens
  misc_RNA (1)...(19): siRNA sense strand
cuguugcuaugccaaauau

SEQ ID NO: 918621 - RNA, 19 nt, Homo sapiens
  misc_RNA (1)...(19): siRNA sense strand
ggcagugcuuuggcucauu

SEQ ID NO: 918622 - RNA, 19 nt, Homo sapiens
  misc_RNA (1)...(19): siRNA sense strand
cuacuucuucagccucuuu

SEQ ID NO: 918623 - RNA, 19 nt, Homo sapiens
  misc_RNA (1)...(19): siRNA sense strand
gauccucuucuuccugguu

SEQ ID NO: 918624 - RNA, 19 nt, Homo sapiens
  misc_RNA (1)...(19): siRNA sense strand
cgaguggcgcuacuacuuc

SEQ ID NO: 918625 - RNA, 19 nt, Homo sapiens
  misc_RNA (1)...(19): siRNA sense strand
ugugcuggcuguugcuaug

SEQ ID NO: 918626 - RNA, 19 nt, Homo sapiens
  misc_RNA (1)...(19): siRNA sense strand
caauauggcagugcuuugg

SEQ ID NO: 918627 - RNA, 19 nt, Homo sapiens
  misc_RNA (1)...(19): siRNA sense strand
cuuauccagucaugaggaa

SEQ ID NO: 918628 - RNA, 19 nt, Homo sapiens
  misc_RNA (1)...(19): siRNA sense strand
ccaugggcaucagaucuuc

SEQ ID NO: 918629 - RNA, 19 nt, Homo sapiens
  misc_RNA (1)...(19): siRNA sense strand
cgucuggacccauuuacug

SEQ ID NO: 918630 - RNA, 19 nt, Homo sapiens
  misc_RNA (1)...(19): siRNA sense strand
ccacugagcucaucuguua

SEQ ID NO: 918631 - RNA, 19 nt, Homo sapiens
  misc_RNA (1)...(19): siRNA sense strand
gaagagagcuagaggcaua

SEQ ID NO: 918632 - RNA, 19 nt, Homo sapiens
  misc_RNA (1)...(19): siRNA sense strand
ggaggaagaugaagaagua

SEQ ID NO: 918633 - RNA, 19 nt, Homo sapiens
  misc_RNA (1)...(19): siRNA sense strand
caagacaacugguuucuaa

SEQ ID NO: 918634 - RNA, 19 nt, Homo sapiens
  misc_RNA (1)...(19): siRNA sense strand
gaagcaagauacagagaua

SEQ ID NO: 918635 - RNA, 19 nt, Homo sapiens
  misc_RNA (1)...(19): siRNA sense strand
ggagagaggucgauauaga

SEQ ID NO: 918636 - RNA, 19 nt, Homo sapiens
  misc_RNA (1)...(19): siRNA sense strand
ccaguaaacucaaauaugu

SEQ ID NO: 918637 - RNA, 19 nt, Homo sapiens
  misc_RNA (1)...(19): siRNA sense strand
gaaugaacauaaaccagua

SEQ ID NO: 918638 - RNA, 19 nt, Homo sapiens
  misc_RNA (1)...(19): siRNA sense strand
gaagugaacucugaagaau

SEQ ID NO: 918639 - RNA, 19 nt, Homo sapiens
  misc_RNA (1)...(19): siRNA sense strand
gaacauaaaccaguaaaga

SEQ ID NO: 918640 - RNA, 19 nt, Homo sapiens
  misc_RNA (1)...(19): siRNA sense strand
ggaagaagauguggaggaa

SEQ ID NO: 918641 - RNA, 19 nt, Homo sapiens
  misc_RNA (1)...(19): siRNA sense strand
ucaaauaugugcuucaaga

SEQ ID NO: 918642 - RNA, 19 nt, Homo sapiens
  misc_RNA (1)...(19): siRNA sense strand
gaaugugucucuugccaaa

SEQ ID NO: 918643 - RNA, 19 nt, Homo sapiens
  misc_RNA (1)...(19): siRNA sense strand
agaagaagaugcagaagaa

SEQ ID NO: 918644 - RNA, 19 nt, Homo sapiens
  misc_RNA (1)...(19): siRNA sense strand
gaauuacccuucacuaagu

SEQ ID NO: 918645 - RNA, 19 nt, Homo sapiens
  misc_RNA (1)...(19): siRNA sense strand
gcucaucuguuagcaauaa

SEQ ID NO: 918646 - RNA, 19 nt, Homo sapiens
  misc_RNA (1)...(19): siRNA sense strand
cagagaaccuuauaagaau

SEQ ID NO: 918647 - RNA, 19 nt, Homo sapiens
  misc_RNA (1)...(19): siRNA sense strand
gaaagucagccacagagua

SEQ ID NO: 918648 - RNA, 19 nt, Homo sapiens
  misc_RNA (1)...(19): siRNA sense strand
ggaacaaccuccacaacau

SEQ ID NO: 918649 - RNA, 19 nt, Homo sapiens
  misc_RNA (1)...(19): siRNA sense strand
ggaagaagaagaauaugaa

SEQ ID NO: 918650 - RNA, 19 nt, Homo sapiens
  misc_RNA (1)...(19): siRNA sense strand
ccagagaaccuuauaagaa

SEQ ID NO: 918651 - RNA, 19 nt, Homo sapiens
  misc_RNA (1)...(19): siRNA sense strand
ucaaagaucugaaagaaac

SEQ ID NO: 918652 - RNA, 19 nt, Homo sapiens
  misc_RNA (1)...(19): siRNA sense strand
gaaagaaaccaaggauuga

SEQ ID NO: 918653 - RNA, 19 nt, Homo sapiens
  misc_RNA (1)...(19): siRNA sense strand
gcugggaggugucuuuaaa

SEQ ID NO: 918654 - RNA, 19 nt, Homo sapiens
  misc_RNA (1)...(19): siRNA sense strand
gaacaacacugagaaugag

SEQ ID NO: 918655 - RNA, 19 nt, Homo sapiens
  misc_RNA (1)...(19): siRNA sense strand
ggaacaacacugagaauga

SEQ ID NO: 918656 - RNA, 19 nt, Homo sapiens
  misc_RNA (1)...(19): siRNA sense strand
auacagagauaaacgagua

SEQ ID NO: 918657 - RNA, 19 nt, Homo sapiens
  misc_RNA (1)...(19): siRNA sense strand
ggaggaagaagaagaauau

SEQ ID NO: 918658 - RNA, 19 nt, Homo sapiens
  misc_RNA (1)...(19): siRNA sense strand
gacaggaaauugaacuuga

SEQ ID NO: 918659 - RNA, 19 nt, Homo sapiens
  misc_RNA (1)...(19): siRNA sense strand
ggaaucuacugauaccaaa

SEQ ID NO: 918660 - RNA, 19 nt, Homo sapiens
  misc_RNA (1)...(19): siRNA sense strand
gcaaggaguguuaucuuaa

SEQ ID NO: 918661 - RNA, 19 nt, Homo sapiens
  misc_RNA (1)...(19): siRNA sense strand
gaucaaaccaguaaacuca

SEQ ID NO: 918662 - RNA, 19 nt, Homo sapiens
  misc_RNA (1)...(19): siRNA sense strand
gauaaacgaguacaugauu

SEQ ID NO: 918663 - RNA, 19 nt, Homo sapiens
  misc_RNA (1)...(19): siRNA sense strand
gagcucaucuguuagcaau

SEQ ID NO: 918664 - RNA, 19 nt, Homo sapiens
  misc_RNA (1)...(19): siRNA sense strand
cgagauagaggacgugaua

SEQ ID NO: 918665 - RNA, 19 nt, Homo sapiens
  misc_RNA (1)...(19): siRNA sense strand
ggaaguggacagacgauuu

SEQ ID NO: 918666 - RNA, 19 nt, Homo sapiens
  misc_RNA (1)...(19): siRNA sense strand
gcuucaagaugcaagauuu

SEQ ID NO: 918667 - RNA, 19 nt, Homo sapiens
  misc_RNA (1)...(19): siRNA sense strand
uguaucaggucauucauaa

SEQ ID NO: 918668 - RNA, 19 nt, Homo sapiens
  misc_RNA (1)...(19): siRNA sense strand
ggaggugucuuuaaaauug

SEQ ID NO: 918669 - RNA, 19 nt, Homo sapiens
  misc_RNA (1)...(19): siRNA sense strand
gaaagaaacaagcgucuag

SEQ ID NO: 918670 - RNA, 19 nt, Homo sapiens
  misc_RNA (1)...(19): siRNA sense strand
guaaagaucggacgugaug

SEQ ID NO: 918671 - RNA, 19 nt, Homo sapiens
  misc_RNA (1)...(19): siRNA sense strand
gcauuuagaucugcaagga

SEQ ID NO: 918672 - RNA, 19 nt, Homo sapiens
  misc_RNA (1)...(19): siRNA sense strand
uuaaauggguccuacaaug

SEQ ID NO: 918673 - RNA, 19 nt, Homo sapiens
  misc_RNA (1)...(19): siRNA sense strand
gcacagauggaucagauga

SEQ ID NO: 918674 - RNA, 19 nt, Homo sapiens
  misc_RNA (1)...(19): siRNA sense strand
gagggaauuucauaacaug

SEQ ID NO: 918675 - RNA, 19 nt, Homo sapiens
  misc_RNA (1)...(19): siRNA sense strand
ggaaauugaacuugaaugu

SEQ ID NO: 918676 - RNA, 19 nt, Homo sapiens
  misc_RNA (1)...(19): siRNA sense strand
caaggaguguuaucuuaau

SEQ ID NO: 918677 - RNA, 19 nt, Homo sapiens
  misc_RNA (1)...(19): siRNA sense strand
aggcauaucuccaauuguu

SEQ ID NO: 918678 - RNA, 19 nt, Homo sapiens
  misc_RNA (1)...(19): siRNA sense strand
gagauaaacgaguacauga

SEQ ID NO: 918679 - RNA, 19 nt, Homo sapiens
  misc_RNA (1)...(19): siRNA sense strand
ugcaaggaguguuaucuua

SEQ ID NO: 918680 - RNA, 19 nt, Homo sapiens
  misc_RNA (1)...(19): siRNA sense strand
ccagagaccaggguauuua

SEQ ID NO: 918681 - RNA, 19 nt, Homo sapiens
  misc_RNA (1)...(19): siRNA sense strand
aaagagagcgauuauguga

SEQ ID NO: 918682 - RNA, 19 nt, Homo sapiens
  misc_RNA (1)...(19): siRNA sense strand
cgagaccgcccuagagaua

SEQ ID NO: 918683 - RNA, 19 nt, Homo sapiens
  misc_RNA (1)...(19): siRNA sense strand
uaaauggguccuacaauga

SEQ ID NO: 918684 - RNA, 19 nt, Homo sapiens
  misc_RNA (1)...(19): siRNA sense strand
gguccacgcucccuguaaa

SEQ ID NO: 918685 - RNA, 19 nt, Homo sapiens
  misc_RNA (1)...(19): siRNA sense strand
gaaaagggauccugaaagg

SEQ ID NO: 918686 - RNA, 19 nt, Homo sapiens
  misc_RNA (1)...(19): siRNA sense strand
gaaagagagcgauuaugug

SEQ ID NO: 918687 - RNA, 19 nt, Homo sapiens
  misc_RNA (1)...(19): siRNA sense strand
gaacccagcuuugucuucu

SEQ ID NO: 918688 - RNA, 19 nt, Homo sapiens
  misc_RNA (1)...(19): siRNA sense strand
aagaagauguggaggaaga

SEQ ID NO: 918689 - RNA, 19 nt, Homo sapiens
  misc_RNA (1)...(19): siRNA sense strand
gaggguggaugauuuccuu

SEQ ID NO: 918690 - RNA, 19 nt, Homo sapiens
  misc_RNA (1)...(19): siRNA sense strand
agaaagaaaccaaggauug

SEQ ID NO: 918691 - RNA, 19 nt, Homo sapiens
  misc_RNA (1)...(19): siRNA sense strand
aggaagaagugaacucuga

SEQ ID NO: 918692 - RNA, 19 nt, Homo sapiens
  misc_RNA (1)...(19): siRNA sense strand
agugaacucugaagaauau

SEQ ID NO: 918693 - RNA, 19 nt, Homo sapiens
  misc_RNA (1)...(19): siRNA sense strand
ggaagaugaagaaguagaa

SEQ ID NO: 918694 - RNA, 19 nt, Homo sapiens
  misc_RNA (1)...(19): siRNA sense strand
uagaggacgugauagagaa

SEQ ID NO: 918695 - RNA, 19 nt, Homo sapiens
  misc_RNA (1)...(19): siRNA sense strand
gaccagaagauuaugauau

SEQ ID NO: 918696 - RNA, 19 nt, Homo sapiens
  misc_RNA (1)...(19): siRNA sense strand
gggaaggcgucgaccagaa

SEQ ID NO: 918697 - RNA, 19 nt, Homo sapiens
  misc_RNA (1)...(19): siRNA sense strand
ucaaaccaguaaacucaaa

SEQ ID NO: 918698 - RNA, 19 nt, Homo sapiens
  misc_RNA (1)...(19): siRNA sense strand
gaaagaggagggaaaugau

SEQ ID NO: 918699 - RNA, 19 nt, Homo sapiens
  misc_RNA (1)...(19): siRNA sense strand
agaagaauaugaacaggau

SEQ ID NO: 918700 - RNA, 19 nt, Homo sapiens
  misc_RNA (1)...(19): siRNA sense strand
gagagaggucgauauagaa

SEQ ID NO: 918701 - RNA, 19 nt, Homo sapiens
  misc_RNA (1)...(19): siRNA sense strand
agaaagagagcgauuaugu

SEQ ID NO: 918702 - RNA, 19 nt, Homo sapiens
  misc_RNA (1)...(19): siRNA sense strand
gaacaaccuccacaacauc

SEQ ID NO: 918703 - RNA, 19 nt, Homo sapiens
  misc_RNA (1)...(19): siRNA sense strand
guaacaaccaugagaaugu

SEQ ID NO: 918704 - RNA, 19 nt, Homo sapiens
  misc_RNA (1)...(19): siRNA sense strand
ggagggaaaugauuaugac

SEQ ID NO: 918705 - RNA, 19 nt, Homo sapiens
  misc_RNA (1)...(19): siRNA sense strand
ggaggaggaagaagaagaa

SEQ ID NO: 918706 - RNA, 19 nt, Homo sapiens
  misc_RNA (1)...(19): siRNA sense strand
agaggcauaucuccaauug

SEQ ID NO: 918707 - RNA, 19 nt, Homo sapiens
  misc_RNA (1)...(19): siRNA sense strand
ggaaggaguggaagaagau

SEQ ID NO: 918708 - RNA, 19 nt, Homo sapiens
  misc_RNA (1)...(19): siRNA sense strand
uaacaaccaugagaaugug

SEQ ID NO: 918709 - RNA, 19 nt, Homo sapiens
  misc_RNA (1)...(19): siRNA sense strand
ggaggaggaggaagaagaa

SEQ ID NO: 918710 - RNA, 19 nt, Homo sapiens
  misc_RNA (1)...(19): siRNA sense strand
gaauguggaacccagcuuu

SEQ ID NO: 918711 - RNA, 19 nt, Homo sapiens
  misc_RNA (1)...(19): siRNA sense strand
gauuugcaggcgugaauua

SEQ ID NO: 918712 - RNA, 19 nt, Homo sapiens
  misc_RNA (1)...(19): siRNA sense strand
ugaggaauaucaaagaucu

SEQ ID NO: 918713 - RNA, 19 nt, Homo sapiens
  misc_RNA (1)...(19): siRNA sense strand
agagagcgauuaugugauc

SEQ ID NO: 918714 - RNA, 19 nt, Homo sapiens
  misc_RNA (1)...(19): siRNA sense strand
gauaugaggguggaugauu

SEQ ID NO: 918715 - RNA, 19 nt, Homo sapiens
  misc_RNA (1)...(19): siRNA sense strand
gaaauugaacuugaaugug

SEQ ID NO: 918716 - RNA, 19 nt, Homo sapiens
  misc_RNA (1)...(19): siRNA sense strand
cagccagucuucuaaggaa

SEQ ID NO: 918717 - RNA, 19 nt, Homo sapiens
  misc_RNA (1)...(19): siRNA sense strand
gauccagccagucuucuaa

SEQ ID NO: 918718 - RNA, 19 nt, Homo sapiens
  misc_RNA (1)...(19): siRNA sense strand
gaaaggagggccaaaucuc

SEQ ID NO: 918719 - RNA, 19 nt, Homo sapiens
  misc_RNA (1)...(19): siRNA sense strand
cacaacauccuuacuauca

SEQ ID NO: 918720 - RNA, 19 nt, Homo sapiens
  misc_RNA (1)...(19): siRNA sense strand
ggacaggaaauugaacuug

SEQ ID NO: 918721 - RNA, 19 nt, Homo sapiens
  misc_RNA (1)...(19): siRNA sense strand
gagaggaggaggaggaaga

SEQ ID NO: 918722 - RNA, 19 nt, Homo sapiens
  misc_RNA (1)...(19): siRNA sense strand
uaaagaguaacaaccauga

SEQ ID NO: 918723 - RNA, 19 nt, Homo sapiens
  misc_RNA (1)...(19): siRNA sense strand
gugagggaauuucauaaca

SEQ ID NO: 918724 - RNA, 19 nt, Homo sapiens
  misc_RNA (1)...(19): siRNA sense strand
augaagagguggaugaaga

SEQ ID NO: 918725 - RNA, 19 nt, Homo sapiens
  misc_RNA (1)...(19): siRNA sense strand
gcagaaagaaaccaaggau

SEQ ID NO: 918726 - RNA, 19 nt, Homo sapiens
  misc_RNA (1)...(19): siRNA sense strand
acaggaaauugaacuugaa

SEQ ID NO: 918727 - RNA, 19 nt, Homo sapiens
  misc_RNA (1)...(19): siRNA sense strand
gggaaaugauuaugacacu

SEQ ID NO: 918728 - RNA, 19 nt, Homo sapiens
  misc_RNA (1)...(19): siRNA sense strand
aagaggagggaaaugauua

SEQ ID NO: 918729 - RNA, 19 nt, Homo sapiens
  misc_RNA (1)...(19): siRNA sense strand
agaaagaggagggaaauga

SEQ ID NO: 918730 - RNA, 19 nt, Homo sapiens
  misc_RNA (1)...(19): siRNA sense strand
gaggagaucuuccaucagu

SEQ ID NO: 918731 - RNA, 19 nt, Homo sapiens
  misc_RNA (1)...(19): siRNA sense strand
gggcugagaucgaggaguu

SEQ ID NO: 918732 - RNA, 19 nt, Homo sapiens
  misc_RNA (1)...(19): siRNA sense strand
gcaaggguaccgccacaua

SEQ ID NO: 918733 - RNA, 19 nt, Homo sapiens
  misc_RNA (1)...(19): siRNA sense strand
caaccugacucgaccuuug

SEQ ID NO: 918734 - RNA, 19 nt, Homo sapiens
  misc_RNA (1)...(19): siRNA sense strand
gaacucagccaacuacagu

SEQ ID NO: 918735 - RNA, 19 nt, Homo sapiens
  misc_RNA (1)...(19): siRNA sense strand
gguuugugguggaagauua

SEQ ID NO: 918736 - RNA, 19 nt, Homo sapiens
  misc_RNA (1)...(19): siRNA sense strand
ucaagagccugcugagaau

SEQ ID NO: 918737 - RNA, 19 nt, Homo sapiens
  misc_RNA (1)...(19): siRNA sense strand
gcagggaacagcuuuguca

SEQ ID NO: 918738 - RNA, 19 nt, Homo sapiens
  misc_RNA (1)...(19): siRNA sense strand
caacaacgaccgucuagag

SEQ ID NO: 918739 - RNA, 19 nt, Homo sapiens
  misc_RNA (1)...(19): siRNA sense strand
gacacuggauggcuucaug

SEQ ID NO: 918740 - RNA, 19 nt, Homo sapiens
  misc_RNA (1)...(19): siRNA sense strand
gcuacgagauggaccucaa

SEQ ID NO: 918741 - RNA, 19 nt, Homo sapiens
  misc_RNA (1)...(19): siRNA sense strand
gcaccgaggccuauguuag

SEQ ID NO: 918742 - RNA, 19 nt, Homo sapiens
  misc_RNA (1)...(19): siRNA sense strand
cuggauggcuucaugaugu

SEQ ID NO: 918743 - RNA, 19 nt, Homo sapiens
  misc_RNA (1)...(19): siRNA sense strand
gcucaacaauggcuucaac

SEQ ID NO: 918744 - RNA, 19 nt, Homo sapiens
  misc_RNA (1)...(19): siRNA sense strand
gagaagccacacuccauug

SEQ ID NO: 918745 - RNA, 19 nt, Homo sapiens
  misc_RNA (1)...(19): siRNA sense strand
gcaagaugagcuucaagga

SEQ ID NO: 918746 - RNA, 19 nt, Homo sapiens
  misc_RNA (1)...(19): siRNA sense strand
gccacgcucuucauccaaa

SEQ ID NO: 918747 - RNA, 19 nt, Homo sapiens
  misc_RNA (1)...(19): siRNA sense strand
gccauacccucaccuccaa

SEQ ID NO: 918748 - RNA, 19 nt, Homo sapiens
  misc_RNA (1)...(19): siRNA sense strand
gggagcccgucaucuauca

SEQ ID NO: 918749 - RNA, 19 nt, Homo sapiens
  misc_RNA (1)...(19): siRNA sense strand
gaaccacucucagcaucca

SEQ ID NO: 918750 - RNA, 19 nt, Homo sapiens
  misc_RNA (1)...(19): siRNA sense strand
acauacaccugcuuuccaa

SEQ ID NO: 918751 - RNA, 19 nt, Homo sapiens
  misc_RNA (1)...(19): siRNA sense strand
gcaguguggcuacguccua

SEQ ID NO: 918752 - RNA, 19 nt, Homo sapiens
  misc_RNA (1)...(19): siRNA sense strand
ccacaacaccuaucugacu

SEQ ID NO: 918753 - RNA, 19 nt, Homo sapiens
  misc_RNA (1)...(19): siRNA sense strand
ugucggcccuggcugugua

SEQ ID NO: 918754 - RNA, 19 nt, Homo sapiens
  misc_RNA (1)...(19): siRNA sense strand
gggacaugcuggugacaca

SEQ ID NO: 918755 - RNA, 19 nt, Homo sapiens
  misc_RNA (1)...(19): siRNA sense strand
ggaggcagggaacagcuuu

SEQ ID NO: 918756 - RNA, 19 nt, Homo sapiens
  misc_RNA (1)...(19): siRNA sense strand
cgagaagccacacuccauu

SEQ ID NO: 918757 - RNA, 19 nt, Homo sapiens
  misc_RNA (1)...(19): siRNA sense strand
uggauggcuucaugaugua

SEQ ID NO: 918758 - RNA, 19 nt, Homo sapiens
  misc_RNA (1)...(19): siRNA sense strand
ggaugaacucagccaacua

SEQ ID NO: 918759 - RNA, 19 nt, Homo sapiens
  misc_RNA (1)...(19): siRNA sense strand
gaucaagagccugcugaga

SEQ ID NO: 918760 - RNA, 19 nt, Homo sapiens
  misc_RNA (1)...(19): siRNA sense strand
gaugaacucagccaacuac

SEQ ID NO: 918761 - RNA, 19 nt, Homo sapiens
  misc_RNA (1)...(19): siRNA sense strand
ggagaucuuccaucaguac

SEQ ID NO: 918762 - RNA, 19 nt, Homo sapiens
  misc_RNA (1)...(19): siRNA sense strand
caagcugaaugccgagaag

SEQ ID NO: 918763 - RNA, 19 nt, Homo sapiens
  misc_RNA (1)...(19): siRNA sense strand
caaccaggacagcaagaug

SEQ ID NO: 918764 - RNA, 19 nt, Homo sapiens
  misc_RNA (1)...(19): siRNA sense strand
gcgcaaagccaagaaacuc

SEQ ID NO: 918765 - RNA, 19 nt, Homo sapiens
  misc_RNA (1)...(19): siRNA sense strand
caucgcagcacaucuucuu

SEQ ID NO: 918766 - RNA, 19 nt, Homo sapiens
  misc_RNA (1)...(19): siRNA sense strand
gcaaagccaagaaacucau

SEQ ID NO: 918767 - RNA, 19 nt, Homo sapiens
  misc_RNA (1)...(19): siRNA sense strand
caaagccaagaaacucauu

SEQ ID NO: 918768 - RNA, 19 nt, Homo sapiens
  misc_RNA (1)...(19): siRNA sense strand
caguguggcuacguccuaa

SEQ ID NO: 918769 - RNA, 19 nt, Homo sapiens
  misc_RNA (1)...(19): siRNA sense strand
agacagccaagcagcauga

SEQ ID NO: 918770 - RNA, 19 nt, Homo sapiens
  misc_RNA (1)...(19): siRNA sense strand
cagccacgcucuucaucca

SEQ ID NO: 918771 - RNA, 19 nt, Homo sapiens
  misc_RNA (1)...(19): siRNA sense strand
gcacaaggagcggcuguac

SEQ ID NO: 918772 - RNA, 19 nt, Homo sapiens
  misc_RNA (1)...(19): siRNA sense strand
gaggggagcccgucaucua

SEQ ID NO: 918773 - RNA, 19 nt, Homo sapiens
  misc_RNA (1)...(19): siRNA sense strand
gcccagcagcucauucaga

SEQ ID NO: 918774 - RNA, 19 nt, Homo sapiens
  misc_RNA (1)...(19): siRNA sense strand
cugacuacgugcucaacaa

SEQ ID NO: 918775 - RNA, 19 nt, Homo sapiens
  misc_RNA (1)...(19): siRNA sense strand
gcagcucauucagaccuau

SEQ ID NO: 918776 - RNA, 19 nt, Homo sapiens
  misc_RNA (1)...(19): siRNA sense strand
acgccuaccuccucuucaa

SEQ ID NO: 918777 - RNA, 19 nt, Homo sapiens
  misc_RNA (1)...(19): siRNA sense strand
gcugguggccuugaacuuc

SEQ ID NO: 918778 - RNA, 19 nt, Homo sapiens
  misc_RNA (1)...(19): siRNA sense strand
acagcaagaugagcuucaa

SEQ ID NO: 918779 - RNA, 19 nt, Homo sapiens
  misc_RNA (1)...(19): siRNA sense strand
gcccacuacuucaucucuu

SEQ ID NO: 918780 - RNA, 19 nt, Homo sapiens
  misc_RNA (1)...(19): siRNA sense strand
agcaugagcugaugacacu

SEQ ID NO: 918781 - RNA, 19 nt, Homo sapiens
  misc_RNA (1)...(19): siRNA sense strand
guacgccuaccuccucuuc

SEQ ID NO: 918782 - RNA, 19 nt, Homo sapiens
  misc_RNA (1)...(19): siRNA sense strand
ggaugacgaggaggaagaa

SEQ ID NO: 918783 - RNA, 19 nt, Homo sapiens
  misc_RNA (1)...(19): siRNA sense strand
gcgcccagcagcucauuca

SEQ ID NO: 918784 - RNA, 19 nt, Homo sapiens
  misc_RNA (1)...(19): siRNA sense strand
gcgcuggacuccccaaauc

SEQ ID NO: 918785 - RNA, 19 nt, Homo sapiens
  misc_RNA (1)...(19): siRNA sense strand
aucaagagccugcugagaa

SEQ ID NO: 918786 - RNA, 19 nt, Homo sapiens
  misc_RNA (1)...(19): siRNA sense strand
acccucaccuccaagauuc

SEQ ID NO: 918787 - RNA, 19 nt, Homo sapiens
  misc_RNA (1)...(19): siRNA sense strand
gacuuugugggccaguuua

SEQ ID NO: 918788 - RNA, 19 nt, Homo sapiens
  misc_RNA (1)...(19): siRNA sense strand
ugacuuugugggccaguuu

SEQ ID NO: 918789 - RNA, 19 nt, Homo sapiens
  misc_RNA (1)...(19): siRNA sense strand
cggaugaacucagccaacu

SEQ ID NO: 918790 - RNA, 19 nt, Homo sapiens
  misc_RNA (1)...(19): siRNA sense strand
cccuuacccugucauccua

SEQ ID NO: 918791 - RNA, 19 nt, Homo sapiens
  misc_RNA (1)...(19): siRNA sense strand
aaccaggacagcaagauga

SEQ ID NO: 918792 - RNA, 19 nt, Homo sapiens
  misc_RNA (1)...(19): siRNA sense strand
ccacuggauccacuccuau

SEQ ID NO: 918793 - RNA, 19 nt, Homo sapiens
  misc_RNA (1)...(19): siRNA sense strand
ggaggaugacgaggaggaa

SEQ ID NO: 918794 - RNA, 19 nt, Homo sapiens
  misc_RNA (1)...(19): siRNA sense strand
gagcccgucaucuaucaug

SEQ ID NO: 918795 - RNA, 19 nt, Homo sapiens
  misc_RNA (1)...(19): siRNA sense strand
ccacgcucuucauccaaau

SEQ ID NO: 918796 - RNA, 19 nt, Homo sapiens
  misc_RNA (1)...(19): siRNA sense strand
ugacuacgugcucaacaau

SEQ ID NO: 918797 - RNA, 19 nt, Homo sapiens
  misc_RNA (1)...(19): siRNA sense strand
ucccacaacaccuaucuga

SEQ ID NO: 918798 - RNA, 19 nt, Homo sapiens
  misc_RNA (1)...(19): siRNA sense strand
caaggguaccgccacauac

SEQ ID NO: 918799 - RNA, 19 nt, Homo sapiens
  misc_RNA (1)...(19): siRNA sense strand
acuacgugcucaacaaugg

SEQ ID NO: 918800 - RNA, 19 nt, Homo sapiens
  misc_RNA (1)...(19): siRNA sense strand
ggcaggagacugacuacgu

SEQ ID NO: 918801 - RNA, 19 nt, Homo sapiens
  misc_RNA (1)...(19): siRNA sense strand
cagcagcaccgaggccuau

SEQ ID NO: 918802 - RNA, 19 nt, Homo sapiens
  misc_RNA (1)...(19): siRNA sense strand
gaacaagggccaccacuua

SEQ ID NO: 918803 - RNA, 19 nt, Homo sapiens
  misc_RNA (1)...(19): siRNA sense strand
caacaaagaucuugaggaa

SEQ ID NO: 918804 - RNA, 19 nt, Homo sapiens
  misc_RNA (1)...(19): siRNA sense strand
gaaggaguauucgugauua

SEQ ID NO: 918805 - RNA, 19 nt, Homo sapiens
  misc_RNA (1)...(19): siRNA sense strand
acaaagaucuugaggaauu

SEQ ID NO: 918806 - RNA, 19 nt, Homo sapiens
  misc_RNA (1)...(19): siRNA sense strand
caacaucuguguauccaaa

SEQ ID NO: 918807 - RNA, 19 nt, Homo sapiens
  misc_RNA (1)...(19): siRNA sense strand
ccacuuuacuucuccaaua

SEQ ID NO: 918808 - RNA, 19 nt, Homo sapiens
  misc_RNA (1)...(19): siRNA sense strand
gcaccaaauucuuacauug

SEQ ID NO: 918809 - RNA, 19 nt, Homo sapiens
  misc_RNA (1)...(19): siRNA sense strand
ggaccuagcucuccuggau

SEQ ID NO: 918810 - RNA, 19 nt, Homo sapiens
  misc_RNA (1)...(19): siRNA sense strand
guacaccgcuuguuaaugg

SEQ ID NO: 918811 - RNA, 19 nt, Homo sapiens
  misc_RNA (1)...(19): siRNA sense strand
cgaaaccgcucaauucaug

SEQ ID NO: 918812 - RNA, 19 nt, Homo sapiens
  misc_RNA (1)...(19): siRNA sense strand
uaaaggugcugcuuaucua

SEQ ID NO: 918813 - RNA, 19 nt, Homo sapiens
  misc_RNA (1)...(19): siRNA sense strand
ggaaugugcuaaagccaaa

SEQ ID NO: 918814 - RNA, 19 nt, Homo sapiens
  misc_RNA (1)...(19): siRNA sense strand
acacagagcccaaauagaa

SEQ ID NO: 918815 - RNA, 19 nt, Homo sapiens
  misc_RNA (1)...(19): siRNA sense strand
gauuaaaggugcugcuuau

SEQ ID NO: 918816 - RNA, 19 nt, Homo sapiens
  misc_RNA (1)...(19): siRNA sense strand
cagaagaacuggcgggauu

SEQ ID NO: 918817 - RNA, 19 nt, Homo sapiens
  misc_RNA (1)...(19): siRNA sense strand
guuagaagcugggauuaaa

SEQ ID NO: 918818 - RNA, 19 nt, Homo sapiens
  misc_RNA (1)...(19): siRNA sense strand
ucauuacggucuugcauua

SEQ ID NO: 918819 - RNA, 19 nt, Homo sapiens
  misc_RNA (1)...(19): siRNA sense strand
gacaggaugccaauuguua

SEQ ID NO: 918820 - RNA, 19 nt, Homo sapiens
  misc_RNA (1)...(19): siRNA sense strand
caaauggugugcuucuauu

SEQ ID NO: 918821 - RNA, 19 nt, Homo sapiens
  misc_RNA (1)...(19): siRNA sense strand
gucagaaccuuaaauaaug

SEQ ID NO: 918822 - RNA, 19 nt, Homo sapiens
  misc_RNA (1)...(19): siRNA sense strand
caaagaucuugaggaauua

SEQ ID NO: 918823 - RNA, 19 nt, Homo sapiens
  misc_RNA (1)...(19): siRNA sense strand
gaaauuaagggaaaucugu

SEQ ID NO: 918824 - RNA, 19 nt, Homo sapiens
  misc_RNA (1)...(19): siRNA sense strand
gccaaaggcuucuucauag

SEQ ID NO: 918825 - RNA, 19 nt, Homo sapiens
  misc_RNA (1)...(19): siRNA sense strand
gacaauuucuggccugauu

SEQ ID NO: 918826 - RNA, 19 nt, Homo sapiens
  misc_RNA (1)...(19): siRNA sense strand
gaggaggaguuccaucauu

SEQ ID NO: 918827 - RNA, 19 nt, Homo sapiens
  misc_RNA (1)...(19): siRNA sense strand
caagggccaccacuuauua

SEQ ID NO: 918828 - RNA, 19 nt, Homo sapiens
  misc_RNA (1)...(19): siRNA sense strand
gcaguaaagauucagauuu

SEQ ID NO: 918829 - RNA, 19 nt, Homo sapiens
  misc_RNA (1)...(19): siRNA sense strand
gaaaagccaucucguauuc

SEQ ID NO: 918830 - RNA, 19 nt, Homo sapiens
  misc_RNA (1)...(19): siRNA sense strand
ucaaagacuuggaugagaa

SEQ ID NO: 918831 - RNA, 19 nt, Homo sapiens
  misc_RNA (1)...(19): siRNA sense strand
ccauguaaccguaagaaua

SEQ ID NO: 918832 - RNA, 19 nt, Homo sapiens
  misc_RNA (1)...(19): siRNA sense strand
ucaagaauaucgccaaaca

SEQ ID NO: 918833 - RNA, 19 nt, Homo sapiens
  misc_RNA (1)...(19): siRNA sense strand
aagaagagguccaaucuca

SEQ ID NO: 918834 - RNA, 19 nt, Homo sapiens
  misc_RNA (1)...(19): siRNA sense strand
aggaggaguuccaucauua

SEQ ID NO: 918835 - RNA, 19 nt, Homo sapiens
  misc_RNA (1)...(19): siRNA sense strand
ugaagcagcccaagaacua

SEQ ID NO: 918836 - RNA, 19 nt, Homo sapiens
  misc_RNA (1)...(19): siRNA sense strand
gauacaaucagacuugaaa

SEQ ID NO: 918837 - RNA, 19 nt, Homo sapiens
  misc_RNA (1)...(19): siRNA sense strand
guauggaagugaaacagaa

SEQ ID NO: 918838 - RNA, 19 nt, Homo sapiens
  misc_RNA (1)...(19): siRNA sense strand
gagaguccauggagaagug

SEQ ID NO: 918839 - RNA, 19 nt, Homo sapiens
  misc_RNA (1)...(19): siRNA sense strand
aaaggcuucuucauagaua

SEQ ID NO: 918840 - RNA, 19 nt, Homo sapiens
  misc_RNA (1)...(19): siRNA sense strand
ccaaaggcuucuucauaga

SEQ ID NO: 918841 - RNA, 19 nt, Homo sapiens
  misc_RNA (1)...(19): siRNA sense strand
ggccaccacuuauuaucua

SEQ ID NO: 918842 - RNA, 19 nt, Homo sapiens
  misc_RNA (1)...(19): siRNA sense strand
gaaggugaguccugaagag

SEQ ID NO: 918843 - RNA, 19 nt, Homo sapiens
  misc_RNA (1)...(19): siRNA sense strand
gcucgaaaccgcucaauuc

SEQ ID NO: 918844 - RNA, 19 nt, Homo sapiens
  misc_RNA (1)...(19): siRNA sense strand
guugauagguaugcuguaa

SEQ ID NO: 918845 - RNA, 19 nt, Homo sapiens
  misc_RNA (1)...(19): siRNA sense strand
caagauaccaaauacagaa

SEQ ID NO: 918846 - RNA, 19 nt, Homo sapiens
  misc_RNA (1)...(19): siRNA sense strand
caggaucccuucaacgauu

SEQ ID NO: 918847 - RNA, 19 nt, Homo sapiens
  misc_RNA (1)...(19): siRNA sense strand
ggauuaaaggugcugcuua

SEQ ID NO: 918848 - RNA, 19 nt, Homo sapiens
  misc_RNA (1)...(19): siRNA sense strand
gcuaaugaauuccagcaau

SEQ ID NO: 918849 - RNA, 19 nt, Homo sapiens
  misc_RNA (1)...(19): siRNA sense strand
gcagacauaucaacaacag

SEQ ID NO: 918850 - RNA, 19 nt, Homo sapiens
  misc_RNA (1)...(19): siRNA sense strand
ugacggaguuauuuauuca

SEQ ID NO: 918851 - RNA, 19 nt, Homo sapiens
  misc_RNA (1)...(19): siRNA sense strand
cagaaacccuccaggacuu

SEQ ID NO: 918852 - RNA, 19 nt, Homo sapiens
  misc_RNA (1)...(19): siRNA sense strand
ucagucagaaccuuaaaua

SEQ ID NO: 918853 - RNA, 19 nt, Homo sapiens
  misc_RNA (1)...(19): siRNA sense strand
gaacaaauggugugcuucu

SEQ ID NO: 918854 - RNA, 19 nt, Homo sapiens
  misc_RNA (1)...(19): siRNA sense strand
gcauguacuucaaagacaa

SEQ ID NO: 918855 - RNA, 19 nt, Homo sapiens
  misc_RNA (1)...(19): siRNA sense strand
guaguacaccgcuuguuaa

SEQ ID NO: 918856 - RNA, 19 nt, Homo sapiens
  misc_RNA (1)...(19): siRNA sense strand
acuacuggauggaaacuua

SEQ ID NO: 918857 - RNA, 19 nt, Homo sapiens
  misc_RNA (1)...(19): siRNA sense strand
caaagaagagguccaaucu

SEQ ID NO: 918858 - RNA, 19 nt, Homo sapiens
  misc_RNA (1)...(19): siRNA sense strand
gaaggagccuauacacacu

SEQ ID NO: 918859 - RNA, 19 nt, Homo sapiens
  misc_RNA (1)...(19): siRNA sense strand
gaauaucgccaaacaaagg

SEQ ID NO: 918860 - RNA, 19 nt, Homo sapiens
  misc_RNA (1)...(19): siRNA sense strand
caaacacagagcccaaaua

SEQ ID NO: 918861 - RNA, 19 nt, Homo sapiens
  misc_RNA (1)...(19): siRNA sense strand
gaagucaaaguaaacauca

SEQ ID NO: 918862 - RNA, 19 nt, Homo sapiens
  misc_RNA (1)...(19): siRNA sense strand
cccaagaagucaaaguaaa

SEQ ID NO: 918863 - RNA, 19 nt, Homo sapiens
  misc_RNA (1)...(19): siRNA sense strand
cuaaugaauuccagcaaug

SEQ ID NO: 918864 - RNA, 19 nt, Homo sapiens
  misc_RNA (1)...(19): siRNA sense strand
uugcauaucugacggaguu

SEQ ID NO: 918865 - RNA, 19 nt, Homo sapiens
  misc_RNA (1)...(19): siRNA sense strand
ggagucaacaucuguguau

SEQ ID NO: 918866 - RNA, 19 nt, Homo sapiens
  misc_RNA (1)...(19): siRNA sense strand
gagcccaaauagaagcuuu

SEQ ID NO: 918867 - RNA, 19 nt, Homo sapiens
  misc_RNA (1)...(19): siRNA sense strand
aagaauaucgccaaacaaa

SEQ ID NO: 918868 - RNA, 19 nt, Homo sapiens
  misc_RNA (1)...(19): siRNA sense strand
ccaguaaacacaccagaaa

SEQ ID NO: 918869 - RNA, 19 nt, Homo sapiens
  misc_RNA (1)...(19): siRNA sense strand
gaaugacugugacgacaag

SEQ ID NO: 918870 - RNA, 19 nt, Homo sapiens
  misc_RNA (1)...(19): siRNA sense strand
ggagccagcaguaaagauu

SEQ ID NO: 918871 - RNA, 19 nt, Homo sapiens
  misc_RNA (1)...(19): siRNA sense strand
ugaaacagaaggaguauuc

SEQ ID NO: 918872 - RNA, 19 nt, Homo sapiens
  misc_RNA (1)...(19): siRNA sense strand
cauacaagauaccaaauac

SEQ ID NO: 918873 - RNA, 19 nt, Homo sapiens
  misc_RNA (1)...(19): siRNA sense strand
ccauacaagauaccaaaua

SEQ ID NO: 918874 - RNA, 19 nt, Homo sapiens
  misc_RNA (1)...(19): siRNA sense strand
cauguaaccguaagaauau

SEQ ID NO: 918875 - RNA, 19 nt, Homo sapiens
  misc_RNA (1)...(19): siRNA sense strand
ggucuugcauuagauaaau

SEQ ID NO: 918876 - RNA, 19 nt, Homo sapiens
  misc_RNA (1)...(19): siRNA sense strand
aagccaagcuggaggaguu

SEQ ID NO: 918877 - RNA, 19 nt, Homo sapiens
  misc_RNA (1)...(19): siRNA sense strand
gaggagaguccauggagaa

SEQ ID NO: 918878 - RNA, 19 nt, Homo sapiens
  misc_RNA (1)...(19): siRNA sense strand
ucaaggagccagcaguaaa

SEQ ID NO: 918879 - RNA, 19 nt, Homo sapiens
  misc_RNA (1)...(19): siRNA sense strand
gcaggagacaguauaacaa

SEQ ID NO: 918880 - RNA, 19 nt, Homo sapiens
  misc_RNA (1)...(19): siRNA sense strand
uaacuaaaucuguggaaga

SEQ ID NO: 918881 - RNA, 19 nt, Homo sapiens
  misc_RNA (1)...(19): siRNA sense strand
gauaccaaauacagaacuu

SEQ ID NO: 918882 - RNA, 19 nt, Homo sapiens
  misc_RNA (1)...(19): siRNA sense strand
gauacacgguccaauaaaa

SEQ ID NO: 918883 - RNA, 19 nt, Homo sapiens
  misc_RNA (1)...(19): siRNA sense strand
uagauacacgguccaauaa

SEQ ID NO: 918884 - RNA, 19 nt, Homo sapiens
  misc_RNA (1)...(19): siRNA sense strand
gaacauucacgaccucauc

SEQ ID NO: 918885 - RNA, 19 nt, Homo sapiens
  misc_RNA (1)...(19): siRNA sense strand
caauuucuggccugauuua

SEQ ID NO: 918886 - RNA, 19 nt, Homo sapiens
  misc_RNA (1)...(19): siRNA sense strand
ucacguugccauucugaua

SEQ ID NO: 918887 - RNA, 19 nt, Homo sapiens
  misc_RNA (1)...(19): siRNA sense strand
cacuuuacuucuccaauaa

SEQ ID NO: 918888 - RNA, 19 nt, Homo sapiens
  misc_RNA (1)...(19): siRNA sense strand
caaagguugugaagaugug

SEQ ID NO: 918889 - RNA, 19 nt, Homo sapiens
  misc_RNA (1)...(19): siRNA sense strand
gguccaaucucagggcaaa

SEQ ID NO: 918890 - RNA, 19 nt, Homo sapiens
  misc_RNA (1)...(19): siRNA sense strand
aagaggcaauucagcagua

SEQ ID NO: 918891 - RNA, 19 nt, Homo sapiens
  misc_RNA (1)...(19): siRNA sense strand
uaucaagaauaucgccaaa

SEQ ID NO: 918892 - RNA, 19 nt, Homo sapiens
  misc_RNA (1)...(19): siRNA sense strand
guaacaaaccauacaagau

SEQ ID NO: 918893 - RNA, 19 nt, Homo sapiens
  misc_RNA (1)...(19): siRNA sense strand
gcguacagcuagaugacaa

SEQ ID NO: 918894 - RNA, 19 nt, Homo sapiens
  misc_RNA (1)...(19): siRNA sense strand
gggaggcguugauagguau

SEQ ID NO: 918895 - RNA, 19 nt, Homo sapiens
  misc_RNA (1)...(19): siRNA sense strand
ugacauuuccguccaaaga

SEQ ID NO: 918896 - RNA, 19 nt, Homo sapiens
  misc_RNA (1)...(19): siRNA sense strand
aaacacagagcccaaauag

SEQ ID NO: 918897 - RNA, 19 nt, Homo sapiens
  misc_RNA (1)...(19): siRNA sense strand
caucucguauucagcauug

SEQ ID NO: 918898 - RNA, 19 nt, Homo sapiens
  misc_RNA (1)...(19): siRNA sense strand
uagaacaaauggugugcuu

SEQ ID NO: 918899 - RNA, 19 nt, Homo sapiens
  misc_RNA (1)...(19): siRNA sense strand
cgaaugcucuguacuucuc

SEQ ID NO: 918900 - RNA, 19 nt, Homo sapiens
  misc_RNA (1)...(19): siRNA sense strand
auagauacacgguccaaua

SEQ ID NO: 918901 - RNA, 19 nt, Homo sapiens
  misc_RNA (1)...(19): siRNA sense strand
gcagauguaacacacuuug

SEQ ID NO: 918902 - RNA, 19 nt, Homo sapiens
  misc_RNA (1)...(19): siRNA sense strand
gaacucaucucgaccuucu

SEQ ID NO: 918903 - RNA, 19 nt, Homo sapiens
  misc_RNA (1)...(19): siRNA sense strand
ggacuucgccuucuucaug

SEQ ID NO: 918904 - RNA, 19 nt, Homo sapiens
  misc_RNA (1)...(19): siRNA sense strand
gcucggacacgcacacuuu

SEQ ID NO: 918905 - RNA, 19 nt, Homo sapiens
  misc_RNA (1)...(19): siRNA sense strand
acaaggacaagaagaagua

SEQ ID NO: 918906 - RNA, 19 nt, Homo sapiens
  misc_RNA (1)...(19): siRNA sense strand
gggcgcaguuugccgagaa

SEQ ID NO: 918907 - RNA, 19 nt, Homo sapiens
  misc_RNA (1)...(19): siRNA sense strand
agaaggaacuggagcaacu

SEQ ID NO: 918908 - RNA, 19 nt, Homo sapiens
  misc_RNA (1)...(19): siRNA sense strand
gacccacugugccaucuga

SEQ ID NO: 918909 - RNA, 19 nt, Homo sapiens
  misc_RNA (1)...(19): siRNA sense strand
ccgaguacaagaagaagua

SEQ ID NO: 918910 - RNA, 19 nt, Homo sapiens
  misc_RNA (1)...(19): siRNA sense strand
gaucagcugcagauugguu

SEQ ID NO: 918911 - RNA, 19 nt, Homo sapiens
  misc_RNA (1)...(19): siRNA sense strand
ccacuucggcugcaugguu

SEQ ID NO: 918912 - RNA, 19 nt, Homo sapiens
  misc_RNA (1)...(19): siRNA sense strand
gaaguauuucuacaaguuc

SEQ ID NO: 918913 - RNA, 19 nt, Homo sapiens
  misc_RNA (1)...(19): siRNA sense strand
gcauggacguggcuguucu

SEQ ID NO: 918914 - RNA, 19 nt, Homo sapiens
  misc_RNA (1)...(19): siRNA sense strand
gugcagacgcuguuucuca

SEQ ID NO: 918915 - RNA, 19 nt, Homo sapiens
  misc_RNA (1)...(19): siRNA sense strand
cgacaucgagcgccacuuc

SEQ ID NO: 918916 - RNA, 19 nt, Homo sapiens
  misc_RNA (1)...(19): siRNA sense strand
uggaggaacugagccaaga

SEQ ID NO: 918917 - RNA, 19 nt, Homo sapiens
  misc_RNA (1)...(19): siRNA sense strand
gcaguuugccgagaaggaa

SEQ ID NO: 918918 - RNA, 19 nt, Homo sapiens
  misc_RNA (1)...(19): siRNA sense strand
aggacaagaagaaguauuu

SEQ ID NO: 918919 - RNA, 19 nt, Homo sapiens
  misc_RNA (1)...(19): siRNA sense strand
cccacaaccucccaaggaa

SEQ ID NO: 918920 - RNA, 19 nt, Homo sapiens
  misc_RNA (1)...(19): siRNA sense strand
cugaucagcugcagauugg

SEQ ID NO: 918921 - RNA, 19 nt, Homo sapiens
  misc_RNA (1)...(19): siRNA sense strand
ccaaagugcagacgcuguu

SEQ ID NO: 918922 - RNA, 19 nt, Homo sapiens
  misc_RNA (1)...(19): siRNA sense strand
ucaccaagcgcuucaccaa

SEQ ID NO: 918923 - RNA, 19 nt, Homo sapiens
  misc_RNA (1)...(19): siRNA sense strand
ggacaagaagaaguauuuc

SEQ ID NO: 918924 - RNA, 19 nt, Homo sapiens
  misc_RNA (1)...(19): siRNA sense strand
cacuucggcugcaugguuu

SEQ ID NO: 918925 - RNA, 19 nt, Homo sapiens
  misc_RNA (1)...(19): siRNA sense strand
gcaaugacugacccacugu

SEQ ID NO: 918926 - RNA, 19 nt, Homo sapiens
  misc_RNA (1)...(19): siRNA sense strand
gacugcguaugcugaguga

SEQ ID NO: 918927 - RNA, 19 nt, Homo sapiens
  misc_RNA (1)...(19): siRNA sense strand
ccacuggaguugcuguacu

SEQ ID NO: 918928 - RNA, 19 nt, Homo sapiens
  misc_RNA (1)...(19): siRNA sense strand
ccgacaaggacaagaagaa

SEQ ID NO: 918929 - RNA, 19 nt, Homo sapiens
  misc_RNA (1)...(19): siRNA sense strand
cgcaggagaagaagaagaa

SEQ ID NO: 918930 - RNA, 19 nt, Homo sapiens
  misc_RNA (1)...(19): siRNA sense strand
caaagugcagacgcuguuu

SEQ ID NO: 918931 - RNA, 19 nt, Homo sapiens
  misc_RNA (1)...(19): siRNA sense strand
gacaaggacaagaagaagu

SEQ ID NO: 918932 - RNA, 19 nt, Homo sapiens
  misc_RNA (1)...(19): siRNA sense strand
cauggugaccuaccugugu

SEQ ID NO: 918933 - RNA, 19 nt, Homo sapiens
  misc_RNA (1)...(19): siRNA sense strand
gcaggaggacgcguuugug

SEQ ID NO: 918934 - RNA, 19 nt, Homo sapiens
  misc_RNA (1)...(19): siRNA sense strand
uggcugcgcuggaggaacu

SEQ ID NO: 918935 - RNA, 19 nt, Homo sapiens
  misc_RNA (1)...(19): siRNA sense strand
gcgccuaccgcuucgugaa

SEQ ID NO: 918936 - RNA, 19 nt, Homo sapiens
  misc_RNA (1)...(19): siRNA sense strand
guucucaaggcaccacaaa

SEQ ID NO: 918937 - RNA, 19 nt, Homo sapiens
  misc_RNA (1)...(19): siRNA sense strand
caggagaagaagaagaaga

SEQ ID NO: 918938 - RNA, 19 nt, Homo sapiens
  misc_RNA (1)...(19): siRNA sense strand
gacaggcacugcggcugau

SEQ ID NO: 918939 - RNA, 19 nt, Homo sapiens
  misc_RNA (1)...(19): siRNA sense strand
ccaagaccaccacgucagu

SEQ ID NO: 918940 - RNA, 19 nt, Homo sapiens
  misc_RNA (1)...(19): siRNA sense strand
gcgcaggagaagaagaaga

SEQ ID NO: 918941 - RNA, 19 nt, Homo sapiens
  misc_RNA (1)...(19): siRNA sense strand
gaaggaacuggagcaacug

SEQ ID NO: 918942 - RNA, 19 nt, Homo sapiens
  misc_RNA (1)...(19): siRNA sense strand
cgacaaggacaagaagaag

SEQ ID NO: 918943 - RNA, 19 nt, Homo sapiens
  misc_RNA (1)...(19): siRNA sense strand
ggacacgcacacuuucaac

SEQ ID NO: 918944 - RNA, 19 nt, Homo sapiens
  misc_RNA (1)...(19): siRNA sense strand
agggagaggagcccaacua

SEQ ID NO: 918945 - RNA, 19 nt, Homo sapiens
  misc_RNA (1)...(19): siRNA sense strand
guaacggcgucacugaugu

SEQ ID NO: 918946 - RNA, 19 nt, Homo sapiens
  misc_RNA (1)...(19): siRNA sense strand
gaacuugcacgugcuggaa

SEQ ID NO: 918947 - RNA, 19 nt, Homo sapiens
  misc_RNA (1)...(19): siRNA sense strand
ggucuugccuuuguuugga

SEQ ID NO: 918948 - RNA, 19 nt, Homo sapiens
  misc_RNA (1)...(19): siRNA sense strand
gguaacggcgucacugaug

SEQ ID NO: 918949 - RNA, 19 nt, Homo sapiens
  misc_RNA (1)...(19): siRNA sense strand
ggaguucggacgcgucuca

SEQ ID NO: 918950 - RNA, 19 nt, Homo sapiens
  misc_RNA (1)...(19): siRNA sense strand
gacaugucaucagcaguga

SEQ ID NO: 918951 - RNA, 19 nt, Homo sapiens
  misc_RNA (1)...(19): siRNA sense strand
ggucacaggacaugucauc

SEQ ID NO: 918952 - RNA, 19 nt, Homo sapiens
  misc_RNA (1)...(19): siRNA sense strand
ccgcuuaucaaacuccuaa

SEQ ID NO: 918953 - RNA, 19 nt, Homo sapiens
  misc_RNA (1)...(19): siRNA sense strand
caugucaucagcagugaaa

SEQ ID NO: 918954 - RNA, 19 nt, Homo sapiens
  misc_RNA (1)...(19): siRNA sense strand
gccuuugguuggugaauuc

SEQ ID NO: 918955 - RNA, 19 nt, Homo sapiens
  misc_RNA (1)...(19): siRNA sense strand
cuacucuucccuccgcuua

SEQ ID NO: 918956 - RNA, 19 nt, Homo sapiens
  misc_RNA (1)...(19): siRNA sense strand
caccaucccacgcuacuga

SEQ ID NO: 918957 - RNA, 19 nt, Homo sapiens
  misc_RNA (1)...(19): siRNA sense strand
caucagcagugaaaagguu

SEQ ID NO: 918958 - RNA, 19 nt, Homo sapiens
  misc_RNA (1)...(19): siRNA sense strand
caucaccccugcugccuuu

SEQ ID NO: 918959 - RNA, 19 nt, Homo sapiens
  misc_RNA (1)...(19): siRNA sense strand
uguccaggguugugccuau

SEQ ID NO: 918960 - RNA, 19 nt, Homo sapiens
  misc_RNA (1)...(19): siRNA sense strand
uuuccugccuucagaacuu

SEQ ID NO: 918961 - RNA, 19 nt, Homo sapiens
  misc_RNA (1)...(19): siRNA sense strand
gcugagccuuucccuugca

SEQ ID NO: 918962 - RNA, 19 nt, Homo sapiens
  misc_RNA (1)...(19): siRNA sense strand
guccaggguugugccuauu

SEQ ID NO: 918963 - RNA, 19 nt, Homo sapiens
  misc_RNA (1)...(19): siRNA sense strand
ccaggguugugccuauugg

SEQ ID NO: 918964 - RNA, 19 nt, Homo sapiens
  misc_RNA (1)...(19): siRNA sense strand
gaagaaaacugacuuugaa

SEQ ID NO: 918965 - RNA, 19 nt, Homo sapiens
  misc_RNA (1)...(19): siRNA sense strand
guacgucaccaccuuguua

SEQ ID NO: 918966 - RNA, 19 nt, Homo sapiens
  misc_RNA (1)...(19): siRNA sense strand
ggaagugaaugauaaagcu

SEQ ID NO: 918967 - RNA, 19 nt, Homo sapiens
  misc_RNA (1)...(19): siRNA sense strand
ugucugagcuguccaguuc

SEQ ID NO: 918968 - RNA, 19 nt, Homo sapiens
  misc_RNA (1)...(19): siRNA sense strand
gaucuggaagugaaugaua

SEQ ID NO: 918969 - RNA, 19 nt, Homo sapiens
  misc_RNA (1)...(19): siRNA sense strand
gaaaucaaggcaccagaga

SEQ ID NO: 918970 - RNA, 19 nt, Homo sapiens
  misc_RNA (1)...(19): siRNA sense strand
gagagcaucaguacaaguu

SEQ ID NO: 918971 - RNA, 19 nt, Homo sapiens
  misc_RNA (1)...(19): siRNA sense strand
ggaaggagagcaucaguac

SEQ ID NO: 918972 - RNA, 19 nt, Homo sapiens
  misc_RNA (1)...(19): siRNA sense strand
ccaaucacgucaugcugaa

SEQ ID NO: 918973 - RNA, 19 nt, Homo sapiens
  misc_RNA (1)...(19): siRNA sense strand
agaaguacgucaccaccuu

SEQ ID NO: 918974 - RNA, 19 nt, Homo sapiens
  misc_RNA (1)...(19): siRNA sense strand
uauacgcgcugucuaucaa

SEQ ID NO: 918975 - RNA, 19 nt, Homo sapiens
  misc_RNA (1)...(19): siRNA sense strand
cagaagccacaauaacuuu

SEQ ID NO: 918976 - RNA, 19 nt, Homo sapiens
  misc_RNA (1)...(19): siRNA sense strand
gagcaucaguacaaguucu

SEQ ID NO: 918977 - RNA, 19 nt, Homo sapiens
  misc_RNA (1)...(19): siRNA sense strand
caacccaccgguacaagaa

SEQ ID NO: 918978 - RNA, 19 nt, Homo sapiens
  misc_RNA (1)...(19): siRNA sense strand
ccagaagccacaauaacuu

SEQ ID NO: 918979 - RNA, 19 nt, Homo sapiens
  misc_RNA (1)...(19): siRNA sense strand
caccagagaaggaggaauu

SEQ ID NO: 918980 - RNA, 19 nt, Homo sapiens
  misc_RNA (1)...(19): siRNA sense strand
caacaacuggaguaaacuu

SEQ ID NO: 918981 - RNA, 19 nt, Homo sapiens
  misc_RNA (1)...(19): siRNA sense strand
ggcccaagauccugaugga

SEQ ID NO: 918982 - RNA, 19 nt, Homo sapiens
  misc_RNA (1)...(19): siRNA sense strand
aaggagagcaucaguacaa

SEQ ID NO: 918983 - RNA, 19 nt, Homo sapiens
  misc_RNA (1)...(19): siRNA sense strand
gcaacccaccgguacaaga

SEQ ID NO: 918984 - RNA, 19 nt, Homo sapiens
  misc_RNA (1)...(19): siRNA sense strand
ccaacgguguuucgaugga

SEQ ID NO: 918985 - RNA, 19 nt, Homo sapiens
  misc_RNA (1)...(19): siRNA sense strand
uaacaacaucauucaagug

SEQ ID NO: 918986 - RNA, 19 nt, Homo sapiens
  misc_RNA (1)...(19): siRNA sense strand
ucaccagaagccacaauaa

SEQ ID NO: 918987 - RNA, 19 nt, Homo sapiens
  misc_RNA (1)...(19): siRNA sense strand
guuauacaagcccauauga

SEQ ID NO: 918988 - RNA, 19 nt, Homo sapiens
  misc_RNA (1)...(19): siRNA sense strand
agcaugaucuggaagugaa

SEQ ID NO: 918989 - RNA, 19 nt, Homo sapiens
  misc_RNA (1)...(19): siRNA sense strand
caaaagugcuccgaugugu

SEQ ID NO: 918990 - RNA, 19 nt, Homo sapiens
  misc_RNA (1)...(19): siRNA sense strand
gcagcaugaucuggaagug

SEQ ID NO: 918991 - RNA, 19 nt, Homo sapiens
  misc_RNA (1)...(19): siRNA sense strand
guuaacaacaucauucaag

SEQ ID NO: 918992 - RNA, 19 nt, Homo sapiens
  misc_RNA (1)...(19): siRNA sense strand
cauaguaaccagccagcuu

SEQ ID NO: 918993 - RNA, 19 nt, Homo sapiens
  misc_RNA (1)...(19): siRNA sense strand
aacaacaucauucaaguga

SEQ ID NO: 918994 - RNA, 19 nt, Homo sapiens
  misc_RNA (1)...(19): siRNA sense strand
ucaaggcaccagagaagga

SEQ ID NO: 918995 - RNA, 19 nt, Homo sapiens
  misc_RNA (1)...(19): siRNA sense strand
gaaggagagcaucaguaca

SEQ ID NO: 918996 - RNA, 19 nt, Homo sapiens
  misc_RNA (1)...(19): siRNA sense strand
gucaccaccuuguuauaca

SEQ ID NO: 918997 - RNA, 19 nt, Homo sapiens
  misc_RNA (1)...(19): siRNA sense strand
acacggggauuuccuguga

SEQ ID NO: 918998 - RNA, 19 nt, Homo sapiens
  misc_RNA (1)...(19): siRNA sense strand
acaguuaacaacaucauuc

SEQ ID NO: 918999 - RNA, 19 nt, Homo sapiens
  misc_RNA (1)...(19): siRNA sense strand
gcacaguuaacaacaucau

SEQ ID NO: 919000 - RNA, 19 nt, Homo sapiens
  misc_RNA (1)...(19): siRNA sense strand
cggaaggagagcaucagua

SEQ ID NO: 919001 - RNA, 19 nt, Homo sapiens
  misc_RNA (1)...(19): siRNA sense strand
ugaagaaaacugacuuuga

SEQ ID NO: 919002 - RNA, 19 nt, Homo sapiens
  misc_RNA (1)...(19): siRNA sense strand
uggcacaguuaacaacauc

SEQ ID NO: 919003 - RNA, 19 nt, Homo sapiens
  misc_RNA (1)...(19): siRNA sense strand
uucaacaacuggaguaaac

SEQ ID NO: 919004 - RNA, 19 nt, Homo sapiens
  misc_RNA (1)...(19): siRNA sense strand
uaucuggguccuucaacaa

SEQ ID NO: 919005 - RNA, 19 nt, Homo sapiens
  misc_RNA (1)...(19): siRNA sense strand
aaucaaggcaccagagaag

SEQ ID NO: 919006 - RNA, 19 nt, Homo sapiens
  misc_RNA (1)...(19): siRNA sense strand
aaagugcuccgaugugucu

SEQ ID NO: 919007 - RNA, 19 nt, Homo sapiens
  misc_RNA (1)...(19): siRNA sense strand
ggagagcaucaguacaagu

SEQ ID NO: 919008 - RNA, 19 nt, Homo sapiens
  misc_RNA (1)...(19): siRNA sense strand
gggcggaaaggaaguuuac

SEQ ID NO: 919009 - RNA, 19 nt, Homo sapiens
  misc_RNA (1)...(19): siRNA sense strand
cagcuuggcacaguuaaca

SEQ ID NO: 919010 - RNA, 19 nt, Homo sapiens
  misc_RNA (1)...(19): siRNA sense strand
caucaguacaaguucuuug

SEQ ID NO: 919011 - RNA, 19 nt, Homo sapiens
  misc_RNA (1)...(19): siRNA sense strand
gcgcaacccaccgguacaa

SEQ ID NO: 919012 - RNA, 19 nt, Homo sapiens
  misc_RNA (1)...(19): siRNA sense strand
cagcaugaucuggaaguga

SEQ ID NO: 919013 - RNA, 19 nt, Homo sapiens
  misc_RNA (1)...(19): siRNA sense strand
gaacaaggacacggggauu

SEQ ID NO: 919014 - RNA, 19 nt, Homo sapiens
  misc_RNA (1)...(19): siRNA sense strand
ggaauuaucucuacaguga

SEQ ID NO: 919015 - RNA, 19 nt, Homo sapiens
  misc_RNA (1)...(19): siRNA sense strand
gaagaaaccucggccauca

SEQ ID NO: 919016 - RNA, 19 nt, Homo sapiens
  misc_RNA (1)...(19): siRNA sense strand
gaaauaagagggccauaug

SEQ ID NO: 919017 - RNA, 19 nt, Homo sapiens
  misc_RNA (1)...(19): siRNA sense strand
caaaagaccuccuauuaau

SEQ ID NO: 919018 - RNA, 19 nt, Homo sapiens
  misc_RNA (1)...(19): siRNA sense strand
agaaggagaugaagauugu

SEQ ID NO: 919019 - RNA, 19 nt, Homo sapiens
  misc_RNA (1)...(19): siRNA sense strand
cagagaaacuaccauuuua

SEQ ID NO: 919020 - RNA, 19 nt, Homo sapiens
  misc_RNA (1)...(19): siRNA sense strand
ggagacagccgcucaccuu

SEQ ID NO: 919021 - RNA, 19 nt, Homo sapiens
  misc_RNA (1)...(19): siRNA sense strand
aaucuaggcuugcuguuug

SEQ ID NO: 919022 - RNA, 19 nt, Homo sapiens
  misc_RNA (1)...(19): siRNA sense strand
gcuauucaguuguugcuau

SEQ ID NO: 919023 - RNA, 19 nt, Homo sapiens
  misc_RNA (1)...(19): siRNA sense strand
ccaucucacugcaauguuu

SEQ ID NO: 919024 - RNA, 19 nt, Homo sapiens
  misc_RNA (1)...(19): siRNA sense strand
ccaagaaagccaaguguga

SEQ ID NO: 919025 - RNA, 19 nt, Homo sapiens
  misc_RNA (1)...(19): siRNA sense strand
uaacagagaaacuaccauu

SEQ ID NO: 919026 - RNA, 19 nt, Homo sapiens
  misc_RNA (1)...(19): siRNA sense strand
caccuuggcuauucaguug

SEQ ID NO: 919027 - RNA, 19 nt, Homo sapiens
  misc_RNA (1)...(19): siRNA sense strand
cauaugacguggcaaaucu

SEQ ID NO: 919028 - RNA, 19 nt, Homo sapiens
  misc_RNA (1)...(19): siRNA sense strand
uaucaaagacuccacaaug

SEQ ID NO: 919029 - RNA, 19 nt, Homo sapiens
  misc_RNA (1)...(19): siRNA sense strand
gauuuagucugcauaacug

SEQ ID NO: 919030 - RNA, 19 nt, Homo sapiens
  misc_RNA (1)...(19): siRNA sense strand
cuauuaauguggcgauuga

SEQ ID NO: 919031 - RNA, 19 nt, Homo sapiens
  misc_RNA (1)...(19): siRNA sense strand
caaagacuccacaaugaga

SEQ ID NO: 919032 - RNA, 19 nt, Homo sapiens
  misc_RNA (1)...(19): siRNA sense strand
cauauugcuugcacacauu

SEQ ID NO: 919033 - RNA, 19 nt, Homo sapiens
  misc_RNA (1)...(19): siRNA sense strand
gcaaaggaaagaauguaau

SEQ ID NO: 919034 - RNA, 19 nt, Homo sapiens
  misc_RNA (1)...(19): siRNA sense strand
ggaaaaucaagaccaauua

SEQ ID NO: 919035 - RNA, 19 nt, Homo sapiens
  misc_RNA (1)...(19): siRNA sense strand
gaaaagaaacaggaaauug

SEQ ID NO: 919036 - RNA, 19 nt, Homo sapiens
  misc_RNA (1)...(19): siRNA sense strand
aaagaccuccuauuaaugu

SEQ ID NO: 919037 - RNA, 19 nt, Homo sapiens
  misc_RNA (1)...(19): siRNA sense strand
cuucacaacuuugccaauu

SEQ ID NO: 919038 - RNA, 19 nt, Homo sapiens
  misc_RNA (1)...(19): siRNA sense strand
ggauccaucucacugcaau

SEQ ID NO: 919039 - RNA, 19 nt, Homo sapiens
  misc_RNA (1)...(19): siRNA sense strand
aucaaagacuccacaauga

SEQ ID NO: 919040 - RNA, 19 nt, Homo sapiens
  misc_RNA (1)...(19): siRNA sense strand
gcaaaucugcaaaggaaag

SEQ ID NO: 919041 - RNA, 19 nt, Homo sapiens
  misc_RNA (1)...(19): siRNA sense strand
acaaugagaagguauacaa

SEQ ID NO: 919042 - RNA, 19 nt, Homo sapiens
  misc_RNA (1)...(19): siRNA sense strand
accaguagcuguuucugaa

SEQ ID NO: 919043 - RNA, 19 nt, Homo sapiens
  misc_RNA (1)...(19): siRNA sense strand
gaaacuaccauuuuacuuc

SEQ ID NO: 919044 - RNA, 19 nt, Homo sapiens
  misc_RNA (1)...(19): siRNA sense strand
ucaaaagaccuccuauuaa

SEQ ID NO: 919045 - RNA, 19 nt, Homo sapiens
  misc_RNA (1)...(19): siRNA sense strand
gagaagguauacaauuucc

SEQ ID NO: 919046 - RNA, 19 nt, Homo sapiens
  misc_RNA (1)...(19): siRNA sense strand
gcucuaugauguuguugca

SEQ ID NO: 919047 - RNA, 19 nt, Homo sapiens
  misc_RNA (1)...(19): siRNA sense strand
ucauaucguugacuuuaag

SEQ ID NO: 919048 - RNA, 19 nt, Homo sapiens
  misc_RNA (1)...(19): siRNA sense strand
ggauuuagucugcauaacu

SEQ ID NO: 919049 - RNA, 19 nt, Homo sapiens
  misc_RNA (1)...(19): siRNA sense strand
ucauauugcuugcacacau

SEQ ID NO: 919050 - RNA, 19 nt, Homo sapiens
  misc_RNA (1)...(19): siRNA sense strand
cagaaggagaugaagauug

SEQ ID NO: 919051 - RNA, 19 nt, Homo sapiens
  misc_RNA (1)...(19): siRNA sense strand
ccgcucaccuuggcuauuc

SEQ ID NO: 919052 - RNA, 19 nt, Homo sapiens
  misc_RNA (1)...(19): siRNA sense strand
caacuuugccaauuguaca

SEQ ID NO: 919053 - RNA, 19 nt, Homo sapiens
  misc_RNA (1)...(19): siRNA sense strand
aaauaagagggccauauga

SEQ ID NO: 919054 - RNA, 19 nt, Homo sapiens
  misc_RNA (1)...(19): siRNA sense strand
ugagaagguauacaauuuc

SEQ ID NO: 919055 - RNA, 19 nt, Homo sapiens
  misc_RNA (1)...(19): siRNA sense strand
ggcgguguuugcagauuug

SEQ ID NO: 919056 - RNA, 19 nt, Homo sapiens
  misc_RNA (1)...(19): siRNA sense strand
ggaaaagaaacaggaaauu

SEQ ID NO: 919057 - RNA, 19 nt, Homo sapiens
  misc_RNA (1)...(19): siRNA sense strand
aaaucuaggcuugcuguuu

SEQ ID NO: 919058 - RNA, 19 nt, Homo sapiens
  misc_RNA (1)...(19): siRNA sense strand
agaaauaagagggccauau

SEQ ID NO: 919059 - RNA, 19 nt, Homo sapiens
  misc_RNA (1)...(19): siRNA sense strand
uucaaaagaccuccuauua

SEQ ID NO: 919060 - RNA, 19 nt, Homo sapiens
  misc_RNA (1)...(19): siRNA sense strand
uaucguugacuuuaaggaa

SEQ ID NO: 919061 - RNA, 19 nt, Homo sapiens
  misc_RNA (1)...(19): siRNA sense strand
gaacucuucacaacuuugc

SEQ ID NO: 919062 - RNA, 19 nt, Homo sapiens
  misc_RNA (1)...(19): siRNA sense strand
ucacugcaauguuuugaga

SEQ ID NO: 919063 - RNA, 19 nt, Homo sapiens
  misc_RNA (1)...(19): siRNA sense strand
gggaaaaucaagaccaauu

SEQ ID NO: 919064 - RNA, 19 nt, Homo sapiens
  misc_RNA (1)...(19): siRNA sense strand
acagagaaacuaccauuuu

SEQ ID NO: 919065 - RNA, 19 nt, Homo sapiens
  misc_RNA (1)...(19): siRNA sense strand
ucaaagacuccacaaugag

SEQ ID NO: 919066 - RNA, 19 nt, Homo sapiens
  misc_RNA (1)...(19): siRNA sense strand
caaugagaagguauacaau

SEQ ID NO: 919067 - RNA, 19 nt, Homo sapiens
  misc_RNA (1)...(19): siRNA sense strand
gaauuaucucuacagugaa

SEQ ID NO: 919068 - RNA, 19 nt, Homo sapiens
  misc_RNA (1)...(19): siRNA sense strand
uauaucuagugcugcagaa

SEQ ID NO: 919069 - RNA, 19 nt, Homo sapiens
  misc_RNA (1)...(19): siRNA sense strand
ugagagcaacuucuucaag

SEQ ID NO: 919070 - RNA, 19 nt, Homo sapiens
  misc_RNA (1)...(19): siRNA sense strand
gcgcggacuuguggagaca

SEQ ID NO: 919071 - RNA, 19 nt, Homo sapiens
  misc_RNA (1)...(19): siRNA sense strand
agaaaccucggccaucaga

SEQ ID NO: 919072 - RNA, 19 nt, Homo sapiens
  misc_RNA (1)...(19): siRNA sense strand
aauuaucucuacagugaag

SEQ ID NO: 919073 - RNA, 19 nt, Homo sapiens
  misc_RNA (1)...(19): siRNA sense strand
uguuugggcucucugaaag

SEQ ID NO: 919074 - RNA, 19 nt, Homo sapiens
  misc_RNA (1)...(19): siRNA sense strand
ugcaaaggaaagaauguaa

SEQ ID NO: 919075 - RNA, 19 nt, Homo sapiens
  misc_RNA (1)...(19): siRNA sense strand
caaaucugcaaaggaaaga

SEQ ID NO: 919076 - RNA, 19 nt, Homo sapiens
  misc_RNA (1)...(19): siRNA sense strand
guuguugcuaucaaucaua

SEQ ID NO: 919077 - RNA, 19 nt, Homo sapiens
  misc_RNA (1)...(19): siRNA sense strand
uuagucugcauaacuguaa

SEQ ID NO: 919078 - RNA, 19 nt, Homo sapiens
  misc_RNA (1)...(19): siRNA sense strand
guggauuuagucugcauaa

SEQ ID NO: 919079 - RNA, 19 nt, Homo sapiens
  misc_RNA (1)...(19): siRNA sense strand
ccuuggcuauucaguuguu

SEQ ID NO: 919080 - RNA, 19 nt, Homo sapiens
  misc_RNA (1)...(19): siRNA sense strand
cuaugauguuguugcaguu

SEQ ID NO: 919081 - RNA, 19 nt, Homo sapiens
  misc_RNA (1)...(19): siRNA sense strand
gagcggguucugaccugaa

SEQ ID NO: 919082 - RNA, 19 nt, Homo sapiens
  misc_RNA (1)...(19): siRNA sense strand
caguagcuguuucugaacu

SEQ ID NO: 919083 - RNA, 19 nt, Homo sapiens
  misc_RNA (1)...(19): siRNA sense strand
ugcuaucaaucauaucguu

SEQ ID NO: 919084 - RNA, 19 nt, Homo sapiens
  misc_RNA (1)...(19): siRNA sense strand
uucacaacuuugccaauug

SEQ ID NO: 919085 - RNA, 19 nt, Homo sapiens
  misc_RNA (1)...(19): siRNA sense strand
ucaccuuggcuauucaguu

SEQ ID NO: 919086 - RNA, 19 nt, Homo sapiens
  misc_RNA (1)...(19): siRNA sense strand
gagacaaacuggucaagug

SEQ ID NO: 919087 - RNA, 19 nt, Homo sapiens
  misc_RNA (1)...(19): siRNA sense strand
gaaccaacuucaccagcaa

SEQ ID NO: 919088 - RNA, 19 nt, Homo sapiens
  misc_RNA (1)...(19): siRNA sense strand
gcaguucacccauccagua

SEQ ID NO: 919089 - RNA, 19 nt, Homo sapiens
  misc_RNA (1)...(19): siRNA sense strand
gcaaauacaacaugaaggu

SEQ ID NO: 919090 - RNA, 19 nt, Homo sapiens
  misc_RNA (1)...(19): siRNA sense strand
caugaagguccucuacuua

SEQ ID NO: 919091 - RNA, 19 nt, Homo sapiens
  misc_RNA (1)...(19): siRNA sense strand
acaaacuggucaaguguga

SEQ ID NO: 919092 - RNA, 19 nt, Homo sapiens
  misc_RNA (1)...(19): siRNA sense strand
acaugaagguccucuacuu

SEQ ID NO: 919093 - RNA, 19 nt, Homo sapiens
  misc_RNA (1)...(19): siRNA sense strand
gaacgucacagugcucaga

SEQ ID NO: 919094 - RNA, 19 nt, Homo sapiens
  misc_RNA (1)...(19): siRNA sense strand
caacuucaccagcaaauac

SEQ ID NO: 919095 - RNA, 19 nt, Homo sapiens
  misc_RNA (1)...(19): siRNA sense strand
ucacagugcucagagacaa

SEQ ID NO: 919096 - RNA, 19 nt, Homo sapiens
  misc_RNA (1)...(19): siRNA sense strand
ugaagguccucuacuuauc

SEQ ID NO: 919097 - RNA, 19 nt, Homo sapiens
  misc_RNA (1)...(19): siRNA sense strand
ggacugccgccaugagaau

SEQ ID NO: 919098 - RNA, 19 nt, Homo sapiens
  misc_RNA (1)...(19): siRNA sense strand
caacaugaagguccucuac

SEQ ID NO: 919099 - RNA, 19 nt, Homo sapiens
  misc_RNA (1)...(19): siRNA sense strand
gcaaggacgagggcaccua

SEQ ID NO: 919100 - RNA, 19 nt, Homo sapiens
  misc_RNA (1)...(19): siRNA sense strand
gagaauaccagcaguucac

SEQ ID NO: 919101 - RNA, 19 nt, Homo sapiens
  misc_RNA (1)...(19): siRNA sense strand
cagaaggugaccagccuaa

SEQ ID NO: 919102 - RNA, 19 nt, Homo sapiens
  misc_RNA (1)...(19): siRNA sense strand
cagcaaauacaacaugaag

SEQ ID NO: 919103 - RNA, 19 nt, Homo sapiens
  misc_RNA (1)...(19): siRNA sense strand
guucacccauccaguacga

SEQ ID NO: 919104 - RNA, 19 nt, Homo sapiens
  misc_RNA (1)...(19): siRNA sense strand
gaaggugaccagccuaacg

SEQ ID NO: 919105 - RNA, 19 nt, Homo sapiens
  misc_RNA (1)...(19): siRNA sense strand
cuacuuauccgccuucacu

SEQ ID NO: 919106 - RNA, 19 nt, Homo sapiens
  misc_RNA (1)...(19): siRNA sense strand
ccuaacggccugccuagug

SEQ ID NO: 919107 - RNA, 19 nt, Homo sapiens
  misc_RNA (1)...(19): siRNA sense strand
ccaacuucaccagcaaaua

SEQ ID NO: 919108 - RNA, 19 nt, Homo sapiens
  misc_RNA (1)...(19): siRNA sense strand
agacaaacuggucaagugu

SEQ ID NO: 919109 - RNA, 19 nt, Homo sapiens
  misc_RNA (1)...(19): siRNA sense strand
ggauuucaugucccuguga

SEQ ID NO: 919110 - RNA, 19 nt, Homo sapiens
  misc_RNA (1)...(19): siRNA sense strand
gaagguccucuacuuaucc

SEQ ID NO: 919111 - RNA, 19 nt, Homo sapiens
  misc_RNA (1)...(19): siRNA sense strand
gcaucgcucuccugcuaac

SEQ ID NO: 919112 - RNA, 19 nt, Homo sapiens
  misc_RNA (1)...(19): siRNA sense strand
acauaccgcucccgaacca

SEQ ID NO: 919113 - RNA, 19 nt, Homo sapiens
  misc_RNA (1)...(19): siRNA sense strand
ccaccacucuggccauucc

SEQ ID NO: 919114 - RNA, 19 nt, Homo sapiens
  misc_RNA (1)...(19): siRNA sense strand
caugagaauaccagcaguu

SEQ ID NO: 919115 - RNA, 19 nt, Homo sapiens
  misc_RNA (1)...(19): siRNA sense strand
agaaggaaauggaagauaa

SEQ ID NO: 919116 - RNA, 19 nt, Homo sapiens
  misc_RNA (1)...(19): siRNA sense strand
ggaaauggaagauaaagug

SEQ ID NO: 919117 - RNA, 19 nt, Homo sapiens
  misc_RNA (1)...(19): siRNA sense strand
caacauggcuaaagcaaaa

SEQ ID NO: 919118 - RNA, 19 nt, Homo sapiens
  misc_RNA (1)...(19): siRNA sense strand
gaagauaaagugacuaguc

SEQ ID NO: 919119 - RNA, 19 nt, Homo sapiens
  misc_RNA (1)...(19): siRNA sense strand
guucagauuucuuaaggaa

SEQ ID NO: 919120 - RNA, 19 nt, Homo sapiens
  misc_RNA (1)...(19): siRNA sense strand
gaaggaaauggaagauaaa

SEQ ID NO: 919121 - RNA, 19 nt, Homo sapiens
  misc_RNA (1)...(19): siRNA sense strand
gaaauggaagauaaaguga

SEQ ID NO: 919122 - RNA, 19 nt, Homo sapiens
  misc_RNA (1)...(19): siRNA sense strand
ggaaacgguugcagaaagg

SEQ ID NO: 919123 - RNA, 19 nt, Homo sapiens
  misc_RNA (1)...(19): siRNA sense strand
uaaggaaacgguugcagaa

SEQ ID NO: 919124 - RNA, 19 nt, Homo sapiens
  misc_RNA (1)...(19): siRNA sense strand
gggauuacaacauggcuaa

SEQ ID NO: 919125 - RNA, 19 nt, Homo sapiens
  misc_RNA (1)...(19): siRNA sense strand
cggaagccgucccuuguug

SEQ ID NO: 919126 - RNA, 19 nt, Homo sapiens
  misc_RNA (1)...(19): siRNA sense strand
gaaagcagaagaagcaaaa

SEQ ID NO: 919127 - RNA, 19 nt, Homo sapiens
  misc_RNA (1)...(19): siRNA sense strand
aaagcaagauauccucauc

SEQ ID NO: 919128 - RNA, 19 nt, Homo sapiens
  misc_RNA (1)...(19): siRNA sense strand
agagaaagcagaagaagca

SEQ ID NO: 919129 - RNA, 19 nt, Homo sapiens
  misc_RNA (1)...(19): siRNA sense strand
gccuggagguucagauuuc

SEQ ID NO: 919130 - RNA, 19 nt, Homo sapiens
  misc_RNA (1)...(19): siRNA sense strand
cuacugcagcuccggauaa

SEQ ID NO: 919131 - RNA, 19 nt, Homo sapiens
  misc_RNA (1)...(19): siRNA sense strand
gcagaagaagcaaaauuaa

SEQ ID NO: 919132 - RNA, 19 nt, Homo sapiens
  misc_RNA (1)...(19): siRNA sense strand
gaacaagcaacuuccuacu

SEQ ID NO: 919133 - RNA, 19 nt, Homo sapiens
  misc_RNA (1)...(19): siRNA sense strand
cagaaggaaauggaagaua

SEQ ID NO: 919134 - RNA, 19 nt, Homo sapiens
  misc_RNA (1)...(19): siRNA sense strand
cggaggagcagaaggaaau

SEQ ID NO: 919135 - RNA, 19 nt, Homo sapiens
  misc_RNA (1)...(19): siRNA sense strand
uggagguucagauuucuua

SEQ ID NO: 919136 - RNA, 19 nt, Homo sapiens
  misc_RNA (1)...(19): siRNA sense strand
aggaaacgguugcagaaag

SEQ ID NO: 919137 - RNA, 19 nt, Homo sapiens
  misc_RNA (1)...(19): siRNA sense strand
ggagguucagauuucuuaa

SEQ ID NO: 919138 - RNA, 19 nt, Homo sapiens
  misc_RNA (1)...(19): siRNA sense strand
ggagcagaaggaaauggaa

SEQ ID NO: 919139 - RNA, 19 nt, Homo sapiens
  misc_RNA (1)...(19): siRNA sense strand
gcagaaggaaauggaagau

SEQ ID NO: 919140 - RNA, 19 nt, Homo sapiens
  misc_RNA (1)...(19): siRNA sense strand
acaaaagccuggagguuca

SEQ ID NO: 919141 - RNA, 19 nt, Homo sapiens
  misc_RNA (1)...(19): siRNA sense strand
aauggaagauaaagugacu

SEQ ID NO: 919142 - RNA, 19 nt, Homo sapiens
  misc_RNA (1)...(19): siRNA sense strand
ggacaaaagccuggagguu

SEQ ID NO: 919143 - RNA, 19 nt, Homo sapiens
  misc_RNA (1)...(19): siRNA sense strand
gguucagauuucuuaagga

SEQ ID NO: 919144 - RNA, 19 nt, Homo sapiens
  misc_RNA (1)...(19): siRNA sense strand
gauuacaacauggcuaaag

SEQ ID NO: 919145 - RNA, 19 nt, Homo sapiens
  misc_RNA (1)...(19): siRNA sense strand
aagaacaagcaacuuccua

SEQ ID NO: 919146 - RNA, 19 nt, Homo sapiens
  misc_RNA (1)...(19): siRNA sense strand
guccagagaaagcagaaga

SEQ ID NO: 919147 - RNA, 19 nt, Homo sapiens
  misc_RNA (1)...(19): siRNA sense strand
agaaagcagaagaagcaaa

SEQ ID NO: 919148 - RNA, 19 nt, Homo sapiens
  misc_RNA (1)...(19): siRNA sense strand
gagguucagauuucuuaag

SEQ ID NO: 919149 - RNA, 19 nt, Homo sapiens
  misc_RNA (1)...(19): siRNA sense strand
aaagugacuaguccagaga

SEQ ID NO: 919150 - RNA, 19 nt, Homo sapiens
  misc_RNA (1)...(19): siRNA sense strand
ggacgaagacgcggaagaa

SEQ ID NO: 919151 - RNA, 19 nt, Homo sapiens
  misc_RNA (1)...(19): siRNA sense strand
ccgggaaacagaauaauuu

SEQ ID NO: 919152 - RNA, 19 nt, Homo sapiens
  misc_RNA (1)...(19): siRNA sense strand
ggacugcgaggacgacgaa

SEQ ID NO: 919153 - RNA, 19 nt, Homo sapiens
  misc_RNA (1)...(19): siRNA sense strand
gcgaggacgacgaagauga

SEQ ID NO: 919154 - RNA, 19 nt, Homo sapiens
  misc_RNA (1)...(19): siRNA sense strand
cgaagacgcggaagaagag

SEQ ID NO: 919155 - RNA, 19 nt, Homo sapiens
  misc_RNA (1)...(19): siRNA sense strand
ggacugggagaucgauguc

SEQ ID NO: 919156 - RNA, 19 nt, Homo sapiens
  misc_RNA (1)...(19): siRNA sense strand
acgaagacgcggaagaaga

SEQ ID NO: 919157 - RNA, 19 nt, Homo sapiens
  misc_RNA (1)...(19): siRNA sense strand
gaauaauuucgagcgcaaa

SEQ ID NO: 919158 - RNA, 19 nt, Homo sapiens
  misc_RNA (1)...(19): siRNA sense strand
guaccagaggcaagucaga

SEQ ID NO: 919159 - RNA, 19 nt, Homo sapiens
  misc_RNA (1)...(19): siRNA sense strand
gaagagccuuugcugauaa

SEQ ID NO: 919160 - RNA, 19 nt, Homo sapiens
  misc_RNA (1)...(19): siRNA sense strand
gcaaggacuucuguaauuu

SEQ ID NO: 919161 - RNA, 19 nt, Homo sapiens
  misc_RNA (1)...(19): siRNA sense strand
ggagagagaauauaaagaa

SEQ ID NO: 919162 - RNA, 19 nt, Homo sapiens
  misc_RNA (1)...(19): siRNA sense strand
gaauuucucucccauuguu

SEQ ID NO: 919163 - RNA, 19 nt, Homo sapiens
  misc_RNA (1)...(19): siRNA sense strand
uaacgaagaucagcaaaga

SEQ ID NO: 919164 - RNA, 19 nt, Homo sapiens
  misc_RNA (1)...(19): siRNA sense strand
gaacaaaacucucggugaa

SEQ ID NO: 919165 - RNA, 19 nt, Homo sapiens
  misc_RNA (1)...(19): siRNA sense strand
gcaaacacuuacugacaaa

SEQ ID NO: 919166 - RNA, 19 nt, Homo sapiens
  misc_RNA (1)...(19): siRNA sense strand
caaaucggguccugaguug

SEQ ID NO: 919167 - RNA, 19 nt, Homo sapiens
  misc_RNA (1)...(19): siRNA sense strand
cacagagaguguuuaguua

SEQ ID NO: 919168 - RNA, 19 nt, Homo sapiens
  misc_RNA (1)...(19): siRNA sense strand
ugacuacaauuccuacaaa

SEQ ID NO: 919169 - RNA, 19 nt, Homo sapiens
  misc_RNA (1)...(19): siRNA sense strand
aaccagaaguacacauuua

SEQ ID NO: 919170 - RNA, 19 nt, Homo sapiens
  misc_RNA (1)...(19): siRNA sense strand
gggaauauggaacuaauuu

SEQ ID NO: 919171 - RNA, 19 nt, Homo sapiens
  misc_RNA (1)...(19): siRNA sense strand
agaagagccuuugcugaua

SEQ ID NO: 919172 - RNA, 19 nt, Homo sapiens
  misc_RNA (1)...(19): siRNA sense strand
ucaagcugcugcucuguuu

SEQ ID NO: 919173 - RNA, 19 nt, Homo sapiens
  misc_RNA (1)...(19): siRNA sense strand
gagagaauauaaagaaagg

SEQ ID NO: 919174 - RNA, 19 nt, Homo sapiens
  misc_RNA (1)...(19): siRNA sense strand
ggacgaagacgcggaagaa

SEQ ID NO: 919175 - RNA, 19 nt, Homo sapiens
  misc_RNA (1)...(19): siRNA sense strand
ucuguugagucuauucuua

SEQ ID NO: 919176 - RNA, 19 nt, Homo sapiens
  misc_RNA (1)...(19): siRNA sense strand
gaaagggagauguuggaaa

SEQ ID NO: 919177 - RNA, 19 nt, Homo sapiens
  misc_RNA (1)...(19): siRNA sense strand
caagcaaggacuucuguaa

SEQ ID NO: 919178 - RNA, 19 nt, Homo sapiens
  misc_RNA (1)...(19): siRNA sense strand
gauaaagaguuggagaaca

SEQ ID NO: 919179 - RNA, 19 nt, Homo sapiens
  misc_RNA (1)...(19): siRNA sense strand
agcaaggacuucuguaauu

SEQ ID NO: 919180 - RNA, 19 nt, Homo sapiens
  misc_RNA (1)...(19): siRNA sense strand
cggaauuucucucccauug

SEQ ID NO: 919181 - RNA, 19 nt, Homo sapiens
  misc_RNA (1)...(19): siRNA sense strand
caaacaaguuggaacaaaa

SEQ ID NO: 919182 - RNA, 19 nt, Homo sapiens
  misc_RNA (1)...(19): siRNA sense strand
gagaguguuuaguuaagga

SEQ ID NO: 919183 - RNA, 19 nt, Homo sapiens
  misc_RNA (1)...(19): siRNA sense strand
ccgggaaacagaauaauuu

SEQ ID NO: 919184 - RNA, 19 nt, Homo sapiens
  misc_RNA (1)...(19): siRNA sense strand
aaagggagauguuggaaac

SEQ ID NO: 919185 - RNA, 19 nt, Homo sapiens
  misc_RNA (1)...(19): siRNA sense strand
auaaagaguuggagaacau

SEQ ID NO: 919186 - RNA, 19 nt, Homo sapiens
  misc_RNA (1)...(19): siRNA sense strand
caaccagaaguacacauuu

SEQ ID NO: 919187 - RNA, 19 nt, Homo sapiens
  misc_RNA (1)...(19): siRNA sense strand
gcacaacuuauagacagua

SEQ ID NO: 919188 - RNA, 19 nt, Homo sapiens
  misc_RNA (1)...(19): siRNA sense strand
ggacugcgaggacgacgaa

SEQ ID NO: 919189 - RNA, 19 nt, Homo sapiens
  misc_RNA (1)...(19): siRNA sense strand
gauuuaaccaugcaguauu

SEQ ID NO: 919190 - RNA, 19 nt, Homo sapiens
  misc_RNA (1)...(19): siRNA sense strand
uuaaggacaaccagaagua

SEQ ID NO: 919191 - RNA, 19 nt, Homo sapiens
  misc_RNA (1)...(19): siRNA sense strand
gcccaccugccuugauuua

SEQ ID NO: 919192 - RNA, 19 nt, Homo sapiens
  misc_RNA (1)...(19): siRNA sense strand
acagagaguguuuaguuaa

SEQ ID NO: 919193 - RNA, 19 nt, Homo sapiens
  misc_RNA (1)...(19): siRNA sense strand
gggagauguuggaaacuuc

SEQ ID NO: 919194 - RNA, 19 nt, Homo sapiens
  misc_RNA (1)...(19): siRNA sense strand
cagagaguguuuaguuaag

SEQ ID NO: 919195 - RNA, 19 nt, Homo sapiens
  misc_RNA (1)...(19): siRNA sense strand
cagcaaacacuuacugaca

SEQ ID NO: 919196 - RNA, 19 nt, Homo sapiens
  misc_RNA (1)...(19): siRNA sense strand
uaaagaaagggagauguug

SEQ ID NO: 919197 - RNA, 19 nt, Homo sapiens
  misc_RNA (1)...(19): siRNA sense strand
acgaagaucagcaaagaaa

SEQ ID NO: 919198 - RNA, 19 nt, Homo sapiens
  misc_RNA (1)...(19): siRNA sense strand
ccaccugccuugauuuaac

SEQ ID NO: 919199 - RNA, 19 nt, Homo sapiens
  misc_RNA (1)...(19): siRNA sense strand
gccuggaccugacuacaau

SEQ ID NO: 919200 - RNA, 19 nt, Homo sapiens
  misc_RNA (1)...(19): siRNA sense strand
guuggaaacuucucaagcu

SEQ ID NO: 919201 - RNA, 19 nt, Homo sapiens
  misc_RNA (1)...(19): siRNA sense strand
aagaagagccuuugcugau

SEQ ID NO: 919202 - RNA, 19 nt, Homo sapiens
  misc_RNA (1)...(19): siRNA sense strand
gugcagagcaggacaugau

SEQ ID NO: 919203 - RNA, 19 nt, Homo sapiens
  misc_RNA (1)...(19): siRNA sense strand
ggaauauggaacuaauuuc

SEQ ID NO: 919204 - RNA, 19 nt, Homo sapiens
  misc_RNA (1)...(19): siRNA sense strand
acauuaugcuggagagaga

SEQ ID NO: 919205 - RNA, 19 nt, Homo sapiens
  misc_RNA (1)...(19): siRNA sense strand
gcgaggacgacgaagauga

SEQ ID NO: 919206 - RNA, 19 nt, Homo sapiens
  misc_RNA (1)...(19): siRNA sense strand
ccucugccacuuagacaua

SEQ ID NO: 919207 - RNA, 19 nt, Homo sapiens
  misc_RNA (1)...(19): siRNA sense strand
cauaauccauuccacucau

SEQ ID NO: 919208 - RNA, 19 nt, Homo sapiens
  misc_RNA (1)...(19): siRNA sense strand
aaagaguuggagaacauua

SEQ ID NO: 919209 - RNA, 19 nt, Homo sapiens
  misc_RNA (1)...(19): siRNA sense strand
ccacuuagacauaauccau

SEQ ID NO: 919210 - RNA, 19 nt, Homo sapiens
  misc_RNA (1)...(19): siRNA sense strand
caguaucccuuguccucaa

SEQ ID NO: 919211 - RNA, 19 nt, Homo sapiens
  misc_RNA (1)...(19): siRNA sense strand
cagaaguacacauuuacaa

SEQ ID NO: 919212 - RNA, 19 nt, Homo sapiens
  misc_RNA (1)...(19): siRNA sense strand
gaagagaccccuaagaaac

SEQ ID NO: 919213 - RNA, 19 nt, Homo sapiens
  misc_RNA (1)...(19): siRNA sense strand
agcaaacacuuacugacaa

SEQ ID NO: 919214 - RNA, 19 nt, Homo sapiens
  misc_RNA (1)...(19): siRNA sense strand
gcucaagggcaugucuuaa

SEQ ID NO: 919215 - RNA, 19 nt, Homo sapiens
  misc_RNA (1)...(19): siRNA sense strand
cgaagacgcggaagaagag

SEQ ID NO: 919216 - RNA, 19 nt, Homo sapiens
  misc_RNA (1)...(19): siRNA sense strand
acaaaucggguccugaguu

SEQ ID NO: 919217 - RNA, 19 nt, Homo sapiens
  misc_RNA (1)...(19): siRNA sense strand
ccagagagguccgcguucu

SEQ ID NO: 919218 - RNA, 19 nt, Homo sapiens
  misc_RNA (1)...(19): siRNA sense strand
auaaagaaagggagauguu

SEQ ID NO: 919219 - RNA, 19 nt, Homo sapiens
  misc_RNA (1)...(19): siRNA sense strand
gaccugacuacaauuccua

SEQ ID NO: 919220 - RNA, 19 nt, Homo sapiens
  misc_RNA (1)...(19): siRNA sense strand
ccauuccagcggagacuua

SEQ ID NO: 919221 - RNA, 19 nt, Homo sapiens
  misc_RNA (1)...(19): siRNA sense strand
ucaagggcaugucuuaacg

SEQ ID NO: 919222 - RNA, 19 nt, Homo sapiens
  misc_RNA (1)...(19): siRNA sense strand
ggaauuucucucccauugu

SEQ ID NO: 919223 - RNA, 19 nt, Homo sapiens
  misc_RNA (1)...(19): siRNA sense strand
gcgacacccuccucuacca

SEQ ID NO: 919224 - RNA, 19 nt, Homo sapiens
  misc_RNA (1)...(19): siRNA sense strand
gaacauuaugcuggagaga

SEQ ID NO: 919225 - RNA, 19 nt, Homo sapiens
  misc_RNA (1)...(19): siRNA sense strand
aagggcaugucuuaacgaa

SEQ ID NO: 919226 - RNA, 19 nt, Homo sapiens
  misc_RNA (1)...(19): siRNA sense strand
ccaguuagugacaggauga

SEQ ID NO: 919227 - RNA, 19 nt, Homo sapiens
  misc_RNA (1)...(19): siRNA sense strand
ggaccugacuacaauuccu

SEQ ID NO: 919228 - RNA, 19 nt, Homo sapiens
  misc_RNA (1)...(19): siRNA sense strand
gcuggagagagaauauaaa

SEQ ID NO: 919229 - RNA, 19 nt, Homo sapiens
  misc_RNA (1)...(19): siRNA sense strand
uaaaugccaccaccucagu

SEQ ID NO: 919230 - RNA, 19 nt, Homo sapiens
  misc_RNA (1)...(19): siRNA sense strand
auaauccauuccacucauu

SEQ ID NO: 919231 - RNA, 19 nt, Homo sapiens
  misc_RNA (1)...(19): siRNA sense strand
aagcaaggacuucuguaau

SEQ ID NO: 919232 - RNA, 19 nt, Homo sapiens
  misc_RNA (1)...(19): siRNA sense strand
acaaccagaaguacacauu

SEQ ID NO: 919233 - RNA, 19 nt, Homo sapiens
  misc_RNA (1)...(19): siRNA sense strand
aaacacuuacugacaaauc

SEQ ID NO: 919234 - RNA, 19 nt, Homo sapiens
  misc_RNA (1)...(19): siRNA sense strand
aagagccuuugcugauaaa

SEQ ID NO: 919235 - RNA, 19 nt, Homo sapiens
  misc_RNA (1)...(19): siRNA sense strand
uauagacaguaucccuugu

SEQ ID NO: 919236 - RNA, 19 nt, Homo sapiens
  misc_RNA (1)...(19): siRNA sense strand
ugccaucacucgugucucu

SEQ ID NO: 919237 - RNA, 19 nt, Homo sapiens
  misc_RNA (1)...(19): siRNA sense strand
aaucggguccugaguugaa

SEQ ID NO: 919238 - RNA, 19 nt, Homo sapiens
  misc_RNA (1)...(19): siRNA sense strand
uugcccaccugccuugauu

SEQ ID NO: 919239 - RNA, 19 nt, Homo sapiens
  misc_RNA (1)...(19): siRNA sense strand
ccacugucauuuucuguug

SEQ ID NO: 919240 - RNA, 19 nt, Homo sapiens
  misc_RNA (1)...(19): siRNA sense strand
ccagaaguacacauuuaca

SEQ ID NO: 919241 - RNA, 19 nt, Homo sapiens
  misc_RNA (1)...(19): siRNA sense strand
acuuagacauaauccauuc

SEQ ID NO: 919242 - RNA, 19 nt, Homo sapiens
  misc_RNA (1)...(19): siRNA sense strand
caacuuauagacaguaucc

SEQ ID NO: 919243 - RNA, 19 nt, Homo sapiens
  misc_RNA (1)...(19): siRNA sense strand
cacaacuuauagacaguau

SEQ ID NO: 919244 - RNA, 19 nt, Homo sapiens
  misc_RNA (1)...(19): siRNA sense strand
cugggaauauggaacuaau

SEQ ID NO: 919245 - RNA, 19 nt, Homo sapiens
  misc_RNA (1)...(19): siRNA sense strand
ggacugggagaucgauguc

SEQ ID NO: 919246 - RNA, 19 nt, Homo sapiens
  misc_RNA (1)...(19): siRNA sense strand
caauagauagaugugcaaa

SEQ ID NO: 919247 - RNA, 19 nt, Homo sapiens
  misc_RNA (1)...(19): siRNA sense strand
ccaagcaaggacuucugua

SEQ ID NO: 919248 - RNA, 19 nt, Homo sapiens
  misc_RNA (1)...(19): siRNA sense strand
agggagauguuggaaacuu

SEQ ID NO: 919249 - RNA, 19 nt, Homo sapiens
  misc_RNA (1)...(19): siRNA sense strand
acgaagacgcggaagaaga

SEQ ID NO: 919250 - RNA, 19 nt, Homo sapiens
  misc_RNA (1)...(19): siRNA sense strand
uaaagaguuggagaacauu

SEQ ID NO: 919251 - RNA, 19 nt, Homo sapiens
  misc_RNA (1)...(19): siRNA sense strand
ucagcgugggcacaacuua

SEQ ID NO: 919252 - RNA, 19 nt, Homo sapiens
  misc_RNA (1)...(19): siRNA sense strand
gaauaauuucgagcgcaaa

SEQ ID NO: 919253 - RNA, 19 nt, Homo sapiens
  misc_RNA (1)...(19): siRNA sense strand
ugauuuaaccaugcaguau

SEQ ID NO: 919254 - RNA, 19 nt, Homo sapiens
  misc_RNA (1)...(19): siRNA sense strand
cuuaagaggccuucaucug

SEQ ID NO: 919255 - RNA, 19 nt, Homo sapiens
  misc_RNA (1)...(19): siRNA sense strand
acaaaacucucggugaaug

SEQ ID NO: 919256 - RNA, 19 nt, Homo sapiens
  misc_RNA (1)...(19): siRNA sense strand
guaccagaggcaagucaga

SEQ ID NO: 919257 - RNA, 19 nt, Homo sapiens
  misc_RNA (1)...(19): siRNA sense strand
ugaagagaccccuaagaaa

SEQ ID NO: 919258 - RNA, 19 nt, Homo sapiens
  misc_RNA (1)...(19): siRNA sense strand
gagauccagaccacgagaa

SEQ ID NO: 919259 - RNA, 19 nt, Homo sapiens
  misc_RNA (1)...(19): siRNA sense strand
gagagcaggugcguuucua

SEQ ID NO: 919260 - RNA, 19 nt, Homo sapiens
  misc_RNA (1)...(19): siRNA sense strand
caagaaggagauugacaaa

SEQ ID NO: 919261 - RNA, 19 nt, Homo sapiens
  misc_RNA (1)...(19): siRNA sense strand
uggagcagcuucuguaugg

SEQ ID NO: 919262 - RNA, 19 nt, Homo sapiens
  misc_RNA (1)...(19): siRNA sense strand
cgacacugcuucucuugca

SEQ ID NO: 919263 - RNA, 19 nt, Homo sapiens
  misc_RNA (1)...(19): siRNA sense strand
guaguggguucggagauga

SEQ ID NO: 919264 - RNA, 19 nt, Homo sapiens
  misc_RNA (1)...(19): siRNA sense strand
gcuacguccuggucuauag

SEQ ID NO: 919265 - RNA, 19 nt, Homo sapiens
  misc_RNA (1)...(19): siRNA sense strand
gagcaggugcguuucuaug

SEQ ID NO: 919266 - RNA, 19 nt, Homo sapiens
  misc_RNA (1)...(19): siRNA sense strand
uacgugggcuccauugaga

SEQ ID NO: 919267 - RNA, 19 nt, Homo sapiens
  misc_RNA (1)...(19): siRNA sense strand
gcucagcacugggccaagu

SEQ ID NO: 919268 - RNA, 19 nt, Homo sapiens
  misc_RNA (1)...(19): siRNA sense strand
ggagcccuuugucuacuug

SEQ ID NO: 919269 - RNA, 19 nt, Homo sapiens
  misc_RNA (1)...(19): siRNA sense strand
gcaggugcguuucuaugac

SEQ ID NO: 919270 - RNA, 19 nt, Homo sapiens
  misc_RNA (1)...(19): siRNA sense strand
acaaauccaaggacaagaa

SEQ ID NO: 919271 - RNA, 19 nt, Homo sapiens
  misc_RNA (1)...(19): siRNA sense strand
agaaggaggucaccaucgu

SEQ ID NO: 919272 - RNA, 19 nt, Homo sapiens
  misc_RNA (1)...(19): siRNA sense strand
caggugcguuucuaugaca

SEQ ID NO: 919273 - RNA, 19 nt, Homo sapiens
  misc_RNA (1)...(19): siRNA sense strand
ugacaaauccaaggacaag

SEQ ID NO: 919274 - RNA, 19 nt, Homo sapiens
  misc_RNA (1)...(19): siRNA sense strand
ccaggcgucugugggcaaa

SEQ ID NO: 919275 - RNA, 19 nt, Homo sapiens
  misc_RNA (1)...(19): siRNA sense strand
cagauagcagagagucuuu

SEQ ID NO: 919276 - RNA, 19 nt, Homo sapiens
  misc_RNA (1)...(19): siRNA sense strand
agacgcaggaggacaucua

SEQ ID NO: 919277 - RNA, 19 nt, Homo sapiens
  misc_RNA (1)...(19): siRNA sense strand
ugcgagagcaggugcguuu

SEQ ID NO: 919278 - RNA, 19 nt, Homo sapiens
  misc_RNA (1)...(19): siRNA sense strand
uguaguggguucggagaug

SEQ ID NO: 919279 - RNA, 19 nt, Homo sapiens
  misc_RNA (1)...(19): siRNA sense strand
gcguguagacccagaugug

SEQ ID NO: 919280 - RNA, 19 nt, Homo sapiens
  misc_RNA (1)...(19): siRNA sense strand
ccaagucagagaaggugaa

SEQ ID NO: 919281 - RNA, 19 nt, Homo sapiens
  misc_RNA (1)...(19): siRNA sense strand
cugcuucucuugcacugau

SEQ ID NO: 919282 - RNA, 19 nt, Homo sapiens
  misc_RNA (1)...(19): siRNA sense strand
acagauagcagagagucuu

SEQ ID NO: 919283 - RNA, 19 nt, Homo sapiens
  misc_RNA (1)...(19): siRNA sense strand
caaauccaaggacaagaag

SEQ ID NO: 919284 - RNA, 19 nt, Homo sapiens
  misc_RNA (1)...(19): siRNA sense strand
gaauauagucucugcauuu

SEQ ID NO: 919285 - RNA, 19 nt, Homo sapiens
  misc_RNA (1)...(19): siRNA sense strand
ggaauaacaugguaagcaa

SEQ ID NO: 919286 - RNA, 19 nt, Homo sapiens
  misc_RNA (1)...(19): siRNA sense strand
gcaagaggauagaagacua

SEQ ID NO: 919287 - RNA, 19 nt, Homo sapiens
  misc_RNA (1)...(19): siRNA sense strand
gcucacagcugacaaucuu

SEQ ID NO: 919288 - RNA, 19 nt, Homo sapiens
  misc_RNA (1)...(19): siRNA sense strand
guaaugcccuugccugguu

SEQ ID NO: 919289 - RNA, 19 nt, Homo sapiens
  misc_RNA (1)...(19): siRNA sense strand
caagaagccuacagggaaa

SEQ ID NO: 919290 - RNA, 19 nt, Homo sapiens
  misc_RNA (1)...(19): siRNA sense strand
ugaggaagaugauguuaau

SEQ ID NO: 919291 - RNA, 19 nt, Homo sapiens
  misc_RNA (1)...(19): siRNA sense strand
ggcauaauacccagaaaua

SEQ ID NO: 919292 - RNA, 19 nt, Homo sapiens
  misc_RNA (1)...(19): siRNA sense strand
ggaagucguugcauaugau

SEQ ID NO: 919293 - RNA, 19 nt, Homo sapiens
  misc_RNA (1)...(19): siRNA sense strand
gggaagucguugcauauga

SEQ ID NO: 919294 - RNA, 19 nt, Homo sapiens
  misc_RNA (1)...(19): siRNA sense strand
gcugggaagucguugcaua

SEQ ID NO: 919295 - RNA, 19 nt, Homo sapiens
  misc_RNA (1)...(19): siRNA sense strand
gggaagacaccaccaguuu

SEQ ID NO: 919296 - RNA, 19 nt, Homo sapiens
  misc_RNA (1)...(19): siRNA sense strand
ccaccuauauugaggaaga

SEQ ID NO: 919297 - RNA, 19 nt, Homo sapiens
  misc_RNA (1)...(19): siRNA sense strand
ggaccucguucucaaagga

SEQ ID NO: 919298 - RNA, 19 nt, Homo sapiens
  misc_RNA (1)...(19): siRNA sense strand
aaagcuauguguggaauaa

SEQ ID NO: 919299 - RNA, 19 nt, Homo sapiens
  misc_RNA (1)...(19): siRNA sense strand
cagaaauaaucgcuuaaug

SEQ ID NO: 919300 - RNA, 19 nt, Homo sapiens
  misc_RNA (1)...(19): siRNA sense strand
gcauaauacccagaaauaa

SEQ ID NO: 919301 - RNA, 19 nt, Homo sapiens
  misc_RNA (1)...(19): siRNA sense strand
gcaaauacagggcucugaa

SEQ ID NO: 919302 - RNA, 19 nt, Homo sapiens
  misc_RNA (1)...(19): siRNA sense strand
ccacagccaccuauauuga

SEQ ID NO: 919303 - RNA, 19 nt, Homo sapiens
  misc_RNA (1)...(19): siRNA sense strand
gauguuaucuacccaaagc

SEQ ID NO: 919304 - RNA, 19 nt, Homo sapiens
  misc_RNA (1)...(19): siRNA sense strand
acccagaaauaaucgcuua

SEQ ID NO: 919305 - RNA, 19 nt, Homo sapiens
  misc_RNA (1)...(19): siRNA sense strand
caaauacagggcucugaaa

SEQ ID NO: 919306 - RNA, 19 nt, Homo sapiens
  misc_RNA (1)...(19): siRNA sense strand
agacgcagcugaauacaac

SEQ ID NO: 919307 - RNA, 19 nt, Homo sapiens
  misc_RNA (1)...(19): siRNA sense strand
aauauagucucugcauuug

SEQ ID NO: 919308 - RNA, 19 nt, Homo sapiens
  misc_RNA (1)...(19): siRNA sense strand
ccaaagcuauguguggaau

SEQ ID NO: 919309 - RNA, 19 nt, Homo sapiens
  misc_RNA (1)...(19): siRNA sense strand
agaauauagucucugcauu

SEQ ID NO: 919310 - RNA, 19 nt, Homo sapiens
  misc_RNA (1)...(19): siRNA sense strand
gacacaaaauucgagauua

SEQ ID NO: 919311 - RNA, 19 nt, Homo sapiens
  misc_RNA (1)...(19): siRNA sense strand
gaaaugcucacagcugaca

SEQ ID NO: 919312 - RNA, 19 nt, Homo sapiens
  misc_RNA (1)...(19): siRNA sense strand
uaagcaagaggauagaaga

SEQ ID NO: 919313 - RNA, 19 nt, Homo sapiens
  misc_RNA (1)...(19): siRNA sense strand
gcccuugccugguuucgau

SEQ ID NO: 919314 - RNA, 19 nt, Homo sapiens
  misc_RNA (1)...(19): siRNA sense strand
gagccacagccaccuauau

SEQ ID NO: 919315 - RNA, 19 nt, Homo sapiens
  misc_RNA (1)...(19): siRNA sense strand
cagcugacaaucuugauau

SEQ ID NO: 919316 - RNA, 19 nt, Homo sapiens
  misc_RNA (1)...(19): siRNA sense strand
agaagacuauggacuaaaa

SEQ ID NO: 919317 - RNA, 19 nt, Homo sapiens
  misc_RNA (1)...(19): siRNA sense strand
caacaugagacacaaaauu

SEQ ID NO: 919318 - RNA, 19 nt, Homo sapiens
  misc_RNA (1)...(19): siRNA sense strand
gaggaagaugauguuaaua

SEQ ID NO: 919319 - RNA, 19 nt, Homo sapiens
  misc_RNA (1)...(19): siRNA sense strand
caccauggccauucgagaa

SEQ ID NO: 919320 - RNA, 19 nt, Homo sapiens
  misc_RNA (1)...(19): siRNA sense strand
ucacagcugacaaucuuga

SEQ ID NO: 919321 - RNA, 19 nt, Homo sapiens
  misc_RNA (1)...(19): siRNA sense strand
gaaccagacgcagcugaau

SEQ ID NO: 919322 - RNA, 19 nt, Homo sapiens
  misc_RNA (1)...(19): siRNA sense strand
guauauucauagcuaccaa

SEQ ID NO: 919323 - RNA, 19 nt, Homo sapiens
  misc_RNA (1)...(19): siRNA sense strand
ggagccacagccaccuaua

SEQ ID NO: 919324 - RNA, 19 nt, Homo sapiens
  misc_RNA (1)...(19): siRNA sense strand
uguguggaauaacauggua

SEQ ID NO: 919325 - RNA, 19 nt, Homo sapiens
  misc_RNA (1)...(19): siRNA sense strand
caaagcuauguguggaaua

SEQ ID NO: 919326 - RNA, 19 nt, Homo sapiens
  misc_RNA (1)...(19): siRNA sense strand
aaccagacgcagcugaaua

SEQ ID NO: 919327 - RNA, 19 nt, Homo sapiens
  misc_RNA (1)...(19): siRNA sense strand
ggaagacaccaccaguuuu

SEQ ID NO: 919328 - RNA, 19 nt, Homo sapiens
  misc_RNA (1)...(19): siRNA sense strand
guuaucuacccaaagcaua

SEQ ID NO: 919329 - RNA, 19 nt, Homo sapiens
  misc_RNA (1)...(19): siRNA sense strand
ccagaaauaaucgcuuaau

SEQ ID NO: 919330 - RNA, 19 nt, Homo sapiens
  misc_RNA (1)...(19): siRNA sense strand
gaagucguugcauaugaug

SEQ ID NO: 919331 - RNA, 19 nt, Homo sapiens
  misc_RNA (1)...(19): siRNA sense strand
uaaugcccuugccugguuu

SEQ ID NO: 919332 - RNA, 19 nt, Homo sapiens
  misc_RNA (1)...(19): siRNA sense strand
gccacagccaccuauauug

SEQ ID NO: 919333 - RNA, 19 nt, Homo sapiens
  misc_RNA (1)...(19): siRNA sense strand
uaccgaaagaucauuauuc

SEQ ID NO: 919334 - RNA, 19 nt, Homo sapiens
  misc_RNA (1)...(19): siRNA sense strand
ucgauguuaucuacccaaa

SEQ ID NO: 919335 - RNA, 19 nt, Homo sapiens
  misc_RNA (1)...(19): siRNA sense strand
guaagcaagaggauagaag

SEQ ID NO: 919336 - RNA, 19 nt, Homo sapiens
  misc_RNA (1)...(19): siRNA sense strand
auacagggcucugaaaaug

SEQ ID NO: 919337 - RNA, 19 nt, Homo sapiens
  misc_RNA (1)...(19): siRNA sense strand
ugcauaugaugaucccaaa

SEQ ID NO: 919338 - RNA, 19 nt, Homo sapiens
  misc_RNA (1)...(19): siRNA sense strand
uauccaugaugugguaaug

SEQ ID NO: 919339 - RNA, 19 nt, Homo sapiens
  misc_RNA (1)...(19): siRNA sense strand
aauaacaugguaagcaaga

SEQ ID NO: 919340 - RNA, 19 nt, Homo sapiens
  misc_RNA (1)...(19): siRNA sense strand
ucgagauuauuccuuguca

SEQ ID NO: 919341 - RNA, 19 nt, Homo sapiens
  misc_RNA (1)...(19): siRNA sense strand
ugacaacaugagacacaaa

SEQ ID NO: 919342 - RNA, 19 nt, Homo sapiens
  misc_RNA (1)...(19): siRNA sense strand
uugccugguuucgauguua

SEQ ID NO: 919343 - RNA, 19 nt, Homo sapiens
  misc_RNA (1)...(19): siRNA sense strand
caaccuagaagggaagaca

SEQ ID NO: 919344 - RNA, 19 nt, Homo sapiens
  misc_RNA (1)...(19): siRNA sense strand
cuaccgaaagaucauuauu

SEQ ID NO: 919345 - RNA, 19 nt, Homo sapiens
  misc_RNA (1)...(19): siRNA sense strand
cucuauccaugauguggua

SEQ ID NO: 919346 - RNA, 19 nt, Homo sapiens
  misc_RNA (1)...(19): siRNA sense strand
gccuaccgaaagaucauua

SEQ ID NO: 919347 - RNA, 19 nt, Homo sapiens
  misc_RNA (1)...(19): siRNA sense strand
acagcugacaaucuugaua

SEQ ID NO: 919348 - RNA, 19 nt, Homo sapiens
  misc_RNA (1)...(19): siRNA sense strand
gguaagcaagaggauagaa

SEQ ID NO: 919349 - RNA, 19 nt, Homo sapiens
  misc_RNA (1)...(19): siRNA sense strand
uggaugagcugcuggaauu

SEQ ID NO: 919350 - RNA, 19 nt, Homo sapiens
  misc_RNA (1)...(19): siRNA sense strand
ggacagcaauggcuucucu

SEQ ID NO: 919351 - RNA, 19 nt, Homo sapiens
  misc_RNA (1)...(19): siRNA sense strand
gcaauggcuucucuaagga

SEQ ID NO: 919352 - RNA, 19 nt, Homo sapiens
  misc_RNA (1)...(19): siRNA sense strand
gcaaaucguguuucuggaa

SEQ ID NO: 919353 - RNA, 19 nt, Homo sapiens
  misc_RNA (1)...(19): siRNA sense strand
caacuucagccucaagaaa

SEQ ID NO: 919354 - RNA, 19 nt, Homo sapiens
  misc_RNA (1)...(19): siRNA sense strand
aaagcagacucgucagaaa

SEQ ID NO: 919355 - RNA, 19 nt, Homo sapiens
  misc_RNA (1)...(19): siRNA sense strand
gagguggaguacuuuaaga

SEQ ID NO: 919356 - RNA, 19 nt, Homo sapiens
  misc_RNA (1)...(19): siRNA sense strand
gcaggcaaaucguguuucu

SEQ ID NO: 919357 - RNA, 19 nt, Homo sapiens
  misc_RNA (1)...(19): siRNA sense strand
gcaaagcagacucgucaga

SEQ ID NO: 919358 - RNA, 19 nt, Homo sapiens
  misc_RNA (1)...(19): siRNA sense strand
ccuagagcuucccaaagua

SEQ ID NO: 919359 - RNA, 19 nt, Homo sapiens
  misc_RNA (1)...(19): siRNA sense strand
gagagguggaguacuuuaa

SEQ ID NO: 919360 - RNA, 19 nt, Homo sapiens
  misc_RNA (1)...(19): siRNA sense strand
ucagaaaguugcugugaac

SEQ ID NO: 919361 - RNA, 19 nt, Homo sapiens
  misc_RNA (1)...(19): siRNA sense strand
gcugugaacuggaccaacu

SEQ ID NO: 919362 - RNA, 19 nt, Homo sapiens
  misc_RNA (1)...(19): siRNA sense strand
uuuaagagguucuguuugg

SEQ ID NO: 919363 - RNA, 19 nt, Homo sapiens
  misc_RNA (1)...(19): siRNA sense strand
gcagcagccugacaucaac

SEQ ID NO: 919364 - RNA, 19 nt, Homo sapiens
  misc_RNA (1)...(19): siRNA sense strand
gcagacucgucagaaaguu

SEQ ID NO: 919365 - RNA, 19 nt, Homo sapiens
  misc_RNA (1)...(19): siRNA sense strand
caaagcagacucgucagaa

SEQ ID NO: 919366 - RNA, 19 nt, Homo sapiens
  misc_RNA (1)...(19): siRNA sense strand
gcaagaggcagggcaguca

SEQ ID NO: 919367 - RNA, 19 nt, Homo sapiens
  misc_RNA (1)...(19): siRNA sense strand
gucagaaaguugcugugaa

SEQ ID NO: 919368 - RNA, 19 nt, Homo sapiens
  misc_RNA (1)...(19): siRNA sense strand
uggaguacuuuaagagguu

SEQ ID NO: 919369 - RNA, 19 nt, Homo sapiens
  misc_RNA (1)...(19): siRNA sense strand
aagagguucuguuuggauu

SEQ ID NO: 919370 - RNA, 19 nt, Homo sapiens
  misc_RNA (1)...(19): siRNA sense strand
cagcagaagcucuaaagca

SEQ ID NO: 919371 - RNA, 19 nt, Homo sapiens
  misc_RNA (1)...(19): siRNA sense strand
caacagcacggagcccaaa

SEQ ID NO: 919372 - RNA, 19 nt, Homo sapiens
  misc_RNA (1)...(19): siRNA sense strand
uccuagagcuucccaaagu

SEQ ID NO: 919373 - RNA, 19 nt, Homo sapiens
  misc_RNA (1)...(19): siRNA sense strand
gcagucaggccaagaagag

SEQ ID NO: 919374 - RNA, 19 nt, Homo sapiens
  misc_RNA (1)...(19): siRNA sense strand
cgagagguggaguacuuua

SEQ ID NO: 919375 - RNA, 19 nt, Homo sapiens
  misc_RNA (1)...(19): siRNA sense strand
gaaccacacguuacaagcu

SEQ ID NO: 919376 - RNA, 19 nt, Homo sapiens
  misc_RNA (1)...(19): siRNA sense strand
ggaacuggaucgggucaac

SEQ ID NO: 919377 - RNA, 19 nt, Homo sapiens
  misc_RNA (1)...(19): siRNA sense strand
gguccuagagcuucccaaa

SEQ ID NO: 919378 - RNA, 19 nt, Homo sapiens
  misc_RNA (1)...(19): siRNA sense strand
caacaccgugcccaaccua

SEQ ID NO: 919379 - RNA, 19 nt, Homo sapiens
  misc_RNA (1)...(19): siRNA sense strand
agcaauggcuucucuaagg

SEQ ID NO: 919380 - RNA, 19 nt, Homo sapiens
  misc_RNA (1)...(19): siRNA sense strand
cgggugaucugggucaaga

SEQ ID NO: 919381 - RNA, 19 nt, Homo sapiens
  misc_RNA (1)...(19): siRNA sense strand
ggaccaacuucagccucaa

SEQ ID NO: 919382 - RNA, 19 nt, Homo sapiens
  misc_RNA (1)...(19): siRNA sense strand
cagcaaggccacagagcuu

SEQ ID NO: 919383 - RNA, 19 nt, Homo sapiens
  misc_RNA (1)...(19): siRNA sense strand
cgugccagcuucagugugu

SEQ ID NO: 919384 - RNA, 19 nt, Homo sapiens
  misc_RNA (1)...(19): siRNA sense strand
ugugugagcucagcaugga

SEQ ID NO: 919385 - RNA, 19 nt, Homo sapiens
  misc_RNA (1)...(19): siRNA sense strand
accgagagguggaguacuu

SEQ ID NO: 919386 - RNA, 19 nt, Homo sapiens
  misc_RNA (1)...(19): siRNA sense strand
gagcagcagccugacauca

SEQ ID NO: 919387 - RNA, 19 nt, Homo sapiens
  misc_RNA (1)...(19): siRNA sense strand
gagguucuguuuggauucu

SEQ ID NO: 919388 - RNA, 19 nt, Homo sapiens
  misc_RNA (1)...(19): siRNA sense strand
caaccuaucccgggugauc

SEQ ID NO: 919389 - RNA, 19 nt, Homo sapiens
  misc_RNA (1)...(19): siRNA sense strand
gaacuggaucgggucaaca

SEQ ID NO: 919390 - RNA, 19 nt, Homo sapiens
  misc_RNA (1)...(19): siRNA sense strand
gaugagcugcuggaauuca

SEQ ID NO: 919391 - RNA, 19 nt, Homo sapiens
  misc_RNA (1)...(19): siRNA sense strand
acagcaauggcuucucuaa

SEQ ID NO: 919392 - RNA, 19 nt, Homo sapiens
  misc_RNA (1)...(19): siRNA sense strand
uaagagguucuguuuggau

SEQ ID NO: 919393 - RNA, 19 nt, Homo sapiens
  misc_RNA (1)...(19): siRNA sense strand
uuaagagguucuguuugga

SEQ ID NO: 919394 - RNA, 19 nt, Homo sapiens
  misc_RNA (1)...(19): siRNA sense strand
gagcugcuggaauucauca

SEQ ID NO: 919395 - RNA, 19 nt, Homo sapiens
  misc_RNA (1)...(19): siRNA sense strand
cgucagaaaguugcuguga

SEQ ID NO: 919396 - RNA, 19 nt, Homo sapiens
  misc_RNA (1)...(19): siRNA sense strand
cugcuggaauucaucaaca

SEQ ID NO: 919397 - RNA, 19 nt, Homo sapiens
  misc_RNA (1)...(19): siRNA sense strand
acuuuaagagguucuguuu

SEQ ID NO: 919398 - RNA, 19 nt, Homo sapiens
  misc_RNA (1)...(19): siRNA sense strand
guuggcagcagaagcucua

SEQ ID NO: 919399 - RNA, 19 nt, Homo sapiens
  misc_RNA (1)...(19): siRNA sense strand
uggaucgggucaacagcuu

SEQ ID NO: 919400 - RNA, 19 nt, Homo sapiens
  misc_RNA (1)...(19): siRNA sense strand
aaaggagaaggcccaguug

SEQ ID NO: 919401 - RNA, 19 nt, Homo sapiens
  misc_RNA (1)...(19): siRNA sense strand
gggaggagcugcugaagau

SEQ ID NO: 919402 - RNA, 19 nt, Homo sapiens
  misc_RNA (1)...(19): siRNA sense strand
ugacuacgcuggccaggaa

SEQ ID NO: 919403 - RNA, 19 nt, Homo sapiens
  misc_RNA (1)...(19): siRNA sense strand
gguugaggcuuccaagaaa

SEQ ID NO: 919404 - RNA, 19 nt, Homo sapiens
  misc_RNA (1)...(19): siRNA sense strand
gcagugagaaguuccauga

SEQ ID NO: 919405 - RNA, 19 nt, Homo sapiens
  misc_RNA (1)...(19): siRNA sense strand
gaugaggaguggucagaug

SEQ ID NO: 919406 - RNA, 19 nt, Homo sapiens
  misc_RNA (1)...(19): siRNA sense strand
ugagggcacucuaugacua

SEQ ID NO: 919407 - RNA, 19 nt, Homo sapiens
  misc_RNA (1)...(19): siRNA sense strand
ggacauggaacaggccuuu

SEQ ID NO: 919408 - RNA, 19 nt, Homo sapiens
  misc_RNA (1)...(19): siRNA sense strand
ccaacuacguggagugugu

SEQ ID NO: 919409 - RNA, 19 nt, Homo sapiens
  misc_RNA (1)...(19): siRNA sense strand
gaggagcugcugaagauga

SEQ ID NO: 919410 - RNA, 19 nt, Homo sapiens
  misc_RNA (1)...(19): siRNA sense strand
gcauugaggcagccaguga

SEQ ID NO: 919411 - RNA, 19 nt, Homo sapiens
  misc_RNA (1)...(19): siRNA sense strand
acaaucagccggaaagaga

SEQ ID NO: 919412 - RNA, 19 nt, Homo sapiens
  misc_RNA (1)...(19): siRNA sense strand
ggauaugcugcucaccuua

SEQ ID NO: 919413 - RNA, 19 nt, Homo sapiens
  misc_RNA (1)...(19): siRNA sense strand
ccggagcccugaugagguu

SEQ ID NO: 919414 - RNA, 19 nt, Homo sapiens
  misc_RNA (1)...(19): siRNA sense strand
gagcgccagcggcuucuuu

SEQ ID NO: 919415 - RNA, 19 nt, Homo sapiens
  misc_RNA (1)...(19): siRNA sense strand
ggaguggucagaugaagag

SEQ ID NO: 919416 - RNA, 19 nt, Homo sapiens
  misc_RNA (1)...(19): siRNA sense strand
guggucagaugaagagagu

SEQ ID NO: 919417 - RNA, 19 nt, Homo sapiens
  misc_RNA (1)...(19): siRNA sense strand
cgagggagagccacgcaaa

SEQ ID NO: 919418 - RNA, 19 nt, Homo sapiens
  misc_RNA (1)...(19): siRNA sense strand
agacaaaagcucaguauga

SEQ ID NO: 919419 - RNA, 19 nt, Homo sapiens
  misc_RNA (1)...(19): siRNA sense strand
gaggaguggucagaugaag

SEQ ID NO: 919420 - RNA, 19 nt, Homo sapiens
  misc_RNA (1)...(19): siRNA sense strand
gccuguacccugccaacua

SEQ ID NO: 919421 - RNA, 19 nt, Homo sapiens
  misc_RNA (1)...(19): siRNA sense strand
ccaaggaggccgagaagac

SEQ ID NO: 919422 - RNA, 19 nt, Homo sapiens
  misc_RNA (1)...(19): siRNA sense strand
ggacaaucagccggaaaga

SEQ ID NO: 919423 - RNA, 19 nt, Homo sapiens
  misc_RNA (1)...(19): siRNA sense strand
gaagacaaaagcucaguau

SEQ ID NO: 919424 - RNA, 19 nt, Homo sapiens
  misc_RNA (1)...(19): siRNA sense strand
caaggaggccgagaagaca

SEQ ID NO: 919425 - RNA, 19 nt, Homo sapiens
  misc_RNA (1)...(19): siRNA sense strand
ugaggcagccagugacgaa

SEQ ID NO: 919426 - RNA, 19 nt, Homo sapiens
  misc_RNA (1)...(19): siRNA sense strand
aggauaugcugcucaccuu

SEQ ID NO: 919427 - RNA, 19 nt, Homo sapiens
  misc_RNA (1)...(19): siRNA sense strand
acauggaacaggccuuuga

SEQ ID NO: 919428 - RNA, 19 nt, Homo sapiens
  misc_RNA (1)...(19): siRNA sense strand
ccuguacccugccaacuac

SEQ ID NO: 919429 - RNA, 19 nt, Homo sapiens
  misc_RNA (1)...(19): siRNA sense strand
gauaugcugcucaccuuac

SEQ ID NO: 919430 - RNA, 19 nt, Homo sapiens
  misc_RNA (1)...(19): siRNA sense strand
gagguugaggcuuccaaga

SEQ ID NO: 919431 - RNA, 19 nt, Homo sapiens
  misc_RNA (1)...(19): siRNA sense strand
ugaacuccaccgugacuug

SEQ ID NO: 919432 - RNA, 19 nt, Homo sapiens
  misc_RNA (1)...(19): siRNA sense strand
ugcaagggcaggacaguga

SEQ ID NO: 919433 - RNA, 19 nt, Homo sapiens
  misc_RNA (1)...(19): siRNA sense strand
gggugagggcacucuauga

SEQ ID NO: 919434 - RNA, 19 nt, Homo sapiens
  misc_RNA (1)...(19): siRNA sense strand
gaggacaaucagccggaaa

SEQ ID NO: 919435 - RNA, 19 nt, Homo sapiens
  misc_RNA (1)...(19): siRNA sense strand
caaucagccggaaagagaa

SEQ ID NO: 919436 - RNA, 19 nt, Homo sapiens
  misc_RNA (1)...(19): siRNA sense strand
gaccuuuccagcagugaga

SEQ ID NO: 919437 - RNA, 19 nt, Homo sapiens
  misc_RNA (1)...(19): siRNA sense strand
cugggaggcuggcaacuac

SEQ ID NO: 919438 - RNA, 19 nt, Homo sapiens
  misc_RNA (1)...(19): siRNA sense strand
ugagaaagauugagaaugu

SEQ ID NO: 919439 - RNA, 19 nt, Homo sapiens
  misc_RNA (1)...(19): siRNA sense strand
gaaguuggccgcaugaaga

SEQ ID NO: 919440 - RNA, 19 nt, Homo sapiens
  misc_RNA (1)...(19): siRNA sense strand
gcaaauucaaguccuguua

SEQ ID NO: 919441 - RNA, 19 nt, Homo sapiens
  misc_RNA (1)...(19): siRNA sense strand
ccaauaggauacaaaggaa

SEQ ID NO: 919442 - RNA, 19 nt, Homo sapiens
  misc_RNA (1)...(19): siRNA sense strand
aaucaucgauggacuucua

SEQ ID NO: 919443 - RNA, 19 nt, Homo sapiens
  misc_RNA (1)...(19): siRNA sense strand
ggaagcaugugguguuugg

SEQ ID NO: 919444 - RNA, 19 nt, Homo sapiens
  misc_RNA (1)...(19): siRNA sense strand
acaaauggcugucaguucu

SEQ ID NO: 919445 - RNA, 19 nt, Homo sapiens
  misc_RNA (1)...(19): siRNA sense strand
gagaaagauugagaauguu

SEQ ID NO: 919446 - RNA, 19 nt, Homo sapiens
  misc_RNA (1)...(19): siRNA sense strand
caaauucaaguccuguuaa

SEQ ID NO: 919447 - RNA, 19 nt, Homo sapiens
  misc_RNA (1)...(19): siRNA sense strand
ggucauaaaggauuucaug

SEQ ID NO: 919448 - RNA, 19 nt, Homo sapiens
  misc_RNA (1)...(19): siRNA sense strand
guucuuugaugucaguauu

SEQ ID NO: 919449 - RNA, 19 nt, Homo sapiens
  misc_RNA (1)...(19): siRNA sense strand
uaagacggccgagaacuuu

SEQ ID NO: 919450 - RNA, 19 nt, Homo sapiens
  misc_RNA (1)...(19): siRNA sense strand
uugcagacguugugccuaa

SEQ ID NO: 919451 - RNA, 19 nt, Homo sapiens
  misc_RNA (1)...(19): siRNA sense strand
ggagaauucaggaaagaug

SEQ ID NO: 919452 - RNA, 19 nt, Homo sapiens
  misc_RNA (1)...(19): siRNA sense strand
ccacaggccccaacaauaa

SEQ ID NO: 919453 - RNA, 19 nt, Homo sapiens
  misc_RNA (1)...(19): siRNA sense strand
caagcuaccuguggugauc

SEQ ID NO: 919454 - RNA, 19 nt, Homo sapiens
  misc_RNA (1)...(19): siRNA sense strand
guacaaauggcugucaguu

SEQ ID NO: 919455 - RNA, 19 nt, Homo sapiens
  misc_RNA (1)...(19): siRNA sense strand
caacaauaagcccaagcua

SEQ ID NO: 919456 - RNA, 19 nt, Homo sapiens
  misc_RNA (1)...(19): siRNA sense strand
gaaagaugggguuccaaua

SEQ ID NO: 919457 - RNA, 19 nt, Homo sapiens
  misc_RNA (1)...(19): siRNA sense strand
gaugagaaagauugagaau

SEQ ID NO: 919458 - RNA, 19 nt, Homo sapiens
  misc_RNA (1)...(19): siRNA sense strand
cgauggacuucuagugaug

SEQ ID NO: 919459 - RNA, 19 nt, Homo sapiens
  misc_RNA (1)...(19): siRNA sense strand
aaauggcugucaguucuuu

SEQ ID NO: 919460 - RNA, 19 nt, Homo sapiens
  misc_RNA (1)...(19): siRNA sense strand
uaagugcgauuggcuggau

SEQ ID NO: 919461 - RNA, 19 nt, Homo sapiens
  misc_RNA (1)...(19): siRNA sense strand
ggaaguuggccgcaugaag

SEQ ID NO: 919462 - RNA, 19 nt, Homo sapiens
  misc_RNA (1)...(19): siRNA sense strand
uuuaucaccugcucuaagu

SEQ ID NO: 919463 - RNA, 19 nt, Homo sapiens
  misc_RNA (1)...(19): siRNA sense strand
ggcugucaguucuuuauca

SEQ ID NO: 919464 - RNA, 19 nt, Homo sapiens
  misc_RNA (1)...(19): siRNA sense strand
ccggagaauucaggaaaga

SEQ ID NO: 919465 - RNA, 19 nt, Homo sapiens
  misc_RNA (1)...(19): siRNA sense strand
cuagugaugagaaagauug

SEQ ID NO: 919466 - RNA, 19 nt, Homo sapiens
  misc_RNA (1)...(19): siRNA sense strand
acagggucauaaaggauuu

SEQ ID NO: 919467 - RNA, 19 nt, Homo sapiens
  misc_RNA (1)...(19): siRNA sense strand
cuaagacggccgagaacuu

SEQ ID NO: 919468 - RNA, 19 nt, Homo sapiens
  misc_RNA (1)...(19): siRNA sense strand
ugggaagcaugugguguuu

SEQ ID NO: 919469 - RNA, 19 nt, Homo sapiens
  misc_RNA (1)...(19): siRNA sense strand
gugaugagaaagauugaga

SEQ ID NO: 919470 - RNA, 19 nt, Homo sapiens
  misc_RNA (1)...(19): siRNA sense strand
gcagacguugugccuaaga

SEQ ID NO: 919471 - RNA, 19 nt, Homo sapiens
  misc_RNA (1)...(19): siRNA sense strand
gguguucuuugaugucagu

SEQ ID NO: 919472 - RNA, 19 nt, Homo sapiens
  misc_RNA (1)...(19): siRNA sense strand
caccggagaauucaggaaa

SEQ ID NO: 919473 - RNA, 19 nt, Homo sapiens
  misc_RNA (1)...(19): siRNA sense strand
ucgauggacuucuagugau

SEQ ID NO: 919474 - RNA, 19 nt, Homo sapiens
  misc_RNA (1)...(19): siRNA sense strand
uccaauaggauacaaagga

SEQ ID NO: 919475 - RNA, 19 nt, Homo sapiens
  misc_RNA (1)...(19): siRNA sense strand
gauucaggguggagauuuu

SEQ ID NO: 919476 - RNA, 19 nt, Homo sapiens
  misc_RNA (1)...(19): siRNA sense strand
cgagcucuuugcagacguu

SEQ ID NO: 919477 - RNA, 19 nt, Homo sapiens
  misc_RNA (1)...(19): siRNA sense strand
ccacagggucauaaaggau

SEQ ID NO: 919478 - RNA, 19 nt, Homo sapiens
  misc_RNA (1)...(19): siRNA sense strand
ggguggagauuuuguuaau

SEQ ID NO: 919479 - RNA, 19 nt, Homo sapiens
  misc_RNA (1)...(19): siRNA sense strand
aaauucaaguccuguuaac

SEQ ID NO: 919480 - RNA, 19 nt, Homo sapiens
  misc_RNA (1)...(19): siRNA sense strand
agaaagauugagaauguuc

SEQ ID NO: 919481 - RNA, 19 nt, Homo sapiens
  misc_RNA (1)...(19): siRNA sense strand
gcucuuugcagacguugug

SEQ ID NO: 919482 - RNA, 19 nt, Homo sapiens
  misc_RNA (1)...(19): siRNA sense strand
caaauggcugucaguucuu

SEQ ID NO: 919483 - RNA, 19 nt, Homo sapiens
  misc_RNA (1)...(19): siRNA sense strand
cacagggucauaaaggauu

SEQ ID NO: 919484 - RNA, 19 nt, Homo sapiens
  misc_RNA (1)...(19): siRNA sense strand
gauggacuucuagugauga

SEQ ID NO: 919485 - RNA, 19 nt, Homo sapiens
  misc_RNA (1)...(19): siRNA sense strand
uauuggcggucaggaaguu

SEQ ID NO: 919486 - RNA, 19 nt, Homo sapiens
  misc_RNA (1)...(19): siRNA sense strand
gcaccggagaauucaggaa

SEQ ID NO: 919487 - RNA, 19 nt, Homo sapiens
  misc_RNA (1)...(19): siRNA sense strand
gugguguucuuugauguca

SEQ ID NO: 919488 - RNA, 19 nt, Homo sapiens
  misc_RNA (1)...(19): siRNA sense strand
uccacagggucauaaagga

SEQ ID NO: 919489 - RNA, 19 nt, Homo sapiens
  misc_RNA (1)...(19): siRNA sense strand
gaggaaccguuaaaggaua

SEQ ID NO: 919490 - RNA, 19 nt, Homo sapiens
  misc_RNA (1)...(19): siRNA sense strand
aaggaaagauagacaauga

SEQ ID NO: 919491 - RNA, 19 nt, Homo sapiens
  misc_RNA (1)...(19): siRNA sense strand
gaucaaagacagagggaaa

SEQ ID NO: 919492 - RNA, 19 nt, Homo sapiens
  misc_RNA (1)...(19): siRNA sense strand
aaagagagccagagaguga

SEQ ID NO: 919493 - RNA, 19 nt, Homo sapiens
  misc_RNA (1)...(19): siRNA sense strand
ggacaugauaagagaauuu

SEQ ID NO: 919494 - RNA, 19 nt, Homo sapiens
  misc_RNA (1)...(19): siRNA sense strand
cucaguaccucaagcaaua

SEQ ID NO: 919495 - RNA, 19 nt, Homo sapiens
  misc_RNA (1)...(19): siRNA sense strand
gaagacaagaaguuagaaa

SEQ ID NO: 919496 - RNA, 19 nt, Homo sapiens
  misc_RNA (1)...(19): siRNA sense strand
gaagggaaagucagagaug

SEQ ID NO: 919497 - RNA, 19 nt, Homo sapiens
  misc_RNA (1)...(19): siRNA sense strand
gcaaugaggacaugauaag

SEQ ID NO: 919498 - RNA, 19 nt, Homo sapiens
  misc_RNA (1)...(19): siRNA sense strand
ggaaugccuucgaaucaag

SEQ ID NO: 919499 - RNA, 19 nt, Homo sapiens
  misc_RNA (1)...(19): siRNA sense strand
gauaagagaauuugacaac

SEQ ID NO: 919500 - RNA, 19 nt, Homo sapiens
  misc_RNA (1)...(19): siRNA sense strand
uggcuaggguggaggauaa

SEQ ID NO: 919501 - RNA, 19 nt, Homo sapiens
  misc_RNA (1)...(19): siRNA sense strand
gauagacaaugaagaacag

SEQ ID NO: 919502 - RNA, 19 nt, Homo sapiens
  misc_RNA (1)...(19): siRNA sense strand
aaacaagggcugcaggaaa

SEQ ID NO: 919503 - RNA, 19 nt, Homo sapiens
  misc_RNA (1)...(19): siRNA sense strand
gaaagauagacaaugaaga

SEQ ID NO: 919504 - RNA, 19 nt, Homo sapiens
  misc_RNA (1)...(19): siRNA sense strand
acacugaagacauuccuua

SEQ ID NO: 919505 - RNA, 19 nt, Homo sapiens
  misc_RNA (1)...(19): siRNA sense strand
gcaauauaaggaagccaua

SEQ ID NO: 919506 - RNA, 19 nt, Homo sapiens
  misc_RNA (1)...(19): siRNA sense strand
gagaguugaggaaccguua

SEQ ID NO: 919507 - RNA, 19 nt, Homo sapiens
  misc_RNA (1)...(19): siRNA sense strand
ggaaagauagacaaugaag

SEQ ID NO: 919508 - RNA, 19 nt, Homo sapiens
  misc_RNA (1)...(19): siRNA sense strand
uagcuuguauucuggaaga

SEQ ID NO: 919509 - RNA, 19 nt, Homo sapiens
  misc_RNA (1)...(19): siRNA sense strand
cgagggaaagccagaagua

SEQ ID NO: 919510 - RNA, 19 nt, Homo sapiens
  misc_RNA (1)...(19): siRNA sense strand
aagggacacugaagacauu

SEQ ID NO: 919511 - RNA, 19 nt, Homo sapiens
  misc_RNA (1)...(19): siRNA sense strand
gaagggacacugaagacau

SEQ ID NO: 919512 - RNA, 19 nt, Homo sapiens
  misc_RNA (1)...(19): siRNA sense strand
uaaggaagccauacaugau

SEQ ID NO: 919513 - RNA, 19 nt, Homo sapiens
  misc_RNA (1)...(19): siRNA sense strand
gaugauauacccaggaaag

SEQ ID NO: 919514 - RNA, 19 nt, Homo sapiens
  misc_RNA (1)...(19): siRNA sense strand
gaaacaagggcugcaggaa

SEQ ID NO: 919515 - RNA, 19 nt, Homo sapiens
  misc_RNA (1)...(19): siRNA sense strand
cagcaaugaggacaugaua

SEQ ID NO: 919516 - RNA, 19 nt, Homo sapiens
  misc_RNA (1)...(19): siRNA sense strand
ggagaaggaaagucagaga

SEQ ID NO: 919517 - RNA, 19 nt, Homo sapiens
  misc_RNA (1)...(19): siRNA sense strand
aagagaauuugacaacaug

SEQ ID NO: 919518 - RNA, 19 nt, Homo sapiens
  misc_RNA (1)...(19): siRNA sense strand
gcagggaggaucaaagaca

SEQ ID NO: 919519 - RNA, 19 nt, Homo sapiens
  misc_RNA (1)...(19): siRNA sense strand
ggagagccagaaagugaaa

SEQ ID NO: 919520 - RNA, 19 nt, Homo sapiens
  misc_RNA (1)...(19): siRNA sense strand
aaggagagccagacaguga

SEQ ID NO: 919521 - RNA, 19 nt, Homo sapiens
  misc_RNA (1)...(19): siRNA sense strand
aaggaagccauacaugaua

SEQ ID NO: 919522 - RNA, 19 nt, Homo sapiens
  misc_RNA (1)...(19): siRNA sense strand
ugaaagagagccagagagu

SEQ ID NO: 919523 - RNA, 19 nt, Homo sapiens
  misc_RNA (1)...(19): siRNA sense strand
ccagaaguagcuuguauuc

SEQ ID NO: 919524 - RNA, 19 nt, Homo sapiens
  misc_RNA (1)...(19): siRNA sense strand
acaaggggcuggcucagua

SEQ ID NO: 919525 - RNA, 19 nt, Homo sapiens
  misc_RNA (1)...(19): siRNA sense strand
aacaagggcugcaggaaag

SEQ ID NO: 919526 - RNA, 19 nt, Homo sapiens
  misc_RNA (1)...(19): siRNA sense strand
ggagagccagacagugaaa

SEQ ID NO: 919527 - RNA, 19 nt, Homo sapiens
  misc_RNA (1)...(19): siRNA sense strand
auaaggaagccauacauga

SEQ ID NO: 919528 - RNA, 19 nt, Homo sapiens
  misc_RNA (1)...(19): siRNA sense strand
guggaugcaaagaaauuua

SEQ ID NO: 919529 - RNA, 19 nt, Homo sapiens
  misc_RNA (1)...(19): siRNA sense strand
caaugaaaaugaaggaaug

SEQ ID NO: 919530 - RNA, 19 nt, Homo sapiens
  misc_RNA (1)...(19): siRNA sense strand
gaggacaugauaagagaau

SEQ ID NO: 919531 - RNA, 19 nt, Homo sapiens
  misc_RNA (1)...(19): siRNA sense strand
gacaugauaagagaauuug

SEQ ID NO: 919532 - RNA, 19 nt, Homo sapiens
  misc_RNA (1)...(19): siRNA sense strand
gaguugaggaaccguuaaa

SEQ ID NO: 919533 - RNA, 19 nt, Homo sapiens
  misc_RNA (1)...(19): siRNA sense strand
ggaagacaagaaguuagaa

SEQ ID NO: 919534 - RNA, 19 nt, Homo sapiens
  misc_RNA (1)...(19): siRNA sense strand
ggaagggaaagucagagau

SEQ ID NO: 919535 - RNA, 19 nt, Homo sapiens
  misc_RNA (1)...(19): siRNA sense strand
aggaaccguuaaaggauaa

SEQ ID NO: 919536 - RNA, 19 nt, Homo sapiens
  misc_RNA (1)...(19): siRNA sense strand
aggaagccauacaugauau

SEQ ID NO: 919537 - RNA, 19 nt, Homo sapiens
  misc_RNA (1)...(19): siRNA sense strand
gggcaagagaguugaggaa

SEQ ID NO: 919538 - RNA, 19 nt, Homo sapiens
  misc_RNA (1)...(19): siRNA sense strand
augaggacaugauaagaga

SEQ ID NO: 919539 - RNA, 19 nt, Homo sapiens
  misc_RNA (1)...(19): siRNA sense strand
gcucaguaccucaagcaau

SEQ ID NO: 919540 - RNA, 19 nt, Homo sapiens
  misc_RNA (1)...(19): siRNA sense strand
agggagagccagaaaguga

SEQ ID NO: 919541 - RNA, 19 nt, Homo sapiens
  misc_RNA (1)...(19): siRNA sense strand
caaggaaagauagacaaug

SEQ ID NO: 919542 - RNA, 19 nt, Homo sapiens
  misc_RNA (1)...(19): siRNA sense strand
caggaaagccaaaagaaaa

SEQ ID NO: 919543 - RNA, 19 nt, Homo sapiens
  misc_RNA (1)...(19): siRNA sense strand
ucuggaagacaagaaguua

SEQ ID NO: 919544 - RNA, 19 nt, Homo sapiens
  misc_RNA (1)...(19): siRNA sense strand
agccagaaguagcuuguau

SEQ ID NO: 919545 - RNA, 19 nt, Homo sapiens
  misc_RNA (1)...(19): siRNA sense strand
aggaugauauacccaggaa

SEQ ID NO: 919546 - RNA, 19 nt, Homo sapiens
  misc_RNA (1)...(19): siRNA sense strand
ugaggaaccguuaaaggau

SEQ ID NO: 919547 - RNA, 19 nt, Homo sapiens
  misc_RNA (1)...(19): siRNA sense strand
ugaaggagagccagacagu

SEQ ID NO: 919548 - RNA, 19 nt, Homo sapiens
  misc_RNA (1)...(19): siRNA sense strand
uggaagacaagaaguuaga

SEQ ID NO: 919549 - RNA, 19 nt, Homo sapiens
  misc_RNA (1)...(19): siRNA sense strand
ucaaggaaagauagacaau

SEQ ID NO: 919550 - RNA, 19 nt, Homo sapiens
  misc_RNA (1)...(19): siRNA sense strand
gggagagccagaaagugaa

SEQ ID NO: 919551 - RNA, 19 nt, Homo sapiens
  misc_RNA (1)...(19): siRNA sense strand
gccagaaguagcuuguauu

SEQ ID NO: 919552 - RNA, 19 nt, Homo sapiens
  misc_RNA (1)...(19): siRNA sense strand
uugaggaaccguuaaagga

SEQ ID NO: 919553 - RNA, 19 nt, Homo sapiens
  misc_RNA (1)...(19): siRNA sense strand
uauaaggaagccauacaug

SEQ ID NO: 919554 - RNA, 19 nt, Homo sapiens
  misc_RNA (1)...(19): siRNA sense strand
aaacgagggaaacacagaa

SEQ ID NO: 919555 - RNA, 19 nt, Homo sapiens
  misc_RNA (1)...(19): siRNA sense strand
ugagggagagccagaaagu

SEQ ID NO: 919556 - RNA, 19 nt, Homo sapiens
  misc_RNA (1)...(19): siRNA sense strand
aggaaugccuucgaaucaa

SEQ ID NO: 919557 - RNA, 19 nt, Homo sapiens
  misc_RNA (1)...(19): siRNA sense strand
agucagagaggaagggaaa

SEQ ID NO: 919558 - RNA, 19 nt, Homo sapiens
  misc_RNA (1)...(19): siRNA sense strand
ccucaagcaauauaaggaa

SEQ ID NO: 919559 - RNA, 19 nt, Homo sapiens
  misc_RNA (1)...(19): siRNA sense strand
caaugaggacaugauaaga

SEQ ID NO: 919560 - RNA, 19 nt, Homo sapiens
  misc_RNA (1)...(19): siRNA sense strand
cgaaucaaggaaagauaga

SEQ ID NO: 919561 - RNA, 19 nt, Homo sapiens
  misc_RNA (1)...(19): siRNA sense strand
gggaagggcagagggugaa

SEQ ID NO: 919562 - RNA, 19 nt, Homo sapiens
  misc_RNA (1)...(19): siRNA sense strand
gagggaaagccagaaguag

SEQ ID NO: 919563 - RNA, 19 nt, Homo sapiens
  misc_RNA (1)...(19): siRNA sense strand
gcacgagggaaagccagaa

SEQ ID NO: 919564 - RNA, 19 nt, Homo sapiens
  misc_RNA (1)...(19): siRNA sense strand
gggaaagccagaaguagcu

SEQ ID NO: 919565 - RNA, 19 nt, Homo sapiens
  misc_RNA (1)...(19): siRNA sense strand
ccacgaagggacacugaag

SEQ ID NO: 919566 - RNA, 19 nt, Homo sapiens
  misc_RNA (1)...(19): siRNA sense strand
caguaccucaagcaauaua

SEQ ID NO: 919567 - RNA, 19 nt, Homo sapiens
  misc_RNA (1)...(19): siRNA sense strand
ucaaauggcuccagacaug

SEQ ID NO: 919568 - RNA, 19 nt, Homo sapiens
  misc_RNA (1)...(19): siRNA sense strand
gaaagugcauagaagaugu

SEQ ID NO: 919569 - RNA, 19 nt, Homo sapiens
  misc_RNA (1)...(19): siRNA sense strand
aagcaaagcugacggaaga

SEQ ID NO: 919570 - RNA, 19 nt, Homo sapiens
  misc_RNA (1)...(19): siRNA sense strand
ggaggagacuggcaucugu

SEQ ID NO: 919571 - RNA, 19 nt, Homo sapiens
  misc_RNA (1)...(19): siRNA sense strand
gugaaagacuuccacauca

SEQ ID NO: 919572 - RNA, 19 nt, Homo sapiens
  misc_RNA (1)...(19): siRNA sense strand
ucaagaaggugcuguacga

SEQ ID NO: 919573 - RNA, 19 nt, Homo sapiens
  misc_RNA (1)...(19): siRNA sense strand
gcagaaagugcauagaaga

SEQ ID NO: 919574 - RNA, 19 nt, Homo sapiens
  misc_RNA (1)...(19): siRNA sense strand
cccagaagaugcuaagaaa

SEQ ID NO: 919575 - RNA, 19 nt, Homo sapiens
  misc_RNA (1)...(19): siRNA sense strand
ugaaagacuuccacaucaa

SEQ ID NO: 919576 - RNA, 19 nt, Homo sapiens
  misc_RNA (1)...(19): siRNA sense strand
uagaagaugugauccacuu

SEQ ID NO: 919577 - RNA, 19 nt, Homo sapiens
  misc_RNA (1)...(19): siRNA sense strand
gaucuucauuccugccaaa

SEQ ID NO: 919578 - RNA, 19 nt, Homo sapiens
  misc_RNA (1)...(19): siRNA sense strand
gaagaugugauccacuuug

SEQ ID NO: 919579 - RNA, 19 nt, Homo sapiens
  misc_RNA (1)...(19): siRNA sense strand
gcacuuaccacuucaggau

SEQ ID NO: 919580 - RNA, 19 nt, Homo sapiens
  misc_RNA (1)...(19): siRNA sense strand
gcugggcgcugaaugugaa

SEQ ID NO: 919581 - RNA, 19 nt, Homo sapiens
  misc_RNA (1)...(19): siRNA sense strand
cggaagaccuguuuaacca

SEQ ID NO: 919582 - RNA, 19 nt, Homo sapiens
  misc_RNA (1)...(19): siRNA sense strand
ccauccaggugaauuacua

SEQ ID NO: 919583 - RNA, 19 nt, Homo sapiens
  misc_RNA (1)...(19): siRNA sense strand
gggcgagugugguuacaga

SEQ ID NO: 919584 - RNA, 19 nt, Homo sapiens
  misc_RNA (1)...(19): siRNA sense strand
ugacggaagaccuguuuaa

SEQ ID NO: 919585 - RNA, 19 nt, Homo sapiens
  misc_RNA (1)...(19): siRNA sense strand
uaaccaagucccaggaauu

SEQ ID NO: 919586 - RNA, 19 nt, Homo sapiens
  misc_RNA (1)...(19): siRNA sense strand
aaacggugcugcagaaggu

SEQ ID NO: 919587 - RNA, 19 nt, Homo sapiens
  misc_RNA (1)...(19): siRNA sense strand
ggugaaagacuuccacauc

SEQ ID NO: 919588 - RNA, 19 nt, Homo sapiens
  misc_RNA (1)...(19): siRNA sense strand
aaagaccacugugauccua

SEQ ID NO: 919589 - RNA, 19 nt, Homo sapiens
  misc_RNA (1)...(19): siRNA sense strand
aaggugcucugcauaauca

SEQ ID NO: 919590 - RNA, 19 nt, Homo sapiens
  misc_RNA (1)...(19): siRNA sense strand
ccuaaggugcucugcauaa

SEQ ID NO: 919591 - RNA, 19 nt, Homo sapiens
  misc_RNA (1)...(19): siRNA sense strand
agaaggugcuguacgagau

SEQ ID NO: 919592 - RNA, 19 nt, Homo sapiens
  misc_RNA (1)...(19): siRNA sense strand
gcuagugacggcauuucua

SEQ ID NO: 919593 - RNA, 19 nt, Homo sapiens
  misc_RNA (1)...(19): siRNA sense strand
gcaauucagccgagagaag

SEQ ID NO: 919594 - RNA, 19 nt, Homo sapiens
  misc_RNA (1)...(19): siRNA sense strand
cuauucagcugucaucucu

SEQ ID NO: 919595 - RNA, 19 nt, Homo sapiens
  misc_RNA (1)...(19): siRNA sense strand
gagcaauucagccgagaga

SEQ ID NO: 919596 - RNA, 19 nt, Homo sapiens
  misc_RNA (1)...(19): siRNA sense strand
cuaaggugcucugcauaau

SEQ ID NO: 919597 - RNA, 19 nt, Homo sapiens
  misc_RNA (1)...(19): siRNA sense strand
gaaagacuuccacaucaac

SEQ ID NO: 919598 - RNA, 19 nt, Homo sapiens
  misc_RNA (1)...(19): siRNA sense strand
ugaaaacggugcugcagaa

SEQ ID NO: 919599 - RNA, 19 nt, Homo sapiens
  misc_RNA (1)...(19): siRNA sense strand
uuacagaggaggcuacaug

SEQ ID NO: 919600 - RNA, 19 nt, Homo sapiens
  misc_RNA (1)...(19): siRNA sense strand
gugcauagaagaugugauc

SEQ ID NO: 919601 - RNA, 19 nt, Homo sapiens
  misc_RNA (1)...(19): siRNA sense strand
aagcagaaagugcauagaa

SEQ ID NO: 919602 - RNA, 19 nt, Homo sapiens
  misc_RNA (1)...(19): siRNA sense strand
ggaguccuuugagcaauuc

SEQ ID NO: 919603 - RNA, 19 nt, Homo sapiens
  misc_RNA (1)...(19): siRNA sense strand
ugcagaaggugaaagacuu

SEQ ID NO: 919604 - RNA, 19 nt, Homo sapiens
  misc_RNA (1)...(19): siRNA sense strand
caaagcagaaagugcauag

SEQ ID NO: 919605 - RNA, 19 nt, Homo sapiens
  misc_RNA (1)...(19): siRNA sense strand
gcagauuccacuccuucaa

SEQ ID NO: 919606 - RNA, 19 nt, Homo sapiens
  misc_RNA (1)...(19): siRNA sense strand
caacguguacucuccagau

SEQ ID NO: 919607 - RNA, 19 nt, Homo sapiens
  misc_RNA (1)...(19): siRNA sense strand
gcugacggaagaccuguuu

SEQ ID NO: 919608 - RNA, 19 nt, Homo sapiens
  misc_RNA (1)...(19): siRNA sense strand
gaggcuacauggaggugau

SEQ ID NO: 919609 - RNA, 19 nt, Homo sapiens
  misc_RNA (1)...(19): siRNA sense strand
caacugcauccgugaagau

SEQ ID NO: 919610 - RNA, 19 nt, Homo sapiens
  misc_RNA (1)...(19): siRNA sense strand
gggaaggcacuuaccacuu

SEQ ID NO: 919611 - RNA, 19 nt, Homo sapiens
  misc_RNA (1)...(19): siRNA sense strand
ggaagaccuguuuaaccaa

SEQ ID NO: 919612 - RNA, 19 nt, Homo sapiens
  misc_RNA (1)...(19): siRNA sense strand
gaaggugcuguacgagaug

SEQ ID NO: 919613 - RNA, 19 nt, Homo sapiens
  misc_RNA (1)...(19): siRNA sense strand
gcauuucuacgauccugaa

SEQ ID NO: 919614 - RNA, 19 nt, Homo sapiens
  misc_RNA (1)...(19): siRNA sense strand
ccacaggccagguacaaag

SEQ ID NO: 919615 - RNA, 19 nt, Homo sapiens
  misc_RNA (1)...(19): siRNA sense strand
ggccaaagaccacugugau

SEQ ID NO: 919616 - RNA, 19 nt, Homo sapiens
  misc_RNA (1)...(19): siRNA sense strand
uuucuacgauccugaagau

SEQ ID NO: 919617 - RNA, 19 nt, Homo sapiens
  misc_RNA (1)...(19): siRNA sense strand
agauuccacuccuucaaga

SEQ ID NO: 919618 - RNA, 19 nt, Homo sapiens
  misc_RNA (1)...(19): siRNA sense strand
cagaagaugcuaagaaacg

SEQ ID NO: 919619 - RNA, 19 nt, Homo sapiens
  misc_RNA (1)...(19): siRNA sense strand
gcagagggaaggcacuuac

SEQ ID NO: 919620 - RNA, 19 nt, Homo sapiens
  misc_RNA (1)...(19): siRNA sense strand
caucaaauggcuccagaca

SEQ ID NO: 919621 - RNA, 19 nt, Homo sapiens
  misc_RNA (1)...(19): siRNA sense strand
gaacugcugggcgcugaau

SEQ ID NO: 919622 - RNA, 19 nt, Homo sapiens
  misc_RNA (1)...(19): siRNA sense strand
cuccagacauguucuacug

SEQ ID NO: 919623 - RNA, 19 nt, Homo sapiens
  misc_RNA (1)...(19): siRNA sense strand
ccaugaacccgcaggugaa

SEQ ID NO: 919624 - RNA, 19 nt, Homo sapiens
  misc_RNA (1)...(19): siRNA sense strand
cagaaagugcauagaagau

SEQ ID NO: 919625 - RNA, 19 nt, Homo sapiens
  misc_RNA (1)...(19): siRNA sense strand
acuuaccacuucaggauga

SEQ ID NO: 919626 - RNA, 19 nt, Homo sapiens
  misc_RNA (1)...(19): siRNA sense strand
ggcaggugauggcacuaug

SEQ ID NO: 919627 - RNA, 19 nt, Homo sapiens
  misc_RNA (1)...(19): siRNA sense strand
ucaacugcauccgugaaga

SEQ ID NO: 919628 - RNA, 19 nt, Homo sapiens
  misc_RNA (1)...(19): siRNA sense strand
gggagcuagugacggcauu

SEQ ID NO: 919629 - RNA, 19 nt, Homo sapiens
  misc_RNA (1)...(19): siRNA sense strand
gcauagaagaugugaucca

SEQ ID NO: 919630 - RNA, 19 nt, Homo sapiens
  misc_RNA (1)...(19): siRNA sense strand
gggcgcugaaugugaauga

SEQ ID NO: 919631 - RNA, 19 nt, Homo sapiens
  misc_RNA (1)...(19): siRNA sense strand
ucccaggaauucacugcaa

SEQ ID NO: 919632 - RNA, 19 nt, Homo sapiens
  misc_RNA (1)...(19): siRNA sense strand
aacguguacucuccagauu

SEQ ID NO: 919633 - RNA, 19 nt, Homo sapiens
  misc_RNA (1)...(19): siRNA sense strand
agaaagugcauagaagaug

SEQ ID NO: 919634 - RNA, 19 nt, Homo sapiens
  misc_RNA (1)...(19): siRNA sense strand
ggaacagccugggguccua

SEQ ID NO: 919635 - RNA, 19 nt, Homo sapiens
  misc_RNA (1)...(19): siRNA sense strand
uaaggugcucugcauaauc

SEQ ID NO: 919636 - RNA, 19 nt, Homo sapiens
  misc_RNA (1)...(19): siRNA sense strand
gccaaagaccacugugauc

SEQ ID NO: 919637 - RNA, 19 nt, Homo sapiens
  misc_RNA (1)...(19): siRNA sense strand
ggagcuagugacggcauuu

SEQ ID NO: 919638 - RNA, 19 nt, Homo sapiens
  misc_RNA (1)...(19): siRNA sense strand
ugauggcacuaugcaccua

SEQ ID NO: 919639 - RNA, 19 nt, Homo sapiens
  misc_RNA (1)...(19): siRNA sense strand
caaccugcacccugagauc

SEQ ID NO: 919640 - RNA, 19 nt, Homo sapiens
  misc_RNA (1)...(19): siRNA sense strand
gugacggcauuucuacgau

SEQ ID NO: 919641 - RNA, 19 nt, Homo sapiens
  misc_RNA (1)...(19): siRNA sense strand
cguguacucuccagauugc

SEQ ID NO: 919642 - RNA, 19 nt, Homo sapiens
  misc_RNA (1)...(19): siRNA sense strand
ggcagcagccaaucaccuu

SEQ ID NO: 919643 - RNA, 19 nt, Homo sapiens
  misc_RNA (1)...(19): siRNA sense strand
uuaaccaagucccaggaau

SEQ ID NO: 919644 - RNA, 19 nt, Homo sapiens
  misc_RNA (1)...(19): siRNA sense strand
ucccagaagaugcuaagaa

SEQ ID NO: 919645 - RNA, 19 nt, Homo sapiens
  misc_RNA (1)...(19): siRNA sense strand
ggucauccgagccaacauc

SEQ ID NO: 919646 - RNA, 19 nt, Homo sapiens
  misc_RNA (1)...(19): siRNA sense strand
acaucaacuuccuggagaa

SEQ ID NO: 919647 - RNA, 19 nt, Homo sapiens
  misc_RNA (1)...(19): siRNA sense strand
gccagggugucaacugcau

SEQ ID NO: 919648 - RNA, 19 nt, Homo sapiens
  misc_RNA (1)...(19): siRNA sense strand
gaagauguggcugccuaca

SEQ ID NO: 919649 - RNA, 19 nt, Homo sapiens
  misc_RNA (1)...(19): siRNA sense strand
ucaagggccagcuggugaa

SEQ ID NO: 919650 - RNA, 19 nt, Homo sapiens
  misc_RNA (1)...(19): siRNA sense strand
ggccagguacaaagcagaa

SEQ ID NO: 919651 - RNA, 19 nt, Homo sapiens
  misc_RNA (1)...(19): siRNA sense strand
gcacagccauccagcauua

SEQ ID NO: 919652 - RNA, 19 nt, Homo sapiens
  misc_RNA (1)...(19): siRNA sense strand
ggagaugccugaagcuuug

SEQ ID NO: 919653 - RNA, 19 nt, Homo sapiens
  misc_RNA (1)...(19): siRNA sense strand
acaaagagaugcagauaga

SEQ ID NO: 919654 - RNA, 19 nt, Homo sapiens
  misc_RNA (1)...(19): siRNA sense strand
gagcauaccugaugaacag

SEQ ID NO: 919655 - RNA, 19 nt, Homo sapiens
  misc_RNA (1)...(19): siRNA sense strand
ggaggugggaguuuaaaua

SEQ ID NO: 919656 - RNA, 19 nt, Homo sapiens
  misc_RNA (1)...(19): siRNA sense strand
gcaauggccuauccaagga

SEQ ID NO: 919657 - RNA, 19 nt, Homo sapiens
  misc_RNA (1)...(19): siRNA sense strand
agaaacaccuaaagaagaa

SEQ ID NO: 919658 - RNA, 19 nt, Homo sapiens
  misc_RNA (1)...(19): siRNA sense strand
ggaagguuaugucaucuau

SEQ ID NO: 919659 - RNA, 19 nt, Homo sapiens
  misc_RNA (1)...(19): siRNA sense strand
gcccauggcugcugcugua

SEQ ID NO: 919660 - RNA, 19 nt, Homo sapiens
  misc_RNA (1)...(19): siRNA sense strand
gaggaacucucaaacagau

SEQ ID NO: 919661 - RNA, 19 nt, Homo sapiens
  misc_RNA (1)...(19): siRNA sense strand
caauacagcuuguguucga

SEQ ID NO: 919662 - RNA, 19 nt, Homo sapiens
  misc_RNA (1)...(19): siRNA sense strand
ugaggugacuguugaaguu

SEQ ID NO: 919663 - RNA, 19 nt, Homo sapiens
  misc_RNA (1)...(19): siRNA sense strand
aaacagggcaugcucuuaa

SEQ ID NO: 919664 - RNA, 19 nt, Homo sapiens
  misc_RNA (1)...(19): siRNA sense strand
gaggugggaguuuaaauaa

SEQ ID NO: 919665 - RNA, 19 nt, Homo sapiens
  misc_RNA (1)...(19): siRNA sense strand
gaaauaagaagaagcaacu

SEQ ID NO: 919666 - RNA, 19 nt, Homo sapiens
  misc_RNA (1)...(19): siRNA sense strand
aagcuuaggugauuauaug

SEQ ID NO: 919667 - RNA, 19 nt, Homo sapiens
  misc_RNA (1)...(19): siRNA sense strand
ggagugacccagacaaaga

SEQ ID NO: 919668 - RNA, 19 nt, Homo sapiens
  misc_RNA (1)...(19): siRNA sense strand
gaacaguuacacucauuug

SEQ ID NO: 919669 - RNA, 19 nt, Homo sapiens
  misc_RNA (1)...(19): siRNA sense strand
ucaacgugcuucugcagua

SEQ ID NO: 919670 - RNA, 19 nt, Homo sapiens
  misc_RNA (1)...(19): siRNA sense strand
aaauggaggugggaguuua

SEQ ID NO: 919671 - RNA, 19 nt, Homo sapiens
  misc_RNA (1)...(19): siRNA sense strand
cgacaauauuccuugauga

SEQ ID NO: 919672 - RNA, 19 nt, Homo sapiens
  misc_RNA (1)...(19): siRNA sense strand
aagguuaugucaucuauug

SEQ ID NO: 919673 - RNA, 19 nt, Homo sapiens
  misc_RNA (1)...(19): siRNA sense strand
gguccaaccuguuuacauc

SEQ ID NO: 919674 - RNA, 19 nt, Homo sapiens
  misc_RNA (1)...(19): siRNA sense strand
ucaggaagguuaugucauc

SEQ ID NO: 919675 - RNA, 19 nt, Homo sapiens
  misc_RNA (1)...(19): siRNA sense strand
gccugaagcuuuggaguuu

SEQ ID NO: 919676 - RNA, 19 nt, Homo sapiens
  misc_RNA (1)...(19): siRNA sense strand
cauaccugaugaacaguua

SEQ ID NO: 919677 - RNA, 19 nt, Homo sapiens
  misc_RNA (1)...(19): siRNA sense strand
gaaauggaggugggaguuu

SEQ ID NO: 919678 - RNA, 19 nt, Homo sapiens
  misc_RNA (1)...(19): siRNA sense strand
caccuauuauucaagcuua

SEQ ID NO: 919679 - RNA, 19 nt, Homo sapiens
  misc_RNA (1)...(19): siRNA sense strand
gcagagccauccccauuaa

SEQ ID NO: 919680 - RNA, 19 nt, Homo sapiens
  misc_RNA (1)...(19): siRNA sense strand
gaagaagcaacuguacaaa

SEQ ID NO: 919681 - RNA, 19 nt, Homo sapiens
  misc_RNA (1)...(19): siRNA sense strand
accaacaacuuuaugauug

SEQ ID NO: 919682 - RNA, 19 nt, Homo sapiens
  misc_RNA (1)...(19): siRNA sense strand
ggaguccucauguguauug

SEQ ID NO: 919683 - RNA, 19 nt, Homo sapiens
  misc_RNA (1)...(19): siRNA sense strand
caaaccauguaucuacugu

SEQ ID NO: 919684 - RNA, 19 nt, Homo sapiens
  misc_RNA (1)...(19): siRNA sense strand
gaaauacgucacccugugu

SEQ ID NO: 919685 - RNA, 19 nt, Homo sapiens
  misc_RNA (1)...(19): siRNA sense strand
uaauaucugugaccuugga

SEQ ID NO: 919686 - RNA, 19 nt, Homo sapiens
  misc_RNA (1)...(19): siRNA sense strand
gggagaugccugaagcuuu

SEQ ID NO: 919687 - RNA, 19 nt, Homo sapiens
  misc_RNA (1)...(19): siRNA sense strand
cugaagcuuuggaguuuaa

SEQ ID NO: 919688 - RNA, 19 nt, Homo sapiens
  misc_RNA (1)...(19): siRNA sense strand
cugcugaggugacuguuga

SEQ ID NO: 919689 - RNA, 19 nt, Homo sapiens
  misc_RNA (1)...(19): siRNA sense strand
guagaaauaagaagaagca

SEQ ID NO: 919690 - RNA, 19 nt, Homo sapiens
  misc_RNA (1)...(19): siRNA sense strand
guugagcucaggaagguua

SEQ ID NO: 919691 - RNA, 19 nt, Homo sapiens
  misc_RNA (1)...(19): siRNA sense strand
aagaaacaccuaaagaaga

SEQ ID NO: 919692 - RNA, 19 nt, Homo sapiens
  misc_RNA (1)...(19): siRNA sense strand
uaacuauuccuccuccauu

SEQ ID NO: 919693 - RNA, 19 nt, Homo sapiens
  misc_RNA (1)...(19): siRNA sense strand
caucauaucacacaaagag

SEQ ID NO: 919694 - RNA, 19 nt, Homo sapiens
  misc_RNA (1)...(19): siRNA sense strand
acacaaagagaugcagaua

SEQ ID NO: 919695 - RNA, 19 nt, Homo sapiens
  misc_RNA (1)...(19): siRNA sense strand
uauucaagcuuaggugauu

SEQ ID NO: 919696 - RNA, 19 nt, Homo sapiens
  misc_RNA (1)...(19): siRNA sense strand
gcgcugguccaaccuguuu

SEQ ID NO: 919697 - RNA, 19 nt, Homo sapiens
  misc_RNA (1)...(19): siRNA sense strand
agaagaagcaacuguacaa

SEQ ID NO: 919698 - RNA, 19 nt, Homo sapiens
  misc_RNA (1)...(19): siRNA sense strand
aaagaaacaccuaaagaag

SEQ ID NO: 919699 - RNA, 19 nt, Homo sapiens
  misc_RNA (1)...(19): siRNA sense strand
uaaacagggcaugcucuua

SEQ ID NO: 919700 - RNA, 19 nt, Homo sapiens
  misc_RNA (1)...(19): siRNA sense strand
caccaacaacuuuaugauu

SEQ ID NO: 919701 - RNA, 19 nt, Homo sapiens
  misc_RNA (1)...(19): siRNA sense strand
guucgacaauauuccuuga

SEQ ID NO: 919702 - RNA, 19 nt, Homo sapiens
  misc_RNA (1)...(19): siRNA sense strand
ccaucaaagucccaggaaa

SEQ ID NO: 919703 - RNA, 19 nt, Homo sapiens
  misc_RNA (1)...(19): siRNA sense strand
gacccucaguucaguguuc

SEQ ID NO: 919704 - RNA, 19 nt, Homo sapiens
  misc_RNA (1)...(19): siRNA sense strand
gcccugcagucgauccaaa

SEQ ID NO: 919705 - RNA, 19 nt, Homo sapiens
  misc_RNA (1)...(19): siRNA sense strand
gcaccaacaacuuuaugau

SEQ ID NO: 919706 - RNA, 19 nt, Homo sapiens
  misc_RNA (1)...(19): siRNA sense strand
ucgacaauauuccuugaug

SEQ ID NO: 919707 - RNA, 19 nt, Homo sapiens
  misc_RNA (1)...(19): siRNA sense strand
gcgucagccucgaguuuga

SEQ ID NO: 919708 - RNA, 19 nt, Homo sapiens
  misc_RNA (1)...(19): siRNA sense strand
ccagaggcaagcacaauau

SEQ ID NO: 919709 - RNA, 19 nt, Homo sapiens
  misc_RNA (1)...(19): siRNA sense strand
auaagaagaagcaacugua

SEQ ID NO: 919710 - RNA, 19 nt, Homo sapiens
  misc_RNA (1)...(19): siRNA sense strand
ggccaucccuagccacauc

SEQ ID NO: 919711 - RNA, 19 nt, Homo sapiens
  misc_RNA (1)...(19): siRNA sense strand
gauagaucuuugagcauac

SEQ ID NO: 919712 - RNA, 19 nt, Homo sapiens
  misc_RNA (1)...(19): siRNA sense strand
guuuaacccuucugccaau

SEQ ID NO: 919713 - RNA, 19 nt, Homo sapiens
  misc_RNA (1)...(19): siRNA sense strand
ccugaagcuuuggaguuua

SEQ ID NO: 919714 - RNA, 19 nt, Homo sapiens
  misc_RNA (1)...(19): siRNA sense strand
caucaaagucccaggaaag

SEQ ID NO: 919715 - RNA, 19 nt, Homo sapiens
  misc_RNA (1)...(19): siRNA sense strand
ccaaccuguuuacaucuga

SEQ ID NO: 919716 - RNA, 19 nt, Homo sapiens
  misc_RNA (1)...(19): siRNA sense strand
gcguuucagucaacaauac

SEQ ID NO: 919717 - RNA, 19 nt, Homo sapiens
  misc_RNA (1)...(19): siRNA sense strand
guccucauguguauugaau

SEQ ID NO: 919718 - RNA, 19 nt, Homo sapiens
  misc_RNA (1)...(19): siRNA sense strand
ggaacucucaaacagaugu

SEQ ID NO: 919719 - RNA, 19 nt, Homo sapiens
  misc_RNA (1)...(19): siRNA sense strand
uuggagauaccucaucaua

SEQ ID NO: 919720 - RNA, 19 nt, Homo sapiens
  misc_RNA (1)...(19): siRNA sense strand
cauccagcauuaucuuaca

SEQ ID NO: 919721 - RNA, 19 nt, Homo sapiens
  misc_RNA (1)...(19): siRNA sense strand
gcucaggaagguuauguca

SEQ ID NO: 919722 - RNA, 19 nt, Homo sapiens
  misc_RNA (1)...(19): siRNA sense strand
ugggaguccucauguguau

SEQ ID NO: 919723 - RNA, 19 nt, Homo sapiens
  misc_RNA (1)...(19): siRNA sense strand
gcaacuguacaaaccaugu

SEQ ID NO: 919724 - RNA, 19 nt, Homo sapiens
  misc_RNA (1)...(19): siRNA sense strand
aacagggcaugcucuuaaa

SEQ ID NO: 919725 - RNA, 19 nt, Homo sapiens
  misc_RNA (1)...(19): siRNA sense strand
uuacacucauuugcaguuu

SEQ ID NO: 919726 - RNA, 19 nt, Homo sapiens
  misc_RNA (1)...(19): siRNA sense strand
gccauccagcauuaucuua

SEQ ID NO: 919727 - RNA, 19 nt, Homo sapiens
  misc_RNA (1)...(19): siRNA sense strand
gaagguuaugucaucuauu

SEQ ID NO: 919728 - RNA, 19 nt, Homo sapiens
  misc_RNA (1)...(19): siRNA sense strand
caguugagcucaggaaggu

SEQ ID NO: 919729 - RNA, 19 nt, Homo sapiens
  misc_RNA (1)...(19): siRNA sense strand
cgggcugggugacuccaua

SEQ ID NO: 919730 - RNA, 19 nt, Homo sapiens
  misc_RNA (1)...(19): siRNA sense strand
agaagcaacuguacaaacc

SEQ ID NO: 919731 - RNA, 19 nt, Homo sapiens
  misc_RNA (1)...(19): siRNA sense strand
aaagagaugcagauagauc

SEQ ID NO: 919732 - RNA, 19 nt, Homo sapiens
  misc_RNA (1)...(19): siRNA sense strand
uagcgucagccucgaguuu

SEQ ID NO: 919733 - RNA, 19 nt, Homo sapiens
  misc_RNA (1)...(19): siRNA sense strand
ccauggcccugcagucgau

SEQ ID NO: 919734 - RNA, 19 nt, Homo sapiens
  misc_RNA (1)...(19): siRNA sense strand
ccgugcacauuaugaagaa

SEQ ID NO: 919735 - RNA, 19 nt, Homo sapiens
  misc_RNA (1)...(19): siRNA sense strand
ccucauguguauugaaugc

SEQ ID NO: 919736 - RNA, 19 nt, Homo sapiens
  misc_RNA (1)...(19): siRNA sense strand
ccuuggagauaccucauca

SEQ ID NO: 919737 - RNA, 19 nt, Homo sapiens
  misc_RNA (1)...(19): siRNA sense strand
caacgugcuucugcaguac

SEQ ID NO: 919738 - RNA, 19 nt, Homo sapiens
  misc_RNA (1)...(19): siRNA sense strand
cagaggcaagcacaauauu

SEQ ID NO: 919739 - RNA, 19 nt, Homo sapiens
  misc_RNA (1)...(19): siRNA sense strand
gcauaccugaugaacaguu

SEQ ID NO: 919740 - RNA, 19 nt, Homo sapiens
  misc_RNA (1)...(19): siRNA sense strand
uaagaagaagcaacuguac

SEQ ID NO: 919741 - RNA, 19 nt, Homo sapiens
  misc_RNA (1)...(19): siRNA sense strand
ccaccgugcacauuaugaa

SEQ ID NO: 919742 - RNA, 19 nt, Homo sapiens
  misc_RNA (1)...(19): siRNA sense strand
caagcuuaggugauuauau

SEQ ID NO: 919743 - RNA, 19 nt, Homo sapiens
  misc_RNA (1)...(19): siRNA sense strand
gaucucuggagcuggauga

SEQ ID NO: 919744 - RNA, 19 nt, Homo sapiens
  misc_RNA (1)...(19): siRNA sense strand
ugaacaguuacacucauuu

SEQ ID NO: 919745 - RNA, 19 nt, Homo sapiens
  misc_RNA (1)...(19): siRNA sense strand
gaaacaccuaaagaagaaa

SEQ ID NO: 919746 - RNA, 19 nt, Homo sapiens
  misc_RNA (1)...(19): siRNA sense strand
gcuuaggugauuauaugaa

SEQ ID NO: 919747 - RNA, 19 nt, Homo sapiens
  misc_RNA (1)...(19): siRNA sense strand
cauaucacacaaagagaug

SEQ ID NO: 919748 - RNA, 19 nt, Homo sapiens
  misc_RNA (1)...(19): siRNA sense strand
gaagcaacuguacaaacca

SEQ ID NO: 919749 - RNA, 19 nt, Homo sapiens
  misc_RNA (1)...(19): siRNA sense strand
uggccagccugcagucaug

SEQ ID NO: 919750 - RNA, 19 nt, Homo sapiens
  misc_RNA (1)...(19): siRNA sense strand
cuuaggugauuauaugaag

SEQ ID NO: 919751 - RNA, 19 nt, Homo sapiens
  misc_RNA (1)...(19): siRNA sense strand
uacaugaccugcucaguga

SEQ ID NO: 919752 - RNA, 19 nt, Homo sapiens
  misc_RNA (1)...(19): siRNA sense strand
acuaugagcucaaauacug

SEQ ID NO: 919753 - RNA, 19 nt, Homo sapiens
  misc_RNA (1)...(19): siRNA sense strand
aagcagagccaccucagua

SEQ ID NO: 919754 - RNA, 19 nt, Homo sapiens
  misc_RNA (1)...(19): siRNA sense strand
ggacgugaccaaccaggaa

SEQ ID NO: 919755 - RNA, 19 nt, Homo sapiens
  misc_RNA (1)...(19): siRNA sense strand
ucgcggugcuggaguauga

SEQ ID NO: 919756 - RNA, 19 nt, Homo sapiens
  misc_RNA (1)...(19): siRNA sense strand
gugacuaugagcucaaaua

SEQ ID NO: 919757 - RNA, 19 nt, Homo sapiens
  misc_RNA (1)...(19): siRNA sense strand
guaaggcaaucggcucuuc

SEQ ID NO: 919758 - RNA, 19 nt, Homo sapiens
  misc_RNA (1)...(19): siRNA sense strand
cagaagagauccggaaacg

SEQ ID NO: 919759 - RNA, 19 nt, Homo sapiens
  misc_RNA (1)...(19): siRNA sense strand
cggaugcccugcugugugu

SEQ ID NO: 919760 - RNA, 19 nt, Homo sapiens
  misc_RNA (1)...(19): siRNA sense strand
gcuucgcggugcuggagua

SEQ ID NO: 919761 - RNA, 19 nt, Homo sapiens
  misc_RNA (1)...(19): siRNA sense strand
ggccagaaacgcagcuuug

SEQ ID NO: 919762 - RNA, 19 nt, Homo sapiens
  misc_RNA (1)...(19): siRNA sense strand
ucacacagcagcaguucga

SEQ ID NO: 919763 - RNA, 19 nt, Homo sapiens
  misc_RNA (1)...(19): siRNA sense strand
gcagagccaccucaguaag

SEQ ID NO: 919764 - RNA, 19 nt, Homo sapiens
  misc_RNA (1)...(19): siRNA sense strand
gagcugccgccucuagauc

SEQ ID NO: 919765 - RNA, 19 nt, Homo sapiens
  misc_RNA (1)...(19): siRNA sense strand
ccaaccaggaaguacauga

SEQ ID NO: 919766 - RNA, 19 nt, Homo sapiens
  misc_RNA (1)...(19): siRNA sense strand
cagugacuaugagcucaaa

SEQ ID NO: 919767 - RNA, 19 nt, Homo sapiens
  misc_RNA (1)...(19): siRNA sense strand
caggcucgcccacuuccua

SEQ ID NO: 919768 - RNA, 19 nt, Homo sapiens
  misc_RNA (1)...(19): siRNA sense strand
guaugagacggcugagaug

SEQ ID NO: 919769 - RNA, 19 nt, Homo sapiens
  misc_RNA (1)...(19): siRNA sense strand
aggccgcaaucaaugcuuu

SEQ ID NO: 919770 - RNA, 19 nt, Homo sapiens
  misc_RNA (1)...(19): siRNA sense strand
uccaagggcuauggcuuug

SEQ ID NO: 919771 - RNA, 19 nt, Homo sapiens
  misc_RNA (1)...(19): siRNA sense strand
gaccaaccaggaaguacau

SEQ ID NO: 919772 - RNA, 19 nt, Homo sapiens
  misc_RNA (1)...(19): siRNA sense strand
uauucaggcucgcccacuu

SEQ ID NO: 919773 - RNA, 19 nt, Homo sapiens
  misc_RNA (1)...(19): siRNA sense strand
caccuggcuucaacgaugu

SEQ ID NO: 919774 - RNA, 19 nt, Homo sapiens
  misc_RNA (1)...(19): siRNA sense strand
ugacuaugagcucaaauac

SEQ ID NO: 919775 - RNA, 19 nt, Homo sapiens
  misc_RNA (1)...(19): siRNA sense strand
uccugcagcugcucaacaa

SEQ ID NO: 919776 - RNA, 19 nt, Homo sapiens
  misc_RNA (1)...(19): siRNA sense strand
uacaugaccugcucaguga

SEQ ID NO: 919777 - RNA, 19 nt, Homo sapiens
  misc_RNA (1)...(19): siRNA sense strand
acuaugagcucaaauacug

SEQ ID NO: 919778 - RNA, 19 nt, Homo sapiens
  misc_RNA (1)...(19): siRNA sense strand
aagcagagccaccucagua

SEQ ID NO: 919779 - RNA, 19 nt, Homo sapiens
  misc_RNA (1)...(19): siRNA sense strand
ggacgugaccaaccaggaa

SEQ ID NO: 919780 - RNA, 19 nt, Homo sapiens
  misc_RNA (1)...(19): siRNA sense strand
ucgcggugcuggaguauga

SEQ ID NO: 919781 - RNA, 19 nt, Homo sapiens
  misc_RNA (1)...(19): siRNA sense strand
gugacuaugagcucaaaua

SEQ ID NO: 919782 - RNA, 19 nt, Homo sapiens
  misc_RNA (1)...(19): siRNA sense strand
guaaggcaaucggcucuuc

SEQ ID NO: 919783 - RNA, 19 nt, Homo sapiens
  misc_RNA (1)...(19): siRNA sense strand
cagaagagauccggaaacg

SEQ ID NO: 919784 - RNA, 19 nt, Homo sapiens
  misc_RNA (1)...(19): siRNA sense strand
cggaugcccugcugugugu

SEQ ID NO: 919785 - RNA, 19 nt, Homo sapiens
  misc_RNA (1)...(19): siRNA sense strand
gcuucgcggugcuggagua

SEQ ID NO: 919786 - RNA, 19 nt, Homo sapiens
  misc_RNA (1)...(19): siRNA sense strand
ggccagaaacgcagcuuug

SEQ ID NO: 919787 - RNA, 19 nt, Homo sapiens
  misc_RNA (1)...(19): siRNA sense strand
ucacacagcagcaguucga

SEQ ID NO: 919788 - RNA, 19 nt, Homo sapiens
  misc_RNA (1)...(19): siRNA sense strand
gcagagccaccucaguaag

SEQ ID NO: 919789 - RNA, 19 nt, Homo sapiens
  misc_RNA (1)...(19): siRNA sense strand
gagcugccgccucuagauc

SEQ ID NO: 919790 - RNA, 19 nt, Homo sapiens
  misc_RNA (1)...(19): siRNA sense strand
ccaaccaggaaguacauga

SEQ ID NO: 919791 - RNA, 19 nt, Homo sapiens
  misc_RNA (1)...(19): siRNA sense strand
cagugacuaugagcucaaa

SEQ ID NO: 919792 - RNA, 19 nt, Homo sapiens
  misc_RNA (1)...(19): siRNA sense strand
caggcucgcccacuuccua

SEQ ID NO: 919793 - RNA, 19 nt, Homo sapiens
  misc_RNA (1)...(19): siRNA sense strand
guaugagacggcugagaug

SEQ ID NO: 919794 - RNA, 19 nt, Homo sapiens
  misc_RNA (1)...(19): siRNA sense strand
aggccgcaaucaaugcuuu

SEQ ID NO: 919795 - RNA, 19 nt, Homo sapiens
  misc_RNA (1)...(19): siRNA sense strand
uccaagggcuauggcuuug

SEQ ID NO: 919796 - RNA, 19 nt, Homo sapiens
  misc_RNA (1)...(19): siRNA sense strand
gaccaaccaggaaguacau

SEQ ID NO: 919797 - RNA, 19 nt, Homo sapiens
  misc_RNA (1)...(19): siRNA sense strand
uauucaggcucgcccacuu

SEQ ID NO: 919798 - RNA, 19 nt, Homo sapiens
  misc_RNA (1)...(19): siRNA sense strand
caccuggcuucaacgaugu

SEQ ID NO: 919799 - RNA, 19 nt, Homo sapiens
  misc_RNA (1)...(19): siRNA sense strand
ugacuaugagcucaaauac

SEQ ID NO: 919800 - RNA, 19 nt, Homo sapiens
  misc_RNA (1)...(19): siRNA sense strand
uccugcagcugcucaacaa

SEQ ID NO: 919801 - RNA, 19 nt, Homo sapiens
  misc_RNA (1)...(19): siRNA sense strand
gaacuggugcuccuaugug

SEQ ID NO: 919802 - RNA, 19 nt, Homo sapiens
  misc_RNA (1)...(19): siRNA sense strand
gggagcagcuacagaacug

SEQ ID NO: 919803 - RNA, 19 nt, Homo sapiens
  misc_RNA (1)...(19): siRNA sense strand
gggagacccuggugagaag

SEQ ID NO: 919804 - RNA, 19 nt, Homo sapiens
  misc_RNA (1)...(19): siRNA sense strand
ugacagagcggcugaaggu

SEQ ID NO: 919805 - RNA, 19 nt, Homo sapiens
  misc_RNA (1)...(19): siRNA sense strand
ugggaguccuggucacaua

SEQ ID NO: 919806 - RNA, 19 nt, Homo sapiens
  misc_RNA (1)...(19): siRNA sense strand
caaggugauguacaagaua

SEQ ID NO: 919807 - RNA, 19 nt, Homo sapiens
  misc_RNA (1)...(19): siRNA sense strand
acaaggugauguacaagau

SEQ ID NO: 919808 - RNA, 19 nt, Homo sapiens
  misc_RNA (1)...(19): siRNA sense strand
uccaacaccuucacugaga

SEQ ID NO: 919809 - RNA, 19 nt, Homo sapiens
  misc_RNA (1)...(19): siRNA sense strand
acgcgaggcuuugaagauu

SEQ ID NO: 919810 - RNA, 19 nt, Homo sapiens
  misc_RNA (1)...(19): siRNA sense strand
ccacuggacccaaaggaau

SEQ ID NO: 919811 - RNA, 19 nt, Homo sapiens
  misc_RNA (1)...(19): siRNA sense strand
caacugcagcaaaguguca

SEQ ID NO: 919812 - RNA, 19 nt, Homo sapiens
  misc_RNA (1)...(19): siRNA sense strand
ucacugagaccaacaacca

SEQ ID NO: 919813 - RNA, 19 nt, Homo sapiens
  misc_RNA (1)...(19): siRNA sense strand
ggaacuggugcuccuaugu

SEQ ID NO: 919814 - RNA, 19 nt, Homo sapiens
  misc_RNA (1)...(19): siRNA sense strand
ggugagacccacauacaag

SEQ ID NO: 919815 - RNA, 19 nt, Homo sapiens
  misc_RNA (1)...(19): siRNA sense strand
ugagaggguuuuaaucuug

SEQ ID NO: 919816 - RNA, 19 nt, Homo sapiens
  misc_RNA (1)...(19): siRNA sense strand
cgcgaggcuuugaagauuu

SEQ ID NO: 919817 - RNA, 19 nt, Homo sapiens
  misc_RNA (1)...(19): siRNA sense strand
ugucucaacugcagcaaag

SEQ ID NO: 919818 - RNA, 19 nt, Homo sapiens
  misc_RNA (1)...(19): siRNA sense strand
gcggacaugcaaccaacua

SEQ ID NO: 919819 - RNA, 19 nt, Homo sapiens
  misc_RNA (1)...(19): siRNA sense strand
gagcagccaguaccuccaa

SEQ ID NO: 919820 - RNA, 19 nt, Homo sapiens
  misc_RNA (1)...(19): siRNA sense strand
gcagaauggcaccuaccuu

SEQ ID NO: 919821 - RNA, 19 nt, Homo sapiens
  misc_RNA (1)...(19): siRNA sense strand
gcgaggcuuugaagauuuu

SEQ ID NO: 919822 - RNA, 19 nt, Homo sapiens
  misc_RNA (1)...(19): siRNA sense strand
aaggugauguacaagauag

SEQ ID NO: 919823 - RNA, 19 nt, Homo sapiens
  misc_RNA (1)...(19): siRNA sense strand
ugucauagagcagccagua

SEQ ID NO: 919824 - RNA, 19 nt, Homo sapiens
  misc_RNA (1)...(19): siRNA sense strand
gaauggcaccuaccuucag

SEQ ID NO: 919825 - RNA, 19 nt, Homo sapiens
  misc_RNA (1)...(19): siRNA sense strand
cccacagccuucucagguu

SEQ ID NO: 919826 - RNA, 19 nt, Homo sapiens
  misc_RNA (1)...(19): siRNA sense strand
gagacccauugcuguccaa

SEQ ID NO: 919827 - RNA, 19 nt, Homo sapiens
  misc_RNA (1)...(19): siRNA sense strand
guaccuccaacaccagcua

SEQ ID NO: 919828 - RNA, 19 nt, Homo sapiens
  misc_RNA (1)...(19): siRNA sense strand
agaugaccaugcugacugu

SEQ ID NO: 919829 - RNA, 19 nt, Homo sapiens
  misc_RNA (1)...(19): siRNA sense strand
uguccaacaccuucacuga

SEQ ID NO: 919830 - RNA, 19 nt, Homo sapiens
  misc_RNA (1)...(19): siRNA sense strand
ggacagaccuccuuccuua

SEQ ID NO: 919831 - RNA, 19 nt, Homo sapiens
  misc_RNA (1)...(19): siRNA sense strand
ccaaagaacuggccagguu

SEQ ID NO: 919832 - RNA, 19 nt, Homo sapiens
  misc_RNA (1)...(19): siRNA sense strand
gauaacaucccaacuauug

SEQ ID NO: 919833 - RNA, 19 nt, Homo sapiens
  misc_RNA (1)...(19): siRNA sense strand
gaaagaggcugcggugaug

SEQ ID NO: 919834 - RNA, 19 nt, Homo sapiens
  misc_RNA (1)...(19): siRNA sense strand
gauguauccugcagaguua

SEQ ID NO: 919835 - RNA, 19 nt, Homo sapiens
  misc_RNA (1)...(19): siRNA sense strand
ccaggucccucucacaaua

SEQ ID NO: 919836 - RNA, 19 nt, Homo sapiens
  misc_RNA (1)...(19): siRNA sense strand
gaaugguucuguagguauu

SEQ ID NO: 919837 - RNA, 19 nt, Homo sapiens
  misc_RNA (1)...(19): siRNA sense strand
gcaaggagcuccgcaugag

SEQ ID NO: 919838 - RNA, 19 nt, Homo sapiens
  misc_RNA (1)...(19): siRNA sense strand
gcugaugccuugggacuuu

SEQ ID NO: 919839 - RNA, 19 nt, Homo sapiens
  misc_RNA (1)...(19): siRNA sense strand
ggagggaccauacccauug

SEQ ID NO: 919840 - RNA, 19 nt, Homo sapiens
  misc_RNA (1)...(19): siRNA sense strand
ccacugggacugcaaauga

SEQ ID NO: 919841 - RNA, 19 nt, Homo sapiens
  misc_RNA (1)...(19): siRNA sense strand
agaccaaacuuuccagguu

SEQ ID NO: 919842 - RNA, 19 nt, Homo sapiens
  misc_RNA (1)...(19): siRNA sense strand
caaagaacuggccagguua

SEQ ID NO: 919843 - RNA, 19 nt, Homo sapiens
  misc_RNA (1)...(19): siRNA sense strand
ccacuggacugaccaccaa

SEQ ID NO: 919844 - RNA, 19 nt, Homo sapiens
  misc_RNA (1)...(19): siRNA sense strand
gaugaaguguuccuagaag

SEQ ID NO: 919845 - RNA, 19 nt, Homo sapiens
  misc_RNA (1)...(19): siRNA sense strand
ggacuuucaggcaaugaua

SEQ ID NO: 919846 - RNA, 19 nt, Homo sapiens
  misc_RNA (1)...(19): siRNA sense strand
uggauggacugauuccuuu

SEQ ID NO: 919847 - RNA, 19 nt, Homo sapiens
  misc_RNA (1)...(19): siRNA sense strand
gugaaugguucuguaggua

SEQ ID NO: 919848 - RNA, 19 nt, Homo sapiens
  misc_RNA (1)...(19): siRNA sense strand
uggcuaaguuugaagauca

SEQ ID NO: 919849 - RNA, 19 nt, Homo sapiens
  misc_RNA (1)...(19): siRNA sense strand
aaugauaacaucccaacua

SEQ ID NO: 919850 - RNA, 19 nt, Homo sapiens
  misc_RNA (1)...(19): siRNA sense strand
gaccauuguuucagaccaa

SEQ ID NO: 919851 - RNA, 19 nt, Homo sapiens
  misc_RNA (1)...(19): siRNA sense strand
gagccaggguccuaucagu

SEQ ID NO: 919852 - RNA, 19 nt, Homo sapiens
  misc_RNA (1)...(19): siRNA sense strand
uucaggagcuggccagauu

SEQ ID NO: 919853 - RNA, 19 nt, Homo sapiens
  misc_RNA (1)...(19): siRNA sense strand
gagaggaggcugccaguac

SEQ ID NO: 919854 - RNA, 19 nt, Homo sapiens
  misc_RNA (1)...(19): siRNA sense strand
gcccuucccucuucuccuu

SEQ ID NO: 919855 - RNA, 19 nt, Homo sapiens
  misc_RNA (1)...(19): siRNA sense strand
ggugaaugguucuguaggu

SEQ ID NO: 919856 - RNA, 19 nt, Homo sapiens
  misc_RNA (1)...(19): siRNA sense strand
gggacgaccuuggccauca

SEQ ID NO: 919857 - RNA, 19 nt, Homo sapiens
  misc_RNA (1)...(19): siRNA sense strand
ggacugcaaaugauaacau

SEQ ID NO: 919858 - RNA, 19 nt, Homo sapiens
  misc_RNA (1)...(19): siRNA sense strand
ggacgaccuuggccaucau

SEQ ID NO: 919859 - RNA, 19 nt, Homo sapiens
  misc_RNA (1)...(19): siRNA sense strand
ggacuacgugcgugugguu

SEQ ID NO: 919860 - RNA, 19 nt, Homo sapiens
  misc_RNA (1)...(19): siRNA sense strand
ccacagcugcagagaguga

SEQ ID NO: 919861 - RNA, 19 nt, Homo sapiens
  misc_RNA (1)...(19): siRNA sense strand
ggauggacugauuccuuua

SEQ ID NO: 919862 - RNA, 19 nt, Homo sapiens
  misc_RNA (1)...(19): siRNA sense strand
ggagcuggccagauuagau

SEQ ID NO: 919863 - RNA, 19 nt, Homo sapiens
  misc_RNA (1)...(19): siRNA sense strand
gagggaccauacccauugu

SEQ ID NO: 919864 - RNA, 19 nt, Homo sapiens
  misc_RNA (1)...(19): siRNA sense strand
augauaacaucccaacuau

SEQ ID NO: 919865 - RNA, 19 nt, Homo sapiens
  misc_RNA (1)...(19): siRNA sense strand
ugauguauccugcagaguu

SEQ ID NO: 919866 - RNA, 19 nt, Homo sapiens
  misc_RNA (1)...(19): siRNA sense strand
guucauggccgaccuagag

SEQ ID NO: 919867 - RNA, 19 nt, Homo sapiens
  misc_RNA (1)...(19): siRNA sense strand
uggaggagcugcgcgucua

SEQ ID NO: 919868 - RNA, 19 nt, Homo sapiens
  misc_RNA (1)...(19): siRNA sense strand
cugaugaaguguuccuaga

SEQ ID NO: 919869 - RNA, 19 nt, Homo sapiens
  misc_RNA (1)...(19): siRNA sense strand
gagcuggccagauuagauc

SEQ ID NO: 919870 - RNA, 19 nt, Homo sapiens
  misc_RNA (1)...(19): siRNA sense strand
gagagugaccuccucaaac

SEQ ID NO: 919871 - RNA, 19 nt, Homo sapiens
  misc_RNA (1)...(19): siRNA sense strand
gacugcaaaugauaacauc

SEQ ID NO: 919872 - RNA, 19 nt, Homo sapiens
  misc_RNA (1)...(19): siRNA sense strand
ggagaggaggcugccagua

SEQ ID NO: 919873 - RNA, 19 nt, Homo sapiens
  misc_RNA (1)...(19): siRNA sense strand
ccugcuggauggacugauu

SEQ ID NO: 919874 - RNA, 19 nt, Homo sapiens
  misc_RNA (1)...(19): siRNA sense strand
agaaagaggcugcggugau

SEQ ID NO: 919875 - RNA, 19 nt, Homo sapiens
  misc_RNA (1)...(19): siRNA sense strand
cagcauccagggcaagaaa

SEQ ID NO: 919876 - RNA, 19 nt, Homo sapiens
  misc_RNA (1)...(19): siRNA sense strand
gugaacagagggucucaga

SEQ ID NO: 919877 - RNA, 19 nt, Homo sapiens
  misc_RNA (1)...(19): siRNA sense strand
ucccucuucuccuuacaua

SEQ ID NO: 919878 - RNA, 19 nt, Homo sapiens
  misc_RNA (1)...(19): siRNA sense strand
ccacccacccugugcuuga

SEQ ID NO: 919879 - RNA, 19 nt, Homo sapiens
  misc_RNA (1)...(19): siRNA sense strand
cccagaccauuguuucaga

SEQ ID NO: 919880 - RNA, 19 nt, Homo sapiens
  misc_RNA (1)...(19): siRNA sense strand
gguccuaucaguucagcuu

SEQ ID NO: 919881 - RNA, 19 nt, Homo sapiens
  misc_RNA (1)...(19): siRNA sense strand
gccaggguccuaucaguuc

SEQ ID NO: 919882 - RNA, 19 nt, Homo sapiens
  misc_RNA (1)...(19): siRNA sense strand
ccacuggucagaaugagau

SEQ ID NO: 919883 - RNA, 19 nt, Homo sapiens
  misc_RNA (1)...(19): siRNA sense strand
agagagugaccuccucaaa

SEQ ID NO: 919884 - RNA, 19 nt, Homo sapiens
  misc_RNA (1)...(19): siRNA sense strand
agaccuccuuccuuaccua

SEQ ID NO: 919885 - RNA, 19 nt, Homo sapiens
  misc_RNA (1)...(19): siRNA sense strand
ugaugaaguguuccuagaa

SEQ ID NO: 919886 - RNA, 19 nt, Homo sapiens
  misc_RNA (1)...(19): siRNA sense strand
agagugaccuccucaaacc

SEQ ID NO: 919887 - RNA, 19 nt, Homo sapiens
  misc_RNA (1)...(19): siRNA sense strand
ucaggagcuggccagauua

SEQ ID NO: 919888 - RNA, 19 nt, Homo sapiens
  misc_RNA (1)...(19): siRNA sense strand
ccaggguccuaucaguuca

SEQ ID NO: 919889 - RNA, 19 nt, Homo sapiens
  misc_RNA (1)...(19): siRNA sense strand
ugaaugguucuguagguau

SEQ ID NO: 919890 - RNA, 19 nt, Homo sapiens
  misc_RNA (1)...(19): siRNA sense strand
aaagaugcuucaggaccuu

SEQ ID NO: 919891 - RNA, 19 nt, Homo sapiens
  misc_RNA (1)...(19): siRNA sense strand
gauggacugauuccuuuag

SEQ ID NO: 919892 - RNA, 19 nt, Homo sapiens
  misc_RNA (1)...(19): siRNA sense strand
cuccaugaguguccaggaa

SEQ ID NO: 919893 - RNA, 19 nt, Homo sapiens
  misc_RNA (1)...(19): siRNA sense strand
agaggaggcugccaguacu

SEQ ID NO: 919894 - RNA, 19 nt, Homo sapiens
  misc_RNA (1)...(19): siRNA sense strand
gggacagaccuccuuccuu

SEQ ID NO: 919895 - RNA, 19 nt, Homo sapiens
  misc_RNA (1)...(19): siRNA sense strand
cgaccuagagcgcgugcuu

SEQ ID NO: 919896 - RNA, 19 nt, Homo sapiens
  misc_RNA (1)...(19): siRNA sense strand
gaccagccguauggaacug

SEQ ID NO: 919897 - RNA, 19 nt, Homo sapiens
  misc_RNA (1)...(19): siRNA sense strand
aagaggcugcggugaugua

SEQ ID NO: 919898 - RNA, 19 nt, Homo sapiens
  misc_RNA (1)...(19): siRNA sense strand
gaggagcugcgcgucuauu

SEQ ID NO: 919899 - RNA, 19 nt, Homo sapiens
  misc_RNA (1)...(19): siRNA sense strand
ggaggagcugcgcgucuau

SEQ ID NO: 919900 - RNA, 19 nt, Homo sapiens
  misc_RNA (1)...(19): siRNA sense strand
ccaguguccaugccucuga

SEQ ID NO: 919901 - RNA, 19 nt, Homo sapiens
  misc_RNA (1)...(19): siRNA sense strand
caaacuuuccagguucuug

SEQ ID NO: 919902 - RNA, 19 nt, Homo sapiens
  misc_RNA (1)...(19): siRNA sense strand
gaccuguccuccaguucag

SEQ ID NO: 919903 - RNA, 19 nt, Homo sapiens
  misc_RNA (1)...(19): siRNA sense strand
uaacaucccaacuauugac

SEQ ID NO: 919904 - RNA, 19 nt, Homo sapiens
  misc_RNA (1)...(19): siRNA sense strand
gcgccaaccucguaaguua

SEQ ID NO: 919905 - RNA, 19 nt, Homo sapiens
  misc_RNA (1)...(19): siRNA sense strand
gagccaaccucaagaugaa

SEQ ID NO: 919906 - RNA, 19 nt, Homo sapiens
  misc_RNA (1)...(19): siRNA sense strand
gagcaacugugaugaggaa

SEQ ID NO: 919907 - RNA, 19 nt, Homo sapiens
  misc_RNA (1)...(19): siRNA sense strand
caaagacaauggagacuca

SEQ ID NO: 919908 - RNA, 19 nt, Homo sapiens
  misc_RNA (1)...(19): siRNA sense strand
gaucagacccaccuacaga

SEQ ID NO: 919909 - RNA, 19 nt, Homo sapiens
  misc_RNA (1)...(19): siRNA sense strand
gaugaggaaugcaugaacu

SEQ ID NO: 919910 - RNA, 19 nt, Homo sapiens
  misc_RNA (1)...(19): siRNA sense strand
gcagccgccuacagacaaa

SEQ ID NO: 919911 - RNA, 19 nt, Homo sapiens
  misc_RNA (1)...(19): siRNA sense strand
ccaagguccuccugcuaga

SEQ ID NO: 919912 - RNA, 19 nt, Homo sapiens
  misc_RNA (1)...(19): siRNA sense strand
ugagagaggcccugaagau

SEQ ID NO: 919913 - RNA, 19 nt, Homo sapiens
  misc_RNA (1)...(19): siRNA sense strand
caacugugaugaggaaugc

SEQ ID NO: 919914 - RNA, 19 nt, Homo sapiens
  misc_RNA (1)...(19): siRNA sense strand
gagagaggcccugaagauc

SEQ ID NO: 919915 - RNA, 19 nt, Homo sapiens
  misc_RNA (1)...(19): siRNA sense strand
gguccuugcugcccugcuu

SEQ ID NO: 919916 - RNA, 19 nt, Homo sapiens
  misc_RNA (1)...(19): siRNA sense strand
gaccuggaaugaggacuuc

SEQ ID NO: 919917 - RNA, 19 nt, Homo sapiens
  misc_RNA (1)...(19): siRNA sense strand
gcaacugugaugaggaaug

SEQ ID NO: 919918 - RNA, 19 nt, Homo sapiens
  misc_RNA (1)...(19): siRNA sense strand
gggagguucuggccaggau

SEQ ID NO: 919919 - RNA, 19 nt, Homo sapiens
  misc_RNA (1)...(19): siRNA sense strand
gagaggcccugaagauccu

SEQ ID NO: 919920 - RNA, 19 nt, Homo sapiens
  misc_RNA (1)...(19): siRNA sense strand
gcacccggcucagugacau

SEQ ID NO: 919921 - RNA, 19 nt, Homo sapiens
  misc_RNA (1)...(19): siRNA sense strand
gacaugagugagcgacuga

SEQ ID NO: 919922 - RNA, 19 nt, Homo sapiens
  misc_RNA (1)...(19): siRNA sense strand
gagagccaaccucaagaug

SEQ ID NO: 919923 - RNA, 19 nt, Homo sapiens
  misc_RNA (1)...(19): siRNA sense strand
agacccaccuacagagugu

SEQ ID NO: 919924 - RNA, 19 nt, Homo sapiens
  misc_RNA (1)...(19): siRNA sense strand
ggccaagguccuccugcua

SEQ ID NO: 919925 - RNA, 19 nt, Homo sapiens
  misc_RNA (1)...(19): siRNA sense strand
gcugagagaggcccugaag

SEQ ID NO: 919926 - RNA, 19 nt, Homo sapiens
  misc_RNA (1)...(19): siRNA sense strand
cuacagacaaagacaaugg

SEQ ID NO: 919927 - RNA, 19 nt, Homo sapiens
  misc_RNA (1)...(19): siRNA sense strand
ggccaccggcuuccucuau

SEQ ID NO: 919928 - RNA, 19 nt, Homo sapiens
  misc_RNA (1)...(19): siRNA sense strand
agagccaaccucaagauga

SEQ ID NO: 919929 - RNA, 19 nt, Homo sapiens
  misc_RNA (1)...(19): siRNA sense strand
cauccuggagcacaugauu

SEQ ID NO: 919930 - RNA, 19 nt, Homo sapiens
  misc_RNA (1)...(19): siRNA sense strand
cggugaaccuggcgugaag

SEQ ID NO: 919931 - RNA, 19 nt, Homo sapiens
  misc_RNA (1)...(19): siRNA sense strand
uaaguuacaggacucugau

SEQ ID NO: 919932 - RNA, 19 nt, Homo sapiens
  misc_RNA (1)...(19): siRNA sense strand
gccaccggcuuccucuauc

SEQ ID NO: 919933 - RNA, 19 nt, Homo sapiens
  misc_RNA (1)...(19): siRNA sense strand
ccaccuacagaguguccua

SEQ ID NO: 919934 - RNA, 19 nt, Homo sapiens
  misc_RNA (1)...(19): siRNA sense strand
gcagaaaucuuuggaauua

SEQ ID NO: 919935 - RNA, 19 nt, Homo sapiens
  misc_RNA (1)...(19): siRNA sense strand
ggaagucaguugagaaaua

SEQ ID NO: 919936 - RNA, 19 nt, Homo sapiens
  misc_RNA (1)...(19): siRNA sense strand
gagcaaagauaccguuuaa

SEQ ID NO: 919937 - RNA, 19 nt, Homo sapiens
  misc_RNA (1)...(19): siRNA sense strand
gaacaaagcaauagaagau

SEQ ID NO: 919938 - RNA, 19 nt, Homo sapiens
  misc_RNA (1)...(19): siRNA sense strand
aaacagagguuccagaaga

SEQ ID NO: 919939 - RNA, 19 nt, Homo sapiens
  misc_RNA (1)...(19): siRNA sense strand
gcaaagauaccguuuaaau

SEQ ID NO: 919940 - RNA, 19 nt, Homo sapiens
  misc_RNA (1)...(19): siRNA sense strand
gaagugguaucaugagaga

SEQ ID NO: 919941 - RNA, 19 nt, Homo sapiens
  misc_RNA (1)...(19): siRNA sense strand
ggacaagauuuaugguuau

SEQ ID NO: 919942 - RNA, 19 nt, Homo sapiens
  misc_RNA (1)...(19): siRNA sense strand
ggagaaguguugagcuaaa

SEQ ID NO: 919943 - RNA, 19 nt, Homo sapiens
  misc_RNA (1)...(19): siRNA sense strand
ccacaccuaucugguauua

SEQ ID NO: 919944 - RNA, 19 nt, Homo sapiens
  misc_RNA (1)...(19): siRNA sense strand
caaaucagauagaucagaa

SEQ ID NO: 919945 - RNA, 19 nt, Homo sapiens
  misc_RNA (1)...(19): siRNA sense strand
gagaagaggcuaaagaaga

SEQ ID NO: 919946 - RNA, 19 nt, Homo sapiens
  misc_RNA (1)...(19): siRNA sense strand
gaagagaagaggcuaaaga

SEQ ID NO: 919947 - RNA, 19 nt, Homo sapiens
  misc_RNA (1)...(19): siRNA sense strand
acaccuaucugguauuaaa

SEQ ID NO: 919948 - RNA, 19 nt, Homo sapiens
  misc_RNA (1)...(19): siRNA sense strand
gcugaaaguuacuauaaga

SEQ ID NO: 919949 - RNA, 19 nt, Homo sapiens
  misc_RNA (1)...(19): siRNA sense strand
gcaauucuuuggaguccua

SEQ ID NO: 919950 - RNA, 19 nt, Homo sapiens
  misc_RNA (1)...(19): siRNA sense strand
gagcuggaaucaaggauau

SEQ ID NO: 919951 - RNA, 19 nt, Homo sapiens
  misc_RNA (1)...(19): siRNA sense strand
agaaagcaguguuaagaaa

SEQ ID NO: 919952 - RNA, 19 nt, Homo sapiens
  misc_RNA (1)...(19): siRNA sense strand
gaagaaauuccucagauuc

SEQ ID NO: 919953 - RNA, 19 nt, Homo sapiens
  misc_RNA (1)...(19): siRNA sense strand
gaagaucggaguugacuau

SEQ ID NO: 919954 - RNA, 19 nt, Homo sapiens
  misc_RNA (1)...(19): siRNA sense strand
gaagaagaugcacuaagua

SEQ ID NO: 919955 - RNA, 19 nt, Homo sapiens
  misc_RNA (1)...(19): siRNA sense strand
agaagaggcuaaagaagaa

SEQ ID NO: 919956 - RNA, 19 nt, Homo sapiens
  misc_RNA (1)...(19): siRNA sense strand
gcaaagaacacucagaaag

SEQ ID NO: 919957 - RNA, 19 nt, Homo sapiens
  misc_RNA (1)...(19): siRNA sense strand
agaagaagaugcacuaagu

SEQ ID NO: 919958 - RNA, 19 nt, Homo sapiens
  misc_RNA (1)...(19): siRNA sense strand
gggauccuuuaucauauua

SEQ ID NO: 919959 - RNA, 19 nt, Homo sapiens
  misc_RNA (1)...(19): siRNA sense strand
caggauagguuacaguaug

SEQ ID NO: 919960 - RNA, 19 nt, Homo sapiens
  misc_RNA (1)...(19): siRNA sense strand
aggacaagauuuaugguua

SEQ ID NO: 919961 - RNA, 19 nt, Homo sapiens
  misc_RNA (1)...(19): siRNA sense strand
aaagauagaugcccucucu

SEQ ID NO: 919962 - RNA, 19 nt, Homo sapiens
  misc_RNA (1)...(19): siRNA sense strand
gaagaucauuaugcaauca

SEQ ID NO: 919963 - RNA, 19 nt, Homo sapiens
  misc_RNA (1)...(19): siRNA sense strand
ugaaagagaggacaauuau

SEQ ID NO: 919964 - RNA, 19 nt, Homo sapiens
  misc_RNA (1)...(19): siRNA sense strand
gcaggacaauccacacuuc

SEQ ID NO: 919965 - RNA, 19 nt, Homo sapiens
  misc_RNA (1)...(19): siRNA sense strand
caggagaaguguugagcua

SEQ ID NO: 919966 - RNA, 19 nt, Homo sapiens
  misc_RNA (1)...(19): siRNA sense strand
ccaaacuggugacaucauu

SEQ ID NO: 919967 - RNA, 19 nt, Homo sapiens
  misc_RNA (1)...(19): siRNA sense strand
gaucggaguugacuauuuu

SEQ ID NO: 919968 - RNA, 19 nt, Homo sapiens
  misc_RNA (1)...(19): siRNA sense strand
gaagucaguugagaaauac

SEQ ID NO: 919969 - RNA, 19 nt, Homo sapiens
  misc_RNA (1)...(19): siRNA sense strand
agaagaaauuccucagauu

SEQ ID NO: 919970 - RNA, 19 nt, Homo sapiens
  misc_RNA (1)...(19): siRNA sense strand
agagagaggaggacaguua

SEQ ID NO: 919971 - RNA, 19 nt, Homo sapiens
  misc_RNA (1)...(19): siRNA sense strand
ggagguaggucugaagauc

SEQ ID NO: 919972 - RNA, 19 nt, Homo sapiens
  misc_RNA (1)...(19): siRNA sense strand
caacaucgagauacagaaa

SEQ ID NO: 919973 - RNA, 19 nt, Homo sapiens
  misc_RNA (1)...(19): siRNA sense strand
uggaugcuaugaaugaaua

SEQ ID NO: 919974 - RNA, 19 nt, Homo sapiens
  misc_RNA (1)...(19): siRNA sense strand
agauauagcccacuuagaa

SEQ ID NO: 919975 - RNA, 19 nt, Homo sapiens
  misc_RNA (1)...(19): siRNA sense strand
gauauagcccacuuagaaa

SEQ ID NO: 919976 - RNA, 19 nt, Homo sapiens
  misc_RNA (1)...(19): siRNA sense strand
ucaaggagaauaugaaaga

SEQ ID NO: 919977 - RNA, 19 nt, Homo sapiens
  misc_RNA (1)...(19): siRNA sense strand
uagaagaaauuccucagau

SEQ ID NO: 919978 - RNA, 19 nt, Homo sapiens
  misc_RNA (1)...(19): siRNA sense strand
ccaagcagguaguagcaaa

SEQ ID NO: 919979 - RNA, 19 nt, Homo sapiens
  misc_RNA (1)...(19): siRNA sense strand
gaugagugcuacccaguuc

SEQ ID NO: 919980 - RNA, 19 nt, Homo sapiens
  misc_RNA (1)...(19): siRNA sense strand
guaguugaauuccuucuag

SEQ ID NO: 919981 - RNA, 19 nt, Homo sapiens
  misc_RNA (1)...(19): siRNA sense strand
gaagaugcacuaaguagca

SEQ ID NO: 919982 - RNA, 19 nt, Homo sapiens
  misc_RNA (1)...(19): siRNA sense strand
guagacaugagcaaagaua

SEQ ID NO: 919983 - RNA, 19 nt, Homo sapiens
  misc_RNA (1)...(19): siRNA sense strand
gaaaagagcacuauagaag

SEQ ID NO: 919984 - RNA, 19 nt, Homo sapiens
  misc_RNA (1)...(19): siRNA sense strand
gaauucagaggacaagauu

SEQ ID NO: 919985 - RNA, 19 nt, Homo sapiens
  misc_RNA (1)...(19): siRNA sense strand
gaggacaguuagaagaaga

SEQ ID NO: 919986 - RNA, 19 nt, Homo sapiens
  misc_RNA (1)...(19): siRNA sense strand
ucacagaaaugcaagaaaa

SEQ ID NO: 919987 - RNA, 19 nt, Homo sapiens
  misc_RNA (1)...(19): siRNA sense strand
guguugaucuguuuaggaa

SEQ ID NO: 919988 - RNA, 19 nt, Homo sapiens
  misc_RNA (1)...(19): siRNA sense strand
gagaaguguugagcuaaau

SEQ ID NO: 919989 - RNA, 19 nt, Homo sapiens
  misc_RNA (1)...(19): siRNA sense strand
aaaacaagcugaaaaggaa

SEQ ID NO: 919990 - RNA, 19 nt, Homo sapiens
  misc_RNA (1)...(19): siRNA sense strand
cuguauagcucuucucuuc

SEQ ID NO: 919991 - RNA, 19 nt, Homo sapiens
  misc_RNA (1)...(19): siRNA sense strand
ucagaaagcaguguuaaga

SEQ ID NO: 919992 - RNA, 19 nt, Homo sapiens
  misc_RNA (1)...(19): siRNA sense strand
caaaucaaggagaauauga

SEQ ID NO: 919993 - RNA, 19 nt, Homo sapiens
  misc_RNA (1)...(19): siRNA sense strand
gguuauaggagauuugaaa

SEQ ID NO: 919994 - RNA, 19 nt, Homo sapiens
  misc_RNA (1)...(19): siRNA sense strand
gcagaguuccuugggauuu

SEQ ID NO: 919995 - RNA, 19 nt, Homo sapiens
  misc_RNA (1)...(19): siRNA sense strand
gcaaucaugccaccuuuag

SEQ ID NO: 919996 - RNA, 19 nt, Homo sapiens
  misc_RNA (1)...(19): siRNA sense strand
aaagagcacuauagaaggu

SEQ ID NO: 919997 - RNA, 19 nt, Homo sapiens
  misc_RNA (1)...(19): siRNA sense strand
gaucagaauaggaaagaug

SEQ ID NO: 919998 - RNA, 19 nt, Homo sapiens
  misc_RNA (1)...(19): siRNA sense strand
ccagacacuuguagagaga

SEQ ID NO: 919999 - RNA, 19 nt, Homo sapiens
  misc_RNA (1)...(19): siRNA sense strand
gauauugagcguggugaua

SEQ ID NO: 920000 - RNA, 19 nt, Homo sapiens
  misc_RNA (1)...(19): siRNA sense strand
aaucuaauccaccaucuuu

SEQ ID NO: 920001 - RNA, 19 nt, Homo sapiens
  misc_RNA (1)...(19): siRNA sense strand
gaaagagaggacaauuaug

SEQ ID NO: 920002 - RNA, 19 nt, Homo sapiens
  misc_RNA (1)...(19): siRNA sense strand
gaaaaucaacuucuucuuc

SEQ ID NO: 920003 - RNA, 19 nt, Homo sapiens
  misc_RNA (1)...(19): siRNA sense strand
gaaaaugucaugcagaguu

SEQ ID NO: 920004 - RNA, 19 nt, Homo sapiens
  misc_RNA (1)...(19): siRNA sense strand
aaagaacacucagaaagca

SEQ ID NO: 920005 - RNA, 19 nt, Homo sapiens
  misc_RNA (1)...(19): siRNA sense strand
gcuaauacuucagcaucuu

SEQ ID NO: 920006 - RNA, 19 nt, Homo sapiens
  misc_RNA (1)...(19): siRNA sense strand
aaacguggaagcuuuggua

SEQ ID NO: 920007 - RNA, 19 nt, Homo sapiens
  misc_RNA (1)...(19): siRNA sense strand
ccauguggaugcuaugaau

SEQ ID NO: 920008 - RNA, 19 nt, Homo sapiens
  misc_RNA (1)...(19): siRNA sense strand
aauccaccaucuuuaauga

SEQ ID NO: 920009 - RNA, 19 nt, Homo sapiens
  misc_RNA (1)...(19): siRNA sense strand
ugagagauauagcccacuu

SEQ ID NO: 920010 - RNA, 19 nt, Homo sapiens
  misc_RNA (1)...(19): siRNA sense strand
uagcaaagaacacucagaa

SEQ ID NO: 920011 - RNA, 19 nt, Homo sapiens
  misc_RNA (1)...(19): siRNA sense strand
aaagagaggacaauuaugg

SEQ ID NO: 920012 - RNA, 19 nt, Homo sapiens
  misc_RNA (1)...(19): siRNA sense strand
agaauacucuuggaaguca

SEQ ID NO: 920013 - RNA, 19 nt, Homo sapiens
  misc_RNA (1)...(19): siRNA sense strand
auucagaggacaagauuua

SEQ ID NO: 920014 - RNA, 19 nt, Homo sapiens
  misc_RNA (1)...(19): siRNA sense strand
ccagaaggcauucaucuag

SEQ ID NO: 920015 - RNA, 19 nt, Homo sapiens
  misc_RNA (1)...(19): siRNA sense strand
gaggaggacaguuagaaga

SEQ ID NO: 920016 - RNA, 19 nt, Homo sapiens
  misc_RNA (1)...(19): siRNA sense strand
gagaggaggacaguuagaa

SEQ ID NO: 920017 - RNA, 19 nt, Homo sapiens
  misc_RNA (1)...(19): siRNA sense strand
acaucgagauacagaaauu

SEQ ID NO: 920018 - RNA, 19 nt, Homo sapiens
  misc_RNA (1)...(19): siRNA sense strand
cuaaauagcaauucuuugg

SEQ ID NO: 920019 - RNA, 19 nt, Homo sapiens
  misc_RNA (1)...(19): siRNA sense strand
ucagaauacucuuggaagu

SEQ ID NO: 920020 - RNA, 19 nt, Homo sapiens
  misc_RNA (1)...(19): siRNA sense strand
caagauuuaugguuauagg

SEQ ID NO: 920021 - RNA, 19 nt, Homo sapiens
  misc_RNA (1)...(19): siRNA sense strand
ccucaaaucagauagauca

SEQ ID NO: 920022 - RNA, 19 nt, Homo sapiens
  misc_RNA (1)...(19): siRNA sense strand
ugagaggccuacaaagcaa

SEQ ID NO: 920023 - RNA, 19 nt, Homo sapiens
  misc_RNA (1)...(19): siRNA sense strand
uauugagcguggugauaua

SEQ ID NO: 920024 - RNA, 19 nt, Homo sapiens
  misc_RNA (1)...(19): siRNA sense strand
gaaaagacacagauaaaag

SEQ ID NO: 920025 - RNA, 19 nt, Homo sapiens
  misc_RNA (1)...(19): siRNA sense strand
ccugcaacuucugaaauua

SEQ ID NO: 920026 - RNA, 19 nt, Homo sapiens
  misc_RNA (1)...(19): siRNA sense strand
ucagauagaucagaauagg

SEQ ID NO: 920027 - RNA, 19 nt, Homo sapiens
  misc_RNA (1)...(19): siRNA sense strand
uuaaugagaggccuacaaa

SEQ ID NO: 920028 - RNA, 19 nt, Homo sapiens
  misc_RNA (1)...(19): siRNA sense strand
gagcuuccuuuauacuaca

SEQ ID NO: 920029 - RNA, 19 nt, Homo sapiens
  misc_RNA (1)...(19): siRNA sense strand
cuagcaguaucucuguaua

SEQ ID NO: 920030 - RNA, 19 nt, Homo sapiens
  misc_RNA (1)...(19): siRNA sense strand
ggugauauagugauuggaa

SEQ ID NO: 920031 - RNA, 19 nt, Homo sapiens
  misc_RNA (1)...(19): siRNA sense strand
ggaauucagaggacaagau

SEQ ID NO: 920032 - RNA, 19 nt, Homo sapiens
  misc_RNA (1)...(19): siRNA sense strand
caguagacaugagcaaaga

SEQ ID NO: 920033 - RNA, 19 nt, Homo sapiens
  misc_RNA (1)...(19): siRNA sense strand
gugaagaucauuaugcaau

SEQ ID NO: 920034 - RNA, 19 nt, Homo sapiens
  misc_RNA (1)...(19): siRNA sense strand
gaacauaaccuuaagaauc

SEQ ID NO: 920035 - RNA, 19 nt, Homo sapiens
  misc_RNA (1)...(19): siRNA sense strand
gaaaggaucucugcaugaa

SEQ ID NO: 920036 - RNA, 19 nt, Homo sapiens
  misc_RNA (1)...(19): siRNA sense strand
caacgagagugauagguua

SEQ ID NO: 920037 - RNA, 19 nt, Homo sapiens
  misc_RNA (1)...(19): siRNA sense strand
ucacugagauucaccuaua

SEQ ID NO: 920038 - RNA, 19 nt, Homo sapiens
  misc_RNA (1)...(19): siRNA sense strand
caacaagcuuggaacauaa

SEQ ID NO: 920039 - RNA, 19 nt, Homo sapiens
  misc_RNA (1)...(19): siRNA sense strand
gaacaucucaagcaaauga

SEQ ID NO: 920040 - RNA, 19 nt, Homo sapiens
  misc_RNA (1)...(19): siRNA sense strand
guacaggaauugcuaguug

SEQ ID NO: 920041 - RNA, 19 nt, Homo sapiens
  misc_RNA (1)...(19): siRNA sense strand
guacuccucuuucgucuuu

SEQ ID NO: 920042 - RNA, 19 nt, Homo sapiens
  misc_RNA (1)...(19): siRNA sense strand
gcauacggauugccgcuua

SEQ ID NO: 920043 - RNA, 19 nt, Homo sapiens
  misc_RNA (1)...(19): siRNA sense strand
guaaggaucucgcgucugu

SEQ ID NO: 920044 - RNA, 19 nt, Homo sapiens
  misc_RNA (1)...(19): siRNA sense strand
gcgaauacaucucugaaau

SEQ ID NO: 920045 - RNA, 19 nt, Homo sapiens
  misc_RNA (1)...(19): siRNA sense strand
acaacaagcuuggaacaua

SEQ ID NO: 920046 - RNA, 19 nt, Homo sapiens
  misc_RNA (1)...(19): siRNA sense strand
gaguuuggcugacuugauu

SEQ ID NO: 920047 - RNA, 19 nt, Homo sapiens
  misc_RNA (1)...(19): siRNA sense strand
uaaagaacaucucaagcaa

SEQ ID NO: 920048 - RNA, 19 nt, Homo sapiens
  misc_RNA (1)...(19): siRNA sense strand
acaagaagcugacguaucu

SEQ ID NO: 920049 - RNA, 19 nt, Homo sapiens
  misc_RNA (1)...(19): siRNA sense strand
aacaagaucuuucgggaua

SEQ ID NO: 920050 - RNA, 19 nt, Homo sapiens
  misc_RNA (1)...(19): siRNA sense strand
gcaccaagauacuucugaa

SEQ ID NO: 920051 - RNA, 19 nt, Homo sapiens
  misc_RNA (1)...(19): siRNA sense strand
gcaaugaaaucggagaugu

SEQ ID NO: 920052 - RNA, 19 nt, Homo sapiens
  misc_RNA (1)...(19): siRNA sense strand
aaacgacacuccugaugaa

SEQ ID NO: 920053 - RNA, 19 nt, Homo sapiens
  misc_RNA (1)...(19): siRNA sense strand
gcaguuugcugaggaagaa

SEQ ID NO: 920054 - RNA, 19 nt, Homo sapiens
  misc_RNA (1)...(19): siRNA sense strand
ccaagaagcuaacuuucau

SEQ ID NO: 920055 - RNA, 19 nt, Homo sapiens
  misc_RNA (1)...(19): siRNA sense strand
gaucaagcacuaugaagaa

SEQ ID NO: 920056 - RNA, 19 nt, Homo sapiens
  misc_RNA (1)...(19): siRNA sense strand
ggacagacacauuugaguu

SEQ ID NO: 920057 - RNA, 19 nt, Homo sapiens
  misc_RNA (1)...(19): siRNA sense strand
cgaaggagcuccgggauca

SEQ ID NO: 920058 - RNA, 19 nt, Homo sapiens
  misc_RNA (1)...(19): siRNA sense strand
gaauacaucucugaaaugc

SEQ ID NO: 920059 - RNA, 19 nt, Homo sapiens
  misc_RNA (1)...(19): siRNA sense strand
ugacguaucugaauguauc

SEQ ID NO: 920060 - RNA, 19 nt, Homo sapiens
  misc_RNA (1)...(19): siRNA sense strand
guaccagucugaagcaaga

SEQ ID NO: 920061 - RNA, 19 nt, Homo sapiens
  misc_RNA (1)...(19): siRNA sense strand
gaggaguucaggaaauuua

SEQ ID NO: 920062 - RNA, 19 nt, Homo sapiens
  misc_RNA (1)...(19): siRNA sense strand
gcaagucugucacugagau

SEQ ID NO: 920063 - RNA, 19 nt, Homo sapiens
  misc_RNA (1)...(19): siRNA sense strand
gcagaaauucagccgcuua

SEQ ID NO: 920064 - RNA, 19 nt, Homo sapiens
  misc_RNA (1)...(19): siRNA sense strand
gugauagguuaguguauuu

SEQ ID NO: 920065 - RNA, 19 nt, Homo sapiens
  misc_RNA (1)...(19): siRNA sense strand
guucucaccugcaguaaga

SEQ ID NO: 920066 - RNA, 19 nt, Homo sapiens
  misc_RNA (1)...(19): siRNA sense strand
gagauucaccuauacuuug

SEQ ID NO: 920067 - RNA, 19 nt, Homo sapiens
  misc_RNA (1)...(19): siRNA sense strand
gaaggacgaaggacugaaa

SEQ ID NO: 920068 - RNA, 19 nt, Homo sapiens
  misc_RNA (1)...(19): siRNA sense strand
aagaacaucucaagcaaau

SEQ ID NO: 920069 - RNA, 19 nt, Homo sapiens
  misc_RNA (1)...(19): siRNA sense strand
gaaauucagccgcuuaugg

SEQ ID NO: 920070 - RNA, 19 nt, Homo sapiens
  misc_RNA (1)...(19): siRNA sense strand
gggaagaacuugcaaaccu

SEQ ID NO: 920071 - RNA, 19 nt, Homo sapiens
  misc_RNA (1)...(19): siRNA sense strand
gaaacucucucgugaugac

SEQ ID NO: 920072 - RNA, 19 nt, Homo sapiens
  misc_RNA (1)...(19): siRNA sense strand
gaagacgaccuccggagaa

SEQ ID NO: 920073 - RNA, 19 nt, Homo sapiens
  misc_RNA (1)...(19): siRNA sense strand
ggagagaacaggauacaca

SEQ ID NO: 920074 - RNA, 19 nt, Homo sapiens
  misc_RNA (1)...(19): siRNA sense strand
gaacaacaagcuuggaaca

SEQ ID NO: 920075 - RNA, 19 nt, Homo sapiens
  misc_RNA (1)...(19): siRNA sense strand
ccaacugucccaagagaua

SEQ ID NO: 920076 - RNA, 19 nt, Homo sapiens
  misc_RNA (1)...(19): siRNA sense strand
ggaagucaagcaagaagaa

SEQ ID NO: 920077 - RNA, 19 nt, Homo sapiens
  misc_RNA (1)...(19): siRNA sense strand
cugaaaugcuucugcguaa

SEQ ID NO: 920078 - RNA, 19 nt, Homo sapiens
  misc_RNA (1)...(19): siRNA sense strand
gagauaaagcagcaaauuc

SEQ ID NO: 920079 - RNA, 19 nt, Homo sapiens
  misc_RNA (1)...(19): siRNA sense strand
gcaaggagagcacauugga

SEQ ID NO: 920080 - RNA, 19 nt, Homo sapiens
  misc_RNA (1)...(19): siRNA sense strand
gacagacacauuugaguuu

SEQ ID NO: 920081 - RNA, 19 nt, Homo sapiens
  misc_RNA (1)...(19): siRNA sense strand
auacaucucugaaaugcuu

SEQ ID NO: 920082 - RNA, 19 nt, Homo sapiens
  misc_RNA (1)...(19): siRNA sense strand
caagcacuaugaagaacaa

SEQ ID NO: 920083 - RNA, 19 nt, Homo sapiens
  misc_RNA (1)...(19): siRNA sense strand
gaaaugcuucugcguaaca

SEQ ID NO: 920084 - RNA, 19 nt, Homo sapiens
  misc_RNA (1)...(19): siRNA sense strand
cagacacgguccugguaua

SEQ ID NO: 920085 - RNA, 19 nt, Homo sapiens
  misc_RNA (1)...(19): siRNA sense strand
gaggguauguggacagaca

SEQ ID NO: 920086 - RNA, 19 nt, Homo sapiens
  misc_RNA (1)...(19): siRNA sense strand
ucaaggaccacaaggaauu

SEQ ID NO: 920087 - RNA, 19 nt, Homo sapiens
  misc_RNA (1)...(19): siRNA sense strand
gguaaauugucaccucuca

SEQ ID NO: 920088 - RNA, 19 nt, Homo sapiens
  misc_RNA (1)...(19): siRNA sense strand
gagcuucacccucacgaaa

SEQ ID NO: 920089 - RNA, 19 nt, Homo sapiens
  misc_RNA (1)...(19): siRNA sense strand
ucagaagcuuggaauaaau

SEQ ID NO: 920090 - RNA, 19 nt, Homo sapiens
  misc_RNA (1)...(19): siRNA sense strand
ugagauguguacaggaauu

SEQ ID NO: 920091 - RNA, 19 nt, Homo sapiens
  misc_RNA (1)...(19): siRNA sense strand
cagaagcuuggaauaaaua

SEQ ID NO: 920092 - RNA, 19 nt, Homo sapiens
  misc_RNA (1)...(19): siRNA sense strand
aaagauggauagaaaggau

SEQ ID NO: 920093 - RNA, 19 nt, Homo sapiens
  misc_RNA (1)...(19): siRNA sense strand
caagagaugcagaaaggaa

SEQ ID NO: 920094 - RNA, 19 nt, Homo sapiens
  misc_RNA (1)...(19): siRNA sense strand
uugcaaaccucuugaucaa

SEQ ID NO: 920095 - RNA, 19 nt, Homo sapiens
  misc_RNA (1)...(19): siRNA sense strand
ggaagaauguggguuaacg

SEQ ID NO: 920096 - RNA, 19 nt, Homo sapiens
  misc_RNA (1)...(19): siRNA sense strand
caacgaguuuggcugacuu

SEQ ID NO: 920097 - RNA, 19 nt, Homo sapiens
  misc_RNA (1)...(19): siRNA sense strand
ccacguacagugauuauuc

SEQ ID NO: 920098 - RNA, 19 nt, Homo sapiens
  misc_RNA (1)...(19): siRNA sense strand
aaacagccacguacaguga

SEQ ID NO: 920099 - RNA, 19 nt, Homo sapiens
  misc_RNA (1)...(19): siRNA sense strand
gcaagaagaaugugaccau

SEQ ID NO: 920100 - RNA, 19 nt, Homo sapiens
  misc_RNA (1)...(19): siRNA sense strand
ggaucuguguggugacuug

SEQ ID NO: 920101 - RNA, 19 nt, Homo sapiens
  misc_RNA (1)...(19): siRNA sense strand
gauucacuguguuugguaa

SEQ ID NO: 920102 - RNA, 19 nt, Homo sapiens
  misc_RNA (1)...(19): siRNA sense strand
cagugaaccuccuccaaga

SEQ ID NO: 920103 - RNA, 19 nt, Homo sapiens
  misc_RNA (1)...(19): siRNA sense strand
ggauucaacgagagugaua

SEQ ID NO: 920104 - RNA, 19 nt, Homo sapiens
  misc_RNA (1)...(19): siRNA sense strand
gcacuaugaagaacaacaa

SEQ ID NO: 920105 - RNA, 19 nt, Homo sapiens
  misc_RNA (1)...(19): siRNA sense strand
guuggaagaauguggguua

SEQ ID NO: 920106 - RNA, 19 nt, Homo sapiens
  misc_RNA (1)...(19): siRNA sense strand
gcucucaucagcaaucaaa

SEQ ID NO: 920107 - RNA, 19 nt, Homo sapiens
  misc_RNA (1)...(19): siRNA sense strand
caaggaaacugggaaacag

SEQ ID NO: 920108 - RNA, 19 nt, Homo sapiens
  misc_RNA (1)...(19): siRNA sense strand
agaacaggauacacaaaga

SEQ ID NO: 920109 - RNA, 19 nt, Homo sapiens
  misc_RNA (1)...(19): siRNA sense strand
ugugagauguguacaggaa

SEQ ID NO: 920110 - RNA, 19 nt, Homo sapiens
  misc_RNA (1)...(19): siRNA sense strand
gaacuugcaaaccucuuga

SEQ ID NO: 920111 - RNA, 19 nt, Homo sapiens
  misc_RNA (1)...(19): siRNA sense strand
ugucaccucucacccauug

SEQ ID NO: 920112 - RNA, 19 nt, Homo sapiens
  misc_RNA (1)...(19): siRNA sense strand
ugaagauucugcaaauugg

SEQ ID NO: 920113 - RNA, 19 nt, Homo sapiens
  misc_RNA (1)...(19): siRNA sense strand
gaagcugacguaucugaau

SEQ ID NO: 920114 - RNA, 19 nt, Homo sapiens
  misc_RNA (1)...(19): siRNA sense strand
gagaacaggauacacaaag

SEQ ID NO: 920115 - RNA, 19 nt, Homo sapiens
  misc_RNA (1)...(19): siRNA sense strand
aaauacugcuccagcuuga

SEQ ID NO: 920116 - RNA, 19 nt, Homo sapiens
  misc_RNA (1)...(19): siRNA sense strand
caagaagcuaacuuucaua

SEQ ID NO: 920117 - RNA, 19 nt, Homo sapiens
  misc_RNA (1)...(19): siRNA sense strand
caagagauaaagcagcaaa

SEQ ID NO: 920118 - RNA, 19 nt, Homo sapiens
  misc_RNA (1)...(19): siRNA sense strand
ggaaacagccacguacagu

SEQ ID NO: 920119 - RNA, 19 nt, Homo sapiens
  misc_RNA (1)...(19): siRNA sense strand
agauucaccuauacuuuga

SEQ ID NO: 920120 - RNA, 19 nt, Homo sapiens
  misc_RNA (1)...(19): siRNA sense strand
ucacaaggguagagaucug

SEQ ID NO: 920121 - RNA, 19 nt, Homo sapiens
  misc_RNA (1)...(19): siRNA sense strand
gcugacguaucugaaugua

SEQ ID NO: 920122 - RNA, 19 nt, Homo sapiens
  misc_RNA (1)...(19): siRNA sense strand
agauaaagcagcaaauuca

SEQ ID NO: 920123 - RNA, 19 nt, Homo sapiens
  misc_RNA (1)...(19): siRNA sense strand
gugccgccuuguucuauuu

SEQ ID NO: 920124 - RNA, 19 nt, Homo sapiens
  misc_RNA (1)...(19): siRNA sense strand
gcuuggaacauaaccuuaa

SEQ ID NO: 920125 - RNA, 19 nt, Homo sapiens
  misc_RNA (1)...(19): siRNA sense strand
ggaguucaggaaauuuaaa

SEQ ID NO: 920126 - RNA, 19 nt, Homo sapiens
  misc_RNA (1)...(19): siRNA sense strand
uucagaagcuuggaauaaa

SEQ ID NO: 920127 - RNA, 19 nt, Homo sapiens
  misc_RNA (1)...(19): siRNA sense strand
gagagaacaggauacacaa

SEQ ID NO: 920128 - RNA, 19 nt, Homo sapiens
  misc_RNA (1)...(19): siRNA sense strand
ugagauucaccuauacuuu

SEQ ID NO: 920129 - RNA, 19 nt, Homo sapiens
  misc_RNA (1)...(19): siRNA sense strand
ggauugccgcuuagagauu

SEQ ID NO: 920130 - RNA, 19 nt, Homo sapiens
  misc_RNA (1)...(19): siRNA sense strand
uuaaagaacaucucaagca

SEQ ID NO: 920131 - RNA, 19 nt, Homo sapiens
  misc_RNA (1)...(19): siRNA sense strand
cgaauacaucucugaaaug

SEQ ID NO: 920132 - RNA, 19 nt, Homo sapiens
  misc_RNA (1)...(19): siRNA sense strand
gagcuagcgcugguaaauu

SEQ ID NO: 920133 - RNA, 19 nt, Homo sapiens
  misc_RNA (1)...(19): siRNA sense strand
gauugccgcuuagagauuc

SEQ ID NO: 920134 - RNA, 19 nt, Homo sapiens
  misc_RNA (1)...(19): siRNA sense strand
gagagaaacucaaugaaua

SEQ ID NO: 920135 - RNA, 19 nt, Homo sapiens
  misc_RNA (1)...(19): siRNA sense strand
ggagagaaauccuacaaau

SEQ ID NO: 920136 - RNA, 19 nt, Homo sapiens
  misc_RNA (1)...(19): siRNA sense strand
gagaaacucuacaaaccua

SEQ ID NO: 920137 - RNA, 19 nt, Homo sapiens
  misc_RNA (1)...(19): siRNA sense strand
ucacaaaccuuacuacaca

SEQ ID NO: 920138 - RNA, 19 nt, Homo sapiens
  misc_RNA (1)...(19): siRNA sense strand
cuacaaaugugaagaaugu

SEQ ID NO: 920139 - RNA, 19 nt, Homo sapiens
  misc_RNA (1)...(19): siRNA sense strand
cuacaaaugugaagaaugu

SEQ ID NO: 920140 - RNA, 19 nt, Homo sapiens
  misc_RNA (1)...(19): siRNA sense strand
gaagagaaaccauacaaau

SEQ ID NO: 920141 - RNA, 19 nt, Homo sapiens
  misc_RNA (1)...(19): siRNA sense strand
cuacaaaugugaagaaugu

SEQ ID NO: 920142 - RNA, 19 nt, Homo sapiens
  misc_RNA (1)...(19): siRNA sense strand
gauccucaaucuuuacuaa

SEQ ID NO: 920143 - RNA, 19 nt, Homo sapiens
  misc_RNA (1)...(19): siRNA sense strand
ggagaaaucguacauaugu

SEQ ID NO: 920144 - RNA, 19 nt, Homo sapiens
  misc_RNA (1)...(19): siRNA sense strand
cuacaaacgugaagaaugu

SEQ ID NO: 920145 - RNA, 19 nt, Homo sapiens
  misc_RNA (1)...(19): siRNA sense strand
gagagaaacccuacaaaug

SEQ ID NO: 920146 - RNA, 19 nt, Homo sapiens
  misc_RNA (1)...(19): siRNA sense strand
gagagaaacccuacaaaug

SEQ ID NO: 920147 - RNA, 19 nt, Homo sapiens
  misc_RNA (1)...(19): siRNA sense strand
cuacaaacgugaagaaugu

SEQ ID NO: 920148 - RNA, 19 nt, Homo sapiens
  misc_RNA (1)...(19): siRNA sense strand
cuacaaaugugaagacugu

SEQ ID NO: 920149 - RNA, 19 nt, Homo sapiens
  misc_RNA (1)...(19): siRNA sense strand
uggcaaagcuucuaaccaa

SEQ ID NO: 920150 - RNA, 19 nt, Homo sapiens
  misc_RNA (1)...(19): siRNA sense strand
gagaaacccuacaaaugug

SEQ ID NO: 920151 - RNA, 19 nt, Homo sapiens
  misc_RNA (1)...(19): siRNA sense strand
gagaaacccuacaaaugug

SEQ ID NO: 920152 - RNA, 19 nt, Homo sapiens
  misc_RNA (1)...(19): siRNA sense strand
ccaguuauuuguucucauu

SEQ ID NO: 920153 - RNA, 19 nt, Homo sapiens
  misc_RNA (1)...(19): siRNA sense strand
uaauggauccucaaucuuu

SEQ ID NO: 920154 - RNA, 19 nt, Homo sapiens
  misc_RNA (1)...(19): siRNA sense strand
gaaauuaugcuggugagaa

SEQ ID NO: 920155 - RNA, 19 nt, Homo sapiens
  misc_RNA (1)...(19): siRNA sense strand
gagaaacccuaccaaugug

SEQ ID NO: 920156 - RNA, 19 nt, Homo sapiens
  misc_RNA (1)...(19): siRNA sense strand
gagagaaacccuaccaaug

SEQ ID NO: 920157 - RNA, 19 nt, Homo sapiens
  misc_RNA (1)...(19): siRNA sense strand
gagaaacccuaccaaugug

SEQ ID NO: 920158 - RNA, 19 nt, Homo sapiens
  misc_RNA (1)...(19): siRNA sense strand
gagagaaacccuaccaaug

SEQ ID NO: 920159 - RNA, 19 nt, Homo sapiens
  misc_RNA (1)...(19): siRNA sense strand
gagaaacccuacacaugug

SEQ ID NO: 920160 - RNA, 19 nt, Homo sapiens
  misc_RNA (1)...(19): siRNA sense strand
gagagaaacccuacacaug

SEQ ID NO: 920161 - RNA, 19 nt, Homo sapiens
  misc_RNA (1)...(19): siRNA sense strand
ccucaaaccuuacugaaca

SEQ ID NO: 920162 - RNA, 19 nt, Homo sapiens
  misc_RNA (1)...(19): siRNA sense strand
ggagagaaacccuacaaau

SEQ ID NO: 920163 - RNA, 19 nt, Homo sapiens
  misc_RNA (1)...(19): siRNA sense strand
ggagagaaacccuacaaau

SEQ ID NO: 920164 - RNA, 19 nt, Homo sapiens
  misc_RNA (1)...(19): siRNA sense strand
agacauaagagcauucaua

SEQ ID NO: 920165 - RNA, 19 nt, Homo sapiens
  misc_RNA (1)...(19): siRNA sense strand
uggcaaagcuuucuaucga

SEQ ID NO: 920166 - RNA, 19 nt, Homo sapiens
  misc_RNA (1)...(19): siRNA sense strand
gagaaaccauacaaaugug

SEQ ID NO: 920167 - RNA, 19 nt, Homo sapiens
  misc_RNA (1)...(19): siRNA sense strand
ucucaaaccuuacuacaca

SEQ ID NO: 920168 - RNA, 19 nt, Homo sapiens
  misc_RNA (1)...(19): siRNA sense strand
ggacauaagguaagacaca

SEQ ID NO: 920169 - RNA, 19 nt, Homo sapiens
  misc_RNA (1)...(19): siRNA sense strand
aaauuaugcuggugagaaa

SEQ ID NO: 920170 - RNA, 19 nt, Homo sapiens
  misc_RNA (1)...(19): siRNA sense strand
gagaaauccuacaaaugug

SEQ ID NO: 920171 - RNA, 19 nt, Homo sapiens
  misc_RNA (1)...(19): siRNA sense strand
agagaaauccuacaaaugu

SEQ ID NO: 920172 - RNA, 19 nt, Homo sapiens
  misc_RNA (1)...(19): siRNA sense strand
gagacaaacucuacaaacg

SEQ ID NO: 920173 - RNA, 19 nt, Homo sapiens
  misc_RNA (1)...(19): siRNA sense strand
cauaagagcauucauacug

SEQ ID NO: 920174 - RNA, 19 nt, Homo sapiens
  misc_RNA (1)...(19): siRNA sense strand
caccagagcagaacauaaa

SEQ ID NO: 920175 - RNA, 19 nt, Homo sapiens
  misc_RNA (1)...(19): siRNA sense strand
gagagaaauccuacaaaug

SEQ ID NO: 920176 - RNA, 19 nt, Homo sapiens
  misc_RNA (1)...(19): siRNA sense strand
ccagagagaaacucaauga

SEQ ID NO: 920177 - RNA, 19 nt, Homo sapiens
  misc_RNA (1)...(19): siRNA sense strand
cuaccaaugugaagaaugu

SEQ ID NO: 920178 - RNA, 19 nt, Homo sapiens
  misc_RNA (1)...(19): siRNA sense strand
aaccaguucucaaaccuua

SEQ ID NO: 920179 - RNA, 19 nt, Homo sapiens
  misc_RNA (1)...(19): siRNA sense strand
aaccaauccucaaaccuua

SEQ ID NO: 920180 - RNA, 19 nt, Homo sapiens
  misc_RNA (1)...(19): siRNA sense strand
agagaaacccuacaaaugu

SEQ ID NO: 920181 - RNA, 19 nt, Homo sapiens
  misc_RNA (1)...(19): siRNA sense strand
agagaaacccuacaaaugu

SEQ ID NO: 920182 - RNA, 19 nt, Homo sapiens
  misc_RNA (1)...(19): siRNA sense strand
auaauggacuuaaccaaug

SEQ ID NO: 920183 - RNA, 19 nt, Homo sapiens
  misc_RNA (1)...(19): siRNA sense strand
ggagagaaacccuaccaau

SEQ ID NO: 920184 - RNA, 19 nt, Homo sapiens
  misc_RNA (1)...(19): siRNA sense strand
ggagagaaacccuaccaau

SEQ ID NO: 920185 - RNA, 19 nt, Homo sapiens
  misc_RNA (1)...(19): siRNA sense strand
gagcauucauacuggagaa

SEQ ID NO: 920186 - RNA, 19 nt, Homo sapiens
  misc_RNA (1)...(19): siRNA sense strand
aaccaguccucaaaccuua

SEQ ID NO: 920187 - RNA, 19 nt, Homo sapiens
  misc_RNA (1)...(19): siRNA sense strand
agagaaacccuaccaaugu

SEQ ID NO: 920188 - RNA, 19 nt, Homo sapiens
  misc_RNA (1)...(19): siRNA sense strand
agagaaacccuaccaaugu

SEQ ID NO: 920189 - RNA, 19 nt, Homo sapiens
  misc_RNA (1)...(19): siRNA sense strand
aaccaguccucaauccuua

SEQ ID NO: 920190 - RNA, 19 nt, Homo sapiens
  misc_RNA (1)...(19): siRNA sense strand
aauggauccucaaucuuua

SEQ ID NO: 920191 - RNA, 19 nt, Homo sapiens
  misc_RNA (1)...(19): siRNA sense strand
ggacuuaaccaauguuugc

SEQ ID NO: 920192 - RNA, 19 nt, Homo sapiens
  misc_RNA (1)...(19): siRNA sense strand
gaaacucuacaaaccuaaa

SEQ ID NO: 920193 - RNA, 19 nt, Homo sapiens
  misc_RNA (1)...(19): siRNA sense strand
ccucacaccuuacuagaca

SEQ ID NO: 920194 - RNA, 19 nt, Homo sapiens
  misc_RNA (1)...(19): siRNA sense strand
ccucacaccuuacuagaca

SEQ ID NO: 920195 - RNA, 19 nt, Homo sapiens
  misc_RNA (1)...(19): siRNA sense strand
ccucacaccuuacuacaca

SEQ ID NO: 920196 - RNA, 19 nt, Homo sapiens
  misc_RNA (1)...(19): siRNA sense strand
aaccaguccucacaccuua

SEQ ID NO: 920197 - RNA, 19 nt, Homo sapiens
  misc_RNA (1)...(19): siRNA sense strand
aaccaguccucacaccuua

SEQ ID NO: 920198 - RNA, 19 nt, Homo sapiens
  misc_RNA (1)...(19): siRNA sense strand
agagaaaccauacaaaugu

SEQ ID NO: 920199 - RNA, 19 nt, Homo sapiens
  misc_RNA (1)...(19): siRNA sense strand
gaacaugagaauuuacagu

SEQ ID NO: 920200 - RNA, 19 nt, Homo sapiens
  misc_RNA (1)...(19): siRNA sense strand
uaaccaauccucaaaccuu

SEQ ID NO: 920201 - RNA, 19 nt, Homo sapiens
  misc_RNA (1)...(19): siRNA sense strand
aaccaguccucacaccuua

SEQ ID NO: 920202 - RNA, 19 nt, Homo sapiens
  misc_RNA (1)...(19): siRNA sense strand
aggcaguccucacaccuua

SEQ ID NO: 920203 - RNA, 19 nt, Homo sapiens
  misc_RNA (1)...(19): siRNA sense strand
cauaagagaauucauacug

SEQ ID NO: 920204 - RNA, 19 nt, Homo sapiens
  misc_RNA (1)...(19): siRNA sense strand
gagcagaacauaaaagauu

SEQ ID NO: 920205 - RNA, 19 nt, Homo sapiens
  misc_RNA (1)...(19): siRNA sense strand
cauaagagaauucauacug

SEQ ID NO: 920206 - RNA, 19 nt, Homo sapiens
  misc_RNA (1)...(19): siRNA sense strand
gcaaagcuucuaaccaauc

SEQ ID NO: 920207 - RNA, 19 nt, Homo sapiens
  misc_RNA (1)...(19): siRNA sense strand
gagaaaucguacauaugug

SEQ ID NO: 920208 - RNA, 19 nt, Homo sapiens
  misc_RNA (1)...(19): siRNA sense strand
ccucacaccuuaccagaca

SEQ ID NO: 920209 - RNA, 19 nt, Homo sapiens
  misc_RNA (1)...(19): siRNA sense strand
ccucacaccuuaccagaca

SEQ ID NO: 920210 - RNA, 19 nt, Homo sapiens
  misc_RNA (1)...(19): siRNA sense strand
ucacacauuacaacacaua

SEQ ID NO: 920211 - RNA, 19 nt, Homo sapiens
  misc_RNA (1)...(19): siRNA sense strand
ucaaaccuaacucaacaua

SEQ ID NO: 920212 - RNA, 19 nt, Homo sapiens
  misc_RNA (1)...(19): siRNA sense strand
agagaaacccuacacaugu

SEQ ID NO: 920213 - RNA, 19 nt, Homo sapiens
  misc_RNA (1)...(19): siRNA sense strand
ggagagaaacccuacacau

SEQ ID NO: 920214 - RNA, 19 nt, Homo sapiens
  misc_RNA (1)...(19): siRNA sense strand
caaagccuguaaccaguuc

SEQ ID NO: 920215 - RNA, 19 nt, Homo sapiens
  misc_RNA (1)...(19): siRNA sense strand
cacauaagguaauucauac

SEQ ID NO: 920216 - RNA, 19 nt, Homo sapiens
  misc_RNA (1)...(19): siRNA sense strand
gagagaaucccuacaaacg

SEQ ID NO: 920217 - RNA, 19 nt, Homo sapiens
  misc_RNA (1)...(19): siRNA sense strand
gaaaucguacauaugugaa

SEQ ID NO: 920218 - RNA, 19 nt, Homo sapiens
  misc_RNA (1)...(19): siRNA sense strand
ugaagaauguggcaaagcu

SEQ ID NO: 920219 - RNA, 19 nt, Homo sapiens
  misc_RNA (1)...(19): siRNA sense strand
gaaauccuacaaaugugaa

SEQ ID NO: 920220 - RNA, 19 nt, Homo sapiens
  misc_RNA (1)...(19): siRNA sense strand
aaaaggagguuauaaugga

SEQ ID NO: 920221 - RNA, 19 nt, Homo sapiens
  misc_RNA (1)...(19): siRNA sense strand
ugaagaauguggcaaagcu

SEQ ID NO: 920222 - RNA, 19 nt, Homo sapiens
  misc_RNA (1)...(19): siRNA sense strand
gaaaccauacaaaugugaa

SEQ ID NO: 920223 - RNA, 19 nt, Homo sapiens
  misc_RNA (1)...(19): siRNA sense strand
ugaagaauguggcaaagcu

SEQ ID NO: 920224 - RNA, 19 nt, Homo sapiens
  misc_RNA (1)...(19): siRNA sense strand
uaaggaauguggcaaagcu

SEQ ID NO: 920225 - RNA, 19 nt, Homo sapiens
  misc_RNA (1)...(19): siRNA sense strand
gcaaagccuguaaccaguu

SEQ ID NO: 920226 - RNA, 19 nt, Homo sapiens
  misc_RNA (1)...(19): siRNA sense strand
uaauggacuuaaccaaugu

SEQ ID NO: 920227 - RNA, 19 nt, Homo sapiens
  misc_RNA (1)...(19): siRNA sense strand
cgucacacauuacaacaca

SEQ ID NO: 920228 - RNA, 19 nt, Homo sapiens
  misc_RNA (1)...(19): siRNA sense strand
uaucgauccucaaaacuua

SEQ ID NO: 920229 - RNA, 19 nt, Homo sapiens
  misc_RNA (1)...(19): siRNA sense strand
uggagagaaucccuacaaa

SEQ ID NO: 920230 - RNA, 19 nt, Homo sapiens
  misc_RNA (1)...(19): siRNA sense strand
aagagaaaccauacaaaug

SEQ ID NO: 920231 - RNA, 19 nt, Homo sapiens
  misc_RNA (1)...(19): siRNA sense strand
cuacaaaccuaaaagaugu

SEQ ID NO: 920232 - RNA, 19 nt, Homo sapiens
  misc_RNA (1)...(19): siRNA sense strand
gugagaaacucuacaaacc

SEQ ID NO: 920233 - RNA, 19 nt, Homo sapiens
  misc_RNA (1)...(19): siRNA sense strand
ccucaauccuuacuacaca

SEQ ID NO: 920234 - RNA, 19 nt, Homo sapiens
  misc_RNA (1)...(19): siRNA sense strand
ggacaguggacaugaauuu

SEQ ID NO: 920235 - RNA, 19 nt, Homo sapiens
  misc_RNA (1)...(19): siRNA sense strand
ggagcuggcccaacucaua

SEQ ID NO: 920236 - RNA, 19 nt, Homo sapiens
  misc_RNA (1)...(19): siRNA sense strand
guucugaccuggagauaga

SEQ ID NO: 920237 - RNA, 19 nt, Homo sapiens
  misc_RNA (1)...(19): siRNA sense strand
ggaugugacuggagaagau

SEQ ID NO: 920238 - RNA, 19 nt, Homo sapiens
  misc_RNA (1)...(19): siRNA sense strand
caacuacaccuaugucaug

SEQ ID NO: 920239 - RNA, 19 nt, Homo sapiens
  misc_RNA (1)...(19): siRNA sense strand
ucauugagcccuauaagaa

SEQ ID NO: 920240 - RNA, 19 nt, Homo sapiens
  misc_RNA (1)...(19): siRNA sense strand
gcaccuuccucuccugaug

SEQ ID NO: 920241 - RNA, 19 nt, Homo sapiens
  misc_RNA (1)...(19): siRNA sense strand
caugguaugugaaagcauu

SEQ ID NO: 920242 - RNA, 19 nt, Homo sapiens
  misc_RNA (1)...(19): siRNA sense strand
gaauuugaaugggaagaug

SEQ ID NO: 920243 - RNA, 19 nt, Homo sapiens
  misc_RNA (1)...(19): siRNA sense strand
gagcagcgcguagacauga

SEQ ID NO: 920244 - RNA, 19 nt, Homo sapiens
  misc_RNA (1)...(19): siRNA sense strand
auaagaaaguccugucuca

SEQ ID NO: 920245 - RNA, 19 nt, Homo sapiens
  misc_RNA (1)...(19): siRNA sense strand
cuucaucaguuccaaauuc

SEQ ID NO: 920246 - RNA, 19 nt, Homo sapiens
  misc_RNA (1)...(19): siRNA sense strand
cuacaccuaugucauggaa

SEQ ID NO: 920247 - RNA, 19 nt, Homo sapiens
  misc_RNA (1)...(19): siRNA sense strand
ccucaaugcugucauccuu

SEQ ID NO: 920248 - RNA, 19 nt, Homo sapiens
  misc_RNA (1)...(19): siRNA sense strand
ugaaugggaagaugaacua

SEQ ID NO: 920249 - RNA, 19 nt, Homo sapiens
  misc_RNA (1)...(19): siRNA sense strand
caguggacaugaauuugaa

SEQ ID NO: 920250 - RNA, 19 nt, Homo sapiens
  misc_RNA (1)...(19): siRNA sense strand
gaaaggcugggccgagguu

SEQ ID NO: 920251 - RNA, 19 nt, Homo sapiens
  misc_RNA (1)...(19): siRNA sense strand
gagcuggcccaacucauau

SEQ ID NO: 920252 - RNA, 19 nt, Homo sapiens
  misc_RNA (1)...(19): siRNA sense strand
aaaauuaccugcuuguuca

SEQ ID NO: 920253 - RNA, 19 nt, Homo sapiens
  misc_RNA (1)...(19): siRNA sense strand
gaaaauuaccugcuuguuc

SEQ ID NO: 920254 - RNA, 19 nt, Homo sapiens
  misc_RNA (1)...(19): siRNA sense strand
ccacggugauggccucaau

SEQ ID NO: 920255 - RNA, 19 nt, Homo sapiens
  misc_RNA (1)...(19): siRNA sense strand
gcuggacaguggacaugaa

SEQ ID NO: 920256 - RNA, 19 nt, Homo sapiens
  misc_RNA (1)...(19): siRNA sense strand
gcuggauacgucaguguua

SEQ ID NO: 920257 - RNA, 19 nt, Homo sapiens
  misc_RNA (1)...(19): siRNA sense strand
guuccaaauucacacgaaa

SEQ ID NO: 920258 - RNA, 19 nt, Homo sapiens
  misc_RNA (1)...(19): siRNA sense strand
gguuguaugugggauguga

SEQ ID NO: 920259 - RNA, 19 nt, Homo sapiens
  misc_RNA (1)...(19): siRNA sense strand
gaagcagcauccccaacua

SEQ ID NO: 920260 - RNA, 19 nt, Homo sapiens
  misc_RNA (1)...(19): siRNA sense strand
acaccuaugucauggaaca

SEQ ID NO: 920261 - RNA, 19 nt, Homo sapiens
  misc_RNA (1)...(19): siRNA sense strand
gaaaguccugucucaugga

SEQ ID NO: 920262 - RNA, 19 nt, Homo sapiens
  misc_RNA (1)...(19): siRNA sense strand
gagguuguaugugggaugu

SEQ ID NO: 920263 - RNA, 19 nt, Homo sapiens
  misc_RNA (1)...(19): siRNA sense strand
aagaaaguccugucucaug

SEQ ID NO: 920264 - RNA, 19 nt, Homo sapiens
  misc_RNA (1)...(19): siRNA sense strand
gaguugcggcugagucuga

SEQ ID NO: 920265 - RNA, 19 nt, Homo sapiens
  misc_RNA (1)...(19): siRNA sense strand
cuucggcccuucaucaguu

SEQ ID NO: 920266 - RNA, 19 nt, Homo sapiens
  misc_RNA (1)...(19): siRNA sense strand
ggcccaaguuccaccucua

SEQ ID NO: 920267 - RNA, 19 nt, Homo sapiens
  misc_RNA (1)...(19): siRNA sense strand
gcccaaguuccaccucuaa

SEQ ID NO: 920268 - RNA, 19 nt, Homo sapiens
  misc_RNA (1)...(19): siRNA sense strand
cauugagcccuauaagaaa

SEQ ID NO: 920269 - RNA, 19 nt, Homo sapiens
  misc_RNA (1)...(19): siRNA sense strand
gcacaagcagggcccaagu

SEQ ID NO: 920270 - RNA, 19 nt, Homo sapiens
  misc_RNA (1)...(19): siRNA sense strand
acaguggacaugaauuuga

SEQ ID NO: 920271 - RNA, 19 nt, Homo sapiens
  misc_RNA (1)...(19): siRNA sense strand
uuaccugcuuguucauuug

SEQ ID NO: 920272 - RNA, 19 nt, Homo sapiens
  misc_RNA (1)...(19): siRNA sense strand
ccuguuaucuacccagaag

SEQ ID NO: 920273 - RNA, 19 nt, Homo sapiens
  misc_RNA (1)...(19): siRNA sense strand
ucaaugcugucauccuuuu

SEQ ID NO: 920274 - RNA, 19 nt, Homo sapiens
  misc_RNA (1)...(19): siRNA sense strand
uggaaaugauggagcuuca

SEQ ID NO: 920275 - RNA, 19 nt, Homo sapiens
  misc_RNA (1)...(19): siRNA sense strand
gacaguggacaugaauuug

SEQ ID NO: 920276 - RNA, 19 nt, Homo sapiens
  misc_RNA (1)...(19): siRNA sense strand
gcacugcuucggcccuuca

SEQ ID NO: 920277 - RNA, 19 nt, Homo sapiens
  misc_RNA (1)...(19): siRNA sense strand
ccagugagacagcugaaag

SEQ ID NO: 920278 - RNA, 19 nt, Homo sapiens
  misc_RNA (1)...(19): siRNA sense strand
ggagcagcgcguagacaug

SEQ ID NO: 920279 - RNA, 19 nt, Homo sapiens
  misc_RNA (1)...(19): siRNA sense strand
gguauauggugggaacucu

SEQ ID NO: 920280 - RNA, 19 nt, Homo sapiens
  misc_RNA (1)...(19): siRNA sense strand
auuaccugcuuguucauuu

SEQ ID NO: 920281 - RNA, 19 nt, Homo sapiens
  misc_RNA (1)...(19): siRNA sense strand
gucauugagcccuauaaga

SEQ ID NO: 920282 - RNA, 19 nt, Homo sapiens
  misc_RNA (1)...(19): siRNA sense strand
gauagacgaauuggagaca

SEQ ID NO: 920283 - RNA, 19 nt, Homo sapiens
  misc_RNA (1)...(19): siRNA sense strand
gcaguucugaccuggagau

SEQ ID NO: 920284 - RNA, 19 nt, Homo sapiens
  misc_RNA (1)...(19): siRNA sense strand
caucaguuccaaauucaca

SEQ ID NO: 920285 - RNA, 19 nt, Homo sapiens
  misc_RNA (1)...(19): siRNA sense strand
ccuaugucauggaacacuu

SEQ ID NO: 920286 - RNA, 19 nt, Homo sapiens
  misc_RNA (1)...(19): siRNA sense strand
uggaggguguuccgaaugg

SEQ ID NO: 920287 - RNA, 19 nt, Homo sapiens
  misc_RNA (1)...(19): siRNA sense strand
gggagcagcgcguagacau

SEQ ID NO: 920288 - RNA, 19 nt, Homo sapiens
  misc_RNA (1)...(19): siRNA sense strand
cgaauuggagacaccuuca

SEQ ID NO: 920289 - RNA, 19 nt, Homo sapiens
  misc_RNA (1)...(19): siRNA sense strand
ggacaguggacaugaauuu

SEQ ID NO: 920290 - RNA, 19 nt, Homo sapiens
  misc_RNA (1)...(19): siRNA sense strand
guucugaccuggagauaga

SEQ ID NO: 920291 - RNA, 19 nt, Homo sapiens
  misc_RNA (1)...(19): siRNA sense strand
ggaugugacuggagaagau

SEQ ID NO: 920292 - RNA, 19 nt, Homo sapiens
  misc_RNA (1)...(19): siRNA sense strand
caacuacaccuaugucaug

SEQ ID NO: 920293 - RNA, 19 nt, Homo sapiens
  misc_RNA (1)...(19): siRNA sense strand
ucauugagcccuauaagaa

SEQ ID NO: 920294 - RNA, 19 nt, Homo sapiens
  misc_RNA (1)...(19): siRNA sense strand
gcaccuuccucuccugaug

SEQ ID NO: 920295 - RNA, 19 nt, Homo sapiens
  misc_RNA (1)...(19): siRNA sense strand
gaauuugaaugggaagaug

SEQ ID NO: 920296 - RNA, 19 nt, Homo sapiens
  misc_RNA (1)...(19): siRNA sense strand
gagcagcgcguagacauga

SEQ ID NO: 920297 - RNA, 19 nt, Homo sapiens
  misc_RNA (1)...(19): siRNA sense strand
auaagaaaguccugucuca

SEQ ID NO: 920298 - RNA, 19 nt, Homo sapiens
  misc_RNA (1)...(19): siRNA sense strand
cuacaccuaugucauggaa

SEQ ID NO: 920299 - RNA, 19 nt, Homo sapiens
  misc_RNA (1)...(19): siRNA sense strand
ccucaaugcugucauccuu

SEQ ID NO: 920300 - RNA, 19 nt, Homo sapiens
  misc_RNA (1)...(19): siRNA sense strand
ugaaugggaagaugaacua

SEQ ID NO: 920301 - RNA, 19 nt, Homo sapiens
  misc_RNA (1)...(19): siRNA sense strand
caguggacaugaauuugaa

SEQ ID NO: 920302 - RNA, 19 nt, Homo sapiens
  misc_RNA (1)...(19): siRNA sense strand
gaaaggcugggccgagguu

SEQ ID NO: 920303 - RNA, 19 nt, Homo sapiens
  misc_RNA (1)...(19): siRNA sense strand
aaaauuaccugcuuguuca

SEQ ID NO: 920304 - RNA, 19 nt, Homo sapiens
  misc_RNA (1)...(19): siRNA sense strand
gaaaauuaccugcuuguuc

SEQ ID NO: 920305 - RNA, 19 nt, Homo sapiens
  misc_RNA (1)...(19): siRNA sense strand
ccacggugauggccucaau

SEQ ID NO: 920306 - RNA, 19 nt, Homo sapiens
  misc_RNA (1)...(19): siRNA sense strand
gcuggacaguggacaugaa

SEQ ID NO: 920307 - RNA, 19 nt, Homo sapiens
  misc_RNA (1)...(19): siRNA sense strand
gcuggauacgucaguguua

SEQ ID NO: 920308 - RNA, 19 nt, Homo sapiens
  misc_RNA (1)...(19): siRNA sense strand
gguuguaugugggauguga

SEQ ID NO: 920309 - RNA, 19 nt, Homo sapiens
  misc_RNA (1)...(19): siRNA sense strand
gaagcagcauccccaacua

SEQ ID NO: 920310 - RNA, 19 nt, Homo sapiens
  misc_RNA (1)...(19): siRNA sense strand
acaccuaugucauggaaca

SEQ ID NO: 920311 - RNA, 19 nt, Homo sapiens
  misc_RNA (1)...(19): siRNA sense strand
gaaaguccugucucaugga

SEQ ID NO: 920312 - RNA, 19 nt, Homo sapiens
  misc_RNA (1)...(19): siRNA sense strand
gagguuguaugugggaugu

SEQ ID NO: 920313 - RNA, 19 nt, Homo sapiens
  misc_RNA (1)...(19): siRNA sense strand
aagaaaguccugucucaug

SEQ ID NO: 920314 - RNA, 19 nt, Homo sapiens
  misc_RNA (1)...(19): siRNA sense strand
gaguugcggcugagucuga

SEQ ID NO: 920315 - RNA, 19 nt, Homo sapiens
  misc_RNA (1)...(19): siRNA sense strand
ggcccaaguuccaccucua

SEQ ID NO: 920316 - RNA, 19 nt, Homo sapiens
  misc_RNA (1)...(19): siRNA sense strand
gcccaaguuccaccucuaa

SEQ ID NO: 920317 - RNA, 19 nt, Homo sapiens
  misc_RNA (1)...(19): siRNA sense strand
cauugagcccuauaagaaa

SEQ ID NO: 920318 - RNA, 19 nt, Homo sapiens
  misc_RNA (1)...(19): siRNA sense strand
gcacaagcagggcccaagu

SEQ ID NO: 920319 - RNA, 19 nt, Homo sapiens
  misc_RNA (1)...(19): siRNA sense strand
acaguggacaugaauuuga

SEQ ID NO: 920320 - RNA, 19 nt, Homo sapiens
  misc_RNA (1)...(19): siRNA sense strand
uuaccugcuuguucauuug

SEQ ID NO: 920321 - RNA, 19 nt, Homo sapiens
  misc_RNA (1)...(19): siRNA sense strand
ccuguuaucuacccagaag

SEQ ID NO: 920322 - RNA, 19 nt, Homo sapiens
  misc_RNA (1)...(19): siRNA sense strand
ucaaugcugucauccuuuu

SEQ ID NO: 920323 - RNA, 19 nt, Homo sapiens
  misc_RNA (1)...(19): siRNA sense strand
uggaaaugauggagcuuca

SEQ ID NO: 920324 - RNA, 19 nt, Homo sapiens
  misc_RNA (1)...(19): siRNA sense strand
gacaguggacaugaauuug

SEQ ID NO: 920325 - RNA, 19 nt, Homo sapiens
  misc_RNA (1)...(19): siRNA sense strand
ccagugagacagcugaaag

SEQ ID NO: 920326 - RNA, 19 nt, Homo sapiens
  misc_RNA (1)...(19): siRNA sense strand
ggagcagcgcguagacaug

SEQ ID NO: 920327 - RNA, 19 nt, Homo sapiens
  misc_RNA (1)...(19): siRNA sense strand
gguauauggugggaacucu

SEQ ID NO: 920328 - RNA, 19 nt, Homo sapiens
  misc_RNA (1)...(19): siRNA sense strand
auuaccugcuuguucauuu

SEQ ID NO: 920329 - RNA, 19 nt, Homo sapiens
  misc_RNA (1)...(19): siRNA sense strand
gauagacgaauuggagaca

SEQ ID NO: 920330 - RNA, 19 nt, Homo sapiens
  misc_RNA (1)...(19): siRNA sense strand
gucauugagcccuauaaga

SEQ ID NO: 920331 - RNA, 19 nt, Homo sapiens
  misc_RNA (1)...(19): siRNA sense strand
gcaguucugaccuggagau

SEQ ID NO: 920332 - RNA, 19 nt, Homo sapiens
  misc_RNA (1)...(19): siRNA sense strand
ccuaugucauggaacacuu

SEQ ID NO: 920333 - RNA, 19 nt, Homo sapiens
  misc_RNA (1)...(19): siRNA sense strand
uggaggguguuccgaaugg

SEQ ID NO: 920334 - RNA, 19 nt, Homo sapiens
  misc_RNA (1)...(19): siRNA sense strand
cgaauuggagacaccuuca

SEQ ID NO: 920335 - RNA, 19 nt, Homo sapiens
  misc_RNA (1)...(19): siRNA sense strand
gggagcagcgcguagacau

SEQ ID NO: 920336 - RNA, 19 nt, Homo sapiens
  misc_RNA (1)...(19): siRNA sense strand
guacagagaugucauguug

SEQ ID NO: 920337 - RNA, 19 nt, Homo sapiens
  misc_RNA (1)...(19): siRNA sense strand
ggagagaccucaagaagga

SEQ ID NO: 920338 - RNA, 19 nt, Homo sapiens
  misc_RNA (1)...(19): siRNA sense strand
gauaaacccuaugaaugua

SEQ ID NO: 920339 - RNA, 19 nt, Homo sapiens
  misc_RNA (1)...(19): siRNA sense strand
caacuuauuucacaucaga

SEQ ID NO: 920340 - RNA, 19 nt, Homo sapiens
  misc_RNA (1)...(19): siRNA sense strand
ucacugggaugcuucauuu

SEQ ID NO: 920341 - RNA, 19 nt, Homo sapiens
  misc_RNA (1)...(19): siRNA sense strand
gggaauaccuggacuugga

SEQ ID NO: 920342 - RNA, 19 nt, Homo sapiens
  misc_RNA (1)...(19): siRNA sense strand
gagaaacccuaugaaugua

SEQ ID NO: 920343 - RNA, 19 nt, Homo sapiens
  misc_RNA (1)...(19): siRNA sense strand
gagaaacccuaugaaugua

SEQ ID NO: 920344 - RNA, 19 nt, Homo sapiens
  misc_RNA (1)...(19): siRNA sense strand
aggaaggccuuuagacuua

SEQ ID NO: 920345 - RNA, 19 nt, Homo sapiens
  misc_RNA (1)...(19): siRNA sense strand
agacuuaauucaucccuua

SEQ ID NO: 920346 - RNA, 19 nt, Homo sapiens
  misc_RNA (1)...(19): siRNA sense strand
gaaaggaagaagacaauau

SEQ ID NO: 920347 - RNA, 19 nt, Homo sapiens
  misc_RNA (1)...(19): siRNA sense strand
gagaagcccuaugaaugua

SEQ ID NO: 920348 - RNA, 19 nt, Homo sapiens
  misc_RNA (1)...(19): siRNA sense strand
guacaucacaaacuucaua

SEQ ID NO: 920349 - RNA, 19 nt, Homo sapiens
  misc_RNA (1)...(19): siRNA sense strand
gaagacaauauccagauuu

SEQ ID NO: 920350 - RNA, 19 nt, Homo sapiens
  misc_RNA (1)...(19): siRNA sense strand
guucagugauguauccaua

SEQ ID NO: 920351 - RNA, 19 nt, Homo sapiens
  misc_RNA (1)...(19): siRNA sense strand
ggaagauaauggaaagaau

SEQ ID NO: 920352 - RNA, 19 nt, Homo sapiens
  misc_RNA (1)...(19): siRNA sense strand
gagaaacccuaugugugua

SEQ ID NO: 920353 - RNA, 19 nt, Homo sapiens
  misc_RNA (1)...(19): siRNA sense strand
gaucuuagaguacaucaga

SEQ ID NO: 920354 - RNA, 19 nt, Homo sapiens
  misc_RNA (1)...(19): siRNA sense strand
ugagaaacccuaugaaugu

SEQ ID NO: 920355 - RNA, 19 nt, Homo sapiens
  misc_RNA (1)...(19): siRNA sense strand
ugagaaacccuaugaaugu

SEQ ID NO: 920356 - RNA, 19 nt, Homo sapiens
  misc_RNA (1)...(19): siRNA sense strand
gggauggccuucagacaga

SEQ ID NO: 920357 - RNA, 19 nt, Homo sapiens
  misc_RNA (1)...(19): siRNA sense strand
caacaucugagaauucauu

SEQ ID NO: 920358 - RNA, 19 nt, Homo sapiens
  misc_RNA (1)...(19): siRNA sense strand
gugagaaaccuuauaaaug

SEQ ID NO: 920359 - RNA, 19 nt, Homo sapiens
  misc_RNA (1)...(19): siRNA sense strand
caacuaacacuccaucaga

SEQ ID NO: 920360 - RNA, 19 nt, Homo sapiens
  misc_RNA (1)...(19): siRNA sense strand
caucagaguauucauauug

SEQ ID NO: 920361 - RNA, 19 nt, Homo sapiens
  misc_RNA (1)...(19): siRNA sense strand
ggaaggccuuuagacuuaa

SEQ ID NO: 920362 - RNA, 19 nt, Homo sapiens
  misc_RNA (1)...(19): siRNA sense strand
caucagaguauucauauug

SEQ ID NO: 920363 - RNA, 19 nt, Homo sapiens
  misc_RNA (1)...(19): siRNA sense strand
gaagcccuaugaauguaaa

SEQ ID NO: 920364 - RNA, 19 nt, Homo sapiens
  misc_RNA (1)...(19): siRNA sense strand
uagaguacaucacaaacuu

SEQ ID NO: 920365 - RNA, 19 nt, Homo sapiens
  misc_RNA (1)...(19): siRNA sense strand
cagaugugauuuccucauu

SEQ ID NO: 920366 - RNA, 19 nt, Homo sapiens
  misc_RNA (1)...(19): siRNA sense strand
ggugagaaaccuuauaaau

SEQ ID NO: 920367 - RNA, 19 nt, Homo sapiens
  misc_RNA (1)...(19): siRNA sense strand
ucacacagcaucagaguau

SEQ ID NO: 920368 - RNA, 19 nt, Homo sapiens
  misc_RNA (1)...(19): siRNA sense strand
ucacaucagaguauucaua

SEQ ID NO: 920369 - RNA, 19 nt, Homo sapiens
  misc_RNA (1)...(19): siRNA sense strand
ucagugauguucagugaug

SEQ ID NO: 920370 - RNA, 19 nt, Homo sapiens
  misc_RNA (1)...(19): siRNA sense strand
gagaugucauguuggagaa

SEQ ID NO: 920371 - RNA, 19 nt, Homo sapiens
  misc_RNA (1)...(19): siRNA sense strand
gugagaagcccuaugaaug

SEQ ID NO: 920372 - RNA, 19 nt, Homo sapiens
  misc_RNA (1)...(19): siRNA sense strand
ugauaaacccuaugaaugu

SEQ ID NO: 920373 - RNA, 19 nt, Homo sapiens
  misc_RNA (1)...(19): siRNA sense strand
gguguccucuuaccagaaa

SEQ ID NO: 920374 - RNA, 19 nt, Homo sapiens
  misc_RNA (1)...(19): siRNA sense strand
gaaaagagccuuggaaagu

SEQ ID NO: 920375 - RNA, 19 nt, Homo sapiens
  misc_RNA (1)...(19): siRNA sense strand
aaagagccuuggaaaguug

SEQ ID NO: 920376 - RNA, 19 nt, Homo sapiens
  misc_RNA (1)...(19): siRNA sense strand
caucagagcauucauacug

SEQ ID NO: 920377 - RNA, 19 nt, Homo sapiens
  misc_RNA (1)...(19): siRNA sense strand
ggaaaggaagaagacaaua

SEQ ID NO: 920378 - RNA, 19 nt, Homo sapiens
  misc_RNA (1)...(19): siRNA sense strand
caucagaagcuuaauagug

SEQ ID NO: 920379 - RNA, 19 nt, Homo sapiens
  misc_RNA (1)...(19): siRNA sense strand
gaaacccuauguguguaaa

SEQ ID NO: 920380 - RNA, 19 nt, Homo sapiens
  misc_RNA (1)...(19): siRNA sense strand
ugagaaacccuaugugugu

SEQ ID NO: 920381 - RNA, 19 nt, Homo sapiens
  misc_RNA (1)...(19): siRNA sense strand
cugaaaagguguccucuua

SEQ ID NO: 920382 - RNA, 19 nt, Homo sapiens
  misc_RNA (1)...(19): siRNA sense strand
acagagaugucauguugga

SEQ ID NO: 920383 - RNA, 19 nt, Homo sapiens
  misc_RNA (1)...(19): siRNA sense strand
gaauguaaggaauguaaga

SEQ ID NO: 920384 - RNA, 19 nt, Homo sapiens
  misc_RNA (1)...(19): siRNA sense strand
ggagaacuacagcaacuug

SEQ ID NO: 920385 - RNA, 19 nt, Homo sapiens
  misc_RNA (1)...(19): siRNA sense strand
cagcaucagaguauucaua

SEQ ID NO: 920386 - RNA, 19 nt, Homo sapiens
  misc_RNA (1)...(19): siRNA sense strand
agaagacaauauccagauu

SEQ ID NO: 920387 - RNA, 19 nt, Homo sapiens
  misc_RNA (1)...(19): siRNA sense strand
gaauguaggaaggccuuua

SEQ ID NO: 920388 - RNA, 19 nt, Homo sapiens
  misc_RNA (1)...(19): siRNA sense strand
cuacaucagagcauucaua

SEQ ID NO: 920389 - RNA, 19 nt, Homo sapiens
  misc_RNA (1)...(19): siRNA sense strand
gaaacccuaugaauguaag

SEQ ID NO: 920390 - RNA, 19 nt, Homo sapiens
  misc_RNA (1)...(19): siRNA sense strand
gaaacccuaugaauguaag

SEQ ID NO: 920391 - RNA, 19 nt, Homo sapiens
  misc_RNA (1)...(19): siRNA sense strand
ccaaguaugagaccaagaa

SEQ ID NO: 920392 - RNA, 19 nt, Homo sapiens
  misc_RNA (1)...(19): siRNA sense strand
aagacaauauccagauuug

SEQ ID NO: 920393 - RNA, 19 nt, Homo sapiens
  misc_RNA (1)...(19): siRNA sense strand
gaugugauuuccucauugg

SEQ ID NO: 920394 - RNA, 19 nt, Homo sapiens
  misc_RNA (1)...(19): siRNA sense strand
uggcaaggccuuuagauug

SEQ ID NO: 920395 - RNA, 19 nt, Homo sapiens
  misc_RNA (1)...(19): siRNA sense strand
gcaucagaguauucauauu

SEQ ID NO: 920396 - RNA, 19 nt, Homo sapiens
  misc_RNA (1)...(19): siRNA sense strand
gugagaaacccuaugaaug

SEQ ID NO: 920397 - RNA, 19 nt, Homo sapiens
  misc_RNA (1)...(19): siRNA sense strand
gugagaaacccuaugaaug

SEQ ID NO: 920398 - RNA, 19 nt, Homo sapiens
  misc_RNA (1)...(19): siRNA sense strand
ucagugauguauccauaga

SEQ ID NO: 920399 - RNA, 19 nt, Homo sapiens
  misc_RNA (1)...(19): siRNA sense strand
ugagaagcccuaugaaugu

SEQ ID NO: 920400 - RNA, 19 nt, Homo sapiens
  misc_RNA (1)...(19): siRNA sense strand
gaauguggcaaggccuuua

SEQ ID NO: 920401 - RNA, 19 nt, Homo sapiens
  misc_RNA (1)...(19): siRNA sense strand
ccacaucagagacuucauu

SEQ ID NO: 920402 - RNA, 19 nt, Homo sapiens
  misc_RNA (1)...(19): siRNA sense strand
aggcaacauucacaccuua

SEQ ID NO: 920403 - RNA, 19 nt, Homo sapiens
  misc_RNA (1)...(19): siRNA sense strand
gccuuuagauugcgccaaa

SEQ ID NO: 920404 - RNA, 19 nt, Homo sapiens
  misc_RNA (1)...(19): siRNA sense strand
acucacaacuuauuucaca

SEQ ID NO: 920405 - RNA, 19 nt, Homo sapiens
  misc_RNA (1)...(19): siRNA sense strand
gauucauacuggugagaaa

SEQ ID NO: 920406 - RNA, 19 nt, Homo sapiens
  misc_RNA (1)...(19): siRNA sense strand
gugcagaucuuagaguaca

SEQ ID NO: 920407 - RNA, 19 nt, Homo sapiens
  misc_RNA (1)...(19): siRNA sense strand
cgacaucagagacuucauu

SEQ ID NO: 920408 - RNA, 19 nt, Homo sapiens
  misc_RNA (1)...(19): siRNA sense strand
caucagagaauucauacug

SEQ ID NO: 920409 - RNA, 19 nt, Homo sapiens
  misc_RNA (1)...(19): siRNA sense strand
guuaagcccuaugacugua

SEQ ID NO: 920410 - RNA, 19 nt, Homo sapiens
  misc_RNA (1)...(19): siRNA sense strand
ggaaaguugugaggaaagg

SEQ ID NO: 920411 - RNA, 19 nt, Homo sapiens
  misc_RNA (1)...(19): siRNA sense strand
gaaggccuuuagacuuaau

SEQ ID NO: 920412 - RNA, 19 nt, Homo sapiens
  misc_RNA (1)...(19): siRNA sense strand
aaacuuacucuacaucaga

SEQ ID NO: 920413 - RNA, 19 nt, Homo sapiens
  misc_RNA (1)...(19): siRNA sense strand
ggugagaaacccuaugaau

SEQ ID NO: 920414 - RNA, 19 nt, Homo sapiens
  misc_RNA (1)...(19): siRNA sense strand
ggugagaaacccuaugaau

SEQ ID NO: 920415 - RNA, 19 nt, Homo sapiens
  misc_RNA (1)...(19): siRNA sense strand
agacagacugcacaccuua

SEQ ID NO: 920416 - RNA, 19 nt, Homo sapiens
  misc_RNA (1)...(19): siRNA sense strand
ggaaagaauugaaaaccau

SEQ ID NO: 920417 - RNA, 19 nt, Homo sapiens
  misc_RNA (1)...(19): siRNA sense strand
gaauguaagaaggccuuua

SEQ ID NO: 920418 - RNA, 19 nt, Homo sapiens
  misc_RNA (1)...(19): siRNA sense strand
gccaacagcuuacuuuuca

SEQ ID NO: 920419 - RNA, 19 nt, Homo sapiens
  misc_RNA (1)...(19): siRNA sense strand
ugggaugcuucauuucuaa

SEQ ID NO: 920420 - RNA, 19 nt, Homo sapiens
  misc_RNA (1)...(19): siRNA sense strand
gaaaaugccaucugaaaag

SEQ ID NO: 920421 - RNA, 19 nt, Homo sapiens
  misc_RNA (1)...(19): siRNA sense strand
agagugcgccaacagcuua

SEQ ID NO: 920422 - RNA, 19 nt, Homo sapiens
  misc_RNA (1)...(19): siRNA sense strand
agucgcuacucacaacuua

SEQ ID NO: 920423 - RNA, 19 nt, Homo sapiens
  misc_RNA (1)...(19): siRNA sense strand
gaauguaaggaauguggaa

SEQ ID NO: 920424 - RNA, 19 nt, Homo sapiens
  misc_RNA (1)...(19): siRNA sense strand
ggugagaaacccuaugugu

SEQ ID NO: 920425 - RNA, 19 nt, Homo sapiens
  misc_RNA (1)...(19): siRNA sense strand
caucagaggauucauacug

SEQ ID NO: 920426 - RNA, 19 nt, Homo sapiens
  misc_RNA (1)...(19): siRNA sense strand
guaugagaccaagaaguua

SEQ ID NO: 920427 - RNA, 19 nt, Homo sapiens
  misc_RNA (1)...(19): siRNA sense strand
ggucuuagaguacaucaca

SEQ ID NO: 920428 - RNA, 19 nt, Homo sapiens
  misc_RNA (1)...(19): siRNA sense strand
ggugagaagcccuaugaau

SEQ ID NO: 920429 - RNA, 19 nt, Homo sapiens
  misc_RNA (1)...(19): siRNA sense strand
guaugaauguaaggaaugu

SEQ ID NO: 920430 - RNA, 19 nt, Homo sapiens
  misc_RNA (1)...(19): siRNA sense strand
gaggaaaggaagaagacaa

SEQ ID NO: 920431 - RNA, 19 nt, Homo sapiens
  misc_RNA (1)...(19): siRNA sense strand
agacuacuuucacaacuca

SEQ ID NO: 920432 - RNA, 19 nt, Homo sapiens
  misc_RNA (1)...(19): siRNA sense strand
gcugacaggcucuaugaau

SEQ ID NO: 920433 - RNA, 19 nt, Homo sapiens
  misc_RNA (1)...(19): siRNA sense strand
ggccuuaagggucucauuu

SEQ ID NO: 920434 - RNA, 19 nt, Homo sapiens
  misc_RNA (1)...(19): siRNA sense strand
cuuaauucaucccuuauuc

SEQ ID NO: 920435 - RNA, 19 nt, Homo sapiens
  misc_RNA (1)...(19): siRNA sense strand
auucacaccuuacucauca

SEQ ID NO: 920436 - RNA, 19 nt, Homo sapiens
  misc_RNA (1)...(19): siRNA sense strand
cauggacgccgaacucauc

SEQ ID NO: 920437 - RNA, 19 nt, Homo sapiens
  misc_RNA (1)...(19): siRNA sense strand
agagcgaguucgacugcuu

SEQ ID NO: 920438 - RNA, 19 nt, Homo sapiens
  misc_RNA (1)...(19): siRNA sense strand
gaaagaaacccuacaaaug

SEQ ID NO: 920439 - RNA, 19 nt, Homo sapiens
  misc_RNA (1)...(19): siRNA sense strand
gacaugagauggugaauga

SEQ ID NO: 920440 - RNA, 19 nt, Homo sapiens
  misc_RNA (1)...(19): siRNA sense strand
ucucaaaccuuacugaaua

SEQ ID NO: 920441 - RNA, 19 nt, Homo sapiens
  misc_RNA (1)...(19): siRNA sense strand
ggagaaacccuacaaaugu

SEQ ID NO: 920442 - RNA, 19 nt, Homo sapiens
  misc_RNA (1)...(19): siRNA sense strand
gugagaaacucuacaaaug

SEQ ID NO: 920443 - RNA, 19 nt, Homo sapiens
  misc_RNA (1)...(19): siRNA sense strand
cuacaaaugugaagaaugu

SEQ ID NO: 920444 - RNA, 19 nt, Homo sapiens
  misc_RNA (1)...(19): siRNA sense strand
cuacaaaugugaagaaugu

SEQ ID NO: 920445 - RNA, 19 nt, Homo sapiens
  misc_RNA (1)...(19): siRNA sense strand
cuacaaaugugaagaaugu

SEQ ID NO: 920446 - RNA, 19 nt, Homo sapiens
  misc_RNA (1)...(19): siRNA sense strand
cuacaaaugugaagaaugu

SEQ ID NO: 920447 - RNA, 19 nt, Homo sapiens
  misc_RNA (1)...(19): siRNA sense strand
cuacaaaugucaagaaugu

SEQ ID NO: 920448 - RNA, 19 nt, Homo sapiens
  misc_RNA (1)...(19): siRNA sense strand
cuacagaacuggaaugugu

SEQ ID NO: 920449 - RNA, 19 nt, Homo sapiens
  misc_RNA (1)...(19): siRNA sense strand
gaaauuauaccaaggugaa

SEQ ID NO: 920450 - RNA, 19 nt, Homo sapiens
  misc_RNA (1)...(19): siRNA sense strand
caagggagguuauaaugga

SEQ ID NO: 920451 - RNA, 19 nt, Homo sapiens
  misc_RNA (1)...(19): siRNA sense strand
ggaaagaaacccuacaaau

SEQ ID NO: 920452 - RNA, 19 nt, Homo sapiens
  misc_RNA (1)...(19): siRNA sense strand
gagagaaacccuacaaaug

SEQ ID NO: 920453 - RNA, 19 nt, Homo sapiens
  misc_RNA (1)...(19): siRNA sense strand
gaagagaaacccuacaaau

SEQ ID NO: 920454 - RNA, 19 nt, Homo sapiens
  misc_RNA (1)...(19): siRNA sense strand
gagagaaacccuacaaaug

SEQ ID NO: 920455 - RNA, 19 nt, Homo sapiens
  misc_RNA (1)...(19): siRNA sense strand
cuucaaagcuuacuaaaca

SEQ ID NO: 920456 - RNA, 19 nt, Homo sapiens
  misc_RNA (1)...(19): siRNA sense strand
uaaccaaucuucaaagcuu

SEQ ID NO: 920457 - RNA, 19 nt, Homo sapiens
  misc_RNA (1)...(19): siRNA sense strand
aaacacuccucaucccuua

SEQ ID NO: 920458 - RNA, 19 nt, Homo sapiens
  misc_RNA (1)...(19): siRNA sense strand
gagagaaacuacagaacug

SEQ ID NO: 920459 - RNA, 19 nt, Homo sapiens
  misc_RNA (1)...(19): siRNA sense strand
uaaccaaucugcaaaccuu

SEQ ID NO: 920460 - RNA, 19 nt, Homo sapiens
  misc_RNA (1)...(19): siRNA sense strand
gagaaacccuacaaaugug

SEQ ID NO: 920461 - RNA, 19 nt, Homo sapiens
  misc_RNA (1)...(19): siRNA sense strand
gagagaaacccuaugaaug

SEQ ID NO: 920462 - RNA, 19 nt, Homo sapiens
  misc_RNA (1)...(19): siRNA sense strand
gagaaacccuacaaaugug

SEQ ID NO: 920463 - RNA, 19 nt, Homo sapiens
  misc_RNA (1)...(19): siRNA sense strand
gagaaacccuacaaaugug

SEQ ID NO: 920464 - RNA, 19 nt, Homo sapiens
  misc_RNA (1)...(19): siRNA sense strand
gagagaaaccauacaaaug

SEQ ID NO: 920465 - RNA, 19 nt, Homo sapiens
  misc_RNA (1)...(19): siRNA sense strand
aaagaaacccuacaaaugu

SEQ ID NO: 920466 - RNA, 19 nt, Homo sapiens
  misc_RNA (1)...(19): siRNA sense strand
caaggugaauuucugcaaa

SEQ ID NO: 920467 - RNA, 19 nt, Homo sapiens
  misc_RNA (1)...(19): siRNA sense strand
ccucaaaacuuacugaaua

SEQ ID NO: 920468 - RNA, 19 nt, Homo sapiens
  misc_RNA (1)...(19): siRNA sense strand
gcacagcggaauuuaugua

SEQ ID NO: 920469 - RNA, 19 nt, Homo sapiens
  misc_RNA (1)...(19): siRNA sense strand
gagcaacccuacaaaugug

SEQ ID NO: 920470 - RNA, 19 nt, Homo sapiens
  misc_RNA (1)...(19): siRNA sense strand
gagcaacccuacauaugug

SEQ ID NO: 920471 - RNA, 19 nt, Homo sapiens
  misc_RNA (1)...(19): siRNA sense strand
aaccaguucucaaaucuua

SEQ ID NO: 920472 - RNA, 19 nt, Homo sapiens
  misc_RNA (1)...(19): siRNA sense strand
gagaaacucuacaaauguc

SEQ ID NO: 920473 - RNA, 19 nt, Homo sapiens
  misc_RNA (1)...(19): siRNA sense strand
cuacaagugugaagaaugu

SEQ ID NO: 920474 - RNA, 19 nt, Homo sapiens
  misc_RNA (1)...(19): siRNA sense strand
ccucaaaucuuacggaaca

SEQ ID NO: 920475 - RNA, 19 nt, Homo sapiens
  misc_RNA (1)...(19): siRNA sense strand
ggagagaaacccuacaaau

SEQ ID NO: 920476 - RNA, 19 nt, Homo sapiens
  misc_RNA (1)...(19): siRNA sense strand
ggagagaaacccuaugaau

SEQ ID NO: 920477 - RNA, 19 nt, Homo sapiens
  misc_RNA (1)...(19): siRNA sense strand
gggagaaacccuacaaaug

SEQ ID NO: 920478 - RNA, 19 nt, Homo sapiens
  misc_RNA (1)...(19): siRNA sense strand
ggagagaaacccuacaaau

SEQ ID NO: 920479 - RNA, 19 nt, Homo sapiens
  misc_RNA (1)...(19): siRNA sense strand
ucucaaaucuuacuacaca

SEQ ID NO: 920480 - RNA, 19 nt, Homo sapiens
  misc_RNA (1)...(19): siRNA sense strand
ugacaaagcuuuuaaccaa

SEQ ID NO: 920481 - RNA, 19 nt, Homo sapiens
  misc_RNA (1)...(19): siRNA sense strand
cugcaaaccuuacuaaaca

SEQ ID NO: 920482 - RNA, 19 nt, Homo sapiens
  misc_RNA (1)...(19): siRNA sense strand
ggccagagcagaacauaaa

SEQ ID NO: 920483 - RNA, 19 nt, Homo sapiens
  misc_RNA (1)...(19): siRNA sense strand
gagagcaacccuacaaaug

SEQ ID NO: 920484 - RNA, 19 nt, Homo sapiens
  misc_RNA (1)...(19): siRNA sense strand
cuacaaaugugaagaaugc

SEQ ID NO: 920485 - RNA, 19 nt, Homo sapiens
  misc_RNA (1)...(19): siRNA sense strand
gcacaagggagguuauaau

SEQ ID NO: 920486 - RNA, 19 nt, Homo sapiens
  misc_RNA (1)...(19): siRNA sense strand
gcaaaccuuacuaaacaua

SEQ ID NO: 920487 - RNA, 19 nt, Homo sapiens
  misc_RNA (1)...(19): siRNA sense strand
gagaaaccauacaaaugug

SEQ ID NO: 920488 - RNA, 19 nt, Homo sapiens
  misc_RNA (1)...(19): siRNA sense strand
ggacuuaaccaauguuuac

SEQ ID NO: 920489 - RNA, 19 nt, Homo sapiens
  misc_RNA (1)...(19): siRNA sense strand
acaccuaacucgacaugaa

SEQ ID NO: 920490 - RNA, 19 nt, Homo sapiens
  misc_RNA (1)...(19): siRNA sense strand
aaccaauucucaaaccuua

SEQ ID NO: 920491 - RNA, 19 nt, Homo sapiens
  misc_RNA (1)...(19): siRNA sense strand
gcaaaugugaagaauguga

SEQ ID NO: 920492 - RNA, 19 nt, Homo sapiens
  misc_RNA (1)...(19): siRNA sense strand
ggagagcaacccuacauau

SEQ ID NO: 920493 - RNA, 19 nt, Homo sapiens
  misc_RNA (1)...(19): siRNA sense strand
caaagccucuaaccaguuc

SEQ ID NO: 920494 - RNA, 19 nt, Homo sapiens
  misc_RNA (1)...(19): siRNA sense strand
gcaaaauguuucaauguga

SEQ ID NO: 920495 - RNA, 19 nt, Homo sapiens
  misc_RNA (1)...(19): siRNA sense strand
agagaaacccuaugaaugu

SEQ ID NO: 920496 - RNA, 19 nt, Homo sapiens
  misc_RNA (1)...(19): siRNA sense strand
agagaaacccuacaaaugu

SEQ ID NO: 920497 - RNA, 19 nt, Homo sapiens
  misc_RNA (1)...(19): siRNA sense strand
agagaaacccuacaaaugu

SEQ ID NO: 920498 - RNA, 19 nt, Homo sapiens
  misc_RNA (1)...(19): siRNA sense strand
gagaauucauacuggagaa

SEQ ID NO: 920499 - RNA, 19 nt, Homo sapiens
  misc_RNA (1)...(19): siRNA sense strand
agagaaacccuacaaaugu

SEQ ID NO: 920500 - RNA, 19 nt, Homo sapiens
  misc_RNA (1)...(19): siRNA sense strand
cugcaaaugugaagaaugu

SEQ ID NO: 920501 - RNA, 19 nt, Homo sapiens
  misc_RNA (1)...(19): siRNA sense strand
auaauggacuuaaccaaug

SEQ ID NO: 920502 - RNA, 19 nt, Homo sapiens
  misc_RNA (1)...(19): siRNA sense strand
gagaaacccuaugaaugug

SEQ ID NO: 920503 - RNA, 19 nt, Homo sapiens
  misc_RNA (1)...(19): siRNA sense strand
ggagagauacccuacaagu

SEQ ID NO: 920504 - RNA, 19 nt, Homo sapiens
  misc_RNA (1)...(19): siRNA sense strand
aaacacuccucagcccuua

SEQ ID NO: 920505 - RNA, 19 nt, Homo sapiens
  misc_RNA (1)...(19): siRNA sense strand
aaccgauccucaaaucuua

SEQ ID NO: 920506 - RNA, 19 nt, Homo sapiens
  misc_RNA (1)...(19): siRNA sense strand
gagagcaacccuacauaug

SEQ ID NO: 920507 - RNA, 19 nt, Homo sapiens
  misc_RNA (1)...(19): siRNA sense strand
ugacagaacuuuuaaccaa

SEQ ID NO: 920508 - RNA, 19 nt, Homo sapiens
  misc_RNA (1)...(19): siRNA sense strand
gcaaagccucuaaccaguu

SEQ ID NO: 920509 - RNA, 19 nt, Homo sapiens
  misc_RNA (1)...(19): siRNA sense strand
acacugagaagauaugaaa

SEQ ID NO: 920510 - RNA, 19 nt, Homo sapiens
  misc_RNA (1)...(19): siRNA sense strand
ggauguggccauagaauuc

SEQ ID NO: 920511 - RNA, 19 nt, Homo sapiens
  misc_RNA (1)...(19): siRNA sense strand
cgagagaaaccauacaaau

SEQ ID NO: 920512 - RNA, 19 nt, Homo sapiens
  misc_RNA (1)...(19): siRNA sense strand
ccucaucccuuacuacaca

SEQ ID NO: 920513 - RNA, 19 nt, Homo sapiens
  misc_RNA (1)...(19): siRNA sense strand
ccucaacccuuacuacaca

SEQ ID NO: 920514 - RNA, 19 nt, Homo sapiens
  misc_RNA (1)...(19): siRNA sense strand
ccucacaccuuacuacaca

SEQ ID NO: 920515 - RNA, 19 nt, Homo sapiens
  misc_RNA (1)...(19): siRNA sense strand
ucaaugugaugaauaugug

SEQ ID NO: 920516 - RNA, 19 nt, Homo sapiens
  misc_RNA (1)...(19): siRNA sense strand
ggagagcaacccuacaaau

SEQ ID NO: 920517 - RNA, 19 nt, Homo sapiens
  misc_RNA (1)...(19): siRNA sense strand
aaccaguccucacaccuua

SEQ ID NO: 920518 - RNA, 19 nt, Homo sapiens
  misc_RNA (1)...(19): siRNA sense strand
agagaaaccauacaaaugu

SEQ ID NO: 920519 - RNA, 19 nt, Homo sapiens
  misc_RNA (1)...(19): siRNA sense strand
ucaccugucuggagcaaga

SEQ ID NO: 920520 - RNA, 19 nt, Homo sapiens
  misc_RNA (1)...(19): siRNA sense strand
gagcagaacauaaaagauu

SEQ ID NO: 920521 - RNA, 19 nt, Homo sapiens
  misc_RNA (1)...(19): siRNA sense strand
aagagaaacccuacaaaug

SEQ ID NO: 920522 - RNA, 19 nt, Homo sapiens
  misc_RNA (1)...(19): siRNA sense strand
uaaccgauccucaaaucuu

SEQ ID NO: 920523 - RNA, 19 nt, Homo sapiens
  misc_RNA (1)...(19): siRNA sense strand
cauaagagaauucauacug

SEQ ID NO: 920524 - RNA, 19 nt, Homo sapiens
  misc_RNA (1)...(19): siRNA sense strand
uaaccaauguuuaccaacu

SEQ ID NO: 920525 - RNA, 19 nt, Homo sapiens
  misc_RNA (1)...(19): siRNA sense strand
uaacucgacaugaaagaaa

SEQ ID NO: 920526 - RNA, 19 nt, Homo sapiens
  misc_RNA (1)...(19): siRNA sense strand
ggagagaaacuacagaacu

SEQ ID NO: 920527 - RNA, 19 nt, Homo sapiens
  misc_RNA (1)...(19): siRNA sense strand
ccucagcccuuacuacaca

SEQ ID NO: 920528 - RNA, 19 nt, Homo sapiens
  misc_RNA (1)...(19): siRNA sense strand
agauuaugcucgagagaaa

SEQ ID NO: 920529 - RNA, 19 nt, Homo sapiens
  misc_RNA (1)...(19): siRNA sense strand
gaaugugacagaacuuuua

SEQ ID NO: 920530 - RNA, 19 nt, Homo sapiens
  misc_RNA (1)...(19): siRNA sense strand
ucaagaaugugacagaacu

SEQ ID NO: 920531 - RNA, 19 nt, Homo sapiens
  misc_RNA (1)...(19): siRNA sense strand
uuaaaaggcuguaaaagug

SEQ ID NO: 920532 - RNA, 19 nt, Homo sapiens
  misc_RNA (1)...(19): siRNA sense strand
agagauacccuacaagugu

SEQ ID NO: 920533 - RNA, 19 nt, Homo sapiens
  misc_RNA (1)...(19): siRNA sense strand
guaaaaguguggaugaaug

SEQ ID NO: 920534 - RNA, 19 nt, Homo sapiens
  misc_RNA (1)...(19): siRNA sense strand
gaaacuucauacuggaaag

SEQ ID NO: 920535 - RNA, 19 nt, Homo sapiens
  misc_RNA (1)...(19): siRNA sense strand
ugagagaugugacaaagcu

SEQ ID NO: 920536 - RNA, 19 nt, Homo sapiens
  misc_RNA (1)...(19): siRNA sense strand
ugaagaauguggcaaagcu

SEQ ID NO: 920537 - RNA, 19 nt, Homo sapiens
  misc_RNA (1)...(19): siRNA sense strand
ugaagaauguggcaaagcu

SEQ ID NO: 920538 - RNA, 19 nt, Homo sapiens
  misc_RNA (1)...(19): siRNA sense strand
gaacaagaggcccaagaaa

SEQ ID NO: 920539 - RNA, 19 nt, Homo sapiens
  misc_RNA (1)...(19): siRNA sense strand
agaaagagacuaagaagaa

SEQ ID NO: 920540 - RNA, 19 nt, Homo sapiens
  misc_RNA (1)...(19): siRNA sense strand
gaaagagacuaagaagaag

SEQ ID NO: 920541 - RNA, 19 nt, Homo sapiens
  misc_RNA (1)...(19): siRNA sense strand
gugcugaggugacgaggaa

SEQ ID NO: 920542 - RNA, 19 nt, Homo sapiens
  misc_RNA (1)...(19): siRNA sense strand
acaagaggcccaagaaaga

SEQ ID NO: 920543 - RNA, 19 nt, Homo sapiens
  misc_RNA (1)...(19): siRNA sense strand
ccaagaaagagacuaagaa

SEQ ID NO: 920544 - RNA, 19 nt, Homo sapiens
  misc_RNA (1)...(19): siRNA sense strand
caagaaagagacuaagaag

SEQ ID NO: 920545 - RNA, 19 nt, Homo sapiens
  misc_RNA (1)...(19): siRNA sense strand
ugaacaagaggcccaagaa

SEQ ID NO: 920546 - RNA, 19 nt, Homo sapiens
  misc_RNA (1)...(19): siRNA sense strand
gcccaaggcugcuguuccu

SEQ ID NO: 920547 - RNA, 19 nt, Homo sapiens
  misc_RNA (1)...(19): siRNA sense strand
ggcccaagaaagagacuaa

SEQ ID NO: 920548 - RNA, 19 nt, Homo sapiens
  misc_RNA (1)...(19): siRNA sense strand
ccacuuuccuggagaaccu

SEQ ID NO: 920549 - RNA, 19 nt, Homo sapiens
  misc_RNA (1)...(19): siRNA sense strand
ccucugaccuagacuucuc

SEQ ID NO: 920550 - RNA, 19 nt, Homo sapiens
  misc_RNA (1)...(19): siRNA sense strand
gccaucaucguacccauuc

SEQ ID NO: 920551 - RNA, 19 nt, Homo sapiens
  misc_RNA (1)...(19): siRNA sense strand
aagaaagagacuaagaaga

SEQ ID NO: 920552 - RNA, 19 nt, Homo sapiens
  misc_RNA (1)...(19): siRNA sense strand
aacaagaggcccaagaaag

SEQ ID NO: 920553 - RNA, 19 nt, Homo sapiens
  misc_RNA (1)...(19): siRNA sense strand
ucuuccagcucaucugugu

SEQ ID NO: 920554 - RNA, 19 nt, Homo sapiens
  misc_RNA (1)...(19): siRNA sense strand
gugaacaagaggcccaaga

SEQ ID NO: 920555 - RNA, 19 nt, Homo sapiens
  misc_RNA (1)...(19): siRNA sense strand
ggccaucaucguacccauu

SEQ ID NO: 920556 - RNA, 19 nt, Homo sapiens
  misc_RNA (1)...(19): siRNA sense strand
cauagacacugauuucauc

SEQ ID NO: 920557 - RNA, 19 nt, Homo sapiens
  misc_RNA (1)...(19): siRNA sense strand
ucaaggagcugcccgaacu

SEQ ID NO: 920558 - RNA, 19 nt, Homo sapiens
  misc_RNA (1)...(19): siRNA sense strand
aaccagcacuuccgagauu

SEQ ID NO: 920559 - RNA, 19 nt, Homo sapiens
  misc_RNA (1)...(19): siRNA sense strand
caaccaguauuucaaccau

SEQ ID NO: 920560 - RNA, 19 nt, Homo sapiens
  misc_RNA (1)...(19): siRNA sense strand
ugacggacuucgugugcaa

SEQ ID NO: 920561 - RNA, 19 nt, Homo sapiens
  misc_RNA (1)...(19): siRNA sense strand
gaagcucaacaaccaguau

SEQ ID NO: 920562 - RNA, 19 nt, Homo sapiens
  misc_RNA (1)...(19): siRNA sense strand
ccuaaugggcgagcacaua

SEQ ID NO: 920563 - RNA, 19 nt, Homo sapiens
  misc_RNA (1)...(19): siRNA sense strand
cagcagcccagcagaguga

SEQ ID NO: 920564 - RNA, 19 nt, Homo sapiens
  misc_RNA (1)...(19): siRNA sense strand
cgacgaggaaguucuuaug

SEQ ID NO: 920565 - RNA, 19 nt, Homo sapiens
  misc_RNA (1)...(19): siRNA sense strand
ugcagaagcucaacaacca

SEQ ID NO: 920566 - RNA, 19 nt, Homo sapiens
  misc_RNA (1)...(19): siRNA sense strand
ugauagaaauggguuugga

SEQ ID NO: 920567 - RNA, 19 nt, Homo sapiens
  misc_RNA (1)...(19): siRNA sense strand
ucaacaaccaguauuucaa

SEQ ID NO: 920568 - RNA, 19 nt, Homo sapiens
  misc_RNA (1)...(19): siRNA sense strand
caacaaccaguauuucaac

SEQ ID NO: 920569 - RNA, 19 nt, Homo sapiens
  misc_RNA (1)...(19): siRNA sense strand
gcucaacaaccaguauuuc

SEQ ID NO: 920570 - RNA, 19 nt, Homo sapiens
  misc_RNA (1)...(19): siRNA sense strand
gacgaggaaguucuuaugu

SEQ ID NO: 920571 - RNA, 19 nt, Homo sapiens
  misc_RNA (1)...(19): siRNA sense strand
accacuacaugccggauuu

SEQ ID NO: 920572 - RNA, 19 nt, Homo sapiens
  misc_RNA (1)...(19): siRNA sense strand
gcugcaggccaccagauga

SEQ ID NO: 920573 - RNA, 19 nt, Homo sapiens
  misc_RNA (1)...(19): siRNA sense strand
acgaggaaguucuuauguc

SEQ ID NO: 920574 - RNA, 19 nt, Homo sapiens
  misc_RNA (1)...(19): siRNA sense strand
ggacuucgugugcaaacag

SEQ ID NO: 920575 - RNA, 19 nt, Homo sapiens
  misc_RNA (1)...(19): siRNA sense strand
ggugauagaaauggguuug

SEQ ID NO: 920576 - RNA, 19 nt, Homo sapiens
  misc_RNA (1)...(19): siRNA sense strand
gcggccagguuuaacaacu

SEQ ID NO: 920577 - RNA, 19 nt, Homo sapiens
  misc_RNA (1)...(19): siRNA sense strand
ucuuauguccuuggugaua

SEQ ID NO: 920578 - RNA, 19 nt, Homo sapiens
  misc_RNA (1)...(19): siRNA sense strand
accaguauuucaaccauca

SEQ ID NO: 920579 - RNA, 19 nt, Homo sapiens
  misc_RNA (1)...(19): siRNA sense strand
ucauagacacugauuucau

SEQ ID NO: 920580 - RNA, 19 nt, Homo sapiens
  misc_RNA (1)...(19): siRNA sense strand
caucgacgaggaaguucuu

SEQ ID NO: 920581 - RNA, 19 nt, Homo sapiens
  misc_RNA (1)...(19): siRNA sense strand
uguccuuggugauagaaau

SEQ ID NO: 920582 - RNA, 19 nt, Homo sapiens
  misc_RNA (1)...(19): siRNA sense strand
caaaguagcuugugaaacu

SEQ ID NO: 920583 - RNA, 19 nt, Homo sapiens
  misc_RNA (1)...(19): siRNA sense strand
gagcaacagucaccagaua

SEQ ID NO: 920584 - RNA, 19 nt, Homo sapiens
  misc_RNA (1)...(19): siRNA sense strand
gaccagggcuuaauguuug

SEQ ID NO: 920585 - RNA, 19 nt, Homo sapiens
  misc_RNA (1)...(19): siRNA sense strand
ccaaguggcagauuuguua

SEQ ID NO: 920586 - RNA, 19 nt, Homo sapiens
  misc_RNA (1)...(19): siRNA sense strand
guucaggucucuuaugcua

SEQ ID NO: 920587 - RNA, 19 nt, Homo sapiens
  misc_RNA (1)...(19): siRNA sense strand
gaaauaccuugaugaggau

SEQ ID NO: 920588 - RNA, 19 nt, Homo sapiens
  misc_RNA (1)...(19): siRNA sense strand
gaagaagaauuucgaucuc

SEQ ID NO: 920589 - RNA, 19 nt, Homo sapiens
  misc_RNA (1)...(19): siRNA sense strand
ugaagaagccaauuuauca

SEQ ID NO: 920590 - RNA, 19 nt, Homo sapiens
  misc_RNA (1)...(19): siRNA sense strand
gaaagugguucgugaagcu

SEQ ID NO: 920591 - RNA, 19 nt, Homo sapiens
  misc_RNA (1)...(19): siRNA sense strand
agagagagcuauuagagau

SEQ ID NO: 920592 - RNA, 19 nt, Homo sapiens
  misc_RNA (1)...(19): siRNA sense strand
ccacacaauuguuauaucu

SEQ ID NO: 920593 - RNA, 19 nt, Homo sapiens
  misc_RNA (1)...(19): siRNA sense strand
gaucugaagaagccaauuu

SEQ ID NO: 920594 - RNA, 19 nt, Homo sapiens
  misc_RNA (1)...(19): siRNA sense strand
ucaggucucuuaugcuauu

SEQ ID NO: 920595 - RNA, 19 nt, Homo sapiens
  misc_RNA (1)...(19): siRNA sense strand
uaugguaccucucagaaga

SEQ ID NO: 920596 - RNA, 19 nt, Homo sapiens
  misc_RNA (1)...(19): siRNA sense strand
caucagaguccacacaauu

SEQ ID NO: 920597 - RNA, 19 nt, Homo sapiens
  misc_RNA (1)...(19): siRNA sense strand
ucagaggacugcagccuau

SEQ ID NO: 920598 - RNA, 19 nt, Homo sapiens
  misc_RNA (1)...(19): siRNA sense strand
gcaacagucaccagauauu

SEQ ID NO: 920599 - RNA, 19 nt, Homo sapiens
  misc_RNA (1)...(19): siRNA sense strand
gggaugcccuaaaggagaa

SEQ ID NO: 920600 - RNA, 19 nt, Homo sapiens
  misc_RNA (1)...(19): siRNA sense strand
gggaaggccacccagauaa

SEQ ID NO: 920601 - RNA, 19 nt, Homo sapiens
  misc_RNA (1)...(19): siRNA sense strand
caagcuaaaugccaaacug

SEQ ID NO: 920602 - RNA, 19 nt, Homo sapiens
  misc_RNA (1)...(19): siRNA sense strand
guguaugccuuuaaccauu

SEQ ID NO: 920603 - RNA, 19 nt, Homo sapiens
  misc_RNA (1)...(19): siRNA sense strand
ggaucgaggugcugugcuu

SEQ ID NO: 920604 - RNA, 19 nt, Homo sapiens
  misc_RNA (1)...(19): siRNA sense strand
gaaaggauuauaccaaggu

SEQ ID NO: 920605 - RNA, 19 nt, Homo sapiens
  misc_RNA (1)...(19): siRNA sense strand
ggauccugaugccaaagua

SEQ ID NO: 920606 - RNA, 19 nt, Homo sapiens
  misc_RNA (1)...(19): siRNA sense strand
gaaagucaucaaagcaguu

SEQ ID NO: 920607 - RNA, 19 nt, Homo sapiens
  misc_RNA (1)...(19): siRNA sense strand
ggagaaagucaucaaagca

SEQ ID NO: 920608 - RNA, 19 nt, Homo sapiens
  misc_RNA (1)...(19): siRNA sense strand
gauaugaugauucuuccaa

SEQ ID NO: 920609 - RNA, 19 nt, Homo sapiens
  misc_RNA (1)...(19): siRNA sense strand
gagagagagcuauuagaga

SEQ ID NO: 920610 - RNA, 19 nt, Homo sapiens
  misc_RNA (1)...(19): siRNA sense strand
guuacgcccugauucuaaa

SEQ ID NO: 920611 - RNA, 19 nt, Homo sapiens
  misc_RNA (1)...(19): siRNA sense strand
gaugauucuuccaaagguu

SEQ ID NO: 920612 - RNA, 19 nt, Homo sapiens
  misc_RNA (1)...(19): siRNA sense strand
uuauaucuguucagcauga

SEQ ID NO: 920613 - RNA, 19 nt, Homo sapiens
  misc_RNA (1)...(19): siRNA sense strand
aaaucauuguggacacuua

SEQ ID NO: 920614 - RNA, 19 nt, Homo sapiens
  misc_RNA (1)...(19): siRNA sense strand
gagcugcuguugacuacca

SEQ ID NO: 920615 - RNA, 19 nt, Homo sapiens
  misc_RNA (1)...(19): siRNA sense strand
uagagauugugaagaagaa

SEQ ID NO: 920616 - RNA, 19 nt, Homo sapiens
  misc_RNA (1)...(19): siRNA sense strand
gaagagugagagagagcua

SEQ ID NO: 920617 - RNA, 19 nt, Homo sapiens
  misc_RNA (1)...(19): siRNA sense strand
gaaggccacccagauaaga

SEQ ID NO: 920618 - RNA, 19 nt, Homo sapiens
  misc_RNA (1)...(19): siRNA sense strand
caacagucaccagauauug

SEQ ID NO: 920619 - RNA, 19 nt, Homo sapiens
  misc_RNA (1)...(19): siRNA sense strand
ggaggugccuuuucaggaa

SEQ ID NO: 920620 - RNA, 19 nt, Homo sapiens
  misc_RNA (1)...(19): siRNA sense strand
agagagcuauuagagauug

SEQ ID NO: 920621 - RNA, 19 nt, Homo sapiens
  misc_RNA (1)...(19): siRNA sense strand
ucucauccauuaucuaucu

SEQ ID NO: 920622 - RNA, 19 nt, Homo sapiens
  misc_RNA (1)...(19): siRNA sense strand
uccauuaucuaucuccauu

SEQ ID NO: 920623 - RNA, 19 nt, Homo sapiens
  misc_RNA (1)...(19): siRNA sense strand
agauauugcucaagguguu

SEQ ID NO: 920624 - RNA, 19 nt, Homo sapiens
  misc_RNA (1)...(19): siRNA sense strand
ggauacaaucuaccaccua

SEQ ID NO: 920625 - RNA, 19 nt, Homo sapiens
  misc_RNA (1)...(19): siRNA sense strand
caguugugccugcgaaaua

SEQ ID NO: 920626 - RNA, 19 nt, Homo sapiens
  misc_RNA (1)...(19): siRNA sense strand
uaaaggagaaagucaucaa

SEQ ID NO: 920627 - RNA, 19 nt, Homo sapiens
  misc_RNA (1)...(19): siRNA sense strand
agaccagggcuuaauguuu

SEQ ID NO: 920628 - RNA, 19 nt, Homo sapiens
  misc_RNA (1)...(19): siRNA sense strand
gguuacgcccugauucuaa

SEQ ID NO: 920629 - RNA, 19 nt, Homo sapiens
  misc_RNA (1)...(19): siRNA sense strand
aaacuggaaugauccuucu

SEQ ID NO: 920630 - RNA, 19 nt, Homo sapiens
  misc_RNA (1)...(19): siRNA sense strand
gagauugugaagaagaauu

SEQ ID NO: 920631 - RNA, 19 nt, Homo sapiens
  misc_RNA (1)...(19): siRNA sense strand
agaguccacacaauuguua

SEQ ID NO: 920632 - RNA, 19 nt, Homo sapiens
  misc_RNA (1)...(19): siRNA sense strand
ugaugaaacugaggagugu

SEQ ID NO: 920633 - RNA, 19 nt, Homo sapiens
  misc_RNA (1)...(19): siRNA sense strand
ccagagcugcuguugacua

SEQ ID NO: 920634 - RNA, 19 nt, Homo sapiens
  misc_RNA (1)...(19): siRNA sense strand
ugaggaguguaugccuuua

SEQ ID NO: 920635 - RNA, 19 nt, Homo sapiens
  misc_RNA (1)...(19): siRNA sense strand
ugaagaagaauuucgaucu

SEQ ID NO: 920636 - RNA, 19 nt, Homo sapiens
  misc_RNA (1)...(19): siRNA sense strand
caggaaaggauuauaccaa

SEQ ID NO: 920637 - RNA, 19 nt, Homo sapiens
  misc_RNA (1)...(19): siRNA sense strand
gaggaguguaugccuuuaa

SEQ ID NO: 920638 - RNA, 19 nt, Homo sapiens
  misc_RNA (1)...(19): siRNA sense strand
gcuguugacuaccagaaag

SEQ ID NO: 920639 - RNA, 19 nt, Homo sapiens
  misc_RNA (1)...(19): siRNA sense strand
gagagagcuauuagagauu

SEQ ID NO: 920640 - RNA, 19 nt, Homo sapiens
  misc_RNA (1)...(19): siRNA sense strand
cacauuggauaugaugauu

SEQ ID NO: 920641 - RNA, 19 nt, Homo sapiens
  misc_RNA (1)...(19): siRNA sense strand
uguaugccuuuaaccauug

SEQ ID NO: 920642 - RNA, 19 nt, Homo sapiens
  misc_RNA (1)...(19): siRNA sense strand
ggcaaaaucccuuguuaaa

SEQ ID NO: 920643 - RNA, 19 nt, Homo sapiens
  misc_RNA (1)...(19): siRNA sense strand
ucagggugaugcugguuug

SEQ ID NO: 920644 - RNA, 19 nt, Homo sapiens
  misc_RNA (1)...(19): siRNA sense strand
ggaaggccacccagauaag

SEQ ID NO: 920645 - RNA, 19 nt, Homo sapiens
  misc_RNA (1)...(19): siRNA sense strand
cauuggauaugaugauucu

SEQ ID NO: 920646 - RNA, 19 nt, Homo sapiens
  misc_RNA (1)...(19): siRNA sense strand
gaagaagccaauuuaucag

SEQ ID NO: 920647 - RNA, 19 nt, Homo sapiens
  misc_RNA (1)...(19): siRNA sense strand
ugagagagagcuauuagag

SEQ ID NO: 920648 - RNA, 19 nt, Homo sapiens
  misc_RNA (1)...(19): siRNA sense strand
gagugagagagagcuauua

SEQ ID NO: 920649 - RNA, 19 nt, Homo sapiens
  misc_RNA (1)...(19): siRNA sense strand
gccaaaguagcuugugaaa

SEQ ID NO: 920650 - RNA, 19 nt, Homo sapiens
  misc_RNA (1)...(19): siRNA sense strand
uguuauaucuguucagcau

SEQ ID NO: 920651 - RNA, 19 nt, Homo sapiens
  misc_RNA (1)...(19): siRNA sense strand
ggagaccagggcuuaaugu

SEQ ID NO: 920652 - RNA, 19 nt, Homo sapiens
  misc_RNA (1)...(19): siRNA sense strand
ccagaaagugguucgugaa

SEQ ID NO: 920653 - RNA, 19 nt, Homo sapiens
  misc_RNA (1)...(19): siRNA sense strand
ucagugaugcuguccuuga

SEQ ID NO: 920654 - RNA, 19 nt, Homo sapiens
  misc_RNA (1)...(19): siRNA sense strand
aaacacauuggauaugaug

SEQ ID NO: 920655 - RNA, 19 nt, Homo sapiens
  misc_RNA (1)...(19): siRNA sense strand
gccuauggccacuuuggua

SEQ ID NO: 920656 - RNA, 19 nt, Homo sapiens
  misc_RNA (1)...(19): siRNA sense strand
uugugaaacuguugcuaaa

SEQ ID NO: 920657 - RNA, 19 nt, Homo sapiens
  misc_RNA (1)...(19): siRNA sense strand
gagaccagggcuuaauguu

SEQ ID NO: 920658 - RNA, 19 nt, Homo sapiens
  misc_RNA (1)...(19): siRNA sense strand
cagagcugcuguugacuac

SEQ ID NO: 920659 - RNA, 19 nt, Homo sapiens
  misc_RNA (1)...(19): siRNA sense strand
gcuauuagagauugugaag

SEQ ID NO: 920660 - RNA, 19 nt, Homo sapiens
  misc_RNA (1)...(19): siRNA sense strand
gcuauuggaguuucucauc

SEQ ID NO: 920661 - RNA, 19 nt, Homo sapiens
  misc_RNA (1)...(19): siRNA sense strand
guggcaaaaucccuuguua

SEQ ID NO: 920662 - RNA, 19 nt, Homo sapiens
  misc_RNA (1)...(19): siRNA sense strand
aguggcagauuuguuauug

SEQ ID NO: 920663 - RNA, 19 nt, Homo sapiens
  misc_RNA (1)...(19): siRNA sense strand
aaaggagaaagucaucaaa

SEQ ID NO: 920664 - RNA, 19 nt, Homo sapiens
  misc_RNA (1)...(19): siRNA sense strand
ucagcaugaugaagagguu

SEQ ID NO: 920665 - RNA, 19 nt, Homo sapiens
  misc_RNA (1)...(19): siRNA sense strand
gcugguagccuuggagcaa

SEQ ID NO: 920666 - RNA, 19 nt, Homo sapiens
  misc_RNA (1)...(19): siRNA sense strand
gccggaggguucuuguuca

SEQ ID NO: 920667 - RNA, 19 nt, Homo sapiens
  misc_RNA (1)...(19): siRNA sense strand
ccacccagauaagauuugu

SEQ ID NO: 920668 - RNA, 19 nt, Homo sapiens
  misc_RNA (1)...(19): siRNA sense strand
uaugaugauucuuccaaag

SEQ ID NO: 920669 - RNA, 19 nt, Homo sapiens
  misc_RNA (1)...(19): siRNA sense strand
uggcagauuuguuauuggu

SEQ ID NO: 920670 - RNA, 19 nt, Homo sapiens
  misc_RNA (1)...(19): siRNA sense strand
agagguuugucuugaugaa

SEQ ID NO: 920671 - RNA, 19 nt, Homo sapiens
  misc_RNA (1)...(19): siRNA sense strand
ggucucuuaugcuauugga

SEQ ID NO: 920672 - RNA, 19 nt, Homo sapiens
  misc_RNA (1)...(19): siRNA sense strand
guuaaacacauuggauaug

SEQ ID NO: 920673 - RNA, 19 nt, Homo sapiens
  misc_RNA (1)...(19): siRNA sense strand
gccuuuaaccauugucuug

SEQ ID NO: 920674 - RNA, 19 nt, Homo sapiens
  misc_RNA (1)...(19): siRNA sense strand
gggcuuaauguuuggcuau

SEQ ID NO: 920675 - RNA, 19 nt, Homo sapiens
  misc_RNA (1)...(19): siRNA sense strand
agauaagauuugugaccaa

SEQ ID NO: 920676 - RNA, 19 nt, Homo sapiens
  misc_RNA (1)...(19): siRNA sense strand
ugaugauucuuccaaaggu

SEQ ID NO: 920677 - RNA, 19 nt, Homo sapiens
  misc_RNA (1)...(19): siRNA sense strand
gagcuauuagagauuguga

SEQ ID NO: 920678 - RNA, 19 nt, Homo sapiens
  misc_RNA (1)...(19): siRNA sense strand
ucauggaggaggugccuuu

SEQ ID NO: 920679 - RNA, 19 nt, Homo sapiens
  misc_RNA (1)...(19): siRNA sense strand
ugaugaggauacaaucuac

SEQ ID NO: 920680 - RNA, 19 nt, Homo sapiens
  misc_RNA (1)...(19): siRNA sense strand
gguuugucuugaugaaaug

SEQ ID NO: 920681 - RNA, 19 nt, Homo sapiens
  misc_RNA (1)...(19): siRNA sense strand
cagugaugcuguccuugau

SEQ ID NO: 920682 - RNA, 19 nt, Homo sapiens
  misc_RNA (1)...(19): siRNA sense strand
ggaaauacagugcaauaua

SEQ ID NO: 920683 - RNA, 19 nt, Homo sapiens
  misc_RNA (1)...(19): siRNA sense strand
gcagcuguauagaauauua

SEQ ID NO: 920684 - RNA, 19 nt, Homo sapiens
  misc_RNA (1)...(19): siRNA sense strand
ggaauauccugcaguaguu

SEQ ID NO: 920685 - RNA, 19 nt, Homo sapiens
  misc_RNA (1)...(19): siRNA sense strand
gaggauggguuuccagauu

SEQ ID NO: 920686 - RNA, 19 nt, Homo sapiens
  misc_RNA (1)...(19): siRNA sense strand
aaacagagccugaagauuc

SEQ ID NO: 920687 - RNA, 19 nt, Homo sapiens
  misc_RNA (1)...(19): siRNA sense strand
gcauacccaucuauaaauu

SEQ ID NO: 920688 - RNA, 19 nt, Homo sapiens
  misc_RNA (1)...(19): siRNA sense strand
caacauggcugggaauauc

SEQ ID NO: 920689 - RNA, 19 nt, Homo sapiens
  misc_RNA (1)...(19): siRNA sense strand
uaacucagauggacaagga

SEQ ID NO: 920690 - RNA, 19 nt, Homo sapiens
  misc_RNA (1)...(19): siRNA sense strand
gagaagucaccuauaaaua

SEQ ID NO: 920691 - RNA, 19 nt, Homo sapiens
  misc_RNA (1)...(19): siRNA sense strand
aagccaaucuacuuucuua

SEQ ID NO: 920692 - RNA, 19 nt, Homo sapiens
  misc_RNA (1)...(19): siRNA sense strand
caaccaagcuggcuaugag

SEQ ID NO: 920693 - RNA, 19 nt, Homo sapiens
  misc_RNA (1)...(19): siRNA sense strand
ugcaauauauggcagauuu

SEQ ID NO: 920694 - RNA, 19 nt, Homo sapiens
  misc_RNA (1)...(19): siRNA sense strand
agaaagagaugaauuaucc

SEQ ID NO: 920695 - RNA, 19 nt, Homo sapiens
  misc_RNA (1)...(19): siRNA sense strand
ucagagagccuugggauuu

SEQ ID NO: 920696 - RNA, 19 nt, Homo sapiens
  misc_RNA (1)...(19): siRNA sense strand
gaagugaaagagcugcuaa

SEQ ID NO: 920697 - RNA, 19 nt, Homo sapiens
  misc_RNA (1)...(19): siRNA sense strand
gauaaugcccugcugacaa

SEQ ID NO: 920698 - RNA, 19 nt, Homo sapiens
  misc_RNA (1)...(19): siRNA sense strand
ccaacaagguggugaugau

SEQ ID NO: 920699 - RNA, 19 nt, Homo sapiens
  misc_RNA (1)...(19): siRNA sense strand
uagcauacccaucuauaaa

SEQ ID NO: 920700 - RNA, 19 nt, Homo sapiens
  misc_RNA (1)...(19): siRNA sense strand
uucaugagcucacuguuaa

SEQ ID NO: 920701 - RNA, 19 nt, Homo sapiens
  misc_RNA (1)...(19): siRNA sense strand
aaugauuggucacaucuuu

SEQ ID NO: 920702 - RNA, 19 nt, Homo sapiens
  misc_RNA (1)...(19): siRNA sense strand
uggagaaagagaugaauua

SEQ ID NO: 920703 - RNA, 19 nt, Homo sapiens
  misc_RNA (1)...(19): siRNA sense strand
ccagagggaucaccaacau

SEQ ID NO: 920704 - RNA, 19 nt, Homo sapiens
  misc_RNA (1)...(19): siRNA sense strand
cucgagaagucaccuauaa

SEQ ID NO: 920705 - RNA, 19 nt, Homo sapiens
  misc_RNA (1)...(19): siRNA sense strand
cagaagagcacaguccuaa

SEQ ID NO: 920706 - RNA, 19 nt, Homo sapiens
  misc_RNA (1)...(19): siRNA sense strand
ggagaaagagaugaauuau

SEQ ID NO: 920707 - RNA, 19 nt, Homo sapiens
  misc_RNA (1)...(19): siRNA sense strand
gaauauccugcaguaguua

SEQ ID NO: 920708 - RNA, 19 nt, Homo sapiens
  misc_RNA (1)...(19): siRNA sense strand
uaaaguggaggauggguuu

SEQ ID NO: 920709 - RNA, 19 nt, Homo sapiens
  misc_RNA (1)...(19): siRNA sense strand
guagcauacccaucuauaa

SEQ ID NO: 920710 - RNA, 19 nt, Homo sapiens
  misc_RNA (1)...(19): siRNA sense strand
ucauucagcuuuuaccuua

SEQ ID NO: 920711 - RNA, 19 nt, Homo sapiens
  misc_RNA (1)...(19): siRNA sense strand
caaagucccacucaucaga

SEQ ID NO: 920712 - RNA, 19 nt, Homo sapiens
  misc_RNA (1)...(19): siRNA sense strand
ggaguuccuuugcaaccaa

SEQ ID NO: 920713 - RNA, 19 nt, Homo sapiens
  misc_RNA (1)...(19): siRNA sense strand
ugagcucacuguuaaugaa

SEQ ID NO: 920714 - RNA, 19 nt, Homo sapiens
  misc_RNA (1)...(19): siRNA sense strand
cgagaagucaccuauaaau

SEQ ID NO: 920715 - RNA, 19 nt, Homo sapiens
  misc_RNA (1)...(19): siRNA sense strand
gggaauauccugcaguagu

SEQ ID NO: 920716 - RNA, 19 nt, Homo sapiens
  misc_RNA (1)...(19): siRNA sense strand
gccaaucuacuuucuuauu

SEQ ID NO: 920717 - RNA, 19 nt, Homo sapiens
  misc_RNA (1)...(19): siRNA sense strand
gaaggcugcagaaggcuuu

SEQ ID NO: 920718 - RNA, 19 nt, Homo sapiens
  misc_RNA (1)...(19): siRNA sense strand
gaaguuggccaaaaugauu

SEQ ID NO: 920719 - RNA, 19 nt, Homo sapiens
  misc_RNA (1)...(19): siRNA sense strand
ugccuuggcucgacagauu

SEQ ID NO: 920720 - RNA, 19 nt, Homo sapiens
  misc_RNA (1)...(19): siRNA sense strand
cuucaugagcucacuguua

SEQ ID NO: 920721 - RNA, 19 nt, Homo sapiens
  misc_RNA (1)...(19): siRNA sense strand
ggauggguuuccagauuuc

SEQ ID NO: 920722 - RNA, 19 nt, Homo sapiens
  misc_RNA (1)...(19): siRNA sense strand
gagaaagagaugaauuauc

SEQ ID NO: 920723 - RNA, 19 nt, Homo sapiens
  misc_RNA (1)...(19): siRNA sense strand
uaaauuaccagagggauca

SEQ ID NO: 920724 - RNA, 19 nt, Homo sapiens
  misc_RNA (1)...(19): siRNA sense strand
uggcaaagcagauggaguu

SEQ ID NO: 920725 - RNA, 19 nt, Homo sapiens
  misc_RNA (1)...(19): siRNA sense strand
aggauggguuuccagauuu

SEQ ID NO: 920726 - RNA, 19 nt, Homo sapiens
  misc_RNA (1)...(19): siRNA sense strand
cugggaauauccugcagua

SEQ ID NO: 920727 - RNA, 19 nt, Homo sapiens
  misc_RNA (1)...(19): siRNA sense strand
gaagagcacaguccuaacg

SEQ ID NO: 920728 - RNA, 19 nt, Homo sapiens
  misc_RNA (1)...(19): siRNA sense strand
caaagcagauggaguuccu

SEQ ID NO: 920729 - RNA, 19 nt, Homo sapiens
  misc_RNA (1)...(19): siRNA sense strand
uuacagaaccaccaaguca

SEQ ID NO: 920730 - RNA, 19 nt, Homo sapiens
  misc_RNA (1)...(19): siRNA sense strand
caauauauggcagauuuga

SEQ ID NO: 920731 - RNA, 19 nt, Homo sapiens
  misc_RNA (1)...(19): siRNA sense strand
ggcaaagucccacucauca

SEQ ID NO: 920732 - RNA, 19 nt, Homo sapiens
  misc_RNA (1)...(19): siRNA sense strand
gcaaccaagcuggcuauga

SEQ ID NO: 920733 - RNA, 19 nt, Homo sapiens
  misc_RNA (1)...(19): siRNA sense strand
ugaagcggcugcucaacuc

SEQ ID NO: 920734 - RNA, 19 nt, Homo sapiens
  misc_RNA (1)...(19): siRNA sense strand
ucaguagcauacccaucua

SEQ ID NO: 920735 - RNA, 19 nt, Homo sapiens
  misc_RNA (1)...(19): siRNA sense strand
gagcuaagagugaagaacu

SEQ ID NO: 920736 - RNA, 19 nt, Homo sapiens
  misc_RNA (1)...(19): siRNA sense strand
gacaagaagagaugagcuu

SEQ ID NO: 920737 - RNA, 19 nt, Homo sapiens
  misc_RNA (1)...(19): siRNA sense strand
ccgggaaccucauuuaaaa

SEQ ID NO: 920738 - RNA, 19 nt, Homo sapiens
  misc_RNA (1)...(19): siRNA sense strand
uaugaaaggaguagcaaug

SEQ ID NO: 920739 - RNA, 19 nt, Homo sapiens
  misc_RNA (1)...(19): siRNA sense strand
uugcagcuguauagaauau

SEQ ID NO: 920740 - RNA, 19 nt, Homo sapiens
  misc_RNA (1)...(19): siRNA sense strand
gcaauauauggcagauuug

SEQ ID NO: 920741 - RNA, 19 nt, Homo sapiens
  misc_RNA (1)...(19): siRNA sense strand
acagaaccaccaagucaaa

SEQ ID NO: 920742 - RNA, 19 nt, Homo sapiens
  misc_RNA (1)...(19): siRNA sense strand
gaguugcagcuguauagaa

SEQ ID NO: 920743 - RNA, 19 nt, Homo sapiens
  misc_RNA (1)...(19): siRNA sense strand
gggaguugcagcuguauag

SEQ ID NO: 920744 - RNA, 19 nt, Homo sapiens
  misc_RNA (1)...(19): siRNA sense strand
gugaugauguccagcaacu

SEQ ID NO: 920745 - RNA, 19 nt, Homo sapiens
  misc_RNA (1)...(19): siRNA sense strand
gaaugccuaauuuacagaa

SEQ ID NO: 920746 - RNA, 19 nt, Homo sapiens
  misc_RNA (1)...(19): siRNA sense strand
ccgaaugccuaauuuacag

SEQ ID NO: 920747 - RNA, 19 nt, Homo sapiens
  misc_RNA (1)...(19): siRNA sense strand
gcagauggaguuccuuugc

SEQ ID NO: 920748 - RNA, 19 nt, Homo sapiens
  misc_RNA (1)...(19): siRNA sense strand
ggcuagagcuaagagugaa

SEQ ID NO: 920749 - RNA, 19 nt, Homo sapiens
  misc_RNA (1)...(19): siRNA sense strand
gucaaaauguggagaaaga

SEQ ID NO: 920750 - RNA, 19 nt, Homo sapiens
  misc_RNA (1)...(19): siRNA sense strand
auaaugcccugcugacaag

SEQ ID NO: 920751 - RNA, 19 nt, Homo sapiens
  misc_RNA (1)...(19): siRNA sense strand
ccaccugugugcagagcuu

SEQ ID NO: 920752 - RNA, 19 nt, Homo sapiens
  misc_RNA (1)...(19): siRNA sense strand
caaaaugauuggucacauc

SEQ ID NO: 920753 - RNA, 19 nt, Homo sapiens
  misc_RNA (1)...(19): siRNA sense strand
uuaaaagacuacccucauu

SEQ ID NO: 920754 - RNA, 19 nt, Homo sapiens
  misc_RNA (1)...(19): siRNA sense strand
agauggaguuccuuugcaa

SEQ ID NO: 920755 - RNA, 19 nt, Homo sapiens
  misc_RNA (1)...(19): siRNA sense strand
gaugaauuauccccaaaga

SEQ ID NO: 920756 - RNA, 19 nt, Homo sapiens
  misc_RNA (1)...(19): siRNA sense strand
acaagaaguuggccaaaau

SEQ ID NO: 920757 - RNA, 19 nt, Homo sapiens
  misc_RNA (1)...(19): siRNA sense strand
gaugauguccagcaacucu

SEQ ID NO: 920758 - RNA, 19 nt, Homo sapiens
  misc_RNA (1)...(19): siRNA sense strand
cagauggaguuccuuugca

SEQ ID NO: 920759 - RNA, 19 nt, Homo sapiens
  misc_RNA (1)...(19): siRNA sense strand
ccaggauucugugcaaaca

SEQ ID NO: 920760 - RNA, 19 nt, Homo sapiens
  misc_RNA (1)...(19): siRNA sense strand
caacaagguggugaugaug

SEQ ID NO: 920761 - RNA, 19 nt, Homo sapiens
  misc_RNA (1)...(19): siRNA sense strand
gcuaagagugaagaacuug

SEQ ID NO: 920762 - RNA, 19 nt, Homo sapiens
  misc_RNA (1)...(19): siRNA sense strand
ugagagacugggucacaaa

SEQ ID NO: 920763 - RNA, 19 nt, Homo sapiens
  misc_RNA (1)...(19): siRNA sense strand
uaaugaagcggcugcucaa

SEQ ID NO: 920764 - RNA, 19 nt, Homo sapiens
  misc_RNA (1)...(19): siRNA sense strand
aguugcagcuguauagaau

SEQ ID NO: 920765 - RNA, 19 nt, Homo sapiens
  misc_RNA (1)...(19): siRNA sense strand
gcaagccccuucauguuag

SEQ ID NO: 920766 - RNA, 19 nt, Homo sapiens
  misc_RNA (1)...(19): siRNA sense strand
gagaugaauuauccccaaa

SEQ ID NO: 920767 - RNA, 19 nt, Homo sapiens
  misc_RNA (1)...(19): siRNA sense strand
caacucugugugaaggaua

SEQ ID NO: 920768 - RNA, 19 nt, Homo sapiens
  misc_RNA (1)...(19): siRNA sense strand
cccgggaaccucauuuaaa

SEQ ID NO: 920769 - RNA, 19 nt, Homo sapiens
  misc_RNA (1)...(19): siRNA sense strand
cggcuugacuuccgauaac

SEQ ID NO: 920770 - RNA, 19 nt, Homo sapiens
  misc_RNA (1)...(19): siRNA sense strand
cugaaaaggugauggcaaa

SEQ ID NO: 920771 - RNA, 19 nt, Homo sapiens
  misc_RNA (1)...(19): siRNA sense strand
ugaauuauccccaaagaga

SEQ ID NO: 920772 - RNA, 19 nt, Homo sapiens
  misc_RNA (1)...(19): siRNA sense strand
ugauuggucacaucuuuga

SEQ ID NO: 920773 - RNA, 19 nt, Homo sapiens
  misc_RNA (1)...(19): siRNA sense strand
gagcugagcagacuuuacc

SEQ ID NO: 920774 - RNA, 19 nt, Homo sapiens
  misc_RNA (1)...(19): siRNA sense strand
guggagaaagagaugaauu

SEQ ID NO: 920775 - RNA, 19 nt, Homo sapiens
  misc_RNA (1)...(19): siRNA sense strand
acaagguggugaugauguc

SEQ ID NO: 920776 - RNA, 19 nt, Homo sapiens
  misc_RNA (1)...(19): siRNA sense strand
gaggcaaagucccacucau

SEQ ID NO: 920777 - RNA, 19 nt, Homo sapiens
  misc_RNA (1)...(19): siRNA sense strand
cgauaacucagauggacaa

SEQ ID NO: 920778 - RNA, 19 nt, Homo sapiens
  misc_RNA (1)...(19): siRNA sense strand
cagaaggcuuugagagacu

SEQ ID NO: 920779 - RNA, 19 nt, Homo sapiens
  misc_RNA (1)...(19): siRNA sense strand
ugacuuccgauaacucaga

SEQ ID NO: 920780 - RNA, 19 nt, Homo sapiens
  misc_RNA (1)...(19): siRNA sense strand
cagagagccuugggauuuu

SEQ ID NO: 920781 - RNA, 19 nt, Homo sapiens
  misc_RNA (1)...(19): siRNA sense strand
ucagauggacaaggagaaa

SEQ ID NO: 920782 - RNA, 19 nt, Homo sapiens
  misc_RNA (1)...(19): siRNA sense strand
gaagauagcucucaagaac

SEQ ID NO: 920783 - RNA, 19 nt, Homo sapiens
  misc_RNA (1)...(19): siRNA sense strand
gaacagcucuuauuucucu

SEQ ID NO: 920784 - RNA, 19 nt, Homo sapiens
  misc_RNA (1)...(19): siRNA sense strand
gcacugagcuugccuacug

SEQ ID NO: 920785 - RNA, 19 nt, Homo sapiens
  misc_RNA (1)...(19): siRNA sense strand
ccaguuaucuccacaugua

SEQ ID NO: 920786 - RNA, 19 nt, Homo sapiens
  misc_RNA (1)...(19): siRNA sense strand
gaaagaggcuuccugugau

SEQ ID NO: 920787 - RNA, 19 nt, Homo sapiens
  misc_RNA (1)...(19): siRNA sense strand
ccacauagcaggcgauuug

SEQ ID NO: 920788 - RNA, 19 nt, Homo sapiens
  misc_RNA (1)...(19): siRNA sense strand
ggacaaagccagugaugau

SEQ ID NO: 920789 - RNA, 19 nt, Homo sapiens
  misc_RNA (1)...(19): siRNA sense strand
gaacauagcacugugaaag

SEQ ID NO: 920790 - RNA, 19 nt, Homo sapiens
  misc_RNA (1)...(19): siRNA sense strand
gcuagcagcugccaguuau

SEQ ID NO: 920791 - RNA, 19 nt, Homo sapiens
  misc_RNA (1)...(19): siRNA sense strand
cucaagaacuuuggaaaua

SEQ ID NO: 920792 - RNA, 19 nt, Homo sapiens
  misc_RNA (1)...(19): siRNA sense strand
aaaagaagcugaaagagaa

SEQ ID NO: 920793 - RNA, 19 nt, Homo sapiens
  misc_RNA (1)...(19): siRNA sense strand
gagcuugccuacugucaga

SEQ ID NO: 920794 - RNA, 19 nt, Homo sapiens
  misc_RNA (1)...(19): siRNA sense strand
gacuggaccuuagaagaua

SEQ ID NO: 920795 - RNA, 19 nt, Homo sapiens
  misc_RNA (1)...(19): siRNA sense strand
agaaagaggcuuccuguga

SEQ ID NO: 920796 - RNA, 19 nt, Homo sapiens
  misc_RNA (1)...(19): siRNA sense strand
aaagagacauuguucaucu

SEQ ID NO: 920797 - RNA, 19 nt, Homo sapiens
  misc_RNA (1)...(19): siRNA sense strand
gggagaagcccuacacaug

SEQ ID NO: 920798 - RNA, 19 nt, Homo sapiens
  misc_RNA (1)...(19): siRNA sense strand
gagcuguacuggcuucaug

SEQ ID NO: 920799 - RNA, 19 nt, Homo sapiens
  misc_RNA (1)...(19): siRNA sense strand
ugaugaagaugaaggagaa

SEQ ID NO: 920800 - RNA, 19 nt, Homo sapiens
  misc_RNA (1)...(19): siRNA sense strand
gcucuuauuucucuucaca

SEQ ID NO: 920801 - RNA, 19 nt, Homo sapiens
  misc_RNA (1)...(19): siRNA sense strand
ggcaagagcuuccaguacu

SEQ ID NO: 920802 - RNA, 19 nt, Homo sapiens
  misc_RNA (1)...(19): siRNA sense strand
gagaagcccuacacaugca

SEQ ID NO: 920803 - RNA, 19 nt, Homo sapiens
  misc_RNA (1)...(19): siRNA sense strand
cggcagauguugacugugu

SEQ ID NO: 920804 - RNA, 19 nt, Homo sapiens
  misc_RNA (1)...(19): siRNA sense strand
gaacauccugcccagcaaa

SEQ ID NO: 920805 - RNA, 19 nt, Homo sapiens
  misc_RNA (1)...(19): siRNA sense strand
agauagcucucaagaacuu

SEQ ID NO: 920806 - RNA, 19 nt, Homo sapiens
  misc_RNA (1)...(19): siRNA sense strand
uaaugacuaugacauggaa

SEQ ID NO: 920807 - RNA, 19 nt, Homo sapiens
  misc_RNA (1)...(19): siRNA sense strand
gcccagugaugaagaugaa

SEQ ID NO: 920808 - RNA, 19 nt, Homo sapiens
  misc_RNA (1)...(19): siRNA sense strand
cugaacagcucuuauuucu

SEQ ID NO: 920809 - RNA, 19 nt, Homo sapiens
  misc_RNA (1)...(19): siRNA sense strand
cuaauaacaggguacagua

SEQ ID NO: 920810 - RNA, 19 nt, Homo sapiens
  misc_RNA (1)...(19): siRNA sense strand
gcaagagcuuccaguacuc

SEQ ID NO: 920811 - RNA, 19 nt, Homo sapiens
  misc_RNA (1)...(19): siRNA sense strand
caaguuccacugugaguug

SEQ ID NO: 920812 - RNA, 19 nt, Homo sapiens
  misc_RNA (1)...(19): siRNA sense strand
gcauguauuuccaccucuu

SEQ ID NO: 920813 - RNA, 19 nt, Homo sapiens
  misc_RNA (1)...(19): siRNA sense strand
ugucagagacuggaccuua

SEQ ID NO: 920814 - RNA, 19 nt, Homo sapiens
  misc_RNA (1)...(19): siRNA sense strand
acauagcacugugaaagaa

SEQ ID NO: 920815 - RNA, 19 nt, Homo sapiens
  misc_RNA (1)...(19): siRNA sense strand
gaacauguggaugcgauug

SEQ ID NO: 920816 - RNA, 19 nt, Homo sapiens
  misc_RNA (1)...(19): siRNA sense strand
aaagaggcuuccugugaug

SEQ ID NO: 920817 - RNA, 19 nt, Homo sapiens
  misc_RNA (1)...(19): siRNA sense strand
gagacuggaccuuagaaga

SEQ ID NO: 920818 - RNA, 19 nt, Homo sapiens
  misc_RNA (1)...(19): siRNA sense strand
gcacuaaugacuaugacau

SEQ ID NO: 920819 - RNA, 19 nt, Homo sapiens
  misc_RNA (1)...(19): siRNA sense strand
gaagaugaaggagaagaug

SEQ ID NO: 920820 - RNA, 19 nt, Homo sapiens
  misc_RNA (1)...(19): siRNA sense strand
auaacaggguacaguauga

SEQ ID NO: 920821 - RNA, 19 nt, Homo sapiens
  misc_RNA (1)...(19): siRNA sense strand
aaucugaacagcucuuauu

SEQ ID NO: 920822 - RNA, 19 nt, Homo sapiens
  misc_RNA (1)...(19): siRNA sense strand
guucaaagacuugcccauu

SEQ ID NO: 920823 - RNA, 19 nt, Homo sapiens
  misc_RNA (1)...(19): siRNA sense strand
ucacaggacgugcugagaa

SEQ ID NO: 920824 - RNA, 19 nt, Homo sapiens
  misc_RNA (1)...(19): siRNA sense strand
uucaaagacuugcccauug

SEQ ID NO: 920825 - RNA, 19 nt, Homo sapiens
  misc_RNA (1)...(19): siRNA sense strand
ggaggcagacagcaccaaa

SEQ ID NO: 920826 - RNA, 19 nt, Homo sapiens
  misc_RNA (1)...(19): siRNA sense strand
acagacacauucgcaaguu

SEQ ID NO: 920827 - RNA, 19 nt, Homo sapiens
  misc_RNA (1)...(19): siRNA sense strand
ggaccuguacagacacauu

SEQ ID NO: 920828 - RNA, 19 nt, Homo sapiens
  misc_RNA (1)...(19): siRNA sense strand
gcgauugcccucagacuca

SEQ ID NO: 920829 - RNA, 19 nt, Homo sapiens
  misc_RNA (1)...(19): siRNA sense strand
gcagcucaacagagucuuu

SEQ ID NO: 920830 - RNA, 19 nt, Homo sapiens
  misc_RNA (1)...(19): siRNA sense strand
uagaagauagcucucaaga

SEQ ID NO: 920831 - RNA, 19 nt, Homo sapiens
  misc_RNA (1)...(19): siRNA sense strand
gacuuucucuugcauguac

SEQ ID NO: 920832 - RNA, 19 nt, Homo sapiens
  misc_RNA (1)...(19): siRNA sense strand
caaagccagugaugaugag

SEQ ID NO: 920833 - RNA, 19 nt, Homo sapiens
  misc_RNA (1)...(19): siRNA sense strand
acaaagccagugaugauga

SEQ ID NO: 920834 - RNA, 19 nt, Homo sapiens
  misc_RNA (1)...(19): siRNA sense strand
agacuggaccuuagaagau

SEQ ID NO: 920835 - RNA, 19 nt, Homo sapiens
  misc_RNA (1)...(19): siRNA sense strand
gcgauuugcccagugauga

SEQ ID NO: 920836 - RNA, 19 nt, Homo sapiens
  misc_RNA (1)...(19): siRNA sense strand
aggugaagguggagaaaga

SEQ ID NO: 920837 - RNA, 19 nt, Homo sapiens
  misc_RNA (1)...(19): siRNA sense strand
caucugaacagcgacauug

SEQ ID NO: 920838 - RNA, 19 nt, Homo sapiens
  misc_RNA (1)...(19): siRNA sense strand
gcggcaagagcuuccagua

SEQ ID NO: 920839 - RNA, 19 nt, Homo sapiens
  misc_RNA (1)...(19): siRNA sense strand
uaauaacaggguacaguau

SEQ ID NO: 920840 - RNA, 19 nt, Homo sapiens
  misc_RNA (1)...(19): siRNA sense strand
gaugaaggagaagaugaaa

SEQ ID NO: 920841 - RNA, 19 nt, Homo sapiens
  misc_RNA (1)...(19): siRNA sense strand
caaagacuugcccauugaa

SEQ ID NO: 920842 - RNA, 19 nt, Homo sapiens
  misc_RNA (1)...(19): siRNA sense strand
gaggacaaagccagugaug

SEQ ID NO: 920843 - RNA, 19 nt, Homo sapiens
  misc_RNA (1)...(19): siRNA sense strand
gggauucggcagauguuga

SEQ ID NO: 920844 - RNA, 19 nt, Homo sapiens
  misc_RNA (1)...(19): siRNA sense strand
caggcgauuugcccaguga

SEQ ID NO: 920845 - RNA, 19 nt, Homo sapiens
  misc_RNA (1)...(19): siRNA sense strand
ucugucaaguccagccuuu

SEQ ID NO: 920846 - RNA, 19 nt, Homo sapiens
  misc_RNA (1)...(19): siRNA sense strand
gucagagacuggaccuuag

SEQ ID NO: 920847 - RNA, 19 nt, Homo sapiens
  misc_RNA (1)...(19): siRNA sense strand
ggaacauagcacugugaaa

SEQ ID NO: 920848 - RNA, 19 nt, Homo sapiens
  misc_RNA (1)...(19): siRNA sense strand
cacaggacgugcugagaag

SEQ ID NO: 920849 - RNA, 19 nt, Homo sapiens
  misc_RNA (1)...(19): siRNA sense strand
ugaacauccugcccagcaa

SEQ ID NO: 920850 - RNA, 19 nt, Homo sapiens
  misc_RNA (1)...(19): siRNA sense strand
cuuagaagauagcucucaa

SEQ ID NO: 920851 - RNA, 19 nt, Homo sapiens
  misc_RNA (1)...(19): siRNA sense strand
gauguuggcacuaaugacu

SEQ ID NO: 920852 - RNA, 19 nt, Homo sapiens
  misc_RNA (1)...(19): siRNA sense strand
ggaugcgauugcccucaga

SEQ ID NO: 920853 - RNA, 19 nt, Homo sapiens
  misc_RNA (1)...(19): siRNA sense strand
guccagccuuucaggaguu

SEQ ID NO: 920854 - RNA, 19 nt, Homo sapiens
  misc_RNA (1)...(19): siRNA sense strand
gcaaguuccacugugaguu

SEQ ID NO: 920855 - RNA, 19 nt, Homo sapiens
  misc_RNA (1)...(19): siRNA sense strand
gacaaagccagugaugaug

SEQ ID NO: 920856 - RNA, 19 nt, Homo sapiens
  misc_RNA (1)...(19): siRNA sense strand
gaccauaguagacauuugc

SEQ ID NO: 920857 - RNA, 19 nt, Homo sapiens
  misc_RNA (1)...(19): siRNA sense strand
cagacacauucgcaaguuc

SEQ ID NO: 920858 - RNA, 19 nt, Homo sapiens
  misc_RNA (1)...(19): siRNA sense strand
acaaggaccagcuggacaa

SEQ ID NO: 920859 - RNA, 19 nt, Homo sapiens
  misc_RNA (1)...(19): siRNA sense strand
gggaggacaaagccaguga

SEQ ID NO: 920860 - RNA, 19 nt, Homo sapiens
  misc_RNA (1)...(19): siRNA sense strand
gagggaggacucggucuug

SEQ ID NO: 920861 - RNA, 19 nt, Homo sapiens
  misc_RNA (1)...(19): siRNA sense strand
gcacuaauaacaggguaca

SEQ ID NO: 920862 - RNA, 19 nt, Homo sapiens
  misc_RNA (1)...(19): siRNA sense strand
gugcuggaccugucuguca

SEQ ID NO: 920863 - RNA, 19 nt, Homo sapiens
  misc_RNA (1)...(19): siRNA sense strand
cugcuugaauucauguaug

SEQ ID NO: 920864 - RNA, 19 nt, Homo sapiens
  misc_RNA (1)...(19): siRNA sense strand
gaacuccuugucggucaaa

SEQ ID NO: 920865 - RNA, 19 nt, Homo sapiens
  misc_RNA (1)...(19): siRNA sense strand
ucgcucuccugcuugaauu

SEQ ID NO: 920866 - RNA, 19 nt, Homo sapiens
  misc_RNA (1)...(19): siRNA sense strand
gaggcuuccugugaugaga

SEQ ID NO: 920867 - RNA, 19 nt, Homo sapiens
  misc_RNA (1)...(19): siRNA sense strand
gcaggugaagguggagaaa

SEQ ID NO: 920868 - RNA, 19 nt, Homo sapiens
  misc_RNA (1)...(19): siRNA sense strand
gaguuuccagaccauagua

SEQ ID NO: 920869 - RNA, 19 nt, Homo sapiens
  misc_RNA (1)...(19): siRNA sense strand
agaagauagcucucaagaa

SEQ ID NO: 920870 - RNA, 19 nt, Homo sapiens
  misc_RNA (1)...(19): siRNA sense strand
ucucaagaacuuuggaaau

SEQ ID NO: 920871 - RNA, 19 nt, Homo sapiens
  misc_RNA (1)...(19): siRNA sense strand
guuaucuccacauguauga

SEQ ID NO: 920872 - RNA, 19 nt, Homo sapiens
  misc_RNA (1)...(19): siRNA sense strand
agaccauaguagacauuug

SEQ ID NO: 920873 - RNA, 19 nt, Homo sapiens
  misc_RNA (1)...(19): siRNA sense strand
ggaguuuccagaccauagu

SEQ ID NO: 920874 - RNA, 19 nt, Homo sapiens
  misc_RNA (1)...(19): siRNA sense strand
ucagagacuggaccuuaga

SEQ ID NO: 920875 - RNA, 19 nt, Homo sapiens
  misc_RNA (1)...(19): siRNA sense strand
caaaagagacauuguucau

SEQ ID NO: 920876 - RNA, 19 nt, Homo sapiens
  misc_RNA (1)...(19): siRNA sense strand
cauagcacugugaaagaaa

SEQ ID NO: 920877 - RNA, 19 nt, Homo sapiens
  misc_RNA (1)...(19): siRNA sense strand
uguuggcacuaaugacuau

SEQ ID NO: 920878 - RNA, 19 nt, Homo sapiens
  misc_RNA (1)...(19): siRNA sense strand
cggacaaagucgagagucu

SEQ ID NO: 920879 - RNA, 19 nt, Homo sapiens
  misc_RNA (1)...(19): siRNA sense strand
aauaacaggguacaguaug

SEQ ID NO: 920880 - RNA, 19 nt, Homo sapiens
  misc_RNA (1)...(19): siRNA sense strand
gaccuguacagacacauuc

SEQ ID NO: 920881 - RNA, 19 nt, Homo sapiens
  misc_RNA (1)...(19): siRNA sense strand
ccagugaugaugagaugau

SEQ ID NO: 920882 - RNA, 19 nt, Homo sapiens
  misc_RNA (1)...(19): siRNA sense strand
caaacuagccagacaauua

SEQ ID NO: 920883 - RNA, 19 nt, Homo sapiens
  misc_RNA (1)...(19): siRNA sense strand
gaagaugccuguagugaca

SEQ ID NO: 920884 - RNA, 19 nt, Homo sapiens
  misc_RNA (1)...(19): siRNA sense strand
caaagacuaugguuuaaug

SEQ ID NO: 920885 - RNA, 19 nt, Homo sapiens
  misc_RNA (1)...(19): siRNA sense strand
aaaggaagcuucacuacaa

SEQ ID NO: 920886 - RNA, 19 nt, Homo sapiens
  misc_RNA (1)...(19): siRNA sense strand
agacaaagacuaugguuua

SEQ ID NO: 920887 - RNA, 19 nt, Homo sapiens
  misc_RNA (1)...(19): siRNA sense strand
caucuuagccaggaaauua

SEQ ID NO: 920888 - RNA, 19 nt, Homo sapiens
  misc_RNA (1)...(19): siRNA sense strand
gacaaagacuaugguuuaa

SEQ ID NO: 920889 - RNA, 19 nt, Homo sapiens
  misc_RNA (1)...(19): siRNA sense strand
caaaagaccuacaugauga

SEQ ID NO: 920890 - RNA, 19 nt, Homo sapiens
  misc_RNA (1)...(19): siRNA sense strand
gaagugggaugaaaugaac

SEQ ID NO: 920891 - RNA, 19 nt, Homo sapiens
  misc_RNA (1)...(19): siRNA sense strand
ugaugaagaugaagaaaug

SEQ ID NO: 920892 - RNA, 19 nt, Homo sapiens
  misc_RNA (1)...(19): siRNA sense strand
ggaagaaucaaaucaagga

SEQ ID NO: 920893 - RNA, 19 nt, Homo sapiens
  misc_RNA (1)...(19): siRNA sense strand
aaacuagccagacaauuaa

SEQ ID NO: 920894 - RNA, 19 nt, Homo sapiens
  misc_RNA (1)...(19): siRNA sense strand
ucaaggaucuacuccaagu

SEQ ID NO: 920895 - RNA, 19 nt, Homo sapiens
  misc_RNA (1)...(19): siRNA sense strand
gagccaaaguaucggauuc

SEQ ID NO: 920896 - RNA, 19 nt, Homo sapiens
  misc_RNA (1)...(19): siRNA sense strand
aaucaaggaucuacuccaa

SEQ ID NO: 920897 - RNA, 19 nt, Homo sapiens
  misc_RNA (1)...(19): siRNA sense strand
ggaagcuucacuacaauga

SEQ ID NO: 920898 - RNA, 19 nt, Homo sapiens
  misc_RNA (1)...(19): siRNA sense strand
aacaagaccucuacgacuu

SEQ ID NO: 920899 - RNA, 19 nt, Homo sapiens
  misc_RNA (1)...(19): siRNA sense strand
gccagacaauuaauuucaa

SEQ ID NO: 920900 - RNA, 19 nt, Homo sapiens
  misc_RNA (1)...(19): siRNA sense strand
gaauacggaagaaucaaau

SEQ ID NO: 920901 - RNA, 19 nt, Homo sapiens
  misc_RNA (1)...(19): siRNA sense strand
gaugaagaaauguuagaga

SEQ ID NO: 920902 - RNA, 19 nt, Homo sapiens
  misc_RNA (1)...(19): siRNA sense strand
caaauuacgaaguucauag

SEQ ID NO: 920903 - RNA, 19 nt, Homo sapiens
  misc_RNA (1)...(19): siRNA sense strand
gaagaugaagaaauguuag

SEQ ID NO: 920904 - RNA, 19 nt, Homo sapiens
  misc_RNA (1)...(19): siRNA sense strand
ccucucaccugaagaacga

SEQ ID NO: 920905 - RNA, 19 nt, Homo sapiens
  misc_RNA (1)...(19): siRNA sense strand
agaaucaaaucaaggaucu

SEQ ID NO: 920906 - RNA, 19 nt, Homo sapiens
  misc_RNA (1)...(19): siRNA sense strand
gcaugaauacggaagaauc

SEQ ID NO: 920907 - RNA, 19 nt, Homo sapiens
  misc_RNA (1)...(19): siRNA sense strand
ccaagcacuccuuaccaua

SEQ ID NO: 920908 - RNA, 19 nt, Homo sapiens
  misc_RNA (1)...(19): siRNA sense strand
ccaagugaccaacagcaaa

SEQ ID NO: 920909 - RNA, 19 nt, Homo sapiens
  misc_RNA (1)...(19): siRNA sense strand
guggagaggaggauaguga

SEQ ID NO: 920910 - RNA, 19 nt, Homo sapiens
  misc_RNA (1)...(19): siRNA sense strand
agaccuacaugaugaugau

SEQ ID NO: 920911 - RNA, 19 nt, Homo sapiens
  misc_RNA (1)...(19): siRNA sense strand
gcagacaaagacuaugguu

SEQ ID NO: 920912 - RNA, 19 nt, Homo sapiens
  misc_RNA (1)...(19): siRNA sense strand
ugaugaugaugaagaugaa

SEQ ID NO: 920913 - RNA, 19 nt, Homo sapiens
  misc_RNA (1)...(19): siRNA sense strand
ggacucaauaucaaacuag

SEQ ID NO: 920914 - RNA, 19 nt, Homo sapiens
  misc_RNA (1)...(19): siRNA sense strand
ugaaggacucaauaucaaa

SEQ ID NO: 920915 - RNA, 19 nt, Homo sapiens
  misc_RNA (1)...(19): siRNA sense strand
aaugaaggacucaauauca

SEQ ID NO: 920916 - RNA, 19 nt, Homo sapiens
  misc_RNA (1)...(19): siRNA sense strand
ugaugaagaugccuguagu

SEQ ID NO: 920917 - RNA, 19 nt, Homo sapiens
  misc_RNA (1)...(19): siRNA sense strand
ugaauacggaagaaucaaa

SEQ ID NO: 920918 - RNA, 19 nt, Homo sapiens
  misc_RNA (1)...(19): siRNA sense strand
uacaaugaaggacucaaua

SEQ ID NO: 920919 - RNA, 19 nt, Homo sapiens
  misc_RNA (1)...(19): siRNA sense strand
gaaccaagcacuccuuacc

SEQ ID NO: 920920 - RNA, 19 nt, Homo sapiens
  misc_RNA (1)...(19): siRNA sense strand
cuagccagacaauuaauuu

SEQ ID NO: 920921 - RNA, 19 nt, Homo sapiens
  misc_RNA (1)...(19): siRNA sense strand
augaaggacucaauaucaa

SEQ ID NO: 920922 - RNA, 19 nt, Homo sapiens
  misc_RNA (1)...(19): siRNA sense strand
caaugaaggacucaauauc

SEQ ID NO: 920923 - RNA, 19 nt, Homo sapiens
  misc_RNA (1)...(19): siRNA sense strand
ccagaagugggaugaaaug

SEQ ID NO: 920924 - RNA, 19 nt, Homo sapiens
  misc_RNA (1)...(19): siRNA sense strand
caagcacuccuuaccauag

SEQ ID NO: 920925 - RNA, 19 nt, Homo sapiens
  misc_RNA (1)...(19): siRNA sense strand
acaaugaaggacucaauau

SEQ ID NO: 920926 - RNA, 19 nt, Homo sapiens
  misc_RNA (1)...(19): siRNA sense strand
gaacaucuuggcgacguau

SEQ ID NO: 920927 - RNA, 19 nt, Homo sapiens
  misc_RNA (1)...(19): siRNA sense strand
gaaggacucaauaucaaac

SEQ ID NO: 920928 - RNA, 19 nt, Homo sapiens
  misc_RNA (1)...(19): siRNA sense strand
cauggcgccagacaucuua

SEQ ID NO: 920929 - RNA, 19 nt, Homo sapiens
  misc_RNA (1)...(19): siRNA sense strand
cagacaaagacuaugguuu

SEQ ID NO: 920930 - RNA, 19 nt, Homo sapiens
  misc_RNA (1)...(19): siRNA sense strand
ccucuacgacuuccucuau

SEQ ID NO: 920931 - RNA, 19 nt, Homo sapiens
  misc_RNA (1)...(19): siRNA sense strand
ccuacaugaugaugaugaa

SEQ ID NO: 920932 - RNA, 19 nt, Homo sapiens
  misc_RNA (1)...(19): siRNA sense strand
gcacuccuuaccauaguau

SEQ ID NO: 920933 - RNA, 19 nt, Homo sapiens
  misc_RNA (1)...(19): siRNA sense strand
aagcaugaauacggaagaa

SEQ ID NO: 920934 - RNA, 19 nt, Homo sapiens
  misc_RNA (1)...(19): siRNA sense strand
agaagugggaugaaaugaa

SEQ ID NO: 920935 - RNA, 19 nt, Homo sapiens
  misc_RNA (1)...(19): siRNA sense strand
ugaccucucaccugaagaa

SEQ ID NO: 920936 - RNA, 19 nt, Homo sapiens
  misc_RNA (1)...(19): siRNA sense strand
ugaacaucuuggcgacgua

SEQ ID NO: 920937 - RNA, 19 nt, Homo sapiens
  misc_RNA (1)...(19): siRNA sense strand
caugaauacggaagaauca

SEQ ID NO: 920938 - RNA, 19 nt, Homo sapiens
  misc_RNA (1)...(19): siRNA sense strand
gaagaaucaaaucaaggau

SEQ ID NO: 920939 - RNA, 19 nt, Homo sapiens
  misc_RNA (1)...(19): siRNA sense strand
acaugaugaugaugaagau

SEQ ID NO: 920940 - RNA, 19 nt, Homo sapiens
  misc_RNA (1)...(19): siRNA sense strand
ggagccaaaguaucggauu

SEQ ID NO: 920941 - RNA, 19 nt, Homo sapiens
  misc_RNA (1)...(19): siRNA sense strand
gaugaaccaagcacuccuu

SEQ ID NO: 920942 - RNA, 19 nt, Homo sapiens
  misc_RNA (1)...(19): siRNA sense strand
gaugaugaagaugaagaaa

SEQ ID NO: 920943 - RNA, 19 nt, Homo sapiens
  misc_RNA (1)...(19): siRNA sense strand
aaggaagcuucacuacaau

SEQ ID NO: 920944 - RNA, 19 nt, Homo sapiens
  misc_RNA (1)...(19): siRNA sense strand
gcaguggagaggaggauag

SEQ ID NO: 920945 - RNA, 19 nt, Homo sapiens
  misc_RNA (1)...(19): siRNA sense strand
gaugaagaugccuguagug

SEQ ID NO: 920946 - RNA, 19 nt, Homo sapiens
  misc_RNA (1)...(19): siRNA sense strand
aaggaucuacuccaaguga

SEQ ID NO: 920947 - RNA, 19 nt, Homo sapiens
  misc_RNA (1)...(19): siRNA sense strand
ucaaaagaccuacaugaug

SEQ ID NO: 920948 - RNA, 19 nt, Homo sapiens
  misc_RNA (1)...(19): siRNA sense strand
cuacaaugaaggacucaau

SEQ ID NO: 920949 - RNA, 19 nt, Homo sapiens
  misc_RNA (1)...(19): siRNA sense strand
aggacucaauaucaaacua

SEQ ID NO: 920950 - RNA, 19 nt, Homo sapiens
  misc_RNA (1)...(19): siRNA sense strand
ugaagaacaagaccucuac

SEQ ID NO: 920951 - RNA, 19 nt, Homo sapiens
  misc_RNA (1)...(19): siRNA sense strand
gaaaaggaagcuucacuac

SEQ ID NO: 920952 - RNA, 19 nt, Homo sapiens
  misc_RNA (1)...(19): siRNA sense strand
cagcagacaaagacuaugg

SEQ ID NO: 920953 - RNA, 19 nt, Homo sapiens
  misc_RNA (1)...(19): siRNA sense strand
aagcacuccuuaccauagu

SEQ ID NO: 920954 - RNA, 19 nt, Homo sapiens
  misc_RNA (1)...(19): siRNA sense strand
ucaaaucaaggaucuacuc

SEQ ID NO: 920955 - RNA, 19 nt, Homo sapiens
  misc_RNA (1)...(19): siRNA sense strand
uacaugaugaugaugaaga

SEQ ID NO: 920956 - RNA, 19 nt, Homo sapiens
  misc_RNA (1)...(19): siRNA sense strand
gaaucaaaucaaggaucua

SEQ ID NO: 920957 - RNA, 19 nt, Homo sapiens
  misc_RNA (1)...(19): siRNA sense strand
acggaagaaucaaaucaag

SEQ ID NO: 920958 - RNA, 19 nt, Homo sapiens
  misc_RNA (1)...(19): siRNA sense strand
uaucaaacuagccagacaa

SEQ ID NO: 920959 - RNA, 19 nt, Homo sapiens
  misc_RNA (1)...(19): siRNA sense strand
gcaaaacaaauuacgaagu

SEQ ID NO: 920960 - RNA, 19 nt, Homo sapiens
  misc_RNA (1)...(19): siRNA sense strand
gaaagaaucucucaagguu

SEQ ID NO: 920961 - RNA, 19 nt, Homo sapiens
  misc_RNA (1)...(19): siRNA sense strand
ggucagaucuuaaaccuua

SEQ ID NO: 920962 - RNA, 19 nt, Homo sapiens
  misc_RNA (1)...(19): siRNA sense strand
gaagaucucuaugaacuuu

SEQ ID NO: 920963 - RNA, 19 nt, Homo sapiens
  misc_RNA (1)...(19): siRNA sense strand
gaagaguccuuuccagcua

SEQ ID NO: 920964 - RNA, 19 nt, Homo sapiens
  misc_RNA (1)...(19): siRNA sense strand
acagauaccuugugugauu

SEQ ID NO: 920965 - RNA, 19 nt, Homo sapiens
  misc_RNA (1)...(19): siRNA sense strand
gaacuuugugcaagauuua

SEQ ID NO: 920966 - RNA, 19 nt, Homo sapiens
  misc_RNA (1)...(19): siRNA sense strand
guacagauaccuuguguga

SEQ ID NO: 920967 - RNA, 19 nt, Homo sapiens
  misc_RNA (1)...(19): siRNA sense strand
caaaauggauugaugauga

SEQ ID NO: 920968 - RNA, 19 nt, Homo sapiens
  misc_RNA (1)...(19): siRNA sense strand
caaggaggcugaauauugg

SEQ ID NO: 920969 - RNA, 19 nt, Homo sapiens
  misc_RNA (1)...(19): siRNA sense strand
ggaaauugaccauaaggaa

SEQ ID NO: 920970 - RNA, 19 nt, Homo sapiens
  misc_RNA (1)...(19): siRNA sense strand
gagcagagcaagcaauaga

SEQ ID NO: 920971 - RNA, 19 nt, Homo sapiens
  misc_RNA (1)...(19): siRNA sense strand
gagagcagagcaagcaaua

SEQ ID NO: 920972 - RNA, 19 nt, Homo sapiens
  misc_RNA (1)...(19): siRNA sense strand
gaaauugaccauaaggaau

SEQ ID NO: 920973 - RNA, 19 nt, Homo sapiens
  misc_RNA (1)...(19): siRNA sense strand
acaaggaggcugaauauug

SEQ ID NO: 920974 - RNA, 19 nt, Homo sapiens
  misc_RNA (1)...(19): siRNA sense strand
gcaauagaaguuggaauuu

SEQ ID NO: 920975 - RNA, 19 nt, Homo sapiens
  misc_RNA (1)...(19): siRNA sense strand
gugaagaucucuaugaacu

SEQ ID NO: 920976 - RNA, 19 nt, Homo sapiens
  misc_RNA (1)...(19): siRNA sense strand
gcagaaaugugaaaaggaa

SEQ ID NO: 920977 - RNA, 19 nt, Homo sapiens
  misc_RNA (1)...(19): siRNA sense strand
uggauuacaucaucagaaa

SEQ ID NO: 920978 - RNA, 19 nt, Homo sapiens
  misc_RNA (1)...(19): siRNA sense strand
gauugaugaugaagaauuc

SEQ ID NO: 920979 - RNA, 19 nt, Homo sapiens
  misc_RNA (1)...(19): siRNA sense strand
gaggcugaauauuggcuua

SEQ ID NO: 920980 - RNA, 19 nt, Homo sapiens
  misc_RNA (1)...(19): siRNA sense strand
gauugguuccuuucaguua

SEQ ID NO: 920981 - RNA, 19 nt, Homo sapiens
  misc_RNA (1)...(19): siRNA sense strand
gaauauuggcuuaggaaau

SEQ ID NO: 920982 - RNA, 19 nt, Homo sapiens
  misc_RNA (1)...(19): siRNA sense strand
ggucuagcauuuccuuuua

SEQ ID NO: 920983 - RNA, 19 nt, Homo sapiens
  misc_RNA (1)...(19): siRNA sense strand
gacaacaagcuucaucuga

SEQ ID NO: 920984 - RNA, 19 nt, Homo sapiens
  misc_RNA (1)...(19): siRNA sense strand
gaugaugaagaauuccuua

SEQ ID NO: 920985 - RNA, 19 nt, Homo sapiens
  misc_RNA (1)...(19): siRNA sense strand
gauaauugguuagucagau

SEQ ID NO: 920986 - RNA, 19 nt, Homo sapiens
  misc_RNA (1)...(19): siRNA sense strand
aagaaucucucaagguuca

SEQ ID NO: 920987 - RNA, 19 nt, Homo sapiens
  misc_RNA (1)...(19): siRNA sense strand
gaugaggggucagaucuua

SEQ ID NO: 920988 - RNA, 19 nt, Homo sapiens
  misc_RNA (1)...(19): siRNA sense strand
ccauauauuucugacauga

SEQ ID NO: 920989 - RNA, 19 nt, Homo sapiens
  misc_RNA (1)...(19): siRNA sense strand
ggauugaugaugaagaauu

SEQ ID NO: 920990 - RNA, 19 nt, Homo sapiens
  misc_RNA (1)...(19): siRNA sense strand
ucagugagacauuuaacua

SEQ ID NO: 920991 - RNA, 19 nt, Homo sapiens
  misc_RNA (1)...(19): siRNA sense strand
ugaacuuugugcaagauuu

SEQ ID NO: 920992 - RNA, 19 nt, Homo sapiens
  misc_RNA (1)...(19): siRNA sense strand
caccugagcaauuccuuua

SEQ ID NO: 920993 - RNA, 19 nt, Homo sapiens
  misc_RNA (1)...(19): siRNA sense strand
ccaaaucagaagagccuua

SEQ ID NO: 920994 - RNA, 19 nt, Homo sapiens
  misc_RNA (1)...(19): siRNA sense strand
ggaagucagggucggauug

SEQ ID NO: 920995 - RNA, 19 nt, Homo sapiens
  misc_RNA (1)...(19): siRNA sense strand
agaagagccuuauggucaa

SEQ ID NO: 920996 - RNA, 19 nt, Homo sapiens
  misc_RNA (1)...(19): siRNA sense strand
caaaauggaccaaauaugu

SEQ ID NO: 920997 - RNA, 19 nt, Homo sapiens
  misc_RNA (1)...(19): siRNA sense strand
ucucaagguucaaguggaa

SEQ ID NO: 920998 - RNA, 19 nt, Homo sapiens
  misc_RNA (1)...(19): siRNA sense strand
uuacaaggaggcugaauau

SEQ ID NO: 920999 - RNA, 19 nt, Homo sapiens
  misc_RNA (1)...(19): siRNA sense strand
guuacaaggaggcugaaua

SEQ ID NO: 921000 - RNA, 19 nt, Homo sapiens
  misc_RNA (1)...(19): siRNA sense strand
aaaaguggguagaaaguuu

SEQ ID NO: 921001 - RNA, 19 nt, Homo sapiens
  misc_RNA (1)...(19): siRNA sense strand
uagcugcaauugauaaugg

SEQ ID NO: 921002 - RNA, 19 nt, Homo sapiens
  misc_RNA (1)...(19): siRNA sense strand
aaaggaaauugaccauaag

SEQ ID NO: 921003 - RNA, 19 nt, Homo sapiens
  misc_RNA (1)...(19): siRNA sense strand
cgaagcgggugccuaucuu

SEQ ID NO: 921004 - RNA, 19 nt, Homo sapiens
  misc_RNA (1)...(19): siRNA sense strand
ucaguuauuuguugaaggu

SEQ ID NO: 921005 - RNA, 19 nt, Homo sapiens
  misc_RNA (1)...(19): siRNA sense strand
ugguuuggcuugucaguga

SEQ ID NO: 921006 - RNA, 19 nt, Homo sapiens
  misc_RNA (1)...(19): siRNA sense strand
caucugagcauuguaccua

SEQ ID NO: 921007 - RNA, 19 nt, Homo sapiens
  misc_RNA (1)...(19): siRNA sense strand
caagauuuaugugaagauc

SEQ ID NO: 921008 - RNA, 19 nt, Homo sapiens
  misc_RNA (1)...(19): siRNA sense strand
ccagaaagaaucucucaag

SEQ ID NO: 921009 - RNA, 19 nt, Homo sapiens
  misc_RNA (1)...(19): siRNA sense strand
cugcugcccuugcugcuuu

SEQ ID NO: 921010 - RNA, 19 nt, Homo sapiens
  misc_RNA (1)...(19): siRNA sense strand
ggacaacaagcuucaucug

SEQ ID NO: 921011 - RNA, 19 nt, Homo sapiens
  misc_RNA (1)...(19): siRNA sense strand
ugacaugaacuuugugcaa

SEQ ID NO: 921012 - RNA, 19 nt, Homo sapiens
  misc_RNA (1)...(19): siRNA sense strand
ggacucccuccuaagauug

SEQ ID NO: 921013 - RNA, 19 nt, Homo sapiens
  misc_RNA (1)...(19): siRNA sense strand
gagcaagcaauagaaguug

SEQ ID NO: 921014 - RNA, 19 nt, Homo sapiens
  misc_RNA (1)...(19): siRNA sense strand
uaagacugacaaaggauuu

SEQ ID NO: 921015 - RNA, 19 nt, Homo sapiens
  misc_RNA (1)...(19): siRNA sense strand
gugcaagauuuaugugaag

SEQ ID NO: 921016 - RNA, 19 nt, Homo sapiens
  misc_RNA (1)...(19): siRNA sense strand
uaagauugguuccuuucag

SEQ ID NO: 921017 - RNA, 19 nt, Homo sapiens
  misc_RNA (1)...(19): siRNA sense strand
aaaccuuacucaggcauug

SEQ ID NO: 921018 - RNA, 19 nt, Homo sapiens
  misc_RNA (1)...(19): siRNA sense strand
uaugugaagaucucuauga

SEQ ID NO: 921019 - RNA, 19 nt, Homo sapiens
  misc_RNA (1)...(19): siRNA sense strand
gcugaauauuggcuuagga

SEQ ID NO: 921020 - RNA, 19 nt, Homo sapiens
  misc_RNA (1)...(19): siRNA sense strand
gaagcgggugccuaucuug

SEQ ID NO: 921021 - RNA, 19 nt, Homo sapiens
  misc_RNA (1)...(19): siRNA sense strand
ugugcaagauuuaugugaa

SEQ ID NO: 921022 - RNA, 19 nt, Homo sapiens
  misc_RNA (1)...(19): siRNA sense strand
uuucugacaugaacuuugu

SEQ ID NO: 921023 - RNA, 19 nt, Homo sapiens
  misc_RNA (1)...(19): siRNA sense strand
ggagagcauauccauuuca

SEQ ID NO: 921024 - RNA, 19 nt, Homo sapiens
  misc_RNA (1)...(19): siRNA sense strand
gaaaaggaaauugaccaua

SEQ ID NO: 921025 - RNA, 19 nt, Homo sapiens
  misc_RNA (1)...(19): siRNA sense strand
gaaaagcagaaaugugaaa

SEQ ID NO: 921026 - RNA, 19 nt, Homo sapiens
  misc_RNA (1)...(19): siRNA sense strand
guuuaaacccaaaucagaa

SEQ ID NO: 921027 - RNA, 19 nt, Homo sapiens
  misc_RNA (1)...(19): siRNA sense strand
uuacccagacugucaauug

SEQ ID NO: 921028 - RNA, 19 nt, Homo sapiens
  misc_RNA (1)...(19): siRNA sense strand
gaacgcagucaagguggaa

SEQ ID NO: 921029 - RNA, 19 nt, Homo sapiens
  misc_RNA (1)...(19): siRNA sense strand
gcagagcaagcaauagaag

SEQ ID NO: 921030 - RNA, 19 nt, Homo sapiens
  misc_RNA (1)...(19): siRNA sense strand
gagagcauauccauuucac

SEQ ID NO: 921031 - RNA, 19 nt, Homo sapiens
  misc_RNA (1)...(19): siRNA sense strand
cagauaccuugugugauug

SEQ ID NO: 921032 - RNA, 19 nt, Homo sapiens
  misc_RNA (1)...(19): siRNA sense strand
caaaucagaagagccuuau

SEQ ID NO: 921033 - RNA, 19 nt, Homo sapiens
  misc_RNA (1)...(19): siRNA sense strand
acaugaacuuugugcaaga

SEQ ID NO: 921034 - RNA, 19 nt, Homo sapiens
  misc_RNA (1)...(19): siRNA sense strand
gaagucagggucggauugu

SEQ ID NO: 921035 - RNA, 19 nt, Homo sapiens
  misc_RNA (1)...(19): siRNA sense strand
gcaagcaauagaaguugga

SEQ ID NO: 921036 - RNA, 19 nt, Homo sapiens
  misc_RNA (1)...(19): siRNA sense strand
uaguacagauaccuugugu

SEQ ID NO: 921037 - RNA, 19 nt, Homo sapiens
  misc_RNA (1)...(19): siRNA sense strand
agaaagaaucucucaaggu

SEQ ID NO: 921038 - RNA, 19 nt, Homo sapiens
  misc_RNA (1)...(19): siRNA sense strand
gaagagccuuauggucaac

SEQ ID NO: 921039 - RNA, 19 nt, Homo sapiens
  misc_RNA (1)...(19): siRNA sense strand
ucagucacaauuugaaaga

SEQ ID NO: 921040 - RNA, 19 nt, Homo sapiens
  misc_RNA (1)...(19): siRNA sense strand
gcugacccuuugccugaga

SEQ ID NO: 921041 - RNA, 19 nt, Homo sapiens
  misc_RNA (1)...(19): siRNA sense strand
auuugaagcugacccuuug

SEQ ID NO: 921042 - RNA, 19 nt, Homo sapiens
  misc_RNA (1)...(19): siRNA sense strand
agcaauagaaguuggaauu

SEQ ID NO: 921043 - RNA, 19 nt, Homo sapiens
  misc_RNA (1)...(19): siRNA sense strand
aagauugguuccuuucagu

SEQ ID NO: 921044 - RNA, 19 nt, Homo sapiens
  misc_RNA (1)...(19): siRNA sense strand
agagcaagcaauagaaguu

SEQ ID NO: 921045 - RNA, 19 nt, Homo sapiens
  misc_RNA (1)...(19): siRNA sense strand
ucugagcauuguaccuaaa

SEQ ID NO: 921046 - RNA, 19 nt, Homo sapiens
  misc_RNA (1)...(19): siRNA sense strand
uaacuauugguacuucaga

SEQ ID NO: 921047 - RNA, 19 nt, Homo sapiens
  misc_RNA (1)...(19): siRNA sense strand
aaauugaccauaaggaauc

SEQ ID NO: 921048 - RNA, 19 nt, Homo sapiens
  misc_RNA (1)...(19): siRNA sense strand
ugccugagaauauuagaaa

SEQ ID NO: 921049 - RNA, 19 nt, Homo sapiens
  misc_RNA (1)...(19): siRNA sense strand
cauaaggaaucaaaaugga

SEQ ID NO: 921050 - RNA, 19 nt, Homo sapiens
  misc_RNA (1)...(19): siRNA sense strand
gcaagauuuaugugaagau

SEQ ID NO: 921051 - RNA, 19 nt, Homo sapiens
  misc_RNA (1)...(19): siRNA sense strand
gcugagagcagagcaagca

SEQ ID NO: 921052 - RNA, 19 nt, Homo sapiens
  misc_RNA (1)...(19): siRNA sense strand
auggauugaugaugaagaa

SEQ ID NO: 921053 - RNA, 19 nt, Homo sapiens
  misc_RNA (1)...(19): siRNA sense strand
uauugguacuucagagaug

SEQ ID NO: 921054 - RNA, 19 nt, Homo sapiens
  misc_RNA (1)...(19): siRNA sense strand
uguuuaaacccaaaucaga

SEQ ID NO: 921055 - RNA, 19 nt, Homo sapiens
  misc_RNA (1)...(19): siRNA sense strand
ucaauugcaggaagccauu

SEQ ID NO: 921056 - RNA, 19 nt, Homo sapiens
  misc_RNA (1)...(19): siRNA sense strand
ggaaaauuauugguguguu

SEQ ID NO: 921057 - RNA, 19 nt, Homo sapiens
  misc_RNA (1)...(19): siRNA sense strand
caugaacuuugugcaagau

SEQ ID NO: 921058 - RNA, 19 nt, Homo sapiens
  misc_RNA (1)...(19): siRNA sense strand
augugaagaucucuaugaa

SEQ ID NO: 921059 - RNA, 19 nt, Homo sapiens
  misc_RNA (1)...(19): siRNA sense strand
ccaccugagcaauuccuuu

SEQ ID NO: 921060 - RNA, 19 nt, Homo sapiens
  misc_RNA (1)...(19): siRNA sense strand
gcaaaggcaugcugucaga

SEQ ID NO: 921061 - RNA, 19 nt, Homo sapiens
  misc_RNA (1)...(19): siRNA sense strand
ggaaagagccucaggaaaa

SEQ ID NO: 921062 - RNA, 19 nt, Homo sapiens
  misc_RNA (1)...(19): siRNA sense strand
gggcgcagauugccaugua

SEQ ID NO: 921063 - RNA, 19 nt, Homo sapiens
  misc_RNA (1)...(19): siRNA sense strand
ggagauggcggaaagcaaa

SEQ ID NO: 921064 - RNA, 19 nt, Homo sapiens
  misc_RNA (1)...(19): siRNA sense strand
guaagaagugccacaauga

SEQ ID NO: 921065 - RNA, 19 nt, Homo sapiens
  misc_RNA (1)...(19): siRNA sense strand
cugcggagaucuacaauga

SEQ ID NO: 921066 - RNA, 19 nt, Homo sapiens
  misc_RNA (1)...(19): siRNA sense strand
cguaagaagugccacaaug

SEQ ID NO: 921067 - RNA, 19 nt, Homo sapiens
  misc_RNA (1)...(19): siRNA sense strand
gagcccagguggagaugaa

SEQ ID NO: 921068 - RNA, 19 nt, Homo sapiens
  misc_RNA (1)...(19): siRNA sense strand
uaccagggcugacugaguu

SEQ ID NO: 921069 - RNA, 19 nt, Homo sapiens
  misc_RNA (1)...(19): siRNA sense strand
ggaccaacuugcugaccuu

SEQ ID NO: 921070 - RNA, 19 nt, Homo sapiens
  misc_RNA (1)...(19): siRNA sense strand
gcagugggcagcuguaugu

SEQ ID NO: 921071 - RNA, 19 nt, Homo sapiens
  misc_RNA (1)...(19): siRNA sense strand
ggucaccucuugcauugau

SEQ ID NO: 921072 - RNA, 19 nt, Homo sapiens
  misc_RNA (1)...(19): siRNA sense strand
gagcuuggguccuggucaa

SEQ ID NO: 921073 - RNA, 19 nt, Homo sapiens
  misc_RNA (1)...(19): siRNA sense strand
ccaccaaugcugugacuuu

SEQ ID NO: 921074 - RNA, 19 nt, Homo sapiens
  misc_RNA (1)...(19): siRNA sense strand
ugcaagagcugcgcacaaa

SEQ ID NO: 921075 - RNA, 19 nt, Homo sapiens
  misc_RNA (1)...(19): siRNA sense strand
gcucuauucccucaaguuu

SEQ ID NO: 921076 - RNA, 19 nt, Homo sapiens
  misc_RNA (1)...(19): siRNA sense strand
ucaaguaugucaucaagac

SEQ ID NO: 921077 - RNA, 19 nt, Homo sapiens
  misc_RNA (1)...(19): siRNA sense strand
ugaaggcugugcacgagaa

SEQ ID NO: 921078 - RNA, 19 nt, Homo sapiens
  misc_RNA (1)...(19): siRNA sense strand
aaagggaacauccgaguga

SEQ ID NO: 921079 - RNA, 19 nt, Homo sapiens
  misc_RNA (1)...(19): siRNA sense strand
gggaacauccgagugauug

SEQ ID NO: 921080 - RNA, 19 nt, Homo sapiens
  misc_RNA (1)...(19): siRNA sense strand
gcugagaacccagguauca

SEQ ID NO: 921081 - RNA, 19 nt, Homo sapiens
  misc_RNA (1)...(19): siRNA sense strand
ccaaugcugugacuuucga

SEQ ID NO: 921082 - RNA, 19 nt, Homo sapiens
  misc_RNA (1)...(19): siRNA sense strand
gcaagccuguguccuucga

SEQ ID NO: 921083 - RNA, 19 nt, Homo sapiens
  misc_RNA (1)...(19): siRNA sense strand
ucgaggaggucaacagcaa

SEQ ID NO: 921084 - RNA, 19 nt, Homo sapiens
  misc_RNA (1)...(19): siRNA sense strand
gggaaagagccucaggaaa

SEQ ID NO: 921085 - RNA, 19 nt, Homo sapiens
  misc_RNA (1)...(19): siRNA sense strand
agaggcaggugcugaagga

SEQ ID NO: 921086 - RNA, 19 nt, Homo sapiens
  misc_RNA (1)...(19): siRNA sense strand
ggagaugcagucccuggaa

SEQ ID NO: 921087 - RNA, 19 nt, Homo sapiens
  misc_RNA (1)...(19): siRNA sense strand
ccaacuugcugaccuugca

SEQ ID NO: 921088 - RNA, 19 nt, Homo sapiens
  misc_RNA (1)...(19): siRNA sense strand
ugucaaguaugucaucaag

SEQ ID NO: 921089 - RNA, 19 nt, Homo sapiens
  misc_RNA (1)...(19): siRNA sense strand
uucaaugucugcaucuuug

SEQ ID NO: 921090 - RNA, 19 nt, Homo sapiens
  misc_RNA (1)...(19): siRNA sense strand
ggcagaugcuggaggagau

SEQ ID NO: 921091 - RNA, 19 nt, Homo sapiens
  misc_RNA (1)...(19): siRNA sense strand
ggcaggugcugaaggagau

SEQ ID NO: 921092 - RNA, 19 nt, Homo sapiens
  misc_RNA (1)...(19): siRNA sense strand
cuggucaccucuugcauug

SEQ ID NO: 921093 - RNA, 19 nt, Homo sapiens
  misc_RNA (1)...(19): siRNA sense strand
gcaacuccaagcucaccua

SEQ ID NO: 921094 - RNA, 19 nt, Homo sapiens
  misc_RNA (1)...(19): siRNA sense strand
gcaagacguacacgaugga

SEQ ID NO: 921095 - RNA, 19 nt, Homo sapiens
  misc_RNA (1)...(19): siRNA sense strand
gaguuuggccacacuaauc

SEQ ID NO: 921096 - RNA, 19 nt, Homo sapiens
  misc_RNA (1)...(19): siRNA sense strand
gaccugaggccaccaaugc

SEQ ID NO: 921097 - RNA, 19 nt, Homo sapiens
  misc_RNA (1)...(19): siRNA sense strand
caccaaugcugugacuuuc

SEQ ID NO: 921098 - RNA, 19 nt, Homo sapiens
  misc_RNA (1)...(19): siRNA sense strand
gcgcagcacaucaacaagu

SEQ ID NO: 921099 - RNA, 19 nt, Homo sapiens
  misc_RNA (1)...(19): siRNA sense strand
gcacgaccgaguucaccaa

SEQ ID NO: 921100 - RNA, 19 nt, Homo sapiens
  misc_RNA (1)...(19): siRNA sense strand
gagugucaaggccgagaua

SEQ ID NO: 921101 - RNA, 19 nt, Homo sapiens
  misc_RNA (1)...(19): siRNA sense strand
cgacuacaaugggcucaag

SEQ ID NO: 921102 - RNA, 19 nt, Homo sapiens
  misc_RNA (1)...(19): siRNA sense strand
gggaggcgcagcacaucaa

SEQ ID NO: 921103 - RNA, 19 nt, Homo sapiens
  misc_RNA (1)...(19): siRNA sense strand
gcgcugcggagaucuacaa

SEQ ID NO: 921104 - RNA, 19 nt, Homo sapiens
  misc_RNA (1)...(19): siRNA sense strand
ucuauucccucaaguuugc

SEQ ID NO: 921105 - RNA, 19 nt, Homo sapiens
  misc_RNA (1)...(19): siRNA sense strand
gagcguggacgacaucaac

SEQ ID NO: 921106 - RNA, 19 nt, Homo sapiens
  misc_RNA (1)...(19): siRNA sense strand
gcagagcguggacgacauc

SEQ ID NO: 921107 - RNA, 19 nt, Homo sapiens
  misc_RNA (1)...(19): siRNA sense strand
caaagaggauggggaagga

SEQ ID NO: 921108 - RNA, 19 nt, Homo sapiens
  misc_RNA (1)...(19): siRNA sense strand
ggucaagccaggagcaucu

SEQ ID NO: 921109 - RNA, 19 nt, Homo sapiens
  misc_RNA (1)...(19): siRNA sense strand
ggaccugaggccaccaaug

SEQ ID NO: 921110 - RNA, 19 nt, Homo sapiens
  misc_RNA (1)...(19): siRNA sense strand
uaagaagugccacaaugag

SEQ ID NO: 921111 - RNA, 19 nt, Homo sapiens
  misc_RNA (1)...(19): siRNA sense strand
cgaccgaguucaccaaccu

SEQ ID NO: 921112 - RNA, 19 nt, Homo sapiens
  misc_RNA (1)...(19): siRNA sense strand
acaagguguuugaguuugg

SEQ ID NO: 921113 - RNA, 19 nt, Homo sapiens
  misc_RNA (1)...(19): siRNA sense strand
guaccagggcugacugagu

SEQ ID NO: 921114 - RNA, 19 nt, Homo sapiens
  misc_RNA (1)...(19): siRNA sense strand
gagguggagcugcgacuca

SEQ ID NO: 921115 - RNA, 19 nt, Homo sapiens
  misc_RNA (1)...(19): siRNA sense strand
gaggaggucaacagcaaca

SEQ ID NO: 921116 - RNA, 19 nt, Homo sapiens
  misc_RNA (1)...(19): siRNA sense strand
cugcaggauucgcuuagug

SEQ ID NO: 921117 - RNA, 19 nt, Homo sapiens
  misc_RNA (1)...(19): siRNA sense strand
cuucaaugucugcaucuuu

SEQ ID NO: 921118 - RNA, 19 nt, Homo sapiens
  misc_RNA (1)...(19): siRNA sense strand
ucauccaccugcugcacaa

SEQ ID NO: 921119 - RNA, 19 nt, Homo sapiens
  misc_RNA (1)...(19): siRNA sense strand
caagagcugcgcacaaagc

SEQ ID NO: 921120 - RNA, 19 nt, Homo sapiens
  misc_RNA (1)...(19): siRNA sense strand
aggacugccuggcugagaa

SEQ ID NO: 921121 - RNA, 19 nt, Homo sapiens
  misc_RNA (1)...(19): siRNA sense strand
uggacgacaucaacaaggu

SEQ ID NO: 921122 - RNA, 19 nt, Homo sapiens
  misc_RNA (1)...(19): siRNA sense strand
ugacagccacgagaccauu

SEQ ID NO: 921123 - RNA, 19 nt, Homo sapiens
  misc_RNA (1)...(19): siRNA sense strand
ccagagcccagguggagau

SEQ ID NO: 921124 - RNA, 19 nt, Homo sapiens
  misc_RNA (1)...(19): siRNA sense strand
gacgcucuauucccucaag

SEQ ID NO: 921125 - RNA, 19 nt, Homo sapiens
  misc_RNA (1)...(19): siRNA sense strand
ccgcugagaacccagguau

SEQ ID NO: 921126 - RNA, 19 nt, Homo sapiens
  misc_RNA (1)...(19): siRNA sense strand
aggagcugcugcgcaagua

SEQ ID NO: 921127 - RNA, 19 nt, Homo sapiens
  misc_RNA (1)...(19): siRNA sense strand
gcuaugcccuggagaauuu

SEQ ID NO: 921128 - RNA, 19 nt, Homo sapiens
  misc_RNA (1)...(19): siRNA sense strand
gcauuucgcuguacaaguu

SEQ ID NO: 921129 - RNA, 19 nt, Homo sapiens
  misc_RNA (1)...(19): siRNA sense strand
ggagguagcuagaaaugug

SEQ ID NO: 921130 - RNA, 19 nt, Homo sapiens
  misc_RNA (1)...(19): siRNA sense strand
ggagugcccucaccugaau

SEQ ID NO: 921131 - RNA, 19 nt, Homo sapiens
  misc_RNA (1)...(19): siRNA sense strand
ggaagaagaggaugacuca

SEQ ID NO: 921132 - RNA, 19 nt, Homo sapiens
  misc_RNA (1)...(19): siRNA sense strand
gcaaggccuuacugaagaa

SEQ ID NO: 921133 - RNA, 19 nt, Homo sapiens
  misc_RNA (1)...(19): siRNA sense strand
gagcaaggccuuacugaag

SEQ ID NO: 921134 - RNA, 19 nt, Homo sapiens
  misc_RNA (1)...(19): siRNA sense strand
gcacaaggccugucaaagc

SEQ ID NO: 921135 - RNA, 19 nt, Homo sapiens
  misc_RNA (1)...(19): siRNA sense strand
ggaccaggauucagaagag

SEQ ID NO: 921136 - RNA, 19 nt, Homo sapiens
  misc_RNA (1)...(19): siRNA sense strand
gcauugugccucaguauga

SEQ ID NO: 921137 - RNA, 19 nt, Homo sapiens
  misc_RNA (1)...(19): siRNA sense strand
cagccuauuugcagccuua

SEQ ID NO: 921138 - RNA, 19 nt, Homo sapiens
  misc_RNA (1)...(19): siRNA sense strand
ggaugaggauguggaagaa

SEQ ID NO: 921139 - RNA, 19 nt, Homo sapiens
  misc_RNA (1)...(19): siRNA sense strand
gugaggcccuugaggcuuu

SEQ ID NO: 921140 - RNA, 19 nt, Homo sapiens
  misc_RNA (1)...(19): siRNA sense strand
gaggaagaguuggagauug

SEQ ID NO: 921141 - RNA, 19 nt, Homo sapiens
  misc_RNA (1)...(19): siRNA sense strand
aggaagaguuggagauuga

SEQ ID NO: 921142 - RNA, 19 nt, Homo sapiens
  misc_RNA (1)...(19): siRNA sense strand
cuacuucccugccaucaug

SEQ ID NO: 921143 - RNA, 19 nt, Homo sapiens
  misc_RNA (1)...(19): siRNA sense strand
ugacggcccugcagagaga

SEQ ID NO: 921144 - RNA, 19 nt, Homo sapiens
  misc_RNA (1)...(19): siRNA sense strand
ucucugaaguccucacauu

SEQ ID NO: 921145 - RNA, 19 nt, Homo sapiens
  misc_RNA (1)...(19): siRNA sense strand
gcuccuuccuucuguuuga

SEQ ID NO: 921146 - RNA, 19 nt, Homo sapiens
  misc_RNA (1)...(19): siRNA sense strand
gaggaugacucagagaucu

SEQ ID NO: 921147 - RNA, 19 nt, Homo sapiens
  misc_RNA (1)...(19): siRNA sense strand
ugaauacgacgccauguug

SEQ ID NO: 921148 - RNA, 19 nt, Homo sapiens
  misc_RNA (1)...(19): siRNA sense strand
gguagacgacgcugacuug

SEQ ID NO: 921149 - RNA, 19 nt, Homo sapiens
  misc_RNA (1)...(19): siRNA sense strand
ggaagaggaagaugaugau

SEQ ID NO: 921150 - RNA, 19 nt, Homo sapiens
  misc_RNA (1)...(19): siRNA sense strand
ggaggaagaggaagaugau

SEQ ID NO: 921151 - RNA, 19 nt, Homo sapiens
  misc_RNA (1)...(19): siRNA sense strand
caccaaggccgcacuguug

SEQ ID NO: 921152 - RNA, 19 nt, Homo sapiens
  misc_RNA (1)...(19): siRNA sense strand
ugacguuccuggccaaaca

SEQ ID NO: 921153 - RNA, 19 nt, Homo sapiens
  misc_RNA (1)...(19): siRNA sense strand
ggcuuuggaugaacuguug

SEQ ID NO: 921154 - RNA, 19 nt, Homo sapiens
  misc_RNA (1)...(19): siRNA sense strand
ucagagaucucaggguaca

SEQ ID NO: 921155 - RNA, 19 nt, Homo sapiens
  misc_RNA (1)...(19): siRNA sense strand
gcacaccgacagcuuucaa

SEQ ID NO: 921156 - RNA, 19 nt, Homo sapiens
  misc_RNA (1)...(19): siRNA sense strand
gagcuucuucggcuucuga

SEQ ID NO: 921157 - RNA, 19 nt, Homo sapiens
  misc_RNA (1)...(19): siRNA sense strand
gccuggagguagcuagaaa

SEQ ID NO: 921158 - RNA, 19 nt, Homo sapiens
  misc_RNA (1)...(19): siRNA sense strand
cauaucagcagcuauucaa

SEQ ID NO: 921159 - RNA, 19 nt, Homo sapiens
  misc_RNA (1)...(19): siRNA sense strand
aagaagaggaugacucaga

SEQ ID NO: 921160 - RNA, 19 nt, Homo sapiens
  misc_RNA (1)...(19): siRNA sense strand
cggaacagcuccagaucgu

SEQ ID NO: 921161 - RNA, 19 nt, Homo sapiens
  misc_RNA (1)...(19): siRNA sense strand
agcaaggccuuacugaaga

SEQ ID NO: 921162 - RNA, 19 nt, Homo sapiens
  misc_RNA (1)...(19): siRNA sense strand
cuccugggcugcucuucua

SEQ ID NO: 921163 - RNA, 19 nt, Homo sapiens
  misc_RNA (1)...(19): siRNA sense strand
gcacaguggcagagaaguc

SEQ ID NO: 921164 - RNA, 19 nt, Homo sapiens
  misc_RNA (1)...(19): siRNA sense strand
ccgguuuccugccauuauu

SEQ ID NO: 921165 - RNA, 19 nt, Homo sapiens
  misc_RNA (1)...(19): siRNA sense strand
gaagaggaugacucagaga

SEQ ID NO: 921166 - RNA, 19 nt, Homo sapiens
  misc_RNA (1)...(19): siRNA sense strand
gcagcuccuuccuucuguu

SEQ ID NO: 921167 - RNA, 19 nt, Homo sapiens
  misc_RNA (1)...(19): siRNA sense strand
gcacguacagccuauuugc

SEQ ID NO: 921168 - RNA, 19 nt, Homo sapiens
  misc_RNA (1)...(19): siRNA sense strand
cugcgggaauuccuguuaa

SEQ ID NO: 921169 - RNA, 19 nt, Homo sapiens
  misc_RNA (1)...(19): siRNA sense strand
ucccaagcauuucgcugua

SEQ ID NO: 921170 - RNA, 19 nt, Homo sapiens
  misc_RNA (1)...(19): siRNA sense strand
gugggacccucacacugaa

SEQ ID NO: 921171 - RNA, 19 nt, Homo sapiens
  misc_RNA (1)...(19): siRNA sense strand
cacaaggccugucaaagcu

SEQ ID NO: 921172 - RNA, 19 nt, Homo sapiens
  misc_RNA (1)...(19): siRNA sense strand
ccacggaacagcuccagau

SEQ ID NO: 921173 - RNA, 19 nt, Homo sapiens
  misc_RNA (1)...(19): siRNA sense strand
ccaagcauuucgcuguaca

SEQ ID NO: 921174 - RNA, 19 nt, Homo sapiens
  misc_RNA (1)...(19): siRNA sense strand
gaggagugggucaccauug

SEQ ID NO: 921175 - RNA, 19 nt, Homo sapiens
  misc_RNA (1)...(19): siRNA sense strand
ggccuuccuuccauacaug

SEQ ID NO: 921176 - RNA, 19 nt, Homo sapiens
  misc_RNA (1)...(19): siRNA sense strand
gcucacugccuguugacaa

SEQ ID NO: 921177 - RNA, 19 nt, Homo sapiens
  misc_RNA (1)...(19): siRNA sense strand
acccaacacugcugcuuug

SEQ ID NO: 921178 - RNA, 19 nt, Homo sapiens
  misc_RNA (1)...(19): siRNA sense strand
gcugcucccugugcuguug

SEQ ID NO: 921179 - RNA, 19 nt, Homo sapiens
  misc_RNA (1)...(19): siRNA sense strand
ggaggagugggucaccauu

SEQ ID NO: 921180 - RNA, 19 nt, Homo sapiens
  misc_RNA (1)...(19): siRNA sense strand
cagaagaggaagaguugga

SEQ ID NO: 921181 - RNA, 19 nt, Homo sapiens
  misc_RNA (1)...(19): siRNA sense strand
ggaccuuggcagagacuau

SEQ ID NO: 921182 - RNA, 19 nt, Homo sapiens
  misc_RNA (1)...(19): siRNA sense strand
gaaaaccuacagccccaua

SEQ ID NO: 921183 - RNA, 19 nt, Homo sapiens
  misc_RNA (1)...(19): siRNA sense strand
gcuccucgccuacuugaag

SEQ ID NO: 921184 - RNA, 19 nt, Homo sapiens
  misc_RNA (1)...(19): siRNA sense strand
cauucuggcugacaacaag

SEQ ID NO: 921185 - RNA, 19 nt, Homo sapiens
  misc_RNA (1)...(19): siRNA sense strand
cucccgagcuucugcguau

SEQ ID NO: 921186 - RNA, 19 nt, Homo sapiens
  misc_RNA (1)...(19): siRNA sense strand
gaccuuggcagagacuauu

SEQ ID NO: 921187 - RNA, 19 nt, Homo sapiens
  misc_RNA (1)...(19): siRNA sense strand
aggcugugcugcagaggaa

SEQ ID NO: 921188 - RNA, 19 nt, Homo sapiens
  misc_RNA (1)...(19): siRNA sense strand
gaacccaacacugcugcuu

SEQ ID NO: 921189 - RNA, 19 nt, Homo sapiens
  misc_RNA (1)...(19): siRNA sense strand
augaggauguggaagaaga

SEQ ID NO: 921190 - RNA, 19 nt, Homo sapiens
  misc_RNA (1)...(19): siRNA sense strand
uggagcaccugcgggaauu

SEQ ID NO: 921191 - RNA, 19 nt, Homo sapiens
  misc_RNA (1)...(19): siRNA sense strand
caagagcaaggccuuacug

SEQ ID NO: 921192 - RNA, 19 nt, Homo sapiens
  misc_RNA (1)...(19): siRNA sense strand
gguacagcguggagaaugc

SEQ ID NO: 921193 - RNA, 19 nt, Homo sapiens
  misc_RNA (1)...(19): siRNA sense strand
gcacacccuuuuccccauu

SEQ ID NO: 921194 - RNA, 19 nt, Homo sapiens
  misc_RNA (1)...(19): siRNA sense strand
ccuugaggcuuuggaugaa

SEQ ID NO: 921195 - RNA, 19 nt, Homo sapiens
  misc_RNA (1)...(19): siRNA sense strand
cugaccagguuauagaugu

SEQ ID NO: 921196 - RNA, 19 nt, Homo sapiens
  misc_RNA (1)...(19): siRNA sense strand
cugcaugcccugccacuga

SEQ ID NO: 921197 - RNA, 19 nt, Homo sapiens
  misc_RNA (1)...(19): siRNA sense strand
ggagcuggcgaccacauca

SEQ ID NO: 921198 - RNA, 19 nt, Homo sapiens
  misc_RNA (1)...(19): siRNA sense strand
ccgaggaccaggauucaga

SEQ ID NO: 921199 - RNA, 19 nt, Homo sapiens
  misc_RNA (1)...(19): siRNA sense strand
cgaggaggaggaagaggaa

SEQ ID NO: 921200 - RNA, 19 nt, Homo sapiens
  misc_RNA (1)...(19): siRNA sense strand
aacaagaucccaccagaca

SEQ ID NO: 921201 - RNA, 19 nt, Homo sapiens
  misc_RNA (1)...(19): siRNA sense strand
ugaccagguuauagaugug

SEQ ID NO: 921202 - RNA, 19 nt, Homo sapiens
  misc_RNA (1)...(19): siRNA sense strand
aggaagaggaagaugauga

SEQ ID NO: 921203 - RNA, 19 nt, Homo sapiens
  misc_RNA (1)...(19): siRNA sense strand
ggauguggaagaagaggau

SEQ ID NO: 921204 - RNA, 19 nt, Homo sapiens
  misc_RNA (1)...(19): siRNA sense strand
gaagaggaagaugaugauc

SEQ ID NO: 921205 - RNA, 19 nt, Homo sapiens
  misc_RNA (1)...(19): siRNA sense strand
agagagagauggggcuuuu

SEQ ID NO: 921206 - RNA, 19 nt, Homo sapiens
  misc_RNA (1)...(19): siRNA sense strand
uggaugaggauguggaaga

SEQ ID NO: 921207 - RNA, 19 nt, Homo sapiens
  misc_RNA (1)...(19): siRNA sense strand
ggaggaggaagaggaagau

SEQ ID NO: 921208 - RNA, 19 nt, Homo sapiens
  misc_RNA (1)...(19): siRNA sense strand
guguggccuuccuuccaua

SEQ ID NO: 921209 - RNA, 19 nt, Homo sapiens
  misc_RNA (1)...(19): siRNA sense strand
agucagaggugccggucau

SEQ ID NO: 921210 - RNA, 19 nt, Homo sapiens
  misc_RNA (1)...(19): siRNA sense strand
ccugcgggaauuccuguua

SEQ ID NO: 921211 - RNA, 19 nt, Homo sapiens
  misc_RNA (1)...(19): siRNA sense strand
ucucgcugcugcccuacuu

SEQ ID NO: 921212 - RNA, 19 nt, Homo sapiens
  misc_RNA (1)...(19): siRNA sense strand
gaagucggugccucuugga

SEQ ID NO: 921213 - RNA, 19 nt, Homo sapiens
  misc_RNA (1)...(19): siRNA sense strand
ugaugcccauguuggaaga

SEQ ID NO: 921214 - RNA, 19 nt, Homo sapiens
  misc_RNA (1)...(19): siRNA sense strand
agaggaagaguuggagauu

SEQ ID NO: 921215 - RNA, 19 nt, Homo sapiens
  misc_RNA (1)...(19): siRNA sense strand
ggagcgagagcccauacca

SEQ ID NO: 921216 - RNA, 19 nt, Homo sapiens
  misc_RNA (1)...(19): siRNA sense strand
acagcacaccgacagcuuu

SEQ ID NO: 921217 - RNA, 19 nt, Homo sapiens
  misc_RNA (1)...(19): siRNA sense strand
ggaugacucagagaucuca

SEQ ID NO: 921218 - RNA, 19 nt, Homo sapiens
  misc_RNA (1)...(19): siRNA sense strand
cagcuccuuccuucuguuu

SEQ ID NO: 921219 - RNA, 19 nt, Homo sapiens
  misc_RNA (1)...(19): siRNA sense strand
ugcugcagcuucugaggaa

SEQ ID NO: 921220 - RNA, 19 nt, Homo sapiens
  misc_RNA (1)...(19): siRNA sense strand
cugaaguccucacauucug

SEQ ID NO: 921221 - RNA, 19 nt, Homo sapiens
  misc_RNA (1)...(19): siRNA sense strand
acaccaaggccgcacuguu

SEQ ID NO: 921222 - RNA, 19 nt, Homo sapiens
  misc_RNA (1)...(19): siRNA sense strand
ugcaugcccugccacugaa

SEQ ID NO: 921223 - RNA, 19 nt, Homo sapiens
  misc_RNA (1)...(19): siRNA sense strand
uuauuggugugcaagacaa

SEQ ID NO: 921224 - RNA, 19 nt, Homo sapiens
  misc_RNA (1)...(19): siRNA sense strand
caacgggagagccucaagu

SEQ ID NO: 921225 - RNA, 19 nt, Homo sapiens
  misc_RNA (1)...(19): siRNA sense strand
gcccugggagccauugcua

SEQ ID NO: 921226 - RNA, 19 nt, Homo sapiens
  misc_RNA (1)...(19): siRNA sense strand
ccaggauucagaagaggaa

SEQ ID NO: 921227 - RNA, 19 nt, Homo sapiens
  misc_RNA (1)...(19): siRNA sense strand
gcuaccaacucccucauca

SEQ ID NO: 921228 - RNA, 19 nt, Homo sapiens
  misc_RNA (1)...(19): siRNA sense strand
cacauugucuuacacugaa

SEQ ID NO: 921229 - RNA, 19 nt, Homo sapiens
  misc_RNA (1)...(19): siRNA sense strand
ccacauugucuuacacuga

SEQ ID NO: 921230 - RNA, 19 nt, Homo sapiens
  misc_RNA (1)...(19): siRNA sense strand
ccaucaagguguucgacuu

SEQ ID NO: 921231 - RNA, 19 nt, Homo sapiens
  misc_RNA (1)...(19): siRNA sense strand
cacuggaucuguccgauuc

SEQ ID NO: 921232 - RNA, 19 nt, Homo sapiens
  misc_RNA (1)...(19): siRNA sense strand
gcuacuccaucaagguguu

SEQ ID NO: 921233 - RNA, 19 nt, Homo sapiens
  misc_RNA (1)...(19): siRNA sense strand
ccgauuccacauugucuua

SEQ ID NO: 921234 - RNA, 19 nt, Homo sapiens
  misc_RNA (1)...(19): siRNA sense strand
aaacggaggcuaccaacuc

SEQ ID NO: 921235 - RNA, 19 nt, Homo sapiens
  misc_RNA (1)...(19): siRNA sense strand
ggugaccugcugucucuuu

SEQ ID NO: 921236 - RNA, 19 nt, Homo sapiens
  misc_RNA (1)...(19): siRNA sense strand
gauuccacauugucuuaca

SEQ ID NO: 921237 - RNA, 19 nt, Homo sapiens
  misc_RNA (1)...(19): siRNA sense strand
cagcaucuucuacgaccua

SEQ ID NO: 921238 - RNA, 19 nt, Homo sapiens
  misc_RNA (1)...(19): siRNA sense strand
ucuguccgauuccacauug

SEQ ID NO: 921239 - RNA, 19 nt, Homo sapiens
  misc_RNA (1)...(19): siRNA sense strand
caucaagguguucgacuuc

SEQ ID NO: 921240 - RNA, 19 nt, Homo sapiens
  misc_RNA (1)...(19): siRNA sense strand
ccacuggaucuguccgauu

SEQ ID NO: 921241 - RNA, 19 nt, Homo sapiens
  misc_RNA (1)...(19): siRNA sense strand
ucacguacucgcugcugaa

SEQ ID NO: 921242 - RNA, 19 nt, Homo sapiens
  misc_RNA (1)...(19): siRNA sense strand
gaccaggccgucagcaucu

SEQ ID NO: 921243 - RNA, 19 nt, Homo sapiens
  misc_RNA (1)...(19): siRNA sense strand
gcuggagcaggaacucaaa

SEQ ID NO: 921244 - RNA, 19 nt, Homo sapiens
  misc_RNA (1)...(19): siRNA sense strand
guacaagccacuggaucug

SEQ ID NO: 921245 - RNA, 19 nt, Homo sapiens
  misc_RNA (1)...(19): siRNA sense strand
gaaacggaggcuaccaacu

SEQ ID NO: 921246 - RNA, 19 nt, Homo sapiens
  misc_RNA (1)...(19): siRNA sense strand
acggugaccugcugucucu

SEQ ID NO: 921247 - RNA, 19 nt, Homo sapiens
  misc_RNA (1)...(19): siRNA sense strand
ggacaaagccauccauguu

SEQ ID NO: 921248 - RNA, 19 nt, Homo sapiens
  misc_RNA (1)...(19): siRNA sense strand
ggcagaagcucauuacugu

SEQ ID NO: 921249 - RNA, 19 nt, Homo sapiens
  misc_RNA (1)...(19): siRNA sense strand
ccaucuaccucuucaauug

SEQ ID NO: 921250 - RNA, 19 nt, Homo sapiens
  misc_RNA (1)...(19): siRNA sense strand
gagcaccgaugacuucuuc

SEQ ID NO: 921251 - RNA, 19 nt, Homo sapiens
  misc_RNA (1)...(19): siRNA sense strand
cuuggcaucuucaacauua

SEQ ID NO: 921252 - RNA, 19 nt, Homo sapiens
  misc_RNA (1)...(19): siRNA sense strand
gagcuguggugguggauga

SEQ ID NO: 921253 - RNA, 19 nt, Homo sapiens
  misc_RNA (1)...(19): siRNA sense strand
ccaaggagcucuggucauc

SEQ ID NO: 921254 - RNA, 19 nt, Homo sapiens
  misc_RNA (1)...(19): siRNA sense strand
gagcagggccaacuggaaa

SEQ ID NO: 921255 - RNA, 19 nt, Homo sapiens
  misc_RNA (1)...(19): siRNA sense strand
ccugagagcugaaucuauc

SEQ ID NO: 921256 - RNA, 19 nt, Homo sapiens
  misc_RNA (1)...(19): siRNA sense strand
caacuggaaagacguguuu

SEQ ID NO: 921257 - RNA, 19 nt, Homo sapiens
  misc_RNA (1)...(19): siRNA sense strand
ggccacaagugaccgcuuu

SEQ ID NO: 921258 - RNA, 19 nt, Homo sapiens
  misc_RNA (1)...(19): siRNA sense strand
caucagggcugugaacauc

SEQ ID NO: 921259 - RNA, 19 nt, Homo sapiens
  misc_RNA (1)...(19): siRNA sense strand
ggacccagacuccauggaa

SEQ ID NO: 921260 - RNA, 19 nt, Homo sapiens
  misc_RNA (1)...(19): siRNA sense strand
gauaugaggcaacaugaag

SEQ ID NO: 921261 - RNA, 19 nt, Homo sapiens
  misc_RNA (1)...(19): siRNA sense strand
gaggcaacaugaagaguac

SEQ ID NO: 921262 - RNA, 19 nt, Homo sapiens
  misc_RNA (1)...(19): siRNA sense strand
gggcagaagcucauuacug

SEQ ID NO: 921263 - RNA, 19 nt, Homo sapiens
  misc_RNA (1)...(19): siRNA sense strand
gacaaagccauccauguuc

SEQ ID NO: 921264 - RNA, 19 nt, Homo sapiens
  misc_RNA (1)...(19): siRNA sense strand
gagcuguggccuucucuga

SEQ ID NO: 921265 - RNA, 19 nt, Homo sapiens
  misc_RNA (1)...(19): siRNA sense strand
gaugggcagaagcucauua

SEQ ID NO: 921266 - RNA, 19 nt, Homo sapiens
  misc_RNA (1)...(19): siRNA sense strand
gcugguggaugagaauguu

SEQ ID NO: 921267 - RNA, 19 nt, Homo sapiens
  misc_RNA (1)...(19): siRNA sense strand
ugaggcaacaugaagagua

SEQ ID NO: 921268 - RNA, 19 nt, Homo sapiens
  misc_RNA (1)...(19): siRNA sense strand
uguacuggcuccacugaug

SEQ ID NO: 921269 - RNA, 19 nt, Homo sapiens
  misc_RNA (1)...(19): siRNA sense strand
ggauaugaggcaacaugaa

SEQ ID NO: 921270 - RNA, 19 nt, Homo sapiens
  misc_RNA (1)...(19): siRNA sense strand
ucauuacugucuccaagga

SEQ ID NO: 921271 - RNA, 19 nt, Homo sapiens
  misc_RNA (1)...(19): siRNA sense strand
cuccauggcucaggaagaa

SEQ ID NO: 921272 - RNA, 19 nt, Homo sapiens
  misc_RNA (1)...(19): siRNA sense strand
gcuggaagcuccggcuagu

SEQ ID NO: 921273 - RNA, 19 nt, Homo sapiens
  misc_RNA (1)...(19): siRNA sense strand
ggagcagggccaacuggaa

SEQ ID NO: 921274 - RNA, 19 nt, Homo sapiens
  misc_RNA (1)...(19): siRNA sense strand
acaaagccauccauguucu

SEQ ID NO: 921275 - RNA, 19 nt, Homo sapiens
  misc_RNA (1)...(19): siRNA sense strand
ccagugaagguaccaucua

SEQ ID NO: 921276 - RNA, 19 nt, Homo sapiens
  misc_RNA (1)...(19): siRNA sense strand
ggagucaucagggcuguga

SEQ ID NO: 921277 - RNA, 19 nt, Homo sapiens
  misc_RNA (1)...(19): siRNA sense strand
uaauggauaugaggcaaca

SEQ ID NO: 921278 - RNA, 19 nt, Homo sapiens
  misc_RNA (1)...(19): siRNA sense strand
gaccagcgccucaaguuuu

SEQ ID NO: 921279 - RNA, 19 nt, Homo sapiens
  misc_RNA (1)...(19): siRNA sense strand
ccgagagucugcuguguac

SEQ ID NO: 921280 - RNA, 19 nt, Homo sapiens
  misc_RNA (1)...(19): siRNA sense strand
caaagccauccauguucua

SEQ ID NO: 921281 - RNA, 19 nt, Homo sapiens
  misc_RNA (1)...(19): siRNA sense strand
gagagucugcuguguacug

SEQ ID NO: 921282 - RNA, 19 nt, Homo sapiens
  misc_RNA (1)...(19): siRNA sense strand
agacauggcucuggaucca

SEQ ID NO: 921283 - RNA, 19 nt, Homo sapiens
  misc_RNA (1)...(19): siRNA sense strand
ucgcaggacugagggaaga

SEQ ID NO: 921284 - RNA, 19 nt, Homo sapiens
  misc_RNA (1)...(19): siRNA sense strand
ugaccagcgccucaaguuu

SEQ ID NO: 921285 - RNA, 19 nt, Homo sapiens
  misc_RNA (1)...(19): siRNA sense strand
agacuuggagcaccgauga

SEQ ID NO: 921286 - RNA, 19 nt, Homo sapiens
  misc_RNA (1)...(19): siRNA sense strand
ugacuaccgucggcgcaaa

SEQ ID NO: 921287 - RNA, 19 nt, Homo sapiens
  misc_RNA (1)...(19): siRNA sense strand
aagaguacaucgcagacau

SEQ ID NO: 921288 - RNA, 19 nt, Homo sapiens
  misc_RNA (1)...(19): siRNA sense strand
cagaagcucauuacugucu

SEQ ID NO: 921289 - RNA, 19 nt, Homo sapiens
  misc_RNA (1)...(19): siRNA sense strand
ggacacuccggaagacauc

SEQ ID NO: 921290 - RNA, 19 nt, Homo sapiens
  misc_RNA (1)...(19): siRNA sense strand
gaagaguacaucgcagaca

SEQ ID NO: 921291 - RNA, 19 nt, Homo sapiens
  misc_RNA (1)...(19): siRNA sense strand
ggaagacaucgugcuggaa

SEQ ID NO: 921292 - RNA, 19 nt, Homo sapiens
  misc_RNA (1)...(19): siRNA sense strand
cagugaagguaccaucuac

SEQ ID NO: 921293 - RNA, 19 nt, Homo sapiens
  misc_RNA (1)...(19): siRNA sense strand
gccuguggcuccagugaag

SEQ ID NO: 921294 - RNA, 19 nt, Homo sapiens
  misc_RNA (1)...(19): siRNA sense strand
cuagugggcuggcguucca

SEQ ID NO: 921295 - RNA, 19 nt, Homo sapiens
  misc_RNA (1)...(19): siRNA sense strand
ugaccgcuuugcccugaga

SEQ ID NO: 921296 - RNA, 19 nt, Homo sapiens
  misc_RNA (1)...(19): siRNA sense strand
gccaagagggagaaaccaa

SEQ ID NO: 921297 - RNA, 19 nt, Homo sapiens
  misc_RNA (1)...(19): siRNA sense strand
caucaggucaccaucucaa

SEQ ID NO: 921298 - RNA, 19 nt, Homo sapiens
  misc_RNA (1)...(19): siRNA sense strand
uuaagaggcgucgguuuga

SEQ ID NO: 921299 - RNA, 19 nt, Homo sapiens
  misc_RNA (1)...(19): siRNA sense strand
uaagaggcgucgguuugag

SEQ ID NO: 921300 - RNA, 19 nt, Homo sapiens
  misc_RNA (1)...(19): siRNA sense strand
agccauccauguucuagau

SEQ ID NO: 921301 - RNA, 19 nt, Homo sapiens
  misc_RNA (1)...(19): siRNA sense strand
gagggaagagggagaagac

SEQ ID NO: 921302 - RNA, 19 nt, Homo sapiens
  misc_RNA (1)...(19): siRNA sense strand
auuaagaggcgucgguuug

SEQ ID NO: 921303 - RNA, 19 nt, Homo sapiens
  misc_RNA (1)...(19): siRNA sense strand
gcagggccaacuggaaaga

SEQ ID NO: 921304 - RNA, 19 nt, Homo sapiens
  misc_RNA (1)...(19): siRNA sense strand
gcccugagagcugaaucua

SEQ ID NO: 921305 - RNA, 19 nt, Homo sapiens
  misc_RNA (1)...(19): siRNA sense strand
cugaaucuaucgacugcau

SEQ ID NO: 921306 - RNA, 19 nt, Homo sapiens
  misc_RNA (1)...(19): siRNA sense strand
cucugucacucucaugaaa

SEQ ID NO: 921307 - RNA, 19 nt, Homo sapiens
  misc_RNA (1)...(19): siRNA sense strand
uaccaucuaccucuucaau

SEQ ID NO: 921308 - RNA, 19 nt, Homo sapiens
  misc_RNA (1)...(19): siRNA sense strand
ucagauggcucccuuaaga

SEQ ID NO: 921309 - RNA, 19 nt, Homo sapiens
  misc_RNA (1)...(19): siRNA sense strand
gggaagagcuggagaaagg

SEQ ID NO: 921310 - RNA, 19 nt, Homo sapiens
  misc_RNA (1)...(19): siRNA sense strand
gaacucaaaugccaauggu

SEQ ID NO: 921311 - RNA, 19 nt, Homo sapiens
  misc_RNA (1)...(19): siRNA sense strand
cggccuggcucgugcauua

SEQ ID NO: 921312 - RNA, 19 nt, Homo sapiens
  misc_RNA (1)...(19): siRNA sense strand
ugccugagcucgcggauga

SEQ ID NO: 921313 - RNA, 19 nt, Homo sapiens
  misc_RNA (1)...(19): siRNA sense strand
acucaaaugccaaugguua

SEQ ID NO: 921314 - RNA, 19 nt, Homo sapiens
  misc_RNA (1)...(19): siRNA sense strand
gcucgcggaugaacugaga

SEQ ID NO: 921315 - RNA, 19 nt, Homo sapiens
  misc_RNA (1)...(19): siRNA sense strand
gcucgugcauuaacaacug

SEQ ID NO: 921316 - RNA, 19 nt, Homo sapiens
  misc_RNA (1)...(19): siRNA sense strand
cuacugauccagcauguga

SEQ ID NO: 921317 - RNA, 19 nt, Homo sapiens
  misc_RNA (1)...(19): siRNA sense strand
gcccaucggugaccuugga

SEQ ID NO: 921318 - RNA, 19 nt, Homo sapiens
  misc_RNA (1)...(19): siRNA sense strand
gaagccuggugcuaucuca

SEQ ID NO: 921319 - RNA, 19 nt, Homo sapiens
  misc_RNA (1)...(19): siRNA sense strand
gcccuggguucaccugauu

SEQ ID NO: 921320 - RNA, 19 nt, Homo sapiens
  misc_RNA (1)...(19): siRNA sense strand
ugagaagccuggugcuauc

SEQ ID NO: 921321 - RNA, 19 nt, Homo sapiens
  misc_RNA (1)...(19): siRNA sense strand
ggagcuacccgacaacauc

SEQ ID NO: 921322 - RNA, 19 nt, Homo sapiens
  misc_RNA (1)...(19): siRNA sense strand
gaaccagaugagaaacuuu

SEQ ID NO: 921323 - RNA, 19 nt, Homo sapiens
  misc_RNA (1)...(19): siRNA sense strand
ccuauaaggaguaccauga

SEQ ID NO: 921324 - RNA, 19 nt, Homo sapiens
  misc_RNA (1)...(19): siRNA sense strand
ugaagaagggcaccaacuu

SEQ ID NO: 921325 - RNA, 19 nt, Homo sapiens
  misc_RNA (1)...(19): siRNA sense strand
gugaugaccucggacacuu

SEQ ID NO: 921326 - RNA, 19 nt, Homo sapiens
  misc_RNA (1)...(19): siRNA sense strand
ugaaccagaugagaaacuu

SEQ ID NO: 921327 - RNA, 19 nt, Homo sapiens
  misc_RNA (1)...(19): siRNA sense strand
ccaccucuccuccaacuug

SEQ ID NO: 921328 - RNA, 19 nt, Homo sapiens
  misc_RNA (1)...(19): siRNA sense strand
uacgugcgcuuacaacuag

SEQ ID NO: 921329 - RNA, 19 nt, Homo sapiens
  misc_RNA (1)...(19): siRNA sense strand
ccgacaacauccucaacuu

SEQ ID NO: 921330 - RNA, 19 nt, Homo sapiens
  misc_RNA (1)...(19): siRNA sense strand
agauggcucccuuaagaua

SEQ ID NO: 921331 - RNA, 19 nt, Homo sapiens
  misc_RNA (1)...(19): siRNA sense strand
cgacaacauccucaacuuc

SEQ ID NO: 921332 - RNA, 19 nt, Homo sapiens
  misc_RNA (1)...(19): siRNA sense strand
gggauccugucgguuacua

SEQ ID NO: 921333 - RNA, 19 nt, Homo sapiens
  misc_RNA (1)...(19): siRNA sense strand
gugaguaccaguuggaaga

SEQ ID NO: 921334 - RNA, 19 nt, Homo sapiens
  misc_RNA (1)...(19): siRNA sense strand
gaccaggagcccaugagaa

SEQ ID NO: 921335 - RNA, 19 nt, Homo sapiens
  misc_RNA (1)...(19): siRNA sense strand
uaaggaguaccaugaggaa

SEQ ID NO: 921336 - RNA, 19 nt, Homo sapiens
  misc_RNA (1)...(19): siRNA sense strand
uuugggauccugucgguua

SEQ ID NO: 921337 - RNA, 19 nt, Homo sapiens
  misc_RNA (1)...(19): siRNA sense strand
uuacgugcgcuuacaacua

SEQ ID NO: 921338 - RNA, 19 nt, Homo sapiens
  misc_RNA (1)...(19): siRNA sense strand
ucaagaagcacccgcugau

SEQ ID NO: 921339 - RNA, 19 nt, Homo sapiens
  misc_RNA (1)...(19): siRNA sense strand
caaccuccguggcaguaag

SEQ ID NO: 921340 - RNA, 19 nt, Homo sapiens
  misc_RNA (1)...(19): siRNA sense strand
ggaacucaaaugccaaugg

SEQ ID NO: 921341 - RNA, 19 nt, Homo sapiens
  misc_RNA (1)...(19): siRNA sense strand
caugcccgcuggaccuuug

SEQ ID NO: 921342 - RNA, 19 nt, Homo sapiens
  misc_RNA (1)...(19): siRNA sense strand
gaguaccaguuggaagaga

SEQ ID NO: 921343 - RNA, 19 nt, Homo sapiens
  misc_RNA (1)...(19): siRNA sense strand
cccgaggagucaucaguau

SEQ ID NO: 921344 - RNA, 19 nt, Homo sapiens
  misc_RNA (1)...(19): siRNA sense strand
gguuacuacuauucagaug

SEQ ID NO: 921345 - RNA, 19 nt, Homo sapiens
  misc_RNA (1)...(19): siRNA sense strand
uggccacucuggaucucua

SEQ ID NO: 921346 - RNA, 19 nt, Homo sapiens
  misc_RNA (1)...(19): siRNA sense strand
gcccuguccugaaccagau

SEQ ID NO: 921347 - RNA, 19 nt, Homo sapiens
  misc_RNA (1)...(19): siRNA sense strand
caagaagcacccgcugaug

SEQ ID NO: 921348 - RNA, 19 nt, Homo sapiens
  misc_RNA (1)...(19): siRNA sense strand
ugucggccaucugugagua

SEQ ID NO: 921349 - RNA, 19 nt, Homo sapiens
  misc_RNA (1)...(19): siRNA sense strand
guaccugucggccaucugu

SEQ ID NO: 921350 - RNA, 19 nt, Homo sapiens
  misc_RNA (1)...(19): siRNA sense strand
guccugaaccagaugagaa

SEQ ID NO: 921351 - RNA, 19 nt, Homo sapiens
  misc_RNA (1)...(19): siRNA sense strand
cacucuggaucucuacuga

SEQ ID NO: 921352 - RNA, 19 nt, Homo sapiens
  misc_RNA (1)...(19): siRNA sense strand
caugagaagccuggugcua

SEQ ID NO: 921353 - RNA, 19 nt, Homo sapiens
  misc_RNA (1)...(19): siRNA sense strand
gcgggaagagcuggagaaa

SEQ ID NO: 921354 - RNA, 19 nt, Homo sapiens
  misc_RNA (1)...(19): siRNA sense strand
gaugaccucggacacuuca

SEQ ID NO: 921355 - RNA, 19 nt, Homo sapiens
  misc_RNA (1)...(19): siRNA sense strand
agaagcacccgcugaugga

SEQ ID NO: 921356 - RNA, 19 nt, Homo sapiens
  misc_RNA (1)...(19): siRNA sense strand
caucugugaguaccaguug

SEQ ID NO: 921357 - RNA, 19 nt, Homo sapiens
  misc_RNA (1)...(19): siRNA sense strand
ugauggagccaccuauaca

SEQ ID NO: 921358 - RNA, 19 nt, Homo sapiens
  misc_RNA (1)...(19): siRNA sense strand
cgaccggguuacaggacuu

SEQ ID NO: 921359 - RNA, 19 nt, Homo sapiens
  misc_RNA (1)...(19): siRNA sense strand
gauggcucccuuaagauag

SEQ ID NO: 921360 - RNA, 19 nt, Homo sapiens
  misc_RNA (1)...(19): siRNA sense strand
gaagucagcuuaaagauaa

SEQ ID NO: 921361 - RNA, 19 nt, Homo sapiens
  misc_RNA (1)...(19): siRNA sense strand
gcacuucucucuccacuua

SEQ ID NO: 921362 - RNA, 19 nt, Homo sapiens
  misc_RNA (1)...(19): siRNA sense strand
gaacugauggguuauauua

SEQ ID NO: 921363 - RNA, 19 nt, Homo sapiens
  misc_RNA (1)...(19): siRNA sense strand
gaaaggaucuagagcugua

SEQ ID NO: 921364 - RNA, 19 nt, Homo sapiens
  misc_RNA (1)...(19): siRNA sense strand
caaggucacuacagaauua

SEQ ID NO: 921365 - RNA, 19 nt, Homo sapiens
  misc_RNA (1)...(19): siRNA sense strand
gaagagaaacucagugaua

SEQ ID NO: 921366 - RNA, 19 nt, Homo sapiens
  misc_RNA (1)...(19): siRNA sense strand
gaauaugccucgugggaua

SEQ ID NO: 921367 - RNA, 19 nt, Homo sapiens
  misc_RNA (1)...(19): siRNA sense strand
gcagugcccugaaagguua

SEQ ID NO: 921368 - RNA, 19 nt, Homo sapiens
  misc_RNA (1)...(19): siRNA sense strand
gaaaggcaaugcgcuguua

SEQ ID NO: 921369 - RNA, 19 nt, Homo sapiens
  misc_RNA (1)...(19): siRNA sense strand
ggagaaagcuaccaauauc

SEQ ID NO: 921370 - RNA, 19 nt, Homo sapiens
  misc_RNA (1)...(19): siRNA sense strand
caaauaagauucggagaaa

SEQ ID NO: 921371 - RNA, 19 nt, Homo sapiens
  misc_RNA (1)...(19): siRNA sense strand
gaaaucauccucauccuuu

SEQ ID NO: 921372 - RNA, 19 nt, Homo sapiens
  misc_RNA (1)...(19): siRNA sense strand
aaagauaacuggugaaugu

SEQ ID NO: 921373 - RNA, 19 nt, Homo sapiens
  misc_RNA (1)...(19): siRNA sense strand
ggaaugcucucucuccaaa

SEQ ID NO: 921374 - RNA, 19 nt, Homo sapiens
  misc_RNA (1)...(19): siRNA sense strand
ugacaaagaucaaccauca

SEQ ID NO: 921375 - RNA, 19 nt, Homo sapiens
  misc_RNA (1)...(19): siRNA sense strand
gcuaugauguuuccaugua

SEQ ID NO: 921376 - RNA, 19 nt, Homo sapiens
  misc_RNA (1)...(19): siRNA sense strand
gggagaaacugauugcaaa

SEQ ID NO: 921377 - RNA, 19 nt, Homo sapiens
  misc_RNA (1)...(19): siRNA sense strand
uggaauagcuuuacuacuu

SEQ ID NO: 921378 - RNA, 19 nt, Homo sapiens
  misc_RNA (1)...(19): siRNA sense strand
gaagaccacuggaaccuau

SEQ ID NO: 921379 - RNA, 19 nt, Homo sapiens
  misc_RNA (1)...(19): siRNA sense strand
caaauucucuuauccaauc

SEQ ID NO: 921380 - RNA, 19 nt, Homo sapiens
  misc_RNA (1)...(19): siRNA sense strand
gcaguuggcucuaaaccuu

SEQ ID NO: 921381 - RNA, 19 nt, Homo sapiens
  misc_RNA (1)...(19): siRNA sense strand
gaaguuucaugcauucaaa

SEQ ID NO: 921382 - RNA, 19 nt, Homo sapiens
  misc_RNA (1)...(19): siRNA sense strand
caacugugccuugaaauua

SEQ ID NO: 921383 - RNA, 19 nt, Homo sapiens
  misc_RNA (1)...(19): siRNA sense strand
gaaguauguuuaagccuuu

SEQ ID NO: 921384 - RNA, 19 nt, Homo sapiens
  misc_RNA (1)...(19): siRNA sense strand
gagaugaaccuucuucuga

SEQ ID NO: 921385 - RNA, 19 nt, Homo sapiens
  misc_RNA (1)...(19): siRNA sense strand
gcagauacuucaacugugu

SEQ ID NO: 921386 - RNA, 19 nt, Homo sapiens
  misc_RNA (1)...(19): siRNA sense strand
gaacugggcugcacuucuc

SEQ ID NO: 921387 - RNA, 19 nt, Homo sapiens
  misc_RNA (1)...(19): siRNA sense strand
gaaacucagugauauaucu

SEQ ID NO: 921388 - RNA, 19 nt, Homo sapiens
  misc_RNA (1)...(19): siRNA sense strand
aaacacagcuagugccauu

SEQ ID NO: 921389 - RNA, 19 nt, Homo sapiens
  misc_RNA (1)...(19): siRNA sense strand
gcagauauguuggcagcua

SEQ ID NO: 921390 - RNA, 19 nt, Homo sapiens
  misc_RNA (1)...(19): siRNA sense strand
gaacuggucauaauuggaa

SEQ ID NO: 921391 - RNA, 19 nt, Homo sapiens
  misc_RNA (1)...(19): siRNA sense strand
uaacucaggucauuagugu

SEQ ID NO: 921392 - RNA, 19 nt, Homo sapiens
  misc_RNA (1)...(19): siRNA sense strand
guucagugcuggaauuauu

SEQ ID NO: 921393 - RNA, 19 nt, Homo sapiens
  misc_RNA (1)...(19): siRNA sense strand
ggaauagcuuuacuacuuc

SEQ ID NO: 921394 - RNA, 19 nt, Homo sapiens
  misc_RNA (1)...(19): siRNA sense strand
gaagagauccagcaacugu

SEQ ID NO: 921395 - RNA, 19 nt, Homo sapiens
  misc_RNA (1)...(19): siRNA sense strand
ccacaugggccuugcuuua

SEQ ID NO: 921396 - RNA, 19 nt, Homo sapiens
  misc_RNA (1)...(19): siRNA sense strand
gagcuggaguugcaguuaa

SEQ ID NO: 921397 - RNA, 19 nt, Homo sapiens
  misc_RNA (1)...(19): siRNA sense strand
aaauacacauggcuugaua

SEQ ID NO: 921398 - RNA, 19 nt, Homo sapiens
  misc_RNA (1)...(19): siRNA sense strand
gagacaugcugacugauga

SEQ ID NO: 921399 - RNA, 19 nt, Homo sapiens
  misc_RNA (1)...(19): siRNA sense strand
gcaggaauguuacagagau

SEQ ID NO: 921400 - RNA, 19 nt, Homo sapiens
  misc_RNA (1)...(19): siRNA sense strand
gaacacaccauucuucauc

SEQ ID NO: 921401 - RNA, 19 nt, Homo sapiens
  misc_RNA (1)...(19): siRNA sense strand
acuaagagcugucacuuug

SEQ ID NO: 921402 - RNA, 19 nt, Homo sapiens
  misc_RNA (1)...(19): siRNA sense strand
ggauguggaucuuucaguu

SEQ ID NO: 921403 - RNA, 19 nt, Homo sapiens
  misc_RNA (1)...(19): siRNA sense strand
caacauccuuucacaauac

SEQ ID NO: 921404 - RNA, 19 nt, Homo sapiens
  misc_RNA (1)...(19): siRNA sense strand
caacacgggcuguauauug

SEQ ID NO: 921405 - RNA, 19 nt, Homo sapiens
  misc_RNA (1)...(19): siRNA sense strand
caaaucagacuccugcuuu

SEQ ID NO: 921406 - RNA, 19 nt, Homo sapiens
  misc_RNA (1)...(19): siRNA sense strand
ucaacauccuuucacaaua

SEQ ID NO: 921407 - RNA, 19 nt, Homo sapiens
  misc_RNA (1)...(19): siRNA sense strand
gcacagucaucccagaaug

SEQ ID NO: 921408 - RNA, 19 nt, Homo sapiens
  misc_RNA (1)...(19): siRNA sense strand
gauauaucacucugcauua

SEQ ID NO: 921409 - RNA, 19 nt, Homo sapiens
  misc_RNA (1)...(19): siRNA sense strand
gagaauagccagcagacuu

SEQ ID NO: 921410 - RNA, 19 nt, Homo sapiens
  misc_RNA (1)...(19): siRNA sense strand
gaagcugucugcgcacgua

SEQ ID NO: 921411 - RNA, 19 nt, Homo sapiens
  misc_RNA (1)...(19): siRNA sense strand
acacuagucuugaauacaa

SEQ ID NO: 921412 - RNA, 19 nt, Homo sapiens
  misc_RNA (1)...(19): siRNA sense strand
gaaaauugcugcuuugaca

SEQ ID NO: 921413 - RNA, 19 nt, Homo sapiens
  misc_RNA (1)...(19): siRNA sense strand
ccugaaagguuagaaguuu

SEQ ID NO: 921414 - RNA, 19 nt, Homo sapiens
  misc_RNA (1)...(19): siRNA sense strand
ggaaggaacagacccagaa

SEQ ID NO: 921415 - RNA, 19 nt, Homo sapiens
  misc_RNA (1)...(19): siRNA sense strand
gaaagacuguagcaggaau

SEQ ID NO: 921416 - RNA, 19 nt, Homo sapiens
  misc_RNA (1)...(19): siRNA sense strand
caagaccucucauucugaa

SEQ ID NO: 921417 - RNA, 19 nt, Homo sapiens
  misc_RNA (1)...(19): siRNA sense strand
uuacagagaugaccaccaa

SEQ ID NO: 921418 - RNA, 19 nt, Homo sapiens
  misc_RNA (1)...(19): siRNA sense strand
caucucaguuacaagaaua

SEQ ID NO: 921419 - RNA, 19 nt, Homo sapiens
  misc_RNA (1)...(19): siRNA sense strand
guuagaaguuucaugcauu

SEQ ID NO: 921420 - RNA, 19 nt, Homo sapiens
  misc_RNA (1)...(19): siRNA sense strand
cagcaacugugccuugaaa

SEQ ID NO: 921421 - RNA, 19 nt, Homo sapiens
  misc_RNA (1)...(19): siRNA sense strand
gcaggaauccccaauuuua

SEQ ID NO: 921422 - RNA, 19 nt, Homo sapiens
  misc_RNA (1)...(19): siRNA sense strand
ugauacagcaggaauguua

SEQ ID NO: 921423 - RNA, 19 nt, Homo sapiens
  misc_RNA (1)...(19): siRNA sense strand
cagaggcgaugauguuuau

SEQ ID NO: 921424 - RNA, 19 nt, Homo sapiens
  misc_RNA (1)...(19): siRNA sense strand
ggauauaucacucugcauu

SEQ ID NO: 921425 - RNA, 19 nt, Homo sapiens
  misc_RNA (1)...(19): siRNA sense strand
agaguuagaugacgaugaa

SEQ ID NO: 921426 - RNA, 19 nt, Homo sapiens
  misc_RNA (1)...(19): siRNA sense strand
uuagagacaugcugacuga

SEQ ID NO: 921427 - RNA, 19 nt, Homo sapiens
  misc_RNA (1)...(19): siRNA sense strand
ugugguaucuguauuguga

SEQ ID NO: 921428 - RNA, 19 nt, Homo sapiens
  misc_RNA (1)...(19): siRNA sense strand
caaaaugccucuuagaaau

SEQ ID NO: 921429 - RNA, 19 nt, Homo sapiens
  misc_RNA (1)...(19): siRNA sense strand
gauacacucuuggucauug

SEQ ID NO: 921430 - RNA, 19 nt, Homo sapiens
  misc_RNA (1)...(19): siRNA sense strand
guauaucuguggaugaaga

SEQ ID NO: 921431 - RNA, 19 nt, Homo sapiens
  misc_RNA (1)...(19): siRNA sense strand
gcaacugugccuugaaauu

SEQ ID NO: 921432 - RNA, 19 nt, Homo sapiens
  misc_RNA (1)...(19): siRNA sense strand
ugaagucauuagaaccuua

SEQ ID NO: 921433 - RNA, 19 nt, Homo sapiens
  misc_RNA (1)...(19): siRNA sense strand
guccuugccuacacacuua

SEQ ID NO: 921434 - RNA, 19 nt, Homo sapiens
  misc_RNA (1)...(19): siRNA sense strand
caaccuaauuuccuuucaa

SEQ ID NO: 921435 - RNA, 19 nt, Homo sapiens
  misc_RNA (1)...(19): siRNA sense strand
caauacaacugaauaugag

SEQ ID NO: 921436 - RNA, 19 nt, Homo sapiens
  misc_RNA (1)...(19): siRNA sense strand
ggaggauucuugaaguaau

SEQ ID NO: 921437 - RNA, 19 nt, Homo sapiens
  misc_RNA (1)...(19): siRNA sense strand
ugaagucagcuuaaagaua

SEQ ID NO: 921438 - RNA, 19 nt, Homo sapiens
  misc_RNA (1)...(19): siRNA sense strand
ccacuuaugaggcuaaauu

SEQ ID NO: 921439 - RNA, 19 nt, Homo sapiens
  misc_RNA (1)...(19): siRNA sense strand
gagccucuguuccuacuga

SEQ ID NO: 921440 - RNA, 19 nt, Homo sapiens
  misc_RNA (1)...(19): siRNA sense strand
guucauggguugucugugu

SEQ ID NO: 921441 - RNA, 19 nt, Homo sapiens
  misc_RNA (1)...(19): siRNA sense strand
gagaaacucagugauauau

SEQ ID NO: 921442 - RNA, 19 nt, Homo sapiens
  misc_RNA (1)...(19): siRNA sense strand
caacuuuagugcaggagaa

SEQ ID NO: 921443 - RNA, 19 nt, Homo sapiens
  misc_RNA (1)...(19): siRNA sense strand
agaauuagcccaaguagau

SEQ ID NO: 921444 - RNA, 19 nt, Homo sapiens
  misc_RNA (1)...(19): siRNA sense strand
gaaaugauacagcaggaau

SEQ ID NO: 921445 - RNA, 19 nt, Homo sapiens
  misc_RNA (1)...(19): siRNA sense strand
cagcagaagccaaucuuaa

SEQ ID NO: 921446 - RNA, 19 nt, Homo sapiens
  misc_RNA (1)...(19): siRNA sense strand
ucuuggaacugauggguua

SEQ ID NO: 921447 - RNA, 19 nt, Homo sapiens
  misc_RNA (1)...(19): siRNA sense strand
guacuuagucucucaagga

SEQ ID NO: 921448 - RNA, 19 nt, Homo sapiens
  misc_RNA (1)...(19): siRNA sense strand
gaugaaccuucuucugaug

SEQ ID NO: 921449 - RNA, 19 nt, Homo sapiens
  misc_RNA (1)...(19): siRNA sense strand
ucccauuccugaagaguua

SEQ ID NO: 921450 - RNA, 19 nt, Homo sapiens
  misc_RNA (1)...(19): siRNA sense strand
gaaauucccauuccugaag

SEQ ID NO: 921451 - RNA, 19 nt, Homo sapiens
  misc_RNA (1)...(19): siRNA sense strand
gaaaagauaagaccagaaa

SEQ ID NO: 921452 - RNA, 19 nt, Homo sapiens
  misc_RNA (1)...(19): siRNA sense strand
gacaaaaucuucaccaaau

SEQ ID NO: 921453 - RNA, 19 nt, Homo sapiens
  misc_RNA (1)...(19): siRNA sense strand
guagagucauugcuuccua

SEQ ID NO: 921454 - RNA, 19 nt, Homo sapiens
  misc_RNA (1)...(19): siRNA sense strand
gcagcuauuucucaagugu

SEQ ID NO: 921455 - RNA, 19 nt, Homo sapiens
  misc_RNA (1)...(19): siRNA sense strand
caugcugacugccagguua

SEQ ID NO: 921456 - RNA, 19 nt, Homo sapiens
  misc_RNA (1)...(19): siRNA sense strand
aagagaagguugaggaaau

SEQ ID NO: 921457 - RNA, 19 nt, Homo sapiens
  misc_RNA (1)...(19): siRNA sense strand
caacuucucuccugguuuu

SEQ ID NO: 921458 - RNA, 19 nt, Homo sapiens
  misc_RNA (1)...(19): siRNA sense strand
ccaaauaagauucggagaa

SEQ ID NO: 921459 - RNA, 19 nt, Homo sapiens
  misc_RNA (1)...(19): siRNA sense strand
gaucuagagcuguauauca

SEQ ID NO: 921460 - RNA, 19 nt, Homo sapiens
  misc_RNA (1)...(19): siRNA sense strand
gcauaaagaugacaaauga

SEQ ID NO: 921461 - RNA, 19 nt, Homo sapiens
  misc_RNA (1)...(19): siRNA sense strand
gaagauggaaggcuaauuu

SEQ ID NO: 921462 - RNA, 19 nt, Homo sapiens
  misc_RNA (1)...(19): siRNA sense strand
gagcgcagaucccuguuua

SEQ ID NO: 921463 - RNA, 19 nt, Homo sapiens
  misc_RNA (1)...(19): siRNA sense strand
ggaaggauauguucgauuc

SEQ ID NO: 921464 - RNA, 19 nt, Homo sapiens
  misc_RNA (1)...(19): siRNA sense strand
gauggaaggcuaauuuaua

SEQ ID NO: 921465 - RNA, 19 nt, Homo sapiens
  misc_RNA (1)...(19): siRNA sense strand
gcagaucccuguuuauugg

SEQ ID NO: 921466 - RNA, 19 nt, Homo sapiens
  misc_RNA (1)...(19): siRNA sense strand
gaagagaaacggcauaaag

SEQ ID NO: 921467 - RNA, 19 nt, Homo sapiens
  misc_RNA (1)...(19): siRNA sense strand
ucuaauggguuaugacaaa

SEQ ID NO: 921468 - RNA, 19 nt, Homo sapiens
  misc_RNA (1)...(19): siRNA sense strand
ccacaacagacacuuauaa

SEQ ID NO: 921469 - RNA, 19 nt, Homo sapiens
  misc_RNA (1)...(19): siRNA sense strand
gaagaaaccagugaagaga

SEQ ID NO: 921470 - RNA, 19 nt, Homo sapiens
  misc_RNA (1)...(19): siRNA sense strand
guacaguguuucaccagaa

SEQ ID NO: 921471 - RNA, 19 nt, Homo sapiens
  misc_RNA (1)...(19): siRNA sense strand
gaagauuccagaugcuaaa

SEQ ID NO: 921472 - RNA, 19 nt, Homo sapiens
  misc_RNA (1)...(19): siRNA sense strand
gcgcagaucccuguuuauu

SEQ ID NO: 921473 - RNA, 19 nt, Homo sapiens
  misc_RNA (1)...(19): siRNA sense strand
agaaaccagugaagagaaa

SEQ ID NO: 921474 - RNA, 19 nt, Homo sapiens
  misc_RNA (1)...(19): siRNA sense strand
ggaagaaaccagugaagag

SEQ ID NO: 921475 - RNA, 19 nt, Homo sapiens
  misc_RNA (1)...(19): siRNA sense strand
caacagacacuuauaaagc

SEQ ID NO: 921476 - RNA, 19 nt, Homo sapiens
  misc_RNA (1)...(19): siRNA sense strand
gagaaacggcauaaagaug

SEQ ID NO: 921477 - RNA, 19 nt, Homo sapiens
  misc_RNA (1)...(19): siRNA sense strand
ccagaaugaugugaagauu

SEQ ID NO: 921478 - RNA, 19 nt, Homo sapiens
  misc_RNA (1)...(19): siRNA sense strand
gaaggaggacugcauugug

SEQ ID NO: 921479 - RNA, 19 nt, Homo sapiens
  misc_RNA (1)...(19): siRNA sense strand
ugaagacuauauccaucua

SEQ ID NO: 921480 - RNA, 19 nt, Homo sapiens
  misc_RNA (1)...(19): siRNA sense strand
ugacaaaucagaagaugga

SEQ ID NO: 921481 - RNA, 19 nt, Homo sapiens
  misc_RNA (1)...(19): siRNA sense strand
gcagaaacgaguacagugu

SEQ ID NO: 921482 - RNA, 19 nt, Homo sapiens
  misc_RNA (1)...(19): siRNA sense strand
ggauauguucgauucuuaa

SEQ ID NO: 921483 - RNA, 19 nt, Homo sapiens
  misc_RNA (1)...(19): siRNA sense strand
auaaagccauuaccuacaa

SEQ ID NO: 921484 - RNA, 19 nt, Homo sapiens
  misc_RNA (1)...(19): siRNA sense strand
uaaauacgccaucugacaa

SEQ ID NO: 921485 - RNA, 19 nt, Homo sapiens
  misc_RNA (1)...(19): siRNA sense strand
cugcuucacuuuauuacaa

SEQ ID NO: 921486 - RNA, 19 nt, Homo sapiens
  misc_RNA (1)...(19): siRNA sense strand
agaaacggcauaaagauga

SEQ ID NO: 921487 - RNA, 19 nt, Homo sapiens
  misc_RNA (1)...(19): siRNA sense strand
aggauauguucgauucuua

SEQ ID NO: 921488 - RNA, 19 nt, Homo sapiens
  misc_RNA (1)...(19): siRNA sense strand
uuacauuucugccauacau

SEQ ID NO: 921489 - RNA, 19 nt, Homo sapiens
  misc_RNA (1)...(19): siRNA sense strand
gaagacuauauccaucuaa

SEQ ID NO: 921490 - RNA, 19 nt, Homo sapiens
  misc_RNA (1)...(19): siRNA sense strand
gcuaugucauucgauugua

SEQ ID NO: 921491 - RNA, 19 nt, Homo sapiens
  misc_RNA (1)...(19): siRNA sense strand
ggaaggcuaauuuauacug

SEQ ID NO: 921492 - RNA, 19 nt, Homo sapiens
  misc_RNA (1)...(19): siRNA sense strand
aaggaggacugcauugugu

SEQ ID NO: 921493 - RNA, 19 nt, Homo sapiens
  misc_RNA (1)...(19): siRNA sense strand
ggaaggaggacugcauugu

SEQ ID NO: 921494 - RNA, 19 nt, Homo sapiens
  misc_RNA (1)...(19): siRNA sense strand
gugcugcuucacuuuauua

SEQ ID NO: 921495 - RNA, 19 nt, Homo sapiens
  misc_RNA (1)...(19): siRNA sense strand
aagagaaacggcauaaaga

SEQ ID NO: 921496 - RNA, 19 nt, Homo sapiens
  misc_RNA (1)...(19): siRNA sense strand
cacaacagacacuuauaaa

SEQ ID NO: 921497 - RNA, 19 nt, Homo sapiens
  misc_RNA (1)...(19): siRNA sense strand
aagauggaaggcuaauuua

SEQ ID NO: 921498 - RNA, 19 nt, Homo sapiens
  misc_RNA (1)...(19): siRNA sense strand
gaaacggcauaaagaugac

SEQ ID NO: 921499 - RNA, 19 nt, Homo sapiens
  misc_RNA (1)...(19): siRNA sense strand
gaugugaagauuccagaug

SEQ ID NO: 921500 - RNA, 19 nt, Homo sapiens
  misc_RNA (1)...(19): siRNA sense strand
gcuaauuuauacuggcaau

SEQ ID NO: 921501 - RNA, 19 nt, Homo sapiens
  misc_RNA (1)...(19): siRNA sense strand
gagcaguguuuggugugaa

SEQ ID NO: 921502 - RNA, 19 nt, Homo sapiens
  misc_RNA (1)...(19): siRNA sense strand
ggcauaaagaugacaaaug

SEQ ID NO: 921503 - RNA, 19 nt, Homo sapiens
  misc_RNA (1)...(19): siRNA sense strand
gauuccagaugcuaaacau

SEQ ID NO: 921504 - RNA, 19 nt, Homo sapiens
  misc_RNA (1)...(19): siRNA sense strand
uguuuggugugaaauguuu

SEQ ID NO: 921505 - RNA, 19 nt, Homo sapiens
  misc_RNA (1)...(19): siRNA sense strand
uccaaaccgugaagacuau

SEQ ID NO: 921506 - RNA, 19 nt, Homo sapiens
  misc_RNA (1)...(19): siRNA sense strand
uccagaugcuaaacaugua

SEQ ID NO: 921507 - RNA, 19 nt, Homo sapiens
  misc_RNA (1)...(19): siRNA sense strand
uuaaauacgccaucugaca

SEQ ID NO: 921508 - RNA, 19 nt, Homo sapiens
  misc_RNA (1)...(19): siRNA sense strand
ugauuggccuuacauuucu

SEQ ID NO: 921509 - RNA, 19 nt, Homo sapiens
  misc_RNA (1)...(19): siRNA sense strand
gugaagagaaacggcauaa

SEQ ID NO: 921510 - RNA, 19 nt, Homo sapiens
  misc_RNA (1)...(19): siRNA sense strand
ggcaucaugggaagcuuua

SEQ ID NO: 921511 - RNA, 19 nt, Homo sapiens
  misc_RNA (1)...(19): siRNA sense strand
ugaagauuccagaugcuaa

SEQ ID NO: 921512 - RNA, 19 nt, Homo sapiens
  misc_RNA (1)...(19): siRNA sense strand
uaaagccauuaccuacaau

SEQ ID NO: 921513 - RNA, 19 nt, Homo sapiens
  misc_RNA (1)...(19): siRNA sense strand
cagaaacgaguacaguguu

SEQ ID NO: 921514 - RNA, 19 nt, Homo sapiens
  misc_RNA (1)...(19): siRNA sense strand
aaggcuaugucauucgauu

SEQ ID NO: 921515 - RNA, 19 nt, Homo sapiens
  misc_RNA (1)...(19): siRNA sense strand
cuuauaaagccauuaccua

SEQ ID NO: 921516 - RNA, 19 nt, Homo sapiens
  misc_RNA (1)...(19): siRNA sense strand
cugauuggccuuacauuuc

SEQ ID NO: 921517 - RNA, 19 nt, Homo sapiens
  misc_RNA (1)...(19): siRNA sense strand
aaggauauguucgauucuu

SEQ ID NO: 921518 - RNA, 19 nt, Homo sapiens
  misc_RNA (1)...(19): siRNA sense strand
ccagugcucuuuccaaacc

SEQ ID NO: 921519 - RNA, 19 nt, Homo sapiens
  misc_RNA (1)...(19): siRNA sense strand
ggccacaacagacacuuau

SEQ ID NO: 921520 - RNA, 19 nt, Homo sapiens
  misc_RNA (1)...(19): siRNA sense strand
gccuuacauuucugccaua

SEQ ID NO: 921521 - RNA, 19 nt, Homo sapiens
  misc_RNA (1)...(19): siRNA sense strand
uacgccaucugacaaauca

SEQ ID NO: 921522 - RNA, 19 nt, Homo sapiens
  misc_RNA (1)...(19): siRNA sense strand
cgagcaguguuugguguga

SEQ ID NO: 921523 - RNA, 19 nt, Homo sapiens
  misc_RNA (1)...(19): siRNA sense strand
aauggguuaugacaaagaa

SEQ ID NO: 921524 - RNA, 19 nt, Homo sapiens
  misc_RNA (1)...(19): siRNA sense strand
auggaaggcuaauuuauac

SEQ ID NO: 921525 - RNA, 19 nt, Homo sapiens
  misc_RNA (1)...(19): siRNA sense strand
gcggaaggaggacugcauu

SEQ ID NO: 921526 - RNA, 19 nt, Homo sapiens
  misc_RNA (1)...(19): siRNA sense strand
aaagugugccucugccuau

SEQ ID NO: 921527 - RNA, 19 nt, Homo sapiens
  misc_RNA (1)...(19): siRNA sense strand
ucugauuggccuuacauuu

SEQ ID NO: 921528 - RNA, 19 nt, Homo sapiens
  misc_RNA (1)...(19): siRNA sense strand
agagaaacggcauaaagau

SEQ ID NO: 921529 - RNA, 19 nt, Homo sapiens
  misc_RNA (1)...(19): siRNA sense strand
uaccuacaaugcuaugcuu

SEQ ID NO: 921530 - RNA, 19 nt, Homo sapiens
  misc_RNA (1)...(19): siRNA sense strand
agacacuuauaaagccauu

SEQ ID NO: 921531 - RNA, 19 nt, Homo sapiens
  misc_RNA (1)...(19): siRNA sense strand
acauuucugccauacauuu

SEQ ID NO: 921532 - RNA, 19 nt, Homo sapiens
  misc_RNA (1)...(19): siRNA sense strand
caucuaauggguuaugaca

SEQ ID NO: 921533 - RNA, 19 nt, Homo sapiens
  misc_RNA (1)...(19): siRNA sense strand
aaauacgccaucugacaaa

SEQ ID NO: 921534 - RNA, 19 nt, Homo sapiens
  misc_RNA (1)...(19): siRNA sense strand
gggaaggauauguucgauu

SEQ ID NO: 921535 - RNA, 19 nt, Homo sapiens
  misc_RNA (1)...(19): siRNA sense strand
ucuuaaauacgccaucuga

SEQ ID NO: 921536 - RNA, 19 nt, Homo sapiens
  misc_RNA (1)...(19): siRNA sense strand
gccacaacagacacuuaua

SEQ ID NO: 921537 - RNA, 19 nt, Homo sapiens
  misc_RNA (1)...(19): siRNA sense strand
gugaagauuccagaugcua

SEQ ID NO: 921538 - RNA, 19 nt, Homo sapiens
  misc_RNA (1)...(19): siRNA sense strand
cuacaaugcuaugcuugca

SEQ ID NO: 921539 - RNA, 19 nt, Homo sapiens
  misc_RNA (1)...(19): siRNA sense strand
uauaaagccauuaccuaca

SEQ ID NO: 921540 - RNA, 19 nt, Homo sapiens
  misc_RNA (1)...(19): siRNA sense strand
ucagaagauggaaggcuaa

SEQ ID NO: 921541 - RNA, 19 nt, Homo sapiens
  misc_RNA (1)...(19): siRNA sense strand
auccagugcucuuuccaaa

SEQ ID NO: 921542 - RNA, 19 nt, Homo sapiens
  misc_RNA (1)...(19): siRNA sense strand
acaaaaggcuaugucauuc

SEQ ID NO: 921543 - RNA, 19 nt, Homo sapiens
  misc_RNA (1)...(19): siRNA sense strand
uacaaaaggcuaugucauu

SEQ ID NO: 921544 - RNA, 19 nt, Homo sapiens
  misc_RNA (1)...(19): siRNA sense strand
uacaguguuucaccagaau

SEQ ID NO: 921545 - RNA, 19 nt, Homo sapiens
  misc_RNA (1)...(19): siRNA sense strand
acaacagacacuuauaaag

SEQ ID NO: 921546 - RNA, 19 nt, Homo sapiens
  misc_RNA (1)...(19): siRNA sense strand
cgcagaucccuguuuauug

SEQ ID NO: 921547 - RNA, 19 nt, Homo sapiens
  misc_RNA (1)...(19): siRNA sense strand
aagaaaccagugaagagaa

SEQ ID NO: 921548 - RNA, 19 nt, Homo sapiens
  misc_RNA (1)...(19): siRNA sense strand
caaaccgugaagacuauau

SEQ ID NO: 921549 - RNA, 19 nt, Homo sapiens
  misc_RNA (1)...(19): siRNA sense strand
gugugccucugccuauuca

SEQ ID NO: 921550 - RNA, 19 nt, Homo sapiens
  misc_RNA (1)...(19): siRNA sense strand
uggaagaaaccagugaaga

SEQ ID NO: 921551 - RNA, 19 nt, Homo sapiens
  misc_RNA (1)...(19): siRNA sense strand
gugccucugccuauucaaa

SEQ ID NO: 921552 - RNA, 19 nt, Homo sapiens
  misc_RNA (1)...(19): siRNA sense strand
gcaagaaacuguagagaug

SEQ ID NO: 921553 - RNA, 19 nt, Homo sapiens
  misc_RNA (1)...(19): siRNA sense strand
gcacagaaguggaauugaa

SEQ ID NO: 921554 - RNA, 19 nt, Homo sapiens
  misc_RNA (1)...(19): siRNA sense strand
acaaucagcuugagaauuu

SEQ ID NO: 921555 - RNA, 19 nt, Homo sapiens
  misc_RNA (1)...(19): siRNA sense strand
gaacgagacugccaaacaa

SEQ ID NO: 921556 - RNA, 19 nt, Homo sapiens
  misc_RNA (1)...(19): siRNA sense strand
gaacaugcaugccacaguu

SEQ ID NO: 921557 - RNA, 19 nt, Homo sapiens
  misc_RNA (1)...(19): siRNA sense strand
agaagaugaugcagaauua

SEQ ID NO: 921558 - RNA, 19 nt, Homo sapiens
  misc_RNA (1)...(19): siRNA sense strand
aaucaaagcugaaggagaa

SEQ ID NO: 921559 - RNA, 19 nt, Homo sapiens
  misc_RNA (1)...(19): siRNA sense strand
caacugaaagucacgauua

SEQ ID NO: 921560 - RNA, 19 nt, Homo sapiens
  misc_RNA (1)...(19): siRNA sense strand
ggaauugaaucugcucuaa

SEQ ID NO: 921561 - RNA, 19 nt, Homo sapiens
  misc_RNA (1)...(19): siRNA sense strand
gagcuucggucauuuggaa

SEQ ID NO: 921562 - RNA, 19 nt, Homo sapiens
  misc_RNA (1)...(19): siRNA sense strand
gcaacaauaucuaacauac

SEQ ID NO: 921563 - RNA, 19 nt, Homo sapiens
  misc_RNA (1)...(19): siRNA sense strand
ggacaaacuccauaaugaa

SEQ ID NO: 921564 - RNA, 19 nt, Homo sapiens
  misc_RNA (1)...(19): siRNA sense strand
gagaauccauguugaccaa

SEQ ID NO: 921565 - RNA, 19 nt, Homo sapiens
  misc_RNA (1)...(19): siRNA sense strand
uaacaaaacugaagcaaga

SEQ ID NO: 921566 - RNA, 19 nt, Homo sapiens
  misc_RNA (1)...(19): siRNA sense strand
caacagaugcugcagaaug

SEQ ID NO: 921567 - RNA, 19 nt, Homo sapiens
  misc_RNA (1)...(19): siRNA sense strand
gagauggacauuagaauug

SEQ ID NO: 921568 - RNA, 19 nt, Homo sapiens
  misc_RNA (1)...(19): siRNA sense strand
gcugcuugguugauuaaua

SEQ ID NO: 921569 - RNA, 19 nt, Homo sapiens
  misc_RNA (1)...(19): siRNA sense strand
gaacacacacuacuccaau

SEQ ID NO: 921570 - RNA, 19 nt, Homo sapiens
  misc_RNA (1)...(19): siRNA sense strand
uaaaggagaccaagggauu

SEQ ID NO: 921571 - RNA, 19 nt, Homo sapiens
  misc_RNA (1)...(19): siRNA sense strand
aaagucagguuauggagaa

SEQ ID NO: 921572 - RNA, 19 nt, Homo sapiens
  misc_RNA (1)...(19): siRNA sense strand
gaagaaagcguugcagaag

SEQ ID NO: 921573 - RNA, 19 nt, Homo sapiens
  misc_RNA (1)...(19): siRNA sense strand
agagacagauaaugaagaa

SEQ ID NO: 921574 - RNA, 19 nt, Homo sapiens
  misc_RNA (1)...(19): siRNA sense strand
gauuaggacugacaauaag

SEQ ID NO: 921575 - RNA, 19 nt, Homo sapiens
  misc_RNA (1)...(19): siRNA sense strand
aaacagagcuuaacaaaac

SEQ ID NO: 921576 - RNA, 19 nt, Homo sapiens
  misc_RNA (1)...(19): siRNA sense strand
gacaaacuccauaaugaaa

SEQ ID NO: 921577 - RNA, 19 nt, Homo sapiens
  misc_RNA (1)...(19): siRNA sense strand
cugcuugguugauuaauaa

SEQ ID NO: 921578 - RNA, 19 nt, Homo sapiens
  misc_RNA (1)...(19): siRNA sense strand
gaauuggcauuguggaaca

SEQ ID NO: 921579 - RNA, 19 nt, Homo sapiens
  misc_RNA (1)...(19): siRNA sense strand
ggaagaagagacagauaau

SEQ ID NO: 921580 - RNA, 19 nt, Homo sapiens
  misc_RNA (1)...(19): siRNA sense strand
aaggagaaguccaacauga

SEQ ID NO: 921581 - RNA, 19 nt, Homo sapiens
  misc_RNA (1)...(19): siRNA sense strand
gaaaagggcagcagcauga

SEQ ID NO: 921582 - RNA, 19 nt, Homo sapiens
  misc_RNA (1)...(19): siRNA sense strand
ucucugagguuauggaaga

SEQ ID NO: 921583 - RNA, 19 nt, Homo sapiens
  misc_RNA (1)...(19): siRNA sense strand
cgauuaggacugacaauaa

SEQ ID NO: 921584 - RNA, 19 nt, Homo sapiens
  misc_RNA (1)...(19): siRNA sense strand
cacaacagaugcugcagaa

SEQ ID NO: 921585 - RNA, 19 nt, Homo sapiens
  misc_RNA (1)...(19): siRNA sense strand
aagaagagacagauaauga

SEQ ID NO: 921586 - RNA, 19 nt, Homo sapiens
  misc_RNA (1)...(19): siRNA sense strand
caauauacccaguagaaga

SEQ ID NO: 921587 - RNA, 19 nt, Homo sapiens
  misc_RNA (1)...(19): siRNA sense strand
acacacuacuccaaucaaa

SEQ ID NO: 921588 - RNA, 19 nt, Homo sapiens
  misc_RNA (1)...(19): siRNA sense strand
gaauccauguugaccaaau

SEQ ID NO: 921589 - RNA, 19 nt, Homo sapiens
  misc_RNA (1)...(19): siRNA sense strand
gccaauauacccaguagaa

SEQ ID NO: 921590 - RNA, 19 nt, Homo sapiens
  misc_RNA (1)...(19): siRNA sense strand
gaagauuaaacagagcuua

SEQ ID NO: 921591 - RNA, 19 nt, Homo sapiens
  misc_RNA (1)...(19): siRNA sense strand
gaauugaaucugcucuaaa

SEQ ID NO: 921592 - RNA, 19 nt, Homo sapiens
  misc_RNA (1)...(19): siRNA sense strand
ugaagaauuuguggaagaa

SEQ ID NO: 921593 - RNA, 19 nt, Homo sapiens
  misc_RNA (1)...(19): siRNA sense strand
gcuauguucuugauugcuu

SEQ ID NO: 921594 - RNA, 19 nt, Homo sapiens
  misc_RNA (1)...(19): siRNA sense strand
ggaugaagaauuuguggaa

SEQ ID NO: 921595 - RNA, 19 nt, Homo sapiens
  misc_RNA (1)...(19): siRNA sense strand
gaagaugaugcagaauuaa

SEQ ID NO: 921596 - RNA, 19 nt, Homo sapiens
  misc_RNA (1)...(19): siRNA sense strand
agaaagcguugcagaagau

SEQ ID NO: 921597 - RNA, 19 nt, Homo sapiens
  misc_RNA (1)...(19): siRNA sense strand
gaagaagagacagauaaug

SEQ ID NO: 921598 - RNA, 19 nt, Homo sapiens
  misc_RNA (1)...(19): siRNA sense strand
ccagacauaucacuuggau

SEQ ID NO: 921599 - RNA, 19 nt, Homo sapiens
  misc_RNA (1)...(19): siRNA sense strand
uggaagaacugcagauuuu

SEQ ID NO: 921600 - RNA, 19 nt, Homo sapiens
  misc_RNA (1)...(19): siRNA sense strand
gaaauuacuaggacuuugg

SEQ ID NO: 921601 - RNA, 19 nt, Homo sapiens
  misc_RNA (1)...(19): siRNA sense strand
uaaaggcccagacauauca

SEQ ID NO: 921602 - RNA, 19 nt, Homo sapiens
  misc_RNA (1)...(19): siRNA sense strand
gaagagacagauaaugaag

SEQ ID NO: 921603 - RNA, 19 nt, Homo sapiens
  misc_RNA (1)...(19): siRNA sense strand
cagaagaugaugcagaauu

SEQ ID NO: 921604 - RNA, 19 nt, Homo sapiens
  misc_RNA (1)...(19): siRNA sense strand
uaugcuauguucuugauug

SEQ ID NO: 921605 - RNA, 19 nt, Homo sapiens
  misc_RNA (1)...(19): siRNA sense strand
caaaugcaccagcacagaa

SEQ ID NO: 921606 - RNA, 19 nt, Homo sapiens
  misc_RNA (1)...(19): siRNA sense strand
guagagauggacauuagaa

SEQ ID NO: 921607 - RNA, 19 nt, Homo sapiens
  misc_RNA (1)...(19): siRNA sense strand
guagaagaauuagaagaag

SEQ ID NO: 921608 - RNA, 19 nt, Homo sapiens
  misc_RNA (1)...(19): siRNA sense strand
aagaaagcguugcagaaga

SEQ ID NO: 921609 - RNA, 19 nt, Homo sapiens
  misc_RNA (1)...(19): siRNA sense strand
uggagaacauguaugcuau

SEQ ID NO: 921610 - RNA, 19 nt, Homo sapiens
  misc_RNA (1)...(19): siRNA sense strand
gaaggagaaguccaacaug

SEQ ID NO: 921611 - RNA, 19 nt, Homo sapiens
  misc_RNA (1)...(19): siRNA sense strand
uggaagaagagacagauaa

SEQ ID NO: 921612 - RNA, 19 nt, Homo sapiens
  misc_RNA (1)...(19): siRNA sense strand
gacauuagaauuggcauug

SEQ ID NO: 921613 - RNA, 19 nt, Homo sapiens
  misc_RNA (1)...(19): siRNA sense strand
ugaaauuacuaggacuuug

SEQ ID NO: 921614 - RNA, 19 nt, Homo sapiens
  misc_RNA (1)...(19): siRNA sense strand
aauugaaucugcucuaaag

SEQ ID NO: 921615 - RNA, 19 nt, Homo sapiens
  misc_RNA (1)...(19): siRNA sense strand
ugacccuaaugcaacaaua

SEQ ID NO: 921616 - RNA, 19 nt, Homo sapiens
  misc_RNA (1)...(19): siRNA sense strand
aagaauaugaugacccuaa

SEQ ID NO: 921617 - RNA, 19 nt, Homo sapiens
  misc_RNA (1)...(19): siRNA sense strand
gguuauggaagaauuagaa

SEQ ID NO: 921618 - RNA, 19 nt, Homo sapiens
  misc_RNA (1)...(19): siRNA sense strand
aagaauuuguggaagaaga

SEQ ID NO: 921619 - RNA, 19 nt, Homo sapiens
  misc_RNA (1)...(19): siRNA sense strand
ugacugauggugcuccuuu

SEQ ID NO: 921620 - RNA, 19 nt, Homo sapiens
  misc_RNA (1)...(19): siRNA sense strand
agaauaugaugacccuaau

SEQ ID NO: 921621 - RNA, 19 nt, Homo sapiens
  misc_RNA (1)...(19): siRNA sense strand
ggaacacacacuacuccaa

SEQ ID NO: 921622 - RNA, 19 nt, Homo sapiens
  misc_RNA (1)...(19): siRNA sense strand
agagauggacauuagaauu

SEQ ID NO: 921623 - RNA, 19 nt, Homo sapiens
  misc_RNA (1)...(19): siRNA sense strand
guacaucaacaaucagcuu

SEQ ID NO: 921624 - RNA, 19 nt, Homo sapiens
  misc_RNA (1)...(19): siRNA sense strand
agaagaaagcguugcagaa

SEQ ID NO: 921625 - RNA, 19 nt, Homo sapiens
  misc_RNA (1)...(19): siRNA sense strand
uaacauacuauccgagcuu

SEQ ID NO: 921626 - RNA, 19 nt, Homo sapiens
  misc_RNA (1)...(19): siRNA sense strand
agaaguggaacguguacua

SEQ ID NO: 921627 - RNA, 19 nt, Homo sapiens
  misc_RNA (1)...(19): siRNA sense strand
ugaacgagacugccaaaca

SEQ ID NO: 921628 - RNA, 19 nt, Homo sapiens
  misc_RNA (1)...(19): siRNA sense strand
gcaacugaaagucacgauu

SEQ ID NO: 921629 - RNA, 19 nt, Homo sapiens
  misc_RNA (1)...(19): siRNA sense strand
cauuagaauuggcauugug

SEQ ID NO: 921630 - RNA, 19 nt, Homo sapiens
  misc_RNA (1)...(19): siRNA sense strand
cauguaugcuauguucuug

SEQ ID NO: 921631 - RNA, 19 nt, Homo sapiens
  misc_RNA (1)...(19): siRNA sense strand
gaauaugaugacccuaaug

SEQ ID NO: 921632 - RNA, 19 nt, Homo sapiens
  misc_RNA (1)...(19): siRNA sense strand
ggacauuagaauuggcauu

SEQ ID NO: 921633 - RNA, 19 nt, Homo sapiens
  misc_RNA (1)...(19): siRNA sense strand
cuguagagauggacauuag

SEQ ID NO: 921634 - RNA, 19 nt, Homo sapiens
  misc_RNA (1)...(19): siRNA sense strand
gaagcaagaaacuguagag

SEQ ID NO: 921635 - RNA, 19 nt, Homo sapiens
  misc_RNA (1)...(19): siRNA sense strand
gagaauuugguucaagaau

SEQ ID NO: 921636 - RNA, 19 nt, Homo sapiens
  misc_RNA (1)...(19): siRNA sense strand
caacaaucagcuugagaau

SEQ ID NO: 921637 - RNA, 19 nt, Homo sapiens
  misc_RNA (1)...(19): siRNA sense strand
agaagagacagauaaugaa

SEQ ID NO: 921638 - RNA, 19 nt, Homo sapiens
  misc_RNA (1)...(19): siRNA sense strand
cagcacagaaguggaauug

SEQ ID NO: 921639 - RNA, 19 nt, Homo sapiens
  misc_RNA (1)...(19): siRNA sense strand
ggaagaauuagaaaaggua

SEQ ID NO: 921640 - RNA, 19 nt, Homo sapiens
  misc_RNA (1)...(19): siRNA sense strand
auacccaguagaagaauua

SEQ ID NO: 921641 - RNA, 19 nt, Homo sapiens
  misc_RNA (1)...(19): siRNA sense strand
cagcaacaggcuuuuauua

SEQ ID NO: 921642 - RNA, 19 nt, Homo sapiens
  misc_RNA (1)...(19): siRNA sense strand
cuccuuuggugaagauuaa

SEQ ID NO: 921643 - RNA, 19 nt, Homo sapiens
  misc_RNA (1)...(19): siRNA sense strand
cgacgucggguuuggaaga

SEQ ID NO: 921644 - RNA, 19 nt, Homo sapiens
  misc_RNA (1)...(19): siRNA sense strand
augaagaauuuguggaaga

SEQ ID NO: 921645 - RNA, 19 nt, Homo sapiens
  misc_RNA (1)...(19): siRNA sense strand
aauauacccaguagaagaa

SEQ ID NO: 921646 - RNA, 19 nt, Homo sapiens
  misc_RNA (1)...(19): siRNA sense strand
ugaaggagaaguccaacau

SEQ ID NO: 921647 - RNA, 19 nt, Homo sapiens
  misc_RNA (1)...(19): siRNA sense strand
ugagguuauggaagaauua

SEQ ID NO: 921648 - RNA, 19 nt, Homo sapiens
  misc_RNA (1)...(19): siRNA sense strand
aagaucagcagccgagaaa

SEQ ID NO: 921649 - RNA, 19 nt, Homo sapiens
  misc_RNA (1)...(19): siRNA sense strand
cgagacugccaaacaagaa

SEQ ID NO: 921650 - RNA, 19 nt, Homo sapiens
  misc_RNA (1)...(19): siRNA sense strand
cccaguagaagaauuagaa

SEQ ID NO: 921651 - RNA, 19 nt, Homo sapiens
  misc_RNA (1)...(19): siRNA sense strand
aagaaacuguagagaugga

SEQ ID NO: 921652 - RNA, 19 nt, Homo sapiens
  misc_RNA (1)...(19): siRNA sense strand
gaagacauauguagagugu

SEQ ID NO: 921653 - RNA, 19 nt, Homo sapiens
  misc_RNA (1)...(19): siRNA sense strand
ucauagaucucgucgcuua

SEQ ID NO: 921654 - RNA, 19 nt, Homo sapiens
  misc_RNA (1)...(19): siRNA sense strand
gaauuggaaugcuuuagaa

SEQ ID NO: 921655 - RNA, 19 nt, Homo sapiens
  misc_RNA (1)...(19): siRNA sense strand
gaacauugaccuucacuau

SEQ ID NO: 921656 - RNA, 19 nt, Homo sapiens
  misc_RNA (1)...(19): siRNA sense strand
ggaccgagcugcugaagag

SEQ ID NO: 921657 - RNA, 19 nt, Homo sapiens
  misc_RNA (1)...(19): siRNA sense strand
guauaugucuucuacuuug

SEQ ID NO: 921658 - RNA, 19 nt, Homo sapiens
  misc_RNA (1)...(19): siRNA sense strand
gcagagugaucuuccagaa

SEQ ID NO: 921659 - RNA, 19 nt, Homo sapiens
  misc_RNA (1)...(19): siRNA sense strand
uggcaacucuugugaaauu

SEQ ID NO: 921660 - RNA, 19 nt, Homo sapiens
  misc_RNA (1)...(19): siRNA sense strand
gagcuuacaugggaaagaa

SEQ ID NO: 921661 - RNA, 19 nt, Homo sapiens
  misc_RNA (1)...(19): siRNA sense strand
ggucauuucucccuuguug

SEQ ID NO: 921662 - RNA, 19 nt, Homo sapiens
  misc_RNA (1)...(19): siRNA sense strand
gaaagaaugcuaggacuug

SEQ ID NO: 921663 - RNA, 19 nt, Homo sapiens
  misc_RNA (1)...(19): siRNA sense strand
gguagaaauuggaguauuc

SEQ ID NO: 921664 - RNA, 19 nt, Homo sapiens
  misc_RNA (1)...(19): siRNA sense strand
gauaugcugucaacggaaa

SEQ ID NO: 921665 - RNA, 19 nt, Homo sapiens
  misc_RNA (1)...(19): siRNA sense strand
ugucauagcuucugguguu

SEQ ID NO: 921666 - RNA, 19 nt, Homo sapiens
  misc_RNA (1)...(19): siRNA sense strand
ggauauuucuguugauugu

SEQ ID NO: 921667 - RNA, 19 nt, Homo sapiens
  misc_RNA (1)...(19): siRNA sense strand
agagugugcugccuaauuu

SEQ ID NO: 921668 - RNA, 19 nt, Homo sapiens
  misc_RNA (1)...(19): siRNA sense strand
acauugaccuucacuauau

SEQ ID NO: 921669 - RNA, 19 nt, Homo sapiens
  misc_RNA (1)...(19): siRNA sense strand
caagaaugcuuaguucaau

SEQ ID NO: 921670 - RNA, 19 nt, Homo sapiens
  misc_RNA (1)...(19): siRNA sense strand
gaacagguuuacgcaaaug

SEQ ID NO: 921671 - RNA, 19 nt, Homo sapiens
  misc_RNA (1)...(19): siRNA sense strand
ccaauuuauucuccagaua

SEQ ID NO: 921672 - RNA, 19 nt, Homo sapiens
  misc_RNA (1)...(19): siRNA sense strand
ggagucugcuauauuguug

SEQ ID NO: 921673 - RNA, 19 nt, Homo sapiens
  misc_RNA (1)...(19): siRNA sense strand
caucaagaaugcuuaguuc

SEQ ID NO: 921674 - RNA, 19 nt, Homo sapiens
  misc_RNA (1)...(19): siRNA sense strand
gcaaauggcauccggaaca

SEQ ID NO: 921675 - RNA, 19 nt, Homo sapiens
  misc_RNA (1)...(19): siRNA sense strand
gaauuugaaugauccagau

SEQ ID NO: 921676 - RNA, 19 nt, Homo sapiens
  misc_RNA (1)...(19): siRNA sense strand
ggaguauucccucucauuu

SEQ ID NO: 921677 - RNA, 19 nt, Homo sapiens
  misc_RNA (1)...(19): siRNA sense strand
caugaagacuuugauaguu

SEQ ID NO: 921678 - RNA, 19 nt, Homo sapiens
  misc_RNA (1)...(19): siRNA sense strand
gaacggaaaucuggcaaac

SEQ ID NO: 921679 - RNA, 19 nt, Homo sapiens
  misc_RNA (1)...(19): siRNA sense strand
gaccuucacuauauuguuc

SEQ ID NO: 921680 - RNA, 19 nt, Homo sapiens
  misc_RNA (1)...(19): siRNA sense strand
cauauuugcuggacugguu

SEQ ID NO: 921681 - RNA, 19 nt, Homo sapiens
  misc_RNA (1)...(19): siRNA sense strand
guuaaggucucuuuguuag

SEQ ID NO: 921682 - RNA, 19 nt, Homo sapiens
  misc_RNA (1)...(19): siRNA sense strand
ugggugguaucuuuaaaua

SEQ ID NO: 921683 - RNA, 19 nt, Homo sapiens
  misc_RNA (1)...(19): siRNA sense strand
gauacuugcuggaucuuca

SEQ ID NO: 921684 - RNA, 19 nt, Homo sapiens
  misc_RNA (1)...(19): siRNA sense strand
agacauauguagagugugu

SEQ ID NO: 921685 - RNA, 19 nt, Homo sapiens
  misc_RNA (1)...(19): siRNA sense strand
ugcuggaucuucauucuua

SEQ ID NO: 921686 - RNA, 19 nt, Homo sapiens
  misc_RNA (1)...(19): siRNA sense strand
acagucaucccaagaauaa

SEQ ID NO: 921687 - RNA, 19 nt, Homo sapiens
  misc_RNA (1)...(19): siRNA sense strand
gaaacacagucgaaaagaa

SEQ ID NO: 921688 - RNA, 19 nt, Homo sapiens
  misc_RNA (1)...(19): siRNA sense strand
caaaaucauugcagcuaua

SEQ ID NO: 921689 - RNA, 19 nt, Homo sapiens
  misc_RNA (1)...(19): siRNA sense strand
uaaggucucuuuguuagug

SEQ ID NO: 921690 - RNA, 19 nt, Homo sapiens
  misc_RNA (1)...(19): siRNA sense strand
aaccauaguuggguauaua

SEQ ID NO: 921691 - RNA, 19 nt, Homo sapiens
  misc_RNA (1)...(19): siRNA sense strand
gacaugaauuggaaugcuu

SEQ ID NO: 921692 - RNA, 19 nt, Homo sapiens
  misc_RNA (1)...(19): siRNA sense strand
cauugcagcuauaacauug

SEQ ID NO: 921693 - RNA, 19 nt, Homo sapiens
  misc_RNA (1)...(19): siRNA sense strand
ggacugguuacaaguauug

SEQ ID NO: 921694 - RNA, 19 nt, Homo sapiens
  misc_RNA (1)...(19): siRNA sense strand
ggaagaaaaugaaaacagu

SEQ ID NO: 921695 - RNA, 19 nt, Homo sapiens
  misc_RNA (1)...(19): siRNA sense strand
ggaaauguuugaugcuacu

SEQ ID NO: 921696 - RNA, 19 nt, Homo sapiens
  misc_RNA (1)...(19): siRNA sense strand
ggaggaagacauauguaga

SEQ ID NO: 921697 - RNA, 19 nt, Homo sapiens
  misc_RNA (1)...(19): siRNA sense strand
ggaaagaaugcuaggacuu

SEQ ID NO: 921698 - RNA, 19 nt, Homo sapiens
  misc_RNA (1)...(19): siRNA sense strand
acggaaaucuggcaaacaa

SEQ ID NO: 921699 - RNA, 19 nt, Homo sapiens
  misc_RNA (1)...(19): siRNA sense strand
gugcaaaucaacaaguuaa

SEQ ID NO: 921700 - RNA, 19 nt, Homo sapiens
  misc_RNA (1)...(19): siRNA sense strand
cauacaaugucaugcucua

SEQ ID NO: 921701 - RNA, 19 nt, Homo sapiens
  misc_RNA (1)...(19): siRNA sense strand
uuaagagugugcugccuaa

SEQ ID NO: 921702 - RNA, 19 nt, Homo sapiens
  misc_RNA (1)...(19): siRNA sense strand
gguguccugugguuucuaa

SEQ ID NO: 921703 - RNA, 19 nt, Homo sapiens
  misc_RNA (1)...(19): siRNA sense strand
cuaaggaauuugaaugauc

SEQ ID NO: 921704 - RNA, 19 nt, Homo sapiens
  misc_RNA (1)...(19): siRNA sense strand
ccacagucaucccaagaau

SEQ ID NO: 921705 - RNA, 19 nt, Homo sapiens
  misc_RNA (1)...(19): siRNA sense strand
caggauauuucuguugauu

SEQ ID NO: 921706 - RNA, 19 nt, Homo sapiens
  misc_RNA (1)...(19): siRNA sense strand
gcacagauuugcuuuuaca

SEQ ID NO: 921707 - RNA, 19 nt, Homo sapiens
  misc_RNA (1)...(19): siRNA sense strand
ccucaucugccuuacuuua

SEQ ID NO: 921708 - RNA, 19 nt, Homo sapiens
  misc_RNA (1)...(19): siRNA sense strand
ggaggacaaugaggaggaa

SEQ ID NO: 921709 - RNA, 19 nt, Homo sapiens
  misc_RNA (1)...(19): siRNA sense strand
gaaaauuuguuggcagauu

SEQ ID NO: 921710 - RNA, 19 nt, Homo sapiens
  misc_RNA (1)...(19): siRNA sense strand
agaaggaacaccugagaaa

SEQ ID NO: 921711 - RNA, 19 nt, Homo sapiens
  misc_RNA (1)...(19): siRNA sense strand
ucugaaagaucgagaacug

SEQ ID NO: 921712 - RNA, 19 nt, Homo sapiens
  misc_RNA (1)...(19): siRNA sense strand
gaagaacacguccaagcau

SEQ ID NO: 921713 - RNA, 19 nt, Homo sapiens
  misc_RNA (1)...(19): siRNA sense strand
gagaaaccgcuuuaucauc

SEQ ID NO: 921714 - RNA, 19 nt, Homo sapiens
  misc_RNA (1)...(19): siRNA sense strand
gaagagcuuacaugggaaa

SEQ ID NO: 921715 - RNA, 19 nt, Homo sapiens
  misc_RNA (1)...(19): siRNA sense strand
acaaugaggaggaagauga

SEQ ID NO: 921716 - RNA, 19 nt, Homo sapiens
  misc_RNA (1)...(19): siRNA sense strand
gcuguuggcuggaguuguc

SEQ ID NO: 921717 - RNA, 19 nt, Homo sapiens
  misc_RNA (1)...(19): siRNA sense strand
gaccugguguccugugguu

SEQ ID NO: 921718 - RNA, 19 nt, Homo sapiens
  misc_RNA (1)...(19): siRNA sense strand
gguauaugucuucuacuuu

SEQ ID NO: 921719 - RNA, 19 nt, Homo sapiens
  misc_RNA (1)...(19): siRNA sense strand
uugaacagguuuacgcaaa

SEQ ID NO: 921720 - RNA, 19 nt, Homo sapiens
  misc_RNA (1)...(19): siRNA sense strand
uugauugucuucaugugua

SEQ ID NO: 921721 - RNA, 19 nt, Homo sapiens
  misc_RNA (1)...(19): siRNA sense strand
cuucacggcuuccaauuca

SEQ ID NO: 921722 - RNA, 19 nt, Homo sapiens
  misc_RNA (1)...(19): siRNA sense strand
gaacuacgaacggaaaucu

SEQ ID NO: 921723 - RNA, 19 nt, Homo sapiens
  misc_RNA (1)...(19): siRNA sense strand
gcaaaucaacaaguuaaca

SEQ ID NO: 921724 - RNA, 19 nt, Homo sapiens
  misc_RNA (1)...(19): siRNA sense strand
cuacuuugccuccuucauu

SEQ ID NO: 921725 - RNA, 19 nt, Homo sapiens
  misc_RNA (1)...(19): siRNA sense strand
cugggagucugcuauauug

SEQ ID NO: 921726 - RNA, 19 nt, Homo sapiens
  misc_RNA (1)...(19): siRNA sense strand
ccaagcaucucauuuugaa

SEQ ID NO: 921727 - RNA, 19 nt, Homo sapiens
  misc_RNA (1)...(19): siRNA sense strand
uaucauccuuguguaugua

SEQ ID NO: 921728 - RNA, 19 nt, Homo sapiens
  misc_RNA (1)...(19): siRNA sense strand
aggaugacaugaauuggaa

SEQ ID NO: 921729 - RNA, 19 nt, Homo sapiens
  misc_RNA (1)...(19): siRNA sense strand
uguuugagcuggucauugu

SEQ ID NO: 921730 - RNA, 19 nt, Homo sapiens
  misc_RNA (1)...(19): siRNA sense strand
agaauacugugaauuaugc

SEQ ID NO: 921731 - RNA, 19 nt, Homo sapiens
  misc_RNA (1)...(19): siRNA sense strand
ucaagaaugcuuaguucaa

SEQ ID NO: 921732 - RNA, 19 nt, Homo sapiens
  misc_RNA (1)...(19): siRNA sense strand
aaagaaugcuaggacuuga

SEQ ID NO: 921733 - RNA, 19 nt, Homo sapiens
  misc_RNA (1)...(19): siRNA sense strand
gugcgagcguggacuguga

SEQ ID NO: 921734 - RNA, 19 nt, Homo sapiens
  misc_RNA (1)...(19): siRNA sense strand
ugaacagguuuacgcaaau

SEQ ID NO: 921735 - RNA, 19 nt, Homo sapiens
  misc_RNA (1)...(19): siRNA sense strand
gccauuagauaugcuguca

SEQ ID NO: 921736 - RNA, 19 nt, Homo sapiens
  misc_RNA (1)...(19): siRNA sense strand
cagugcaaaucaacaaguu

SEQ ID NO: 921737 - RNA, 19 nt, Homo sapiens
  misc_RNA (1)...(19): siRNA sense strand
gaguauucccucucauuug

SEQ ID NO: 921738 - RNA, 19 nt, Homo sapiens
  misc_RNA (1)...(19): siRNA sense strand
ggugguagaaauuggagua

SEQ ID NO: 921739 - RNA, 19 nt, Homo sapiens
  misc_RNA (1)...(19): siRNA sense strand
gcuauauuguuguuaaggu

SEQ ID NO: 921740 - RNA, 19 nt, Homo sapiens
  misc_RNA (1)...(19): siRNA sense strand
cuuggcaacucuugugaaa

SEQ ID NO: 921741 - RNA, 19 nt, Homo sapiens
  misc_RNA (1)...(19): siRNA sense strand
gcuuccaauucaagacaua

SEQ ID NO: 921742 - RNA, 19 nt, Homo sapiens
  misc_RNA (1)...(19): siRNA sense strand
cgugaucucugugcuguug

SEQ ID NO: 921743 - RNA, 19 nt, Homo sapiens
  misc_RNA (1)...(19): siRNA sense strand
caaauggcauccggaacau

SEQ ID NO: 921744 - RNA, 19 nt, Homo sapiens
  misc_RNA (1)...(19): siRNA sense strand
augaagacuuugauaguug

SEQ ID NO: 921745 - RNA, 19 nt, Homo sapiens
  misc_RNA (1)...(19): siRNA sense strand
ugguauaugucuucuacuu

SEQ ID NO: 921746 - RNA, 19 nt, Homo sapiens
  misc_RNA (1)...(19): siRNA sense strand
aauacacuguucauucuug

SEQ ID NO: 921747 - RNA, 19 nt, Homo sapiens
  misc_RNA (1)...(19): siRNA sense strand
ugaauuggaaugcuuuaga

SEQ ID NO: 921748 - RNA, 19 nt, Homo sapiens
  misc_RNA (1)...(19): siRNA sense strand
aguauucccucucauuugu

SEQ ID NO: 921749 - RNA, 19 nt, Homo sapiens
  misc_RNA (1)...(19): siRNA sense strand
gguccucaguggugguuga

SEQ ID NO: 921750 - RNA, 19 nt, Homo sapiens
  misc_RNA (1)...(19): siRNA sense strand
aaacagugcaaaucaacaa

SEQ ID NO: 921751 - RNA, 19 nt, Homo sapiens
  misc_RNA (1)...(19): siRNA sense strand
uuaagcgccuuuaugaaca

SEQ ID NO: 921752 - RNA, 19 nt, Homo sapiens
  misc_RNA (1)...(19): siRNA sense strand
ggaaagaugugaagauaga

SEQ ID NO: 921753 - RNA, 19 nt, Homo sapiens
  misc_RNA (1)...(19): siRNA sense strand
caacaaagauguaugaagu

SEQ ID NO: 921754 - RNA, 19 nt, Homo sapiens
  misc_RNA (1)...(19): siRNA sense strand
gagagcaacugguucauaa

SEQ ID NO: 921755 - RNA, 19 nt, Homo sapiens
  misc_RNA (1)...(19): siRNA sense strand
gcaacugguucauaauuaa

SEQ ID NO: 921756 - RNA, 19 nt, Homo sapiens
  misc_RNA (1)...(19): siRNA sense strand
gaaaugauugcuccuguua

SEQ ID NO: 921757 - RNA, 19 nt, Homo sapiens
  misc_RNA (1)...(19): siRNA sense strand
gaacacuucuugaaaccuu

SEQ ID NO: 921758 - RNA, 19 nt, Homo sapiens
  misc_RNA (1)...(19): siRNA sense strand
caacuuugauccuccaauu

SEQ ID NO: 921759 - RNA, 19 nt, Homo sapiens
  misc_RNA (1)...(19): siRNA sense strand
gcacuucagcagccuauua

SEQ ID NO: 921760 - RNA, 19 nt, Homo sapiens
  misc_RNA (1)...(19): siRNA sense strand
ggacaucaaugccuuugug

SEQ ID NO: 921761 - RNA, 19 nt, Homo sapiens
  misc_RNA (1)...(19): siRNA sense strand
gaagauagaccuguuugaa

SEQ ID NO: 921762 - RNA, 19 nt, Homo sapiens
  misc_RNA (1)...(19): siRNA sense strand
ccacaacgcugcacuccuu

SEQ ID NO: 921763 - RNA, 19 nt, Homo sapiens
  misc_RNA (1)...(19): siRNA sense strand
caggauggcuuauaugaga

SEQ ID NO: 921764 - RNA, 19 nt, Homo sapiens
  misc_RNA (1)...(19): siRNA sense strand
gaagguggcaauaaacuug

SEQ ID NO: 921765 - RNA, 19 nt, Homo sapiens
  misc_RNA (1)...(19): siRNA sense strand
caacauauagugacaacuu

SEQ ID NO: 921766 - RNA, 19 nt, Homo sapiens
  misc_RNA (1)...(19): siRNA sense strand
gagaaguuccucaaugaaa

SEQ ID NO: 921767 - RNA, 19 nt, Homo sapiens
  misc_RNA (1)...(19): siRNA sense strand
gcagaaauuugggaaagau

SEQ ID NO: 921768 - RNA, 19 nt, Homo sapiens
  misc_RNA (1)...(19): siRNA sense strand
gagcaacugguucauaauu

SEQ ID NO: 921769 - RNA, 19 nt, Homo sapiens
  misc_RNA (1)...(19): siRNA sense strand
ugggaaagaugugaagaua

SEQ ID NO: 921770 - RNA, 19 nt, Homo sapiens
  misc_RNA (1)...(19): siRNA sense strand
uugcauauccucacuauaa

SEQ ID NO: 921771 - RNA, 19 nt, Homo sapiens
  misc_RNA (1)...(19): siRNA sense strand
gaaauccaacaaagaugua

SEQ ID NO: 921772 - RNA, 19 nt, Homo sapiens
  misc_RNA (1)...(19): siRNA sense strand
ucuuauaucuggcucagua

SEQ ID NO: 921773 - RNA, 19 nt, Homo sapiens
  misc_RNA (1)...(19): siRNA sense strand
uaaauuaguuuggcgcuau

SEQ ID NO: 921774 - RNA, 19 nt, Homo sapiens
  misc_RNA (1)...(19): siRNA sense strand
ucacuguccuguucugauu

SEQ ID NO: 921775 - RNA, 19 nt, Homo sapiens
  misc_RNA (1)...(19): siRNA sense strand
aguagaagguggcaauaaa

SEQ ID NO: 921776 - RNA, 19 nt, Homo sapiens
  misc_RNA (1)...(19): siRNA sense strand
ggaauugaauacaucuauc

SEQ ID NO: 921777 - RNA, 19 nt, Homo sapiens
  misc_RNA (1)...(19): siRNA sense strand
uaauguacaucgaggagaa

SEQ ID NO: 921778 - RNA, 19 nt, Homo sapiens
  misc_RNA (1)...(19): siRNA sense strand
ggagagcaacugguucaua

SEQ ID NO: 921779 - RNA, 19 nt, Homo sapiens
  misc_RNA (1)...(19): siRNA sense strand
gaauacaucuaucuuuagc

SEQ ID NO: 921780 - RNA, 19 nt, Homo sapiens
  misc_RNA (1)...(19): siRNA sense strand
ggaaauccaacaaagaugu

SEQ ID NO: 921781 - RNA, 19 nt, Homo sapiens
  misc_RNA (1)...(19): siRNA sense strand
caacagauggaacauaugu

SEQ ID NO: 921782 - RNA, 19 nt, Homo sapiens
  misc_RNA (1)...(19): siRNA sense strand
ggagaugagugccauugca

SEQ ID NO: 921783 - RNA, 19 nt, Homo sapiens
  misc_RNA (1)...(19): siRNA sense strand
ggaagauccugagccauca

SEQ ID NO: 921784 - RNA, 19 nt, Homo sapiens
  misc_RNA (1)...(19): siRNA sense strand
agauagaccuguuugaaag

SEQ ID NO: 921785 - RNA, 19 nt, Homo sapiens
  misc_RNA (1)...(19): siRNA sense strand
ugucauccauccuuuaaau

SEQ ID NO: 921786 - RNA, 19 nt, Homo sapiens
  misc_RNA (1)...(19): siRNA sense strand
ggcaggagguucugucauc

SEQ ID NO: 921787 - RNA, 19 nt, Homo sapiens
  misc_RNA (1)...(19): siRNA sense strand
agcaacugguucauaauua

SEQ ID NO: 921788 - RNA, 19 nt, Homo sapiens
  misc_RNA (1)...(19): siRNA sense strand
cuuuaaaucugcacaugaa

SEQ ID NO: 921789 - RNA, 19 nt, Homo sapiens
  misc_RNA (1)...(19): siRNA sense strand
ccacuccguugaaucgaaa

SEQ ID NO: 921790 - RNA, 19 nt, Homo sapiens
  misc_RNA (1)...(19): siRNA sense strand
ugaaaugauugcuccuguu

SEQ ID NO: 921791 - RNA, 19 nt, Homo sapiens
  misc_RNA (1)...(19): siRNA sense strand
guuccucaaugaaaugauu

SEQ ID NO: 921792 - RNA, 19 nt, Homo sapiens
  misc_RNA (1)...(19): siRNA sense strand
agaaguuccucaaugaaau

SEQ ID NO: 921793 - RNA, 19 nt, Homo sapiens
  misc_RNA (1)...(19): siRNA sense strand
guggguagaggacguguua

SEQ ID NO: 921794 - RNA, 19 nt, Homo sapiens
  misc_RNA (1)...(19): siRNA sense strand
uagaggacguguuagacaa

SEQ ID NO: 921795 - RNA, 19 nt, Homo sapiens
  misc_RNA (1)...(19): siRNA sense strand
cuagacccauagauaaauu

SEQ ID NO: 921796 - RNA, 19 nt, Homo sapiens
  misc_RNA (1)...(19): siRNA sense strand
aaugauugcuccuguuaug

SEQ ID NO: 921797 - RNA, 19 nt, Homo sapiens
  misc_RNA (1)...(19): siRNA sense strand
gaaguuccucaaugaaaug

SEQ ID NO: 921798 - RNA, 19 nt, Homo sapiens
  misc_RNA (1)...(19): siRNA sense strand
ugaucaggauggcuuauau

SEQ ID NO: 921799 - RNA, 19 nt, Homo sapiens
  misc_RNA (1)...(19): siRNA sense strand
gcaagugccauggagauga

SEQ ID NO: 921800 - RNA, 19 nt, Homo sapiens
  misc_RNA (1)...(19): siRNA sense strand
gaggaauuccaucaauauu

SEQ ID NO: 921801 - RNA, 19 nt, Homo sapiens
  misc_RNA (1)...(19): siRNA sense strand
ccaaagcacggacaucaau

SEQ ID NO: 921802 - RNA, 19 nt, Homo sapiens
  misc_RNA (1)...(19): siRNA sense strand
gaacgggcacacagacaug

SEQ ID NO: 921803 - RNA, 19 nt, Homo sapiens
  misc_RNA (1)...(19): siRNA sense strand
uccaugaucgacuuuauua

SEQ ID NO: 921804 - RNA, 19 nt, Homo sapiens
  misc_RNA (1)...(19): siRNA sense strand
gaggagagcaacugguuca

SEQ ID NO: 921805 - RNA, 19 nt, Homo sapiens
  misc_RNA (1)...(19): siRNA sense strand
acaucuaucuuuagcucua

SEQ ID NO: 921806 - RNA, 19 nt, Homo sapiens
  misc_RNA (1)...(19): siRNA sense strand
gggaauugaauacaucuau

SEQ ID NO: 921807 - RNA, 19 nt, Homo sapiens
  misc_RNA (1)...(19): siRNA sense strand
aaacaaagaccaaguacac

SEQ ID NO: 921808 - RNA, 19 nt, Homo sapiens
  misc_RNA (1)...(19): siRNA sense strand
gcuugcauauccucacuau

SEQ ID NO: 921809 - RNA, 19 nt, Homo sapiens
  misc_RNA (1)...(19): siRNA sense strand
aagauagaccuguuugaaa

SEQ ID NO: 921810 - RNA, 19 nt, Homo sapiens
  misc_RNA (1)...(19): siRNA sense strand
ugaggaauuccaucaauau

SEQ ID NO: 921811 - RNA, 19 nt, Homo sapiens
  misc_RNA (1)...(19): siRNA sense strand
guucugucauccauccuuu

SEQ ID NO: 921812 - RNA, 19 nt, Homo sapiens
  misc_RNA (1)...(19): siRNA sense strand
ggcagaaauuugggaaaga

SEQ ID NO: 921813 - RNA, 19 nt, Homo sapiens
  misc_RNA (1)...(19): siRNA sense strand
guucagacuucuaugacau

SEQ ID NO: 921814 - RNA, 19 nt, Homo sapiens
  misc_RNA (1)...(19): siRNA sense strand
caggaaauccaacaaagau

SEQ ID NO: 921815 - RNA, 19 nt, Homo sapiens
  misc_RNA (1)...(19): siRNA sense strand
aaucgaacacuucuugaaa

SEQ ID NO: 921816 - RNA, 19 nt, Homo sapiens
  misc_RNA (1)...(19): siRNA sense strand
gauauauaauggagagacu

SEQ ID NO: 921817 - RNA, 19 nt, Homo sapiens
  misc_RNA (1)...(19): siRNA sense strand
cacaggaaauccaacaaag

SEQ ID NO: 921818 - RNA, 19 nt, Homo sapiens
  misc_RNA (1)...(19): siRNA sense strand
gcucaguaauguacaucga

SEQ ID NO: 921819 - RNA, 19 nt, Homo sapiens
  misc_RNA (1)...(19): siRNA sense strand
gcaguagaagguggcaaua

SEQ ID NO: 921820 - RNA, 19 nt, Homo sapiens
  misc_RNA (1)...(19): siRNA sense strand
guuaugagggucaauuaug

SEQ ID NO: 921821 - RNA, 19 nt, Homo sapiens
  misc_RNA (1)...(19): siRNA sense strand
gaaauuugggaaagaugug

SEQ ID NO: 921822 - RNA, 19 nt, Homo sapiens
  misc_RNA (1)...(19): siRNA sense strand
gauagaccuguuugaaaga

SEQ ID NO: 921823 - RNA, 19 nt, Homo sapiens
  misc_RNA (1)...(19): siRNA sense strand
gauuucaauuccuccguau

SEQ ID NO: 921824 - RNA, 19 nt, Homo sapiens
  misc_RNA (1)...(19): siRNA sense strand
gcacacagacaugauugau

SEQ ID NO: 921825 - RNA, 19 nt, Homo sapiens
  misc_RNA (1)...(19): siRNA sense strand
guagaggacguguuagaca

SEQ ID NO: 921826 - RNA, 19 nt, Homo sapiens
  misc_RNA (1)...(19): siRNA sense strand
caagugccauggagaugag

SEQ ID NO: 921827 - RNA, 19 nt, Homo sapiens
  misc_RNA (1)...(19): siRNA sense strand
cauagagugugcagcaagu

SEQ ID NO: 921828 - RNA, 19 nt, Homo sapiens
  misc_RNA (1)...(19): siRNA sense strand
gggauugugcccucuguga

SEQ ID NO: 921829 - RNA, 19 nt, Homo sapiens
  misc_RNA (1)...(19): siRNA sense strand
acacaggaaauccaacaaa

SEQ ID NO: 921830 - RNA, 19 nt, Homo sapiens
  misc_RNA (1)...(19): siRNA sense strand
uagacaaguucaugaggau

SEQ ID NO: 921831 - RNA, 19 nt, Homo sapiens
  misc_RNA (1)...(19): siRNA sense strand
uggcuuauaugagaaacuu

SEQ ID NO: 921832 - RNA, 19 nt, Homo sapiens
  misc_RNA (1)...(19): siRNA sense strand
gaucaggauggcuuauaug

SEQ ID NO: 921833 - RNA, 19 nt, Homo sapiens
  misc_RNA (1)...(19): siRNA sense strand
cauuaacaguauugggauu

SEQ ID NO: 921834 - RNA, 19 nt, Homo sapiens
  misc_RNA (1)...(19): siRNA sense strand
ggacguguuagacaaguuc

SEQ ID NO: 921835 - RNA, 19 nt, Homo sapiens
  misc_RNA (1)...(19): siRNA sense strand
guacacaggaaauccaaca

SEQ ID NO: 921836 - RNA, 19 nt, Homo sapiens
  misc_RNA (1)...(19): siRNA sense strand
gauugugcccucugugaga

SEQ ID NO: 921837 - RNA, 19 nt, Homo sapiens
  misc_RNA (1)...(19): siRNA sense strand
gagaaaugccccucuauca

SEQ ID NO: 921838 - RNA, 19 nt, Homo sapiens
  misc_RNA (1)...(19): siRNA sense strand
aucaacagauggaacauau

SEQ ID NO: 921839 - RNA, 19 nt, Homo sapiens
  misc_RNA (1)...(19): siRNA sense strand
cggcagaaauuugggaaag

SEQ ID NO: 921840 - RNA, 19 nt, Homo sapiens
  misc_RNA (1)...(19): siRNA sense strand
cuuuagcucuagacccaua

SEQ ID NO: 921841 - RNA, 19 nt, Homo sapiens
  misc_RNA (1)...(19): siRNA sense strand
cggaauugguggcacuuca

SEQ ID NO: 921842 - RNA, 19 nt, Homo sapiens
  misc_RNA (1)...(19): siRNA sense strand
ggccaaagcacggacauca

SEQ ID NO: 921843 - RNA, 19 nt, Homo sapiens
  misc_RNA (1)...(19): siRNA sense strand
ggucaauuauggccaaagc

SEQ ID NO: 921844 - RNA, 19 nt, Homo sapiens
  misc_RNA (1)...(19): siRNA sense strand
uuaugagggucaauuaugg

SEQ ID NO: 921845 - RNA, 19 nt, Homo sapiens
  misc_RNA (1)...(19): siRNA sense strand
gcgcuauggauuucaauuc

SEQ ID NO: 921846 - RNA, 19 nt, Homo sapiens
  misc_RNA (1)...(19): siRNA sense strand
cgacuuuauuaccucaaug

SEQ ID NO: 921847 - RNA, 19 nt, Homo sapiens
  misc_RNA (1)...(19): siRNA sense strand
agaccuguuugaaagagaa

SEQ ID NO: 921848 - RNA, 19 nt, Homo sapiens
  misc_RNA (1)...(19): siRNA sense strand
gccacuccguugaaucgaa

SEQ ID NO: 921849 - RNA, 19 nt, Homo sapiens
  misc_RNA (1)...(19): siRNA sense strand
uaaucgaacacuucuugaa

SEQ ID NO: 921850 - RNA, 19 nt, Homo sapiens
  misc_RNA (1)...(19): siRNA sense strand
ggguagaggacguguuaga

SEQ ID NO: 921851 - RNA, 19 nt, Homo sapiens
  misc_RNA (1)...(19): siRNA sense strand
ggaacgggcacacagacau

SEQ ID NO: 921852 - RNA, 19 nt, Homo sapiens
  misc_RNA (1)...(19): siRNA sense strand
gagcaaaucucaaacauca

SEQ ID NO: 921853 - RNA, 19 nt, Homo sapiens
  misc_RNA (1)...(19): siRNA sense strand
cgaaagcggucucgaagua

SEQ ID NO: 921854 - RNA, 19 nt, Homo sapiens
  misc_RNA (1)...(19): siRNA sense strand
aaagaaauguccacaagua

SEQ ID NO: 921855 - RNA, 19 nt, Homo sapiens
  misc_RNA (1)...(19): siRNA sense strand
ugaaucaucuccugaagua

SEQ ID NO: 921856 - RNA, 19 nt, Homo sapiens
  misc_RNA (1)...(19): siRNA sense strand
ccacagaucugauacuuca

SEQ ID NO: 921857 - RNA, 19 nt, Homo sapiens
  misc_RNA (1)...(19): siRNA sense strand
acacagcaguucugaguua

SEQ ID NO: 921858 - RNA, 19 nt, Homo sapiens
  misc_RNA (1)...(19): siRNA sense strand
gaaagaagcgggucagaau

SEQ ID NO: 921859 - RNA, 19 nt, Homo sapiens
  misc_RNA (1)...(19): siRNA sense strand
cgacgcaggucucguagua

SEQ ID NO: 921860 - RNA, 19 nt, Homo sapiens
  misc_RNA (1)...(19): siRNA sense strand
gcauccagaucuccaauaa

SEQ ID NO: 921861 - RNA, 19 nt, Homo sapiens
  misc_RNA (1)...(19): siRNA sense strand
gaaacucgcucuagaacuc

SEQ ID NO: 921862 - RNA, 19 nt, Homo sapiens
  misc_RNA (1)...(19): siRNA sense strand
gguaaacgguccuuaacaa

SEQ ID NO: 921863 - RNA, 19 nt, Homo sapiens
  misc_RNA (1)...(19): siRNA sense strand
cgaggaagaucccgcagua

SEQ ID NO: 921864 - RNA, 19 nt, Homo sapiens
  misc_RNA (1)...(19): siRNA sense strand
gcagggaugucuucaaauc

SEQ ID NO: 921865 - RNA, 19 nt, Homo sapiens
  misc_RNA (1)...(19): siRNA sense strand
aagccaagaugaagaguua

SEQ ID NO: 921866 - RNA, 19 nt, Homo sapiens
  misc_RNA (1)...(19): siRNA sense strand
cagaacaucucaaagaaga

SEQ ID NO: 921867 - RNA, 19 nt, Homo sapiens
  misc_RNA (1)...(19): siRNA sense strand
gagcagaaauacccagaga

SEQ ID NO: 921868 - RNA, 19 nt, Homo sapiens
  misc_RNA (1)...(19): siRNA sense strand
ggaaguaguucugaucguu

SEQ ID NO: 921869 - RNA, 19 nt, Homo sapiens
  misc_RNA (1)...(19): siRNA sense strand
uggaucaccuuuagaauuu

SEQ ID NO: 921870 - RNA, 19 nt, Homo sapiens
  misc_RNA (1)...(19): siRNA sense strand
gaagugagacagagucauu

SEQ ID NO: 921871 - RNA, 19 nt, Homo sapiens
  misc_RNA (1)...(19): siRNA sense strand
gcaauaauaucaccaagac

SEQ ID NO: 921872 - RNA, 19 nt, Homo sapiens
  misc_RNA (1)...(19): siRNA sense strand
gagcaggucucucucuuca

SEQ ID NO: 921873 - RNA, 19 nt, Homo sapiens
  misc_RNA (1)...(19): siRNA sense strand
caaagugaaggcaauaaua

SEQ ID NO: 921874 - RNA, 19 nt, Homo sapiens
  misc_RNA (1)...(19): siRNA sense strand
ggacucgaauucucucuug

SEQ ID NO: 921875 - RNA, 19 nt, Homo sapiens
  misc_RNA (1)...(19): siRNA sense strand
gagaugcgccuuucaguga

SEQ ID NO: 921876 - RNA, 19 nt, Homo sapiens
  misc_RNA (1)...(19): siRNA sense strand
gaacagcaaauucaggaaa

SEQ ID NO: 921877 - RNA, 19 nt, Homo sapiens
  misc_RNA (1)...(19): siRNA sense strand
gaacauaaagaacugucua

SEQ ID NO: 921878 - RNA, 19 nt, Homo sapiens
  misc_RNA (1)...(19): siRNA sense strand
uagaacaccucaaagaaga

SEQ ID NO: 921879 - RNA, 19 nt, Homo sapiens
  misc_RNA (1)...(19): siRNA sense strand
uuaaucagcuggaaacaga

SEQ ID NO: 921880 - RNA, 19 nt, Homo sapiens
  misc_RNA (1)...(19): siRNA sense strand
ccaaagagcaaacguaaau

SEQ ID NO: 921881 - RNA, 19 nt, Homo sapiens
  misc_RNA (1)...(19): siRNA sense strand
ccagauuguugccaagaua

SEQ ID NO: 921882 - RNA, 19 nt, Homo sapiens
  misc_RNA (1)...(19): siRNA sense strand
gcccagaaaugaagaaauc

SEQ ID NO: 921883 - RNA, 19 nt, Homo sapiens
  misc_RNA (1)...(19): siRNA sense strand
uaggauggcuccagcauug

SEQ ID NO: 921884 - RNA, 19 nt, Homo sapiens
  misc_RNA (1)...(19): siRNA sense strand
uaauggaggugguagagaa

SEQ ID NO: 921885 - RNA, 19 nt, Homo sapiens
  misc_RNA (1)...(19): siRNA sense strand
gcacuugcccugacagcua

SEQ ID NO: 921886 - RNA, 19 nt, Homo sapiens
  misc_RNA (1)...(19): siRNA sense strand
agacaaagauaaagacaag

SEQ ID NO: 921887 - RNA, 19 nt, Homo sapiens
  misc_RNA (1)...(19): siRNA sense strand
gaagaaaggccugcugugu

SEQ ID NO: 921888 - RNA, 19 nt, Homo sapiens
  misc_RNA (1)...(19): siRNA sense strand
ggccaaauccugucucauu

SEQ ID NO: 921889 - RNA, 19 nt, Homo sapiens
  misc_RNA (1)...(19): siRNA sense strand
caaagcagaagaagaagaa

SEQ ID NO: 921890 - RNA, 19 nt, Homo sapiens
  misc_RNA (1)...(19): siRNA sense strand
aaagaugguuuacccagaa

SEQ ID NO: 921891 - RNA, 19 nt, Homo sapiens
  misc_RNA (1)...(19): siRNA sense strand
ggacacagcaguucugagu

SEQ ID NO: 921892 - RNA, 19 nt, Homo sapiens
  misc_RNA (1)...(19): siRNA sense strand
agacaaauuuagucccuuu

SEQ ID NO: 921893 - RNA, 19 nt, Homo sapiens
  misc_RNA (1)...(19): siRNA sense strand
caaagucacucagggucua

SEQ ID NO: 921894 - RNA, 19 nt, Homo sapiens
  misc_RNA (1)...(19): siRNA sense strand
gaagaagcagguccaauuc

SEQ ID NO: 921895 - RNA, 19 nt, Homo sapiens
  misc_RNA (1)...(19): siRNA sense strand
gagcaaacguaaaucuaag

SEQ ID NO: 921896 - RNA, 19 nt, Homo sapiens
  misc_RNA (1)...(19): siRNA sense strand
uggaagaucucacucuaga

SEQ ID NO: 921897 - RNA, 19 nt, Homo sapiens
  misc_RNA (1)...(19): siRNA sense strand
gacagcaaaucucgacuau

SEQ ID NO: 921898 - RNA, 19 nt, Homo sapiens
  misc_RNA (1)...(19): siRNA sense strand
ggaaugaaagauauaccua

SEQ ID NO: 921899 - RNA, 19 nt, Homo sapiens
  misc_RNA (1)...(19): siRNA sense strand
guugaaaucuggaaugucu

SEQ ID NO: 921900 - RNA, 19 nt, Homo sapiens
  misc_RNA (1)...(19): siRNA sense strand
gaaacaccgccaagacaaa

SEQ ID NO: 921901 - RNA, 19 nt, Homo sapiens
  misc_RNA (1)...(19): siRNA sense strand
aaaucucgcuugucuuuga

SEQ ID NO: 921902 - RNA, 19 nt, Homo sapiens
  misc_RNA (1)...(19): siRNA sense strand
cgacgaagaucccggucaa

SEQ ID NO: 921903 - RNA, 19 nt, Homo sapiens
  misc_RNA (1)...(19): siRNA sense strand
cagcaaaucucgacuaucc

SEQ ID NO: 921904 - RNA, 19 nt, Homo sapiens
  misc_RNA (1)...(19): siRNA sense strand
aaagaacaaucgacaagau

SEQ ID NO: 921905 - RNA, 19 nt, Homo sapiens
  misc_RNA (1)...(19): siRNA sense strand
gaauggaccguuucuuaau

SEQ ID NO: 921906 - RNA, 19 nt, Homo sapiens
  misc_RNA (1)...(19): siRNA sense strand
auaaagaacugucuaacuc

SEQ ID NO: 921907 - RNA, 19 nt, Homo sapiens
  misc_RNA (1)...(19): siRNA sense strand
gaccacagaucugauacuu

SEQ ID NO: 921908 - RNA, 19 nt, Homo sapiens
  misc_RNA (1)...(19): siRNA sense strand
ucuaaagacucacuaguuc

SEQ ID NO: 921909 - RNA, 19 nt, Homo sapiens
  misc_RNA (1)...(19): siRNA sense strand
ggaagaucccgcaguagaa

SEQ ID NO: 921910 - RNA, 19 nt, Homo sapiens
  misc_RNA (1)...(19): siRNA sense strand
gcacucaacaguuccagaa

SEQ ID NO: 921911 - RNA, 19 nt, Homo sapiens
  misc_RNA (1)...(19): siRNA sense strand
uuaaagaaauguccacaag

SEQ ID NO: 921912 - RNA, 19 nt, Homo sapiens
  misc_RNA (1)...(19): siRNA sense strand
gagacagagucauucagaa

SEQ ID NO: 921913 - RNA, 19 nt, Homo sapiens
  misc_RNA (1)...(19): siRNA sense strand
gcacacaacggccuaguag

SEQ ID NO: 921914 - RNA, 19 nt, Homo sapiens
  misc_RNA (1)...(19): siRNA sense strand
ccaagccaaucuaggauga

SEQ ID NO: 921915 - RNA, 19 nt, Homo sapiens
  misc_RNA (1)...(19): siRNA sense strand
gaaagaacaaucgacaaga

SEQ ID NO: 921916 - RNA, 19 nt, Homo sapiens
  misc_RNA (1)...(19): siRNA sense strand
ugaauggaccguuucuuaa

SEQ ID NO: 921917 - RNA, 19 nt, Homo sapiens
  misc_RNA (1)...(19): siRNA sense strand
gaaaggacaaucucaaacu

SEQ ID NO: 921918 - RNA, 19 nt, Homo sapiens
  misc_RNA (1)...(19): siRNA sense strand
agaagaagcagguccaauu

SEQ ID NO: 921919 - RNA, 19 nt, Homo sapiens
  misc_RNA (1)...(19): siRNA sense strand
guucaucuccucauccuaa

SEQ ID NO: 921920 - RNA, 19 nt, Homo sapiens
  misc_RNA (1)...(19): siRNA sense strand
aaucuaggaugaccucuga

SEQ ID NO: 921921 - RNA, 19 nt, Homo sapiens
  misc_RNA (1)...(19): siRNA sense strand
guccagaucucgaacuuca

SEQ ID NO: 921922 - RNA, 19 nt, Homo sapiens
  misc_RNA (1)...(19): siRNA sense strand
gggauccucucaagaacuu

SEQ ID NO: 921923 - RNA, 19 nt, Homo sapiens
  misc_RNA (1)...(19): siRNA sense strand
ggucaucuccagaaacaaa

SEQ ID NO: 921924 - RNA, 19 nt, Homo sapiens
  misc_RNA (1)...(19): siRNA sense strand
ggagggagaugcgccuuuc

SEQ ID NO: 921925 - RNA, 19 nt, Homo sapiens
  misc_RNA (1)...(19): siRNA sense strand
aaacgguccuuaacaagau

SEQ ID NO: 921926 - RNA, 19 nt, Homo sapiens
  misc_RNA (1)...(19): siRNA sense strand
gaucaucuccagagguuga

SEQ ID NO: 921927 - RNA, 19 nt, Homo sapiens
  misc_RNA (1)...(19): siRNA sense strand
gggagaagcgaaugugauu

SEQ ID NO: 921928 - RNA, 19 nt, Homo sapiens
  misc_RNA (1)...(19): siRNA sense strand
ggaucaccuuuagaauuua

SEQ ID NO: 921929 - RNA, 19 nt, Homo sapiens
  misc_RNA (1)...(19): siRNA sense strand
cagggucuauuucaccaua

SEQ ID NO: 921930 - RNA, 19 nt, Homo sapiens
  misc_RNA (1)...(19): siRNA sense strand
caccuaaacagaaaucuaa

SEQ ID NO: 921931 - RNA, 19 nt, Homo sapiens
  misc_RNA (1)...(19): siRNA sense strand
gcagaaauacccagagaag

SEQ ID NO: 921932 - RNA, 19 nt, Homo sapiens
  misc_RNA (1)...(19): siRNA sense strand
aagaaaagcucaaagaaga

SEQ ID NO: 921933 - RNA, 19 nt, Homo sapiens
  misc_RNA (1)...(19): siRNA sense strand
gcacuaagacaaccucaag

SEQ ID NO: 921934 - RNA, 19 nt, Homo sapiens
  misc_RNA (1)...(19): siRNA sense strand
agaacacccucgagagaaa

SEQ ID NO: 921935 - RNA, 19 nt, Homo sapiens
  misc_RNA (1)...(19): siRNA sense strand
ggagaacagcuuuggauca

SEQ ID NO: 921936 - RNA, 19 nt, Homo sapiens
  misc_RNA (1)...(19): siRNA sense strand
uggaggagaugauggaaga

SEQ ID NO: 921937 - RNA, 19 nt, Homo sapiens
  misc_RNA (1)...(19): siRNA sense strand
aaaggacaaucucaaacuu

SEQ ID NO: 921938 - RNA, 19 nt, Homo sapiens
  misc_RNA (1)...(19): siRNA sense strand
ccaagaaacguaagcauag

SEQ ID NO: 921939 - RNA, 19 nt, Homo sapiens
  misc_RNA (1)...(19): siRNA sense strand
cagaucaccuggaaugcuu

SEQ ID NO: 921940 - RNA, 19 nt, Homo sapiens
  misc_RNA (1)...(19): siRNA sense strand
ucauuugucuucagaacuu

SEQ ID NO: 921941 - RNA, 19 nt, Homo sapiens
  misc_RNA (1)...(19): siRNA sense strand
guucaaaguugcccuggau

SEQ ID NO: 921942 - RNA, 19 nt, Homo sapiens
  misc_RNA (1)...(19): siRNA sense strand
caaccuaaagcuaaaucua

SEQ ID NO: 921943 - RNA, 19 nt, Homo sapiens
  misc_RNA (1)...(19): siRNA sense strand
ugaaagauauaccuagaac

SEQ ID NO: 921944 - RNA, 19 nt, Homo sapiens
  misc_RNA (1)...(19): siRNA sense strand
aggcagggaugucuucaaa

SEQ ID NO: 921945 - RNA, 19 nt, Homo sapiens
  misc_RNA (1)...(19): siRNA sense strand
ggagacugcugaaucaaaa

SEQ ID NO: 921946 - RNA, 19 nt, Homo sapiens
  misc_RNA (1)...(19): siRNA sense strand
ggaggucgguccaggucuu

SEQ ID NO: 921947 - RNA, 19 nt, Homo sapiens
  misc_RNA (1)...(19): siRNA sense strand
agacagagcccaucuaggu

SEQ ID NO: 921948 - RNA, 19 nt, Homo sapiens
  misc_RNA (1)...(19): siRNA sense strand
agaagcagguccaauucaa

SEQ ID NO: 921949 - RNA, 19 nt, Homo sapiens
  misc_RNA (1)...(19): siRNA sense strand
cgacguagguccagaucuc

SEQ ID NO: 921950 - RNA, 19 nt, Homo sapiens
  misc_RNA (1)...(19): siRNA sense strand
ccaguuggcagaauuaaau

SEQ ID NO: 921951 - RNA, 19 nt, Homo sapiens
  misc_RNA (1)...(19): siRNA sense strand
uugaauggaccguuucuua

SEQ ID NO: 921952 - RNA, 19 nt, Homo sapiens
  misc_RNA (1)...(19): siRNA sense strand
caacagauacuauaaggaa

SEQ ID NO: 921953 - RNA, 19 nt, Homo sapiens
  misc_RNA (1)...(19): siRNA sense strand
gcaaagacugcaaguuuaa

SEQ ID NO: 921954 - RNA, 19 nt, Homo sapiens
  misc_RNA (1)...(19): siRNA sense strand
ggacaucaaugaccagauc

SEQ ID NO: 921955 - RNA, 19 nt, Homo sapiens
  misc_RNA (1)...(19): siRNA sense strand
gaaauuccgcugucagaaa

SEQ ID NO: 921956 - RNA, 19 nt, Homo sapiens
  misc_RNA (1)...(19): siRNA sense strand
ugagaaagcggcacuauug

SEQ ID NO: 921957 - RNA, 19 nt, Homo sapiens
  misc_RNA (1)...(19): siRNA sense strand
ccauugagcuggacaagau

SEQ ID NO: 921958 - RNA, 19 nt, Homo sapiens
  misc_RNA (1)...(19): siRNA sense strand
ugaagcagcuggccuguuc

SEQ ID NO: 921959 - RNA, 19 nt, Homo sapiens
  misc_RNA (1)...(19): siRNA sense strand
caucucagcuggagccauu

SEQ ID NO: 921960 - RNA, 19 nt, Homo sapiens
  misc_RNA (1)...(19): siRNA sense strand
gaacaacacgaccaacaga

SEQ ID NO: 921961 - RNA, 19 nt, Homo sapiens
  misc_RNA (1)...(19): siRNA sense strand
gaaaguguuuguggugaug

SEQ ID NO: 921962 - RNA, 19 nt, Homo sapiens
  misc_RNA (1)...(19): siRNA sense strand
gcaaguguaucacgcucuu

SEQ ID NO: 921963 - RNA, 19 nt, Homo sapiens
  misc_RNA (1)...(19): siRNA sense strand
gaccagaaguucccugagu

SEQ ID NO: 921964 - RNA, 19 nt, Homo sapiens
  misc_RNA (1)...(19): siRNA sense strand
ugagacaccuucacuucaa

SEQ ID NO: 921965 - RNA, 19 nt, Homo sapiens
  misc_RNA (1)...(19): siRNA sense strand
gggaggcccuuaucaaugg

SEQ ID NO: 921966 - RNA, 19 nt, Homo sapiens
  misc_RNA (1)...(19): siRNA sense strand
caagaacauuguccacugu

SEQ ID NO: 921967 - RNA, 19 nt, Homo sapiens
  misc_RNA (1)...(19): siRNA sense strand
guaucacgcucuuccagaa

SEQ ID NO: 921968 - RNA, 19 nt, Homo sapiens
  misc_RNA (1)...(19): siRNA sense strand
aaacugcgcuucccuacca

SEQ ID NO: 921969 - RNA, 19 nt, Homo sapiens
  misc_RNA (1)...(19): siRNA sense strand
aggguugggugguucauua

SEQ ID NO: 921970 - RNA, 19 nt, Homo sapiens
  misc_RNA (1)...(19): siRNA sense strand
caagagcgcccucauggau

SEQ ID NO: 921971 - RNA, 19 nt, Homo sapiens
  misc_RNA (1)...(19): siRNA sense strand
acagucagauccaagagaa

SEQ ID NO: 921972 - RNA, 19 nt, Homo sapiens
  misc_RNA (1)...(19): siRNA sense strand
ucaaugaccagauccagaa

SEQ ID NO: 921973 - RNA, 19 nt, Homo sapiens
  misc_RNA (1)...(19): siRNA sense strand
acaagaugcugcucuccaa

SEQ ID NO: 921974 - RNA, 19 nt, Homo sapiens
  misc_RNA (1)...(19): siRNA sense strand
ggcaucagcagacccauuu

SEQ ID NO: 921975 - RNA, 19 nt, Homo sapiens
  misc_RNA (1)...(19): siRNA sense strand
aaauuccgcugucagaaau

SEQ ID NO: 921976 - RNA, 19 nt, Homo sapiens
  misc_RNA (1)...(19): siRNA sense strand
cgaccaacagauacuauaa

SEQ ID NO: 921977 - RNA, 19 nt, Homo sapiens
  misc_RNA (1)...(19): siRNA sense strand
ggaggaggccaccgauuuc

SEQ ID NO: 921978 - RNA, 19 nt, Homo sapiens
  misc_RNA (1)...(19): siRNA sense strand
acaacacgaccaacagaua

SEQ ID NO: 921979 - RNA, 19 nt, Homo sapiens
  misc_RNA (1)...(19): siRNA sense strand
gccgggacguggcaguuaa

SEQ ID NO: 921980 - RNA, 19 nt, Homo sapiens
  misc_RNA (1)...(19): siRNA sense strand
caccuucacuucaagaaca

SEQ ID NO: 921981 - RNA, 19 nt, Homo sapiens
  misc_RNA (1)...(19): siRNA sense strand
ccacccgcgucccuaauga

SEQ ID NO: 921982 - RNA, 19 nt, Homo sapiens
  misc_RNA (1)...(19): siRNA sense strand
acaaggacacgcugagaaa

SEQ ID NO: 921983 - RNA, 19 nt, Homo sapiens
  misc_RNA (1)...(19): siRNA sense strand
uaaugaggguggugcaauc

SEQ ID NO: 921984 - RNA, 19 nt, Homo sapiens
  misc_RNA (1)...(19): siRNA sense strand
gcaccaacccacacugcuu

SEQ ID NO: 921985 - RNA, 19 nt, Homo sapiens
  misc_RNA (1)...(19): siRNA sense strand
ucagaggacuccgguguca

SEQ ID NO: 921986 - RNA, 19 nt, Homo sapiens
  misc_RNA (1)...(19): siRNA sense strand
ggaagaugggagagcgaua

SEQ ID NO: 921987 - RNA, 19 nt, Homo sapiens
  misc_RNA (1)...(19): siRNA sense strand
gcuacagcguggacaaauc

SEQ ID NO: 921988 - RNA, 19 nt, Homo sapiens
  misc_RNA (1)...(19): siRNA sense strand
ggagggaaacaccggaaga

SEQ ID NO: 921989 - RNA, 19 nt, Homo sapiens
  misc_RNA (1)...(19): siRNA sense strand
gcgccugccuucugugauc

SEQ ID NO: 921990 - RNA, 19 nt, Homo sapiens
  misc_RNA (1)...(19): siRNA sense strand
uggaggaggccaccgauuu

SEQ ID NO: 921991 - RNA, 19 nt, Homo sapiens
  misc_RNA (1)...(19): siRNA sense strand
gaagagcugagccguagca

SEQ ID NO: 921992 - RNA, 19 nt, Homo sapiens
  misc_RNA (1)...(19): siRNA sense strand
cgagacgccugagaaagug

SEQ ID NO: 921993 - RNA, 19 nt, Homo sapiens
  misc_RNA (1)...(19): siRNA sense strand
cgccuggacugcaagugua

SEQ ID NO: 921994 - RNA, 19 nt, Homo sapiens
  misc_RNA (1)...(19): siRNA sense strand
caacaaggacacgcugaga

SEQ ID NO: 921995 - RNA, 19 nt, Homo sapiens
  misc_RNA (1)...(19): siRNA sense strand
gcggagcgcaucaguguuc

SEQ ID NO: 921996 - RNA, 19 nt, Homo sapiens
  misc_RNA (1)...(19): siRNA sense strand
gugaagcugugugacuuug

SEQ ID NO: 921997 - RNA, 19 nt, Homo sapiens
  misc_RNA (1)...(19): siRNA sense strand
cagugggcgugaucaugua

SEQ ID NO: 921998 - RNA, 19 nt, Homo sapiens
  misc_RNA (1)...(19): siRNA sense strand
caacacgaccaacagauac

SEQ ID NO: 921999 - RNA, 19 nt, Homo sapiens
  misc_RNA (1)...(19): siRNA sense strand
gaagaugggagagcgauac

SEQ ID NO: 922000 - RNA, 19 nt, Homo sapiens
  misc_RNA (1)...(19): siRNA sense strand
agcgauacaucacgcauga

SEQ ID NO: 922001 - RNA, 19 nt, Homo sapiens
  misc_RNA (1)...(19): siRNA sense strand
ugacaagagcgcccucaug

SEQ ID NO: 922002 - RNA, 19 nt, Homo sapiens
  misc_RNA (1)...(19): siRNA sense strand
gacaagauccugcuuuuca

SEQ ID NO: 922003 - RNA, 19 nt, Homo sapiens
  misc_RNA (1)...(19): siRNA sense strand
gcaccuucccuuucaacga

SEQ ID NO: 922004 - RNA, 19 nt, Homo sapiens
  misc_RNA (1)...(19): siRNA sense strand
agaacauuguccacuguga

SEQ ID NO: 922005 - RNA, 19 nt, Homo sapiens
  misc_RNA (1)...(19): siRNA sense strand
gagacaccuucacuucaag

SEQ ID NO: 922006 - RNA, 19 nt, Homo sapiens
  misc_RNA (1)...(19): siRNA sense strand
agaugauccuguccaguga

SEQ ID NO: 922007 - RNA, 19 nt, Homo sapiens
  misc_RNA (1)...(19): siRNA sense strand
gcugcgggcugaacuacca

SEQ ID NO: 922008 - RNA, 19 nt, Homo sapiens
  misc_RNA (1)...(19): siRNA sense strand
uguccacugugacuugaaa

SEQ ID NO: 922009 - RNA, 19 nt, Homo sapiens
  misc_RNA (1)...(19): siRNA sense strand
caccaacccacacugcuuu

SEQ ID NO: 922010 - RNA, 19 nt, Homo sapiens
  misc_RNA (1)...(19): siRNA sense strand
ggaguccgcccagaacuuc

SEQ ID NO: 922011 - RNA, 19 nt, Homo sapiens
  misc_RNA (1)...(19): siRNA sense strand
ucucugagcaucucugugu

SEQ ID NO: 922012 - RNA, 19 nt, Homo sapiens
  misc_RNA (1)...(19): siRNA sense strand
cgauacaucacgcaugaga

SEQ ID NO: 922013 - RNA, 19 nt, Homo sapiens
  misc_RNA (1)...(19): siRNA sense strand
gcugugugacuuuggcuuu

SEQ ID NO: 922014 - RNA, 19 nt, Homo sapiens
  misc_RNA (1)...(19): siRNA sense strand
ggugaagcugugugacuuu

SEQ ID NO: 922015 - RNA, 19 nt, Homo sapiens
  misc_RNA (1)...(19): siRNA sense strand
guucgagacgccugagaaa

SEQ ID NO: 922016 - RNA, 19 nt, Homo sapiens
  misc_RNA (1)...(19): siRNA sense strand
ccaacagucagauccaaga

SEQ ID NO: 922017 - RNA, 19 nt, Homo sapiens
  misc_RNA (1)...(19): siRNA sense strand
gagaaagcggcacuauugg

SEQ ID NO: 922018 - RNA, 19 nt, Homo sapiens
  misc_RNA (1)...(19): siRNA sense strand
uggcuuugcucgcaucauc

SEQ ID NO: 922019 - RNA, 19 nt, Homo sapiens
  misc_RNA (1)...(19): siRNA sense strand
cagaacaacacgaccaaca

SEQ ID NO: 922020 - RNA, 19 nt, Homo sapiens
  misc_RNA (1)...(19): siRNA sense strand
agaaaguguuuguggugau

SEQ ID NO: 922021 - RNA, 19 nt, Homo sapiens
  misc_RNA (1)...(19): siRNA sense strand
ucagugggcgugaucaugu

SEQ ID NO: 922022 - RNA, 19 nt, Homo sapiens
  misc_RNA (1)...(19): siRNA sense strand
ccucuucugccucaucgua

SEQ ID NO: 922023 - RNA, 19 nt, Homo sapiens
  misc_RNA (1)...(19): siRNA sense strand
ucuucugccucaucguaua

SEQ ID NO: 922024 - RNA, 19 nt, Homo sapiens
  misc_RNA (1)...(19): siRNA sense strand
cgacacacgacgcggaaau

SEQ ID NO: 922025 - RNA, 19 nt, Homo sapiens
  misc_RNA (1)...(19): siRNA sense strand
ccagaucuucccugacgaa

SEQ ID NO: 922026 - RNA, 19 nt, Homo sapiens
  misc_RNA (1)...(19): siRNA sense strand
ucuacggccuuuacgacaa

SEQ ID NO: 922027 - RNA, 19 nt, Homo sapiens
  misc_RNA (1)...(19): siRNA sense strand
gaccaacagauacuauaag

SEQ ID NO: 922028 - RNA, 19 nt, Homo sapiens
  misc_RNA (1)...(19): siRNA sense strand
ggaggcccuuaucaaugga

SEQ ID NO: 922029 - RNA, 19 nt, Homo sapiens
  misc_RNA (1)...(19): siRNA sense strand
ucgagacgccugagaaagu

SEQ ID NO: 922030 - RNA, 19 nt, Homo sapiens
  misc_RNA (1)...(19): siRNA sense strand
aacccacacugcuuugaga

SEQ ID NO: 922031 - RNA, 19 nt, Homo sapiens
  misc_RNA (1)...(19): siRNA sense strand
ccuuaucaauggagaugug

SEQ ID NO: 922032 - RNA, 19 nt, Homo sapiens
  misc_RNA (1)...(19): siRNA sense strand
cuacggccuuuacgacaag

SEQ ID NO: 922033 - RNA, 19 nt, Homo sapiens
  misc_RNA (1)...(19): siRNA sense strand
gcaguuugcagcagagcau

SEQ ID NO: 922034 - RNA, 19 nt, Homo sapiens
  misc_RNA (1)...(19): siRNA sense strand
gaggaggccaccgauuuca

SEQ ID NO: 922035 - RNA, 19 nt, Homo sapiens
  misc_RNA (1)...(19): siRNA sense strand
uggcggagcgcaucagugu

SEQ ID NO: 922036 - RNA, 19 nt, Homo sapiens
  misc_RNA (1)...(19): siRNA sense strand
cagcggcaccuucccuuuc

SEQ ID NO: 922037 - RNA, 19 nt, Homo sapiens
  misc_RNA (1)...(19): siRNA sense strand
ccgaggugcugcucaacca

SEQ ID NO: 922038 - RNA, 19 nt, Homo sapiens
  misc_RNA (1)...(19): siRNA sense strand
gauccugguggcuuugaga

SEQ ID NO: 922039 - RNA, 19 nt, Homo sapiens
  misc_RNA (1)...(19): siRNA sense strand
ggacauguuggagaugauc

SEQ ID NO: 922040 - RNA, 19 nt, Homo sapiens
  misc_RNA (1)...(19): siRNA sense strand
ucacugccaaugccaccua

SEQ ID NO: 922041 - RNA, 19 nt, Homo sapiens
  misc_RNA (1)...(19): siRNA sense strand
ccagaaguucccugagugu

SEQ ID NO: 922042 - RNA, 19 nt, Homo sapiens
  misc_RNA (1)...(19): siRNA sense strand
gcugagaaagcggcacuau

SEQ ID NO: 922043 - RNA, 19 nt, Homo sapiens
  misc_RNA (1)...(19): siRNA sense strand
gcgccuggacugcaagugu

SEQ ID NO: 922044 - RNA, 19 nt, Homo sapiens
  misc_RNA (1)...(19): siRNA sense strand
gcaguuuggaguggucuau

SEQ ID NO: 922045 - RNA, 19 nt, Homo sapiens
  misc_RNA (1)...(19): siRNA sense strand
guccaacagucagauccaa

SEQ ID NO: 922046 - RNA, 19 nt, Homo sapiens
  misc_RNA (1)...(19): siRNA sense strand
cuacagcguggacaaaucu

SEQ ID NO: 922047 - RNA, 19 nt, Homo sapiens
  misc_RNA (1)...(19): siRNA sense strand
gaaaccagaaaacguguug

SEQ ID NO: 922048 - RNA, 19 nt, Homo sapiens
  misc_RNA (1)...(19): siRNA sense strand
gauccuguccagugagaag

SEQ ID NO: 922049 - RNA, 19 nt, Homo sapiens
  misc_RNA (1)...(19): siRNA sense strand
gggacauguuggagaugau

SEQ ID NO: 922050 - RNA, 19 nt, Homo sapiens
  misc_RNA (1)...(19): siRNA sense strand
gaacuuaucuccacucuga

SEQ ID NO: 922051 - RNA, 19 nt, Homo sapiens
  misc_RNA (1)...(19): siRNA sense strand
gagcauaucuaccaacuua

SEQ ID NO: 922052 - RNA, 19 nt, Homo sapiens
  misc_RNA (1)...(19): siRNA sense strand
ggaaugacaucucuuagua

SEQ ID NO: 922053 - RNA, 19 nt, Homo sapiens
  misc_RNA (1)...(19): siRNA sense strand
guaaagagauagaugauga

SEQ ID NO: 922054 - RNA, 19 nt, Homo sapiens
  misc_RNA (1)...(19): siRNA sense strand
guaaaggacuucauaaugu

SEQ ID NO: 922055 - RNA, 19 nt, Homo sapiens
  misc_RNA (1)...(19): siRNA sense strand
ucaggcagcugcucaauua

SEQ ID NO: 922056 - RNA, 19 nt, Homo sapiens
  misc_RNA (1)...(19): siRNA sense strand
agaaaggacuggucacuua

SEQ ID NO: 922057 - RNA, 19 nt, Homo sapiens
  misc_RNA (1)...(19): siRNA sense strand
gcaguuggcuguuuaugaa

SEQ ID NO: 922058 - RNA, 19 nt, Homo sapiens
  misc_RNA (1)...(19): siRNA sense strand
gcuagaggcuuauguuaaa

SEQ ID NO: 922059 - RNA, 19 nt, Homo sapiens
  misc_RNA (1)...(19): siRNA sense strand
ugaagaaugucgcaauaua

SEQ ID NO: 922060 - RNA, 19 nt, Homo sapiens
  misc_RNA (1)...(19): siRNA sense strand
caaagcaguuggcuguuua

SEQ ID NO: 922061 - RNA, 19 nt, Homo sapiens
  misc_RNA (1)...(19): siRNA sense strand
caaauugucucgaauacuu

SEQ ID NO: 922062 - RNA, 19 nt, Homo sapiens
  misc_RNA (1)...(19): siRNA sense strand
gagauuagcaacugaauuu

SEQ ID NO: 922063 - RNA, 19 nt, Homo sapiens
  misc_RNA (1)...(19): siRNA sense strand
guagagggcuuacuagaug

SEQ ID NO: 922064 - RNA, 19 nt, Homo sapiens
  misc_RNA (1)...(19): siRNA sense strand
gagaauggcuuaaacuaca

SEQ ID NO: 922065 - RNA, 19 nt, Homo sapiens
  misc_RNA (1)...(19): siRNA sense strand
cauccuaacucagcuauua

SEQ ID NO: 922066 - RNA, 19 nt, Homo sapiens
  misc_RNA (1)...(19): siRNA sense strand
gcucagaucuuagagguuu

SEQ ID NO: 922067 - RNA, 19 nt, Homo sapiens
  misc_RNA (1)...(19): siRNA sense strand
gcugaagaauccugaauuu

SEQ ID NO: 922068 - RNA, 19 nt, Homo sapiens
  misc_RNA (1)...(19): siRNA sense strand
gaagaaugucgcaauauaa

SEQ ID NO: 922069 - RNA, 19 nt, Homo sapiens
  misc_RNA (1)...(19): siRNA sense strand
gaugaaaccuucggacuug

SEQ ID NO: 922070 - RNA, 19 nt, Homo sapiens
  misc_RNA (1)...(19): siRNA sense strand
ggaacuuguuugaagaaua

SEQ ID NO: 922071 - RNA, 19 nt, Homo sapiens
  misc_RNA (1)...(19): siRNA sense strand
guaaagugcucaaauuaag

SEQ ID NO: 922072 - RNA, 19 nt, Homo sapiens
  misc_RNA (1)...(19): siRNA sense strand
gaauuuggcuguggacuug

SEQ ID NO: 922073 - RNA, 19 nt, Homo sapiens
  misc_RNA (1)...(19): siRNA sense strand
guaaccaccucaacaacua

SEQ ID NO: 922074 - RNA, 19 nt, Homo sapiens
  misc_RNA (1)...(19): siRNA sense strand
gcaauuuccacaucauuua

SEQ ID NO: 922075 - RNA, 19 nt, Homo sapiens
  misc_RNA (1)...(19): siRNA sense strand
gaguaaagugcucaaauua

SEQ ID NO: 922076 - RNA, 19 nt, Homo sapiens
  misc_RNA (1)...(19): siRNA sense strand
uauaacagccugccuauuu

SEQ ID NO: 922077 - RNA, 19 nt, Homo sapiens
  misc_RNA (1)...(19): siRNA sense strand
ggucacagcugcccagguu

SEQ ID NO: 922078 - RNA, 19 nt, Homo sapiens
  misc_RNA (1)...(19): siRNA sense strand
cuacauggcuguggcauuu

SEQ ID NO: 922079 - RNA, 19 nt, Homo sapiens
  misc_RNA (1)...(19): siRNA sense strand
caauguuccuggcuucuua

SEQ ID NO: 922080 - RNA, 19 nt, Homo sapiens
  misc_RNA (1)...(19): siRNA sense strand
caaguuagcacuaugguaa

SEQ ID NO: 922081 - RNA, 19 nt, Homo sapiens
  misc_RNA (1)...(19): siRNA sense strand
auaaguggcucacagauaa

SEQ ID NO: 922082 - RNA, 19 nt, Homo sapiens
  misc_RNA (1)...(19): siRNA sense strand
ggaugacaaucgagaaauu

SEQ ID NO: 922083 - RNA, 19 nt, Homo sapiens
  misc_RNA (1)...(19): siRNA sense strand
caacaagaauugcucuaug

SEQ ID NO: 922084 - RNA, 19 nt, Homo sapiens
  misc_RNA (1)...(19): siRNA sense strand
gguauuagccuuacuacaa

SEQ ID NO: 922085 - RNA, 19 nt, Homo sapiens
  misc_RNA (1)...(19): siRNA sense strand
gaugugaucccaccuaauu

SEQ ID NO: 922086 - RNA, 19 nt, Homo sapiens
  misc_RNA (1)...(19): siRNA sense strand
ucagaagacugcaguagaa

SEQ ID NO: 922087 - RNA, 19 nt, Homo sapiens
  misc_RNA (1)...(19): siRNA sense strand
ggauaaagaucgccugaag

SEQ ID NO: 922088 - RNA, 19 nt, Homo sapiens
  misc_RNA (1)...(19): siRNA sense strand
guauuagccuuacuacaaa

SEQ ID NO: 922089 - RNA, 19 nt, Homo sapiens
  misc_RNA (1)...(19): siRNA sense strand
caauuucacuggaguaaug

SEQ ID NO: 922090 - RNA, 19 nt, Homo sapiens
  misc_RNA (1)...(19): siRNA sense strand
gcacagcuacugauugauu

SEQ ID NO: 922091 - RNA, 19 nt, Homo sapiens
  misc_RNA (1)...(19): siRNA sense strand
gaagaauccugaauuuaac

SEQ ID NO: 922092 - RNA, 19 nt, Homo sapiens
  misc_RNA (1)...(19): siRNA sense strand
ggacagcagucuagagauc

SEQ ID NO: 922093 - RNA, 19 nt, Homo sapiens
  misc_RNA (1)...(19): siRNA sense strand
cgagaaguauuuaacugua

SEQ ID NO: 922094 - RNA, 19 nt, Homo sapiens
  misc_RNA (1)...(19): siRNA sense strand
gagugugcguugcugauua

SEQ ID NO: 922095 - RNA, 19 nt, Homo sapiens
  misc_RNA (1)...(19): siRNA sense strand
gauuuggauuccuaucuua

SEQ ID NO: 922096 - RNA, 19 nt, Homo sapiens
  misc_RNA (1)...(19): siRNA sense strand
gggaaugggugaaucucua

SEQ ID NO: 922097 - RNA, 19 nt, Homo sapiens
  misc_RNA (1)...(19): siRNA sense strand
gcaguaugaucuucaccua

SEQ ID NO: 922098 - RNA, 19 nt, Homo sapiens
  misc_RNA (1)...(19): siRNA sense strand
ucaauuagcucaggacaau

SEQ ID NO: 922099 - RNA, 19 nt, Homo sapiens
  misc_RNA (1)...(19): siRNA sense strand
gaagaacucccucccauca

SEQ ID NO: 922100 - RNA, 19 nt, Homo sapiens
  misc_RNA (1)...(19): siRNA sense strand
gaugugccaccuucuauua

SEQ ID NO: 922101 - RNA, 19 nt, Homo sapiens
  misc_RNA (1)...(19): siRNA sense strand
uagaaaugcugcagagauu

SEQ ID NO: 922102 - RNA, 19 nt, Homo sapiens
  misc_RNA (1)...(19): siRNA sense strand
gauaaguggcucacagaua

SEQ ID NO: 922103 - RNA, 19 nt, Homo sapiens
  misc_RNA (1)...(19): siRNA sense strand
gaauguagaagucuugauu

SEQ ID NO: 922104 - RNA, 19 nt, Homo sapiens
  misc_RNA (1)...(19): siRNA sense strand
caguagaccucauauauag

SEQ ID NO: 922105 - RNA, 19 nt, Homo sapiens
  misc_RNA (1)...(19): siRNA sense strand
caacuucccuaccaucgaa

SEQ ID NO: 922106 - RNA, 19 nt, Homo sapiens
  misc_RNA (1)...(19): siRNA sense strand
caacuggagucagcuuuaa

SEQ ID NO: 922107 - RNA, 19 nt, Homo sapiens
  misc_RNA (1)...(19): siRNA sense strand
caaaccagcacuuuaguaa

SEQ ID NO: 922108 - RNA, 19 nt, Homo sapiens
  misc_RNA (1)...(19): siRNA sense strand
gaaauugccacauggaaga

SEQ ID NO: 922109 - RNA, 19 nt, Homo sapiens
  misc_RNA (1)...(19): siRNA sense strand
gcaauauaaucgugcaguu

SEQ ID NO: 922110 - RNA, 19 nt, Homo sapiens
  misc_RNA (1)...(19): siRNA sense strand
gcaagaaugcuggcacaua

SEQ ID NO: 922111 - RNA, 19 nt, Homo sapiens
  misc_RNA (1)...(19): siRNA sense strand
gcacaauccugcugccaau

SEQ ID NO: 922112 - RNA, 19 nt, Homo sapiens
  misc_RNA (1)...(19): siRNA sense strand
ugaaauguguguugaaauc

SEQ ID NO: 922113 - RNA, 19 nt, Homo sapiens
  misc_RNA (1)...(19): siRNA sense strand
gaauuuaugccuuggguuu

SEQ ID NO: 922114 - RNA, 19 nt, Homo sapiens
  misc_RNA (1)...(19): siRNA sense strand
uggaagagcuuggauuuga

SEQ ID NO: 922115 - RNA, 19 nt, Homo sapiens
  misc_RNA (1)...(19): siRNA sense strand
aaagaucgccugaagaauu

SEQ ID NO: 922116 - RNA, 19 nt, Homo sapiens
  misc_RNA (1)...(19): siRNA sense strand
guaaauaggccacauccuu

SEQ ID NO: 922117 - RNA, 19 nt, Homo sapiens
  misc_RNA (1)...(19): siRNA sense strand
ucaaauauuuagcgccuuu

SEQ ID NO: 922118 - RNA, 19 nt, Homo sapiens
  misc_RNA (1)...(19): siRNA sense strand
guggaucgaucaauuaaga

SEQ ID NO: 922119 - RNA, 19 nt, Homo sapiens
  misc_RNA (1)...(19): siRNA sense strand
ggagugaugggaaagauaa

SEQ ID NO: 922120 - RNA, 19 nt, Homo sapiens
  misc_RNA (1)...(19): siRNA sense strand
guacugaaauguguguuga

SEQ ID NO: 922121 - RNA, 19 nt, Homo sapiens
  misc_RNA (1)...(19): siRNA sense strand
gaucuggagugaugggaaa

SEQ ID NO: 922122 - RNA, 19 nt, Homo sapiens
  misc_RNA (1)...(19): siRNA sense strand
caagaaugcuggcacauac

SEQ ID NO: 922123 - RNA, 19 nt, Homo sapiens
  misc_RNA (1)...(19): siRNA sense strand
caaccuggaugccuuuguu

SEQ ID NO: 922124 - RNA, 19 nt, Homo sapiens
  misc_RNA (1)...(19): siRNA sense strand
uuacagaacuggagcaaca

SEQ ID NO: 922125 - RNA, 19 nt, Homo sapiens
  misc_RNA (1)...(19): siRNA sense strand
ugauaaagcugcagccaau

SEQ ID NO: 922126 - RNA, 19 nt, Homo sapiens
  misc_RNA (1)...(19): siRNA sense strand
ugaaugagaccuacagaaa

SEQ ID NO: 922127 - RNA, 19 nt, Homo sapiens
  misc_RNA (1)...(19): siRNA sense strand
cuaaggaacuuguuugaag

SEQ ID NO: 922128 - RNA, 19 nt, Homo sapiens
  misc_RNA (1)...(19): siRNA sense strand
gagcuuggauuugauugaa

SEQ ID NO: 922129 - RNA, 19 nt, Homo sapiens
  misc_RNA (1)...(19): siRNA sense strand
ccaguagaccucauauaua

SEQ ID NO: 922130 - RNA, 19 nt, Homo sapiens
  misc_RNA (1)...(19): siRNA sense strand
gccaauugcaguaauguua

SEQ ID NO: 922131 - RNA, 19 nt, Homo sapiens
  misc_RNA (1)...(19): siRNA sense strand
cagaguuccuuugugauua

SEQ ID NO: 922132 - RNA, 19 nt, Homo sapiens
  misc_RNA (1)...(19): siRNA sense strand
uaaaggacaacaagaauug

SEQ ID NO: 922133 - RNA, 19 nt, Homo sapiens
  misc_RNA (1)...(19): siRNA sense strand
uaaaggaaacggugaaaga

SEQ ID NO: 922134 - RNA, 19 nt, Homo sapiens
  misc_RNA (1)...(19): siRNA sense strand
gcagugggaucuggaguga

SEQ ID NO: 922135 - RNA, 19 nt, Homo sapiens
  misc_RNA (1)...(19): siRNA sense strand
ggauuuggauuccuaucuu

SEQ ID NO: 922136 - RNA, 19 nt, Homo sapiens
  misc_RNA (1)...(19): siRNA sense strand
gcaauacauuccacaucuu

SEQ ID NO: 922137 - RNA, 19 nt, Homo sapiens
  misc_RNA (1)...(19): siRNA sense strand
caaggugccuaauugaaug

SEQ ID NO: 922138 - RNA, 19 nt, Homo sapiens
  misc_RNA (1)...(19): siRNA sense strand
ggacgcagauacugugauc

SEQ ID NO: 922139 - RNA, 19 nt, Homo sapiens
  misc_RNA (1)...(19): siRNA sense strand
gacaagagauuagcaacug

SEQ ID NO: 922140 - RNA, 19 nt, Homo sapiens
  misc_RNA (1)...(19): siRNA sense strand
acaagaugguucugaauga

SEQ ID NO: 922141 - RNA, 19 nt, Homo sapiens
  misc_RNA (1)...(19): siRNA sense strand
uaaggaacuuguuugaaga

SEQ ID NO: 922142 - RNA, 19 nt, Homo sapiens
  misc_RNA (1)...(19): siRNA sense strand
agagauagaugaugaagca

SEQ ID NO: 922143 - RNA, 19 nt, Homo sapiens
  misc_RNA (1)...(19): siRNA sense strand
gugcguugcugauuacaaa

SEQ ID NO: 922144 - RNA, 19 nt, Homo sapiens
  misc_RNA (1)...(19): siRNA sense strand
gcaaaccagcacuuuagua

SEQ ID NO: 922145 - RNA, 19 nt, Homo sapiens
  misc_RNA (1)...(19): siRNA sense strand
caacauucccuuauaaauc

SEQ ID NO: 922146 - RNA, 19 nt, Homo sapiens
  misc_RNA (1)...(19): siRNA sense strand
uaaaggacuucauaaugug

SEQ ID NO: 922147 - RNA, 19 nt, Homo sapiens
  misc_RNA (1)...(19): siRNA sense strand
gcaacucucugcuccaaag

SEQ ID NO: 922148 - RNA, 19 nt, Homo sapiens
  misc_RNA (1)...(19): siRNA sense strand
gaagcaggcccagcaagua

SEQ ID NO: 922149 - RNA, 19 nt, Homo sapiens
  misc_RNA (1)...(19): siRNA sense strand
caucggauauuuauugcaa

SEQ ID NO: 922150 - RNA, 19 nt, Homo sapiens
  misc_RNA (1)...(19): siRNA sense strand
gagaagauauggcaaaugu

SEQ ID NO: 922151 - RNA, 19 nt, Homo sapiens
  misc_RNA (1)...(19): siRNA sense strand
ggagagaaaucuuacaaau

SEQ ID NO: 922152 - RNA, 19 nt, Homo sapiens
  misc_RNA (1)...(19): siRNA sense strand
agaggaaucuucuaguuua

SEQ ID NO: 922153 - RNA, 19 nt, Homo sapiens
  misc_RNA (1)...(19): siRNA sense strand
aaagagcccuggaauauga

SEQ ID NO: 922154 - RNA, 19 nt, Homo sapiens
  misc_RNA (1)...(19): siRNA sense strand
gacaugagaugguggauga

SEQ ID NO: 922155 - RNA, 19 nt, Homo sapiens
  misc_RNA (1)...(19): siRNA sense strand
gagagaagcccuacaaaug

SEQ ID NO: 922156 - RNA, 19 nt, Homo sapiens
  misc_RNA (1)...(19): siRNA sense strand
gaagauauggcaaauguga

SEQ ID NO: 922157 - RNA, 19 nt, Homo sapiens
  misc_RNA (1)...(19): siRNA sense strand
agagaaaccuuacaaaugu

SEQ ID NO: 922158 - RNA, 19 nt, Homo sapiens
  misc_RNA (1)...(19): siRNA sense strand
gagaaacccuucaaaugug

SEQ ID NO: 922159 - RNA, 19 nt, Homo sapiens
  misc_RNA (1)...(19): siRNA sense strand
aaggagacauugacauuua

SEQ ID NO: 922160 - RNA, 19 nt, Homo sapiens
  misc_RNA (1)...(19): siRNA sense strand
cuacaaaugucaagaaugu

SEQ ID NO: 922161 - RNA, 19 nt, Homo sapiens
  misc_RNA (1)...(19): siRNA sense strand
cuacaaaugugaagaaugu

SEQ ID NO: 922162 - RNA, 19 nt, Homo sapiens
  misc_RNA (1)...(19): siRNA sense strand
gagagaaaccuuacaaaug

SEQ ID NO: 922163 - RNA, 19 nt, Homo sapiens
  misc_RNA (1)...(19): siRNA sense strand
cuacaaaugugaagaaugu

SEQ ID NO: 922164 - RNA, 19 nt, Homo sapiens
  misc_RNA (1)...(19): siRNA sense strand
cuacaaaugugaagaaugu

SEQ ID NO: 922165 - RNA, 19 nt, Homo sapiens
  misc_RNA (1)...(19): siRNA sense strand
caaagaagguuauaaugag

SEQ ID NO: 922166 - RNA, 19 nt, Homo sapiens
  misc_RNA (1)...(19): siRNA sense strand
gcacaaagaagguuauaau

SEQ ID NO: 922167 - RNA, 19 nt, Homo sapiens
  misc_RNA (1)...(19): siRNA sense strand
ccucaaaccuuauuaaaca

SEQ ID NO: 922168 - RNA, 19 nt, Homo sapiens
  misc_RNA (1)...(19): siRNA sense strand
ccucaaaucuuacuaaaca

SEQ ID NO: 922169 - RNA, 19 nt, Homo sapiens
  misc_RNA (1)...(19): siRNA sense strand
gcaaauagacauaagacaa

SEQ ID NO: 922170 - RNA, 19 nt, Homo sapiens
  misc_RNA (1)...(19): siRNA sense strand
gagagaaacccuacaaaug

SEQ ID NO: 922171 - RNA, 19 nt, Homo sapiens
  misc_RNA (1)...(19): siRNA sense strand
gagagaaacccuacaaaug

SEQ ID NO: 922172 - RNA, 19 nt, Homo sapiens
  misc_RNA (1)...(19): siRNA sense strand
gagagaaacccuacaaaug

SEQ ID NO: 922173 - RNA, 19 nt, Homo sapiens
  misc_RNA (1)...(19): siRNA sense strand
gagagaaacccuacaaaug

SEQ ID NO: 922174 - RNA, 19 nt, Homo sapiens
  misc_RNA (1)...(19): siRNA sense strand
gagagaaacccuucaaaug

SEQ ID NO: 922175 - RNA, 19 nt, Homo sapiens
  misc_RNA (1)...(19): siRNA sense strand
acacauaaguucauucaug

SEQ ID NO: 922176 - RNA, 19 nt, Homo sapiens
  misc_RNA (1)...(19): siRNA sense strand
ggagaaaccauauagaugu

SEQ ID NO: 922177 - RNA, 19 nt, Homo sapiens
  misc_RNA (1)...(19): siRNA sense strand
ucucauaccuuacuaaaca

SEQ ID NO: 922178 - RNA, 19 nt, Homo sapiens
  misc_RNA (1)...(19): siRNA sense strand
gagaaacccuacaaaugug

SEQ ID NO: 922179 - RNA, 19 nt, Homo sapiens
  misc_RNA (1)...(19): siRNA sense strand
gagaaacccuacaaaugug

SEQ ID NO: 922180 - RNA, 19 nt, Homo sapiens
  misc_RNA (1)...(19): siRNA sense strand
gagaaacccuacaaaugug

SEQ ID NO: 922181 - RNA, 19 nt, Homo sapiens
  misc_RNA (1)...(19): siRNA sense strand
cuacaaaugugaagugugu

SEQ ID NO: 922182 - RNA, 19 nt, Homo sapiens
  misc_RNA (1)...(19): siRNA sense strand
gagaaacccuacaaaugug

SEQ ID NO: 922183 - RNA, 19 nt, Homo sapiens
  misc_RNA (1)...(19): siRNA sense strand
ggagagaaaccuuacaaau

SEQ ID NO: 922184 - RNA, 19 nt, Homo sapiens
  misc_RNA (1)...(19): siRNA sense strand
gagaagcccuacaaaugug

SEQ ID NO: 922185 - RNA, 19 nt, Homo sapiens
  misc_RNA (1)...(19): siRNA sense strand
gaaaccauauagaugugaa

SEQ ID NO: 922186 - RNA, 19 nt, Homo sapiens
  misc_RNA (1)...(19): siRNA sense strand
gagaaacucuacaaauguc

SEQ ID NO: 922187 - RNA, 19 nt, Homo sapiens
  misc_RNA (1)...(19): siRNA sense strand
cuacaacugugaagaaugu

SEQ ID NO: 922188 - RNA, 19 nt, Homo sapiens
  misc_RNA (1)...(19): siRNA sense strand
ccucaaaccuuacuacaca

SEQ ID NO: 922189 - RNA, 19 nt, Homo sapiens
  misc_RNA (1)...(19): siRNA sense strand
gagaggaaucuucuaguuu

SEQ ID NO: 922190 - RNA, 19 nt, Homo sapiens
  misc_RNA (1)...(19): siRNA sense strand
ggagagaaacccuucaaau

SEQ ID NO: 922191 - RNA, 19 nt, Homo sapiens
  misc_RNA (1)...(19): siRNA sense strand
ccucaacucuuacuaaaca

SEQ ID NO: 922192 - RNA, 19 nt, Homo sapiens
  misc_RNA (1)...(19): siRNA sense strand
ggagagaaacccuacaaau

SEQ ID NO: 922193 - RNA, 19 nt, Homo sapiens
  misc_RNA (1)...(19): siRNA sense strand
ggagagaaacccuacaaau

SEQ ID NO: 922194 - RNA, 19 nt, Homo sapiens
  misc_RNA (1)...(19): siRNA sense strand
ugagaggaaucuucuaguu

SEQ ID NO: 922195 - RNA, 19 nt, Homo sapiens
  misc_RNA (1)...(19): siRNA sense strand
ggagagaaacccuacaaau

SEQ ID NO: 922196 - RNA, 19 nt, Homo sapiens
  misc_RNA (1)...(19): siRNA sense strand
ggagagaaacccuacaaau

SEQ ID NO: 922197 - RNA, 19 nt, Homo sapiens
  misc_RNA (1)...(19): siRNA sense strand
aaccaauccucaacucuua

SEQ ID NO: 922198 - RNA, 19 nt, Homo sapiens
  misc_RNA (1)...(19): siRNA sense strand
ccagcuauguguucuuauu

SEQ ID NO: 922199 - RNA, 19 nt, Homo sapiens
  misc_RNA (1)...(19): siRNA sense strand
ugaagaaugugacaauaca

SEQ ID NO: 922200 - RNA, 19 nt, Homo sapiens
  misc_RNA (1)...(19): siRNA sense strand
aaucgauucucauaccuua

SEQ ID NO: 922201 - RNA, 19 nt, Homo sapiens
  misc_RNA (1)...(19): siRNA sense strand
acaccuaagucaacauaaa

SEQ ID NO: 922202 - RNA, 19 nt, Homo sapiens
  misc_RNA (1)...(19): siRNA sense strand
gagagaaaucuuacaaaug

SEQ ID NO: 922203 - RNA, 19 nt, Homo sapiens
  misc_RNA (1)...(19): siRNA sense strand
ccucaacccuuacuaaaca

SEQ ID NO: 922204 - RNA, 19 nt, Homo sapiens
  misc_RNA (1)...(19): siRNA sense strand
ggagagaagcccuacaaau

SEQ ID NO: 922205 - RNA, 19 nt, Homo sapiens
  misc_RNA (1)...(19): siRNA sense strand
gagaaaccauauagaugug

SEQ ID NO: 922206 - RNA, 19 nt, Homo sapiens
  misc_RNA (1)...(19): siRNA sense strand
aagcaguccucaacccuua

SEQ ID NO: 922207 - RNA, 19 nt, Homo sapiens
  misc_RNA (1)...(19): siRNA sense strand
aguauaaggugcacaaaga

SEQ ID NO: 922208 - RNA, 19 nt, Homo sapiens
  misc_RNA (1)...(19): siRNA sense strand
gauaauucauacuggagaa

SEQ ID NO: 922209 - RNA, 19 nt, Homo sapiens
  misc_RNA (1)...(19): siRNA sense strand
ccauauagaugugaagaau

SEQ ID NO: 922210 - RNA, 19 nt, Homo sapiens
  misc_RNA (1)...(19): siRNA sense strand
agagaauucuuaccaaugu

SEQ ID NO: 922211 - RNA, 19 nt, Homo sapiens
  misc_RNA (1)...(19): siRNA sense strand
agagaaacccuacaaaugu

SEQ ID NO: 922212 - RNA, 19 nt, Homo sapiens
  misc_RNA (1)...(19): siRNA sense strand
agagaaacccuacaaaugu

SEQ ID NO: 922213 - RNA, 19 nt, Homo sapiens
  misc_RNA (1)...(19): siRNA sense strand
agagaaacccuacaaaugu

SEQ ID NO: 922214 - RNA, 19 nt, Homo sapiens
  misc_RNA (1)...(19): siRNA sense strand
agagaaacccuacaaaugu

SEQ ID NO: 922215 - RNA, 19 nt, Homo sapiens
  misc_RNA (1)...(19): siRNA sense strand
agagaaacccuucaaaugu

SEQ ID NO: 922216 - RNA, 19 nt, Homo sapiens
  misc_RNA (1)...(19): siRNA sense strand
ugacaaagcuuuuaaucga

SEQ ID NO: 922217 - RNA, 19 nt, Homo sapiens
  misc_RNA (1)...(19): siRNA sense strand
aaccgauccucaaaucuua

SEQ ID NO: 922218 - RNA, 19 nt, Homo sapiens
  misc_RNA (1)...(19): siRNA sense strand
caucaauccuuacuacaca

SEQ ID NO: 922219 - RNA, 19 nt, Homo sapiens
  misc_RNA (1)...(19): siRNA sense strand
aaccaguccucaaaccuua

SEQ ID NO: 922220 - RNA, 19 nt, Homo sapiens
  misc_RNA (1)...(19): siRNA sense strand
agacauaagacaagacgua

SEQ ID NO: 922221 - RNA, 19 nt, Homo sapiens
  misc_RNA (1)...(19): siRNA sense strand
ggauguggccauagaauuc

SEQ ID NO: 922222 - RNA, 19 nt, Homo sapiens
  misc_RNA (1)...(19): siRNA sense strand
uuaccaaugugaagaaugu

SEQ ID NO: 922223 - RNA, 19 nt, Homo sapiens
  misc_RNA (1)...(19): siRNA sense strand
ggccagagcaagacauaaa

SEQ ID NO: 922224 - RNA, 19 nt, Homo sapiens
  misc_RNA (1)...(19): siRNA sense strand
gagaaaccuuacaaaugug

SEQ ID NO: 922225 - RNA, 19 nt, Homo sapiens
  misc_RNA (1)...(19): siRNA sense strand
cuugaaauauggaguguau

SEQ ID NO: 922226 - RNA, 19 nt, Homo sapiens
  misc_RNA (1)...(19): siRNA sense strand
ccucacaccuuacuacaca

SEQ ID NO: 922227 - RNA, 19 nt, Homo sapiens
  misc_RNA (1)...(19): siRNA sense strand
ccucaacccuuacuacaca

SEQ ID NO: 922228 - RNA, 19 nt, Homo sapiens
  misc_RNA (1)...(19): siRNA sense strand
agacacaagagaauucaua

SEQ ID NO: 922229 - RNA, 19 nt, Homo sapiens
  misc_RNA (1)...(19): siRNA sense strand
gcaaagcuuuuaaaugguu

SEQ ID NO: 922230 - RNA, 19 nt, Homo sapiens
  misc_RNA (1)...(19): siRNA sense strand
gagagaauucuuaccaaug

SEQ ID NO: 922231 - RNA, 19 nt, Homo sapiens
  misc_RNA (1)...(19): siRNA sense strand
gacaagacguacuggaaag

SEQ ID NO: 922232 - RNA, 19 nt, Homo sapiens
  misc_RNA (1)...(19): siRNA sense strand
gaacaugagaauuuacagu

SEQ ID NO: 922233 - RNA, 19 nt, Homo sapiens
  misc_RNA (1)...(19): siRNA sense strand
ucaccugucuggagcaaga

SEQ ID NO: 922234 - RNA, 19 nt, Homo sapiens
  misc_RNA (1)...(19): siRNA sense strand
gcucagcagaauuuauaua

SEQ ID NO: 922235 - RNA, 19 nt, Homo sapiens
  misc_RNA (1)...(19): siRNA sense strand
gggagaaaccauauagaug

SEQ ID NO: 922236 - RNA, 19 nt, Homo sapiens
  misc_RNA (1)...(19): siRNA sense strand
ccgcaaguguagaugagua

SEQ ID NO: 922237 - RNA, 19 nt, Homo sapiens
  misc_RNA (1)...(19): siRNA sense strand
uaaccgauccucaaaucuu

SEQ ID NO: 922238 - RNA, 19 nt, Homo sapiens
  misc_RNA (1)...(19): siRNA sense strand
guacacauaaguucauuca

SEQ ID NO: 922239 - RNA, 19 nt, Homo sapiens
  misc_RNA (1)...(19): siRNA sense strand
caaauagacauaagacaag

SEQ ID NO: 922240 - RNA, 19 nt, Homo sapiens
  misc_RNA (1)...(19): siRNA sense strand
gacagaaacccuacaacug

SEQ ID NO: 922241 - RNA, 19 nt, Homo sapiens
  misc_RNA (1)...(19): siRNA sense strand
gauccucaaaucuuacuaa

SEQ ID NO: 922242 - RNA, 19 nt, Homo sapiens
  misc_RNA (1)...(19): siRNA sense strand
agaaacccuucaaauguga

SEQ ID NO: 922243 - RNA, 19 nt, Homo sapiens
  misc_RNA (1)...(19): siRNA sense strand
caaguguagaugaguauaa

SEQ ID NO: 922244 - RNA, 19 nt, Homo sapiens
  misc_RNA (1)...(19): siRNA sense strand
auacaggagagaaaucuua

SEQ ID NO: 922245 - RNA, 19 nt, Homo sapiens
  misc_RNA (1)...(19): siRNA sense strand
gauucauacuggagagaaa

SEQ ID NO: 922246 - RNA, 19 nt, Homo sapiens
  misc_RNA (1)...(19): siRNA sense strand
ucucaacccuuacuagaca

SEQ ID NO: 922247 - RNA, 19 nt, Homo sapiens
  misc_RNA (1)...(19): siRNA sense strand
gcaaaauauuuccauguga

SEQ ID NO: 922248 - RNA, 19 nt, Homo sapiens
  misc_RNA (1)...(19): siRNA sense strand
ugaagaauguggcaaagcu

SEQ ID NO: 922249 - RNA, 19 nt, Homo sapiens
  misc_RNA (1)...(19): siRNA sense strand
ugugaagaaugugacaaua

SEQ ID NO: 922250 - RNA, 19 nt, Homo sapiens
  misc_RNA (1)...(19): siRNA sense strand
gaacacagccuggauaugu

SEQ ID NO: 922251 - RNA, 19 nt, Homo sapiens
  misc_RNA (1)...(19): siRNA sense strand
ggaugaagaugagcuguaa

SEQ ID NO: 922252 - RNA, 19 nt, Homo sapiens
  misc_RNA (1)...(19): siRNA sense strand
gaagaaggcucuggaaagg

SEQ ID NO: 922253 - RNA, 19 nt, Homo sapiens
  misc_RNA (1)...(19): siRNA sense strand
gcaccgagacuauuucuug

SEQ ID NO: 922254 - RNA, 19 nt, Homo sapiens
  misc_RNA (1)...(19): siRNA sense strand
guauguauguccugaguga

SEQ ID NO: 922255 - RNA, 19 nt, Homo sapiens
  misc_RNA (1)...(19): siRNA sense strand
gcauguggcucagaucuug

SEQ ID NO: 922256 - RNA, 19 nt, Homo sapiens
  misc_RNA (1)...(19): siRNA sense strand
gagaggagcugccggaacu

SEQ ID NO: 922257 - RNA, 19 nt, Homo sapiens
  misc_RNA (1)...(19): siRNA sense strand
cccaagcgcugcaacgaua

SEQ ID NO: 922258 - RNA, 19 nt, Homo sapiens
  misc_RNA (1)...(19): siRNA sense strand
caauagagcugggauggau

SEQ ID NO: 922259 - RNA, 19 nt, Homo sapiens
  misc_RNA (1)...(19): siRNA sense strand
gagcaaaucaucaucuuca

SEQ ID NO: 922260 - RNA, 19 nt, Homo sapiens
  misc_RNA (1)...(19): siRNA sense strand
agaauaagcccaagucaga

SEQ ID NO: 922261 - RNA, 19 nt, Homo sapiens
  misc_RNA (1)...(19): siRNA sense strand
gaacgaccuccucaucaaa

SEQ ID NO: 922262 - RNA, 19 nt, Homo sapiens
  misc_RNA (1)...(19): siRNA sense strand
gcauugcagucacccauug

SEQ ID NO: 922263 - RNA, 19 nt, Homo sapiens
  misc_RNA (1)...(19): siRNA sense strand
gauggauacugcagaccua

SEQ ID NO: 922264 - RNA, 19 nt, Homo sapiens
  misc_RNA (1)...(19): siRNA sense strand
gaauucggcuuggagauca

SEQ ID NO: 922265 - RNA, 19 nt, Homo sapiens
  misc_RNA (1)...(19): siRNA sense strand
gaauauccagcaaaucuau

SEQ ID NO: 922266 - RNA, 19 nt, Homo sapiens
  misc_RNA (1)...(19): siRNA sense strand
ggagggcccuggagauaag

SEQ ID NO: 922267 - RNA, 19 nt, Homo sapiens
  misc_RNA (1)...(19): siRNA sense strand
gaagaagaaggcucuggaa

SEQ ID NO: 922268 - RNA, 19 nt, Homo sapiens
  misc_RNA (1)...(19): siRNA sense strand
ugaacgaccuccucaucaa

SEQ ID NO: 922269 - RNA, 19 nt, Homo sapiens
  misc_RNA (1)...(19): siRNA sense strand
cuacaacggugucugaaag

SEQ ID NO: 922270 - RNA, 19 nt, Homo sapiens
  misc_RNA (1)...(19): siRNA sense strand
ggauauguauacaagaaca

SEQ ID NO: 922271 - RNA, 19 nt, Homo sapiens
  misc_RNA (1)...(19): siRNA sense strand
ggaauauccagcaaaucua

SEQ ID NO: 922272 - RNA, 19 nt, Homo sapiens
  misc_RNA (1)...(19): siRNA sense strand
gggaauauccagcaaaucu

SEQ ID NO: 922273 - RNA, 19 nt, Homo sapiens
  misc_RNA (1)...(19): siRNA sense strand
ugagugaacugguagaaac

SEQ ID NO: 922274 - RNA, 19 nt, Homo sapiens
  misc_RNA (1)...(19): siRNA sense strand
gagcuacaacggugucuga

SEQ ID NO: 922275 - RNA, 19 nt, Homo sapiens
  misc_RNA (1)...(19): siRNA sense strand
gcucagcuauucaucaaac

SEQ ID NO: 922276 - RNA, 19 nt, Homo sapiens
  misc_RNA (1)...(19): siRNA sense strand
gaacugguagaaacagaga

SEQ ID NO: 922277 - RNA, 19 nt, Homo sapiens
  misc_RNA (1)...(19): siRNA sense strand
ucaaggauuuucucaagua

SEQ ID NO: 922278 - RNA, 19 nt, Homo sapiens
  misc_RNA (1)...(19): siRNA sense strand
ugcagcggaucaugaaaua

SEQ ID NO: 922279 - RNA, 19 nt, Homo sapiens
  misc_RNA (1)...(19): siRNA sense strand
ggcagauuguggaggguua

SEQ ID NO: 922280 - RNA, 19 nt, Homo sapiens
  misc_RNA (1)...(19): siRNA sense strand
guauacaagaacagcauua

SEQ ID NO: 922281 - RNA, 19 nt, Homo sapiens
  misc_RNA (1)...(19): siRNA sense strand
ggaaaggaguauguauguc

SEQ ID NO: 922282 - RNA, 19 nt, Homo sapiens
  misc_RNA (1)...(19): siRNA sense strand
cagagcauguggugucaga

SEQ ID NO: 922283 - RNA, 19 nt, Homo sapiens
  misc_RNA (1)...(19): siRNA sense strand
gaguauguauguccugagu

SEQ ID NO: 922284 - RNA, 19 nt, Homo sapiens
  misc_RNA (1)...(19): siRNA sense strand
ucugaaagauccugauugg

SEQ ID NO: 922285 - RNA, 19 nt, Homo sapiens
  misc_RNA (1)...(19): siRNA sense strand
cuggauauguauacaagaa

SEQ ID NO: 922286 - RNA, 19 nt, Homo sapiens
  misc_RNA (1)...(19): siRNA sense strand
ggauuguguuugggaauau

SEQ ID NO: 922287 - RNA, 19 nt, Homo sapiens
  misc_RNA (1)...(19): siRNA sense strand
uugccaagcuggaugaaga

SEQ ID NO: 922288 - RNA, 19 nt, Homo sapiens
  misc_RNA (1)...(19): siRNA sense strand
gcacacacacacccaucaa

SEQ ID NO: 922289 - RNA, 19 nt, Homo sapiens
  misc_RNA (1)...(19): siRNA sense strand
aaauguacguggacgacuu

SEQ ID NO: 922290 - RNA, 19 nt, Homo sapiens
  misc_RNA (1)...(19): siRNA sense strand
gggacuuccucaacgcauu

SEQ ID NO: 922291 - RNA, 19 nt, Homo sapiens
  misc_RNA (1)...(19): siRNA sense strand
ucaagcauguggcucagau

SEQ ID NO: 922292 - RNA, 19 nt, Homo sapiens
  misc_RNA (1)...(19): siRNA sense strand
gcauguggugucagaguuu

SEQ ID NO: 922293 - RNA, 19 nt, Homo sapiens
  misc_RNA (1)...(19): siRNA sense strand
caagcuggaugaagaugag

SEQ ID NO: 922294 - RNA, 19 nt, Homo sapiens
  misc_RNA (1)...(19): siRNA sense strand
uggcucagcuauucaucaa

SEQ ID NO: 922295 - RNA, 19 nt, Homo sapiens
  misc_RNA (1)...(19): siRNA sense strand
ggacuuccucaacgcauug

SEQ ID NO: 922296 - RNA, 19 nt, Homo sapiens
  misc_RNA (1)...(19): siRNA sense strand
aacacagccuggauaugua

SEQ ID NO: 922297 - RNA, 19 nt, Homo sapiens
  misc_RNA (1)...(19): siRNA sense strand
gcaaaucaucaucuucagu

SEQ ID NO: 922298 - RNA, 19 nt, Homo sapiens
  misc_RNA (1)...(19): siRNA sense strand
ccgagacuauuucuugcaa

SEQ ID NO: 922299 - RNA, 19 nt, Homo sapiens
  misc_RNA (1)...(19): siRNA sense strand
aggauuguguuugggaaua

SEQ ID NO: 922300 - RNA, 19 nt, Homo sapiens
  misc_RNA (1)...(19): siRNA sense strand
ggggagcccuggaagaauu

SEQ ID NO: 922301 - RNA, 19 nt, Homo sapiens
  misc_RNA (1)...(19): siRNA sense strand
gcuacaacggugucugaaa

SEQ ID NO: 922302 - RNA, 19 nt, Homo sapiens
  misc_RNA (1)...(19): siRNA sense strand
agaagaaggcucuggaaag

SEQ ID NO: 922303 - RNA, 19 nt, Homo sapiens
  misc_RNA (1)...(19): siRNA sense strand
gaggaggaacagaagaaga

SEQ ID NO: 922304 - RNA, 19 nt, Homo sapiens
  misc_RNA (1)...(19): siRNA sense strand
guggaacacagccuggaua

SEQ ID NO: 922305 - RNA, 19 nt, Homo sapiens
  misc_RNA (1)...(19): siRNA sense strand
gcucaaggauuuucucaag

SEQ ID NO: 922306 - RNA, 19 nt, Homo sapiens
  misc_RNA (1)...(19): siRNA sense strand
uguccugagugaacuggua

SEQ ID NO: 922307 - RNA, 19 nt, Homo sapiens
  misc_RNA (1)...(19): siRNA sense strand
acacacacacccaucaaug

SEQ ID NO: 922308 - RNA, 19 nt, Homo sapiens
  misc_RNA (1)...(19): siRNA sense strand
gcagucacccauugaguac

SEQ ID NO: 922309 - RNA, 19 nt, Homo sapiens
  misc_RNA (1)...(19): siRNA sense strand
gugaacugguagaaacaga

SEQ ID NO: 922310 - RNA, 19 nt, Homo sapiens
  misc_RNA (1)...(19): siRNA sense strand
gcgcugcaacgauaugaug

SEQ ID NO: 922311 - RNA, 19 nt, Homo sapiens
  misc_RNA (1)...(19): siRNA sense strand
caccugaagaggagacuuu

SEQ ID NO: 922312 - RNA, 19 nt, Homo sapiens
  misc_RNA (1)...(19): siRNA sense strand
gugacaggauuguguuugg

SEQ ID NO: 922313 - RNA, 19 nt, Homo sapiens
  misc_RNA (1)...(19): siRNA sense strand
gugaggaggaacagaagaa

SEQ ID NO: 922314 - RNA, 19 nt, Homo sapiens
  misc_RNA (1)...(19): siRNA sense strand
uggaaaggaguauguaugu

SEQ ID NO: 922315 - RNA, 19 nt, Homo sapiens
  misc_RNA (1)...(19): siRNA sense strand
gcugaacgaccuccucauc

SEQ ID NO: 922316 - RNA, 19 nt, Homo sapiens
  misc_RNA (1)...(19): siRNA sense strand
gagcauguggugucagagu

SEQ ID NO: 922317 - RNA, 19 nt, Homo sapiens
  misc_RNA (1)...(19): siRNA sense strand
agacgcagccaccugaaga

SEQ ID NO: 922318 - RNA, 19 nt, Homo sapiens
  misc_RNA (1)...(19): siRNA sense strand
aagaagaaggcucuggaaa

SEQ ID NO: 922319 - RNA, 19 nt, Homo sapiens
  misc_RNA (1)...(19): siRNA sense strand
gcucuggaaaggaguaugu

SEQ ID NO: 922320 - RNA, 19 nt, Homo sapiens
  misc_RNA (1)...(19): siRNA sense strand
aggaggaacagaagaagaa

SEQ ID NO: 922321 - RNA, 19 nt, Homo sapiens
  misc_RNA (1)...(19): siRNA sense strand
gccuggauauguauacaag

SEQ ID NO: 922322 - RNA, 19 nt, Homo sapiens
  misc_RNA (1)...(19): siRNA sense strand
aaaucaucaucuucaguga

SEQ ID NO: 922323 - RNA, 19 nt, Homo sapiens
  misc_RNA (1)...(19): siRNA sense strand
gauuguggaggguuauaug

SEQ ID NO: 922324 - RNA, 19 nt, Homo sapiens
  misc_RNA (1)...(19): siRNA sense strand
gaggagcugccggaacuga

SEQ ID NO: 922325 - RNA, 19 nt, Homo sapiens
  misc_RNA (1)...(19): siRNA sense strand
agagugaggaggaacagaa

SEQ ID NO: 922326 - RNA, 19 nt, Homo sapiens
  misc_RNA (1)...(19): siRNA sense strand
gugcagcggaucaugaaau

SEQ ID NO: 922327 - RNA, 19 nt, Homo sapiens
  misc_RNA (1)...(19): siRNA sense strand
caacggugucugaaagauc

SEQ ID NO: 922328 - RNA, 19 nt, Homo sapiens
  misc_RNA (1)...(19): siRNA sense strand
aaacaggcccuuggugaca

SEQ ID NO: 922329 - RNA, 19 nt, Homo sapiens
  misc_RNA (1)...(19): siRNA sense strand
uacaagaacagcauuaagg

SEQ ID NO: 922330 - RNA, 19 nt, Homo sapiens
  misc_RNA (1)...(19): siRNA sense strand
ucgaggccgugacaggauu

SEQ ID NO: 922331 - RNA, 19 nt, Homo sapiens
  misc_RNA (1)...(19): siRNA sense strand
ggugacccuugccgcuuug

SEQ ID NO: 922332 - RNA, 19 nt, Homo sapiens
  misc_RNA (1)...(19): siRNA sense strand
ugaccuugcugaccacacu

SEQ ID NO: 922333 - RNA, 19 nt, Homo sapiens
  misc_RNA (1)...(19): siRNA sense strand
uugggaauauccagcaaau

SEQ ID NO: 922334 - RNA, 19 nt, Homo sapiens
  misc_RNA (1)...(19): siRNA sense strand
ggauaaacaggcccuuggu

SEQ ID NO: 922335 - RNA, 19 nt, Homo sapiens
  misc_RNA (1)...(19): siRNA sense strand
ugcagucacccauugagua

SEQ ID NO: 922336 - RNA, 19 nt, Homo sapiens
  misc_RNA (1)...(19): siRNA sense strand
ggaacacagccuggauaug

SEQ ID NO: 922337 - RNA, 19 nt, Homo sapiens
  misc_RNA (1)...(19): siRNA sense strand
cauguggugucagaguuug

SEQ ID NO: 922338 - RNA, 19 nt, Homo sapiens
  misc_RNA (1)...(19): siRNA sense strand
ccaagcuggaugaagauga

SEQ ID NO: 922339 - RNA, 19 nt, Homo sapiens
  misc_RNA (1)...(19): siRNA sense strand
ugaguggcaccgagacuau

SEQ ID NO: 922340 - RNA, 19 nt, Homo sapiens
  misc_RNA (1)...(19): siRNA sense strand
cgggagagccagaccaaca

SEQ ID NO: 922341 - RNA, 19 nt, Homo sapiens
  misc_RNA (1)...(19): siRNA sense strand
acaagaacagcauuaaggu

SEQ ID NO: 922342 - RNA, 19 nt, Homo sapiens
  misc_RNA (1)...(19): siRNA sense strand
guggaggucaugugcuuug

SEQ ID NO: 922343 - RNA, 19 nt, Homo sapiens
  misc_RNA (1)...(19): siRNA sense strand
uugagcaaaucaucaucuu

SEQ ID NO: 922344 - RNA, 19 nt, Homo sapiens
  misc_RNA (1)...(19): siRNA sense strand
ggugggauccagcgcuaug

SEQ ID NO: 922345 - RNA, 19 nt, Homo sapiens
  misc_RNA (1)...(19): siRNA sense strand
acacagccuggauauguau

SEQ ID NO: 922346 - RNA, 19 nt, Homo sapiens
  misc_RNA (1)...(19): siRNA sense strand
ccucaacgcauugcaguca

SEQ ID NO: 922347 - RNA, 19 nt, Homo sapiens
  misc_RNA (1)...(19): siRNA sense strand
uggaugaagaugagcugua

SEQ ID NO: 922348 - RNA, 19 nt, Homo sapiens
  misc_RNA (1)...(19): siRNA sense strand
uggaagaauucggcuugga

SEQ ID NO: 922349 - RNA, 19 nt, Homo sapiens
  misc_RNA (1)...(19): siRNA sense strand
gacgggagagccagaccaa

SEQ ID NO: 922350 - RNA, 19 nt, Homo sapiens
  misc_RNA (1)...(19): siRNA sense strand
gaacacagccuggauaugu

SEQ ID NO: 922351 - RNA, 19 nt, Homo sapiens
  misc_RNA (1)...(19): siRNA sense strand
ggaugaagaugagcuguaa

SEQ ID NO: 922352 - RNA, 19 nt, Homo sapiens
  misc_RNA (1)...(19): siRNA sense strand
gaaaagugcuggcaaaaug

SEQ ID NO: 922353 - RNA, 19 nt, Homo sapiens
  misc_RNA (1)...(19): siRNA sense strand
gaagaaggcucuggaaagg

SEQ ID NO: 922354 - RNA, 19 nt, Homo sapiens
  misc_RNA (1)...(19): siRNA sense strand
ggagaugguuggaucauuc

SEQ ID NO: 922355 - RNA, 19 nt, Homo sapiens
  misc_RNA (1)...(19): siRNA sense strand
gcaccgagacuauuucuug

SEQ ID NO: 922356 - RNA, 19 nt, Homo sapiens
  misc_RNA (1)...(19): siRNA sense strand
gagaggagcugccggaacu

SEQ ID NO: 922357 - RNA, 19 nt, Homo sapiens
  misc_RNA (1)...(19): siRNA sense strand
gcauguggcucagaucuug

SEQ ID NO: 922358 - RNA, 19 nt, Homo sapiens
  misc_RNA (1)...(19): siRNA sense strand
guauguauguccugaguga

SEQ ID NO: 922359 - RNA, 19 nt, Homo sapiens
  misc_RNA (1)...(19): siRNA sense strand
cccaagcgcugcaacgaua

SEQ ID NO: 922360 - RNA, 19 nt, Homo sapiens
  misc_RNA (1)...(19): siRNA sense strand
caauagagcugggauggau

SEQ ID NO: 922361 - RNA, 19 nt, Homo sapiens
  misc_RNA (1)...(19): siRNA sense strand
gagcaaaucaucaucuuca

SEQ ID NO: 922362 - RNA, 19 nt, Homo sapiens
  misc_RNA (1)...(19): siRNA sense strand
agaauaagcccaagucaga

SEQ ID NO: 922363 - RNA, 19 nt, Homo sapiens
  misc_RNA (1)...(19): siRNA sense strand
gaacgaccuccucaucaaa

SEQ ID NO: 922364 - RNA, 19 nt, Homo sapiens
  misc_RNA (1)...(19): siRNA sense strand
gcauugcagucacccauug

SEQ ID NO: 922365 - RNA, 19 nt, Homo sapiens
  misc_RNA (1)...(19): siRNA sense strand
gauggauacugcagaccua

SEQ ID NO: 922366 - RNA, 19 nt, Homo sapiens
  misc_RNA (1)...(19): siRNA sense strand
gaauucggcuuggagauca

SEQ ID NO: 922367 - RNA, 19 nt, Homo sapiens
  misc_RNA (1)...(19): siRNA sense strand
ggagggcccuggagauaag

SEQ ID NO: 922368 - RNA, 19 nt, Homo sapiens
  misc_RNA (1)...(19): siRNA sense strand
gaauauccagcaaaucuau

SEQ ID NO: 922369 - RNA, 19 nt, Homo sapiens
  misc_RNA (1)...(19): siRNA sense strand
gaagaagaaggcucuggaa

SEQ ID NO: 922370 - RNA, 19 nt, Homo sapiens
  misc_RNA (1)...(19): siRNA sense strand
ugaacgaccuccucaucaa

SEQ ID NO: 922371 - RNA, 19 nt, Homo sapiens
  misc_RNA (1)...(19): siRNA sense strand
cuacaacggugucugaaag

SEQ ID NO: 922372 - RNA, 19 nt, Homo sapiens
  misc_RNA (1)...(19): siRNA sense strand
ggauauguauacaagaaca

SEQ ID NO: 922373 - RNA, 19 nt, Homo sapiens
  misc_RNA (1)...(19): siRNA sense strand
ggaauauccagcaaaucua

SEQ ID NO: 922374 - RNA, 19 nt, Homo sapiens
  misc_RNA (1)...(19): siRNA sense strand
gggaauauccagcaaaucu

SEQ ID NO: 922375 - RNA, 19 nt, Homo sapiens
  misc_RNA (1)...(19): siRNA sense strand
ugagugaacugguagaaac

SEQ ID NO: 922376 - RNA, 19 nt, Homo sapiens
  misc_RNA (1)...(19): siRNA sense strand
gagcuacaacggugucuga

SEQ ID NO: 922377 - RNA, 19 nt, Homo sapiens
  misc_RNA (1)...(19): siRNA sense strand
gcucagcuauucaucaaac

SEQ ID NO: 922378 - RNA, 19 nt, Homo sapiens
  misc_RNA (1)...(19): siRNA sense strand
gaacugguagaaacagaga

SEQ ID NO: 922379 - RNA, 19 nt, Homo sapiens
  misc_RNA (1)...(19): siRNA sense strand
ucaaggauuuucucaagua

SEQ ID NO: 922380 - RNA, 19 nt, Homo sapiens
  misc_RNA (1)...(19): siRNA sense strand
ugcagcggaucaugaaaua

SEQ ID NO: 922381 - RNA, 19 nt, Homo sapiens
  misc_RNA (1)...(19): siRNA sense strand
ggcagauuguggaggguua

SEQ ID NO: 922382 - RNA, 19 nt, Homo sapiens
  misc_RNA (1)...(19): siRNA sense strand
guauacaagaacagcauua

SEQ ID NO: 922383 - RNA, 19 nt, Homo sapiens
  misc_RNA (1)...(19): siRNA sense strand
ggaaaggaguauguauguc

SEQ ID NO: 922384 - RNA, 19 nt, Homo sapiens
  misc_RNA (1)...(19): siRNA sense strand
cagagcauguggugucaga

SEQ ID NO: 922385 - RNA, 19 nt, Homo sapiens
  misc_RNA (1)...(19): siRNA sense strand
gaguauguauguccugagu

SEQ ID NO: 922386 - RNA, 19 nt, Homo sapiens
  misc_RNA (1)...(19): siRNA sense strand
ucugaaagauccugauugg

SEQ ID NO: 922387 - RNA, 19 nt, Homo sapiens
  misc_RNA (1)...(19): siRNA sense strand
cuggauauguauacaagaa

SEQ ID NO: 922388 - RNA, 19 nt, Homo sapiens
  misc_RNA (1)...(19): siRNA sense strand
ggauuguguuugggaauau

SEQ ID NO: 922389 - RNA, 19 nt, Homo sapiens
  misc_RNA (1)...(19): siRNA sense strand
uugccaagcuggaugaaga

SEQ ID NO: 922390 - RNA, 19 nt, Homo sapiens
  misc_RNA (1)...(19): siRNA sense strand
gcacacacacacccaucaa

SEQ ID NO: 922391 - RNA, 19 nt, Homo sapiens
  misc_RNA (1)...(19): siRNA sense strand
aaauguacguggacgacuu

SEQ ID NO: 922392 - RNA, 19 nt, Homo sapiens
  misc_RNA (1)...(19): siRNA sense strand
gggacuuccucaacgcauu

SEQ ID NO: 922393 - RNA, 19 nt, Homo sapiens
  misc_RNA (1)...(19): siRNA sense strand
ucaagcauguggcucagau

SEQ ID NO: 922394 - RNA, 19 nt, Homo sapiens
  misc_RNA (1)...(19): siRNA sense strand
gcauguggugucagaguuu

SEQ ID NO: 922395 - RNA, 19 nt, Homo sapiens
  misc_RNA (1)...(19): siRNA sense strand
caagcuggaugaagaugag

SEQ ID NO: 922396 - RNA, 19 nt, Homo sapiens
  misc_RNA (1)...(19): siRNA sense strand
uggcucagcuauucaucaa

SEQ ID NO: 922397 - RNA, 19 nt, Homo sapiens
  misc_RNA (1)...(19): siRNA sense strand
ggacuuccucaacgcauug

SEQ ID NO: 922398 - RNA, 19 nt, Homo sapiens
  misc_RNA (1)...(19): siRNA sense strand
aacacagccuggauaugua

SEQ ID NO: 922399 - RNA, 19 nt, Homo sapiens
  misc_RNA (1)...(19): siRNA sense strand
gcaaaucaucaucuucagu

SEQ ID NO: 922400 - RNA, 19 nt, Homo sapiens
  misc_RNA (1)...(19): siRNA sense strand
ccgagacuauuucuugcaa

SEQ ID NO: 922401 - RNA, 19 nt, Homo sapiens
  misc_RNA (1)...(19): siRNA sense strand
aggauuguguuugggaaua

SEQ ID NO: 922402 - RNA, 19 nt, Homo sapiens
  misc_RNA (1)...(19): siRNA sense strand
ggggagcccuggaagaauu

SEQ ID NO: 922403 - RNA, 19 nt, Homo sapiens
  misc_RNA (1)...(19): siRNA sense strand
gaccauaugagaacuggau

SEQ ID NO: 922404 - RNA, 19 nt, Homo sapiens
  misc_RNA (1)...(19): siRNA sense strand
gaggaggaacagaagaaga

SEQ ID NO: 922405 - RNA, 19 nt, Homo sapiens
  misc_RNA (1)...(19): siRNA sense strand
guggaacacagccuggaua

SEQ ID NO: 922406 - RNA, 19 nt, Homo sapiens
  misc_RNA (1)...(19): siRNA sense strand
gcucaaggauuuucucaag

SEQ ID NO: 922407 - RNA, 19 nt, Homo sapiens
  misc_RNA (1)...(19): siRNA sense strand
gcuacaacggugucugaaa

SEQ ID NO: 922408 - RNA, 19 nt, Homo sapiens
  misc_RNA (1)...(19): siRNA sense strand
agaagaaggcucuggaaag

SEQ ID NO: 922409 - RNA, 19 nt, Homo sapiens
  misc_RNA (1)...(19): siRNA sense strand
uguccugagugaacuggua

SEQ ID NO: 922410 - RNA, 19 nt, Homo sapiens
  misc_RNA (1)...(19): siRNA sense strand
acacacacacccaucaaug

SEQ ID NO: 922411 - RNA, 19 nt, Homo sapiens
  misc_RNA (1)...(19): siRNA sense strand
gcagucacccauugaguac

SEQ ID NO: 922412 - RNA, 19 nt, Homo sapiens
  misc_RNA (1)...(19): siRNA sense strand
caccugaagaggagacuuu

SEQ ID NO: 922413 - RNA, 19 nt, Homo sapiens
  misc_RNA (1)...(19): siRNA sense strand
gcgcugcaacgauaugaug

SEQ ID NO: 922414 - RNA, 19 nt, Homo sapiens
  misc_RNA (1)...(19): siRNA sense strand
gugacaggauuguguuugg

SEQ ID NO: 922415 - RNA, 19 nt, Homo sapiens
  misc_RNA (1)...(19): siRNA sense strand
gugaacugguagaaacaga

SEQ ID NO: 922416 - RNA, 19 nt, Homo sapiens
  misc_RNA (1)...(19): siRNA sense strand
gugaggaggaacagaagaa

SEQ ID NO: 922417 - RNA, 19 nt, Homo sapiens
  misc_RNA (1)...(19): siRNA sense strand
gcugaacgaccuccucauc

SEQ ID NO: 922418 - RNA, 19 nt, Homo sapiens
  misc_RNA (1)...(19): siRNA sense strand
uggaaaggaguauguaugu

SEQ ID NO: 922419 - RNA, 19 nt, Homo sapiens
  misc_RNA (1)...(19): siRNA sense strand
agacgcagccaccugaaga

SEQ ID NO: 922420 - RNA, 19 nt, Homo sapiens
  misc_RNA (1)...(19): siRNA sense strand
gagcauguggugucagagu

SEQ ID NO: 922421 - RNA, 19 nt, Homo sapiens
  misc_RNA (1)...(19): siRNA sense strand
aggaggaacagaagaagaa

SEQ ID NO: 922422 - RNA, 19 nt, Homo sapiens
  misc_RNA (1)...(19): siRNA sense strand
gccuggauauguauacaag

SEQ ID NO: 922423 - RNA, 19 nt, Homo sapiens
  misc_RNA (1)...(19): siRNA sense strand
aaaucaucaucuucaguga

SEQ ID NO: 922424 - RNA, 19 nt, Homo sapiens
  misc_RNA (1)...(19): siRNA sense strand
ccaaacauugucucagugu

SEQ ID NO: 922425 - RNA, 19 nt, Homo sapiens
  misc_RNA (1)...(19): siRNA sense strand
cauaugagaacuggauguu

SEQ ID NO: 922426 - RNA, 19 nt, Homo sapiens
  misc_RNA (1)...(19): siRNA sense strand
gcucuggaaaggaguaugu

SEQ ID NO: 922427 - RNA, 19 nt, Homo sapiens
  misc_RNA (1)...(19): siRNA sense strand
aagaagaaggcucuggaaa

SEQ ID NO: 922428 - RNA, 19 nt, Homo sapiens
  misc_RNA (1)...(19): siRNA sense strand
gauuguggaggguuauaug

SEQ ID NO: 922429 - RNA, 19 nt, Homo sapiens
  misc_RNA (1)...(19): siRNA sense strand
gaggagcugccggaacuga

SEQ ID NO: 922430 - RNA, 19 nt, Homo sapiens
  misc_RNA (1)...(19): siRNA sense strand
gugcagcggaucaugaaau

SEQ ID NO: 922431 - RNA, 19 nt, Homo sapiens
  misc_RNA (1)...(19): siRNA sense strand
agagugaggaggaacagaa

SEQ ID NO: 922432 - RNA, 19 nt, Homo sapiens
  misc_RNA (1)...(19): siRNA sense strand
caacggugucugaaagauc

SEQ ID NO: 922433 - RNA, 19 nt, Homo sapiens
  misc_RNA (1)...(19): siRNA sense strand
aaacaggcccuuggugaca

SEQ ID NO: 922434 - RNA, 19 nt, Homo sapiens
  misc_RNA (1)...(19): siRNA sense strand
uacaagaacagcauuaagg

SEQ ID NO: 922435 - RNA, 19 nt, Homo sapiens
  misc_RNA (1)...(19): siRNA sense strand
ucgaggccgugacaggauu

SEQ ID NO: 922436 - RNA, 19 nt, Homo sapiens
  misc_RNA (1)...(19): siRNA sense strand
ugaccuugcugaccacacu

SEQ ID NO: 922437 - RNA, 19 nt, Homo sapiens
  misc_RNA (1)...(19): siRNA sense strand
ggugacccuugccgcuuug

SEQ ID NO: 922438 - RNA, 19 nt, Homo sapiens
  misc_RNA (1)...(19): siRNA sense strand
uugggaauauccagcaaau

SEQ ID NO: 922439 - RNA, 19 nt, Homo sapiens
  misc_RNA (1)...(19): siRNA sense strand
ggauaaacaggcccuuggu

SEQ ID NO: 922440 - RNA, 19 nt, Homo sapiens
  misc_RNA (1)...(19): siRNA sense strand
ugcagucacccauugagua

SEQ ID NO: 922441 - RNA, 19 nt, Homo sapiens
  misc_RNA (1)...(19): siRNA sense strand
ggaacacagccuggauaug

SEQ ID NO: 922442 - RNA, 19 nt, Homo sapiens
  misc_RNA (1)...(19): siRNA sense strand
cauguggugucagaguuug

SEQ ID NO: 922443 - RNA, 19 nt, Homo sapiens
  misc_RNA (1)...(19): siRNA sense strand
uuccaaacauugucucagu

SEQ ID NO: 922444 - RNA, 19 nt, Homo sapiens
  misc_RNA (1)...(19): siRNA sense strand
ccaagcuggaugaagauga

SEQ ID NO: 922445 - RNA, 19 nt, Homo sapiens
  misc_RNA (1)...(19): siRNA sense strand
gaucauuccaaacauuguc

SEQ ID NO: 922446 - RNA, 19 nt, Homo sapiens
  misc_RNA (1)...(19): siRNA sense strand
cgggagagccagaccaaca

SEQ ID NO: 922447 - RNA, 19 nt, Homo sapiens
  misc_RNA (1)...(19): siRNA sense strand
acaagaacagcauuaaggu

SEQ ID NO: 922448 - RNA, 19 nt, Homo sapiens
  misc_RNA (1)...(19): siRNA sense strand
guggaggucaugugcuuug

SEQ ID NO: 922449 - RNA, 19 nt, Homo sapiens
  misc_RNA (1)...(19): siRNA sense strand
ugaguggcaccgagacuau

SEQ ID NO: 922450 - RNA, 19 nt, Homo sapiens
  misc_RNA (1)...(19): siRNA sense strand
gaauuuaccucuacucauu

SEQ ID NO: 922451 - RNA, 19 nt, Homo sapiens
  misc_RNA (1)...(19): siRNA sense strand
gaagaacacucauuacaug

SEQ ID NO: 922452 - RNA, 19 nt, Homo sapiens
  misc_RNA (1)...(19): siRNA sense strand
gaacaaagguaccaagcaa

SEQ ID NO: 922453 - RNA, 19 nt, Homo sapiens
  misc_RNA (1)...(19): siRNA sense strand
gcauguaucuggaucaauu

SEQ ID NO: 922454 - RNA, 19 nt, Homo sapiens
  misc_RNA (1)...(19): siRNA sense strand
ugacaucgauccagaaauu

SEQ ID NO: 922455 - RNA, 19 nt, Homo sapiens
  misc_RNA (1)...(19): siRNA sense strand
caagauggcuucccagaga

SEQ ID NO: 922456 - RNA, 19 nt, Homo sapiens
  misc_RNA (1)...(19): siRNA sense strand
ggaaacaucuacccuggaa

SEQ ID NO: 922457 - RNA, 19 nt, Homo sapiens
  misc_RNA (1)...(19): siRNA sense strand
ugacguguaugaucaguua

SEQ ID NO: 922458 - RNA, 19 nt, Homo sapiens
  misc_RNA (1)...(19): siRNA sense strand
ggugguagcuuucaaggaa

SEQ ID NO: 922459 - RNA, 19 nt, Homo sapiens
  misc_RNA (1)...(19): siRNA sense strand
gcaaagaucuacccaacuc

SEQ ID NO: 922460 - RNA, 19 nt, Homo sapiens
  misc_RNA (1)...(19): siRNA sense strand
caguggagcuucaguuuaa

SEQ ID NO: 922461 - RNA, 19 nt, Homo sapiens
  misc_RNA (1)...(19): siRNA sense strand
gaagaugacccuccaguau

SEQ ID NO: 922462 - RNA, 19 nt, Homo sapiens
  misc_RNA (1)...(19): siRNA sense strand
gaaggaaguuucuguuucu

SEQ ID NO: 922463 - RNA, 19 nt, Homo sapiens
  misc_RNA (1)...(19): siRNA sense strand
gaaacuugccauacaaauu

SEQ ID NO: 922464 - RNA, 19 nt, Homo sapiens
  misc_RNA (1)...(19): siRNA sense strand
gcccauaguggaagaauua

SEQ ID NO: 922465 - RNA, 19 nt, Homo sapiens
  misc_RNA (1)...(19): siRNA sense strand
gaugaucuuugaugccuuu

SEQ ID NO: 922466 - RNA, 19 nt, Homo sapiens
  misc_RNA (1)...(19): siRNA sense strand
gcagacaguucgucaucaa

SEQ ID NO: 922467 - RNA, 19 nt, Homo sapiens
  misc_RNA (1)...(19): siRNA sense strand
gcuaagagucuaacuaguu

SEQ ID NO: 922468 - RNA, 19 nt, Homo sapiens
  misc_RNA (1)...(19): siRNA sense strand
gaaaugauaccuuugacau

SEQ ID NO: 922469 - RNA, 19 nt, Homo sapiens
  misc_RNA (1)...(19): siRNA sense strand
agacugaacuucguacauu

SEQ ID NO: 922470 - RNA, 19 nt, Homo sapiens
  misc_RNA (1)...(19): siRNA sense strand
ccgaauggaugacacauau

SEQ ID NO: 922471 - RNA, 19 nt, Homo sapiens
  misc_RNA (1)...(19): siRNA sense strand
gaacuuaacacuggacuuc

SEQ ID NO: 922472 - RNA, 19 nt, Homo sapiens
  misc_RNA (1)...(19): siRNA sense strand
ggaagagaauacuauagca

SEQ ID NO: 922473 - RNA, 19 nt, Homo sapiens
  misc_RNA (1)...(19): siRNA sense strand
ggaaguuucuguuucugau

SEQ ID NO: 922474 - RNA, 19 nt, Homo sapiens
  misc_RNA (1)...(19): siRNA sense strand
ugcauuagaucugugauua

SEQ ID NO: 922475 - RNA, 19 nt, Homo sapiens
  misc_RNA (1)...(19): siRNA sense strand
uguaaagacuggcauguau

SEQ ID NO: 922476 - RNA, 19 nt, Homo sapiens
  misc_RNA (1)...(19): siRNA sense strand
aaagugacguguaugauca

SEQ ID NO: 922477 - RNA, 19 nt, Homo sapiens
  misc_RNA (1)...(19): siRNA sense strand
caaggaagagaauacuaua

SEQ ID NO: 922478 - RNA, 19 nt, Homo sapiens
  misc_RNA (1)...(19): siRNA sense strand
ucaucagccucuuuauaua

SEQ ID NO: 922479 - RNA, 19 nt, Homo sapiens
  misc_RNA (1)...(19): siRNA sense strand
ggaugguacauuaugauua

SEQ ID NO: 922480 - RNA, 19 nt, Homo sapiens
  misc_RNA (1)...(19): siRNA sense strand
caguuaaucuucgcaguaa

SEQ ID NO: 922481 - RNA, 19 nt, Homo sapiens
  misc_RNA (1)...(19): siRNA sense strand
gugcagcuaugauuuacuu

SEQ ID NO: 922482 - RNA, 19 nt, Homo sapiens
  misc_RNA (1)...(19): siRNA sense strand
ugacuuuacucugacuaua

SEQ ID NO: 922483 - RNA, 19 nt, Homo sapiens
  misc_RNA (1)...(19): siRNA sense strand
gacugaacuucguacauuu

SEQ ID NO: 922484 - RNA, 19 nt, Homo sapiens
  misc_RNA (1)...(19): siRNA sense strand
ucauugcacugaucacuga

SEQ ID NO: 922485 - RNA, 19 nt, Homo sapiens
  misc_RNA (1)...(19): siRNA sense strand
gcuaugauuuacuuagguu

SEQ ID NO: 922486 - RNA, 19 nt, Homo sapiens
  misc_RNA (1)...(19): siRNA sense strand
ccauuaaucugcagacagu

SEQ ID NO: 922487 - RNA, 19 nt, Homo sapiens
  misc_RNA (1)...(19): siRNA sense strand
cauuagaucugugauuaga

SEQ ID NO: 922488 - RNA, 19 nt, Homo sapiens
  misc_RNA (1)...(19): siRNA sense strand
ugacuugcuugguuucauu

SEQ ID NO: 922489 - RNA, 19 nt, Homo sapiens
  misc_RNA (1)...(19): siRNA sense strand
guucugggcucgagguaga

SEQ ID NO: 922490 - RNA, 19 nt, Homo sapiens
  misc_RNA (1)...(19): siRNA sense strand
agcaggaguuugucaauuu

SEQ ID NO: 922491 - RNA, 19 nt, Homo sapiens
  misc_RNA (1)...(19): siRNA sense strand
cagcaaacaucuccaucug

SEQ ID NO: 922492 - RNA, 19 nt, Homo sapiens
  misc_RNA (1)...(19): siRNA sense strand
aaacuugccauacaaauuc

SEQ ID NO: 922493 - RNA, 19 nt, Homo sapiens
  misc_RNA (1)...(19): siRNA sense strand
cagcaggaguuugucaauu

SEQ ID NO: 922494 - RNA, 19 nt, Homo sapiens
  misc_RNA (1)...(19): siRNA sense strand
uguuaugacuuuacucuga

SEQ ID NO: 922495 - RNA, 19 nt, Homo sapiens
  misc_RNA (1)...(19): siRNA sense strand
gacaguucgucaucaagaa

SEQ ID NO: 922496 - RNA, 19 nt, Homo sapiens
  misc_RNA (1)...(19): siRNA sense strand
caucuacccuggaaaugau

SEQ ID NO: 922497 - RNA, 19 nt, Homo sapiens
  misc_RNA (1)...(19): siRNA sense strand
ucaaacaccuuuuccuaaa

SEQ ID NO: 922498 - RNA, 19 nt, Homo sapiens
  misc_RNA (1)...(19): siRNA sense strand
gaucuuugaugccuuuguc

SEQ ID NO: 922499 - RNA, 19 nt, Homo sapiens
  misc_RNA (1)...(19): siRNA sense strand
gauaaauggagaugauaug

SEQ ID NO: 922500 - RNA, 19 nt, Homo sapiens
  misc_RNA (1)...(19): siRNA sense strand
aaauugcaauggugacuau

SEQ ID NO: 922501 - RNA, 19 nt, Homo sapiens
  misc_RNA (1)...(19): siRNA sense strand
uacuuagucuggcuguuua

SEQ ID NO: 922502 - RNA, 19 nt, Homo sapiens
  misc_RNA (1)...(19): siRNA sense strand
cuauccagcuggucuuauu

SEQ ID NO: 922503 - RNA, 19 nt, Homo sapiens
  misc_RNA (1)...(19): siRNA sense strand
gaagagaauacuauagcau

SEQ ID NO: 922504 - RNA, 19 nt, Homo sapiens
  misc_RNA (1)...(19): siRNA sense strand
caucagccucuuuauauau

SEQ ID NO: 922505 - RNA, 19 nt, Homo sapiens
  misc_RNA (1)...(19): siRNA sense strand
caagcuaagagucuaacua

SEQ ID NO: 922506 - RNA, 19 nt, Homo sapiens
  misc_RNA (1)...(19): siRNA sense strand
ggaaauccaagcuaagagu

SEQ ID NO: 922507 - RNA, 19 nt, Homo sapiens
  misc_RNA (1)...(19): siRNA sense strand
uuagaggacuucagcuuca

SEQ ID NO: 922508 - RNA, 19 nt, Homo sapiens
  misc_RNA (1)...(19): siRNA sense strand
cagaagaacacucauuaca

SEQ ID NO: 922509 - RNA, 19 nt, Homo sapiens
  misc_RNA (1)...(19): siRNA sense strand
gacuuuacucugacuauaa

SEQ ID NO: 922510 - RNA, 19 nt, Homo sapiens
  misc_RNA (1)...(19): siRNA sense strand
caaagugacguguaugauc

SEQ ID NO: 922511 - RNA, 19 nt, Homo sapiens
  misc_RNA (1)...(19): siRNA sense strand
ucaaggaagagaauacuau

SEQ ID NO: 922512 - RNA, 19 nt, Homo sapiens
  misc_RNA (1)...(19): siRNA sense strand
ugauauguuugccacguuu

SEQ ID NO: 922513 - RNA, 19 nt, Homo sapiens
  misc_RNA (1)...(19): siRNA sense strand
agaacucccugacuguuau

SEQ ID NO: 922514 - RNA, 19 nt, Homo sapiens
  misc_RNA (1)...(19): siRNA sense strand
ggacuuccacagacuccua

SEQ ID NO: 922515 - RNA, 19 nt, Homo sapiens
  misc_RNA (1)...(19): siRNA sense strand
aaacaucuacccuggaaau

SEQ ID NO: 922516 - RNA, 19 nt, Homo sapiens
  misc_RNA (1)...(19): siRNA sense strand
ggccuuaccaugacaaguu

SEQ ID NO: 922517 - RNA, 19 nt, Homo sapiens
  misc_RNA (1)...(19): siRNA sense strand
gcaggaguuugucaauuuu

SEQ ID NO: 922518 - RNA, 19 nt, Homo sapiens
  misc_RNA (1)...(19): siRNA sense strand
aaacugaaagccauuaauc

SEQ ID NO: 922519 - RNA, 19 nt, Homo sapiens
  misc_RNA (1)...(19): siRNA sense strand
gccuuaccaugacaaguuu

SEQ ID NO: 922520 - RNA, 19 nt, Homo sapiens
  misc_RNA (1)...(19): siRNA sense strand
ggaaacuugccauacaaau

SEQ ID NO: 922521 - RNA, 19 nt, Homo sapiens
  misc_RNA (1)...(19): siRNA sense strand
cuggaucaauucagaagaa

SEQ ID NO: 922522 - RNA, 19 nt, Homo sapiens
  misc_RNA (1)...(19): siRNA sense strand
ggaaaugauaccuuugaca

SEQ ID NO: 922523 - RNA, 19 nt, Homo sapiens
  misc_RNA (1)...(19): siRNA sense strand
ucaguuaaucuucgcagua

SEQ ID NO: 922524 - RNA, 19 nt, Homo sapiens
  misc_RNA (1)...(19): siRNA sense strand
aaggauauauggaccgaau

SEQ ID NO: 922525 - RNA, 19 nt, Homo sapiens
  misc_RNA (1)...(19): siRNA sense strand
caauuaagcaauaccaaca

SEQ ID NO: 922526 - RNA, 19 nt, Homo sapiens
  misc_RNA (1)...(19): siRNA sense strand
ucugauaaauggagaugau

SEQ ID NO: 922527 - RNA, 19 nt, Homo sapiens
  misc_RNA (1)...(19): siRNA sense strand
caucugaggagcuucuauu

SEQ ID NO: 922528 - RNA, 19 nt, Homo sapiens
  misc_RNA (1)...(19): siRNA sense strand
gaaauugaaacugaguguu

SEQ ID NO: 922529 - RNA, 19 nt, Homo sapiens
  misc_RNA (1)...(19): siRNA sense strand
auccagaaauugaaacuga

SEQ ID NO: 922530 - RNA, 19 nt, Homo sapiens
  misc_RNA (1)...(19): siRNA sense strand
gcaaucugcuauggcaauc

SEQ ID NO: 922531 - RNA, 19 nt, Homo sapiens
  misc_RNA (1)...(19): siRNA sense strand
gauuagaggacuucagcuu

SEQ ID NO: 922532 - RNA, 19 nt, Homo sapiens
  misc_RNA (1)...(19): siRNA sense strand
aagaacucccugacuguua

SEQ ID NO: 922533 - RNA, 19 nt, Homo sapiens
  misc_RNA (1)...(19): siRNA sense strand
ggagccagaugaaccuuuu

SEQ ID NO: 922534 - RNA, 19 nt, Homo sapiens
  misc_RNA (1)...(19): siRNA sense strand
uaacaguggagcuucaguu

SEQ ID NO: 922535 - RNA, 19 nt, Homo sapiens
  misc_RNA (1)...(19): siRNA sense strand
ucauucaucagccucuuua

SEQ ID NO: 922536 - RNA, 19 nt, Homo sapiens
  misc_RNA (1)...(19): siRNA sense strand
gaauggaugacacauaugc

SEQ ID NO: 922537 - RNA, 19 nt, Homo sapiens
  misc_RNA (1)...(19): siRNA sense strand
cgaaacaauuaagcaauac

SEQ ID NO: 922538 - RNA, 19 nt, Homo sapiens
  misc_RNA (1)...(19): siRNA sense strand
aaaguacaaccuccucauu

SEQ ID NO: 922539 - RNA, 19 nt, Homo sapiens
  misc_RNA (1)...(19): siRNA sense strand
gcauacuucuugggacuuc

SEQ ID NO: 922540 - RNA, 19 nt, Homo sapiens
  misc_RNA (1)...(19): siRNA sense strand
acaguggagcuucaguuua

SEQ ID NO: 922541 - RNA, 19 nt, Homo sapiens
  misc_RNA (1)...(19): siRNA sense strand
guacuugcagcuauacaau

SEQ ID NO: 922542 - RNA, 19 nt, Homo sapiens
  misc_RNA (1)...(19): siRNA sense strand
gaucuacccaacucuggaa

SEQ ID NO: 922543 - RNA, 19 nt, Homo sapiens
  misc_RNA (1)...(19): siRNA sense strand
uaagcaauaccaacaagau

SEQ ID NO: 922544 - RNA, 19 nt, Homo sapiens
  misc_RNA (1)...(19): siRNA sense strand
caagaacucccugacuguu

SEQ ID NO: 922545 - RNA, 19 nt, Homo sapiens
  misc_RNA (1)...(19): siRNA sense strand
ugacauuuccaucagagaa

SEQ ID NO: 922546 - RNA, 19 nt, Homo sapiens
  misc_RNA (1)...(19): siRNA sense strand
uuacuuagucuggcuguuu

SEQ ID NO: 922547 - RNA, 19 nt, Homo sapiens
  misc_RNA (1)...(19): siRNA sense strand
aaguacaaccuccucauuu

SEQ ID NO: 922548 - RNA, 19 nt, Homo sapiens
  misc_RNA (1)...(19): siRNA sense strand
uucagaagaacacucauua

SEQ ID NO: 922549 - RNA, 19 nt, Homo sapiens
  misc_RNA (1)...(19): siRNA sense strand
caucagagaauguaaagac

SEQ ID NO: 922550 - RNA, 19 nt, Homo sapiens
  misc_RNA (1)...(19): siRNA sense strand
gaagaugacuggaaacugu

SEQ ID NO: 922551 - RNA, 19 nt, Homo sapiens
  misc_RNA (1)...(19): siRNA sense strand
ggagaaaccaauagaaaua

SEQ ID NO: 922552 - RNA, 19 nt, Homo sapiens
  misc_RNA (1)...(19): siRNA sense strand
gaaagaaacggauuuacaa

SEQ ID NO: 922553 - RNA, 19 nt, Homo sapiens
  misc_RNA (1)...(19): siRNA sense strand
ggaccaacuuuauaugaaa

SEQ ID NO: 922554 - RNA, 19 nt, Homo sapiens
  misc_RNA (1)...(19): siRNA sense strand
uaacgagguuugugaaaug

SEQ ID NO: 922555 - RNA, 19 nt, Homo sapiens
  misc_RNA (1)...(19): siRNA sense strand
ggaacggauucucaucuuu

SEQ ID NO: 922556 - RNA, 19 nt, Homo sapiens
  misc_RNA (1)...(19): siRNA sense strand
gaagaacuguaauaaaugc

SEQ ID NO: 922557 - RNA, 19 nt, Homo sapiens
  misc_RNA (1)...(19): siRNA sense strand
gaacugaagaugacuggaa

SEQ ID NO: 922558 - RNA, 19 nt, Homo sapiens
  misc_RNA (1)...(19): siRNA sense strand
gaggagaaaccaauagaaa

SEQ ID NO: 922559 - RNA, 19 nt, Homo sapiens
  misc_RNA (1)...(19): siRNA sense strand
caagaaagaaacggauuua

SEQ ID NO: 922560 - RNA, 19 nt, Homo sapiens
  misc_RNA (1)...(19): siRNA sense strand
gauaauaggauaugguuuc

SEQ ID NO: 922561 - RNA, 19 nt, Homo sapiens
  misc_RNA (1)...(19): siRNA sense strand
gcaagaaagaaacggauuu

SEQ ID NO: 922562 - RNA, 19 nt, Homo sapiens
  misc_RNA (1)...(19): siRNA sense strand
cagaggagguggaggaaga

SEQ ID NO: 922563 - RNA, 19 nt, Homo sapiens
  misc_RNA (1)...(19): siRNA sense strand
guugaugccucauucuaaa

SEQ ID NO: 922564 - RNA, 19 nt, Homo sapiens
  misc_RNA (1)...(19): siRNA sense strand
gauaugguuucggaacuuu

SEQ ID NO: 922565 - RNA, 19 nt, Homo sapiens
  misc_RNA (1)...(19): siRNA sense strand
gaggaccaacuuuauauga

SEQ ID NO: 922566 - RNA, 19 nt, Homo sapiens
  misc_RNA (1)...(19): siRNA sense strand
gagagaaacagcaagugaa

SEQ ID NO: 922567 - RNA, 19 nt, Homo sapiens
  misc_RNA (1)...(19): siRNA sense strand
gaccacguguuuacuuuca

SEQ ID NO: 922568 - RNA, 19 nt, Homo sapiens
  misc_RNA (1)...(19): siRNA sense strand
auauguggcuuucaaauuc

SEQ ID NO: 922569 - RNA, 19 nt, Homo sapiens
  misc_RNA (1)...(19): siRNA sense strand
ggauaugguuucggaacuu

SEQ ID NO: 922570 - RNA, 19 nt, Homo sapiens
  misc_RNA (1)...(19): siRNA sense strand
gaaauaggaccucguuuug

SEQ ID NO: 922571 - RNA, 19 nt, Homo sapiens
  misc_RNA (1)...(19): siRNA sense strand
guaaggauaagcuauuugu

SEQ ID NO: 922572 - RNA, 19 nt, Homo sapiens
  misc_RNA (1)...(19): siRNA sense strand
ugaaagaugugccgcaaaa

SEQ ID NO: 922573 - RNA, 19 nt, Homo sapiens
  misc_RNA (1)...(19): siRNA sense strand
gcaucggcgugucauaaga

SEQ ID NO: 922574 - RNA, 19 nt, Homo sapiens
  misc_RNA (1)...(19): siRNA sense strand
guguuuacuuucaccauuu

SEQ ID NO: 922575 - RNA, 19 nt, Homo sapiens
  misc_RNA (1)...(19): siRNA sense strand
uuucggaacuuucagauca

SEQ ID NO: 922576 - RNA, 19 nt, Homo sapiens
  misc_RNA (1)...(19): siRNA sense strand
agaaacagcaagugaaaga

SEQ ID NO: 922577 - RNA, 19 nt, Homo sapiens
  misc_RNA (1)...(19): siRNA sense strand
guagaaauaggaccucguu

SEQ ID NO: 922578 - RNA, 19 nt, Homo sapiens
  misc_RNA (1)...(19): siRNA sense strand
gaacuuucagaucauagaa

SEQ ID NO: 922579 - RNA, 19 nt, Homo sapiens
  misc_RNA (1)...(19): siRNA sense strand
cggaccaucugcuaaauuc

SEQ ID NO: 922580 - RNA, 19 nt, Homo sapiens
  misc_RNA (1)...(19): siRNA sense strand
gaaagaaagagccgaagac

SEQ ID NO: 922581 - RNA, 19 nt, Homo sapiens
  misc_RNA (1)...(19): siRNA sense strand
gaacggauucucaucuuuu

SEQ ID NO: 922582 - RNA, 19 nt, Homo sapiens
  misc_RNA (1)...(19): siRNA sense strand
agacucuucuuccacauga

SEQ ID NO: 922583 - RNA, 19 nt, Homo sapiens
  misc_RNA (1)...(19): siRNA sense strand
caucacagcugcaaaauac

SEQ ID NO: 922584 - RNA, 19 nt, Homo sapiens
  misc_RNA (1)...(19): siRNA sense strand
gcuaaauuccuuguucaaa

SEQ ID NO: 922585 - RNA, 19 nt, Homo sapiens
  misc_RNA (1)...(19): siRNA sense strand
aacaggaucucuauaugug

SEQ ID NO: 922586 - RNA, 19 nt, Homo sapiens
  misc_RNA (1)...(19): siRNA sense strand
aaacaggaucucuauaugu

SEQ ID NO: 922587 - RNA, 19 nt, Homo sapiens
  misc_RNA (1)...(19): siRNA sense strand
gugaaaugaagaacuguaa

SEQ ID NO: 922588 - RNA, 19 nt, Homo sapiens
  misc_RNA (1)...(19): siRNA sense strand
agaaagaaacggauuuaca

SEQ ID NO: 922589 - RNA, 19 nt, Homo sapiens
  misc_RNA (1)...(19): siRNA sense strand
gauuugaaagcaagaaaga

SEQ ID NO: 922590 - RNA, 19 nt, Homo sapiens
  misc_RNA (1)...(19): siRNA sense strand
ucacggaccaucugcuaaa

SEQ ID NO: 922591 - RNA, 19 nt, Homo sapiens
  misc_RNA (1)...(19): siRNA sense strand
aaggauaagcuauuuguga

SEQ ID NO: 922592 - RNA, 19 nt, Homo sapiens
  misc_RNA (1)...(19): siRNA sense strand
gaucauagaagaagaugcu

SEQ ID NO: 922593 - RNA, 19 nt, Homo sapiens
  misc_RNA (1)...(19): siRNA sense strand
augcaggacuugagaaugu

SEQ ID NO: 922594 - RNA, 19 nt, Homo sapiens
  misc_RNA (1)...(19): siRNA sense strand
gaggauggacagugggaaa

SEQ ID NO: 922595 - RNA, 19 nt, Homo sapiens
  misc_RNA (1)...(19): siRNA sense strand
agagaaacagcaagugaaa

SEQ ID NO: 922596 - RNA, 19 nt, Homo sapiens
  misc_RNA (1)...(19): siRNA sense strand
ggauaagcuauuugugauu

SEQ ID NO: 922597 - RNA, 19 nt, Homo sapiens
  misc_RNA (1)...(19): siRNA sense strand
uuaacgagguuugugaaau

SEQ ID NO: 922598 - RNA, 19 nt, Homo sapiens
  misc_RNA (1)...(19): siRNA sense strand
aaacagcaagugaaagaug

SEQ ID NO: 922599 - RNA, 19 nt, Homo sapiens
  misc_RNA (1)...(19): siRNA sense strand
ggaacuuucagaucauaga

SEQ ID NO: 922600 - RNA, 19 nt, Homo sapiens
  misc_RNA (1)...(19): siRNA sense strand
gaugaauuaccacauuaug

SEQ ID NO: 922601 - RNA, 19 nt, Homo sapiens
  misc_RNA (1)...(19): siRNA sense strand
aggauaagcuauuugugau

SEQ ID NO: 922602 - RNA, 19 nt, Homo sapiens
  misc_RNA (1)...(19): siRNA sense strand
uaacaccagcugaggagaa

SEQ ID NO: 922603 - RNA, 19 nt, Homo sapiens
  misc_RNA (1)...(19): siRNA sense strand
ggaggaccaacuuuauaug

SEQ ID NO: 922604 - RNA, 19 nt, Homo sapiens
  misc_RNA (1)...(19): siRNA sense strand
uggaccacguguuuacuuu

SEQ ID NO: 922605 - RNA, 19 nt, Homo sapiens
  misc_RNA (1)...(19): siRNA sense strand
cguguuuacuuucaccauu

SEQ ID NO: 922606 - RNA, 19 nt, Homo sapiens
  misc_RNA (1)...(19): siRNA sense strand
agagagaaacagcaaguga

SEQ ID NO: 922607 - RNA, 19 nt, Homo sapiens
  misc_RNA (1)...(19): siRNA sense strand
aggaccaacuuuauaugaa

SEQ ID NO: 922608 - RNA, 19 nt, Homo sapiens
  misc_RNA (1)...(19): siRNA sense strand
ucguaaggauaagcuauuu

SEQ ID NO: 922609 - RNA, 19 nt, Homo sapiens
  misc_RNA (1)...(19): siRNA sense strand
gaauuaccacauuaugcuu

SEQ ID NO: 922610 - RNA, 19 nt, Homo sapiens
  misc_RNA (1)...(19): siRNA sense strand
gauuaacgagguuugugaa

SEQ ID NO: 922611 - RNA, 19 nt, Homo sapiens
  misc_RNA (1)...(19): siRNA sense strand
agaugcugcucuuguagaa

SEQ ID NO: 922612 - RNA, 19 nt, Homo sapiens
  misc_RNA (1)...(19): siRNA sense strand
ccacauuaugcuuuguuaa

SEQ ID NO: 922613 - RNA, 19 nt, Homo sapiens
  misc_RNA (1)...(19): siRNA sense strand
gagaaaccaauagaaauac

SEQ ID NO: 922614 - RNA, 19 nt, Homo sapiens
  misc_RNA (1)...(19): siRNA sense strand
gcaucuauuuugaagcuaa

SEQ ID NO: 922615 - RNA, 19 nt, Homo sapiens
  misc_RNA (1)...(19): siRNA sense strand
ucggaacuuucagaucaua

SEQ ID NO: 922616 - RNA, 19 nt, Homo sapiens
  misc_RNA (1)...(19): siRNA sense strand
aacugaagaugacuggaaa

SEQ ID NO: 922617 - RNA, 19 nt, Homo sapiens
  misc_RNA (1)...(19): siRNA sense strand
auagaaauacaguggguaa

SEQ ID NO: 922618 - RNA, 19 nt, Homo sapiens
  misc_RNA (1)...(19): siRNA sense strand
gaaauacaguggguaaaac

SEQ ID NO: 922619 - RNA, 19 nt, Homo sapiens
  misc_RNA (1)...(19): siRNA sense strand
cgagguuugugaaaugaag

SEQ ID NO: 922620 - RNA, 19 nt, Homo sapiens
  misc_RNA (1)...(19): siRNA sense strand
gaaacagcaagugaaagau

SEQ ID NO: 922621 - RNA, 19 nt, Homo sapiens
  misc_RNA (1)...(19): siRNA sense strand
uggaggaccaacuuuauau

SEQ ID NO: 922622 - RNA, 19 nt, Homo sapiens
  misc_RNA (1)...(19): siRNA sense strand
ggagguggaggaagaagag

SEQ ID NO: 922623 - RNA, 19 nt, Homo sapiens
  misc_RNA (1)...(19): siRNA sense strand
ucugcuaaauuccuuguuc

SEQ ID NO: 922624 - RNA, 19 nt, Homo sapiens
  misc_RNA (1)...(19): siRNA sense strand
uauguggcuuucaaauuca

SEQ ID NO: 922625 - RNA, 19 nt, Homo sapiens
  misc_RNA (1)...(19): siRNA sense strand
aaaacaggaucucuauaug

SEQ ID NO: 922626 - RNA, 19 nt, Homo sapiens
  misc_RNA (1)...(19): siRNA sense strand
agaaagaaagagccgaaga

SEQ ID NO: 922627 - RNA, 19 nt, Homo sapiens
  misc_RNA (1)...(19): siRNA sense strand
ggauaauaggauaugguuu

SEQ ID NO: 922628 - RNA, 19 nt, Homo sapiens
  misc_RNA (1)...(19): siRNA sense strand
auucagaucuuuaguacac

SEQ ID NO: 922629 - RNA, 19 nt, Homo sapiens
  misc_RNA (1)...(19): siRNA sense strand
ucgcugaacugaagaugac

SEQ ID NO: 922630 - RNA, 19 nt, Homo sapiens
  misc_RNA (1)...(19): siRNA sense strand
aggaacggauucucaucuu

SEQ ID NO: 922631 - RNA, 19 nt, Homo sapiens
  misc_RNA (1)...(19): siRNA sense strand
cagcugaggagaaaccaau

SEQ ID NO: 922632 - RNA, 19 nt, Homo sapiens
  misc_RNA (1)...(19): siRNA sense strand
aauaaggaacggauucuca

SEQ ID NO: 922633 - RNA, 19 nt, Homo sapiens
  misc_RNA (1)...(19): siRNA sense strand
ugauuaacgagguuuguga

SEQ ID NO: 922634 - RNA, 19 nt, Homo sapiens
  misc_RNA (1)...(19): siRNA sense strand
ggaccucguuuugucuuaa

SEQ ID NO: 922635 - RNA, 19 nt, Homo sapiens
  misc_RNA (1)...(19): siRNA sense strand
augcugcucuuguagaaau

SEQ ID NO: 922636 - RNA, 19 nt, Homo sapiens
  misc_RNA (1)...(19): siRNA sense strand
ggaccacguguuuacuuuc

SEQ ID NO: 922637 - RNA, 19 nt, Homo sapiens
  misc_RNA (1)...(19): siRNA sense strand
cugcuaaauuccuuguuca

SEQ ID NO: 922638 - RNA, 19 nt, Homo sapiens
  misc_RNA (1)...(19): siRNA sense strand
gaaacggauuuacaaaagg

SEQ ID NO: 922639 - RNA, 19 nt, Homo sapiens
  misc_RNA (1)...(19): siRNA sense strand
ugaggagaaaccaauagaa

SEQ ID NO: 922640 - RNA, 19 nt, Homo sapiens
  misc_RNA (1)...(19): siRNA sense strand
aacaccagcugaggagaaa

SEQ ID NO: 922641 - RNA, 19 nt, Homo sapiens
  misc_RNA (1)...(19): siRNA sense strand
aacagcaagugaaagaugu

SEQ ID NO: 922642 - RNA, 19 nt, Homo sapiens
  misc_RNA (1)...(19): siRNA sense strand
acuuucagaucauagaaga

SEQ ID NO: 922643 - RNA, 19 nt, Homo sapiens
  misc_RNA (1)...(19): siRNA sense strand
gaacucuuaauucagaucu

SEQ ID NO: 922644 - RNA, 19 nt, Homo sapiens
  misc_RNA (1)...(19): siRNA sense strand
accacauuaugcuuuguua

SEQ ID NO: 922645 - RNA, 19 nt, Homo sapiens
  misc_RNA (1)...(19): siRNA sense strand
uacccucgcugaacugaag

SEQ ID NO: 922646 - RNA, 19 nt, Homo sapiens
  misc_RNA (1)...(19): siRNA sense strand
ugaauuaccacauuaugcu

SEQ ID NO: 922647 - RNA, 19 nt, Homo sapiens
  misc_RNA (1)...(19): siRNA sense strand
agaaacggauuuacaaaag

SEQ ID NO: 922648 - RNA, 19 nt, Homo sapiens
  misc_RNA (1)...(19): siRNA sense strand
aaacggcguggcaggcuuu

SEQ ID NO: 922649 - RNA, 19 nt, Homo sapiens
  misc_RNA (1)...(19): siRNA sense strand
guggcaggcuuugcaguuc

SEQ ID NO: 922650 - RNA, 19 nt, Homo sapiens
  misc_RNA (1)...(19): siRNA sense strand
aaacgcagcuggagauuaa

SEQ ID NO: 922651 - RNA, 19 nt, Homo sapiens
  misc_RNA (1)...(19): siRNA sense strand
gcucaaaugucaucacuug

SEQ ID NO: 922652 - RNA, 19 nt, Homo sapiens
  misc_RNA (1)...(19): siRNA sense strand
aaauacaccuguucugauu

SEQ ID NO: 922653 - RNA, 19 nt, Homo sapiens
  misc_RNA (1)...(19): siRNA sense strand
ggagaaugauugccgcuau

SEQ ID NO: 922654 - RNA, 19 nt, Homo sapiens
  misc_RNA (1)...(19): siRNA sense strand
gcagaacuuguaccaaaua

SEQ ID NO: 922655 - RNA, 19 nt, Homo sapiens
  misc_RNA (1)...(19): siRNA sense strand
agaagucuguagagaauuu

SEQ ID NO: 922656 - RNA, 19 nt, Homo sapiens
  misc_RNA (1)...(19): siRNA sense strand
cugcagaacuuguaccaaa

SEQ ID NO: 922657 - RNA, 19 nt, Homo sapiens
  misc_RNA (1)...(19): siRNA sense strand
caaaugucaucacuugguu

SEQ ID NO: 922658 - RNA, 19 nt, Homo sapiens
  misc_RNA (1)...(19): siRNA sense strand
cugcauggauuacaucaaa

SEQ ID NO: 922659 - RNA, 19 nt, Homo sapiens
  misc_RNA (1)...(19): siRNA sense strand
ggagaaaugcaaguacuuu

SEQ ID NO: 922660 - RNA, 19 nt, Homo sapiens
  misc_RNA (1)...(19): siRNA sense strand
ccaaaacgcucaaauguca

SEQ ID NO: 922661 - RNA, 19 nt, Homo sapiens
  misc_RNA (1)...(19): siRNA sense strand
ugucaucacuugguucuuu

SEQ ID NO: 922662 - RNA, 19 nt, Homo sapiens
  misc_RNA (1)...(19): siRNA sense strand
gcacccgcuucaaauauug

SEQ ID NO: 922663 - RNA, 19 nt, Homo sapiens
  misc_RNA (1)...(19): siRNA sense strand
uuagaagucuguagagaau

SEQ ID NO: 922664 - RNA, 19 nt, Homo sapiens
  misc_RNA (1)...(19): siRNA sense strand
gagaaugauugccgcuaug

SEQ ID NO: 922665 - RNA, 19 nt, Homo sapiens
  misc_RNA (1)...(19): siRNA sense strand
ccaaauacaccuguucuga

SEQ ID NO: 922666 - RNA, 19 nt, Homo sapiens
  misc_RNA (1)...(19): siRNA sense strand
aaacccaccucuugcaaug

SEQ ID NO: 922667 - RNA, 19 nt, Homo sapiens
  misc_RNA (1)...(19): siRNA sense strand
ggagguuugccgagaauuu

SEQ ID NO: 922668 - RNA, 19 nt, Homo sapiens
  misc_RNA (1)...(19): siRNA sense strand
ccauggcuuucaauccuua

SEQ ID NO: 922669 - RNA, 19 nt, Homo sapiens
  misc_RNA (1)...(19): siRNA sense strand
ucacccuccuccacacuua

SEQ ID NO: 922670 - RNA, 19 nt, Homo sapiens
  misc_RNA (1)...(19): siRNA sense strand
caaggcagcucaucaucag

SEQ ID NO: 922671 - RNA, 19 nt, Homo sapiens
  misc_RNA (1)...(19): siRNA sense strand
ggcuuucaauccuuacaua

SEQ ID NO: 922672 - RNA, 19 nt, Homo sapiens
  misc_RNA (1)...(19): siRNA sense strand
ggcacccgcuucaaauauu

SEQ ID NO: 922673 - RNA, 19 nt, Homo sapiens
  misc_RNA (1)...(19): siRNA sense strand
caaauauugugcccaugau

SEQ ID NO: 922674 - RNA, 19 nt, Homo sapiens
  misc_RNA (1)...(19): siRNA sense strand
gauaauacugugacaaucu

SEQ ID NO: 922675 - RNA, 19 nt, Homo sapiens
  misc_RNA (1)...(19): siRNA sense strand
gcauggcacccgcuucaaa

SEQ ID NO: 922676 - RNA, 19 nt, Homo sapiens
  misc_RNA (1)...(19): siRNA sense strand
caaauacaccuguucugau

SEQ ID NO: 922677 - RNA, 19 nt, Homo sapiens
  misc_RNA (1)...(19): siRNA sense strand
ucaaauauugugcccauga

SEQ ID NO: 922678 - RNA, 19 nt, Homo sapiens
  misc_RNA (1)...(19): siRNA sense strand
gcccauccaccaagaguuu

SEQ ID NO: 922679 - RNA, 19 nt, Homo sapiens
  misc_RNA (1)...(19): siRNA sense strand
ggaaacccaccucuugcaa

SEQ ID NO: 922680 - RNA, 19 nt, Homo sapiens
  misc_RNA (1)...(19): siRNA sense strand
gcuaugcucacccuacuga

SEQ ID NO: 922681 - RNA, 19 nt, Homo sapiens
  misc_RNA (1)...(19): siRNA sense strand
gaaacccaccucuugcaau

SEQ ID NO: 922682 - RNA, 19 nt, Homo sapiens
  misc_RNA (1)...(19): siRNA sense strand
gugauaauacugugacaau

SEQ ID NO: 922683 - RNA, 19 nt, Homo sapiens
  misc_RNA (1)...(19): siRNA sense strand
gauugaagcgagugauaau

SEQ ID NO: 922684 - RNA, 19 nt, Homo sapiens
  misc_RNA (1)...(19): siRNA sense strand
ugucaauguugcccugauu

SEQ ID NO: 922685 - RNA, 19 nt, Homo sapiens
  misc_RNA (1)...(19): siRNA sense strand
gaugcucgcgggagaaaug

SEQ ID NO: 922686 - RNA, 19 nt, Homo sapiens
  misc_RNA (1)...(19): siRNA sense strand
cuccaucaauuccagcuaa

SEQ ID NO: 922687 - RNA, 19 nt, Homo sapiens
  misc_RNA (1)...(19): siRNA sense strand
gcccagcagaugcagcuua

SEQ ID NO: 922688 - RNA, 19 nt, Homo sapiens
  misc_RNA (1)...(19): siRNA sense strand
gggccucguuccugcagaa

SEQ ID NO: 922689 - RNA, 19 nt, Homo sapiens
  misc_RNA (1)...(19): siRNA sense strand
uccuaugacuccaucaauu

SEQ ID NO: 922690 - RNA, 19 nt, Homo sapiens
  misc_RNA (1)...(19): siRNA sense strand
cuaauccucccauggcuuu

SEQ ID NO: 922691 - RNA, 19 nt, Homo sapiens
  misc_RNA (1)...(19): siRNA sense strand
ccuggaaacccaccucuug

SEQ ID NO: 922692 - RNA, 19 nt, Homo sapiens
  misc_RNA (1)...(19): siRNA sense strand
gcaaugccaggagcuguug

SEQ ID NO: 922693 - RNA, 19 nt, Homo sapiens
  misc_RNA (1)...(19): siRNA sense strand
uacugaugcuuccaugauu

SEQ ID NO: 922694 - RNA, 19 nt, Homo sapiens
  misc_RNA (1)...(19): siRNA sense strand
cccagcagaugcagcuuau

SEQ ID NO: 922695 - RNA, 19 nt, Homo sapiens
  misc_RNA (1)...(19): siRNA sense strand
gaagcgagugauaauacug

SEQ ID NO: 922696 - RNA, 19 nt, Homo sapiens
  misc_RNA (1)...(19): siRNA sense strand
ucaaaugucaucacuuggu

SEQ ID NO: 922697 - RNA, 19 nt, Homo sapiens
  misc_RNA (1)...(19): siRNA sense strand
ucccacagccggcauuuau

SEQ ID NO: 922698 - RNA, 19 nt, Homo sapiens
  misc_RNA (1)...(19): siRNA sense strand
ucaaggcagcucaucauca

SEQ ID NO: 922699 - RNA, 19 nt, Homo sapiens
  misc_RNA (1)...(19): siRNA sense strand
gggagaaaugcaaguacuu

SEQ ID NO: 922700 - RNA, 19 nt, Homo sapiens
  misc_RNA (1)...(19): siRNA sense strand
ccuaugacuccaucaauuc

SEQ ID NO: 922701 - RNA, 19 nt, Homo sapiens
  misc_RNA (1)...(19): siRNA sense strand
ucacuugguucuuuuccua

SEQ ID NO: 922702 - RNA, 19 nt, Homo sapiens
  misc_RNA (1)...(19): siRNA sense strand
uuaaugggcggaacaaucu

SEQ ID NO: 922703 - RNA, 19 nt, Homo sapiens
  misc_RNA (1)...(19): siRNA sense strand
gugcuacaccuaccacugu

SEQ ID NO: 922704 - RNA, 19 nt, Homo sapiens
  misc_RNA (1)...(19): siRNA sense strand
gucgugugguggccuguuu

SEQ ID NO: 922705 - RNA, 19 nt, Homo sapiens
  misc_RNA (1)...(19): siRNA sense strand
ugauugaagcgagugauaa

SEQ ID NO: 922706 - RNA, 19 nt, Homo sapiens
  misc_RNA (1)...(19): siRNA sense strand
cuacugaugcuuccaugau

SEQ ID NO: 922707 - RNA, 19 nt, Homo sapiens
  misc_RNA (1)...(19): siRNA sense strand
gagauuaaugggcggaaca

SEQ ID NO: 922708 - RNA, 19 nt, Homo sapiens
  misc_RNA (1)...(19): siRNA sense strand
auaauacugugacaaucug

SEQ ID NO: 922709 - RNA, 19 nt, Homo sapiens
  misc_RNA (1)...(19): siRNA sense strand
gagguuugccgagaauuuc

SEQ ID NO: 922710 - RNA, 19 nt, Homo sapiens
  misc_RNA (1)...(19): siRNA sense strand
caccaagaguuugccaugu

SEQ ID NO: 922711 - RNA, 19 nt, Homo sapiens
  misc_RNA (1)...(19): siRNA sense strand
guaccaaauacaccuguuc

SEQ ID NO: 922712 - RNA, 19 nt, Homo sapiens
  misc_RNA (1)...(19): siRNA sense strand
ugauaauacugugacaauc

SEQ ID NO: 922713 - RNA, 19 nt, Homo sapiens
  misc_RNA (1)...(19): siRNA sense strand
acugaugcuuccaugauug

SEQ ID NO: 922714 - RNA, 19 nt, Homo sapiens
  misc_RNA (1)...(19): siRNA sense strand
accaagaguuugccaugug

SEQ ID NO: 922715 - RNA, 19 nt, Homo sapiens
  misc_RNA (1)...(19): siRNA sense strand
ugaagcgagugauaauacu

SEQ ID NO: 922716 - RNA, 19 nt, Homo sapiens
  misc_RNA (1)...(19): siRNA sense strand
aaaugcaaguacuuucauc

SEQ ID NO: 922717 - RNA, 19 nt, Homo sapiens
  misc_RNA (1)...(19): siRNA sense strand
ugcagaacuuguaccaaau

SEQ ID NO: 922718 - RNA, 19 nt, Homo sapiens
  misc_RNA (1)...(19): siRNA sense strand
gaauuucagagaggaacuu

SEQ ID NO: 922719 - RNA, 19 nt, Homo sapiens
  misc_RNA (1)...(19): siRNA sense strand
cagaacuuguaccaaauac

SEQ ID NO: 922720 - RNA, 19 nt, Homo sapiens
  misc_RNA (1)...(19): siRNA sense strand
cauggcacccgcuucaaau

SEQ ID NO: 922721 - RNA, 19 nt, Homo sapiens
  misc_RNA (1)...(19): siRNA sense strand
cagcagaugcagcuuaugc

SEQ ID NO: 922722 - RNA, 19 nt, Homo sapiens
  misc_RNA (1)...(19): siRNA sense strand
cgggagaaaugcaaguacu

SEQ ID NO: 922723 - RNA, 19 nt, Homo sapiens
  misc_RNA (1)...(19): siRNA sense strand
uuucaauccuuacauacca

SEQ ID NO: 922724 - RNA, 19 nt, Homo sapiens
  misc_RNA (1)...(19): siRNA sense strand
gugguggccuguuuugauu

SEQ ID NO: 922725 - RNA, 19 nt, Homo sapiens
  misc_RNA (1)...(19): siRNA sense strand
uuuagaagucuguagagaa

SEQ ID NO: 922726 - RNA, 19 nt, Homo sapiens
  misc_RNA (1)...(19): siRNA sense strand
gaacugcaaguaccuucac

SEQ ID NO: 922727 - RNA, 19 nt, Homo sapiens
  misc_RNA (1)...(19): siRNA sense strand
cuuuagaagucuguagaga

SEQ ID NO: 922728 - RNA, 19 nt, Homo sapiens
  misc_RNA (1)...(19): siRNA sense strand
aaacgcagcuggagauuaa

SEQ ID NO: 922729 - RNA, 19 nt, Homo sapiens
  misc_RNA (1)...(19): siRNA sense strand
gcucaaaugucaucacuug

SEQ ID NO: 922730 - RNA, 19 nt, Homo sapiens
  misc_RNA (1)...(19): siRNA sense strand
aaauacaccuguucugauu

SEQ ID NO: 922731 - RNA, 19 nt, Homo sapiens
  misc_RNA (1)...(19): siRNA sense strand
ggagaaugauugccgcuau

SEQ ID NO: 922732 - RNA, 19 nt, Homo sapiens
  misc_RNA (1)...(19): siRNA sense strand
gcagaacuuguaccaaaua

SEQ ID NO: 922733 - RNA, 19 nt, Homo sapiens
  misc_RNA (1)...(19): siRNA sense strand
agaagucuguagagaauuu

SEQ ID NO: 922734 - RNA, 19 nt, Homo sapiens
  misc_RNA (1)...(19): siRNA sense strand
cugcagaacuuguaccaaa

SEQ ID NO: 922735 - RNA, 19 nt, Homo sapiens
  misc_RNA (1)...(19): siRNA sense strand
caaaugucaucacuugguu

SEQ ID NO: 922736 - RNA, 19 nt, Homo sapiens
  misc_RNA (1)...(19): siRNA sense strand
cugcauggauuacaucaaa

SEQ ID NO: 922737 - RNA, 19 nt, Homo sapiens
  misc_RNA (1)...(19): siRNA sense strand
ggagaaaugcaaguacuuu

SEQ ID NO: 922738 - RNA, 19 nt, Homo sapiens
  misc_RNA (1)...(19): siRNA sense strand
ccaaaacgcucaaauguca

SEQ ID NO: 922739 - RNA, 19 nt, Homo sapiens
  misc_RNA (1)...(19): siRNA sense strand
ugucaucacuugguucuuu

SEQ ID NO: 922740 - RNA, 19 nt, Homo sapiens
  misc_RNA (1)...(19): siRNA sense strand
gcacccgcuucaaauauug

SEQ ID NO: 922741 - RNA, 19 nt, Homo sapiens
  misc_RNA (1)...(19): siRNA sense strand
uuagaagucuguagagaau

SEQ ID NO: 922742 - RNA, 19 nt, Homo sapiens
  misc_RNA (1)...(19): siRNA sense strand
gagaaugauugccgcuaug

SEQ ID NO: 922743 - RNA, 19 nt, Homo sapiens
  misc_RNA (1)...(19): siRNA sense strand
ccaaauacaccuguucuga

SEQ ID NO: 922744 - RNA, 19 nt, Homo sapiens
  misc_RNA (1)...(19): siRNA sense strand
aaacccaccucuugcaaug

SEQ ID NO: 922745 - RNA, 19 nt, Homo sapiens
  misc_RNA (1)...(19): siRNA sense strand
ggagguuugccgagaauuu

SEQ ID NO: 922746 - RNA, 19 nt, Homo sapiens
  misc_RNA (1)...(19): siRNA sense strand
ccauggcuuucaauccuua

SEQ ID NO: 922747 - RNA, 19 nt, Homo sapiens
  misc_RNA (1)...(19): siRNA sense strand
ucacccuccuccacacuua

SEQ ID NO: 922748 - RNA, 19 nt, Homo sapiens
  misc_RNA (1)...(19): siRNA sense strand
caaggcagcucaucaucag

SEQ ID NO: 922749 - RNA, 19 nt, Homo sapiens
  misc_RNA (1)...(19): siRNA sense strand
ggcuuucaauccuuacaua

SEQ ID NO: 922750 - RNA, 19 nt, Homo sapiens
  misc_RNA (1)...(19): siRNA sense strand
ggcacccgcuucaaauauu

SEQ ID NO: 922751 - RNA, 19 nt, Homo sapiens
  misc_RNA (1)...(19): siRNA sense strand
caaauauugugcccaugau

SEQ ID NO: 922752 - RNA, 19 nt, Homo sapiens
  misc_RNA (1)...(19): siRNA sense strand
gauaauacugugacaaucu

SEQ ID NO: 922753 - RNA, 19 nt, Homo sapiens
  misc_RNA (1)...(19): siRNA sense strand
gcauggcacccgcuucaaa

SEQ ID NO: 922754 - RNA, 19 nt, Homo sapiens
  misc_RNA (1)...(19): siRNA sense strand
caaauacaccuguucugau

SEQ ID NO: 922755 - RNA, 19 nt, Homo sapiens
  misc_RNA (1)...(19): siRNA sense strand
ucaaauauugugcccauga

SEQ ID NO: 922756 - RNA, 19 nt, Homo sapiens
  misc_RNA (1)...(19): siRNA sense strand
gcccauccaccaagaguuu

SEQ ID NO: 922757 - RNA, 19 nt, Homo sapiens
  misc_RNA (1)...(19): siRNA sense strand
ggaaacccaccucuugcaa

SEQ ID NO: 922758 - RNA, 19 nt, Homo sapiens
  misc_RNA (1)...(19): siRNA sense strand
gcuaugcucacccuacuga

SEQ ID NO: 922759 - RNA, 19 nt, Homo sapiens
  misc_RNA (1)...(19): siRNA sense strand
gaaacccaccucuugcaau

SEQ ID NO: 922760 - RNA, 19 nt, Homo sapiens
  misc_RNA (1)...(19): siRNA sense strand
gugauaauacugugacaau

SEQ ID NO: 922761 - RNA, 19 nt, Homo sapiens
  misc_RNA (1)...(19): siRNA sense strand
gauugaagcgagugauaau

SEQ ID NO: 922762 - RNA, 19 nt, Homo sapiens
  misc_RNA (1)...(19): siRNA sense strand
ugucaauguugcccugauu

SEQ ID NO: 922763 - RNA, 19 nt, Homo sapiens
  misc_RNA (1)...(19): siRNA sense strand
gaugcucgcgggagaaaug

SEQ ID NO: 922764 - RNA, 19 nt, Homo sapiens
  misc_RNA (1)...(19): siRNA sense strand
cuccaucaauuccagcuaa

SEQ ID NO: 922765 - RNA, 19 nt, Homo sapiens
  misc_RNA (1)...(19): siRNA sense strand
gcccagcagaugcagcuua

SEQ ID NO: 922766 - RNA, 19 nt, Homo sapiens
  misc_RNA (1)...(19): siRNA sense strand
gggccucguuccugcagaa

SEQ ID NO: 922767 - RNA, 19 nt, Homo sapiens
  misc_RNA (1)...(19): siRNA sense strand
uccuaugacuccaucaauu

SEQ ID NO: 922768 - RNA, 19 nt, Homo sapiens
  misc_RNA (1)...(19): siRNA sense strand
cuaauccucccauggcuuu

SEQ ID NO: 922769 - RNA, 19 nt, Homo sapiens
  misc_RNA (1)...(19): siRNA sense strand
ccuggaaacccaccucuug

SEQ ID NO: 922770 - RNA, 19 nt, Homo sapiens
  misc_RNA (1)...(19): siRNA sense strand
gcaaugccaggagcuguug

SEQ ID NO: 922771 - RNA, 19 nt, Homo sapiens
  misc_RNA (1)...(19): siRNA sense strand
uacugaugcuuccaugauu

SEQ ID NO: 922772 - RNA, 19 nt, Homo sapiens
  misc_RNA (1)...(19): siRNA sense strand
cccagcagaugcagcuuau

SEQ ID NO: 922773 - RNA, 19 nt, Homo sapiens
  misc_RNA (1)...(19): siRNA sense strand
gaagcgagugauaauacug

SEQ ID NO: 922774 - RNA, 19 nt, Homo sapiens
  misc_RNA (1)...(19): siRNA sense strand
ucaaaugucaucacuuggu

SEQ ID NO: 922775 - RNA, 19 nt, Homo sapiens
  misc_RNA (1)...(19): siRNA sense strand
ucccacagccggcauuuau

SEQ ID NO: 922776 - RNA, 19 nt, Homo sapiens
  misc_RNA (1)...(19): siRNA sense strand
ucaaggcagcucaucauca

SEQ ID NO: 922777 - RNA, 19 nt, Homo sapiens
  misc_RNA (1)...(19): siRNA sense strand
gggagaaaugcaaguacuu

SEQ ID NO: 922778 - RNA, 19 nt, Homo sapiens
  misc_RNA (1)...(19): siRNA sense strand
ccuaugacuccaucaauuc

SEQ ID NO: 922779 - RNA, 19 nt, Homo sapiens
  misc_RNA (1)...(19): siRNA sense strand
ucacuugguucuuuuccua

SEQ ID NO: 922780 - RNA, 19 nt, Homo sapiens
  misc_RNA (1)...(19): siRNA sense strand
uuaaugggcggaacaaucu

SEQ ID NO: 922781 - RNA, 19 nt, Homo sapiens
  misc_RNA (1)...(19): siRNA sense strand
gugcuacaccuaccacugu

SEQ ID NO: 922782 - RNA, 19 nt, Homo sapiens
  misc_RNA (1)...(19): siRNA sense strand
gucgugugguggccuguuu

SEQ ID NO: 922783 - RNA, 19 nt, Homo sapiens
  misc_RNA (1)...(19): siRNA sense strand
ugauugaagcgagugauaa

SEQ ID NO: 922784 - RNA, 19 nt, Homo sapiens
  misc_RNA (1)...(19): siRNA sense strand
cuacugaugcuuccaugau

SEQ ID NO: 922785 - RNA, 19 nt, Homo sapiens
  misc_RNA (1)...(19): siRNA sense strand
gagauuaaugggcggaaca

SEQ ID NO: 922786 - RNA, 19 nt, Homo sapiens
  misc_RNA (1)...(19): siRNA sense strand
auaauacugugacaaucug

SEQ ID NO: 922787 - RNA, 19 nt, Homo sapiens
  misc_RNA (1)...(19): siRNA sense strand
gagguuugccgagaauuuc

SEQ ID NO: 922788 - RNA, 19 nt, Homo sapiens
  misc_RNA (1)...(19): siRNA sense strand
caccaagaguuugccaugu

SEQ ID NO: 922789 - RNA, 19 nt, Homo sapiens
  misc_RNA (1)...(19): siRNA sense strand
guaccaaauacaccuguuc

SEQ ID NO: 922790 - RNA, 19 nt, Homo sapiens
  misc_RNA (1)...(19): siRNA sense strand
ugauaauacugugacaauc

SEQ ID NO: 922791 - RNA, 19 nt, Homo sapiens
  misc_RNA (1)...(19): siRNA sense strand
acugaugcuuccaugauug

SEQ ID NO: 922792 - RNA, 19 nt, Homo sapiens
  misc_RNA (1)...(19): siRNA sense strand
accaagaguuugccaugug

SEQ ID NO: 922793 - RNA, 19 nt, Homo sapiens
  misc_RNA (1)...(19): siRNA sense strand
ugaagcgagugauaauacu

SEQ ID NO: 922794 - RNA, 19 nt, Homo sapiens
  misc_RNA (1)...(19): siRNA sense strand
aaaugcaaguacuuucauc

SEQ ID NO: 922795 - RNA, 19 nt, Homo sapiens
  misc_RNA (1)...(19): siRNA sense strand
ugcagaacuuguaccaaau

SEQ ID NO: 922796 - RNA, 19 nt, Homo sapiens
  misc_RNA (1)...(19): siRNA sense strand
gaauuucagagaggaacuu

SEQ ID NO: 922797 - RNA, 19 nt, Homo sapiens
  misc_RNA (1)...(19): siRNA sense strand
cagaacuuguaccaaauac

SEQ ID NO: 922798 - RNA, 19 nt, Homo sapiens
  misc_RNA (1)...(19): siRNA sense strand
cauggcacccgcuucaaau

SEQ ID NO: 922799 - RNA, 19 nt, Homo sapiens
  misc_RNA (1)...(19): siRNA sense strand
cagcagaugcagcuuaugc

SEQ ID NO: 922800 - RNA, 19 nt, Homo sapiens
  misc_RNA (1)...(19): siRNA sense strand
cgggagaaaugcaaguacu

SEQ ID NO: 922801 - RNA, 19 nt, Homo sapiens
  misc_RNA (1)...(19): siRNA sense strand
uuucaauccuuacauacca

SEQ ID NO: 922802 - RNA, 19 nt, Homo sapiens
  misc_RNA (1)...(19): siRNA sense strand
gugguggccuguuuugauu

SEQ ID NO: 922803 - RNA, 19 nt, Homo sapiens
  misc_RNA (1)...(19): siRNA sense strand
uuuagaagucuguagagaa

SEQ ID NO: 922804 - RNA, 19 nt, Homo sapiens
  misc_RNA (1)...(19): siRNA sense strand
gaacugcaaguaccuucac

SEQ ID NO: 922805 - RNA, 19 nt, Homo sapiens
  misc_RNA (1)...(19): siRNA sense strand
cuuuagaagucuguagaga

SEQ ID NO: 922806 - RNA, 19 nt, Homo sapiens
  misc_RNA (1)...(19): siRNA sense strand
gaaggugauucuccuaggu

SEQ ID NO: 922807 - RNA, 19 nt, Homo sapiens
  misc_RNA (1)...(19): siRNA sense strand
gguccacacugguuuccuu

SEQ ID NO: 922808 - RNA, 19 nt, Homo sapiens
  misc_RNA (1)...(19): siRNA sense strand
gggcugcauuguauucuca

SEQ ID NO: 922809 - RNA, 19 nt, Homo sapiens
  misc_RNA (1)...(19): siRNA sense strand
gcacaucagcaucuucuac

SEQ ID NO: 922810 - RNA, 19 nt, Homo sapiens
  misc_RNA (1)...(19): siRNA sense strand
gcauggccauccucagcuu

SEQ ID NO: 922811 - RNA, 19 nt, Homo sapiens
  misc_RNA (1)...(19): siRNA sense strand
ggagcugccugcugugaac

SEQ ID NO: 922812 - RNA, 19 nt, Homo sapiens
  misc_RNA (1)...(19): siRNA sense strand
ggacuccaucgacgccaua

SEQ ID NO: 922813 - RNA, 19 nt, Homo sapiens
  misc_RNA (1)...(19): siRNA sense strand
gugccuaccagacgauuga

SEQ ID NO: 922814 - RNA, 19 nt, Homo sapiens
  misc_RNA (1)...(19): siRNA sense strand
ccagagggcaggagucaag

SEQ ID NO: 922815 - RNA, 19 nt, Homo sapiens
  misc_RNA (1)...(19): siRNA sense strand
gcccgcagaucccuuugca

SEQ ID NO: 922816 - RNA, 19 nt, Homo sapiens
  misc_RNA (1)...(19): siRNA sense strand
gagggcaggagucaagaug

SEQ ID NO: 922817 - RNA, 19 nt, Homo sapiens
  misc_RNA (1)...(19): siRNA sense strand
gcaaacagauggaauauuc

SEQ ID NO: 922818 - RNA, 19 nt, Homo sapiens
  misc_RNA (1)...(19): siRNA sense strand
ggaagaagaugaagaugaa

SEQ ID NO: 922819 - RNA, 19 nt, Homo sapiens
  misc_RNA (1)...(19): siRNA sense strand
ggaagaauaugaagagagu

SEQ ID NO: 922820 - RNA, 19 nt, Homo sapiens
  misc_RNA (1)...(19): siRNA sense strand
gagaguggauuguuggaaa

SEQ ID NO: 922821 - RNA, 19 nt, Homo sapiens
  misc_RNA (1)...(19): siRNA sense strand
caagacacuucacaaugua

SEQ ID NO: 922822 - RNA, 19 nt, Homo sapiens
  misc_RNA (1)...(19): siRNA sense strand
gcggauggguagauacaua

SEQ ID NO: 922823 - RNA, 19 nt, Homo sapiens
  misc_RNA (1)...(19): siRNA sense strand
cugcagauauggaagaaua

SEQ ID NO: 922824 - RNA, 19 nt, Homo sapiens
  misc_RNA (1)...(19): siRNA sense strand
uuaccagacuccacgauua

SEQ ID NO: 922825 - RNA, 19 nt, Homo sapiens
  misc_RNA (1)...(19): siRNA sense strand
uaaggaaacagguguaauu

SEQ ID NO: 922826 - RNA, 19 nt, Homo sapiens
  misc_RNA (1)...(19): siRNA sense strand
acaagacacuucacaaugu

SEQ ID NO: 922827 - RNA, 19 nt, Homo sapiens
  misc_RNA (1)...(19): siRNA sense strand
gggaagaauugaaagugaa

SEQ ID NO: 922828 - RNA, 19 nt, Homo sapiens
  misc_RNA (1)...(19): siRNA sense strand
uauaagcggugcaaacaga

SEQ ID NO: 922829 - RNA, 19 nt, Homo sapiens
  misc_RNA (1)...(19): siRNA sense strand
gaaagugaaggcauaccua

SEQ ID NO: 922830 - RNA, 19 nt, Homo sapiens
  misc_RNA (1)...(19): siRNA sense strand
gaauaugacuacacaagac

SEQ ID NO: 922831 - RNA, 19 nt, Homo sapiens
  misc_RNA (1)...(19): siRNA sense strand
gagcaacggcagccuuuaa

SEQ ID NO: 922832 - RNA, 19 nt, Homo sapiens
  misc_RNA (1)...(19): siRNA sense strand
gaacuuaugaccuuuacau

SEQ ID NO: 922833 - RNA, 19 nt, Homo sapiens
  misc_RNA (1)...(19): siRNA sense strand
ugaagagaguggauuguug

SEQ ID NO: 922834 - RNA, 19 nt, Homo sapiens
  misc_RNA (1)...(19): siRNA sense strand
ggaaacagguguaauuacc

SEQ ID NO: 922835 - RNA, 19 nt, Homo sapiens
  misc_RNA (1)...(19): siRNA sense strand
auauaaggcuucaagauug

SEQ ID NO: 922836 - RNA, 19 nt, Homo sapiens
  misc_RNA (1)...(19): siRNA sense strand
ugaagaagaugauggugau

SEQ ID NO: 922837 - RNA, 19 nt, Homo sapiens
  misc_RNA (1)...(19): siRNA sense strand
uaucacaacacagguauua

SEQ ID NO: 922838 - RNA, 19 nt, Homo sapiens
  misc_RNA (1)...(19): siRNA sense strand
aggagaagcugcagauaug

SEQ ID NO: 922839 - RNA, 19 nt, Homo sapiens
  misc_RNA (1)...(19): siRNA sense strand
ggaaucaaaguuuaaggaa

SEQ ID NO: 922840 - RNA, 19 nt, Homo sapiens
  misc_RNA (1)...(19): siRNA sense strand
gauggcggauggguagaua

SEQ ID NO: 922841 - RNA, 19 nt, Homo sapiens
  misc_RNA (1)...(19): siRNA sense strand
gaagggaaaggcacuggaa

SEQ ID NO: 922842 - RNA, 19 nt, Homo sapiens
  misc_RNA (1)...(19): siRNA sense strand
cucaaggaaucaaaguuua

SEQ ID NO: 922843 - RNA, 19 nt, Homo sapiens
  misc_RNA (1)...(19): siRNA sense strand
aaccagaacuuaugaccuu

SEQ ID NO: 922844 - RNA, 19 nt, Homo sapiens
  misc_RNA (1)...(19): siRNA sense strand
agaugaagaugaaggagaa

SEQ ID NO: 922845 - RNA, 19 nt, Homo sapiens
  misc_RNA (1)...(19): siRNA sense strand
aaagagaucacacuggaaa

SEQ ID NO: 922846 - RNA, 19 nt, Homo sapiens
  misc_RNA (1)...(19): siRNA sense strand
cagaugaauuggaagcuau

SEQ ID NO: 922847 - RNA, 19 nt, Homo sapiens
  misc_RNA (1)...(19): siRNA sense strand
gcucagcacuaugugaaga

SEQ ID NO: 922848 - RNA, 19 nt, Homo sapiens
  misc_RNA (1)...(19): siRNA sense strand
ggugcaaacagauggaaua

SEQ ID NO: 922849 - RNA, 19 nt, Homo sapiens
  misc_RNA (1)...(19): siRNA sense strand
uuaauacugugaagggaaa

SEQ ID NO: 922850 - RNA, 19 nt, Homo sapiens
  misc_RNA (1)...(19): siRNA sense strand
gaauuggaagcuaucauug

SEQ ID NO: 922851 - RNA, 19 nt, Homo sapiens
  misc_RNA (1)...(19): siRNA sense strand
caguugagcacauguauga

SEQ ID NO: 922852 - RNA, 19 nt, Homo sapiens
  misc_RNA (1)...(19): siRNA sense strand
ccacgauuaugguuguuug

SEQ ID NO: 922853 - RNA, 19 nt, Homo sapiens
  misc_RNA (1)...(19): siRNA sense strand
gaaggagaagcugcagaua

SEQ ID NO: 922854 - RNA, 19 nt, Homo sapiens
  misc_RNA (1)...(19): siRNA sense strand
acacagguauuacaggaau

SEQ ID NO: 922855 - RNA, 19 nt, Homo sapiens
  misc_RNA (1)...(19): siRNA sense strand
ccucaaggaaucaaaguuu

SEQ ID NO: 922856 - RNA, 19 nt, Homo sapiens
  misc_RNA (1)...(19): siRNA sense strand
uggaagcuaucauugaaga

SEQ ID NO: 922857 - RNA, 19 nt, Homo sapiens
  misc_RNA (1)...(19): siRNA sense strand
aauugaaagugaaggcaua

SEQ ID NO: 922858 - RNA, 19 nt, Homo sapiens
  misc_RNA (1)...(19): siRNA sense strand
ugaauuggaagcuaucauu

SEQ ID NO: 922859 - RNA, 19 nt, Homo sapiens
  misc_RNA (1)...(19): siRNA sense strand
ucagaugaauuggaagcua

SEQ ID NO: 922860 - RNA, 19 nt, Homo sapiens
  misc_RNA (1)...(19): siRNA sense strand
gaaggcauaccuaccaaca

SEQ ID NO: 922861 - RNA, 19 nt, Homo sapiens
  misc_RNA (1)...(19): siRNA sense strand
ggaagccguuaaagagauc

SEQ ID NO: 922862 - RNA, 19 nt, Homo sapiens
  misc_RNA (1)...(19): siRNA sense strand
augcugaggugaugaagaa

SEQ ID NO: 922863 - RNA, 19 nt, Homo sapiens
  misc_RNA (1)...(19): siRNA sense strand
cauugagacuguugcagaa

SEQ ID NO: 922864 - RNA, 19 nt, Homo sapiens
  misc_RNA (1)...(19): siRNA sense strand
cagauggaauauucagaug

SEQ ID NO: 922865 - RNA, 19 nt, Homo sapiens
  misc_RNA (1)...(19): siRNA sense strand
ccagaacuuaugaccuuua

SEQ ID NO: 922866 - RNA, 19 nt, Homo sapiens
  misc_RNA (1)...(19): siRNA sense strand
gugaagaggaagaagauga

SEQ ID NO: 922867 - RNA, 19 nt, Homo sapiens
  misc_RNA (1)...(19): siRNA sense strand
caauauaaggcuucaagau

SEQ ID NO: 922868 - RNA, 19 nt, Homo sapiens
  misc_RNA (1)...(19): siRNA sense strand
aaggaaacagguguaauua

SEQ ID NO: 922869 - RNA, 19 nt, Homo sapiens
  misc_RNA (1)...(19): siRNA sense strand
uaacaguugagcacaugua

SEQ ID NO: 922870 - RNA, 19 nt, Homo sapiens
  misc_RNA (1)...(19): siRNA sense strand
cggcagccuuuaacaguug

SEQ ID NO: 922871 - RNA, 19 nt, Homo sapiens
  misc_RNA (1)...(19): siRNA sense strand
gaugaggcuacccuagaua

SEQ ID NO: 922872 - RNA, 19 nt, Homo sapiens
  misc_RNA (1)...(19): siRNA sense strand
gcuauaagcggugcaaaca

SEQ ID NO: 922873 - RNA, 19 nt, Homo sapiens
  misc_RNA (1)...(19): siRNA sense strand
gagcacauguaugaagaca

SEQ ID NO: 922874 - RNA, 19 nt, Homo sapiens
  misc_RNA (1)...(19): siRNA sense strand
gaaaauaguagaagcuugu

SEQ ID NO: 922875 - RNA, 19 nt, Homo sapiens
  misc_RNA (1)...(19): siRNA sense strand
cacaagacacuucacaaug

SEQ ID NO: 922876 - RNA, 19 nt, Homo sapiens
  misc_RNA (1)...(19): siRNA sense strand
ucacaacacagguauuaca

SEQ ID NO: 922877 - RNA, 19 nt, Homo sapiens
  misc_RNA (1)...(19): siRNA sense strand
cagaugaggcuacccuaga

SEQ ID NO: 922878 - RNA, 19 nt, Homo sapiens
  misc_RNA (1)...(19): siRNA sense strand
gacaauauaaggcuucaag

SEQ ID NO: 922879 - RNA, 19 nt, Homo sapiens
  misc_RNA (1)...(19): siRNA sense strand
gaagcuaucauugaagaag

SEQ ID NO: 922880 - RNA, 19 nt, Homo sapiens
  misc_RNA (1)...(19): siRNA sense strand
acacaagacacuucacaau

SEQ ID NO: 922881 - RNA, 19 nt, Homo sapiens
  misc_RNA (1)...(19): siRNA sense strand
gaaaaucauugagacuguu

SEQ ID NO: 922882 - RNA, 19 nt, Homo sapiens
  misc_RNA (1)...(19): siRNA sense strand
ugaagaggaagaagaugaa

SEQ ID NO: 922883 - RNA, 19 nt, Homo sapiens
  misc_RNA (1)...(19): siRNA sense strand
cggaagccguuaaagagau

SEQ ID NO: 922884 - RNA, 19 nt, Homo sapiens
  misc_RNA (1)...(19): siRNA sense strand
auuggaagcuaucauugaa

SEQ ID NO: 922885 - RNA, 19 nt, Homo sapiens
  misc_RNA (1)...(19): siRNA sense strand
gucaggaucaugugaagaa

SEQ ID NO: 922886 - RNA, 19 nt, Homo sapiens
  misc_RNA (1)...(19): siRNA sense strand
uacccuagauacaaggaaa

SEQ ID NO: 922887 - RNA, 19 nt, Homo sapiens
  misc_RNA (1)...(19): siRNA sense strand
gugaaggcauaccuaccaa

SEQ ID NO: 922888 - RNA, 19 nt, Homo sapiens
  misc_RNA (1)...(19): siRNA sense strand
agaaaacagugaccauuga

SEQ ID NO: 922889 - RNA, 19 nt, Homo sapiens
  misc_RNA (1)...(19): siRNA sense strand
gaagaaaacagugaccauu

SEQ ID NO: 922890 - RNA, 19 nt, Homo sapiens
  misc_RNA (1)...(19): siRNA sense strand
gagaagcugcagauaugga

SEQ ID NO: 922891 - RNA, 19 nt, Homo sapiens
  misc_RNA (1)...(19): siRNA sense strand
ggggaagaauugaaaguga

SEQ ID NO: 922892 - RNA, 19 nt, Homo sapiens
  misc_RNA (1)...(19): siRNA sense strand
gaguucauauguaucuucu

SEQ ID NO: 922893 - RNA, 19 nt, Homo sapiens
  misc_RNA (1)...(19): siRNA sense strand
gccaccaccucccaugugu

SEQ ID NO: 922894 - RNA, 19 nt, Homo sapiens
  misc_RNA (1)...(19): siRNA sense strand
caagcugucauuccaacaa

SEQ ID NO: 922895 - RNA, 19 nt, Homo sapiens
  misc_RNA (1)...(19): siRNA sense strand
uguacaagcugucauucca

SEQ ID NO: 922896 - RNA, 19 nt, Homo sapiens
  misc_RNA (1)...(19): siRNA sense strand
ggaguucauauguaucuuc

SEQ ID NO: 922897 - RNA, 19 nt, Homo sapiens
  misc_RNA (1)...(19): siRNA sense strand
aagcuaucauugaagaaga

SEQ ID NO: 922898 - RNA, 19 nt, Homo sapiens
  misc_RNA (1)...(19): siRNA sense strand
ggaagaauugaaagugaag

SEQ ID NO: 922899 - RNA, 19 nt, Homo sapiens
  misc_RNA (1)...(19): siRNA sense strand
agaauaugacuacacaaga

SEQ ID NO: 922900 - RNA, 19 nt, Homo sapiens
  misc_RNA (1)...(19): siRNA sense strand
gaggcuacccuagauacaa

SEQ ID NO: 922901 - RNA, 19 nt, Homo sapiens
  misc_RNA (1)...(19): siRNA sense strand
agaugaggcuacccuagau

SEQ ID NO: 922902 - RNA, 19 nt, Homo sapiens
  misc_RNA (1)...(19): siRNA sense strand
ugaaggagaagcugcagau

SEQ ID NO: 922903 - RNA, 19 nt, Homo sapiens
  misc_RNA (1)...(19): siRNA sense strand
accuuuacaucacuuauga

SEQ ID NO: 922904 - RNA, 19 nt, Homo sapiens
  misc_RNA (1)...(19): siRNA sense strand
aaggagaagcugcagauau

SEQ ID NO: 922905 - RNA, 19 nt, Homo sapiens
  misc_RNA (1)...(19): siRNA sense strand
aggaagaagaugaagauga

SEQ ID NO: 922906 - RNA, 19 nt, Homo sapiens
  misc_RNA (1)...(19): siRNA sense strand
guacaagcugucauuccaa

SEQ ID NO: 922907 - RNA, 19 nt, Homo sapiens
  misc_RNA (1)...(19): siRNA sense strand
acuuggaguucauauguau

SEQ ID NO: 922908 - RNA, 19 nt, Homo sapiens
  misc_RNA (1)...(19): siRNA sense strand
gcaacggcagccuuuaaca

SEQ ID NO: 922909 - RNA, 19 nt, Homo sapiens
  misc_RNA (1)...(19): siRNA sense strand
agaggaagaagaugaagau

SEQ ID NO: 922910 - RNA, 19 nt, Homo sapiens
  misc_RNA (1)...(19): siRNA sense strand
uagaauaugacuacacaag

SEQ ID NO: 922911 - RNA, 19 nt, Homo sapiens
  misc_RNA (1)...(19): siRNA sense strand
accaacaggcaaacaauuu

SEQ ID NO: 922912 - RNA, 19 nt, Homo sapiens
  misc_RNA (1)...(19): siRNA sense strand
ugagacuguugcagaagga

SEQ ID NO: 922913 - RNA, 19 nt, Homo sapiens
  misc_RNA (1)...(19): siRNA sense strand
ucaggaucaugugaagaaa

SEQ ID NO: 922914 - RNA, 19 nt, Homo sapiens
  misc_RNA (1)...(19): siRNA sense strand
gaauaugaagagaguggau

SEQ ID NO: 922915 - RNA, 19 nt, Homo sapiens
  misc_RNA (1)...(19): siRNA sense strand
cagaaugugauuaauacug

SEQ ID NO: 922916 - RNA, 19 nt, Homo sapiens
  misc_RNA (1)...(19): siRNA sense strand
guccaccacuguccaacau

SEQ ID NO: 922917 - RNA, 19 nt, Homo sapiens
  misc_RNA (1)...(19): siRNA sense strand
aaacgcagcuggagauuaa

SEQ ID NO: 922918 - RNA, 19 nt, Homo sapiens
  misc_RNA (1)...(19): siRNA sense strand
gcucaaaugucaucacuug

SEQ ID NO: 922919 - RNA, 19 nt, Homo sapiens
  misc_RNA (1)...(19): siRNA sense strand
aaauacaccuguucugauu

SEQ ID NO: 922920 - RNA, 19 nt, Homo sapiens
  misc_RNA (1)...(19): siRNA sense strand
ggagaaugauugccgcuau

SEQ ID NO: 922921 - RNA, 19 nt, Homo sapiens
  misc_RNA (1)...(19): siRNA sense strand
gcagaacuuguaccaaaua

SEQ ID NO: 922922 - RNA, 19 nt, Homo sapiens
  misc_RNA (1)...(19): siRNA sense strand
agaagucuguagagaauuu

SEQ ID NO: 922923 - RNA, 19 nt, Homo sapiens
  misc_RNA (1)...(19): siRNA sense strand
cugcagaacuuguaccaaa

SEQ ID NO: 922924 - RNA, 19 nt, Homo sapiens
  misc_RNA (1)...(19): siRNA sense strand
caaaugucaucacuugguu

SEQ ID NO: 922925 - RNA, 19 nt, Homo sapiens
  misc_RNA (1)...(19): siRNA sense strand
cugcauggauuacaucaaa

SEQ ID NO: 922926 - RNA, 19 nt, Homo sapiens
  misc_RNA (1)...(19): siRNA sense strand
ggagaaaugcaaguacuuu

SEQ ID NO: 922927 - RNA, 19 nt, Homo sapiens
  misc_RNA (1)...(19): siRNA sense strand
ccaaaacgcucaaauguca

SEQ ID NO: 922928 - RNA, 19 nt, Homo sapiens
  misc_RNA (1)...(19): siRNA sense strand
ugucaucacuugguucuuu

SEQ ID NO: 922929 - RNA, 19 nt, Homo sapiens
  misc_RNA (1)...(19): siRNA sense strand
gcacccgcuucaaauauug

SEQ ID NO: 922930 - RNA, 19 nt, Homo sapiens
  misc_RNA (1)...(19): siRNA sense strand
uuagaagucuguagagaau

SEQ ID NO: 922931 - RNA, 19 nt, Homo sapiens
  misc_RNA (1)...(19): siRNA sense strand
gagaaugauugccgcuaug

SEQ ID NO: 922932 - RNA, 19 nt, Homo sapiens
  misc_RNA (1)...(19): siRNA sense strand
ccaaauacaccuguucuga

SEQ ID NO: 922933 - RNA, 19 nt, Homo sapiens
  misc_RNA (1)...(19): siRNA sense strand
aaacccaccucuugcaaug

SEQ ID NO: 922934 - RNA, 19 nt, Homo sapiens
  misc_RNA (1)...(19): siRNA sense strand
ggagguuugccgagaauuu

SEQ ID NO: 922935 - RNA, 19 nt, Homo sapiens
  misc_RNA (1)...(19): siRNA sense strand
ccauggcuuucaauccuua

SEQ ID NO: 922936 - RNA, 19 nt, Homo sapiens
  misc_RNA (1)...(19): siRNA sense strand
ucacccuccuccacacuua

SEQ ID NO: 922937 - RNA, 19 nt, Homo sapiens
  misc_RNA (1)...(19): siRNA sense strand
caaggcagcucaucaucag

SEQ ID NO: 922938 - RNA, 19 nt, Homo sapiens
  misc_RNA (1)...(19): siRNA sense strand
ggcuuucaauccuuacaua

SEQ ID NO: 922939 - RNA, 19 nt, Homo sapiens
  misc_RNA (1)...(19): siRNA sense strand
ggcacccgcuucaaauauu

SEQ ID NO: 922940 - RNA, 19 nt, Homo sapiens
  misc_RNA (1)...(19): siRNA sense strand
caaauauugugcccaugau

SEQ ID NO: 922941 - RNA, 19 nt, Homo sapiens
  misc_RNA (1)...(19): siRNA sense strand
gauaauacugugacaaucu

SEQ ID NO: 922942 - RNA, 19 nt, Homo sapiens
  misc_RNA (1)...(19): siRNA sense strand
gcauggcacccgcuucaaa

SEQ ID NO: 922943 - RNA, 19 nt, Homo sapiens
  misc_RNA (1)...(19): siRNA sense strand
caaauacaccuguucugau

SEQ ID NO: 922944 - RNA, 19 nt, Homo sapiens
  misc_RNA (1)...(19): siRNA sense strand
ucaaauauugugcccauga

SEQ ID NO: 922945 - RNA, 19 nt, Homo sapiens
  misc_RNA (1)...(19): siRNA sense strand
gcccauccaccaagaguuu

SEQ ID NO: 922946 - RNA, 19 nt, Homo sapiens
  misc_RNA (1)...(19): siRNA sense strand
ggaaacccaccucuugcaa

SEQ ID NO: 922947 - RNA, 19 nt, Homo sapiens
  misc_RNA (1)...(19): siRNA sense strand
gcuaugcucacccuacuga

SEQ ID NO: 922948 - RNA, 19 nt, Homo sapiens
  misc_RNA (1)...(19): siRNA sense strand
gaaacccaccucuugcaau

SEQ ID NO: 922949 - RNA, 19 nt, Homo sapiens
  misc_RNA (1)...(19): siRNA sense strand
gugauaauacugugacaau

SEQ ID NO: 922950 - RNA, 19 nt, Homo sapiens
  misc_RNA (1)...(19): siRNA sense strand
gauugaagcgagugauaau

SEQ ID NO: 922951 - RNA, 19 nt, Homo sapiens
  misc_RNA (1)...(19): siRNA sense strand
ugucaauguugcccugauu

SEQ ID NO: 922952 - RNA, 19 nt, Homo sapiens
  misc_RNA (1)...(19): siRNA sense strand
gaugcucgcgggagaaaug

SEQ ID NO: 922953 - RNA, 19 nt, Homo sapiens
  misc_RNA (1)...(19): siRNA sense strand
cuccaucaauuccagcuaa

SEQ ID NO: 922954 - RNA, 19 nt, Homo sapiens
  misc_RNA (1)...(19): siRNA sense strand
gcccagcagaugcagcuua

SEQ ID NO: 922955 - RNA, 19 nt, Homo sapiens
  misc_RNA (1)...(19): siRNA sense strand
gggccucguuccugcagaa

SEQ ID NO: 922956 - RNA, 19 nt, Homo sapiens
  misc_RNA (1)...(19): siRNA sense strand
uccuaugacuccaucaauu

SEQ ID NO: 922957 - RNA, 19 nt, Homo sapiens
  misc_RNA (1)...(19): siRNA sense strand
cuaauccucccauggcuuu

SEQ ID NO: 922958 - RNA, 19 nt, Homo sapiens
  misc_RNA (1)...(19): siRNA sense strand
ccuggaaacccaccucuug

SEQ ID NO: 922959 - RNA, 19 nt, Homo sapiens
  misc_RNA (1)...(19): siRNA sense strand
gcaaugccaggagcuguug

SEQ ID NO: 922960 - RNA, 19 nt, Homo sapiens
  misc_RNA (1)...(19): siRNA sense strand
uacugaugcuuccaugauu

SEQ ID NO: 922961 - RNA, 19 nt, Homo sapiens
  misc_RNA (1)...(19): siRNA sense strand
cccagcagaugcagcuuau

SEQ ID NO: 922962 - RNA, 19 nt, Homo sapiens
  misc_RNA (1)...(19): siRNA sense strand
gaagcgagugauaauacug

SEQ ID NO: 922963 - RNA, 19 nt, Homo sapiens
  misc_RNA (1)...(19): siRNA sense strand
ucaaaugucaucacuuggu

SEQ ID NO: 922964 - RNA, 19 nt, Homo sapiens
  misc_RNA (1)...(19): siRNA sense strand
ucccacagccggcauuuau

SEQ ID NO: 922965 - RNA, 19 nt, Homo sapiens
  misc_RNA (1)...(19): siRNA sense strand
ucaaggcagcucaucauca

SEQ ID NO: 922966 - RNA, 19 nt, Homo sapiens
  misc_RNA (1)...(19): siRNA sense strand
gggagaaaugcaaguacuu

SEQ ID NO: 922967 - RNA, 19 nt, Homo sapiens
  misc_RNA (1)...(19): siRNA sense strand
ccuaugacuccaucaauuc

SEQ ID NO: 922968 - RNA, 19 nt, Homo sapiens
  misc_RNA (1)...(19): siRNA sense strand
ucacuugguucuuuuccua

SEQ ID NO: 922969 - RNA, 19 nt, Homo sapiens
  misc_RNA (1)...(19): siRNA sense strand
uuaaugggcggaacaaucu

SEQ ID NO: 922970 - RNA, 19 nt, Homo sapiens
  misc_RNA (1)...(19): siRNA sense strand
gugcuacaccuaccacugu

SEQ ID NO: 922971 - RNA, 19 nt, Homo sapiens
  misc_RNA (1)...(19): siRNA sense strand
gucgugugguggccuguuu

SEQ ID NO: 922972 - RNA, 19 nt, Homo sapiens
  misc_RNA (1)...(19): siRNA sense strand
ugauugaagcgagugauaa

SEQ ID NO: 922973 - RNA, 19 nt, Homo sapiens
  misc_RNA (1)...(19): siRNA sense strand
cuacugaugcuuccaugau

SEQ ID NO: 922974 - RNA, 19 nt, Homo sapiens
  misc_RNA (1)...(19): siRNA sense strand
gagauuaaugggcggaaca

SEQ ID NO: 922975 - RNA, 19 nt, Homo sapiens
  misc_RNA (1)...(19): siRNA sense strand
auaauacugugacaaucug

SEQ ID NO: 922976 - RNA, 19 nt, Homo sapiens
  misc_RNA (1)...(19): siRNA sense strand
gagguuugccgagaauuuc

SEQ ID NO: 922977 - RNA, 19 nt, Homo sapiens
  misc_RNA (1)...(19): siRNA sense strand
caccaagaguuugccaugu

SEQ ID NO: 922978 - RNA, 19 nt, Homo sapiens
  misc_RNA (1)...(19): siRNA sense strand
guaccaaauacaccuguuc

SEQ ID NO: 922979 - RNA, 19 nt, Homo sapiens
  misc_RNA (1)...(19): siRNA sense strand
ugauaauacugugacaauc

SEQ ID NO: 922980 - RNA, 19 nt, Homo sapiens
  misc_RNA (1)...(19): siRNA sense strand
acugaugcuuccaugauug

SEQ ID NO: 922981 - RNA, 19 nt, Homo sapiens
  misc_RNA (1)...(19): siRNA sense strand
accaagaguuugccaugug

SEQ ID NO: 922982 - RNA, 19 nt, Homo sapiens
  misc_RNA (1)...(19): siRNA sense strand
ugaagcgagugauaauacu

SEQ ID NO: 922983 - RNA, 19 nt, Homo sapiens
  misc_RNA (1)...(19): siRNA sense strand
aaaugcaaguacuuucauc

SEQ ID NO: 922984 - RNA, 19 nt, Homo sapiens
  misc_RNA (1)...(19): siRNA sense strand
ugcagaacuuguaccaaau

SEQ ID NO: 922985 - RNA, 19 nt, Homo sapiens
  misc_RNA (1)...(19): siRNA sense strand
gaauuucagagaggaacuu

SEQ ID NO: 922986 - RNA, 19 nt, Homo sapiens
  misc_RNA (1)...(19): siRNA sense strand
cagaacuuguaccaaauac

SEQ ID NO: 922987 - RNA, 19 nt, Homo sapiens
  misc_RNA (1)...(19): siRNA sense strand
cauggcacccgcuucaaau

SEQ ID NO: 922988 - RNA, 19 nt, Homo sapiens
  misc_RNA (1)...(19): siRNA sense strand
cagcagaugcagcuuaugc

SEQ ID NO: 922989 - RNA, 19 nt, Homo sapiens
  misc_RNA (1)...(19): siRNA sense strand
cgggagaaaugcaaguacu

SEQ ID NO: 922990 - RNA, 19 nt, Homo sapiens
  misc_RNA (1)...(19): siRNA sense strand
uuucaauccuuacauacca

SEQ ID NO: 922991 - RNA, 19 nt, Homo sapiens
  misc_RNA (1)...(19): siRNA sense strand
gugguggccuguuuugauu

SEQ ID NO: 922992 - RNA, 19 nt, Homo sapiens
  misc_RNA (1)...(19): siRNA sense strand
uuuagaagucuguagagaa

SEQ ID NO: 922993 - RNA, 19 nt, Homo sapiens
  misc_RNA (1)...(19): siRNA sense strand
gaacugcaaguaccuucac

SEQ ID NO: 922994 - RNA, 19 nt, Homo sapiens
  misc_RNA (1)...(19): siRNA sense strand
cuuuagaagucuguagaga

SEQ ID NO: 922995 - RNA, 19 nt, Homo sapiens
  misc_RNA (1)...(19): siRNA sense strand
aaacgcagcuggagauuaa

SEQ ID NO: 922996 - RNA, 19 nt, Homo sapiens
  misc_RNA (1)...(19): siRNA sense strand
gcucaaaugucaucacuug

SEQ ID NO: 922997 - RNA, 19 nt, Homo sapiens
  misc_RNA (1)...(19): siRNA sense strand
aaauacaccuguucugauu

SEQ ID NO: 922998 - RNA, 19 nt, Homo sapiens
  misc_RNA (1)...(19): siRNA sense strand
ggagaaugauugccgcuau

SEQ ID NO: 922999 - RNA, 19 nt, Homo sapiens
  misc_RNA (1)...(19): siRNA sense strand
gcagaacuuguaccaaaua

SEQ ID NO: 923000 - RNA, 19 nt, Homo sapiens
  misc_RNA (1)...(19): siRNA sense strand
agaagucuguagagaauuu

SEQ ID NO: 923001 - RNA, 19 nt, Homo sapiens
  misc_RNA (1)...(19): siRNA sense strand
cugcagaacuuguaccaaa

SEQ ID NO: 923002 - RNA, 19 nt, Homo sapiens
  misc_RNA (1)...(19): siRNA sense strand
caaaugucaucacuugguu

SEQ ID NO: 923003 - RNA, 19 nt, Homo sapiens
  misc_RNA (1)...(19): siRNA sense strand
cugcauggauuacaucaaa

SEQ ID NO: 923004 - RNA, 19 nt, Homo sapiens
  misc_RNA (1)...(19): siRNA sense strand
ggagaaaugcaaguacuuu

SEQ ID NO: 923005 - RNA, 19 nt, Homo sapiens
  misc_RNA (1)...(19): siRNA sense strand
ccaaaacgcucaaauguca

SEQ ID NO: 923006 - RNA, 19 nt, Homo sapiens
  misc_RNA (1)...(19): siRNA sense strand
ugucaucacuugguucuuu

SEQ ID NO: 923007 - RNA, 19 nt, Homo sapiens
  misc_RNA (1)...(19): siRNA sense strand
gcacccgcuucaaauauug

SEQ ID NO: 923008 - RNA, 19 nt, Homo sapiens
  misc_RNA (1)...(19): siRNA sense strand
uuagaagucuguagagaau

SEQ ID NO: 923009 - RNA, 19 nt, Homo sapiens
  misc_RNA (1)...(19): siRNA sense strand
gagaaugauugccgcuaug

SEQ ID NO: 923010 - RNA, 19 nt, Homo sapiens
  misc_RNA (1)...(19): siRNA sense strand
ccaaauacaccuguucuga

SEQ ID NO: 923011 - RNA, 19 nt, Homo sapiens
  misc_RNA (1)...(19): siRNA sense strand
aaacccaccucuugcaaug

SEQ ID NO: 923012 - RNA, 19 nt, Homo sapiens
  misc_RNA (1)...(19): siRNA sense strand
ggagguuugccgagaauuu

SEQ ID NO: 923013 - RNA, 19 nt, Homo sapiens
  misc_RNA (1)...(19): siRNA sense strand
ccauggcuuucaauccuua

SEQ ID NO: 923014 - RNA, 19 nt, Homo sapiens
  misc_RNA (1)...(19): siRNA sense strand
ucacccuccuccacacuua

SEQ ID NO: 923015 - RNA, 19 nt, Homo sapiens
  misc_RNA (1)...(19): siRNA sense strand
caaggcagcucaucaucag

SEQ ID NO: 923016 - RNA, 19 nt, Homo sapiens
  misc_RNA (1)...(19): siRNA sense strand
ggcuuucaauccuuacaua

SEQ ID NO: 923017 - RNA, 19 nt, Homo sapiens
  misc_RNA (1)...(19): siRNA sense strand
ggcacccgcuucaaauauu

SEQ ID NO: 923018 - RNA, 19 nt, Homo sapiens
  misc_RNA (1)...(19): siRNA sense strand
caaauauugugcccaugau

SEQ ID NO: 923019 - RNA, 19 nt, Homo sapiens
  misc_RNA (1)...(19): siRNA sense strand
gauaauacugugacaaucu

SEQ ID NO: 923020 - RNA, 19 nt, Homo sapiens
  misc_RNA (1)...(19): siRNA sense strand
gcauggcacccgcuucaaa

SEQ ID NO: 923021 - RNA, 19 nt, Homo sapiens
  misc_RNA (1)...(19): siRNA sense strand
caaauacaccuguucugau

SEQ ID NO: 923022 - RNA, 19 nt, Homo sapiens
  misc_RNA (1)...(19): siRNA sense strand
ucaaauauugugcccauga

SEQ ID NO: 923023 - RNA, 19 nt, Homo sapiens
  misc_RNA (1)...(19): siRNA sense strand
gcccauccaccaagaguuu

SEQ ID NO: 923024 - RNA, 19 nt, Homo sapiens
  misc_RNA (1)...(19): siRNA sense strand
ggaaacccaccucuugcaa

SEQ ID NO: 923025 - RNA, 19 nt, Homo sapiens
  misc_RNA (1)...(19): siRNA sense strand
gcuaugcucacccuacuga

SEQ ID NO: 923026 - RNA, 19 nt, Homo sapiens
  misc_RNA (1)...(19): siRNA sense strand
gaaacccaccucuugcaau

SEQ ID NO: 923027 - RNA, 19 nt, Homo sapiens
  misc_RNA (1)...(19): siRNA sense strand
gugauaauacugugacaau

SEQ ID NO: 923028 - RNA, 19 nt, Homo sapiens
  misc_RNA (1)...(19): siRNA sense strand
gauugaagcgagugauaau

SEQ ID NO: 923029 - RNA, 19 nt, Homo sapiens
  misc_RNA (1)...(19): siRNA sense strand
ugucaauguugcccugauu

SEQ ID NO: 923030 - RNA, 19 nt, Homo sapiens
  misc_RNA (1)...(19): siRNA sense strand
gaugcucgcgggagaaaug

SEQ ID NO: 923031 - RNA, 19 nt, Homo sapiens
  misc_RNA (1)...(19): siRNA sense strand
cuccaucaauuccagcuaa

SEQ ID NO: 923032 - RNA, 19 nt, Homo sapiens
  misc_RNA (1)...(19): siRNA sense strand
gcccagcagaugcagcuua

SEQ ID NO: 923033 - RNA, 19 nt, Homo sapiens
  misc_RNA (1)...(19): siRNA sense strand
gggccucguuccugcagaa

SEQ ID NO: 923034 - RNA, 19 nt, Homo sapiens
  misc_RNA (1)...(19): siRNA sense strand
uccuaugacuccaucaauu

SEQ ID NO: 923035 - RNA, 19 nt, Homo sapiens
  misc_RNA (1)...(19): siRNA sense strand
cuaauccucccauggcuuu

SEQ ID NO: 923036 - RNA, 19 nt, Homo sapiens
  misc_RNA (1)...(19): siRNA sense strand
ccuggaaacccaccucuug

SEQ ID NO: 923037 - RNA, 19 nt, Homo sapiens
  misc_RNA (1)...(19): siRNA sense strand
gcaaugccaggagcuguug

SEQ ID NO: 923038 - RNA, 19 nt, Homo sapiens
  misc_RNA (1)...(19): siRNA sense strand
uacugaugcuuccaugauu

SEQ ID NO: 923039 - RNA, 19 nt, Homo sapiens
  misc_RNA (1)...(19): siRNA sense strand
cccagcagaugcagcuuau

SEQ ID NO: 923040 - RNA, 19 nt, Homo sapiens
  misc_RNA (1)...(19): siRNA sense strand
gaagcgagugauaauacug

SEQ ID NO: 923041 - RNA, 19 nt, Homo sapiens
  misc_RNA (1)...(19): siRNA sense strand
ucaaaugucaucacuuggu

SEQ ID NO: 923042 - RNA, 19 nt, Homo sapiens
  misc_RNA (1)...(19): siRNA sense strand
ucccacagccggcauuuau

SEQ ID NO: 923043 - RNA, 19 nt, Homo sapiens
  misc_RNA (1)...(19): siRNA sense strand
ucaaggcagcucaucauca

SEQ ID NO: 923044 - RNA, 19 nt, Homo sapiens
  misc_RNA (1)...(19): siRNA sense strand
gggagaaaugcaaguacuu

SEQ ID NO: 923045 - RNA, 19 nt, Homo sapiens
  misc_RNA (1)...(19): siRNA sense strand
ccuaugacuccaucaauuc

SEQ ID NO: 923046 - RNA, 19 nt, Homo sapiens
  misc_RNA (1)...(19): siRNA sense strand
ucacuugguucuuuuccua

SEQ ID NO: 923047 - RNA, 19 nt, Homo sapiens
  misc_RNA (1)...(19): siRNA sense strand
uuaaugggcggaacaaucu

SEQ ID NO: 923048 - RNA, 19 nt, Homo sapiens
  misc_RNA (1)...(19): siRNA sense strand
gugcuacaccuaccacugu

SEQ ID NO: 923049 - RNA, 19 nt, Homo sapiens
  misc_RNA (1)...(19): siRNA sense strand
gucgugugguggccuguuu

SEQ ID NO: 923050 - RNA, 19 nt, Homo sapiens
  misc_RNA (1)...(19): siRNA sense strand
ugauugaagcgagugauaa

SEQ ID NO: 923051 - RNA, 19 nt, Homo sapiens
  misc_RNA (1)...(19): siRNA sense strand
cuacugaugcuuccaugau

SEQ ID NO: 923052 - RNA, 19 nt, Homo sapiens
  misc_RNA (1)...(19): siRNA sense strand
gagauuaaugggcggaaca

SEQ ID NO: 923053 - RNA, 19 nt, Homo sapiens
  misc_RNA (1)...(19): siRNA sense strand
auaauacugugacaaucug

SEQ ID NO: 923054 - RNA, 19 nt, Homo sapiens
  misc_RNA (1)...(19): siRNA sense strand
gagguuugccgagaauuuc

SEQ ID NO: 923055 - RNA, 19 nt, Homo sapiens
  misc_RNA (1)...(19): siRNA sense strand
caccaagaguuugccaugu

SEQ ID NO: 923056 - RNA, 19 nt, Homo sapiens
  misc_RNA (1)...(19): siRNA sense strand
guaccaaauacaccuguuc

SEQ ID NO: 923057 - RNA, 19 nt, Homo sapiens
  misc_RNA (1)...(19): siRNA sense strand
ugauaauacugugacaauc

SEQ ID NO: 923058 - RNA, 19 nt, Homo sapiens
  misc_RNA (1)...(19): siRNA sense strand
acugaugcuuccaugauug

SEQ ID NO: 923059 - RNA, 19 nt, Homo sapiens
  misc_RNA (1)...(19): siRNA sense strand
accaagaguuugccaugug

SEQ ID NO: 923060 - RNA, 19 nt, Homo sapiens
  misc_RNA (1)...(19): siRNA sense strand
ugaagcgagugauaauacu

SEQ ID NO: 923061 - RNA, 19 nt, Homo sapiens
  misc_RNA (1)...(19): siRNA sense strand
aaaugcaaguacuuucauc

SEQ ID NO: 923062 - RNA, 19 nt, Homo sapiens
  misc_RNA (1)...(19): siRNA sense strand
ugcagaacuuguaccaaau

SEQ ID NO: 923063 - RNA, 19 nt, Homo sapiens
  misc_RNA (1)...(19): siRNA sense strand
gaauuucagagaggaacuu

SEQ ID NO: 923064 - RNA, 19 nt, Homo sapiens
  misc_RNA (1)...(19): siRNA sense strand
cagaacuuguaccaaauac

SEQ ID NO: 923065 - RNA, 19 nt, Homo sapiens
  misc_RNA (1)...(19): siRNA sense strand
cauggcacccgcuucaaau

SEQ ID NO: 923066 - RNA, 19 nt, Homo sapiens
  misc_RNA (1)...(19): siRNA sense strand
cagcagaugcagcuuaugc

SEQ ID NO: 923067 - RNA, 19 nt, Homo sapiens
  misc_RNA (1)...(19): siRNA sense strand
cgggagaaaugcaaguacu

SEQ ID NO: 923068 - RNA, 19 nt, Homo sapiens
  misc_RNA (1)...(19): siRNA sense strand
uuucaauccuuacauacca

SEQ ID NO: 923069 - RNA, 19 nt, Homo sapiens
  misc_RNA (1)...(19): siRNA sense strand
gugguggccuguuuugauu

SEQ ID NO: 923070 - RNA, 19 nt, Homo sapiens
  misc_RNA (1)...(19): siRNA sense strand
uuuagaagucuguagagaa

SEQ ID NO: 923071 - RNA, 19 nt, Homo sapiens
  misc_RNA (1)...(19): siRNA sense strand
gaacugcaaguaccuucac

SEQ ID NO: 923072 - RNA, 19 nt, Homo sapiens
  misc_RNA (1)...(19): siRNA sense strand
cuuuagaagucuguagaga

SEQ ID NO: 923073 - RNA, 19 nt, Homo sapiens
  misc_RNA (1)...(19): siRNA sense strand
caacaccacuguacuuugg

SEQ ID NO: 923074 - RNA, 19 nt, Homo sapiens
  misc_RNA (1)...(19): siRNA sense strand
gguguggucuucuccauga

SEQ ID NO: 923075 - RNA, 19 nt, Homo sapiens
  misc_RNA (1)...(19): siRNA sense strand
ccagaucagcuguuuguga

SEQ ID NO: 923076 - RNA, 19 nt, Homo sapiens
  misc_RNA (1)...(19): siRNA sense strand
gagaaaaggagacuucaaa

SEQ ID NO: 923077 - RNA, 19 nt, Homo sapiens
  misc_RNA (1)...(19): siRNA sense strand
gccagccgaugucgagaug

SEQ ID NO: 923078 - RNA, 19 nt, Homo sapiens
  misc_RNA (1)...(19): siRNA sense strand
guggucuucuccaugauga

SEQ ID NO: 923079 - RNA, 19 nt, Homo sapiens
  misc_RNA (1)...(19): siRNA sense strand
gacuccagaucagcuguuu

SEQ ID NO: 923080 - RNA, 19 nt, Homo sapiens
  misc_RNA (1)...(19): siRNA sense strand
gacccugaguguggauuug

SEQ ID NO: 923081 - RNA, 19 nt, Homo sapiens
  misc_RNA (1)...(19): siRNA sense strand
ccaacaccacuguacuuug

SEQ ID NO: 923082 - RNA, 19 nt, Homo sapiens
  misc_RNA (1)...(19): siRNA sense strand
ucaggguggugguccuaga

SEQ ID NO: 923083 - RNA, 19 nt, Homo sapiens
  misc_RNA (1)...(19): siRNA sense strand
ggacagggugacuccagau

SEQ ID NO: 923084 - RNA, 19 nt, Homo sapiens
  misc_RNA (1)...(19): siRNA sense strand
gguggugguccuagacuuc

SEQ ID NO: 923085 - RNA, 19 nt, Homo sapiens
  misc_RNA (1)...(19): siRNA sense strand
ccuccuggcucaguguaau

SEQ ID NO: 923086 - RNA, 19 nt, Homo sapiens
  misc_RNA (1)...(19): siRNA sense strand
gcuaugggauauacuauuu

SEQ ID NO: 923087 - RNA, 19 nt, Homo sapiens
  misc_RNA (1)...(19): siRNA sense strand
gauaagggcugcucccaau

SEQ ID NO: 923088 - RNA, 19 nt, Homo sapiens
  misc_RNA (1)...(19): siRNA sense strand
ggaagggacgcaccauuua

SEQ ID NO: 923089 - RNA, 19 nt, Homo sapiens
  misc_RNA (1)...(19): siRNA sense strand
cgagaaaguuggcaggaaa

SEQ ID NO: 923090 - RNA, 19 nt, Homo sapiens
  misc_RNA (1)...(19): siRNA sense strand
gcagauggcuuuggagaca

SEQ ID NO: 923091 - RNA, 19 nt, Homo sapiens
  misc_RNA (1)...(19): siRNA sense strand
gagggagacuguggagaua

SEQ ID NO: 923092 - RNA, 19 nt, Homo sapiens
  misc_RNA (1)...(19): siRNA sense strand
gagacaauccuuucuauca

SEQ ID NO: 923093 - RNA, 19 nt, Homo sapiens
  misc_RNA (1)...(19): siRNA sense strand
ggagcuagccgaauucgaa

SEQ ID NO: 923094 - RNA, 19 nt, Homo sapiens
  misc_RNA (1)...(19): siRNA sense strand
gagagcagauggcuuugga

SEQ ID NO: 923095 - RNA, 19 nt, Homo sapiens
  misc_RNA (1)...(19): siRNA sense strand
gaagggacgcaccauuuau

SEQ ID NO: 923096 - RNA, 19 nt, Homo sapiens
  misc_RNA (1)...(19): siRNA sense strand
ggagggagacuguggagau

SEQ ID NO: 923097 - RNA, 19 nt, Homo sapiens
  misc_RNA (1)...(19): siRNA sense strand
aaaguuggcaggaaaguga

SEQ ID NO: 923098 - RNA, 19 nt, Homo sapiens
  misc_RNA (1)...(19): siRNA sense strand
gcugagggcuggcacuucu

SEQ ID NO: 923099 - RNA, 19 nt, Homo sapiens
  misc_RNA (1)...(19): siRNA sense strand
ccugagagcagauggcuuu

SEQ ID NO: 923100 - RNA, 19 nt, Homo sapiens
  misc_RNA (1)...(19): siRNA sense strand
gggagacuguggagauauc

SEQ ID NO: 923101 - RNA, 19 nt, Homo sapiens
  misc_RNA (1)...(19): siRNA sense strand
agagggccauggacuugua

SEQ ID NO: 923102 - RNA, 19 nt, Homo sapiens
  misc_RNA (1)...(19): siRNA sense strand
uggagacaauccuuucuau

SEQ ID NO: 923103 - RNA, 19 nt, Homo sapiens
  misc_RNA (1)...(19): siRNA sense strand
gggauauacuauuucaucu

SEQ ID NO: 923104 - RNA, 19 nt, Homo sapiens
  misc_RNA (1)...(19): siRNA sense strand
gcacuucuucugcuuucaa

SEQ ID NO: 923105 - RNA, 19 nt, Homo sapiens
  misc_RNA (1)...(19): siRNA sense strand
uggaagggacgcaccauuu

SEQ ID NO: 923106 - RNA, 19 nt, Homo sapiens
  misc_RNA (1)...(19): siRNA sense strand
gacaauccuuucuaucacu

SEQ ID NO: 923107 - RNA, 19 nt, Homo sapiens
  misc_RNA (1)...(19): siRNA sense strand
gagcuagccgaauucgaaa

SEQ ID NO: 923108 - RNA, 19 nt, Homo sapiens
  misc_RNA (1)...(19): siRNA sense strand
ggagaggcaacgagaaagu

SEQ ID NO: 923109 - RNA, 19 nt, Homo sapiens
  misc_RNA (1)...(19): siRNA sense strand
uggcugagguggccuugga

SEQ ID NO: 923110 - RNA, 19 nt, Homo sapiens
  misc_RNA (1)...(19): siRNA sense strand
gagaggcaacgagaaaguu

SEQ ID NO: 923111 - RNA, 19 nt, Homo sapiens
  misc_RNA (1)...(19): siRNA sense strand
uaagggcugcucccaauuc

SEQ ID NO: 923112 - RNA, 19 nt, Homo sapiens
  misc_RNA (1)...(19): siRNA sense strand
gaaaguuggcaggaaagug

SEQ ID NO: 923113 - RNA, 19 nt, Homo sapiens
  misc_RNA (1)...(19): siRNA sense strand
ggagacaauccuuucuauc

SEQ ID NO: 923114 - RNA, 19 nt, Homo sapiens
  misc_RNA (1)...(19): siRNA sense strand
gcugagguggccuuggaua

SEQ ID NO: 923115 - RNA, 19 nt, Homo sapiens
  misc_RNA (1)...(19): siRNA sense strand
ccagagggccauggacuug

SEQ ID NO: 923116 - RNA, 19 nt, Homo sapiens
  misc_RNA (1)...(19): siRNA sense strand
guggugggcuaugggauau

SEQ ID NO: 923117 - RNA, 19 nt, Homo sapiens
  misc_RNA (1)...(19): siRNA sense strand
aaggagaggcaacgagaaa

SEQ ID NO: 923118 - RNA, 19 nt, Homo sapiens
  misc_RNA (1)...(19): siRNA sense strand
uggaggauaucuaugugau

SEQ ID NO: 923119 - RNA, 19 nt, Homo sapiens
  misc_RNA (1)...(19): siRNA sense strand
gagauauccugaggcugau

SEQ ID NO: 923120 - RNA, 19 nt, Homo sapiens
  misc_RNA (1)...(19): siRNA sense strand
ccuaggagcccaagaucug

SEQ ID NO: 923121 - RNA, 19 nt, Homo sapiens
  misc_RNA (1)...(19): siRNA sense strand
ggaaccagagggccaugga

SEQ ID NO: 923122 - RNA, 19 nt, Homo sapiens
  misc_RNA (1)...(19): siRNA sense strand
caaggagaggcaacgagaa

SEQ ID NO: 923123 - RNA, 19 nt, Homo sapiens
  misc_RNA (1)...(19): siRNA sense strand
ggaggauaucuaugugaug

SEQ ID NO: 923124 - RNA, 19 nt, Homo sapiens
  misc_RNA (1)...(19): siRNA sense strand
gcuggcacuucuucugcuu

SEQ ID NO: 923125 - RNA, 19 nt, Homo sapiens
  misc_RNA (1)...(19): siRNA sense strand
ggugaagaucagugaagaa

SEQ ID NO: 923126 - RNA, 19 nt, Homo sapiens
  misc_RNA (1)...(19): siRNA sense strand
cguggugggcuaugggaua

SEQ ID NO: 923127 - RNA, 19 nt, Homo sapiens
  misc_RNA (1)...(19): siRNA sense strand
agacaauccuuucuaucac

SEQ ID NO: 923128 - RNA, 19 nt, Homo sapiens
  misc_RNA (1)...(19): siRNA sense strand
ggugggcuaugggauauac

SEQ ID NO: 923129 - RNA, 19 nt, Homo sapiens
  misc_RNA (1)...(19): siRNA sense strand
ugggauauacuauuucauc

SEQ ID NO: 923130 - RNA, 19 nt, Homo sapiens
  misc_RNA (1)...(19): siRNA sense strand
gagaaaguuggcaggaaag

SEQ ID NO: 923131 - RNA, 19 nt, Homo sapiens
  misc_RNA (1)...(19): siRNA sense strand
gauauccugaggcugauuc

SEQ ID NO: 923132 - RNA, 19 nt, Homo sapiens
  misc_RNA (1)...(19): siRNA sense strand
gugaagaucagugaagaag

SEQ ID NO: 923133 - RNA, 19 nt, Homo sapiens
  misc_RNA (1)...(19): siRNA sense strand
acgagaaaguuggcaggaa

SEQ ID NO: 923134 - RNA, 19 nt, Homo sapiens
  misc_RNA (1)...(19): siRNA sense strand
ggccaaggagggagacugu

SEQ ID NO: 923135 - RNA, 19 nt, Homo sapiens
  misc_RNA (1)...(19): siRNA sense strand
uggcacuucuucugcuuuc

SEQ ID NO: 923136 - RNA, 19 nt, Homo sapiens
  misc_RNA (1)...(19): siRNA sense strand
ucucggaucaggugaagau

SEQ ID NO: 923137 - RNA, 19 nt, Homo sapiens
  misc_RNA (1)...(19): siRNA sense strand
gaagaugacaauccauuug

SEQ ID NO: 923138 - RNA, 19 nt, Homo sapiens
  misc_RNA (1)...(19): siRNA sense strand
acaaauagaagaggaguua

SEQ ID NO: 923139 - RNA, 19 nt, Homo sapiens
  misc_RNA (1)...(19): siRNA sense strand
ggaagaagagcaugaaugg

SEQ ID NO: 923140 - RNA, 19 nt, Homo sapiens
  misc_RNA (1)...(19): siRNA sense strand
cgagaucucccacaaacua

SEQ ID NO: 923141 - RNA, 19 nt, Homo sapiens
  misc_RNA (1)...(19): siRNA sense strand
gaagaauucaacagacaaa

SEQ ID NO: 923142 - RNA, 19 nt, Homo sapiens
  misc_RNA (1)...(19): siRNA sense strand
gaagagcaugaaugguuua

SEQ ID NO: 923143 - RNA, 19 nt, Homo sapiens
  misc_RNA (1)...(19): siRNA sense strand
agaagagcaugaaugguuu

SEQ ID NO: 923144 - RNA, 19 nt, Homo sapiens
  misc_RNA (1)...(19): siRNA sense strand
ggaguuaugggaagaagaa

SEQ ID NO: 923145 - RNA, 19 nt, Homo sapiens
  misc_RNA (1)...(19): siRNA sense strand
gaauucaacagacaaauag

SEQ ID NO: 923146 - RNA, 19 nt, Homo sapiens
  misc_RNA (1)...(19): siRNA sense strand
gaguacauguggauggaaa

SEQ ID NO: 923147 - RNA, 19 nt, Homo sapiens
  misc_RNA (1)...(19): siRNA sense strand
ccaagucgcagcaguacua

SEQ ID NO: 923148 - RNA, 19 nt, Homo sapiens
  misc_RNA (1)...(19): siRNA sense strand
agagcaaucugaauccaaa

SEQ ID NO: 923149 - RNA, 19 nt, Homo sapiens
  misc_RNA (1)...(19): siRNA sense strand
ccaaauccaagaccaguuu

SEQ ID NO: 923150 - RNA, 19 nt, Homo sapiens
  misc_RNA (1)...(19): siRNA sense strand
guuaugggaagaagaauuu

SEQ ID NO: 923151 - RNA, 19 nt, Homo sapiens
  misc_RNA (1)...(19): siRNA sense strand
gauccaagucgcagcagua

SEQ ID NO: 923152 - RNA, 19 nt, Homo sapiens
  misc_RNA (1)...(19): siRNA sense strand
uggaagaucuuguggucaa

SEQ ID NO: 923153 - RNA, 19 nt, Homo sapiens
  misc_RNA (1)...(19): siRNA sense strand
gauggaaaaugaagaagaa

SEQ ID NO: 923154 - RNA, 19 nt, Homo sapiens
  misc_RNA (1)...(19): siRNA sense strand
aagaagagcaugaaugguu

SEQ ID NO: 923155 - RNA, 19 nt, Homo sapiens
  misc_RNA (1)...(19): siRNA sense strand
ugaacgcuguuuccaagaa

SEQ ID NO: 923156 - RNA, 19 nt, Homo sapiens
  misc_RNA (1)...(19): siRNA sense strand
gggaagaagaauuuauuga

SEQ ID NO: 923157 - RNA, 19 nt, Homo sapiens
  misc_RNA (1)...(19): siRNA sense strand
cacaaacuauggaccaaau

SEQ ID NO: 923158 - RNA, 19 nt, Homo sapiens
  misc_RNA (1)...(19): siRNA sense strand
uuaaugaccuuguuaucag

SEQ ID NO: 923159 - RNA, 19 nt, Homo sapiens
  misc_RNA (1)...(19): siRNA sense strand
aagaagaauucaacagaca

SEQ ID NO: 923160 - RNA, 19 nt, Homo sapiens
  misc_RNA (1)...(19): siRNA sense strand
uccaagaccaguuuaauga

SEQ ID NO: 923161 - RNA, 19 nt, Homo sapiens
  misc_RNA (1)...(19): siRNA sense strand
acaauccauuugcagagua

SEQ ID NO: 923162 - RNA, 19 nt, Homo sapiens
  misc_RNA (1)...(19): siRNA sense strand
gaagaugugauuauuaacg

SEQ ID NO: 923163 - RNA, 19 nt, Homo sapiens
  misc_RNA (1)...(19): siRNA sense strand
ccaguuuaaugaccuuguu

SEQ ID NO: 923164 - RNA, 19 nt, Homo sapiens
  misc_RNA (1)...(19): siRNA sense strand
caacagacaaauagaagag

SEQ ID NO: 923165 - RNA, 19 nt, Homo sapiens
  misc_RNA (1)...(19): siRNA sense strand
caaauccaagaccaguuua

SEQ ID NO: 923166 - RNA, 19 nt, Homo sapiens
  misc_RNA (1)...(19): siRNA sense strand
ugaagaugacaauccauuu

SEQ ID NO: 923167 - RNA, 19 nt, Homo sapiens
  misc_RNA (1)...(19): siRNA sense strand
gacaauccauuugcagagu

SEQ ID NO: 923168 - RNA, 19 nt, Homo sapiens
  misc_RNA (1)...(19): siRNA sense strand
cagaguacauguggaugga

SEQ ID NO: 923169 - RNA, 19 nt, Homo sapiens
  misc_RNA (1)...(19): siRNA sense strand
ggaagaggaagaagagcau

SEQ ID NO: 923170 - RNA, 19 nt, Homo sapiens
  misc_RNA (1)...(19): siRNA sense strand
ggaaaaugaagaagaauuc

SEQ ID NO: 923171 - RNA, 19 nt, Homo sapiens
  misc_RNA (1)...(19): siRNA sense strand
aaauagaagaggaguuaug

SEQ ID NO: 923172 - RNA, 19 nt, Homo sapiens
  misc_RNA (1)...(19): siRNA sense strand
caagagcaaucugaaucca

SEQ ID NO: 923173 - RNA, 19 nt, Homo sapiens
  misc_RNA (1)...(19): siRNA sense strand
ggucaagagcaaucugaau

SEQ ID NO: 923174 - RNA, 19 nt, Homo sapiens
  misc_RNA (1)...(19): siRNA sense strand
gcucgagaucucccacaaa

SEQ ID NO: 923175 - RNA, 19 nt, Homo sapiens
  misc_RNA (1)...(19): siRNA sense strand
uaaugaccuuguuaucagu

SEQ ID NO: 923176 - RNA, 19 nt, Homo sapiens
  misc_RNA (1)...(19): siRNA sense strand
gucaagagcaaucugaauc

SEQ ID NO: 923177 - RNA, 19 nt, Homo sapiens
  misc_RNA (1)...(19): siRNA sense strand
gaauuuauugaacgcuguu

SEQ ID NO: 923178 - RNA, 19 nt, Homo sapiens
  misc_RNA (1)...(19): siRNA sense strand
caaucugaauccaaaugca

SEQ ID NO: 923179 - RNA, 19 nt, Homo sapiens
  misc_RNA (1)...(19): siRNA sense strand
ccacaaacuauggaccaaa

SEQ ID NO: 923180 - RNA, 19 nt, Homo sapiens
  misc_RNA (1)...(19): siRNA sense strand
gagaucucccacaaacuau

SEQ ID NO: 923181 - RNA, 19 nt, Homo sapiens
  misc_RNA (1)...(19): siRNA sense strand
aguacuagcccaagcauca

SEQ ID NO: 923182 - RNA, 19 nt, Homo sapiens
  misc_RNA (1)...(19): siRNA sense strand
caguuuaaugaccuuguua

SEQ ID NO: 923183 - RNA, 19 nt, Homo sapiens
  misc_RNA (1)...(19): siRNA sense strand
gaggaguuaugggaagaag

SEQ ID NO: 923184 - RNA, 19 nt, Homo sapiens
  misc_RNA (1)...(19): siRNA sense strand
gcuggaagaggaagaagag

SEQ ID NO: 923185 - RNA, 19 nt, Homo sapiens
  misc_RNA (1)...(19): siRNA sense strand
acauguggauggaaaauga

SEQ ID NO: 923186 - RNA, 19 nt, Homo sapiens
  misc_RNA (1)...(19): siRNA sense strand
aagaggaguuaugggaaga

SEQ ID NO: 923187 - RNA, 19 nt, Homo sapiens
  misc_RNA (1)...(19): siRNA sense strand
gcaaucugaauccaaaugc

SEQ ID NO: 923188 - RNA, 19 nt, Homo sapiens
  misc_RNA (1)...(19): siRNA sense strand
uauuaacggucauucucau

SEQ ID NO: 923189 - RNA, 19 nt, Homo sapiens
  misc_RNA (1)...(19): siRNA sense strand
gaggaagaagagcaugaau

SEQ ID NO: 923190 - RNA, 19 nt, Homo sapiens
  misc_RNA (1)...(19): siRNA sense strand
ucaacagacaaauagaaga

SEQ ID NO: 923191 - RNA, 19 nt, Homo sapiens
  misc_RNA (1)...(19): siRNA sense strand
gaagaagagcaugaauggu

SEQ ID NO: 923192 - RNA, 19 nt, Homo sapiens
  misc_RNA (1)...(19): siRNA sense strand
caauccauuugcagaguac

SEQ ID NO: 923193 - RNA, 19 nt, Homo sapiens
  misc_RNA (1)...(19): siRNA sense strand
ggaagaaccugauaguaaa

SEQ ID NO: 923194 - RNA, 19 nt, Homo sapiens
  misc_RNA (1)...(19): siRNA sense strand
gaagagagccaaugaggaa

SEQ ID NO: 923195 - RNA, 19 nt, Homo sapiens
  misc_RNA (1)...(19): siRNA sense strand
gaaacugguugcucaaaug

SEQ ID NO: 923196 - RNA, 19 nt, Homo sapiens
  misc_RNA (1)...(19): siRNA sense strand
gaagaaauccaaagcaaga

SEQ ID NO: 923197 - RNA, 19 nt, Homo sapiens
  misc_RNA (1)...(19): siRNA sense strand
guaaaugcauggaaaugaa

SEQ ID NO: 923198 - RNA, 19 nt, Homo sapiens
  misc_RNA (1)...(19): siRNA sense strand
ggcagaggcuguccaaauu

SEQ ID NO: 923199 - RNA, 19 nt, Homo sapiens
  misc_RNA (1)...(19): siRNA sense strand
ugaaacagcucagcaauuc

SEQ ID NO: 923200 - RNA, 19 nt, Homo sapiens
  misc_RNA (1)...(19): siRNA sense strand
gaagaaggaagaagcaauu

SEQ ID NO: 923201 - RNA, 19 nt, Homo sapiens
  misc_RNA (1)...(19): siRNA sense strand
uaaagaaacagcuucauga

SEQ ID NO: 923202 - RNA, 19 nt, Homo sapiens
  misc_RNA (1)...(19): siRNA sense strand
gguaacacaugaccaucua

SEQ ID NO: 923203 - RNA, 19 nt, Homo sapiens
  misc_RNA (1)...(19): siRNA sense strand
ggagaacccucagaaacuu

SEQ ID NO: 923204 - RNA, 19 nt, Homo sapiens
  misc_RNA (1)...(19): siRNA sense strand
gaagcaggauccacagaau

SEQ ID NO: 923205 - RNA, 19 nt, Homo sapiens
  misc_RNA (1)...(19): siRNA sense strand
gacacuaccucucgucuug

SEQ ID NO: 923206 - RNA, 19 nt, Homo sapiens
  misc_RNA (1)...(19): siRNA sense strand
cggaagaaccugauaguaa

SEQ ID NO: 923207 - RNA, 19 nt, Homo sapiens
  misc_RNA (1)...(19): siRNA sense strand
gcagugacauaccuaaaca

SEQ ID NO: 923208 - RNA, 19 nt, Homo sapiens
  misc_RNA (1)...(19): siRNA sense strand
ccacaacccuucccacauc

SEQ ID NO: 923209 - RNA, 19 nt, Homo sapiens
  misc_RNA (1)...(19): siRNA sense strand
gcaauuccauaaguaaaug

SEQ ID NO: 923210 - RNA, 19 nt, Homo sapiens
  misc_RNA (1)...(19): siRNA sense strand
uagaagaaauccaaagcaa

SEQ ID NO: 923211 - RNA, 19 nt, Homo sapiens
  misc_RNA (1)...(19): siRNA sense strand
gcucagcaauuccauaagu

SEQ ID NO: 923212 - RNA, 19 nt, Homo sapiens
  misc_RNA (1)...(19): siRNA sense strand
agaaacagcuucaugaacu

SEQ ID NO: 923213 - RNA, 19 nt, Homo sapiens
  misc_RNA (1)...(19): siRNA sense strand
gaggaacacuggccaaagg

SEQ ID NO: 923214 - RNA, 19 nt, Homo sapiens
  misc_RNA (1)...(19): siRNA sense strand
caucaaaguaccacaguuu

SEQ ID NO: 923215 - RNA, 19 nt, Homo sapiens
  misc_RNA (1)...(19): siRNA sense strand
gccuggaacuuuagcaauu

SEQ ID NO: 923216 - RNA, 19 nt, Homo sapiens
  misc_RNA (1)...(19): siRNA sense strand
acaggaggcucuuaaagug

SEQ ID NO: 923217 - RNA, 19 nt, Homo sapiens
  misc_RNA (1)...(19): siRNA sense strand
agaaacagaugagaaacaa

SEQ ID NO: 923218 - RNA, 19 nt, Homo sapiens
  misc_RNA (1)...(19): siRNA sense strand
acagaaugcugacuuaaag

SEQ ID NO: 923219 - RNA, 19 nt, Homo sapiens
  misc_RNA (1)...(19): siRNA sense strand
gagaacaacuagagcaaaa

SEQ ID NO: 923220 - RNA, 19 nt, Homo sapiens
  misc_RNA (1)...(19): siRNA sense strand
ucagaaacuugccuucaug

SEQ ID NO: 923221 - RNA, 19 nt, Homo sapiens
  misc_RNA (1)...(19): siRNA sense strand
guaacuacagcuucuauga

SEQ ID NO: 923222 - RNA, 19 nt, Homo sapiens
  misc_RNA (1)...(19): siRNA sense strand
gauaguaaagcaagaacaa

SEQ ID NO: 923223 - RNA, 19 nt, Homo sapiens
  misc_RNA (1)...(19): siRNA sense strand
aagaguaguugaacagcua

SEQ ID NO: 923224 - RNA, 19 nt, Homo sapiens
  misc_RNA (1)...(19): siRNA sense strand
ggccagagaccuaccauug

SEQ ID NO: 923225 - RNA, 19 nt, Homo sapiens
  misc_RNA (1)...(19): siRNA sense strand
ccaaaccuguagacucuga

SEQ ID NO: 923226 - RNA, 19 nt, Homo sapiens
  misc_RNA (1)...(19): siRNA sense strand
gcaauuguucauuccuaua

SEQ ID NO: 923227 - RNA, 19 nt, Homo sapiens
  misc_RNA (1)...(19): siRNA sense strand
uaagaagagugcagugaca

SEQ ID NO: 923228 - RNA, 19 nt, Homo sapiens
  misc_RNA (1)...(19): siRNA sense strand
gggcagaggcuguccaaau

SEQ ID NO: 923229 - RNA, 19 nt, Homo sapiens
  misc_RNA (1)...(19): siRNA sense strand
gcaagaggcaagagcgaaa

SEQ ID NO: 923230 - RNA, 19 nt, Homo sapiens
  misc_RNA (1)...(19): siRNA sense strand
caaagggugauauucauga

SEQ ID NO: 923231 - RNA, 19 nt, Homo sapiens
  misc_RNA (1)...(19): siRNA sense strand
gaaacagcuucaugaacuc

SEQ ID NO: 923232 - RNA, 19 nt, Homo sapiens
  misc_RNA (1)...(19): siRNA sense strand
aaauucagguucaccagaa

SEQ ID NO: 923233 - RNA, 19 nt, Homo sapiens
  misc_RNA (1)...(19): siRNA sense strand
gaagagaaacagaaguuac

SEQ ID NO: 923234 - RNA, 19 nt, Homo sapiens
  misc_RNA (1)...(19): siRNA sense strand
gaugagaaacaaacagaga

SEQ ID NO: 923235 - RNA, 19 nt, Homo sapiens
  misc_RNA (1)...(19): siRNA sense strand
aacuacagcuucuaugauu

SEQ ID NO: 923236 - RNA, 19 nt, Homo sapiens
  misc_RNA (1)...(19): siRNA sense strand
uagcaauuguucauuccua

SEQ ID NO: 923237 - RNA, 19 nt, Homo sapiens
  misc_RNA (1)...(19): siRNA sense strand
aguuaaaucucacacagaa

SEQ ID NO: 923238 - RNA, 19 nt, Homo sapiens
  misc_RNA (1)...(19): siRNA sense strand
gaaugcugacuuaaagaaa

SEQ ID NO: 923239 - RNA, 19 nt, Homo sapiens
  misc_RNA (1)...(19): siRNA sense strand
cagcucagcaauuccauaa

SEQ ID NO: 923240 - RNA, 19 nt, Homo sapiens
  misc_RNA (1)...(19): siRNA sense strand
gccaaagggugauauucau

SEQ ID NO: 923241 - RNA, 19 nt, Homo sapiens
  misc_RNA (1)...(19): siRNA sense strand
gcagaggcuguccaaauug

SEQ ID NO: 923242 - RNA, 19 nt, Homo sapiens
  misc_RNA (1)...(19): siRNA sense strand
aaagaaacagcuucaugaa

SEQ ID NO: 923243 - RNA, 19 nt, Homo sapiens
  misc_RNA (1)...(19): siRNA sense strand
aagaacaaccggacaaguu

SEQ ID NO: 923244 - RNA, 19 nt, Homo sapiens
  misc_RNA (1)...(19): siRNA sense strand
gcauggaaaugaagaacac

SEQ ID NO: 923245 - RNA, 19 nt, Homo sapiens
  misc_RNA (1)...(19): siRNA sense strand
cacagaaacagaugagaaa

SEQ ID NO: 923246 - RNA, 19 nt, Homo sapiens
  misc_RNA (1)...(19): siRNA sense strand
cagaggcuguccaaauugu

SEQ ID NO: 923247 - RNA, 19 nt, Homo sapiens
  misc_RNA (1)...(19): siRNA sense strand
caaaguaccacaguuuauc

SEQ ID NO: 923248 - RNA, 19 nt, Homo sapiens
  misc_RNA (1)...(19): siRNA sense strand
acaagaacgagaacaacua

SEQ ID NO: 923249 - RNA, 19 nt, Homo sapiens
  misc_RNA (1)...(19): siRNA sense strand
ggccaaagggugauauuca

SEQ ID NO: 923250 - RNA, 19 nt, Homo sapiens
  misc_RNA (1)...(19): siRNA sense strand
caacagcaaauccggucua

SEQ ID NO: 923251 - RNA, 19 nt, Homo sapiens
  misc_RNA (1)...(19): siRNA sense strand
ccucaaacuguacagcuua

SEQ ID NO: 923252 - RNA, 19 nt, Homo sapiens
  misc_RNA (1)...(19): siRNA sense strand
cuucuaugauuaccacaaa

SEQ ID NO: 923253 - RNA, 19 nt, Homo sapiens
  misc_RNA (1)...(19): siRNA sense strand
gugaaacagcucagcaauu

SEQ ID NO: 923254 - RNA, 19 nt, Homo sapiens
  misc_RNA (1)...(19): siRNA sense strand
acagagagccacaccauca

SEQ ID NO: 923255 - RNA, 19 nt, Homo sapiens
  misc_RNA (1)...(19): siRNA sense strand
agaaacugguugcucaaau

SEQ ID NO: 923256 - RNA, 19 nt, Homo sapiens
  misc_RNA (1)...(19): siRNA sense strand
acuacagcuucuaugauua

SEQ ID NO: 923257 - RNA, 19 nt, Homo sapiens
  misc_RNA (1)...(19): siRNA sense strand
cacagaaugcugacuuaaa

SEQ ID NO: 923258 - RNA, 19 nt, Homo sapiens
  misc_RNA (1)...(19): siRNA sense strand
gaaacagaugagaaacaaa

SEQ ID NO: 923259 - RNA, 19 nt, Homo sapiens
  misc_RNA (1)...(19): siRNA sense strand
acacagaaacagaugagaa

SEQ ID NO: 923260 - RNA, 19 nt, Homo sapiens
  misc_RNA (1)...(19): siRNA sense strand
gugcagaacacaccaguca

SEQ ID NO: 923261 - RNA, 19 nt, Homo sapiens
  misc_RNA (1)...(19): siRNA sense strand
ccagagaccuaccauugcu

SEQ ID NO: 923262 - RNA, 19 nt, Homo sapiens
  misc_RNA (1)...(19): siRNA sense strand
cuacaaagcagcaaaagaa

SEQ ID NO: 923263 - RNA, 19 nt, Homo sapiens
  misc_RNA (1)...(19): siRNA sense strand
uccacagaaugcugacuua

SEQ ID NO: 923264 - RNA, 19 nt, Homo sapiens
  misc_RNA (1)...(19): siRNA sense strand
acaugaccaucuagaagaa

SEQ ID NO: 923265 - RNA, 19 nt, Homo sapiens
  misc_RNA (1)...(19): siRNA sense strand
ccaagccuguggcccagaa

SEQ ID NO: 923266 - RNA, 19 nt, Homo sapiens
  misc_RNA (1)...(19): siRNA sense strand
ucaaaguaccacaguuuau

SEQ ID NO: 923267 - RNA, 19 nt, Homo sapiens
  misc_RNA (1)...(19): siRNA sense strand
ggacaaguuccaaauacag

SEQ ID NO: 923268 - RNA, 19 nt, Homo sapiens
  misc_RNA (1)...(19): siRNA sense strand
aagaagagaaacagaaguu

SEQ ID NO: 923269 - RNA, 19 nt, Homo sapiens
  misc_RNA (1)...(19): siRNA sense strand
gaagaagagaaacagaagu

SEQ ID NO: 923270 - RNA, 19 nt, Homo sapiens
  misc_RNA (1)...(19): siRNA sense strand
uaaaguggaaauucagguu

SEQ ID NO: 923271 - RNA, 19 nt, Homo sapiens
  misc_RNA (1)...(19): siRNA sense strand
uaacacaugaccaucuaga

SEQ ID NO: 923272 - RNA, 19 nt, Homo sapiens
  misc_RNA (1)...(19): siRNA sense strand
cagacucgcuggaccucaa

SEQ ID NO: 923273 - RNA, 19 nt, Homo sapiens
  misc_RNA (1)...(19): siRNA sense strand
gcagcaaccacuacagcaa

SEQ ID NO: 923274 - RNA, 19 nt, Homo sapiens
  misc_RNA (1)...(19): siRNA sense strand
gccacaaucugaaaacaaa

SEQ ID NO: 923275 - RNA, 19 nt, Homo sapiens
  misc_RNA (1)...(19): siRNA sense strand
uaacuacagcuucuaugau

SEQ ID NO: 923276 - RNA, 19 nt, Homo sapiens
  misc_RNA (1)...(19): siRNA sense strand
uuaaagaaacagcuucaug

SEQ ID NO: 923277 - RNA, 19 nt, Homo sapiens
  misc_RNA (1)...(19): siRNA sense strand
ucagcaauuccauaaguaa

SEQ ID NO: 923278 - RNA, 19 nt, Homo sapiens
  misc_RNA (1)...(19): siRNA sense strand
caagaacgagaacaacuag

SEQ ID NO: 923279 - RNA, 19 nt, Homo sapiens
  misc_RNA (1)...(19): siRNA sense strand
cagcaaauccggucuacag

SEQ ID NO: 923280 - RNA, 19 nt, Homo sapiens
  misc_RNA (1)...(19): siRNA sense strand
aaacuuucuuccacagguu

SEQ ID NO: 923281 - RNA, 19 nt, Homo sapiens
  misc_RNA (1)...(19): siRNA sense strand
gaagaaccugauaguaaag

SEQ ID NO: 923282 - RNA, 19 nt, Homo sapiens
  misc_RNA (1)...(19): siRNA sense strand
aaacugguugcucaaauga

SEQ ID NO: 923283 - RNA, 19 nt, Homo sapiens
  misc_RNA (1)...(19): siRNA sense strand
gugauauucaugaggauuu

SEQ ID NO: 923284 - RNA, 19 nt, Homo sapiens
  misc_RNA (1)...(19): siRNA sense strand
gaagagugcagugacauac

SEQ ID NO: 923285 - RNA, 19 nt, Homo sapiens
  misc_RNA (1)...(19): siRNA sense strand
cuacaguggagcagucuuu

SEQ ID NO: 923286 - RNA, 19 nt, Homo sapiens
  misc_RNA (1)...(19): siRNA sense strand
aaacagagagccacaccau

SEQ ID NO: 923287 - RNA, 19 nt, Homo sapiens
  misc_RNA (1)...(19): siRNA sense strand
cuccaaaccuguagacucu

SEQ ID NO: 923288 - RNA, 19 nt, Homo sapiens
  misc_RNA (1)...(19): siRNA sense strand
ccacagaaugcugacuuaa

SEQ ID NO: 923289 - RNA, 19 nt, Homo sapiens
  misc_RNA (1)...(19): siRNA sense strand
uugaacagcuacggaagaa

SEQ ID NO: 923290 - RNA, 19 nt, Homo sapiens
  misc_RNA (1)...(19): siRNA sense strand
agaagagaaacagaaguua

SEQ ID NO: 923291 - RNA, 19 nt, Homo sapiens
  misc_RNA (1)...(19): siRNA sense strand
agaagagugcagugacaua

SEQ ID NO: 923292 - RNA, 19 nt, Homo sapiens
  misc_RNA (1)...(19): siRNA sense strand
gaagaacaacagcaaaucc

SEQ ID NO: 923293 - RNA, 19 nt, Homo sapiens
  misc_RNA (1)...(19): siRNA sense strand
ggaagaagcuguccauguu

SEQ ID NO: 923294 - RNA, 19 nt, Homo sapiens
  misc_RNA (1)...(19): siRNA sense strand
agaagggucuguucacgua

SEQ ID NO: 923295 - RNA, 19 nt, Homo sapiens
  misc_RNA (1)...(19): siRNA sense strand
gcacggagaccgcuucauc

SEQ ID NO: 923296 - RNA, 19 nt, Homo sapiens
  misc_RNA (1)...(19): siRNA sense strand
caaaggagucugugucugu

SEQ ID NO: 923297 - RNA, 19 nt, Homo sapiens
  misc_RNA (1)...(19): siRNA sense strand
gaagaagcuguccauguug

SEQ ID NO: 923298 - RNA, 19 nt, Homo sapiens
  misc_RNA (1)...(19): siRNA sense strand
gggaagaagcuguccaugu

SEQ ID NO: 923299 - RNA, 19 nt, Homo sapiens
  misc_RNA (1)...(19): siRNA sense strand
gagacgagacccugagguu

SEQ ID NO: 923300 - RNA, 19 nt, Homo sapiens
  misc_RNA (1)...(19): siRNA sense strand
ccacaggauuaacgagaau

SEQ ID NO: 923301 - RNA, 19 nt, Homo sapiens
  misc_RNA (1)...(19): siRNA sense strand
gagaagaagggucuguuca

SEQ ID NO: 923302 - RNA, 19 nt, Homo sapiens
  misc_RNA (1)...(19): siRNA sense strand
ggauuaacgagaaugagaa

SEQ ID NO: 923303 - RNA, 19 nt, Homo sapiens
  misc_RNA (1)...(19): siRNA sense strand
acucugcccugcucaagaa

SEQ ID NO: 923304 - RNA, 19 nt, Homo sapiens
  misc_RNA (1)...(19): siRNA sense strand
gcaaaacccguucgacaaa

SEQ ID NO: 923305 - RNA, 19 nt, Homo sapiens
  misc_RNA (1)...(19): siRNA sense strand
ccaaggacgccaccucaga

SEQ ID NO: 923306 - RNA, 19 nt, Homo sapiens
  misc_RNA (1)...(19): siRNA sense strand
acaagcugcuggucuggaa

SEQ ID NO: 923307 - RNA, 19 nt, Homo sapiens
  misc_RNA (1)...(19): siRNA sense strand
ggacgacuucuaccucaau

SEQ ID NO: 923308 - RNA, 19 nt, Homo sapiens
  misc_RNA (1)...(19): siRNA sense strand
gaaacccacccgcaagauc

SEQ ID NO: 923309 - RNA, 19 nt, Homo sapiens
  misc_RNA (1)...(19): siRNA sense strand
gugaacuuccacaggauua

SEQ ID NO: 923310 - RNA, 19 nt, Homo sapiens
  misc_RNA (1)...(19): siRNA sense strand
uaacgagaaugagaagucu

SEQ ID NO: 923311 - RNA, 19 nt, Homo sapiens
  misc_RNA (1)...(19): siRNA sense strand
uguauccgcuucuggaaca

SEQ ID NO: 923312 - RNA, 19 nt, Homo sapiens
  misc_RNA (1)...(19): siRNA sense strand
gcaacaagagccagaagcu

SEQ ID NO: 923313 - RNA, 19 nt, Homo sapiens
  misc_RNA (1)...(19): siRNA sense strand
ccuccacgccugagaagaa

SEQ ID NO: 923314 - RNA, 19 nt, Homo sapiens
  misc_RNA (1)...(19): siRNA sense strand
ucuggaacgucuuuagcaa

SEQ ID NO: 923315 - RNA, 19 nt, Homo sapiens
  misc_RNA (1)...(19): siRNA sense strand
gguccaagcacgccaacga

SEQ ID NO: 923316 - RNA, 19 nt, Homo sapiens
  misc_RNA (1)...(19): siRNA sense strand
cguauucccuuagcaccaa

SEQ ID NO: 923317 - RNA, 19 nt, Homo sapiens
  misc_RNA (1)...(19): siRNA sense strand
gccagaucgucauccagaa

SEQ ID NO: 923318 - RNA, 19 nt, Homo sapiens
  misc_RNA (1)...(19): siRNA sense strand
caacuggagcgugaacuuc

SEQ ID NO: 923319 - RNA, 19 nt, Homo sapiens
  misc_RNA (1)...(19): siRNA sense strand
gacgagacccugagguucu

SEQ ID NO: 923320 - RNA, 19 nt, Homo sapiens
  misc_RNA (1)...(19): siRNA sense strand
ggacgccaccucagacaac

SEQ ID NO: 923321 - RNA, 19 nt, Homo sapiens
  misc_RNA (1)...(19): siRNA sense strand
aagggucuguucacguauu

SEQ ID NO: 923322 - RNA, 19 nt, Homo sapiens
  misc_RNA (1)...(19): siRNA sense strand
cugcccugcucaagaauga

SEQ ID NO: 923323 - RNA, 19 nt, Homo sapiens
  misc_RNA (1)...(19): siRNA sense strand
gcuaggcaccugcguguac

SEQ ID NO: 923324 - RNA, 19 nt, Homo sapiens
  misc_RNA (1)...(19): siRNA sense strand
ggaaacccacccgcaagau

SEQ ID NO: 923325 - RNA, 19 nt, Homo sapiens
  misc_RNA (1)...(19): siRNA sense strand
gcggcucugugaccucuca

SEQ ID NO: 923326 - RNA, 19 nt, Homo sapiens
  misc_RNA (1)...(19): siRNA sense strand
ugucugugcucaaccucuu

SEQ ID NO: 923327 - RNA, 19 nt, Homo sapiens
  misc_RNA (1)...(19): siRNA sense strand
uccacaggauuaacgagaa

SEQ ID NO: 923328 - RNA, 19 nt, Homo sapiens
  misc_RNA (1)...(19): siRNA sense strand
ccaacuggagcgugaacuu

SEQ ID NO: 923329 - RNA, 19 nt, Homo sapiens
  misc_RNA (1)...(19): siRNA sense strand
gacgacuucuaccucaauc

SEQ ID NO: 923330 - RNA, 19 nt, Homo sapiens
  misc_RNA (1)...(19): siRNA sense strand
uggaacgucuuuagcaaaa

SEQ ID NO: 923331 - RNA, 19 nt, Homo sapiens
  misc_RNA (1)...(19): siRNA sense strand
gcgugaacuuccacaggau

SEQ ID NO: 923332 - RNA, 19 nt, Homo sapiens
  misc_RNA (1)...(19): siRNA sense strand
ccagaucgucauccagaau

SEQ ID NO: 923333 - RNA, 19 nt, Homo sapiens
  misc_RNA (1)...(19): siRNA sense strand
cgacuucuaccucaaucug

SEQ ID NO: 923334 - RNA, 19 nt, Homo sapiens
  misc_RNA (1)...(19): siRNA sense strand
ugcaggacccgcagacuga

SEQ ID NO: 923335 - RNA, 19 nt, Homo sapiens
  misc_RNA (1)...(19): siRNA sense strand
gaacacgcugacaggacaa

SEQ ID NO: 923336 - RNA, 19 nt, Homo sapiens
  misc_RNA (1)...(19): siRNA sense strand
agaagucucccagucagaa

SEQ ID NO: 923337 - RNA, 19 nt, Homo sapiens
  misc_RNA (1)...(19): siRNA sense strand
ugagaagaagggucuguuc

SEQ ID NO: 923338 - RNA, 19 nt, Homo sapiens
  misc_RNA (1)...(19): siRNA sense strand
gaacuuccacaggauuaac

SEQ ID NO: 923339 - RNA, 19 nt, Homo sapiens
  misc_RNA (1)...(19): siRNA sense strand
acaagggcuucgugcagau

SEQ ID NO: 923340 - RNA, 19 nt, Homo sapiens
  misc_RNA (1)...(19): siRNA sense strand
cggaaacccacccgcaaga

SEQ ID NO: 923341 - RNA, 19 nt, Homo sapiens
  misc_RNA (1)...(19): siRNA sense strand
gaagggucuguucacguau

SEQ ID NO: 923342 - RNA, 19 nt, Homo sapiens
  misc_RNA (1)...(19): siRNA sense strand
ugacccagguggccaagcu

SEQ ID NO: 923343 - RNA, 19 nt, Homo sapiens
  misc_RNA (1)...(19): siRNA sense strand
gcucccaagugugcaaucu

SEQ ID NO: 923344 - RNA, 19 nt, Homo sapiens
  misc_RNA (1)...(19): siRNA sense strand
cuguucacguauucccuua

SEQ ID NO: 923345 - RNA, 19 nt, Homo sapiens
  misc_RNA (1)...(19): siRNA sense strand
gaacagaugucagguuaua

SEQ ID NO: 923346 - RNA, 19 nt, Homo sapiens
  misc_RNA (1)...(19): siRNA sense strand
gagcggaucuccaaacaua

SEQ ID NO: 923347 - RNA, 19 nt, Homo sapiens
  misc_RNA (1)...(19): siRNA sense strand
gggaacagaugucagguua

SEQ ID NO: 923348 - RNA, 19 nt, Homo sapiens
  misc_RNA (1)...(19): siRNA sense strand
aaagagaacugcacagaaa

SEQ ID NO: 923349 - RNA, 19 nt, Homo sapiens
  misc_RNA (1)...(19): siRNA sense strand
uaaagacacugaaagauga

SEQ ID NO: 923350 - RNA, 19 nt, Homo sapiens
  misc_RNA (1)...(19): siRNA sense strand
gaacgcagcgagagaauaa

SEQ ID NO: 923351 - RNA, 19 nt, Homo sapiens
  misc_RNA (1)...(19): siRNA sense strand
caugagaaauggcaagaua

SEQ ID NO: 923352 - RNA, 19 nt, Homo sapiens
  misc_RNA (1)...(19): siRNA sense strand
guacaaaggcuguuacuug

SEQ ID NO: 923353 - RNA, 19 nt, Homo sapiens
  misc_RNA (1)...(19): siRNA sense strand
gagcacaccuugagcagaa

SEQ ID NO: 923354 - RNA, 19 nt, Homo sapiens
  misc_RNA (1)...(19): siRNA sense strand
ggacuagccuaccuacauu

SEQ ID NO: 923355 - RNA, 19 nt, Homo sapiens
  misc_RNA (1)...(19): siRNA sense strand
caaaggcuguuacuugaaa

SEQ ID NO: 923356 - RNA, 19 nt, Homo sapiens
  misc_RNA (1)...(19): siRNA sense strand
ggaauuugguuacauuaga

SEQ ID NO: 923357 - RNA, 19 nt, Homo sapiens
  misc_RNA (1)...(19): siRNA sense strand
ggaauggacccuugaauga

SEQ ID NO: 923358 - RNA, 19 nt, Homo sapiens
  misc_RNA (1)...(19): siRNA sense strand
gaagaaagauuugacaacu

SEQ ID NO: 923359 - RNA, 19 nt, Homo sapiens
  misc_RNA (1)...(19): siRNA sense strand
gaucuuagcuauggaugaa

SEQ ID NO: 923360 - RNA, 19 nt, Homo sapiens
  misc_RNA (1)...(19): siRNA sense strand
ggaaguuacuccaaagaau

SEQ ID NO: 923361 - RNA, 19 nt, Homo sapiens
  misc_RNA (1)...(19): siRNA sense strand
ccauggaaaugcaaauuaa

SEQ ID NO: 923362 - RNA, 19 nt, Homo sapiens
  misc_RNA (1)...(19): siRNA sense strand
uuaagaagauguccuauag

SEQ ID NO: 923363 - RNA, 19 nt, Homo sapiens
  misc_RNA (1)...(19): siRNA sense strand
gauggccucucaagcguua

SEQ ID NO: 923364 - RNA, 19 nt, Homo sapiens
  misc_RNA (1)...(19): siRNA sense strand
ggagaucgcugccauuacu

SEQ ID NO: 923365 - RNA, 19 nt, Homo sapiens
  misc_RNA (1)...(19): siRNA sense strand
caacaugaaugcaaugagu

SEQ ID NO: 923366 - RNA, 19 nt, Homo sapiens
  misc_RNA (1)...(19): siRNA sense strand
gaagaagcaguauaagauu

SEQ ID NO: 923367 - RNA, 19 nt, Homo sapiens
  misc_RNA (1)...(19): siRNA sense strand
uaaagaaccuauuggaaag

SEQ ID NO: 923368 - RNA, 19 nt, Homo sapiens
  misc_RNA (1)...(19): siRNA sense strand
guacagaccaaacaguaua

SEQ ID NO: 923369 - RNA, 19 nt, Homo sapiens
  misc_RNA (1)...(19): siRNA sense strand
ucucaugcauugauucaua

SEQ ID NO: 923370 - RNA, 19 nt, Homo sapiens
  misc_RNA (1)...(19): siRNA sense strand
auaaagcacucaagaauca

SEQ ID NO: 923371 - RNA, 19 nt, Homo sapiens
  misc_RNA (1)...(19): siRNA sense strand
uggagaagcuggccaagaa

SEQ ID NO: 923372 - RNA, 19 nt, Homo sapiens
  misc_RNA (1)...(19): siRNA sense strand
gacgaaagcacaaucaauu

SEQ ID NO: 923373 - RNA, 19 nt, Homo sapiens
  misc_RNA (1)...(19): siRNA sense strand
ggaagacagugaacaugga

SEQ ID NO: 923374 - RNA, 19 nt, Homo sapiens
  misc_RNA (1)...(19): siRNA sense strand
caaaugcucacaccaauga

SEQ ID NO: 923375 - RNA, 19 nt, Homo sapiens
  misc_RNA (1)...(19): siRNA sense strand
gaaagagaacugcacagaa

SEQ ID NO: 923376 - RNA, 19 nt, Homo sapiens
  misc_RNA (1)...(19): siRNA sense strand
gaagcaaguggcuaucaua

SEQ ID NO: 923377 - RNA, 19 nt, Homo sapiens
  misc_RNA (1)...(19): siRNA sense strand
uacaaaggcuguuacuuga

SEQ ID NO: 923378 - RNA, 19 nt, Homo sapiens
  misc_RNA (1)...(19): siRNA sense strand
gaaugggauuugggaauuu

SEQ ID NO: 923379 - RNA, 19 nt, Homo sapiens
  misc_RNA (1)...(19): siRNA sense strand
ccaaugaggugguggcaau

SEQ ID NO: 923380 - RNA, 19 nt, Homo sapiens
  misc_RNA (1)...(19): siRNA sense strand
gaagcagacccaugagaaa

SEQ ID NO: 923381 - RNA, 19 nt, Homo sapiens
  misc_RNA (1)...(19): siRNA sense strand
aaacagaggcacaacauga

SEQ ID NO: 923382 - RNA, 19 nt, Homo sapiens
  misc_RNA (1)...(19): siRNA sense strand
ggaagcagacccaugagaa

SEQ ID NO: 923383 - RNA, 19 nt, Homo sapiens
  misc_RNA (1)...(19): siRNA sense strand
gaaguuacuccaaagaaug

SEQ ID NO: 923384 - RNA, 19 nt, Homo sapiens
  misc_RNA (1)...(19): siRNA sense strand
gaccauagcacacccaaga

SEQ ID NO: 923385 - RNA, 19 nt, Homo sapiens
  misc_RNA (1)...(19): siRNA sense strand
gcaggaaauauucuucuaa

SEQ ID NO: 923386 - RNA, 19 nt, Homo sapiens
  misc_RNA (1)...(19): siRNA sense strand
caauugaagcauccuaaua

SEQ ID NO: 923387 - RNA, 19 nt, Homo sapiens
  misc_RNA (1)...(19): siRNA sense strand
ggugauggaauauugcuua

SEQ ID NO: 923388 - RNA, 19 nt, Homo sapiens
  misc_RNA (1)...(19): siRNA sense strand
ggagauuuguugauuacug

SEQ ID NO: 923389 - RNA, 19 nt, Homo sapiens
  misc_RNA (1)...(19): siRNA sense strand
aagaagauguccuauagug

SEQ ID NO: 923390 - RNA, 19 nt, Homo sapiens
  misc_RNA (1)...(19): siRNA sense strand
guauaaagcacucaagaau

SEQ ID NO: 923391 - RNA, 19 nt, Homo sapiens
  misc_RNA (1)...(19): siRNA sense strand
gaaaauaccucaggaaagg

SEQ ID NO: 923392 - RNA, 19 nt, Homo sapiens
  misc_RNA (1)...(19): siRNA sense strand
gaggugaucuuagcuaugg

SEQ ID NO: 923393 - RNA, 19 nt, Homo sapiens
  misc_RNA (1)...(19): siRNA sense strand
gaaauuggacauggaaguu

SEQ ID NO: 923394 - RNA, 19 nt, Homo sapiens
  misc_RNA (1)...(19): siRNA sense strand
guugauauuuggucacuug

SEQ ID NO: 923395 - RNA, 19 nt, Homo sapiens
  misc_RNA (1)...(19): siRNA sense strand
uggcaucacuuguauugaa

SEQ ID NO: 923396 - RNA, 19 nt, Homo sapiens
  misc_RNA (1)...(19): siRNA sense strand
caacguuacagucuaauga

SEQ ID NO: 923397 - RNA, 19 nt, Homo sapiens
  misc_RNA (1)...(19): siRNA sense strand
ucacuuggcaucacuugua

SEQ ID NO: 923398 - RNA, 19 nt, Homo sapiens
  misc_RNA (1)...(19): siRNA sense strand
aacaucagcagaacuauua

SEQ ID NO: 923399 - RNA, 19 nt, Homo sapiens
  misc_RNA (1)...(19): siRNA sense strand
gaauggacagacuccuuua

SEQ ID NO: 923400 - RNA, 19 nt, Homo sapiens
  misc_RNA (1)...(19): siRNA sense strand
ugaagcauccuaauacuau

SEQ ID NO: 923401 - RNA, 19 nt, Homo sapiens
  misc_RNA (1)...(19): siRNA sense strand
agcgagagauugaaacuuu

SEQ ID NO: 923402 - RNA, 19 nt, Homo sapiens
  misc_RNA (1)...(19): siRNA sense strand
ggaaauauucuucuaacag

SEQ ID NO: 923403 - RNA, 19 nt, Homo sapiens
  misc_RNA (1)...(19): siRNA sense strand
gcauaagaaagaucaugua

SEQ ID NO: 923404 - RNA, 19 nt, Homo sapiens
  misc_RNA (1)...(19): siRNA sense strand
aaaucaagaugcaaacaga

SEQ ID NO: 923405 - RNA, 19 nt, Homo sapiens
  misc_RNA (1)...(19): siRNA sense strand
gaaaugauggccucucaag

SEQ ID NO: 923406 - RNA, 19 nt, Homo sapiens
  misc_RNA (1)...(19): siRNA sense strand
gcuccuccgucgugcauaa

SEQ ID NO: 923407 - RNA, 19 nt, Homo sapiens
  misc_RNA (1)...(19): siRNA sense strand
gcaaaguacagaccaaaca

SEQ ID NO: 923408 - RNA, 19 nt, Homo sapiens
  misc_RNA (1)...(19): siRNA sense strand
gccauggaaaugcaaauua

SEQ ID NO: 923409 - RNA, 19 nt, Homo sapiens
  misc_RNA (1)...(19): siRNA sense strand
ggaaaugaaugaggaccau

SEQ ID NO: 923410 - RNA, 19 nt, Homo sapiens
  misc_RNA (1)...(19): siRNA sense strand
gaugggaaaguugauauuu

SEQ ID NO: 923411 - RNA, 19 nt, Homo sapiens
  misc_RNA (1)...(19): siRNA sense strand
uaaggaggacuacagauga

SEQ ID NO: 923412 - RNA, 19 nt, Homo sapiens
  misc_RNA (1)...(19): siRNA sense strand
agaaugggauuugggaauu

SEQ ID NO: 923413 - RNA, 19 nt, Homo sapiens
  misc_RNA (1)...(19): siRNA sense strand
gcaaacagaggcacaacau

SEQ ID NO: 923414 - RNA, 19 nt, Homo sapiens
  misc_RNA (1)...(19): siRNA sense strand
agaagaagcaguauaagau

SEQ ID NO: 923415 - RNA, 19 nt, Homo sapiens
  misc_RNA (1)...(19): siRNA sense strand
aaaucagcaucuuugguua

SEQ ID NO: 923416 - RNA, 19 nt, Homo sapiens
  misc_RNA (1)...(19): siRNA sense strand
caauuaagaagauguccua

SEQ ID NO: 923417 - RNA, 19 nt, Homo sapiens
  misc_RNA (1)...(19): siRNA sense strand
gcaaugagugccuuauauc

SEQ ID NO: 923418 - RNA, 19 nt, Homo sapiens
  misc_RNA (1)...(19): siRNA sense strand
acaggcagcugcacacguu

SEQ ID NO: 923419 - RNA, 19 nt, Homo sapiens
  misc_RNA (1)...(19): siRNA sense strand
gucagaagaagcaguauaa

SEQ ID NO: 923420 - RNA, 19 nt, Homo sapiens
  misc_RNA (1)...(19): siRNA sense strand
gguuggugauggaauauug

SEQ ID NO: 923421 - RNA, 19 nt, Homo sapiens
  misc_RNA (1)...(19): siRNA sense strand
ggauuugggaauuugguua

SEQ ID NO: 923422 - RNA, 19 nt, Homo sapiens
  misc_RNA (1)...(19): siRNA sense strand
ggcaagagcgagagauuga

SEQ ID NO: 923423 - RNA, 19 nt, Homo sapiens
  misc_RNA (1)...(19): siRNA sense strand
gcagagcaguaugaacaga

SEQ ID NO: 923424 - RNA, 19 nt, Homo sapiens
  misc_RNA (1)...(19): siRNA sense strand
aagaugagcagacaagaaa

SEQ ID NO: 923425 - RNA, 19 nt, Homo sapiens
  misc_RNA (1)...(19): siRNA sense strand
cagaagaagcaguauaaga

SEQ ID NO: 923426 - RNA, 19 nt, Homo sapiens
  misc_RNA (1)...(19): siRNA sense strand
agaagaaguuccagcaaca

SEQ ID NO: 923427 - RNA, 19 nt, Homo sapiens
  misc_RNA (1)...(19): siRNA sense strand
caacaucagcagaacuauu

SEQ ID NO: 923428 - RNA, 19 nt, Homo sapiens
  misc_RNA (1)...(19): siRNA sense strand
aaucaccaguuggaaguua

SEQ ID NO: 923429 - RNA, 19 nt, Homo sapiens
  misc_RNA (1)...(19): siRNA sense strand
gaaggaacgcagcgagaga

SEQ ID NO: 923430 - RNA, 19 nt, Homo sapiens
  misc_RNA (1)...(19): siRNA sense strand
uauaucacauugcccagaa

SEQ ID NO: 923431 - RNA, 19 nt, Homo sapiens
  misc_RNA (1)...(19): siRNA sense strand
caagagcgagagauugaaa

SEQ ID NO: 923432 - RNA, 19 nt, Homo sapiens
  misc_RNA (1)...(19): siRNA sense strand
uuaaagacacugaaagaug

SEQ ID NO: 923433 - RNA, 19 nt, Homo sapiens
  misc_RNA (1)...(19): siRNA sense strand
gcugaaggacccagagauu

SEQ ID NO: 923434 - RNA, 19 nt, Homo sapiens
  misc_RNA (1)...(19): siRNA sense strand
cagcuggaguacaauaaga

SEQ ID NO: 923435 - RNA, 19 nt, Homo sapiens
  misc_RNA (1)...(19): siRNA sense strand
gcagaacauucgggaggaa

SEQ ID NO: 923436 - RNA, 19 nt, Homo sapiens
  misc_RNA (1)...(19): siRNA sense strand
gaaaugaaugaggaccaua

SEQ ID NO: 923437 - RNA, 19 nt, Homo sapiens
  misc_RNA (1)...(19): siRNA sense strand
ugagaaauggcaagauauu

SEQ ID NO: 923438 - RNA, 19 nt, Homo sapiens
  misc_RNA (1)...(19): siRNA sense strand
gaagacagugaacauggaa

SEQ ID NO: 923439 - RNA, 19 nt, Homo sapiens
  misc_RNA (1)...(19): siRNA sense strand
gccacuacguguccucauu

SEQ ID NO: 923440 - RNA, 19 nt, Homo sapiens
  misc_RNA (1)...(19): siRNA sense strand
ccaagaagcaaguggcuau

SEQ ID NO: 923441 - RNA, 19 nt, Homo sapiens
  misc_RNA (1)...(19): siRNA sense strand
gcagcgagagaauaaagaa

SEQ ID NO: 923442 - RNA, 19 nt, Homo sapiens
  misc_RNA (1)...(19): siRNA sense strand
uaaaggccauggaaaugca

SEQ ID NO: 923443 - RNA, 19 nt, Homo sapiens
  misc_RNA (1)...(19): siRNA sense strand
guaaaggggugcugaagga

SEQ ID NO: 923444 - RNA, 19 nt, Homo sapiens
  misc_RNA (1)...(19): siRNA sense strand
cagcagaugagaagaaguu

SEQ ID NO: 923445 - RNA, 19 nt, Homo sapiens
  misc_RNA (1)...(19): siRNA sense strand
gagaauaucugucuucauu

SEQ ID NO: 923446 - RNA, 19 nt, Homo sapiens
  misc_RNA (1)...(19): siRNA sense strand
caaauggacuuucugaaua

SEQ ID NO: 923447 - RNA, 19 nt, Homo sapiens
  misc_RNA (1)...(19): siRNA sense strand
uaucagaggugaagaauuu

SEQ ID NO: 923448 - RNA, 19 nt, Homo sapiens
  misc_RNA (1)...(19): siRNA sense strand
gaaggaagcuuugaauaug

SEQ ID NO: 923449 - RNA, 19 nt, Homo sapiens
  misc_RNA (1)...(19): siRNA sense strand
gaagugaaguuucgcauug

SEQ ID NO: 923450 - RNA, 19 nt, Homo sapiens
  misc_RNA (1)...(19): siRNA sense strand
gaagagugauucauaguga

SEQ ID NO: 923451 - RNA, 19 nt, Homo sapiens
  misc_RNA (1)...(19): siRNA sense strand
agaaacaacugacagauaa

SEQ ID NO: 923452 - RNA, 19 nt, Homo sapiens
  misc_RNA (1)...(19): siRNA sense strand
caacauggguuacaggauu

SEQ ID NO: 923453 - RNA, 19 nt, Homo sapiens
  misc_RNA (1)...(19): siRNA sense strand
uaacuucucuccugggaua

SEQ ID NO: 923454 - RNA, 19 nt, Homo sapiens
  misc_RNA (1)...(19): siRNA sense strand
ugaagaaaguggaauauga

SEQ ID NO: 923455 - RNA, 19 nt, Homo sapiens
  misc_RNA (1)...(19): siRNA sense strand
ugaaugaccagacauauua

SEQ ID NO: 923456 - RNA, 19 nt, Homo sapiens
  misc_RNA (1)...(19): siRNA sense strand
gcacuaauguguucuucaa

SEQ ID NO: 923457 - RNA, 19 nt, Homo sapiens
  misc_RNA (1)...(19): siRNA sense strand
uaaaggcucugucugaauu

SEQ ID NO: 923458 - RNA, 19 nt, Homo sapiens
  misc_RNA (1)...(19): siRNA sense strand
gcacuugguugucagcuuu

SEQ ID NO: 923459 - RNA, 19 nt, Homo sapiens
  misc_RNA (1)...(19): siRNA sense strand
gaacauacacuuggcuuaa

SEQ ID NO: 923460 - RNA, 19 nt, Homo sapiens
  misc_RNA (1)...(19): siRNA sense strand
gaacagugcagaugagauu

SEQ ID NO: 923461 - RNA, 19 nt, Homo sapiens
  misc_RNA (1)...(19): siRNA sense strand
aguaaaggcugaaggaaua

SEQ ID NO: 923462 - RNA, 19 nt, Homo sapiens
  misc_RNA (1)...(19): siRNA sense strand
gaagguaacucgugcugau

SEQ ID NO: 923463 - RNA, 19 nt, Homo sapiens
  misc_RNA (1)...(19): siRNA sense strand
caagaaauguaagcacuaa

SEQ ID NO: 923464 - RNA, 19 nt, Homo sapiens
  misc_RNA (1)...(19): siRNA sense strand
gacaauaggcuacagagua

SEQ ID NO: 923465 - RNA, 19 nt, Homo sapiens
  misc_RNA (1)...(19): siRNA sense strand
gcaaccaacugacucuuga

SEQ ID NO: 923466 - RNA, 19 nt, Homo sapiens
  misc_RNA (1)...(19): siRNA sense strand
ggaguuaagcuauauggua

SEQ ID NO: 923467 - RNA, 19 nt, Homo sapiens
  misc_RNA (1)...(19): siRNA sense strand
ccagacauauuaucaauca

SEQ ID NO: 923468 - RNA, 19 nt, Homo sapiens
  misc_RNA (1)...(19): siRNA sense strand
agaaauagcuugggugguu

SEQ ID NO: 923469 - RNA, 19 nt, Homo sapiens
  misc_RNA (1)...(19): siRNA sense strand
agacauacauccaacuaaa

SEQ ID NO: 923470 - RNA, 19 nt, Homo sapiens
  misc_RNA (1)...(19): siRNA sense strand
agacgaagaucuauccaaa

SEQ ID NO: 923471 - RNA, 19 nt, Homo sapiens
  misc_RNA (1)...(19): siRNA sense strand
aauggaagcuguucagaaa

SEQ ID NO: 923472 - RNA, 19 nt, Homo sapiens
  misc_RNA (1)...(19): siRNA sense strand
ugaagccgauccuuacaua

SEQ ID NO: 923473 - RNA, 19 nt, Homo sapiens
  misc_RNA (1)...(19): siRNA sense strand
caacacaucugggagaaau

SEQ ID NO: 923474 - RNA, 19 nt, Homo sapiens
  misc_RNA (1)...(19): siRNA sense strand
ccagugagcuacaguugaa

SEQ ID NO: 923475 - RNA, 19 nt, Homo sapiens
  misc_RNA (1)...(19): siRNA sense strand
ccacugagguuaagguaau

SEQ ID NO: 923476 - RNA, 19 nt, Homo sapiens
  misc_RNA (1)...(19): siRNA sense strand
caucaucacucuucaguca

SEQ ID NO: 923477 - RNA, 19 nt, Homo sapiens
  misc_RNA (1)...(19): siRNA sense strand
gacaggcggugagaaguua

SEQ ID NO: 923478 - RNA, 19 nt, Homo sapiens
  misc_RNA (1)...(19): siRNA sense strand
gaaaguaucagccuaacau

SEQ ID NO: 923479 - RNA, 19 nt, Homo sapiens
  misc_RNA (1)...(19): siRNA sense strand
guaauggauucuucaaaug

SEQ ID NO: 923480 - RNA, 19 nt, Homo sapiens
  misc_RNA (1)...(19): siRNA sense strand
gaaauagcuugggugguuu

SEQ ID NO: 923481 - RNA, 19 nt, Homo sapiens
  misc_RNA (1)...(19): siRNA sense strand
gaaugccucuaaugauauu

SEQ ID NO: 923482 - RNA, 19 nt, Homo sapiens
  misc_RNA (1)...(19): siRNA sense strand
ggaagcagaaggagucuuu

SEQ ID NO: 923483 - RNA, 19 nt, Homo sapiens
  misc_RNA (1)...(19): siRNA sense strand
gaccagacauauuaucaau

SEQ ID NO: 923484 - RNA, 19 nt, Homo sapiens
  misc_RNA (1)...(19): siRNA sense strand
gaauguguguacaagcuuu

SEQ ID NO: 923485 - RNA, 19 nt, Homo sapiens
  misc_RNA (1)...(19): siRNA sense strand
gaggaaaugugacuauugg

SEQ ID NO: 923486 - RNA, 19 nt, Homo sapiens
  misc_RNA (1)...(19): siRNA sense strand
aaucuucccuacucuguua

SEQ ID NO: 923487 - RNA, 19 nt, Homo sapiens
  misc_RNA (1)...(19): siRNA sense strand
aaacagacaaggccuuaua

SEQ ID NO: 923488 - RNA, 19 nt, Homo sapiens
  misc_RNA (1)...(19): siRNA sense strand
gcagaaggagucuuugaaa

SEQ ID NO: 923489 - RNA, 19 nt, Homo sapiens
  misc_RNA (1)...(19): siRNA sense strand
ugauuuagauguugcugua

SEQ ID NO: 923490 - RNA, 19 nt, Homo sapiens
  misc_RNA (1)...(19): siRNA sense strand
caagaagccuuugauuuag

SEQ ID NO: 923491 - RNA, 19 nt, Homo sapiens
  misc_RNA (1)...(19): siRNA sense strand
gaagaucuauccaaaauca

SEQ ID NO: 923492 - RNA, 19 nt, Homo sapiens
  misc_RNA (1)...(19): siRNA sense strand
cauuucagguuucagaaua

SEQ ID NO: 923493 - RNA, 19 nt, Homo sapiens
  misc_RNA (1)...(19): siRNA sense strand
ugacuggucuauucaaguu

SEQ ID NO: 923494 - RNA, 19 nt, Homo sapiens
  misc_RNA (1)...(19): siRNA sense strand
cgaaggaagcuuugaauau

SEQ ID NO: 923495 - RNA, 19 nt, Homo sapiens
  misc_RNA (1)...(19): siRNA sense strand
aaauggaucugcaaacuuc

SEQ ID NO: 923496 - RNA, 19 nt, Homo sapiens
  misc_RNA (1)...(19): siRNA sense strand
gaagaaaguggaauaugau

SEQ ID NO: 923497 - RNA, 19 nt, Homo sapiens
  misc_RNA (1)...(19): siRNA sense strand
uggcauggcucuuauggaa

SEQ ID NO: 923498 - RNA, 19 nt, Homo sapiens
  misc_RNA (1)...(19): siRNA sense strand
gcacugcucucacacuucu

SEQ ID NO: 923499 - RNA, 19 nt, Homo sapiens
  misc_RNA (1)...(19): siRNA sense strand
guagaggaauuucagacaa

SEQ ID NO: 923500 - RNA, 19 nt, Homo sapiens
  misc_RNA (1)...(19): siRNA sense strand
gcaagagucuauccauuuu

SEQ ID NO: 923501 - RNA, 19 nt, Homo sapiens
  misc_RNA (1)...(19): siRNA sense strand
ccaggaagagugauucaua

SEQ ID NO: 923502 - RNA, 19 nt, Homo sapiens
  misc_RNA (1)...(19): siRNA sense strand
gaggcaagguuaccagaga

SEQ ID NO: 923503 - RNA, 19 nt, Homo sapiens
  misc_RNA (1)...(19): siRNA sense strand
ugaagaauuugcuuuggaa

SEQ ID NO: 923504 - RNA, 19 nt, Homo sapiens
  misc_RNA (1)...(19): siRNA sense strand
gacacagccugacuccaua

SEQ ID NO: 923505 - RNA, 19 nt, Homo sapiens
  misc_RNA (1)...(19): siRNA sense strand
augaaugccucuaaugaua

SEQ ID NO: 923506 - RNA, 19 nt, Homo sapiens
  misc_RNA (1)...(19): siRNA sense strand
ugaaguaacuguaccugau

SEQ ID NO: 923507 - RNA, 19 nt, Homo sapiens
  misc_RNA (1)...(19): siRNA sense strand
gaaagaugccacugagguu

SEQ ID NO: 923508 - RNA, 19 nt, Homo sapiens
  misc_RNA (1)...(19): siRNA sense strand
cagccacgcucccuggaua

SEQ ID NO: 923509 - RNA, 19 nt, Homo sapiens
  misc_RNA (1)...(19): siRNA sense strand
cagaaucaguuacagguau

SEQ ID NO: 923510 - RNA, 19 nt, Homo sapiens
  misc_RNA (1)...(19): siRNA sense strand
ccaauggcaguuaauauuu

SEQ ID NO: 923511 - RNA, 19 nt, Homo sapiens
  misc_RNA (1)...(19): siRNA sense strand
gggccuagcucaccaaguc

SEQ ID NO: 923512 - RNA, 19 nt, Homo sapiens
  misc_RNA (1)...(19): siRNA sense strand
ucagaucacugcaauugga

SEQ ID NO: 923513 - RNA, 19 nt, Homo sapiens
  misc_RNA (1)...(19): siRNA sense strand
gaaguaacuguaccugauu

SEQ ID NO: 923514 - RNA, 19 nt, Homo sapiens
  misc_RNA (1)...(19): siRNA sense strand
gcagacaccauuauauugu

SEQ ID NO: 923515 - RNA, 19 nt, Homo sapiens
  misc_RNA (1)...(19): siRNA sense strand
ggaguggcauggcucuuau

SEQ ID NO: 923516 - RNA, 19 nt, Homo sapiens
  misc_RNA (1)...(19): siRNA sense strand
acaagaagguggcaugcaa

SEQ ID NO: 923517 - RNA, 19 nt, Homo sapiens
  misc_RNA (1)...(19): siRNA sense strand
guugucagcuuuuguuuua

SEQ ID NO: 923518 - RNA, 19 nt, Homo sapiens
  misc_RNA (1)...(19): siRNA sense strand
ggucuuggacuaacaacua

SEQ ID NO: 923519 - RNA, 19 nt, Homo sapiens
  misc_RNA (1)...(19): siRNA sense strand
ccacauguccgaaagcauu

SEQ ID NO: 923520 - RNA, 19 nt, Homo sapiens
  misc_RNA (1)...(19): siRNA sense strand
ucacgaaggauuauauuga

SEQ ID NO: 923521 - RNA, 19 nt, Homo sapiens
  misc_RNA (1)...(19): siRNA sense strand
guuacacucuucucagauu

SEQ ID NO: 923522 - RNA, 19 nt, Homo sapiens
  misc_RNA (1)...(19): siRNA sense strand
caagcaacaugauuacauc

SEQ ID NO: 923523 - RNA, 19 nt, Homo sapiens
  misc_RNA (1)...(19): siRNA sense strand
ugaaggacauauuguagau

SEQ ID NO: 923524 - RNA, 19 nt, Homo sapiens
  misc_RNA (1)...(19): siRNA sense strand
ggaauaugaucauggaaaa

SEQ ID NO: 923525 - RNA, 19 nt, Homo sapiens
  misc_RNA (1)...(19): siRNA sense strand
gcauggcucuuauggaagu

SEQ ID NO: 923526 - RNA, 19 nt, Homo sapiens
  misc_RNA (1)...(19): siRNA sense strand
caauggcaguuaauauuuc

SEQ ID NO: 923527 - RNA, 19 nt, Homo sapiens
  misc_RNA (1)...(19): siRNA sense strand
cuaagcaggcaaagaaaua

SEQ ID NO: 923528 - RNA, 19 nt, Homo sapiens
  misc_RNA (1)...(19): siRNA sense strand
ucacacuucuuacaauuuc

SEQ ID NO: 923529 - RNA, 19 nt, Homo sapiens
  misc_RNA (1)...(19): siRNA sense strand
gcgaaggaagcuuugaaua

SEQ ID NO: 923530 - RNA, 19 nt, Homo sapiens
  misc_RNA (1)...(19): siRNA sense strand
ggaggaaaugugacuauug

SEQ ID NO: 923531 - RNA, 19 nt, Homo sapiens
  misc_RNA (1)...(19): siRNA sense strand
uuacaacucugaagugaag

SEQ ID NO: 923532 - RNA, 19 nt, Homo sapiens
  misc_RNA (1)...(19): siRNA sense strand
uaauauuccugcugugaga

SEQ ID NO: 923533 - RNA, 19 nt, Homo sapiens
  misc_RNA (1)...(19): siRNA sense strand
ccuauuaaguggcuuuaug

SEQ ID NO: 923534 - RNA, 19 nt, Homo sapiens
  misc_RNA (1)...(19): siRNA sense strand
ccuguaaaguuucugauug

SEQ ID NO: 923535 - RNA, 19 nt, Homo sapiens
  misc_RNA (1)...(19): siRNA sense strand
gugcaagagucuauccauu

SEQ ID NO: 923536 - RNA, 19 nt, Homo sapiens
  misc_RNA (1)...(19): siRNA sense strand
gcuucaagguggcaauaaa

SEQ ID NO: 923537 - RNA, 19 nt, Homo sapiens
  misc_RNA (1)...(19): siRNA sense strand
caacugacagauaauuuga

SEQ ID NO: 923538 - RNA, 19 nt, Homo sapiens
  misc_RNA (1)...(19): siRNA sense strand
cacaauccaucuuauuaga

SEQ ID NO: 923539 - RNA, 19 nt, Homo sapiens
  misc_RNA (1)...(19): siRNA sense strand
ccaagaauuugaaguaacu

SEQ ID NO: 923540 - RNA, 19 nt, Homo sapiens
  misc_RNA (1)...(19): siRNA sense strand
uuacaggauuuaccaagaa

SEQ ID NO: 923541 - RNA, 19 nt, Homo sapiens
  misc_RNA (1)...(19): siRNA sense strand
ugaaggaguuaagcuauau

SEQ ID NO: 923542 - RNA, 19 nt, Homo sapiens
  misc_RNA (1)...(19): siRNA sense strand
cagagaaacuauacugagu

SEQ ID NO: 923543 - RNA, 19 nt, Homo sapiens
  misc_RNA (1)...(19): siRNA sense strand
gcaaacuucucuuuuaaug

SEQ ID NO: 923544 - RNA, 19 nt, Homo sapiens
  misc_RNA (1)...(19): siRNA sense strand
cagccuauauuguaacuuc

SEQ ID NO: 923545 - RNA, 19 nt, Homo sapiens
  misc_RNA (1)...(19): siRNA sense strand
ugagauggcugcauuacaa

SEQ ID NO: 923546 - RNA, 19 nt, Homo sapiens
  misc_RNA (1)...(19): siRNA sense strand
gaagagucaugcauagaga

SEQ ID NO: 923547 - RNA, 19 nt, Homo sapiens
  misc_RNA (1)...(19): siRNA sense strand
gauaugggcuauaauacau

SEQ ID NO: 923548 - RNA, 19 nt, Homo sapiens
  misc_RNA (1)...(19): siRNA sense strand
gaccagacgucaccuaugu

SEQ ID NO: 923549 - RNA, 19 nt, Homo sapiens
  misc_RNA (1)...(19): siRNA sense strand
gauacaacuucaaaucuga

SEQ ID NO: 923550 - RNA, 19 nt, Homo sapiens
  misc_RNA (1)...(19): siRNA sense strand
gaccggauaugggcuauaa

SEQ ID NO: 923551 - RNA, 19 nt, Homo sapiens
  misc_RNA (1)...(19): siRNA sense strand
gaugagcaaucacaaggaa

SEQ ID NO: 923552 - RNA, 19 nt, Homo sapiens
  misc_RNA (1)...(19): siRNA sense strand
ggauacaacuucaaaucug

SEQ ID NO: 923553 - RNA, 19 nt, Homo sapiens
  misc_RNA (1)...(19): siRNA sense strand
uauaugagauggcugcauu

SEQ ID NO: 923554 - RNA, 19 nt, Homo sapiens
  misc_RNA (1)...(19): siRNA sense strand
aaagaacuguuuggaagua

SEQ ID NO: 923555 - RNA, 19 nt, Homo sapiens
  misc_RNA (1)...(19): siRNA sense strand
gaacacaugcauucucgaa

SEQ ID NO: 923556 - RNA, 19 nt, Homo sapiens
  misc_RNA (1)...(19): siRNA sense strand
gcacauucuuuaguuggua

SEQ ID NO: 923557 - RNA, 19 nt, Homo sapiens
  misc_RNA (1)...(19): siRNA sense strand
ccagagagaauacaugaaa

SEQ ID NO: 923558 - RNA, 19 nt, Homo sapiens
  misc_RNA (1)...(19): siRNA sense strand
gaacuguuuggaaguauuu

SEQ ID NO: 923559 - RNA, 19 nt, Homo sapiens
  misc_RNA (1)...(19): siRNA sense strand
gaauuuauacucacugugu

SEQ ID NO: 923560 - RNA, 19 nt, Homo sapiens
  misc_RNA (1)...(19): siRNA sense strand
gaaaauggauacaacuuca

SEQ ID NO: 923561 - RNA, 19 nt, Homo sapiens
  misc_RNA (1)...(19): siRNA sense strand
ucucuuggcugucuacuau

SEQ ID NO: 923562 - RNA, 19 nt, Homo sapiens
  misc_RNA (1)...(19): siRNA sense strand
caacucaaccauccaaaug

SEQ ID NO: 923563 - RNA, 19 nt, Homo sapiens
  misc_RNA (1)...(19): siRNA sense strand
acacaugcauucucgaaga

SEQ ID NO: 923564 - RNA, 19 nt, Homo sapiens
  misc_RNA (1)...(19): siRNA sense strand
gaggcuaauuccugaaaga

SEQ ID NO: 923565 - RNA, 19 nt, Homo sapiens
  misc_RNA (1)...(19): siRNA sense strand
gagaauacaugaaaaugga

SEQ ID NO: 923566 - RNA, 19 nt, Homo sapiens
  misc_RNA (1)...(19): siRNA sense strand
caacccagauccagagaag

SEQ ID NO: 923567 - RNA, 19 nt, Homo sapiens
  misc_RNA (1)...(19): siRNA sense strand
acucaaccauccaaaugua

SEQ ID NO: 923568 - RNA, 19 nt, Homo sapiens
  misc_RNA (1)...(19): siRNA sense strand
ucugacaucuggucucuug

SEQ ID NO: 923569 - RNA, 19 nt, Homo sapiens
  misc_RNA (1)...(19): siRNA sense strand
gaaagaacuguuuggaagu

SEQ ID NO: 923570 - RNA, 19 nt, Homo sapiens
  misc_RNA (1)...(19): siRNA sense strand
ggauaugggcuauaauaca

SEQ ID NO: 923571 - RNA, 19 nt, Homo sapiens
  misc_RNA (1)...(19): siRNA sense strand
ccacagcugcacauucuuu

SEQ ID NO: 923572 - RNA, 19 nt, Homo sapiens
  misc_RNA (1)...(19): siRNA sense strand
agucaugcauagagauaua

SEQ ID NO: 923573 - RNA, 19 nt, Homo sapiens
  misc_RNA (1)...(19): siRNA sense strand
gaaaauuggucgcggacaa

SEQ ID NO: 923574 - RNA, 19 nt, Homo sapiens
  misc_RNA (1)...(19): siRNA sense strand
ccggauaugggcuauaaua

SEQ ID NO: 923575 - RNA, 19 nt, Homo sapiens
  misc_RNA (1)...(19): siRNA sense strand
gcuaauuccugaaagaacu

SEQ ID NO: 923576 - RNA, 19 nt, Homo sapiens
  misc_RNA (1)...(19): siRNA sense strand
caaccauccaaauguaaua

SEQ ID NO: 923577 - RNA, 19 nt, Homo sapiens
  misc_RNA (1)...(19): siRNA sense strand
ucagaucacuauucagaag

SEQ ID NO: 923578 - RNA, 19 nt, Homo sapiens
  misc_RNA (1)...(19): siRNA sense strand
uggaguaccaguagcuuua

SEQ ID NO: 923579 - RNA, 19 nt, Homo sapiens
  misc_RNA (1)...(19): siRNA sense strand
ggcgaccuauccagaauga

SEQ ID NO: 923580 - RNA, 19 nt, Homo sapiens
  misc_RNA (1)...(19): siRNA sense strand
gaguaccaguagcuuuaaa

SEQ ID NO: 923581 - RNA, 19 nt, Homo sapiens
  misc_RNA (1)...(19): siRNA sense strand
agacgucaccuauguuuau

SEQ ID NO: 923582 - RNA, 19 nt, Homo sapiens
  misc_RNA (1)...(19): siRNA sense strand
gaaauagaucuucuuaagc

SEQ ID NO: 923583 - RNA, 19 nt, Homo sapiens
  misc_RNA (1)...(19): siRNA sense strand
uauacucacuguguaagaa

SEQ ID NO: 923584 - RNA, 19 nt, Homo sapiens
  misc_RNA (1)...(19): siRNA sense strand
ccagacgucaccuauguuu

SEQ ID NO: 923585 - RNA, 19 nt, Homo sapiens
  misc_RNA (1)...(19): siRNA sense strand
gcaacucaaccauccaaau

SEQ ID NO: 923586 - RNA, 19 nt, Homo sapiens
  misc_RNA (1)...(19): siRNA sense strand
caccuauguuuaugacgua

SEQ ID NO: 923587 - RNA, 19 nt, Homo sapiens
  misc_RNA (1)...(19): siRNA sense strand
gacaguuaguuaauaugug

SEQ ID NO: 923588 - RNA, 19 nt, Homo sapiens
  misc_RNA (1)...(19): siRNA sense strand
gcaaucacaaggaaugcaa

SEQ ID NO: 923589 - RNA, 19 nt, Homo sapiens
  misc_RNA (1)...(19): siRNA sense strand
uuagccaacuuucgaauag

SEQ ID NO: 923590 - RNA, 19 nt, Homo sapiens
  misc_RNA (1)...(19): siRNA sense strand
ggacaauuuagugaaguuu

SEQ ID NO: 923591 - RNA, 19 nt, Homo sapiens
  misc_RNA (1)...(19): siRNA sense strand
uaguugguacgccuuauua

SEQ ID NO: 923592 - RNA, 19 nt, Homo sapiens
  misc_RNA (1)...(19): siRNA sense strand
aaccacagcugcacauucu

SEQ ID NO: 923593 - RNA, 19 nt, Homo sapiens
  misc_RNA (1)...(19): siRNA sense strand
gaucaagcauuuuaagaag

SEQ ID NO: 923594 - RNA, 19 nt, Homo sapiens
  misc_RNA (1)...(19): siRNA sense strand
ggaguaccaguagcuuuaa

SEQ ID NO: 923595 - RNA, 19 nt, Homo sapiens
  misc_RNA (1)...(19): siRNA sense strand
gcagugcauuggaacacau

SEQ ID NO: 923596 - RNA, 19 nt, Homo sapiens
  misc_RNA (1)...(19): siRNA sense strand
cgacaguuaguuaauaugu

SEQ ID NO: 923597 - RNA, 19 nt, Homo sapiens
  misc_RNA (1)...(19): siRNA sense strand
gauagaacagugugacuac

SEQ ID NO: 923598 - RNA, 19 nt, Homo sapiens
  misc_RNA (1)...(19): siRNA sense strand
ucucgaagagucaugcaua

SEQ ID NO: 923599 - RNA, 19 nt, Homo sapiens
  misc_RNA (1)...(19): siRNA sense strand
gcugcacauucuuuaguug

SEQ ID NO: 923600 - RNA, 19 nt, Homo sapiens
  misc_RNA (1)...(19): siRNA sense strand
uuuaauggaugccaaagca

SEQ ID NO: 923601 - RNA, 19 nt, Homo sapiens
  misc_RNA (1)...(19): siRNA sense strand
cuucagaucacuauucaga

SEQ ID NO: 923602 - RNA, 19 nt, Homo sapiens
  misc_RNA (1)...(19): siRNA sense strand
cuacccaccucuuccuuca

SEQ ID NO: 923603 - RNA, 19 nt, Homo sapiens
  misc_RNA (1)...(19): siRNA sense strand
gagauggcugcauuacaaa

SEQ ID NO: 923604 - RNA, 19 nt, Homo sapiens
  misc_RNA (1)...(19): siRNA sense strand
caacuucaaaucugacauc

SEQ ID NO: 923605 - RNA, 19 nt, Homo sapiens
  misc_RNA (1)...(19): siRNA sense strand
ggccaccuguuccucaguu

SEQ ID NO: 923606 - RNA, 19 nt, Homo sapiens
  misc_RNA (1)...(19): siRNA sense strand
gcauagagauauaaaacca

SEQ ID NO: 923607 - RNA, 19 nt, Homo sapiens
  misc_RNA (1)...(19): siRNA sense strand
agaacuguuuggaaguauu

SEQ ID NO: 923608 - RNA, 19 nt, Homo sapiens
  misc_RNA (1)...(19): siRNA sense strand
gacgucaccuauguuuaug

SEQ ID NO: 923609 - RNA, 19 nt, Homo sapiens
  misc_RNA (1)...(19): siRNA sense strand
cuccgacaguuaguuaaua

SEQ ID NO: 923610 - RNA, 19 nt, Homo sapiens
  misc_RNA (1)...(19): siRNA sense strand
cgaccuauccagaaugauc

SEQ ID NO: 923611 - RNA, 19 nt, Homo sapiens
  misc_RNA (1)...(19): siRNA sense strand
agaucacuauucagaagaa

SEQ ID NO: 923612 - RNA, 19 nt, Homo sapiens
  misc_RNA (1)...(19): siRNA sense strand
cggacaauuuagugaaguu

SEQ ID NO: 923613 - RNA, 19 nt, Homo sapiens
  misc_RNA (1)...(19): siRNA sense strand
gguaaaacuuggagaucuu

SEQ ID NO: 923614 - RNA, 19 nt, Homo sapiens
  misc_RNA (1)...(19): siRNA sense strand
cgaagagucaugcauagag

SEQ ID NO: 923615 - RNA, 19 nt, Homo sapiens
  misc_RNA (1)...(19): siRNA sense strand
uccgacaguuaguuaauau

SEQ ID NO: 923616 - RNA, 19 nt, Homo sapiens
  misc_RNA (1)...(19): siRNA sense strand
agagucaugcauagagaua

SEQ ID NO: 923617 - RNA, 19 nt, Homo sapiens
  misc_RNA (1)...(19): siRNA sense strand
ucuuggcugucuacuauau

SEQ ID NO: 923618 - RNA, 19 nt, Homo sapiens
  misc_RNA (1)...(19): siRNA sense strand
uauccagaaugaucaagca

SEQ ID NO: 923619 - RNA, 19 nt, Homo sapiens
  misc_RNA (1)...(19): siRNA sense strand
agccaacuuucgaauagaa

SEQ ID NO: 923620 - RNA, 19 nt, Homo sapiens
  misc_RNA (1)...(19): siRNA sense strand
ugagcaaucacaaggaaug

SEQ ID NO: 923621 - RNA, 19 nt, Homo sapiens
  misc_RNA (1)...(19): siRNA sense strand
aaaaccagcuaauguguuc

SEQ ID NO: 923622 - RNA, 19 nt, Homo sapiens
  misc_RNA (1)...(19): siRNA sense strand
cacagcugcacauucuuua

SEQ ID NO: 923623 - RNA, 19 nt, Homo sapiens
  misc_RNA (1)...(19): siRNA sense strand
uaagaagauagaacagugu

SEQ ID NO: 923624 - RNA, 19 nt, Homo sapiens
  misc_RNA (1)...(19): siRNA sense strand
ggaugagcaaucacaagga

SEQ ID NO: 923625 - RNA, 19 nt, Homo sapiens
  misc_RNA (1)...(19): siRNA sense strand
ugguacgccuuauuacaug

SEQ ID NO: 923626 - RNA, 19 nt, Homo sapiens
  misc_RNA (1)...(19): siRNA sense strand
cagacgucaccuauguuua

SEQ ID NO: 923627 - RNA, 19 nt, Homo sapiens
  misc_RNA (1)...(19): siRNA sense strand
ucucuuggauggaguacca

SEQ ID NO: 923628 - RNA, 19 nt, Homo sapiens
  misc_RNA (1)...(19): siRNA sense strand
gaccuauccagaaugauca

SEQ ID NO: 923629 - RNA, 19 nt, Homo sapiens
  misc_RNA (1)...(19): siRNA sense strand
gcgaccagacgucaccuau

SEQ ID NO: 923630 - RNA, 19 nt, Homo sapiens
  misc_RNA (1)...(19): siRNA sense strand
gguacgccuuauuacaugu

SEQ ID NO: 923631 - RNA, 19 nt, Homo sapiens
  misc_RNA (1)...(19): siRNA sense strand
cauuggaacacaugcauuc

SEQ ID NO: 923632 - RNA, 19 nt, Homo sapiens
  misc_RNA (1)...(19): siRNA sense strand
cugaaagaacuguuuggaa

SEQ ID NO: 923633 - RNA, 19 nt, Homo sapiens
  misc_RNA (1)...(19): siRNA sense strand
gcggacaauuuagugaagu

SEQ ID NO: 923634 - RNA, 19 nt, Homo sapiens
  misc_RNA (1)...(19): siRNA sense strand
uuggcugucuacuauauga

SEQ ID NO: 923635 - RNA, 19 nt, Homo sapiens
  misc_RNA (1)...(19): siRNA sense strand
uacauuagccaacuuucga

SEQ ID NO: 923636 - RNA, 19 nt, Homo sapiens
  misc_RNA (1)...(19): siRNA sense strand
gauauaaaaccagcuaaug

SEQ ID NO: 923637 - RNA, 19 nt, Homo sapiens
  misc_RNA (1)...(19): siRNA sense strand
gaaguauuuuguucagcuu

SEQ ID NO: 923638 - RNA, 19 nt, Homo sapiens
  misc_RNA (1)...(19): siRNA sense strand
acccaccucuuccuucaga

SEQ ID NO: 923639 - RNA, 19 nt, Homo sapiens
  misc_RNA (1)...(19): siRNA sense strand
agauagaacagugugacua

SEQ ID NO: 923640 - RNA, 19 nt, Homo sapiens
  misc_RNA (1)...(19): siRNA sense strand
gauggcugcauuacaaagu

SEQ ID NO: 923641 - RNA, 19 nt, Homo sapiens
  misc_RNA (1)...(19): siRNA sense strand
uagccaacuuucgaauaga

SEQ ID NO: 923642 - RNA, 19 nt, Homo sapiens
  misc_RNA (1)...(19): siRNA sense strand
cagagagaauacaugaaaa

SEQ ID NO: 923643 - RNA, 19 nt, Homo sapiens
  misc_RNA (1)...(19): siRNA sense strand
aaaccacagcugcacauuc

SEQ ID NO: 923644 - RNA, 19 nt, Homo sapiens
  misc_RNA (1)...(19): siRNA sense strand
gagcagccugucucuugga

SEQ ID NO: 923645 - RNA, 19 nt, Homo sapiens
  misc_RNA (1)...(19): siRNA sense strand
gcaaggaguuuacaguuua

SEQ ID NO: 923646 - RNA, 19 nt, Homo sapiens
  misc_RNA (1)...(19): siRNA sense strand
gaacagcacuucuggacuu

SEQ ID NO: 923647 - RNA, 19 nt, Homo sapiens
  misc_RNA (1)...(19): siRNA sense strand
caaagacgaugaauacaaa

SEQ ID NO: 923648 - RNA, 19 nt, Homo sapiens
  misc_RNA (1)...(19): siRNA sense strand
gauccuaucuguucaauuc

SEQ ID NO: 923649 - RNA, 19 nt, Homo sapiens
  misc_RNA (1)...(19): siRNA sense strand
aagagaaucuguuggaaua

SEQ ID NO: 923650 - RNA, 19 nt, Homo sapiens
  misc_RNA (1)...(19): siRNA sense strand
guugggaccuugaaauuaa

SEQ ID NO: 923651 - RNA, 19 nt, Homo sapiens
  misc_RNA (1)...(19): siRNA sense strand
gagaaucuguuggaauauu

SEQ ID NO: 923652 - RNA, 19 nt, Homo sapiens
  misc_RNA (1)...(19): siRNA sense strand
ggacauggacacuuucauu

SEQ ID NO: 923653 - RNA, 19 nt, Homo sapiens
  misc_RNA (1)...(19): siRNA sense strand
ggagagauaaugaugcuuu

SEQ ID NO: 923654 - RNA, 19 nt, Homo sapiens
  misc_RNA (1)...(19): siRNA sense strand
ggacuggcagcuucuguua

SEQ ID NO: 923655 - RNA, 19 nt, Homo sapiens
  misc_RNA (1)...(19): siRNA sense strand
ggacccagcagacagauuu

SEQ ID NO: 923656 - RNA, 19 nt, Homo sapiens
  misc_RNA (1)...(19): siRNA sense strand
cagcuucuguuauuucaaa

SEQ ID NO: 923657 - RNA, 19 nt, Homo sapiens
  misc_RNA (1)...(19): siRNA sense strand
gaaccucucuuucgcuuuu

SEQ ID NO: 923658 - RNA, 19 nt, Homo sapiens
  misc_RNA (1)...(19): siRNA sense strand
gagagacugcuucuuguuu

SEQ ID NO: 923659 - RNA, 19 nt, Homo sapiens
  misc_RNA (1)...(19): siRNA sense strand
gagaacuccuccccuauua

SEQ ID NO: 923660 - RNA, 19 nt, Homo sapiens
  misc_RNA (1)...(19): siRNA sense strand
ccauagccaugaagugaaa

SEQ ID NO: 923661 - RNA, 19 nt, Homo sapiens
  misc_RNA (1)...(19): siRNA sense strand
acacagucauucccucuuu

SEQ ID NO: 923662 - RNA, 19 nt, Homo sapiens
  misc_RNA (1)...(19): siRNA sense strand
gaacuacucuacggcaucu

SEQ ID NO: 923663 - RNA, 19 nt, Homo sapiens
  misc_RNA (1)...(19): siRNA sense strand
ugagacagcucuacguaca

SEQ ID NO: 923664 - RNA, 19 nt, Homo sapiens
  misc_RNA (1)...(19): siRNA sense strand
uaaugaugcuuucuccuau

SEQ ID NO: 923665 - RNA, 19 nt, Homo sapiens
  misc_RNA (1)...(19): siRNA sense strand
caugagagacugcuucuug

SEQ ID NO: 923666 - RNA, 19 nt, Homo sapiens
  misc_RNA (1)...(19): siRNA sense strand
caagaucucgggcugguuu

SEQ ID NO: 923667 - RNA, 19 nt, Homo sapiens
  misc_RNA (1)...(19): siRNA sense strand
caugauggcccguccuuaa

SEQ ID NO: 923668 - RNA, 19 nt, Homo sapiens
  misc_RNA (1)...(19): siRNA sense strand
gaugcuagguggauuuuaa

SEQ ID NO: 923669 - RNA, 19 nt, Homo sapiens
  misc_RNA (1)...(19): siRNA sense strand
ggaaguauugguguaauug

SEQ ID NO: 923670 - RNA, 19 nt, Homo sapiens
  misc_RNA (1)...(19): siRNA sense strand
ccuaucuguucaauucuua

SEQ ID NO: 923671 - RNA, 19 nt, Homo sapiens
  misc_RNA (1)...(19): siRNA sense strand
gacuuuauguucugacguu

SEQ ID NO: 923672 - RNA, 19 nt, Homo sapiens
  misc_RNA (1)...(19): siRNA sense strand
gaauauuaaugcagagaac

SEQ ID NO: 923673 - RNA, 19 nt, Homo sapiens
  misc_RNA (1)...(19): siRNA sense strand
gagagauaaugaugcuuuc

SEQ ID NO: 923674 - RNA, 19 nt, Homo sapiens
  misc_RNA (1)...(19): siRNA sense strand
cagcacuucuggacuuuau

SEQ ID NO: 923675 - RNA, 19 nt, Homo sapiens
  misc_RNA (1)...(19): siRNA sense strand
ugcaaggaguuuacaguuu

SEQ ID NO: 923676 - RNA, 19 nt, Homo sapiens
  misc_RNA (1)...(19): siRNA sense strand
ucaaagacgaugaauacaa

SEQ ID NO: 923677 - RNA, 19 nt, Homo sapiens
  misc_RNA (1)...(19): siRNA sense strand
cacagucauucccucuuua

SEQ ID NO: 923678 - RNA, 19 nt, Homo sapiens
  misc_RNA (1)...(19): siRNA sense strand
acuggcagcuucuguuauu

SEQ ID NO: 923679 - RNA, 19 nt, Homo sapiens
  misc_RNA (1)...(19): siRNA sense strand
guaaguguuauuccucuuu

SEQ ID NO: 923680 - RNA, 19 nt, Homo sapiens
  misc_RNA (1)...(19): siRNA sense strand
ccacccaaguucaauuugu

SEQ ID NO: 923681 - RNA, 19 nt, Homo sapiens
  misc_RNA (1)...(19): siRNA sense strand
gaauacaaaccacccaagu

SEQ ID NO: 923682 - RNA, 19 nt, Homo sapiens
  misc_RNA (1)...(19): siRNA sense strand
ggaauauuaaugcagagaa

SEQ ID NO: 923683 - RNA, 19 nt, Homo sapiens
  misc_RNA (1)...(19): siRNA sense strand
cacccaaguucaauuuguu

SEQ ID NO: 923684 - RNA, 19 nt, Homo sapiens
  misc_RNA (1)...(19): siRNA sense strand
gaaaauagucugccucagu

SEQ ID NO: 923685 - RNA, 19 nt, Homo sapiens
  misc_RNA (1)...(19): siRNA sense strand
cuccagauguccaccauga

SEQ ID NO: 923686 - RNA, 19 nt, Homo sapiens
  misc_RNA (1)...(19): siRNA sense strand
gcacuucuggacuuuaugu

SEQ ID NO: 923687 - RNA, 19 nt, Homo sapiens
  misc_RNA (1)...(19): siRNA sense strand
uggaaguauugguguaauu

SEQ ID NO: 923688 - RNA, 19 nt, Homo sapiens
  misc_RNA (1)...(19): siRNA sense strand
agacagcucuacguacaga

SEQ ID NO: 923689 - RNA, 19 nt, Homo sapiens
  misc_RNA (1)...(19): siRNA sense strand
guaauugcuucugccauca

SEQ ID NO: 923690 - RNA, 19 nt, Homo sapiens
  misc_RNA (1)...(19): siRNA sense strand
uaagagaaucuguuggaau

SEQ ID NO: 923691 - RNA, 19 nt, Homo sapiens
  misc_RNA (1)...(19): siRNA sense strand
caaaauggagagauaauga

SEQ ID NO: 923692 - RNA, 19 nt, Homo sapiens
  misc_RNA (1)...(19): siRNA sense strand
cuacguacagauugacuuu

SEQ ID NO: 923693 - RNA, 19 nt, Homo sapiens
  misc_RNA (1)...(19): siRNA sense strand
gacauggacacuuucauuc

SEQ ID NO: 923694 - RNA, 19 nt, Homo sapiens
  misc_RNA (1)...(19): siRNA sense strand
agagacugcuucuuguuuc

SEQ ID NO: 923695 - RNA, 19 nt, Homo sapiens
  misc_RNA (1)...(19): siRNA sense strand
caacugcuuaggcuugauu

SEQ ID NO: 923696 - RNA, 19 nt, Homo sapiens
  misc_RNA (1)...(19): siRNA sense strand
auacaaaccacccaaguuc

SEQ ID NO: 923697 - RNA, 19 nt, Homo sapiens
  misc_RNA (1)...(19): siRNA sense strand
caacaggacccagcagaca

SEQ ID NO: 923698 - RNA, 19 nt, Homo sapiens
  misc_RNA (1)...(19): siRNA sense strand
ccagauguccaccaugaga

SEQ ID NO: 923699 - RNA, 19 nt, Homo sapiens
  misc_RNA (1)...(19): siRNA sense strand
auaaugaugcuuucuccua

SEQ ID NO: 923700 - RNA, 19 nt, Homo sapiens
  misc_RNA (1)...(19): siRNA sense strand
ugguuuaggucuauacugu

SEQ ID NO: 923701 - RNA, 19 nt, Homo sapiens
  misc_RNA (1)...(19): siRNA sense strand
cuuugucaauggccuauuu

SEQ ID NO: 923702 - RNA, 19 nt, Homo sapiens
  misc_RNA (1)...(19): siRNA sense strand
uuaagagaaucuguuggaa

SEQ ID NO: 923703 - RNA, 19 nt, Homo sapiens
  misc_RNA (1)...(19): siRNA sense strand
cgauagcacugccauuuug

SEQ ID NO: 923704 - RNA, 19 nt, Homo sapiens
  misc_RNA (1)...(19): siRNA sense strand
ggcagcuucuguuauuuca

SEQ ID NO: 923705 - RNA, 19 nt, Homo sapiens
  misc_RNA (1)...(19): siRNA sense strand
caaggaguuuacaguuuac

SEQ ID NO: 923706 - RNA, 19 nt, Homo sapiens
  misc_RNA (1)...(19): siRNA sense strand
cuucuuguuuccauucuug

SEQ ID NO: 923707 - RNA, 19 nt, Homo sapiens
  misc_RNA (1)...(19): siRNA sense strand
gaacuccuccccuauuaga

SEQ ID NO: 923708 - RNA, 19 nt, Homo sapiens
  misc_RNA (1)...(19): siRNA sense strand
ccuagcagauacacuugga

SEQ ID NO: 923709 - RNA, 19 nt, Homo sapiens
  misc_RNA (1)...(19): siRNA sense strand
cauggacacuuucauucuc

SEQ ID NO: 923710 - RNA, 19 nt, Homo sapiens
  misc_RNA (1)...(19): siRNA sense strand
gggcugguuuaggucuaua

SEQ ID NO: 923711 - RNA, 19 nt, Homo sapiens
  misc_RNA (1)...(19): siRNA sense strand
acaaaccacccaaguucaa

SEQ ID NO: 923712 - RNA, 19 nt, Homo sapiens
  misc_RNA (1)...(19): siRNA sense strand
gcugaugcuagguggauuu

SEQ ID NO: 923713 - RNA, 19 nt, Homo sapiens
  misc_RNA (1)...(19): siRNA sense strand
ggaaguucuggcuggcuuu

SEQ ID NO: 923714 - RNA, 19 nt, Homo sapiens
  misc_RNA (1)...(19): siRNA sense strand
uguugggaccuugaaauua

SEQ ID NO: 923715 - RNA, 19 nt, Homo sapiens
  misc_RNA (1)...(19): siRNA sense strand
aauacaaaccacccaaguu

SEQ ID NO: 923716 - RNA, 19 nt, Homo sapiens
  misc_RNA (1)...(19): siRNA sense strand
uagccauucuuauaguugu

SEQ ID NO: 923717 - RNA, 19 nt, Homo sapiens
  misc_RNA (1)...(19): siRNA sense strand
gaaguucuggcuggcuuug

SEQ ID NO: 923718 - RNA, 19 nt, Homo sapiens
  misc_RNA (1)...(19): siRNA sense strand
acagucauucccucuuuaa

SEQ ID NO: 923719 - RNA, 19 nt, Homo sapiens
  misc_RNA (1)...(19): siRNA sense strand
ugacuuugcagccauguag

SEQ ID NO: 923720 - RNA, 19 nt, Homo sapiens
  misc_RNA (1)...(19): siRNA sense strand
aaaccacccaaguucaauu

SEQ ID NO: 923721 - RNA, 19 nt, Homo sapiens
  misc_RNA (1)...(19): siRNA sense strand
uaauggugcucuagaucag

SEQ ID NO: 923722 - RNA, 19 nt, Homo sapiens
  misc_RNA (1)...(19): siRNA sense strand
ccucuuuaauggugcucua

SEQ ID NO: 923723 - RNA, 19 nt, Homo sapiens
  misc_RNA (1)...(19): siRNA sense strand
ugagagacugcuucuuguu

SEQ ID NO: 923724 - RNA, 19 nt, Homo sapiens
  misc_RNA (1)...(19): siRNA sense strand
cuucuggacuuuauguucu

SEQ ID NO: 923725 - RNA, 19 nt, Homo sapiens
  misc_RNA (1)...(19): siRNA sense strand
ucaauuuguucggcaagau

SEQ ID NO: 923726 - RNA, 19 nt, Homo sapiens
  misc_RNA (1)...(19): siRNA sense strand
aaauggagagauaaugaug

SEQ ID NO: 923727 - RNA, 19 nt, Homo sapiens
  misc_RNA (1)...(19): siRNA sense strand
gcaguugcaaggaguuuac

SEQ ID NO: 923728 - RNA, 19 nt, Homo sapiens
  misc_RNA (1)...(19): siRNA sense strand
ugccauagccaugaaguga

SEQ ID NO: 923729 - RNA, 19 nt, Homo sapiens
  misc_RNA (1)...(19): siRNA sense strand
uuaauggugcucuagauca

SEQ ID NO: 923730 - RNA, 19 nt, Homo sapiens
  misc_RNA (1)...(19): siRNA sense strand
aaugaugcuuucuccuaug

SEQ ID NO: 923731 - RNA, 19 nt, Homo sapiens
  misc_RNA (1)...(19): siRNA sense strand
auucuuggguuugugguaa

SEQ ID NO: 923732 - RNA, 19 nt, Homo sapiens
  misc_RNA (1)...(19): siRNA sense strand
ggacacuuucauucucaug

SEQ ID NO: 923733 - RNA, 19 nt, Homo sapiens
  misc_RNA (1)...(19): siRNA sense strand
uuuaagagaaucuguugga

SEQ ID NO: 923734 - RNA, 19 nt, Homo sapiens
  misc_RNA (1)...(19): siRNA sense strand
ggccacggacacagucauu

SEQ ID NO: 923735 - RNA, 19 nt, Homo sapiens
  misc_RNA (1)...(19): siRNA sense strand
gaaguauugguguaauugc

SEQ ID NO: 923736 - RNA, 19 nt, Homo sapiens
  misc_RNA (1)...(19): siRNA sense strand
caaaccacccaaguucaau

SEQ ID NO: 923737 - RNA, 19 nt, Homo sapiens
  misc_RNA (1)...(19): siRNA sense strand
uuucaaacauggaggucau

SEQ ID NO: 923738 - RNA, 19 nt, Homo sapiens
  misc_RNA (1)...(19): siRNA sense strand
gccauagccaugaagugaa

SEQ ID NO: 923739 - RNA, 19 nt, Homo sapiens
  misc_RNA (1)...(19): siRNA sense strand
ggaaauaacuguugaauca

SEQ ID NO: 923740 - RNA, 19 nt, Homo sapiens
  misc_RNA (1)...(19): siRNA sense strand
gaaagaagguggacaagaa

SEQ ID NO: 923741 - RNA, 19 nt, Homo sapiens
  misc_RNA (1)...(19): siRNA sense strand
gcacuuagcuaaugcaaau

SEQ ID NO: 923742 - RNA, 19 nt, Homo sapiens
  misc_RNA (1)...(19): siRNA sense strand
aagaagagguccaauauaa

SEQ ID NO: 923743 - RNA, 19 nt, Homo sapiens
  misc_RNA (1)...(19): siRNA sense strand
gaaacaugcuacagacuuu

SEQ ID NO: 923744 - RNA, 19 nt, Homo sapiens
  misc_RNA (1)...(19): siRNA sense strand
gaagagguccaauauaauu

SEQ ID NO: 923745 - RNA, 19 nt, Homo sapiens
  misc_RNA (1)...(19): siRNA sense strand
cagaaguuauucccaauua

SEQ ID NO: 923746 - RNA, 19 nt, Homo sapiens
  misc_RNA (1)...(19): siRNA sense strand
gaacucgguuucuuuguug

SEQ ID NO: 923747 - RNA, 19 nt, Homo sapiens
  misc_RNA (1)...(19): siRNA sense strand
gaagcugacuuacugugua

SEQ ID NO: 923748 - RNA, 19 nt, Homo sapiens
  misc_RNA (1)...(19): siRNA sense strand
ccaagaagcugacuuacug

SEQ ID NO: 923749 - RNA, 19 nt, Homo sapiens
  misc_RNA (1)...(19): siRNA sense strand
gauugaaacuggaagaauu

SEQ ID NO: 923750 - RNA, 19 nt, Homo sapiens
  misc_RNA (1)...(19): siRNA sense strand
gaagauuuccuccaacuaa

SEQ ID NO: 923751 - RNA, 19 nt, Homo sapiens
  misc_RNA (1)...(19): siRNA sense strand
gcagaacucuucaaaugau

SEQ ID NO: 923752 - RNA, 19 nt, Homo sapiens
  misc_RNA (1)...(19): siRNA sense strand
gaaguaaacagcucaaaga

SEQ ID NO: 923753 - RNA, 19 nt, Homo sapiens
  misc_RNA (1)...(19): siRNA sense strand
ggacauguuuggugacuau

SEQ ID NO: 923754 - RNA, 19 nt, Homo sapiens
  misc_RNA (1)...(19): siRNA sense strand
ggacauagcuuggugaacu

SEQ ID NO: 923755 - RNA, 19 nt, Homo sapiens
  misc_RNA (1)...(19): siRNA sense strand
caacgaaucuugaugacau

SEQ ID NO: 923756 - RNA, 19 nt, Homo sapiens
  misc_RNA (1)...(19): siRNA sense strand
gaagaagagguccaauaua

SEQ ID NO: 923757 - RNA, 19 nt, Homo sapiens
  misc_RNA (1)...(19): siRNA sense strand
gaacauaagaaacaugcua

SEQ ID NO: 923758 - RNA, 19 nt, Homo sapiens
  misc_RNA (1)...(19): siRNA sense strand
caaagacacucuccuaucu

SEQ ID NO: 923759 - RNA, 19 nt, Homo sapiens
  misc_RNA (1)...(19): siRNA sense strand
gagcugaucuuuuguauga

SEQ ID NO: 923760 - RNA, 19 nt, Homo sapiens
  misc_RNA (1)...(19): siRNA sense strand
gaaccagaguggauaugaa

SEQ ID NO: 923761 - RNA, 19 nt, Homo sapiens
  misc_RNA (1)...(19): siRNA sense strand
gcacaugauuggugaagga

SEQ ID NO: 923762 - RNA, 19 nt, Homo sapiens
  misc_RNA (1)...(19): siRNA sense strand
caacagguauuggaguuaa

SEQ ID NO: 923763 - RNA, 19 nt, Homo sapiens
  misc_RNA (1)...(19): siRNA sense strand
gugaggagcuugaggaguu

SEQ ID NO: 923764 - RNA, 19 nt, Homo sapiens
  misc_RNA (1)...(19): siRNA sense strand
ggaaguuacuggaguuuua

SEQ ID NO: 923765 - RNA, 19 nt, Homo sapiens
  misc_RNA (1)...(19): siRNA sense strand
gaagaacugugaaaaugua

SEQ ID NO: 923766 - RNA, 19 nt, Homo sapiens
  misc_RNA (1)...(19): siRNA sense strand
uaagauugccuucugauuu

SEQ ID NO: 923767 - RNA, 19 nt, Homo sapiens
  misc_RNA (1)...(19): siRNA sense strand
caucuuguguguuacauuu

SEQ ID NO: 923768 - RNA, 19 nt, Homo sapiens
  misc_RNA (1)...(19): siRNA sense strand
caagggaauccaaacauua

SEQ ID NO: 923769 - RNA, 19 nt, Homo sapiens
  misc_RNA (1)...(19): siRNA sense strand
guacagagacuugaagaaa

SEQ ID NO: 923770 - RNA, 19 nt, Homo sapiens
  misc_RNA (1)...(19): siRNA sense strand
gaaggaagccguggagcua

SEQ ID NO: 923771 - RNA, 19 nt, Homo sapiens
  misc_RNA (1)...(19): siRNA sense strand
caucuaaucuaccuaacaa

SEQ ID NO: 923772 - RNA, 19 nt, Homo sapiens
  misc_RNA (1)...(19): siRNA sense strand
ugacaucuaucauuucaug

SEQ ID NO: 923773 - RNA, 19 nt, Homo sapiens
  misc_RNA (1)...(19): siRNA sense strand
ggaaagaggaggaggaaau

SEQ ID NO: 923774 - RNA, 19 nt, Homo sapiens
  misc_RNA (1)...(19): siRNA sense strand
ccaagggaauccaaacauu

SEQ ID NO: 923775 - RNA, 19 nt, Homo sapiens
  misc_RNA (1)...(19): siRNA sense strand
guagaagaguuacuaagau

SEQ ID NO: 923776 - RNA, 19 nt, Homo sapiens
  misc_RNA (1)...(19): siRNA sense strand
uuuaagagcucccuauguu

SEQ ID NO: 923777 - RNA, 19 nt, Homo sapiens
  misc_RNA (1)...(19): siRNA sense strand
cagaagcccugcaagaaga

SEQ ID NO: 923778 - RNA, 19 nt, Homo sapiens
  misc_RNA (1)...(19): siRNA sense strand
cuacagacuuugccacuga

SEQ ID NO: 923779 - RNA, 19 nt, Homo sapiens
  misc_RNA (1)...(19): siRNA sense strand
caaccuuacugaauuacaa

SEQ ID NO: 923780 - RNA, 19 nt, Homo sapiens
  misc_RNA (1)...(19): siRNA sense strand
gcaacucccugaacauaag

SEQ ID NO: 923781 - RNA, 19 nt, Homo sapiens
  misc_RNA (1)...(19): siRNA sense strand
gaaagccuucuucaucuaa

SEQ ID NO: 923782 - RNA, 19 nt, Homo sapiens
  misc_RNA (1)...(19): siRNA sense strand
gggagaguauccucauauu

SEQ ID NO: 923783 - RNA, 19 nt, Homo sapiens
  misc_RNA (1)...(19): siRNA sense strand
uugcagaacucuucaaaug

SEQ ID NO: 923784 - RNA, 19 nt, Homo sapiens
  misc_RNA (1)...(19): siRNA sense strand
uagcagaaaugauaugcaa

SEQ ID NO: 923785 - RNA, 19 nt, Homo sapiens
  misc_RNA (1)...(19): siRNA sense strand
aaugugaggugauuaagaa

SEQ ID NO: 923786 - RNA, 19 nt, Homo sapiens
  misc_RNA (1)...(19): siRNA sense strand
ggaaauuaauguugcuaag

SEQ ID NO: 923787 - RNA, 19 nt, Homo sapiens
  misc_RNA (1)...(19): siRNA sense strand
gaucugguuucacagugua

SEQ ID NO: 923788 - RNA, 19 nt, Homo sapiens
  misc_RNA (1)...(19): siRNA sense strand
cgacucaaauuaucgguau

SEQ ID NO: 923789 - RNA, 19 nt, Homo sapiens
  misc_RNA (1)...(19): siRNA sense strand
guagacgaguugcacauga

SEQ ID NO: 923790 - RNA, 19 nt, Homo sapiens
  misc_RNA (1)...(19): siRNA sense strand
gguagaagaguuacuaaga

SEQ ID NO: 923791 - RNA, 19 nt, Homo sapiens
  misc_RNA (1)...(19): siRNA sense strand
caaauuguuucaucagcaa

SEQ ID NO: 923792 - RNA, 19 nt, Homo sapiens
  misc_RNA (1)...(19): siRNA sense strand
auucucaucuuguguguua

SEQ ID NO: 923793 - RNA, 19 nt, Homo sapiens
  misc_RNA (1)...(19): siRNA sense strand
gcagaaaugauaugcaaau

SEQ ID NO: 923794 - RNA, 19 nt, Homo sapiens
  misc_RNA (1)...(19): siRNA sense strand
guugggacgugcuucauuu

SEQ ID NO: 923795 - RNA, 19 nt, Homo sapiens
  misc_RNA (1)...(19): siRNA sense strand
cacaguggcuuaacaagug

SEQ ID NO: 923796 - RNA, 19 nt, Homo sapiens
  misc_RNA (1)...(19): siRNA sense strand
aagaagagguagaagaguu

SEQ ID NO: 923797 - RNA, 19 nt, Homo sapiens
  misc_RNA (1)...(19): siRNA sense strand
ugaagaagagguccaauau

SEQ ID NO: 923798 - RNA, 19 nt, Homo sapiens
  misc_RNA (1)...(19): siRNA sense strand
gaaaaucuuugcucggaaa

SEQ ID NO: 923799 - RNA, 19 nt, Homo sapiens
  misc_RNA (1)...(19): siRNA sense strand
caagcaaauuguuucauca

SEQ ID NO: 923800 - RNA, 19 nt, Homo sapiens
  misc_RNA (1)...(19): siRNA sense strand
ccaagcaaauuguuucauc

SEQ ID NO: 923801 - RNA, 19 nt, Homo sapiens
  misc_RNA (1)...(19): siRNA sense strand
gguaugagugcaacauuaa

SEQ ID NO: 923802 - RNA, 19 nt, Homo sapiens
  misc_RNA (1)...(19): siRNA sense strand
cgguaugagugcaacauua

SEQ ID NO: 923803 - RNA, 19 nt, Homo sapiens
  misc_RNA (1)...(19): siRNA sense strand
gcucaaagacacucuccua

SEQ ID NO: 923804 - RNA, 19 nt, Homo sapiens
  misc_RNA (1)...(19): siRNA sense strand
uaggcaaccuuacugaauu

SEQ ID NO: 923805 - RNA, 19 nt, Homo sapiens
  misc_RNA (1)...(19): siRNA sense strand
ccuaugaucugguuucaca

SEQ ID NO: 923806 - RNA, 19 nt, Homo sapiens
  misc_RNA (1)...(19): siRNA sense strand
gaaaggucuugaaggacuu

SEQ ID NO: 923807 - RNA, 19 nt, Homo sapiens
  misc_RNA (1)...(19): siRNA sense strand
agaaaucacucuauauugc

SEQ ID NO: 923808 - RNA, 19 nt, Homo sapiens
  misc_RNA (1)...(19): siRNA sense strand
gauaugaaggugucacuau

SEQ ID NO: 923809 - RNA, 19 nt, Homo sapiens
  misc_RNA (1)...(19): siRNA sense strand
gcaagaagagguagaagag

SEQ ID NO: 923810 - RNA, 19 nt, Homo sapiens
  misc_RNA (1)...(19): siRNA sense strand
gaaagaggaggaggaaaug

SEQ ID NO: 923811 - RNA, 19 nt, Homo sapiens
  misc_RNA (1)...(19): siRNA sense strand
gugaacuccuugauugaaa

SEQ ID NO: 923812 - RNA, 19 nt, Homo sapiens
  misc_RNA (1)...(19): siRNA sense strand
gcucaaagagaccaacauu

SEQ ID NO: 923813 - RNA, 19 nt, Homo sapiens
  misc_RNA (1)...(19): siRNA sense strand
uggagucucugaaagcuuu

SEQ ID NO: 923814 - RNA, 19 nt, Homo sapiens
  misc_RNA (1)...(19): siRNA sense strand
ggacgugcuucauuuaagg

SEQ ID NO: 923815 - RNA, 19 nt, Homo sapiens
  misc_RNA (1)...(19): siRNA sense strand
uauaugaaguugacagcaa

SEQ ID NO: 923816 - RNA, 19 nt, Homo sapiens
  misc_RNA (1)...(19): siRNA sense strand
ggaaaugacccuagcaaaa

SEQ ID NO: 923817 - RNA, 19 nt, Homo sapiens
  misc_RNA (1)...(19): siRNA sense strand
gggaauccaaacauuauuu

SEQ ID NO: 923818 - RNA, 19 nt, Homo sapiens
  misc_RNA (1)...(19): siRNA sense strand
ggcaaccuguguccuguuu

SEQ ID NO: 923819 - RNA, 19 nt, Homo sapiens
  misc_RNA (1)...(19): siRNA sense strand
aggcaaccuuacugaauua

SEQ ID NO: 923820 - RNA, 19 nt, Homo sapiens
  misc_RNA (1)...(19): siRNA sense strand
ccucgaggauauauacaaa

SEQ ID NO: 923821 - RNA, 19 nt, Homo sapiens
  misc_RNA (1)...(19): siRNA sense strand
guuugaagauugcaacgaa

SEQ ID NO: 923822 - RNA, 19 nt, Homo sapiens
  misc_RNA (1)...(19): siRNA sense strand
aaagcgcacuaucccauuu

SEQ ID NO: 923823 - RNA, 19 nt, Homo sapiens
  misc_RNA (1)...(19): siRNA sense strand
caaccuguguccuguuuua

SEQ ID NO: 923824 - RNA, 19 nt, Homo sapiens
  misc_RNA (1)...(19): siRNA sense strand
caaggaauaucugaaacau

SEQ ID NO: 923825 - RNA, 19 nt, Homo sapiens
  misc_RNA (1)...(19): siRNA sense strand
gcaaaacgacucaaauuau

SEQ ID NO: 923826 - RNA, 19 nt, Homo sapiens
  misc_RNA (1)...(19): siRNA sense strand
gaugaguccucuuccaaag

SEQ ID NO: 923827 - RNA, 19 nt, Homo sapiens
  misc_RNA (1)...(19): siRNA sense strand
gaaccuggagcugaucuuu

SEQ ID NO: 923828 - RNA, 19 nt, Homo sapiens
  misc_RNA (1)...(19): siRNA sense strand
gaaagggauuggaagucau

SEQ ID NO: 923829 - RNA, 19 nt, Homo sapiens
  misc_RNA (1)...(19): siRNA sense strand
aagauugccuucugauuuc

SEQ ID NO: 923830 - RNA, 19 nt, Homo sapiens
  misc_RNA (1)...(19): siRNA sense strand
uuacuaagauugccuucug

SEQ ID NO: 923831 - RNA, 19 nt, Homo sapiens
  misc_RNA (1)...(19): siRNA sense strand
gaagugcucguaaggacaa

SEQ ID NO: 923832 - RNA, 19 nt, Homo sapiens
  misc_RNA (1)...(19): siRNA sense strand
uuaccaagaagcugacuua

SEQ ID NO: 923833 - RNA, 19 nt, Homo sapiens
  misc_RNA (1)...(19): siRNA sense strand
ggaaagaagguggacaaga

SEQ ID NO: 923834 - RNA, 19 nt, Homo sapiens
  misc_RNA (1)...(19): siRNA sense strand
gagaguauccucauauugc

SEQ ID NO: 923835 - RNA, 19 nt, Homo sapiens
  misc_RNA (1)...(19): siRNA sense strand
guuuaacacugaauucugu

SEQ ID NO: 923836 - RNA, 19 nt, Homo sapiens
  misc_RNA (1)...(19): siRNA sense strand
gagcuacacuggaaaugac

SEQ ID NO: 923837 - RNA, 19 nt, Homo sapiens
  misc_RNA (1)...(19): siRNA sense strand
ggaacugccucauucucau

SEQ ID NO: 923838 - RNA, 19 nt, Homo sapiens
  misc_RNA (1)...(19): siRNA sense strand
gcaaggaauaucugaaaca

SEQ ID NO: 923839 - RNA, 19 nt, Homo sapiens
  misc_RNA (1)...(19): siRNA sense strand
gaaauuaccuucuccuaac

SEQ ID NO: 923840 - RNA, 19 nt, Homo sapiens
  misc_RNA (1)...(19): siRNA sense strand
ggaaauuaccuucuccuaa

SEQ ID NO: 923841 - RNA, 19 nt, Homo sapiens
  misc_RNA (1)...(19): siRNA sense strand
ggacauggaugcccgaaag

SEQ ID NO: 923842 - RNA, 19 nt, Homo sapiens
  misc_RNA (1)...(19): siRNA sense strand
gcagagaccuucagaaagc

SEQ ID NO: 923843 - RNA, 19 nt, Homo sapiens
  misc_RNA (1)...(19): siRNA sense strand
gaauugaacuucccuuguc

SEQ ID NO: 923844 - RNA, 19 nt, Homo sapiens
  misc_RNA (1)...(19): siRNA sense strand
gaaagguuguggucacuca

SEQ ID NO: 923845 - RNA, 19 nt, Homo sapiens
  misc_RNA (1)...(19): siRNA sense strand
gaacucaugcaacgaauug

SEQ ID NO: 923846 - RNA, 19 nt, Homo sapiens
  misc_RNA (1)...(19): siRNA sense strand
gagcagaauuccaaguguu

SEQ ID NO: 923847 - RNA, 19 nt, Homo sapiens
  misc_RNA (1)...(19): siRNA sense strand
ggaccagccugcuccagaa

SEQ ID NO: 923848 - RNA, 19 nt, Homo sapiens
  misc_RNA (1)...(19): siRNA sense strand
agaaagcacuggugucaga

SEQ ID NO: 923849 - RNA, 19 nt, Homo sapiens
  misc_RNA (1)...(19): siRNA sense strand
acuagaagcuccaccauug

SEQ ID NO: 923850 - RNA, 19 nt, Homo sapiens
  misc_RNA (1)...(19): siRNA sense strand
ccuggaagauuuagacuau

SEQ ID NO: 923851 - RNA, 19 nt, Homo sapiens
  misc_RNA (1)...(19): siRNA sense strand
ccagguguaugaagccuuu

SEQ ID NO: 923852 - RNA, 19 nt, Homo sapiens
  misc_RNA (1)...(19): siRNA sense strand
ugcaagcccuggaagauuu

SEQ ID NO: 923853 - RNA, 19 nt, Homo sapiens
  misc_RNA (1)...(19): siRNA sense strand
cagagagccuggugagaga

SEQ ID NO: 923854 - RNA, 19 nt, Homo sapiens
  misc_RNA (1)...(19): siRNA sense strand
cuaccacaauuucaccaua

SEQ ID NO: 923855 - RNA, 19 nt, Homo sapiens
  misc_RNA (1)...(19): siRNA sense strand
uggcccagcucuccucaua

SEQ ID NO: 923856 - RNA, 19 nt, Homo sapiens
  misc_RNA (1)...(19): siRNA sense strand
uggcagcccuggaugauga

SEQ ID NO: 923857 - RNA, 19 nt, Homo sapiens
  misc_RNA (1)...(19): siRNA sense strand
gcuccgaaguguuuacaau

SEQ ID NO: 923858 - RNA, 19 nt, Homo sapiens
  misc_RNA (1)...(19): siRNA sense strand
cacagaugcugguggaauu

SEQ ID NO: 923859 - RNA, 19 nt, Homo sapiens
  misc_RNA (1)...(19): siRNA sense strand
caggagaugugcuaguguu

SEQ ID NO: 923860 - RNA, 19 nt, Homo sapiens
  misc_RNA (1)...(19): siRNA sense strand
gcaagcccuggaagauuua

SEQ ID NO: 923861 - RNA, 19 nt, Homo sapiens
  misc_RNA (1)...(19): siRNA sense strand
aagcacuggugucagaaua

SEQ ID NO: 923862 - RNA, 19 nt, Homo sapiens
  misc_RNA (1)...(19): siRNA sense strand
cgaaguguuuacaauccua

SEQ ID NO: 923863 - RNA, 19 nt, Homo sapiens
  misc_RNA (1)...(19): siRNA sense strand
gauccgagcagaauuccaa

SEQ ID NO: 923864 - RNA, 19 nt, Homo sapiens
  misc_RNA (1)...(19): siRNA sense strand
gauccugccucugccugua

SEQ ID NO: 923865 - RNA, 19 nt, Homo sapiens
  misc_RNA (1)...(19): siRNA sense strand
ucgcagagaccuucagaaa

SEQ ID NO: 923866 - RNA, 19 nt, Homo sapiens
  misc_RNA (1)...(19): siRNA sense strand
ggagguagaguccuugcuu

SEQ ID NO: 923867 - RNA, 19 nt, Homo sapiens
  misc_RNA (1)...(19): siRNA sense strand
ccagggagguagaguccuu

SEQ ID NO: 923868 - RNA, 19 nt, Homo sapiens
  misc_RNA (1)...(19): siRNA sense strand
guaacuugccucccaguga

SEQ ID NO: 923869 - RNA, 19 nt, Homo sapiens
  misc_RNA (1)...(19): siRNA sense strand
ggacuggagcuccgaagug

SEQ ID NO: 923870 - RNA, 19 nt, Homo sapiens
  misc_RNA (1)...(19): siRNA sense strand
agacgggacuggaaauuac

SEQ ID NO: 923871 - RNA, 19 nt, Homo sapiens
  misc_RNA (1)...(19): siRNA sense strand
gugccaagcccauaaacuu

SEQ ID NO: 923872 - RNA, 19 nt, Homo sapiens
  misc_RNA (1)...(19): siRNA sense strand
gacaacugccucuccauug

SEQ ID NO: 923873 - RNA, 19 nt, Homo sapiens
  misc_RNA (1)...(19): siRNA sense strand
cagacgggacuggaaauua

SEQ ID NO: 923874 - RNA, 19 nt, Homo sapiens
  misc_RNA (1)...(19): siRNA sense strand
aaauuucccugugcuguga

SEQ ID NO: 923875 - RNA, 19 nt, Homo sapiens
  misc_RNA (1)...(19): siRNA sense strand
gacuggagcuccgaagugu

SEQ ID NO: 923876 - RNA, 19 nt, Homo sapiens
  misc_RNA (1)...(19): siRNA sense strand
uaccacaauuucaccauau

SEQ ID NO: 923877 - RNA, 19 nt, Homo sapiens
  misc_RNA (1)...(19): siRNA sense strand
gaucugggugucauacuau

SEQ ID NO: 923878 - RNA, 19 nt, Homo sapiens
  misc_RNA (1)...(19): siRNA sense strand
acccagcccuugaaccuaa

SEQ ID NO: 923879 - RNA, 19 nt, Homo sapiens
  misc_RNA (1)...(19): siRNA sense strand
gagugguugugguuacuga

SEQ ID NO: 923880 - RNA, 19 nt, Homo sapiens
  misc_RNA (1)...(19): siRNA sense strand
ccagugaggaggaaauuuc

SEQ ID NO: 923881 - RNA, 19 nt, Homo sapiens
  misc_RNA (1)...(19): siRNA sense strand
gcccaggaguucagagauc

SEQ ID NO: 923882 - RNA, 19 nt, Homo sapiens
  misc_RNA (1)...(19): siRNA sense strand
caauuucaccauauccaaa

SEQ ID NO: 923883 - RNA, 19 nt, Homo sapiens
  misc_RNA (1)...(19): siRNA sense strand
ucccugguguuacuacuaa

SEQ ID NO: 923884 - RNA, 19 nt, Homo sapiens
  misc_RNA (1)...(19): siRNA sense strand
agaucugggugucauacua

SEQ ID NO: 923885 - RNA, 19 nt, Homo sapiens
  misc_RNA (1)...(19): siRNA sense strand
caugggugcucuaccacaa

SEQ ID NO: 923886 - RNA, 19 nt, Homo sapiens
  misc_RNA (1)...(19): siRNA sense strand
gcacuggugucagaauacu

SEQ ID NO: 923887 - RNA, 19 nt, Homo sapiens
  misc_RNA (1)...(19): siRNA sense strand
gguguaugaagccuuuaua

SEQ ID NO: 923888 - RNA, 19 nt, Homo sapiens
  misc_RNA (1)...(19): siRNA sense strand
gcccagcucuccucauacu

SEQ ID NO: 923889 - RNA, 19 nt, Homo sapiens
  misc_RNA (1)...(19): siRNA sense strand
ucagaaagcacugguguca

SEQ ID NO: 923890 - RNA, 19 nt, Homo sapiens
  misc_RNA (1)...(19): siRNA sense strand
cgagcagaauuccaagugu

SEQ ID NO: 923891 - RNA, 19 nt, Homo sapiens
  misc_RNA (1)...(19): siRNA sense strand
caacugccucuccauuguu

SEQ ID NO: 923892 - RNA, 19 nt, Homo sapiens
  misc_RNA (1)...(19): siRNA sense strand
uaccuucuccuaacccaua

SEQ ID NO: 923893 - RNA, 19 nt, Homo sapiens
  misc_RNA (1)...(19): siRNA sense strand
uauacaaaguggagcagau

SEQ ID NO: 923894 - RNA, 19 nt, Homo sapiens
  misc_RNA (1)...(19): siRNA sense strand
caugcgaguuugacugugu

SEQ ID NO: 923895 - RNA, 19 nt, Homo sapiens
  misc_RNA (1)...(19): siRNA sense strand
gaacuagaagcuccaccau

SEQ ID NO: 923896 - RNA, 19 nt, Homo sapiens
  misc_RNA (1)...(19): siRNA sense strand
ggaagcugccugccaagca

SEQ ID NO: 923897 - RNA, 19 nt, Homo sapiens
  misc_RNA (1)...(19): siRNA sense strand
caagguggccagagacaca

SEQ ID NO: 923898 - RNA, 19 nt, Homo sapiens
  misc_RNA (1)...(19): siRNA sense strand
guucucugauccaggugua

SEQ ID NO: 923899 - RNA, 19 nt, Homo sapiens
  misc_RNA (1)...(19): siRNA sense strand
gaugcaagcccuggaagau

SEQ ID NO: 923900 - RNA, 19 nt, Homo sapiens
  misc_RNA (1)...(19): siRNA sense strand
ugaccacaguucucugauc

SEQ ID NO: 923901 - RNA, 19 nt, Homo sapiens
  misc_RNA (1)...(19): siRNA sense strand
agacaacugccucuccauu

SEQ ID NO: 923902 - RNA, 19 nt, Homo sapiens
  misc_RNA (1)...(19): siRNA sense strand
acacagacgggacuggaaa

SEQ ID NO: 923903 - RNA, 19 nt, Homo sapiens
  misc_RNA (1)...(19): siRNA sense strand
cuagaacucaugcaacgaa

SEQ ID NO: 923904 - RNA, 19 nt, Homo sapiens
  misc_RNA (1)...(19): siRNA sense strand
gcagaauuccaaguguuga

SEQ ID NO: 923905 - RNA, 19 nt, Homo sapiens
  misc_RNA (1)...(19): siRNA sense strand
ggugaccacaguucucuga

SEQ ID NO: 923906 - RNA, 19 nt, Homo sapiens
  misc_RNA (1)...(19): siRNA sense strand
gccucugccuguauccuaa

SEQ ID NO: 923907 - RNA, 19 nt, Homo sapiens
  misc_RNA (1)...(19): siRNA sense strand
ucugagcucccugguguua

SEQ ID NO: 923908 - RNA, 19 nt, Homo sapiens
  misc_RNA (1)...(19): siRNA sense strand
ugggugcucuaccacaauu

SEQ ID NO: 923909 - RNA, 19 nt, Homo sapiens
  misc_RNA (1)...(19): siRNA sense strand
gaaagcacuggugucagaa

SEQ ID NO: 923910 - RNA, 19 nt, Homo sapiens
  misc_RNA (1)...(19): siRNA sense strand
cgaauugaacuucccuugu

SEQ ID NO: 923911 - RNA, 19 nt, Homo sapiens
  misc_RNA (1)...(19): siRNA sense strand
ucagagugguugugguuac

SEQ ID NO: 923912 - RNA, 19 nt, Homo sapiens
  misc_RNA (1)...(19): siRNA sense strand
cuggagcuccgaaguguuu

SEQ ID NO: 923913 - RNA, 19 nt, Homo sapiens
  misc_RNA (1)...(19): siRNA sense strand
uuacugacccagcccuuga

SEQ ID NO: 923914 - RNA, 19 nt, Homo sapiens
  misc_RNA (1)...(19): siRNA sense strand
ggugucauacuaucagaau

SEQ ID NO: 923915 - RNA, 19 nt, Homo sapiens
  misc_RNA (1)...(19): siRNA sense strand
ugucauacuaucagaauuc

SEQ ID NO: 923916 - RNA, 19 nt, Homo sapiens
  misc_RNA (1)...(19): siRNA sense strand
ggacuggaaauuaccuucu

SEQ ID NO: 923917 - RNA, 19 nt, Homo sapiens
  misc_RNA (1)...(19): siRNA sense strand
gagaacuccuagaacucau

SEQ ID NO: 923918 - RNA, 19 nt, Homo sapiens
  misc_RNA (1)...(19): siRNA sense strand
gagaugugcuaguguuccu

SEQ ID NO: 923919 - RNA, 19 nt, Homo sapiens
  misc_RNA (1)...(19): siRNA sense strand
cagcagggagcaaaucauc

SEQ ID NO: 923920 - RNA, 19 nt, Homo sapiens
  misc_RNA (1)...(19): siRNA sense strand
ggaauuggccccuccauac

SEQ ID NO: 923921 - RNA, 19 nt, Homo sapiens
  misc_RNA (1)...(19): siRNA sense strand
gcauugugccaagcccaua

SEQ ID NO: 923922 - RNA, 19 nt, Homo sapiens
  misc_RNA (1)...(19): siRNA sense strand
ggcagaggcaagacgauug

SEQ ID NO: 923923 - RNA, 19 nt, Homo sapiens
  misc_RNA (1)...(19): siRNA sense strand
ccucagagugguugugguu

SEQ ID NO: 923924 - RNA, 19 nt, Homo sapiens
  misc_RNA (1)...(19): siRNA sense strand
gcuggccucaugcgaguuu

SEQ ID NO: 923925 - RNA, 19 nt, Homo sapiens
  misc_RNA (1)...(19): siRNA sense strand
cuccauuguuucugagauu

SEQ ID NO: 923926 - RNA, 19 nt, Homo sapiens
  misc_RNA (1)...(19): siRNA sense strand
gacuggaaauuaccuucuc

SEQ ID NO: 923927 - RNA, 19 nt, Homo sapiens
  misc_RNA (1)...(19): siRNA sense strand
uaguguuccugcccaguga

SEQ ID NO: 923928 - RNA, 19 nt, Homo sapiens
  misc_RNA (1)...(19): siRNA sense strand
cauggaugcccgaaagguu

SEQ ID NO: 923929 - RNA, 19 nt, Homo sapiens
  misc_RNA (1)...(19): siRNA sense strand
uccaggagaugugcuagug

SEQ ID NO: 923930 - RNA, 19 nt, Homo sapiens
  misc_RNA (1)...(19): siRNA sense strand
gccucuccauuguuucuga

SEQ ID NO: 923931 - RNA, 19 nt, Homo sapiens
  misc_RNA (1)...(19): siRNA sense strand
ugucagaucugggugucau

SEQ ID NO: 923932 - RNA, 19 nt, Homo sapiens
  misc_RNA (1)...(19): siRNA sense strand
aacugccucuccauuguuu

SEQ ID NO: 923933 - RNA, 19 nt, Homo sapiens
  misc_RNA (1)...(19): siRNA sense strand
caccauauccaaagacaac

SEQ ID NO: 923934 - RNA, 19 nt, Homo sapiens
  misc_RNA (1)...(19): siRNA sense strand
ugaauugggcagcauugug

SEQ ID NO: 923935 - RNA, 19 nt, Homo sapiens
  misc_RNA (1)...(19): siRNA sense strand
ccguucaggcuguguauga

SEQ ID NO: 923936 - RNA, 19 nt, Homo sapiens
  misc_RNA (1)...(19): siRNA sense strand
gaccuucugaaccagcuaa

SEQ ID NO: 923937 - RNA, 19 nt, Homo sapiens
  misc_RNA (1)...(19): siRNA sense strand
uagaacucaugcaacgaau

SEQ ID NO: 923938 - RNA, 19 nt, Homo sapiens
  misc_RNA (1)...(19): siRNA sense strand
caaguguugaggccaauca

SEQ ID NO: 923939 - RNA, 19 nt, Homo sapiens
  misc_RNA (1)...(19): siRNA sense strand
ggagaaagcuaaagugauu

SEQ ID NO: 923940 - RNA, 19 nt, Homo sapiens
  misc_RNA (1)...(19): siRNA sense strand
ggagggagcuguagaagau

SEQ ID NO: 923941 - RNA, 19 nt, Homo sapiens
  misc_RNA (1)...(19): siRNA sense strand
caagacugaucaauacuua

SEQ ID NO: 923942 - RNA, 19 nt, Homo sapiens
  misc_RNA (1)...(19): siRNA sense strand
ccaaagaguccauuaauuu

SEQ ID NO: 923943 - RNA, 19 nt, Homo sapiens
  misc_RNA (1)...(19): siRNA sense strand
gaaagagcuuguuggauga

SEQ ID NO: 923944 - RNA, 19 nt, Homo sapiens
  misc_RNA (1)...(19): siRNA sense strand
gaagaccacucaacgaaga

SEQ ID NO: 923945 - RNA, 19 nt, Homo sapiens
  misc_RNA (1)...(19): siRNA sense strand
ggaaguagaugccuuggau

SEQ ID NO: 923946 - RNA, 19 nt, Homo sapiens
  misc_RNA (1)...(19): siRNA sense strand
aagaucagcugccauguua

SEQ ID NO: 923947 - RNA, 19 nt, Homo sapiens
  misc_RNA (1)...(19): siRNA sense strand
guagagagcuggcugaaag

SEQ ID NO: 923948 - RNA, 19 nt, Homo sapiens
  misc_RNA (1)...(19): siRNA sense strand
gagcucagauugauaggaa

SEQ ID NO: 923949 - RNA, 19 nt, Homo sapiens
  misc_RNA (1)...(19): siRNA sense strand
gccaaagaguccauuaauu

SEQ ID NO: 923950 - RNA, 19 nt, Homo sapiens
  misc_RNA (1)...(19): siRNA sense strand
gaaccauaccgcauguuua

SEQ ID NO: 923951 - RNA, 19 nt, Homo sapiens
  misc_RNA (1)...(19): siRNA sense strand
ugucagagcucucgauguu

SEQ ID NO: 923952 - RNA, 19 nt, Homo sapiens
  misc_RNA (1)...(19): siRNA sense strand
ccagaggcuucuauaagua

SEQ ID NO: 923953 - RNA, 19 nt, Homo sapiens
  misc_RNA (1)...(19): siRNA sense strand
uggaugagauuguccuuaa

SEQ ID NO: 923954 - RNA, 19 nt, Homo sapiens
  misc_RNA (1)...(19): siRNA sense strand
gcagacagacuucaagaga

SEQ ID NO: 923955 - RNA, 19 nt, Homo sapiens
  misc_RNA (1)...(19): siRNA sense strand
uaaagggaguucagcaaga

SEQ ID NO: 923956 - RNA, 19 nt, Homo sapiens
  misc_RNA (1)...(19): siRNA sense strand
gaagacagucggcuaugaa

SEQ ID NO: 923957 - RNA, 19 nt, Homo sapiens
  misc_RNA (1)...(19): siRNA sense strand
gaagaucagcugccauguu

SEQ ID NO: 923958 - RNA, 19 nt, Homo sapiens
  misc_RNA (1)...(19): siRNA sense strand
cauccaagacugaucaaua

SEQ ID NO: 923959 - RNA, 19 nt, Homo sapiens
  misc_RNA (1)...(19): siRNA sense strand
ccaugaaguucgagagaaa

SEQ ID NO: 923960 - RNA, 19 nt, Homo sapiens
  misc_RNA (1)...(19): siRNA sense strand
ccacagggguuaucuauga

SEQ ID NO: 923961 - RNA, 19 nt, Homo sapiens
  misc_RNA (1)...(19): siRNA sense strand
gcuacgguguucaguauga

SEQ ID NO: 923962 - RNA, 19 nt, Homo sapiens
  misc_RNA (1)...(19): siRNA sense strand
ggauuaagccagaagauca

SEQ ID NO: 923963 - RNA, 19 nt, Homo sapiens
  misc_RNA (1)...(19): siRNA sense strand
agacagacuucaagagaga

SEQ ID NO: 923964 - RNA, 19 nt, Homo sapiens
  misc_RNA (1)...(19): siRNA sense strand
gaacagaagguuacauagg

SEQ ID NO: 923965 - RNA, 19 nt, Homo sapiens
  misc_RNA (1)...(19): siRNA sense strand
caucggaaagggacauuua

SEQ ID NO: 923966 - RNA, 19 nt, Homo sapiens
  misc_RNA (1)...(19): siRNA sense strand
gacagucggcuaugaauga

SEQ ID NO: 923967 - RNA, 19 nt, Homo sapiens
  misc_RNA (1)...(19): siRNA sense strand
agaagccacuuaugaauca

SEQ ID NO: 923968 - RNA, 19 nt, Homo sapiens
  misc_RNA (1)...(19): siRNA sense strand
aaauagaagccacuuauga

SEQ ID NO: 923969 - RNA, 19 nt, Homo sapiens
  misc_RNA (1)...(19): siRNA sense strand
guuggaaccugaaggaaug

SEQ ID NO: 923970 - RNA, 19 nt, Homo sapiens
  misc_RNA (1)...(19): siRNA sense strand
ggaucagccuucuauagga

SEQ ID NO: 923971 - RNA, 19 nt, Homo sapiens
  misc_RNA (1)...(19): siRNA sense strand
gaacaugcagaaagaaauc

SEQ ID NO: 923972 - RNA, 19 nt, Homo sapiens
  misc_RNA (1)...(19): siRNA sense strand
caaagaguccauuaauuuc

SEQ ID NO: 923973 - RNA, 19 nt, Homo sapiens
  misc_RNA (1)...(19): siRNA sense strand
ccagagcccuugaagaagu

SEQ ID NO: 923974 - RNA, 19 nt, Homo sapiens
  misc_RNA (1)...(19): siRNA sense strand
gaucagccuucuauaggau

SEQ ID NO: 923975 - RNA, 19 nt, Homo sapiens
  misc_RNA (1)...(19): siRNA sense strand
cgaagacagucggcuauga

SEQ ID NO: 923976 - RNA, 19 nt, Homo sapiens
  misc_RNA (1)...(19): siRNA sense strand
gaaaauagaagccacuuau

SEQ ID NO: 923977 - RNA, 19 nt, Homo sapiens
  misc_RNA (1)...(19): siRNA sense strand
caacaacgauaugaaagag

SEQ ID NO: 923978 - RNA, 19 nt, Homo sapiens
  misc_RNA (1)...(19): siRNA sense strand
auaggaaacucuacaaaca

SEQ ID NO: 923979 - RNA, 19 nt, Homo sapiens
  misc_RNA (1)...(19): siRNA sense strand
gaaggcauuucuguguuga

SEQ ID NO: 923980 - RNA, 19 nt, Homo sapiens
  misc_RNA (1)...(19): siRNA sense strand
uuacauaggagucuugauu

SEQ ID NO: 923981 - RNA, 19 nt, Homo sapiens
  misc_RNA (1)...(19): siRNA sense strand
ggaaucaacgccagucuuc

SEQ ID NO: 923982 - RNA, 19 nt, Homo sapiens
  misc_RNA (1)...(19): siRNA sense strand
gauacugucccuccauuga

SEQ ID NO: 923983 - RNA, 19 nt, Homo sapiens
  misc_RNA (1)...(19): siRNA sense strand
ucgauguucugaaguauga

SEQ ID NO: 923984 - RNA, 19 nt, Homo sapiens
  misc_RNA (1)...(19): siRNA sense strand
cagcugaguuacaagagaa

SEQ ID NO: 923985 - RNA, 19 nt, Homo sapiens
  misc_RNA (1)...(19): siRNA sense strand
gcauccagcaggacguuua

SEQ ID NO: 923986 - RNA, 19 nt, Homo sapiens
  misc_RNA (1)...(19): siRNA sense strand
cgagagaaacuacauuuua

SEQ ID NO: 923987 - RNA, 19 nt, Homo sapiens
  misc_RNA (1)...(19): siRNA sense strand
aacagaagguuacauagga

SEQ ID NO: 923988 - RNA, 19 nt, Homo sapiens
  misc_RNA (1)...(19): siRNA sense strand
gcuaccagcugaguuacaa

SEQ ID NO: 923989 - RNA, 19 nt, Homo sapiens
  misc_RNA (1)...(19): siRNA sense strand
aaugagacaguauggauua

SEQ ID NO: 923990 - RNA, 19 nt, Homo sapiens
  misc_RNA (1)...(19): siRNA sense strand
aaacagaacaugcagaaag

SEQ ID NO: 923991 - RNA, 19 nt, Homo sapiens
  misc_RNA (1)...(19): siRNA sense strand
agaugaagcucuccaacug

SEQ ID NO: 923992 - RNA, 19 nt, Homo sapiens
  misc_RNA (1)...(19): siRNA sense strand
gaugagauuguccuuaaga

SEQ ID NO: 923993 - RNA, 19 nt, Homo sapiens
  misc_RNA (1)...(19): siRNA sense strand
cagcugccauguuacuuga

SEQ ID NO: 923994 - RNA, 19 nt, Homo sapiens
  misc_RNA (1)...(19): siRNA sense strand
gagagaaacuacauuuuag

SEQ ID NO: 923995 - RNA, 19 nt, Homo sapiens
  misc_RNA (1)...(19): siRNA sense strand
gauaugaaagagcuuguug

SEQ ID NO: 923996 - RNA, 19 nt, Homo sapiens
  misc_RNA (1)...(19): siRNA sense strand
ccgaacagaagguuacaua

SEQ ID NO: 923997 - RNA, 19 nt, Homo sapiens
  misc_RNA (1)...(19): siRNA sense strand
caucagaggcuuggagaaa

SEQ ID NO: 923998 - RNA, 19 nt, Homo sapiens
  misc_RNA (1)...(19): siRNA sense strand
gacgcuaccagcugaguua

SEQ ID NO: 923999 - RNA, 19 nt, Homo sapiens
  misc_RNA (1)...(19): siRNA sense strand
aacagaacaugcagaaaga

SEQ ID NO: 924000 - RNA, 19 nt, Homo sapiens
  misc_RNA (1)...(19): siRNA sense strand
acauaggagucuugauuga

SEQ ID NO: 924001 - RNA, 19 nt, Homo sapiens
  misc_RNA (1)...(19): siRNA sense strand
ggauggaagcacaguauau

SEQ ID NO: 924002 - RNA, 19 nt, Homo sapiens
  misc_RNA (1)...(19): siRNA sense strand
gacaauccauccauaccau

SEQ ID NO: 924003 - RNA, 19 nt, Homo sapiens
  misc_RNA (1)...(19): siRNA sense strand
uaucagggaugugucuuug

SEQ ID NO: 924004 - RNA, 19 nt, Homo sapiens
  misc_RNA (1)...(19): siRNA sense strand
gaccuagauuauuugacua

SEQ ID NO: 924005 - RNA, 19 nt, Homo sapiens
  misc_RNA (1)...(19): siRNA sense strand
gaaccugaaggaauggauu

SEQ ID NO: 924006 - RNA, 19 nt, Homo sapiens
  misc_RNA (1)...(19): siRNA sense strand
ugagaggcaugauuguaau

SEQ ID NO: 924007 - RNA, 19 nt, Homo sapiens
  misc_RNA (1)...(19): siRNA sense strand
gugaagaccacucaacgaa

SEQ ID NO: 924008 - RNA, 19 nt, Homo sapiens
  misc_RNA (1)...(19): siRNA sense strand
caucaucaaucugcugaga

SEQ ID NO: 924009 - RNA, 19 nt, Homo sapiens
  misc_RNA (1)...(19): siRNA sense strand
agucugguguacauuauaa

SEQ ID NO: 924010 - RNA, 19 nt, Homo sapiens
  misc_RNA (1)...(19): siRNA sense strand
cagagcccuugaagaagua

SEQ ID NO: 924011 - RNA, 19 nt, Homo sapiens
  misc_RNA (1)...(19): siRNA sense strand
ugaggaaguugacauggau

SEQ ID NO: 924012 - RNA, 19 nt, Homo sapiens
  misc_RNA (1)...(19): siRNA sense strand
cccagaggcuucuauaagu

SEQ ID NO: 924013 - RNA, 19 nt, Homo sapiens
  misc_RNA (1)...(19): siRNA sense strand
cgaguagaguuccguuugu

SEQ ID NO: 924014 - RNA, 19 nt, Homo sapiens
  misc_RNA (1)...(19): siRNA sense strand
uccauaccauucagcuuua

SEQ ID NO: 924015 - RNA, 19 nt, Homo sapiens
  misc_RNA (1)...(19): siRNA sense strand
gauggaagcacaguauaug

SEQ ID NO: 924016 - RNA, 19 nt, Homo sapiens
  misc_RNA (1)...(19): siRNA sense strand
aauagaagccacuuaugaa

SEQ ID NO: 924017 - RNA, 19 nt, Homo sapiens
  misc_RNA (1)...(19): siRNA sense strand
uugaauacaccacugcuua

SEQ ID NO: 924018 - RNA, 19 nt, Homo sapiens
  misc_RNA (1)...(19): siRNA sense strand
guucaacgacucuucuuug

SEQ ID NO: 924019 - RNA, 19 nt, Homo sapiens
  misc_RNA (1)...(19): siRNA sense strand
agaccuagauuauuugacu

SEQ ID NO: 924020 - RNA, 19 nt, Homo sapiens
  misc_RNA (1)...(19): siRNA sense strand
auacaccacugcuuacugu

SEQ ID NO: 924021 - RNA, 19 nt, Homo sapiens
  misc_RNA (1)...(19): siRNA sense strand
aggaaacucuacaaacaga

SEQ ID NO: 924022 - RNA, 19 nt, Homo sapiens
  misc_RNA (1)...(19): siRNA sense strand
gauaggaaacucuacaaac

SEQ ID NO: 924023 - RNA, 19 nt, Homo sapiens
  misc_RNA (1)...(19): siRNA sense strand
ucagagcucucgauguucu

SEQ ID NO: 924024 - RNA, 19 nt, Homo sapiens
  misc_RNA (1)...(19): siRNA sense strand
ccaacaacgauaugaaaga

SEQ ID NO: 924025 - RNA, 19 nt, Homo sapiens
  misc_RNA (1)...(19): siRNA sense strand
auaggagucuugauugaug

SEQ ID NO: 924026 - RNA, 19 nt, Homo sapiens
  misc_RNA (1)...(19): siRNA sense strand
gagagugugauucugacua

SEQ ID NO: 924027 - RNA, 19 nt, Homo sapiens
  misc_RNA (1)...(19): siRNA sense strand
aaguugacauggauucauu

SEQ ID NO: 924028 - RNA, 19 nt, Homo sapiens
  misc_RNA (1)...(19): siRNA sense strand
gcaugauuguaauuggauu

SEQ ID NO: 924029 - RNA, 19 nt, Homo sapiens
  misc_RNA (1)...(19): siRNA sense strand
acaaacagaacaugcagaa

SEQ ID NO: 924030 - RNA, 19 nt, Homo sapiens
  misc_RNA (1)...(19): siRNA sense strand
ucacugcgcccugauaaug

SEQ ID NO: 924031 - RNA, 19 nt, Homo sapiens
  misc_RNA (1)...(19): siRNA sense strand
ccagcugaguuacaagaga

SEQ ID NO: 924032 - RNA, 19 nt, Homo sapiens
  misc_RNA (1)...(19): siRNA sense strand
ccaaugagacaguauggau

SEQ ID NO: 924033 - RNA, 19 nt, Homo sapiens
  misc_RNA (1)...(19): siRNA sense strand
cacaguauaugcagagagu

SEQ ID NO: 924034 - RNA, 19 nt, Homo sapiens
  misc_RNA (1)...(19): siRNA sense strand
cagaacaugcagaaagaaa

SEQ ID NO: 924035 - RNA, 19 nt, Homo sapiens
  misc_RNA (1)...(19): siRNA sense strand
aaagggaguucagcaagau

SEQ ID NO: 924036 - RNA, 19 nt, Homo sapiens
  misc_RNA (1)...(19): siRNA sense strand
ugaaguaugaggaaguuga

SEQ ID NO: 924037 - RNA, 19 nt, Homo sapiens
  misc_RNA (1)...(19): siRNA sense strand
aagccucccuuugugguua

SEQ ID NO: 924038 - RNA, 19 nt, Homo sapiens
  misc_RNA (1)...(19): siRNA sense strand
ucagggaugugucuuuguc

SEQ ID NO: 924039 - RNA, 19 nt, Homo sapiens
  misc_RNA (1)...(19): siRNA sense strand
ggagaaagcuaaagugauu

SEQ ID NO: 924040 - RNA, 19 nt, Homo sapiens
  misc_RNA (1)...(19): siRNA sense strand
ggagggagcuguagaagau

SEQ ID NO: 924041 - RNA, 19 nt, Homo sapiens
  misc_RNA (1)...(19): siRNA sense strand
caagacugaucaauacuua

SEQ ID NO: 924042 - RNA, 19 nt, Homo sapiens
  misc_RNA (1)...(19): siRNA sense strand
ccaaagaguccauuaauuu

SEQ ID NO: 924043 - RNA, 19 nt, Homo sapiens
  misc_RNA (1)...(19): siRNA sense strand
gaaagagcuuguuggauga

SEQ ID NO: 924044 - RNA, 19 nt, Homo sapiens
  misc_RNA (1)...(19): siRNA sense strand
gaagaccacucaacgaaga

SEQ ID NO: 924045 - RNA, 19 nt, Homo sapiens
  misc_RNA (1)...(19): siRNA sense strand
ggaaguagaugccuuggau

SEQ ID NO: 924046 - RNA, 19 nt, Homo sapiens
  misc_RNA (1)...(19): siRNA sense strand
aagaucagcugccauguua

SEQ ID NO: 924047 - RNA, 19 nt, Homo sapiens
  misc_RNA (1)...(19): siRNA sense strand
guagagagcuggcugaaag

SEQ ID NO: 924048 - RNA, 19 nt, Homo sapiens
  misc_RNA (1)...(19): siRNA sense strand
gagcucagauugauaggaa

SEQ ID NO: 924049 - RNA, 19 nt, Homo sapiens
  misc_RNA (1)...(19): siRNA sense strand
ggucagaugucauguaauc

SEQ ID NO: 924050 - RNA, 19 nt, Homo sapiens
  misc_RNA (1)...(19): siRNA sense strand
gccaaagaguccauuaauu

SEQ ID NO: 924051 - RNA, 19 nt, Homo sapiens
  misc_RNA (1)...(19): siRNA sense strand
gaaccauaccgcauguuua

SEQ ID NO: 924052 - RNA, 19 nt, Homo sapiens
  misc_RNA (1)...(19): siRNA sense strand
ugucagagcucucgauguu

SEQ ID NO: 924053 - RNA, 19 nt, Homo sapiens
  misc_RNA (1)...(19): siRNA sense strand
ccagaggcuucuauaagua

SEQ ID NO: 924054 - RNA, 19 nt, Homo sapiens
  misc_RNA (1)...(19): siRNA sense strand
uggaugagauuguccuuaa

SEQ ID NO: 924055 - RNA, 19 nt, Homo sapiens
  misc_RNA (1)...(19): siRNA sense strand
ggacucugcuccucacuca

SEQ ID NO: 924056 - RNA, 19 nt, Homo sapiens
  misc_RNA (1)...(19): siRNA sense strand
gcagacagacuucaagaga

SEQ ID NO: 924057 - RNA, 19 nt, Homo sapiens
  misc_RNA (1)...(19): siRNA sense strand
uaaagggaguucagcaaga

SEQ ID NO: 924058 - RNA, 19 nt, Homo sapiens
  misc_RNA (1)...(19): siRNA sense strand
gaagacagucggcuaugaa

SEQ ID NO: 924059 - RNA, 19 nt, Homo sapiens
  misc_RNA (1)...(19): siRNA sense strand
gaagaucagcugccauguu

SEQ ID NO: 924060 - RNA, 19 nt, Homo sapiens
  misc_RNA (1)...(19): siRNA sense strand
cauccaagacugaucaaua

SEQ ID NO: 924061 - RNA, 19 nt, Homo sapiens
  misc_RNA (1)...(19): siRNA sense strand
ccaugaaguucgagagaaa

SEQ ID NO: 924062 - RNA, 19 nt, Homo sapiens
  misc_RNA (1)...(19): siRNA sense strand
ccacagggguuaucuauga

SEQ ID NO: 924063 - RNA, 19 nt, Homo sapiens
  misc_RNA (1)...(19): siRNA sense strand
gcuacgguguucaguauga

SEQ ID NO: 924064 - RNA, 19 nt, Homo sapiens
  misc_RNA (1)...(19): siRNA sense strand
ggauuaagccagaagauca

SEQ ID NO: 924065 - RNA, 19 nt, Homo sapiens
  misc_RNA (1)...(19): siRNA sense strand
agacagacuucaagagaga

SEQ ID NO: 924066 - RNA, 19 nt, Homo sapiens
  misc_RNA (1)...(19): siRNA sense strand
gaacagaagguuacauagg

SEQ ID NO: 924067 - RNA, 19 nt, Homo sapiens
  misc_RNA (1)...(19): siRNA sense strand
caucggaaagggacauuua

SEQ ID NO: 924068 - RNA, 19 nt, Homo sapiens
  misc_RNA (1)...(19): siRNA sense strand
gacagucggcuaugaauga

SEQ ID NO: 924069 - RNA, 19 nt, Homo sapiens
  misc_RNA (1)...(19): siRNA sense strand
agaagccacuuaugaauca

SEQ ID NO: 924070 - RNA, 19 nt, Homo sapiens
  misc_RNA (1)...(19): siRNA sense strand
aaauagaagccacuuauga

SEQ ID NO: 924071 - RNA, 19 nt, Homo sapiens
  misc_RNA (1)...(19): siRNA sense strand
guuggaaccugaaggaaug

SEQ ID NO: 924072 - RNA, 19 nt, Homo sapiens
  misc_RNA (1)...(19): siRNA sense strand
ggaucagccuucuauagga

SEQ ID NO: 924073 - RNA, 19 nt, Homo sapiens
  misc_RNA (1)...(19): siRNA sense strand
gaacaugcagaaagaaauc

SEQ ID NO: 924074 - RNA, 19 nt, Homo sapiens
  misc_RNA (1)...(19): siRNA sense strand
caaagaguccauuaauuuc

SEQ ID NO: 924075 - RNA, 19 nt, Homo sapiens
  misc_RNA (1)...(19): siRNA sense strand
ccagagcccuugaagaagu

SEQ ID NO: 924076 - RNA, 19 nt, Homo sapiens
  misc_RNA (1)...(19): siRNA sense strand
gaucagccuucuauaggau

SEQ ID NO: 924077 - RNA, 19 nt, Homo sapiens
  misc_RNA (1)...(19): siRNA sense strand
cgaagacagucggcuauga

SEQ ID NO: 924078 - RNA, 19 nt, Homo sapiens
  misc_RNA (1)...(19): siRNA sense strand
gaaaauagaagccacuuau

SEQ ID NO: 924079 - RNA, 19 nt, Homo sapiens
  misc_RNA (1)...(19): siRNA sense strand
caacaacgauaugaaagag

SEQ ID NO: 924080 - RNA, 19 nt, Homo sapiens
  misc_RNA (1)...(19): siRNA sense strand
auaggaaacucuacaaaca

SEQ ID NO: 924081 - RNA, 19 nt, Homo sapiens
  misc_RNA (1)...(19): siRNA sense strand
gaaggcauuucuguguuga

SEQ ID NO: 924082 - RNA, 19 nt, Homo sapiens
  misc_RNA (1)...(19): siRNA sense strand
uuacauaggagucuugauu

SEQ ID NO: 924083 - RNA, 19 nt, Homo sapiens
  misc_RNA (1)...(19): siRNA sense strand
ggaaucaacgccagucuuc

SEQ ID NO: 924084 - RNA, 19 nt, Homo sapiens
  misc_RNA (1)...(19): siRNA sense strand
gauacugucccuccauuga

SEQ ID NO: 924085 - RNA, 19 nt, Homo sapiens
  misc_RNA (1)...(19): siRNA sense strand
ucgauguucugaaguauga

SEQ ID NO: 924086 - RNA, 19 nt, Homo sapiens
  misc_RNA (1)...(19): siRNA sense strand
cagcugaguuacaagagaa

SEQ ID NO: 924087 - RNA, 19 nt, Homo sapiens
  misc_RNA (1)...(19): siRNA sense strand
gcauccagcaggacguuua

SEQ ID NO: 924088 - RNA, 19 nt, Homo sapiens
  misc_RNA (1)...(19): siRNA sense strand
cgagagaaacuacauuuua

SEQ ID NO: 924089 - RNA, 19 nt, Homo sapiens
  misc_RNA (1)...(19): siRNA sense strand
aacagaagguuacauagga

SEQ ID NO: 924090 - RNA, 19 nt, Homo sapiens
  misc_RNA (1)...(19): siRNA sense strand
gcuaccagcugaguuacaa

SEQ ID NO: 924091 - RNA, 19 nt, Homo sapiens
  misc_RNA (1)...(19): siRNA sense strand
aaugagacaguauggauua

SEQ ID NO: 924092 - RNA, 19 nt, Homo sapiens
  misc_RNA (1)...(19): siRNA sense strand
ucggucagaugucauguaa

SEQ ID NO: 924093 - RNA, 19 nt, Homo sapiens
  misc_RNA (1)...(19): siRNA sense strand
aaacagaacaugcagaaag

SEQ ID NO: 924094 - RNA, 19 nt, Homo sapiens
  misc_RNA (1)...(19): siRNA sense strand
agaugaagcucuccaacug

SEQ ID NO: 924095 - RNA, 19 nt, Homo sapiens
  misc_RNA (1)...(19): siRNA sense strand
gaugagauuguccuuaaga

SEQ ID NO: 924096 - RNA, 19 nt, Homo sapiens
  misc_RNA (1)...(19): siRNA sense strand
cagcugccauguuacuuga

SEQ ID NO: 924097 - RNA, 19 nt, Homo sapiens
  misc_RNA (1)...(19): siRNA sense strand
gagagaaacuacauuuuag

SEQ ID NO: 924098 - RNA, 19 nt, Homo sapiens
  misc_RNA (1)...(19): siRNA sense strand
gauaugaaagagcuuguug

SEQ ID NO: 924099 - RNA, 19 nt, Homo sapiens
  misc_RNA (1)...(19): siRNA sense strand
ccgaacagaagguuacaua

SEQ ID NO: 924100 - RNA, 19 nt, Homo sapiens
  misc_RNA (1)...(19): siRNA sense strand
caucagaggcuuggagaaa

SEQ ID NO: 924101 - RNA, 19 nt, Homo sapiens
  misc_RNA (1)...(19): siRNA sense strand
gacgcuaccagcugaguua

SEQ ID NO: 924102 - RNA, 19 nt, Homo sapiens
  misc_RNA (1)...(19): siRNA sense strand
aacagaacaugcagaaaga

SEQ ID NO: 924103 - RNA, 19 nt, Homo sapiens
  misc_RNA (1)...(19): siRNA sense strand
acauaggagucuugauuga

SEQ ID NO: 924104 - RNA, 19 nt, Homo sapiens
  misc_RNA (1)...(19): siRNA sense strand
ggauggaagcacaguauau

SEQ ID NO: 924105 - RNA, 19 nt, Homo sapiens
  misc_RNA (1)...(19): siRNA sense strand
gacaauccauccauaccau

SEQ ID NO: 924106 - RNA, 19 nt, Homo sapiens
  misc_RNA (1)...(19): siRNA sense strand
uaucagggaugugucuuug

SEQ ID NO: 924107 - RNA, 19 nt, Homo sapiens
  misc_RNA (1)...(19): siRNA sense strand
gaccuagauuauuugacua

SEQ ID NO: 924108 - RNA, 19 nt, Homo sapiens
  misc_RNA (1)...(19): siRNA sense strand
gaaccugaaggaauggauu

SEQ ID NO: 924109 - RNA, 19 nt, Homo sapiens
  misc_RNA (1)...(19): siRNA sense strand
ugagaggcaugauuguaau

SEQ ID NO: 924110 - RNA, 19 nt, Homo sapiens
  misc_RNA (1)...(19): siRNA sense strand
gugaagaccacucaacgaa

SEQ ID NO: 924111 - RNA, 19 nt, Homo sapiens
  misc_RNA (1)...(19): siRNA sense strand
caucaucaaucugcugaga

SEQ ID NO: 924112 - RNA, 19 nt, Homo sapiens
  misc_RNA (1)...(19): siRNA sense strand
cagagcccuugaagaagua

SEQ ID NO: 924113 - RNA, 19 nt, Homo sapiens
  misc_RNA (1)...(19): siRNA sense strand
ugaggaaguugacauggau

SEQ ID NO: 924114 - RNA, 19 nt, Homo sapiens
  misc_RNA (1)...(19): siRNA sense strand
cccagaggcuucuauaagu

SEQ ID NO: 924115 - RNA, 19 nt, Homo sapiens
  misc_RNA (1)...(19): siRNA sense strand
cgaguagaguuccguuugu

SEQ ID NO: 924116 - RNA, 19 nt, Homo sapiens
  misc_RNA (1)...(19): siRNA sense strand
uccauaccauucagcuuua

SEQ ID NO: 924117 - RNA, 19 nt, Homo sapiens
  misc_RNA (1)...(19): siRNA sense strand
agucugguguacauuauaa

SEQ ID NO: 924118 - RNA, 19 nt, Homo sapiens
  misc_RNA (1)...(19): siRNA sense strand
uugaauacaccacugcuua

SEQ ID NO: 924119 - RNA, 19 nt, Homo sapiens
  misc_RNA (1)...(19): siRNA sense strand
aauagaagccacuuaugaa

SEQ ID NO: 924120 - RNA, 19 nt, Homo sapiens
  misc_RNA (1)...(19): siRNA sense strand
guucaacgacucuucuuug

SEQ ID NO: 924121 - RNA, 19 nt, Homo sapiens
  misc_RNA (1)...(19): siRNA sense strand
gauggaagcacaguauaug

SEQ ID NO: 924122 - RNA, 19 nt, Homo sapiens
  misc_RNA (1)...(19): siRNA sense strand
agaccuagauuauuugacu

SEQ ID NO: 924123 - RNA, 19 nt, Homo sapiens
  misc_RNA (1)...(19): siRNA sense strand
gauaggaaacucuacaaac

SEQ ID NO: 924124 - RNA, 19 nt, Homo sapiens
  misc_RNA (1)...(19): siRNA sense strand
ucagagcucucgauguucu

SEQ ID NO: 924125 - RNA, 19 nt, Homo sapiens
  misc_RNA (1)...(19): siRNA sense strand
ccaacaacgauaugaaaga

SEQ ID NO: 924126 - RNA, 19 nt, Homo sapiens
  misc_RNA (1)...(19): siRNA sense strand
auaggagucuugauugaug

SEQ ID NO: 924127 - RNA, 19 nt, Homo sapiens
  misc_RNA (1)...(19): siRNA sense strand
auacaccacugcuuacugu

SEQ ID NO: 924128 - RNA, 19 nt, Homo sapiens
  misc_RNA (1)...(19): siRNA sense strand
aggaaacucuacaaacaga

SEQ ID NO: 924129 - RNA, 19 nt, Homo sapiens
  misc_RNA (1)...(19): siRNA sense strand
gagagugugauucugacua

SEQ ID NO: 924130 - RNA, 19 nt, Homo sapiens
  misc_RNA (1)...(19): siRNA sense strand
aaguugacauggauucauu

SEQ ID NO: 924131 - RNA, 19 nt, Homo sapiens
  misc_RNA (1)...(19): siRNA sense strand
gcaugauuguaauuggauu

SEQ ID NO: 924132 - RNA, 19 nt, Homo sapiens
  misc_RNA (1)...(19): siRNA sense strand
acaaacagaacaugcagaa

SEQ ID NO: 924133 - RNA, 19 nt, Homo sapiens
  misc_RNA (1)...(19): siRNA sense strand
ucacugcgcccugauaaug

SEQ ID NO: 924134 - RNA, 19 nt, Homo sapiens
  misc_RNA (1)...(19): siRNA sense strand
ccagcugaguuacaagaga

SEQ ID NO: 924135 - RNA, 19 nt, Homo sapiens
  misc_RNA (1)...(19): siRNA sense strand
ccaaugagacaguauggau

SEQ ID NO: 924136 - RNA, 19 nt, Homo sapiens
  misc_RNA (1)...(19): siRNA sense strand
cacaguauaugcagagagu

SEQ ID NO: 924137 - RNA, 19 nt, Homo sapiens
  misc_RNA (1)...(19): siRNA sense strand
ugaaguaugaggaaguuga

SEQ ID NO: 924138 - RNA, 19 nt, Homo sapiens
  misc_RNA (1)...(19): siRNA sense strand
aaagggaguucagcaagau

SEQ ID NO: 924139 - RNA, 19 nt, Homo sapiens
  misc_RNA (1)...(19): siRNA sense strand
ccaaaggaaugcauuauuu

SEQ ID NO: 924140 - RNA, 19 nt, Homo sapiens
  misc_RNA (1)...(19): siRNA sense strand
gaaagacguuuaaagaugu

SEQ ID NO: 924141 - RNA, 19 nt, Homo sapiens
  misc_RNA (1)...(19): siRNA sense strand
ggauauggaucacauuaug

SEQ ID NO: 924142 - RNA, 19 nt, Homo sapiens
  misc_RNA (1)...(19): siRNA sense strand
ggagguggcuguaaagaag

SEQ ID NO: 924143 - RNA, 19 nt, Homo sapiens
  misc_RNA (1)...(19): siRNA sense strand
agaaagacguuuaaagaug

SEQ ID NO: 924144 - RNA, 19 nt, Homo sapiens
  misc_RNA (1)...(19): siRNA sense strand
cgagaaagacguuuaaaga

SEQ ID NO: 924145 - RNA, 19 nt, Homo sapiens
  misc_RNA (1)...(19): siRNA sense strand
uaaagaagcuccucaaaau

SEQ ID NO: 924146 - RNA, 19 nt, Homo sapiens
  misc_RNA (1)...(19): siRNA sense strand
gaagugaggagauggauau

SEQ ID NO: 924147 - RNA, 19 nt, Homo sapiens
  misc_RNA (1)...(19): siRNA sense strand
gaagaucugugacuuuggu

SEQ ID NO: 924148 - RNA, 19 nt, Homo sapiens
  misc_RNA (1)...(19): siRNA sense strand
ggaagcugaugccaagaaa

SEQ ID NO: 924149 - RNA, 19 nt, Homo sapiens
  misc_RNA (1)...(19): siRNA sense strand
agagaaagaggcagaaaua

SEQ ID NO: 924150 - RNA, 19 nt, Homo sapiens
  misc_RNA (1)...(19): siRNA sense strand
uaacagaagugaggagaug

SEQ ID NO: 924151 - RNA, 19 nt, Homo sapiens
  misc_RNA (1)...(19): siRNA sense strand
acaaggagguggcuguaaa

SEQ ID NO: 924152 - RNA, 19 nt, Homo sapiens
  misc_RNA (1)...(19): siRNA sense strand
gaaauugaggcaacucuug

SEQ ID NO: 924153 - RNA, 19 nt, Homo sapiens
  misc_RNA (1)...(19): siRNA sense strand
gaaagaggcagaaauacuc

SEQ ID NO: 924154 - RNA, 19 nt, Homo sapiens
  misc_RNA (1)...(19): siRNA sense strand
acagaaacaucauccaguu

SEQ ID NO: 924155 - RNA, 19 nt, Homo sapiens
  misc_RNA (1)...(19): siRNA sense strand
gaguggaggugcgaaauug

SEQ ID NO: 924156 - RNA, 19 nt, Homo sapiens
  misc_RNA (1)...(19): siRNA sense strand
gagaaagacguuuaaagau

SEQ ID NO: 924157 - RNA, 19 nt, Homo sapiens
  misc_RNA (1)...(19): siRNA sense strand
ucacagagaccucaaguca

SEQ ID NO: 924158 - RNA, 19 nt, Homo sapiens
  misc_RNA (1)...(19): siRNA sense strand
ccaagaaacggccaucauu

SEQ ID NO: 924159 - RNA, 19 nt, Homo sapiens
  misc_RNA (1)...(19): siRNA sense strand
caagaaacguuguuauagc

SEQ ID NO: 924160 - RNA, 19 nt, Homo sapiens
  misc_RNA (1)...(19): siRNA sense strand
gucaagaaacguuguuaua

SEQ ID NO: 924161 - RNA, 19 nt, Homo sapiens
  misc_RNA (1)...(19): siRNA sense strand
gugaggagauggauaugga

SEQ ID NO: 924162 - RNA, 19 nt, Homo sapiens
  misc_RNA (1)...(19): siRNA sense strand
caacacacauguccuuggu

SEQ ID NO: 924163 - RNA, 19 nt, Homo sapiens
  misc_RNA (1)...(19): siRNA sense strand
acagagaccucaagucaag

SEQ ID NO: 924164 - RNA, 19 nt, Homo sapiens
  misc_RNA (1)...(19): siRNA sense strand
ugacaaguguaacucauuc

SEQ ID NO: 924165 - RNA, 19 nt, Homo sapiens
  misc_RNA (1)...(19): siRNA sense strand
uauagcugcugauggagua

SEQ ID NO: 924166 - RNA, 19 nt, Homo sapiens
  misc_RNA (1)...(19): siRNA sense strand
gagcgugaucucagcuuua

SEQ ID NO: 924167 - RNA, 19 nt, Homo sapiens
  misc_RNA (1)...(19): siRNA sense strand
uuaaagaugugggagcaaa

SEQ ID NO: 924168 - RNA, 19 nt, Homo sapiens
  misc_RNA (1)...(19): siRNA sense strand
uguuauagcugcugaugga

SEQ ID NO: 924169 - RNA, 19 nt, Homo sapiens
  misc_RNA (1)...(19): siRNA sense strand
aacgagagauuaaccauuc

SEQ ID NO: 924170 - RNA, 19 nt, Homo sapiens
  misc_RNA (1)...(19): siRNA sense strand
aaacugcgguggaggaagu

SEQ ID NO: 924171 - RNA, 19 nt, Homo sapiens
  misc_RNA (1)...(19): siRNA sense strand
gcuuaaagaacgagaaaga

SEQ ID NO: 924172 - RNA, 19 nt, Homo sapiens
  misc_RNA (1)...(19): siRNA sense strand
gagcuuaaagaacgagaaa

SEQ ID NO: 924173 - RNA, 19 nt, Homo sapiens
  misc_RNA (1)...(19): siRNA sense strand
caagaaacggccaucauuc

SEQ ID NO: 924174 - RNA, 19 nt, Homo sapiens
  misc_RNA (1)...(19): siRNA sense strand
gauauggaucacauuauga

SEQ ID NO: 924175 - RNA, 19 nt, Homo sapiens
  misc_RNA (1)...(19): siRNA sense strand
uugcugaacuguuacauca

SEQ ID NO: 924176 - RNA, 19 nt, Homo sapiens
  misc_RNA (1)...(19): siRNA sense strand
uuaaagguuuggaaggauu

SEQ ID NO: 924177 - RNA, 19 nt, Homo sapiens
  misc_RNA (1)...(19): siRNA sense strand
gaccugggccacugaugua

SEQ ID NO: 924178 - RNA, 19 nt, Homo sapiens
  misc_RNA (1)...(19): siRNA sense strand
ggacaaggagguggcugua

SEQ ID NO: 924179 - RNA, 19 nt, Homo sapiens
  misc_RNA (1)...(19): siRNA sense strand
ggaguggaggugcgaaauu

SEQ ID NO: 924180 - RNA, 19 nt, Homo sapiens
  misc_RNA (1)...(19): siRNA sense strand
acacgagccuuccugacaa

SEQ ID NO: 924181 - RNA, 19 nt, Homo sapiens
  misc_RNA (1)...(19): siRNA sense strand
ggauaucacaggacaagga

SEQ ID NO: 924182 - RNA, 19 nt, Homo sapiens
  misc_RNA (1)...(19): siRNA sense strand
gagccuuccugacaagugu

SEQ ID NO: 924183 - RNA, 19 nt, Homo sapiens
  misc_RNA (1)...(19): siRNA sense strand
ccacugauguagccaaagg

SEQ ID NO: 924184 - RNA, 19 nt, Homo sapiens
  misc_RNA (1)...(19): siRNA sense strand
gccaaaggaaugcauuauu

SEQ ID NO: 924185 - RNA, 19 nt, Homo sapiens
  misc_RNA (1)...(19): siRNA sense strand
uaaagguuuggaaggauua

SEQ ID NO: 924186 - RNA, 19 nt, Homo sapiens
  misc_RNA (1)...(19): siRNA sense strand
ggagcaggagcuuaaagaa

SEQ ID NO: 924187 - RNA, 19 nt, Homo sapiens
  misc_RNA (1)...(19): siRNA sense strand
guaaagaagcuccucaaaa

SEQ ID NO: 924188 - RNA, 19 nt, Homo sapiens
  misc_RNA (1)...(19): siRNA sense strand
gaaacggccaucauucaag

SEQ ID NO: 924189 - RNA, 19 nt, Homo sapiens
  misc_RNA (1)...(19): siRNA sense strand
ucaagaaacguuguuauag

SEQ ID NO: 924190 - RNA, 19 nt, Homo sapiens
  misc_RNA (1)...(19): siRNA sense strand
guaacucauuccuacacaa

SEQ ID NO: 924191 - RNA, 19 nt, Homo sapiens
  misc_RNA (1)...(19): siRNA sense strand
ggccaucauucaagcaaau

SEQ ID NO: 924192 - RNA, 19 nt, Homo sapiens
  misc_RNA (1)...(19): siRNA sense strand
ucuugaaccucccaacuau

SEQ ID NO: 924193 - RNA, 19 nt, Homo sapiens
  misc_RNA (1)...(19): siRNA sense strand
gaaacuagagcgugaucuc

SEQ ID NO: 924194 - RNA, 19 nt, Homo sapiens
  misc_RNA (1)...(19): siRNA sense strand
gacacgagccuuccugaca

SEQ ID NO: 924195 - RNA, 19 nt, Homo sapiens
  misc_RNA (1)...(19): siRNA sense strand
gcaggagcuuaaagaacga

SEQ ID NO: 924196 - RNA, 19 nt, Homo sapiens
  misc_RNA (1)...(19): siRNA sense strand
gggaagcugaugccaagaa

SEQ ID NO: 924197 - RNA, 19 nt, Homo sapiens
  misc_RNA (1)...(19): siRNA sense strand
ggccacugauguagccaaa

SEQ ID NO: 924198 - RNA, 19 nt, Homo sapiens
  misc_RNA (1)...(19): siRNA sense strand
gaguguuuaucgagccaaa

SEQ ID NO: 924199 - RNA, 19 nt, Homo sapiens
  misc_RNA (1)...(19): siRNA sense strand
caaguguaacucauuccua

SEQ ID NO: 924200 - RNA, 19 nt, Homo sapiens
  misc_RNA (1)...(19): siRNA sense strand
ugauguagccaaaggaaug

SEQ ID NO: 924201 - RNA, 19 nt, Homo sapiens
  misc_RNA (1)...(19): siRNA sense strand
aggcagaaauacucagugu

SEQ ID NO: 924202 - RNA, 19 nt, Homo sapiens
  misc_RNA (1)...(19): siRNA sense strand
gagcaggagcuuaaagaac

SEQ ID NO: 924203 - RNA, 19 nt, Homo sapiens
  misc_RNA (1)...(19): siRNA sense strand
cagaaguuauccagagucu

SEQ ID NO: 924204 - RNA, 19 nt, Homo sapiens
  misc_RNA (1)...(19): siRNA sense strand
ucucugggaucacucuaug

SEQ ID NO: 924205 - RNA, 19 nt, Homo sapiens
  misc_RNA (1)...(19): siRNA sense strand
uagccaaaggaaugcauua

SEQ ID NO: 924206 - RNA, 19 nt, Homo sapiens
  misc_RNA (1)...(19): siRNA sense strand
ugacagagcaguccaacac

SEQ ID NO: 924207 - RNA, 19 nt, Homo sapiens
  misc_RNA (1)...(19): siRNA sense strand
aagaaacggccaucauuca

SEQ ID NO: 924208 - RNA, 19 nt, Homo sapiens
  misc_RNA (1)...(19): siRNA sense strand
aaacgagagauuaaccauu

SEQ ID NO: 924209 - RNA, 19 nt, Homo sapiens
  misc_RNA (1)...(19): siRNA sense strand
uuggaaggauuacaaguag

SEQ ID NO: 924210 - RNA, 19 nt, Homo sapiens
  misc_RNA (1)...(19): siRNA sense strand
ucugggagaugcuaacaag

SEQ ID NO: 924211 - RNA, 19 nt, Homo sapiens
  misc_RNA (1)...(19): siRNA sense strand
gaccucaagucaagaaacg

SEQ ID NO: 924212 - RNA, 19 nt, Homo sapiens
  misc_RNA (1)...(19): siRNA sense strand
aagaaacguuguuauagcu

SEQ ID NO: 924213 - RNA, 19 nt, Homo sapiens
  misc_RNA (1)...(19): siRNA sense strand
ggauggcuccagaaguuau

SEQ ID NO: 924214 - RNA, 19 nt, Homo sapiens
  misc_RNA (1)...(19): siRNA sense strand
aaauugaggcaacucuuga

SEQ ID NO: 924215 - RNA, 19 nt, Homo sapiens
  misc_RNA (1)...(19): siRNA sense strand
agcgugaucucagcuuuaa

SEQ ID NO: 924216 - RNA, 19 nt, Homo sapiens
  misc_RNA (1)...(19): siRNA sense strand
acuauggcauugucacaga

SEQ ID NO: 924217 - RNA, 19 nt, Homo sapiens
  misc_RNA (1)...(19): siRNA sense strand
agagcgugaucucagcuuu

SEQ ID NO: 924218 - RNA, 19 nt, Homo sapiens
  misc_RNA (1)...(19): siRNA sense strand
uuuggaaggauuacaagua

SEQ ID NO: 924219 - RNA, 19 nt, Homo sapiens
  misc_RNA (1)...(19): siRNA sense strand
cuuuaaagguuuggaagga

SEQ ID NO: 924220 - RNA, 19 nt, Homo sapiens
  misc_RNA (1)...(19): siRNA sense strand
gacaaggagguggcuguaa

SEQ ID NO: 924221 - RNA, 19 nt, Homo sapiens
  misc_RNA (1)...(19): siRNA sense strand
gagucucccugugucagaa

SEQ ID NO: 924222 - RNA, 19 nt, Homo sapiens
  misc_RNA (1)...(19): siRNA sense strand
acucauuccuacacaacaa

SEQ ID NO: 924223 - RNA, 19 nt, Homo sapiens
  misc_RNA (1)...(19): siRNA sense strand
agaaacggccaucauucaa

SEQ ID NO: 924224 - RNA, 19 nt, Homo sapiens
  misc_RNA (1)...(19): siRNA sense strand
ggaaggauuacaaguagcu

SEQ ID NO: 924225 - RNA, 19 nt, Homo sapiens
  misc_RNA (1)...(19): siRNA sense strand
caacuauggcauugucaca

SEQ ID NO: 924226 - RNA, 19 nt, Homo sapiens
  misc_RNA (1)...(19): siRNA sense strand
gagaaagaggcagaaauac

SEQ ID NO: 924227 - RNA, 19 nt, Homo sapiens
  misc_RNA (1)...(19): siRNA sense strand
ccaguuuuauggaguaauu

SEQ ID NO: 924228 - RNA, 19 nt, Homo sapiens
  misc_RNA (1)...(19): siRNA sense strand
agaaagaggcagaaauacu

SEQ ID NO: 924229 - RNA, 19 nt, Homo sapiens
  misc_RNA (1)...(19): siRNA sense strand
gugccucucgguuccauaa

SEQ ID NO: 924230 - RNA, 19 nt, Homo sapiens
  misc_RNA (1)...(19): siRNA sense strand
cauuaacaguaacagaagu

SEQ ID NO: 924231 - RNA, 19 nt, Homo sapiens
  misc_RNA (1)...(19): siRNA sense strand
aaagaagcuccucaaaaua

SEQ ID NO: 924232 - RNA, 19 nt, Homo sapiens
  misc_RNA (1)...(19): siRNA sense strand
guccuugguuggaacuuuc

SEQ ID NO: 924233 - RNA, 19 nt, Homo sapiens
  misc_RNA (1)...(19): siRNA sense strand
uguaaagaagcuccucaaa

SEQ ID NO: 924234 - RNA, 19 nt, Homo sapiens
  misc_RNA (1)...(19): siRNA sense strand
ggagauggauauggaucac

SEQ ID NO: 924235 - RNA, 19 nt, Homo sapiens
  misc_RNA (1)...(19): siRNA sense strand
agauggauauggaucacau

SEQ ID NO: 924236 - RNA, 19 nt, Homo sapiens
  misc_RNA (1)...(19): siRNA sense strand
aaagacguuuaaagaugug

SEQ ID NO: 924237 - RNA, 19 nt, Homo sapiens
  misc_RNA (1)...(19): siRNA sense strand
uugagaggcuaaagaaacu

SEQ ID NO: 924238 - RNA, 19 nt, Homo sapiens
  misc_RNA (1)...(19): siRNA sense strand
gagaggcuaaagaaacuag

SEQ ID NO: 924239 - RNA, 19 nt, Homo sapiens
  misc_RNA (1)...(19): siRNA sense strand
ccaaaggaaugcauuauuu

SEQ ID NO: 924240 - RNA, 19 nt, Homo sapiens
  misc_RNA (1)...(19): siRNA sense strand
gaaagacguuuaaagaugu

SEQ ID NO: 924241 - RNA, 19 nt, Homo sapiens
  misc_RNA (1)...(19): siRNA sense strand
ggauauggaucacauuaug

SEQ ID NO: 924242 - RNA, 19 nt, Homo sapiens
  misc_RNA (1)...(19): siRNA sense strand
ggagguggcuguaaagaag

SEQ ID NO: 924243 - RNA, 19 nt, Homo sapiens
  misc_RNA (1)...(19): siRNA sense strand
agaaagacguuuaaagaug

SEQ ID NO: 924244 - RNA, 19 nt, Homo sapiens
  misc_RNA (1)...(19): siRNA sense strand
cgagaaagacguuuaaaga

SEQ ID NO: 924245 - RNA, 19 nt, Homo sapiens
  misc_RNA (1)...(19): siRNA sense strand
uaaagaagcuccucaaaau

SEQ ID NO: 924246 - RNA, 19 nt, Homo sapiens
  misc_RNA (1)...(19): siRNA sense strand
gaagugaggagauggauau

SEQ ID NO: 924247 - RNA, 19 nt, Homo sapiens
  misc_RNA (1)...(19): siRNA sense strand
gaagaucugugacuuuggu

SEQ ID NO: 924248 - RNA, 19 nt, Homo sapiens
  misc_RNA (1)...(19): siRNA sense strand
ggaagcugaugccaagaaa

SEQ ID NO: 924249 - RNA, 19 nt, Homo sapiens
  misc_RNA (1)...(19): siRNA sense strand
agagaaagaggcagaaaua

SEQ ID NO: 924250 - RNA, 19 nt, Homo sapiens
  misc_RNA (1)...(19): siRNA sense strand
uaacagaagugaggagaug

SEQ ID NO: 924251 - RNA, 19 nt, Homo sapiens
  misc_RNA (1)...(19): siRNA sense strand
acaaggagguggcuguaaa

SEQ ID NO: 924252 - RNA, 19 nt, Homo sapiens
  misc_RNA (1)...(19): siRNA sense strand
gaaauugaggcaacucuug

SEQ ID NO: 924253 - RNA, 19 nt, Homo sapiens
  misc_RNA (1)...(19): siRNA sense strand
gaaagaggcagaaauacuc

SEQ ID NO: 924254 - RNA, 19 nt, Homo sapiens
  misc_RNA (1)...(19): siRNA sense strand
acagaaacaucauccaguu

SEQ ID NO: 924255 - RNA, 19 nt, Homo sapiens
  misc_RNA (1)...(19): siRNA sense strand
gaguggaggugcgaaauug

SEQ ID NO: 924256 - RNA, 19 nt, Homo sapiens
  misc_RNA (1)...(19): siRNA sense strand
gagaaagacguuuaaagau

SEQ ID NO: 924257 - RNA, 19 nt, Homo sapiens
  misc_RNA (1)...(19): siRNA sense strand
ucacagagaccucaaguca

SEQ ID NO: 924258 - RNA, 19 nt, Homo sapiens
  misc_RNA (1)...(19): siRNA sense strand
ccaagaaacggccaucauu

SEQ ID NO: 924259 - RNA, 19 nt, Homo sapiens
  misc_RNA (1)...(19): siRNA sense strand
caagaaacguuguuauagc

SEQ ID NO: 924260 - RNA, 19 nt, Homo sapiens
  misc_RNA (1)...(19): siRNA sense strand
gucaagaaacguuguuaua

SEQ ID NO: 924261 - RNA, 19 nt, Homo sapiens
  misc_RNA (1)...(19): siRNA sense strand
gugaggagauggauaugga

SEQ ID NO: 924262 - RNA, 19 nt, Homo sapiens
  misc_RNA (1)...(19): siRNA sense strand
caacacacauguccuuggu

SEQ ID NO: 924263 - RNA, 19 nt, Homo sapiens
  misc_RNA (1)...(19): siRNA sense strand
acagagaccucaagucaag

SEQ ID NO: 924264 - RNA, 19 nt, Homo sapiens
  misc_RNA (1)...(19): siRNA sense strand
ugacaaguguaacucauuc

SEQ ID NO: 924265 - RNA, 19 nt, Homo sapiens
  misc_RNA (1)...(19): siRNA sense strand
uauagcugcugauggagua

SEQ ID NO: 924266 - RNA, 19 nt, Homo sapiens
  misc_RNA (1)...(19): siRNA sense strand
gagcgugaucucagcuuua

SEQ ID NO: 924267 - RNA, 19 nt, Homo sapiens
  misc_RNA (1)...(19): siRNA sense strand
uuaaagaugugggagcaaa

SEQ ID NO: 924268 - RNA, 19 nt, Homo sapiens
  misc_RNA (1)...(19): siRNA sense strand
uguuauagcugcugaugga

SEQ ID NO: 924269 - RNA, 19 nt, Homo sapiens
  misc_RNA (1)...(19): siRNA sense strand
aacgagagauuaaccauuc

SEQ ID NO: 924270 - RNA, 19 nt, Homo sapiens
  misc_RNA (1)...(19): siRNA sense strand
aaacugcgguggaggaagu

SEQ ID NO: 924271 - RNA, 19 nt, Homo sapiens
  misc_RNA (1)...(19): siRNA sense strand
gcuuaaagaacgagaaaga

SEQ ID NO: 924272 - RNA, 19 nt, Homo sapiens
  misc_RNA (1)...(19): siRNA sense strand
gagcuuaaagaacgagaaa

SEQ ID NO: 924273 - RNA, 19 nt, Homo sapiens
  misc_RNA (1)...(19): siRNA sense strand
caagaaacggccaucauuc

SEQ ID NO: 924274 - RNA, 19 nt, Homo sapiens
  misc_RNA (1)...(19): siRNA sense strand
gauauggaucacauuauga

SEQ ID NO: 924275 - RNA, 19 nt, Homo sapiens
  misc_RNA (1)...(19): siRNA sense strand
uugcugaacuguuacauca

SEQ ID NO: 924276 - RNA, 19 nt, Homo sapiens
  misc_RNA (1)...(19): siRNA sense strand
uuaaagguuuggaaggauu

SEQ ID NO: 924277 - RNA, 19 nt, Homo sapiens
  misc_RNA (1)...(19): siRNA sense strand
gaccugggccacugaugua

SEQ ID NO: 924278 - RNA, 19 nt, Homo sapiens
  misc_RNA (1)...(19): siRNA sense strand
ggacaaggagguggcugua

SEQ ID NO: 924279 - RNA, 19 nt, Homo sapiens
  misc_RNA (1)...(19): siRNA sense strand
ggaguggaggugcgaaauu

SEQ ID NO: 924280 - RNA, 19 nt, Homo sapiens
  misc_RNA (1)...(19): siRNA sense strand
acacgagccuuccugacaa

SEQ ID NO: 924281 - RNA, 19 nt, Homo sapiens
  misc_RNA (1)...(19): siRNA sense strand
ggauaucacaggacaagga

SEQ ID NO: 924282 - RNA, 19 nt, Homo sapiens
  misc_RNA (1)...(19): siRNA sense strand
gagccuuccugacaagugu

SEQ ID NO: 924283 - RNA, 19 nt, Homo sapiens
  misc_RNA (1)...(19): siRNA sense strand
ccacugauguagccaaagg

SEQ ID NO: 924284 - RNA, 19 nt, Homo sapiens
  misc_RNA (1)...(19): siRNA sense strand
gccaaaggaaugcauuauu

SEQ ID NO: 924285 - RNA, 19 nt, Homo sapiens
  misc_RNA (1)...(19): siRNA sense strand
uaaagguuuggaaggauua

SEQ ID NO: 924286 - RNA, 19 nt, Homo sapiens
  misc_RNA (1)...(19): siRNA sense strand
ggagcaggagcuuaaagaa

SEQ ID NO: 924287 - RNA, 19 nt, Homo sapiens
  misc_RNA (1)...(19): siRNA sense strand
guaaagaagcuccucaaaa

SEQ ID NO: 924288 - RNA, 19 nt, Homo sapiens
  misc_RNA (1)...(19): siRNA sense strand
gaaacggccaucauucaag

SEQ ID NO: 924289 - RNA, 19 nt, Homo sapiens
  misc_RNA (1)...(19): siRNA sense strand
ucaagaaacguuguuauag

SEQ ID NO: 924290 - RNA, 19 nt, Homo sapiens
  misc_RNA (1)...(19): siRNA sense strand
guaacucauuccuacacaa

SEQ ID NO: 924291 - RNA, 19 nt, Homo sapiens
  misc_RNA (1)...(19): siRNA sense strand
ggccaucauucaagcaaau

SEQ ID NO: 924292 - RNA, 19 nt, Homo sapiens
  misc_RNA (1)...(19): siRNA sense strand
ucuugaaccucccaacuau

SEQ ID NO: 924293 - RNA, 19 nt, Homo sapiens
  misc_RNA (1)...(19): siRNA sense strand
gaaacuagagcgugaucuc

SEQ ID NO: 924294 - RNA, 19 nt, Homo sapiens
  misc_RNA (1)...(19): siRNA sense strand
gacacgagccuuccugaca

SEQ ID NO: 924295 - RNA, 19 nt, Homo sapiens
  misc_RNA (1)...(19): siRNA sense strand
gcaggagcuuaaagaacga

SEQ ID NO: 924296 - RNA, 19 nt, Homo sapiens
  misc_RNA (1)...(19): siRNA sense strand
gggaagcugaugccaagaa

SEQ ID NO: 924297 - RNA, 19 nt, Homo sapiens
  misc_RNA (1)...(19): siRNA sense strand
ggccacugauguagccaaa

SEQ ID NO: 924298 - RNA, 19 nt, Homo sapiens
  misc_RNA (1)...(19): siRNA sense strand
gaguguuuaucgagccaaa

SEQ ID NO: 924299 - RNA, 19 nt, Homo sapiens
  misc_RNA (1)...(19): siRNA sense strand
caaguguaacucauuccua

SEQ ID NO: 924300 - RNA, 19 nt, Homo sapiens
  misc_RNA (1)...(19): siRNA sense strand
ugauguagccaaaggaaug

SEQ ID NO: 924301 - RNA, 19 nt, Homo sapiens
  misc_RNA (1)...(19): siRNA sense strand
aggcagaaauacucagugu

SEQ ID NO: 924302 - RNA, 19 nt, Homo sapiens
  misc_RNA (1)...(19): siRNA sense strand
gagcaggagcuuaaagaac

SEQ ID NO: 924303 - RNA, 19 nt, Homo sapiens
  misc_RNA (1)...(19): siRNA sense strand
cagaaguuauccagagucu

SEQ ID NO: 924304 - RNA, 19 nt, Homo sapiens
  misc_RNA (1)...(19): siRNA sense strand
ucucugggaucacucuaug

SEQ ID NO: 924305 - RNA, 19 nt, Homo sapiens
  misc_RNA (1)...(19): siRNA sense strand
uagccaaaggaaugcauua

SEQ ID NO: 924306 - RNA, 19 nt, Homo sapiens
  misc_RNA (1)...(19): siRNA sense strand
ugacagagcaguccaacac

SEQ ID NO: 924307 - RNA, 19 nt, Homo sapiens
  misc_RNA (1)...(19): siRNA sense strand
aagaaacggccaucauuca

SEQ ID NO: 924308 - RNA, 19 nt, Homo sapiens
  misc_RNA (1)...(19): siRNA sense strand
aaacgagagauuaaccauu

SEQ ID NO: 924309 - RNA, 19 nt, Homo sapiens
  misc_RNA (1)...(19): siRNA sense strand
uuggaaggauuacaaguag

SEQ ID NO: 924310 - RNA, 19 nt, Homo sapiens
  misc_RNA (1)...(19): siRNA sense strand
ucugggagaugcuaacaag
